United States Patent Application Publication US 2005/0228172 A9 - sequence listing, part 77

SEQ ID NO: 341084 - DNA, 577 bp, Homo sapiens
ggcactatcagtgaactgtgagacagaaataaatcaatatatatataaggatatatgaacataggaggaaacaaaaaatatataataaaaacatactctaaaaataagacataaacatgtaaatgttcggattacttttaaagaaagatatttcattgtgtaaaagtatttcaaaacatggaaacactgaaaaattaatcaactatttttcttttctaaaagctgatcttgctgcttttattttttatttttacttttaacttttaagttcagggtacaggtgaaggtttgtttcatargtaaacttgtgtcatggggatgtgttgtacagataattttatcatccagatattaaatttagtacccattatttatttttcctgaccttctccctcctcctatcctccacccttcagtaggccccattgggtgctgctcccctctatgtgtccacgagttctcatcatttagctgtcatttataagtgagaacatgacatgctgtatttggttttatgtttctgcattagtttgcttaggttaatggcctccagctctatccatgcccttgcaaagga

SEQ ID NO: 341085 - DNA, 581 bp, Homo sapiens
actggtttatattttaatatcattacccgcaatgcgtcagtcatatgattattatggctcagctaagattcccataggcctctttggcattatgattgtctgtagctcatgtgtaggtaattgaattacacttgaatttaatgtttttgttgatctaagaaaacgtatttagttcacatatgttgcaacctaaactgcacatttagatattagctacaattctgcagagtacgtttcaatgcaatacttttagtgcagctcgccccacagaatcagtgaaataaactggaatgttttggaatttaaaaagcaagccaatagattattgaatatatttgtaacatatttacaaatataaaattttgacatcacccgacatagtactgaataycattttcttgaaagcttgccagtttttgtacatttttgtacaaatgtacatgattgtacatttaggcatcataagtagtatcaacaccataaaagcatattaatcttaagtttcatatatgcaaagatatatagcaattataatatgcttgtaattgttctaagccttaaacaaacatcaacttagataa

SEQ ID NO: 341086 - DNA, 581 bp, Homo sapiens
actggtttatattttaatatcattacccgcaatgcgtcagtcatatgattattatggctcagctaagattcccataggcctctttggcattatgattgtctgtagctcatgtgtaggtaattgaattacacttgaatttaatgtttttgttgatctaagaaaacgtatttagttcacatatgttgcaacctaaactgcacatttagatattagctacaattctgcagagtacgtttcaatgcaatacttttagtgcagctcgccccacagaatcagtgaaataaactggaatgttttggaatttaaaaagcaagccaatagattattgaatatatttgtaacatatttacaaatataaaattttgacatcacccgacatagtactgaataccattttcttgaaagcttkccagtttttgtacatttttgtacaaatgtacatgattgtacatttaggcatcataagtagtatcaacaccataaaagcatattaatcttaagtttcatatatgcaaagatatatagcaattataatatgcttgtaattgttctaagccttaaacaaacatcaacttagataa

SEQ ID NO: 341087 - DNA, 554 bp, Homo sapiens
attaaggctggctacataatttgagggtcggtgtataaaatgaaagtgcagggccccttgttttaaaagcaggaaaatgtgtcattacatgtacttccaccatctctctctcaacctgtattggcattttaatttcctatttaatttctaaattaaaaatctacacacattattagcatttcttttaccattatagtggcaatgccaatttcaaatgcaaatattataccatttaactcacacaaagaattactgaaattacacaatttatatttcatagcttgtacatgcgtatgtatttctttcttagcacaacagcgaaagtgccacacaatagtagaaagtctaactgacctgttttgtttttgyttttgcttgttttcacttgatacacacacattttactaaaaacctttatctttagcttactgataagtaaggaagaactgaaataaaaaacagctgtggggttgccctatcttttcctttccttctatttcatcattttcagcataaggggtgggttaatacagggaagtaacagaaataaaaaa

SEQ ID NO: 341088 - DNA, 593 bp, Homo sapiens
gggaatgagctaacctaaacaactttcaaaactagtgtaaaggctaaaaactaaagggaaaggaactgtaaataagcacgcactctagttaatgagattattcccatagggaaacaatccttgtactcatgcatttgcattgcaattgaacaaataagtaaatgtatgggaaatagaataaaccatatttgcactgttaaagtgggaatttatagacaagtaagtggaggagattagaatgatcaagtggtaattgattrtacttgtagccatcagtatgaacttatttttagattaatatagatgatagaaacattcacaggtatgtatacacacattattatacacacatatattttcttgttttatcagttgagatcaatggcttattctaagcttaagaaatatagacaatgagactggagcatcttattgagctaggataaagagaccaatagtaaataaataaaccctacctttacgtggcatgcaaaagacacatctgccaatagaaagatatcctgatggccaaaaggtggaactaatagtgacaggagacagataaattcccaggcagaaagggattaaaaaag

SEQ ID NO: 341089 - DNA, 576 bp, Homo sapiens
ggaactaatagtgacaggagacagataaattcccaggcagaaagggattaaaaaaggcactaggtgccactccctctcgctagcagagctatgggtggtaggagtaaaaaagctgtaaccctccctcccacttgctgaacaggaaagaagaagccactgagtgccactccctcacctagttgagctaagggagtaaagaagtgaagtctctgcctccaggggccactccctcctgctcctcaaactacaggaacaaaaaggctgcaacagaaccatttgagaaacaaaataaatgttagacagggaggtgggtgtaactacacagtggagaaatctgacaaacactacctcaaccaggtcatcaagttcarcatgtacttaaatcatgttgatagtgtgcacacttgatatggtgtgatgaaaatcttacttctgtgatgaaattttacttctgtcatctttttctccaagcctcctaaccctaatataaacatgaaaaaaagcacaaaagaaattccaatagagagtcatattacaaaatattcaaccagtacgcctcaaaattgtcaaagtcat

SEQ ID NO: 341090 - DNA, 556 bp, Homo sapiens
tgagactcagtgaaaatttgattcaagaaaaatggtagatatttcttcaaatatttttatatttagtatgtttggtattcacaaagtcagatgcatcacttataaatgcccagattctagcaggtaattccttctcaaggaactataagtgcaaaaaaattaaaattcatgtttttaattttatttagaagaagttaactcattatcataatatagacaaatctccatccagaatgattattaataatttcggtagatactgttttcaaggaggtagaacatacttcttcacttctcaagtgtaggctatgcatagtaacttcttttcaaagagcaccaaaaggaaaaggggaaaaaggtgagtttttcagtagagaaacttgacccacattacctcaaccaggtgaccaagattaacmtcaacagtaatagacaattttagaggaatgtatccttaagatagcctaacatagaaaatgatatcacttatttcttaactgatacaaaagtgatgattaagtctaaaaattcttctatattctacagtgttacatac

SEQ ID NO: 341091 - DNA, 556 bp, Homo sapiens
tgagactcagtgaaaatttgattcaagaaaaatggtagatatttcttcaaatatttttatatttagtatgtttggtattcacaaagtcagatgcatcacttataaatgcccagattctagcaggtaattccttctcaaggaactataagtgcaaaaaaattaaaattcatgtttttaattttatttagaagaagttaactcattatcataatatagacaaatctccatccagaatgattattaataatttcggtagatactgttttcaaggaggtagaacatacttcttcacttctcaagtgtaggctatgcatagtaacttcttttcaaagagcaccaaaaggaaaaggggaaaaaggtgagtttttcagtagagaaacttgacccacattacctcaaccaggtgaccaagattaacatcaacagtaatagamaattttagaggaatgtatccttaagatagcctaacatagaaaatgatatcacttatttcttaactgatacaaaagtgatgattaagtctaaaaattcttctatattctacagtgttacatac

SEQ ID NO: 341092 - DNA, 581 bp, Homo sapiens
aggactacacaataaaattatataaaattacttcacaacaggaacrcagacagtgtttccaatagctatgattgttattgcaattctaatgtagggttatttatttaaaagttcacagcattttcaaagatataacaaattatagaagggtgatcattctttacatctctcttccagtgcatacttaaatttttagtggtccatactggaaaacagatagaatgcaatggtgctttctatggttgtatctacattaggaaaaggttactattatagtcaaacaaaagtcatcacttcttttcataaggaatttgaataaacgagccctgaagaatagtttctgagtgaactttattgaagattagttttctagtgattcttccttattaccggatctctctagtgtttgctcttctgacagctttccgtgtctgaaattttgaagaaaaaactaatatattctcatttcaaaatatcataactttctaactctctcctgtggttaaaacatattattcacttaaggtcagcattatgaatataatcaaaaatatgagatctggggaggataatgtgaacca

SEQ ID NO: 341093 - DNA, 581 bp, Homo sapiens
aggactacacaataaaattatataaaattacttcacaacaggaacgcagacagtgtttccaatagctatgattgttattgcaattctaatgtagggttatttatttaaaagttcacagcattttcaaagatataacaaattatagaagggtgatcattctttacatctctcttccagtgcatacttaaatttttagtggtccatactggaaaacagatagaatgcaatggtgctttctatggttgtatctacattaggaaaaggttactattatagtcaaacaaaagtcatcacttcttttcataaggaatttgaataaacgagccctgaagaatrgtttctgagtgaactttattgaagattagttttctagtgattcttccttattaccggatctctctagtgtttgctcttctgacagctttccgtgtctgaaattttgaagaaaaaactaatatattctcatttcaaaatatcataactttctaactctctcctgtggttaaaacatattattcacttaaggtcagcattatgaatataatcaaaaatatgagatctggggaggataatgtgaacca

SEQ ID NO: 341094 - DNA, 581 bp, Homo sapiens
aggactacacaataaaattatataaaattacttcacaacaggaacgcagacagtgtttccaatagctatgattgttattgcaattctaatgtagggttatttatttaaaagttcacagcattttcaaagatataacaaattatagaagggtgatcattctttacatctctcttccagtgcatacttaaatttttagtggtccatactggaaaacagatagaatgcaatggtgctttctatggttgtatctacattaggaaaaggttactattatagtcaaacaaaagtcatcacttcttttcataaggaatttgaataaacgagccctgaagaatagtttctgagtgaactttattgaagattagttttctagtgattcttccttattaccggatctctctagtgtttgctcttctgacagctttccgtgtctgaaattttgragaaaaaactaatatattctcatttcaaaatatcataactttctaactctctcctgtggttaaaacatattattcacttaaggtcagcattatgaatataatcaaaaatatgagatctggggaggataatgtgaacca

SEQ ID NO: 341095 - DNA, 624 bp, Homo sapiens
atgtttatctcctagtaaattcagtttttatgacaagattgcctccagaaataccagtatatttttcttcctttaagaaatcactactgtttccattatttgtggacattctatcatttaacaaaagcaatcactaggtatttttgcctgggaacaaatctaattttaatgaatcgatgtttttgccattaacttcaataaagtggatatttatacttaaacaagaatcattccaacaataaggttacagtgatcctcttataactcaccagtattttatasgcacaaaagtgtaagcataatttaaacacacattttgctagttattattgatagattttcaattaatatggagcataagacaatttcactgtacaattattaattcaataaagtttaaactgtatttcatatgcatttgctctaattcaaattatagcattccaggatagcaggttaaaaatgaggctaaatcacggtaattatgttttcatctttactaatttaaattgacatttagtatgatgaatctaaaaagcaaaacatcaataatagaaacattacaattaaaagaaataagcaacatgcaaattattccactcaaagacaaaaactgaatgtatt

SEQ ID NO: 341096 - DNA, 559 bp, Homo sapiens
aatttacttaaaattggccagattacatctactccatcaatgatagattcaaactaacgtctctccaaattaggataacttagagaagtttgccaaaatcatccccagaaatctcctggggtattgaattcaggagataataaacaaacaacataaataacaaacaacataattactgaccaaaaaaaaaaaaaaaaaaaaatcaagacaagccacagagctagaacagagtcttagaggttgctgaaattaaccatttaattgctgaataaaarggaggccctctcacagagggacaacatggcttggagtcagtattgaaatacttcaatattttaacaattaatgcaatgtttaatgttttgtcaacttgattggattgaaggatgcaaagtatcattcctgggtgtgtctgtgagggtgttgccaaaggagattaacatttgattcagtggactgggagaggcagactcaccatcagtctgggtgggcaccatctaatcagttgccagcacagctagaataaagcaggcagaagttggaacgactagactcactg

SEQ ID NO: 341097 - DNA, 559 bp, Homo sapiens
aatttacttaaaattggccagattacatctactccatcaatgatagattcaaactaacgtctctccaaattaggataacttagagaagtttgccaaaatcatccccagaaatctcctggggtattgaattcaggagataataaacaaacaacataaataacaaacaacataattactgaccaaaaaaaaaaaaaaaaaaaaatcaagacaagccacagagctagaacagagtcttagaggttgctgaaattaaccatttaattgctgaataaaaaggaggccctctcacagagggacaacatggcttggagtcagtattgaaatacttcaatattttaacaattaatgcaatgtttaatgttttgtcaacttgattggattgaaggatgcaaagtatcattcctgggtgtgtctgtgagggtgttgccaaaggagattaacatttgattcagtggactgggagaggcagactcacyatcagtctgggtgggcaccatctaatcagttgccagcacagctagaataaagcaggcagaagttggaacgactagactcactg

SEQ ID NO: 341098 - DNA, 620 bp, Homo sapiens
gtctagaacgagttcatggccctgattcctgatgactgaagggtgagtagaaaatgcagtttctctgagtcaagaagaaaaggaaaactggatacagttgagcattcasaataccaaccacgagttatgtgacaaaaaatttattcttttaatcttgacagcaaatttggagataaagtcaaaatttgaggcagtctatgaatacaaggattcatatagcttccttggctataattttaggccctaggaactggtgacaaaaatgaaaaattctgttattgattcaatgattgtgcacccactgaaaatgtacatattgaaaccgaatccccaatgtgatggtaaggcctttgaagagggcctttggaaggtgattaggttatgagggtggagccctcattatcagaattagtgccctcataaaaagcaccccaaagaacttcttttccctttctgcaatgtgaggacccaaaaacaagacagccatctatgaatcaagaagcaaaccctcacccaaaccccacatctgcgtaccttaattttgaacttcctagcctccagaactgtgagaaataaacttctgttatgtgtgagccacacattccatggtaacttgtaat

SEQ ID NO: 341099 - DNA, 620 bp, Homo sapiens
gtctagaacgagttcatggccctgattcctgatgactgaagggtgagtagaaaatgcagtttctctgagtcaagaagaaaaggaaaactggatacagttgagcattcacaataccaaccacgagttatgtgacaaaaaatttattcttttaatcttgacagcaaatttggagataaagtcaaaatttgaggcagtctatgaatacaaggattcatatagcttccttggctataattttaggccctaggaactggtgacaaaaatgaaaaattctgttattgattcaatgattgtgcacccactgaaaatgtacatattgaaaccgaatccccaatgtgatggtaaggcctttgaagagggcctttggaaggtgattaggttatgagggtggagccctcattatcagaattagtgccctcataaaaagcaccccaaagaacttcttttccctttctgcaatgtgaggacccaaaaacaagacagccatctatgaatcaagaagcaaaccctcacccaaaccccacatctgygtaccttaattttgaacttcctagcctccagaactgtgagaaataaacttctgttatgtgtgagccacacattccatggtaacttgtaat

SEQ ID NO: 341100 - DNA, 551 bp, Homo sapiens
tcttataaattagcaggtagaagaattttaataatacctgcttgagtttgaaagcaaaaaaaaaaaaatctacccatctcaggaatgaatgaagatattccttacccaatgcaactggaagctgaagctgtatagctcaaaggtataccagaataggaaatatgcttcaaagcctagagtctcaatgtattgtttaatgtagtgaaaatgtagttctccatgtaaaaccaagaacctgggtaatcctattatacctctgaaaatcttcatgcctatggtcttagtactaaaaggaaygtgagaccaaaaaaaaaaaaaaaaaaaagaaagaaaatcattgaggcatatagagcgaaacccaaaatcagaaacctgaggaaacaccaggttcaaagatatttaaaaaaagacagcatacatcaaataattgaatatcattacagaaaacaaaacgtgtcagataaaatttataggttgtccactaataaaagacatcatttaagagggaagtacaaatagttactaaccatgaggaaagcaacacaggaata

SEQ ID NO: 341101 - DNA, 608 bp, Homo sapiens
tgaattatgtataaaatatagtatttatagctgtttcaaattggctttttaataatcagggtggctaggtaatgcatcatccaataataagtatataaagtattcaaattgggaccttttgagaacaaagggaagctttattaatgattataccagttcaatcttaacataatcctgcactttccaaagtaaagcaagttgtgtgatcattcaatccataatgtaattgkttttcactcatgaattttgcacagctaaattgaatcatgtaatcacatagaaattggtacctctgaaacatatgagcacacaggtaccgtatatgaatcttccactaaattgaagtcaataaagagataaaaatttatattctttttgcatccaaaatatataatgctatggctgcatatttccagtcttgctaaaattataggattctttaacataatgaaaatacttttcacaaatgcatagtgttattatttatcatttgagaaccatccctatatctcagactcattcattgtttagtgttaatttggaagaaatatcagatgcagcagagggtgaattgaaaacttcttgaaaaaaagttaccatctaattga

SEQ ID NO: 341102 - DNA, 435 bp, Homo sapiens
gaggctaatgtgctatcagtccgaaagtaccaggttttgagaataaagttgcttcatgcccatttagtggctagtgagtagaacttaayagtgcagaagagccccttgtgaatccctcaatcaacgcaaactgtatatgataacttgaaattaaaatcaacttttattttgcaaaacatattactttctgtataactagtcagctggcattaatagttttagttgttctttataatggaatgttcttccttgctattcaatgttagaggcataataagaggttcctcaggtcatttacagttaggatcccatttgaaatactcatacttaattagggaattcaaaaattaaggaaggggatggaagaaagaaaatgctggaaaggacaatcttaatgcaacaggaactgggcacatgcttatcaaatgcattttg

SEQ ID NO: 341103 - DNA, 534 bp, Homo sapiens
ctccctaacaagggaatggggctttcaggcataattagaaaagcatgtgaaaagagtaaagttccccagtcacaacttagtggctgggagaagtatctagtgactggctgtcctaggacccctcagatagtgacagatctggaggacagttgtccaggacaggagagtaagactgagaaggctgcaccagtgtcccggagacaattaacctcctggccctcaatggtcaagcatacatgaggatctgtgagggtgttggcatgggctggtgcttgccccaggcaccctcagtcctgctgctggatcatctgattagtggcttctgactcagrggaccttcatcccctaggtaaatgggtcttccagtgattcccttgacataaggggcatggatgagggggcaacttatttccacttggacaatcttttttaaagtgtccttgtagaccacactggaagcaagccctattaggcattcaacttgcccagcttttcccttttccagagcctccaaagtccgcttccctgagggcc

SEQ ID NO: 341104 - DNA, 534 bp, Homo sapiens
ctccctaacaagggaatggggctttcaggcataattagaaaagcatgtgaaaagagtaaagttccccagtcacaacttagtggctgggagaagtatctagtgactggctgtcctaggacccctcagatagtgacagatctggaggacagttgtccaggacaggagagtaagactgagaaggctgcaccagtgtcccggagacaattaacctcctggccctcaatggtcaagcatacatgaggatctgtgagggtgttggcatgggctggtgcttgccccaggcaccctcagtcctgctgctggatcatctgattagtggcttctgactcaggggaccttcatcccctaggkaaatgggtcttccagtgattcccttgacataaggggcatggatgagggggcaacttatttccacttggacaatcttttttaaagtgtccttgtagaccacactggaagcaagccctattaggcattcaacttgcccagcttttcccttttccagagcctccaaagtccgcttccctgagggcc

SEQ ID NO: 341105 - DNA, 534 bp, Homo sapiens
ctccctaacaagggaatggggctttcaggcataattagaaaagcatgtgaaaagagtaaagttccccagtcacaacttagtggctgggagaagtatctagtgactggctgtcctaggacccctcagatagtgacagatctggaggacagttgtccaggacaggagagtaagactgagaaggctgcaccagtgtcccggagacaattaacctcctggccctcaatggtcaagcatacatgaggatctgtgagggtgttggcatgggctggtgcttgccccaggcaccctcagtcctgctgctggatcatctgattagtggcttctgactcaggggaccttcatcccctaggtaaatgggtcttccagtgattcccttgacataaggggcatggmtgagggggcaacttatttccacttggacaatcttttttaaagtgtccttgtagaccacactggaagcaagccctattaggcattcaacttgcccagcttttcccttttccagagcctccaaagtccgcttccctgagggcc

SEQ ID NO: 341106 - DNA, 534 bp, Homo sapiens
ctccctaacaagggaatggggctttcaggcataattagaaaagcatgtgaaaagagtaaagttccccagtcacaacttagtggctgggagaagtatctagtgactggctgtcctaggacccctcagatagtgacagatctggaggacagttgtccaggacaggagagtaagactgagaaggctgcaccagtgtcccggagacaattaacctcctggccctcaatggtcaagcatacatgaggatctgtgagggtgttggcatgggctggtgcttgccccaggcaccctcagtcctgctgctggatcatctgattagtggcttctgactcaggggaccttcatcccctaggtaaatgggtcttccagtgattcccttgacataaggggcatggatgagggggcaacttatttccacttggacaatcttttttaaagtgtccttgyagaccacactggaagcaagccctattaggcattcaacttgcccagcttttcccttttccagagcctccaaagtccgcttccctgagggcc

SEQ ID NO: 341107 - DNA, 583 bp, Homo sapiens
tgggctgggttcctgagtatttcataacaaccccagctgccccatcaagatgcattcccataaacaacagttctcatgcaaattcatttcagagaggctgtaggtaaccttttgagtcaggattgagatagtcttttttgattctgtaagtattttaggyttggctgagtgcaaacagctcgctcctttgaggagaccaattaggcaatttttctaactctgcttccgcaagagtctccctatcaattactgaatacccattgtggttttttcctcagtcacctaggaggaaccatctatctcctgtcctgaagggagttcctcctaggtctggttggggctttgtatggtaattaagatttaagttccctgtaaggaaatctgctgggttaagagaattatcagtggttagcattaaattacctttttctaacagaatagccccatactttaagatttttgagtttgtaagctacctttttgcttttttgacttagaataattctgaactggtgaggtgtgctcacaatgaggtttcctctaaaagttacttttctactttcttcttttaccaaagcagttg

SEQ ID NO: 341108 - DNA, 485 bp, Homo sapiens
gttttaacatcaaactgaaactcagagagagttgtaaattaatgcagcataaactaatagcaggttatctgtttttccctctttttccaattaaaaaataaaccttttcctttttaccttatatgaaaaaaaaatmtgtcctagtcattgttcttaaacaaatgctcataagctctgttgatattaacatccaatttttagtcttgagagctaactttggtagttttttgctcatttaacatgtattttgcatcttcaaattgccagacctgggtgtaagattctgaggtccaaaggtaaataaattaaaccttcctatgtttgtaaggttaaaagtttgatagaggaagcagaaatctacaaaactaattactgtgcacactaagtgtacatagtgtggttgtgaagagtaagtaagggaacaaatgcagtagcacagtgccttgcacacaggaatcactaggcaccagatctttttagaagca

SEQ ID NO: 341109 - DNA, 578 bp, Homo sapiens
tttgtgggtacatagtgggagtatatatttatggggtacctgagatgttgtgatataggtatacaatgtgaaataagcacatcatggagaatggggtatccatccactcaagcatttatgctttgagttataaacaatccaatttatctttaagttattttaaaatgtacaattaagttatgattgactayagtcaccctattgtgctatcaaatagcagatcttattcattctttctaactaccaatatgtttgtgtacccattagccatccccaccaccactgtaggcctccccacctactgtccttcccaggctctggtaagcataacttctactctccatgttcatgagtacagttcttttgatttttagatctcacaaataagtgagaacagatgtttgtctttctgtgcctggcttatttcacttaacataatgatctccagttccatccatgttgttgcaaataacagagtcttacacattttattgctgaatagtagtctattgtgtatatgtaccacattttctttatccgttcatctgttgatggacactgaggttgcttccaaatct

SEQ ID NO: 341110 - DNA, 578 bp, Homo sapiens
tttgtgggtacatagtgggagtatatatttatggggtacctgagatgttgtgatataggtatacaatgtgaaataagcacatcatggagaatggggtatccatccactcaagcatttatgctttgagttataaacaatccaatttatctttaagttattttaaaatgtacaattaagttatgattgactatagtcaccctattgtgctatcaaatagcagatcttattcattctttctaactaccaatatgtttgtgtacccattagccatccccaccaccactgtaggcctccccacctactgtccttcccaggctctggtaagcataacttctactctccatgttcatgagtacagttcttttgatttttagatctcacaaataagtgagaacagatgtttgtctttctgtgcctggcttatttcacttaacataatgatctccagttccatycatgttgttgcaaataacagagtcttacacattttattgctgaatagtagtctattgtgtatatgtaccacattttctttatccgttcatctgttgatggacactgaggttgcttccaaatct

SEQ ID NO: 341111 - DNA, 558 bp, Homo sapiens
ttcttcattttgttgatattatgtatcacatttatttacatatgttgagccatccttgcatcccagggataaataccattaggtcatgatgaatgatcttcctaatgtattgttgtatttggtttgatagtattttgttraggatttttgcatcaatattcatcagagatattggcctgtagatttttgttttgctatgttttgagacagagtcttgctctgttgtccaggctgaagtgcagcagtgagagctctgctcattgcaaccccagcctcctgggttcaagtgactctcctgcctcagtctcccaagtaggtgggattacaggcacctgccaccatgcctggctaatattttttgtatttttagtagagatgagtttttgctgtgttggccaggctgctctcgaaagcctggcttcaagtgatccccccatctcaaccttctaaagtgctgggattacaggcatgagccactgcacccaacctagcctgtagttttctttcactgatgtgtctttgtctgggtttggtgcccagcgtggcctgtagttttct

SEQ ID NO: 341112 - DNA, 558 bp, Homo sapiens
ttcttcattttgttgatattatgtatcacatttatttacatatgttgagccatccttgcatcccagggataaataccattaggtcatgatgaatgatcttcctaatgtattgttgtatttggtttgatagtattttgttaaggatttttgcatcaatattcatcagagatattggcctgtagatttttgttttgctatgttttgagacagagtcttgctctgttgtccaggctgaagtgcagcagtgagagctctgctcattgcaaccccagcctcctgggttcaagtgactctcctgcctcagtctcccaagtaggtgggattacaggcacctgccaccatgcctggctaatattttttgtatttttagtagagatgagtttttgctgtgttggccaggctgctctcgaaagcctggcttcaagtgatccccccatctcaaccttctaaagtgctgggattacaggcatgagccactgcacccaacctagcctgtagttttctttcactgatgtgtctttgtctggktttggtgcccagcgtggcctgtagttttct

SEQ ID NO: 341113 - DNA, 498 bp, Homo sapiens
ttttctttcagcactttaaatatgtcatgtcactctctcctggcaggtaaggtttctgatgatacatctgctgccagatgtattagagctccatygaatattatttttatcttgtctcatagtacttttaggaccctttctttatccttgacccttggtaatttaattattaaattccttgaggttagtcttctttgggttaaatcttcttggtgttctataaccttgtatttggatatccatatctttctttcggtttgggaagtcctctaatattatccctttgaataaactttctaccccatgtctttctctaccctcttgaaggccaataactcttagatttccccttttaaactattttctagatcctgttggcatgcttacttttttttaattctttcttttgtcttctttgactgcatatttttgaatagcctgtcttcaagctcactaattctttcttctacttcatcaactctgtaattaaaagactct

SEQ ID NO: 341114 - DNA, 555 bp, Homo sapiens
tttcttgtcaatgcatagcttcctgttttacattagagcaaaaattttaacattctattgtaaatactgatttctgttcaggaagcatgtgtctgagatacaggatagaggacaggagggaccaggaggaatcatttaactatttttctattcattcaaaatattaatagaattcttctgtgatcttgtcactatgattgctacagtggttttaggaaggtatgaaaaaaacagytggatatacctaaatgagtttcttagtgtcactcacatagagctgggtaccatcattaaaaagcaaaatctgaatttttaataatttagatctttactatggtcttcattgtataggaaagtatgaatttacacagctgattacatattaaatgtttctaaaaatcattttttaatctttttctcttcccagtatttccaatatagcaactattaaaattgctctctctcttctactagtgtagtccatgcatcgtgacattgctataaatccaggctttccttcctcctgtctcttggcatatatatccaaacctgaca

SEQ ID NO: 341115 - DNA, 514 bp, Homo sapiens
tctgccatttaccagctgcgcgacatcagaaaagttaccttcatcctccaactttggtttcctcacctgtgacatgacagtggctagaggacctcatagaatcactgtgaggacaagagcagccaagggtaagtctttgcacaaggcctccccggtcattattgggtcatcaagacataaccgtgccttatctccacttcmaaaacccaaacagctctcaaaaatgagtcattgtagctcatttggaagaaaagactgatatgaatcaatatgcaactacctacaatctttctctatccctcttactgtgaatatttgctgtggaaatattaacatgtttggtctccactggggtagactccacatgtgtaggactccactggggtgctaccatacacatagtagatatgccttaccaccttccgaaaattgggtaattaaatttcacaacttatctagcccaaaggtttcagagactgtagacctgtatctttatgagggcaaggatgagagt

SEQ ID NO: 341116 - DNA, 514 bp, Homo sapiens
tctgccatttaccagctgcgcgacatcagaaaagttaccttcatcctccaactttggtttcctcacctgtgacatgacagtggctagaggacctcatagaatcactgtgaggacaagagcagccaagggtaagtctttgcacaaggcctccccggtcattattgggtcatcaagacataaccgtgccttatctccacttccaaaacccaaacagctctcaaaaatgagtcattgtagctcatttggaagaaaagactgatatgaatcaatatgcaactacctayaatctttctctatccctcttactgtgaatatttgctgtggaaatattaacatgtttggtctccactggggtagactccacatgtgtaggactccactggggtgctaccatacacatagtagatatgccttaccaccttccgaaaattgggtaattaaatttcacaacttatctagcccaaaggtttcagagactgtagacctgtatctttatgagggcaaggatgagagt

SEQ ID NO: 341117 - DNA, 426 bp, Homo sapiens
gtaatcccagttactcaagaggctgaggcaygagagaggcgcttgaacccaggaggcagaggatgcagtgagctgagattgtggccactgcactccagcctgggcaacagtgaaactgtctcaaaaaaaaaaaaaagagaatgaaattaatggctaatatcagtctgtcttatttgtgatgcaatttcaaaggaaatcaaagatgtcaattcactcccattaaatatttgaataaccagagtctttgcttgtgtgtccccctgccacattcctgggtatctggactcctctcccatttggcagatcctcataagcccacctgtgcctggcactgtgctgggtgccagaggtgccacaagccctgcctgcggggcccttgggtcagtgggggattcaagtgggaagtggaaggggtgcttcaatgga

SEQ ID NO: 341118 - DNA, 492 bp, Homo sapiens
tcgaacctgggaggtagaggtggaggttgcagggagccaagatcatgcatgccactgccctccagcctgggtgacagagtgagatcccatctcaaaaaaaaaaaaaaattaactgggcatagtggcatttgcctgtaatcccagttactcaagaggctgaggcatgagagaggcgmttgaacccaggaggcagaggatgcagtgagctgagattgtggccactgcactccagcctgggcaacagtgaaactgtctcaaaaaaaaaaaaaagagaatgaaattaatggctaatatcagtctgtcttatttgtgatgcaatttcaaaggaaatcaaagatgtcaattcactcccattaaatatttgaataaccagagtctttgcttgtgtgtccccctgccacattcctgggtatctggactcctctcccatttggcagatcctcataagcccacctgtgcctggcactgtgctgggtgccagaggtgccacaa

SEQ ID NO: 341119 - DNA, 635 bp, Homo sapiens
ctcgctagtgagattagaggtactttcatgaactatatcttcatacatattttccaacttgcctattctctttccttctctctcagaaatgttgataaattgtagatttgttctctaagtaatctcatatttctcaatggggatgttgatttttcttaattcttttatctttatttttgtctgactatgttgattcaataaaacagtgtttgagctctgagattcttttctcagtttagtctattctgctggaaatacttctgattttattataaaatcctcacagtaaatctttcagctcaagaatttttttagtttagatatttyttaagattgctattttatctttcaggttttgaatcatttaaccggattgcttggcttccttgggttaagtttcaactttcttctcaatctaaatgagtttccctgctcttttttccatgtctgtcattttagacaattcagactgttaaaaaccatcactggggcactagtgggctctcttgaaggagacactctggctttttgcattgccagagattttgagccaattctttctcatctgagagaactggtatacctctaattggggtataaattgagtatagtctattggctttctttttttgaag

SEQ ID NO: 341120 - DNA, 635 bp, Homo sapiens
ctcgctagtgagattagaggtactttcatgaactatatcttcatacatattttccaacttgcctattctctttccttctctctcagaaatgttgataaattgtagatttgttctctaagtaatctcatatttctcaatggggatgttgatttttcttaattcttttatctttatttttgtctgactatgttgattcaataaaacagtgtttgagctctgagattcttttctcagtttagtctattctgctggaaatacttctgattttattataaaatcctcacagtaaatctttcagctcaagaatttttttagtttagatatttcttaagattgctattttatctttcaggttttgaatcatttaaccggattgcttggcttccttgggttaagtttcaactttcttctcaatytaaatgagtttccctgctcttttttccatgtctgtcattttagacaattcagactgttaaaaaccatcactggggcactagtgggctctcttgaaggagacactctggctttttgcattgccagagattttgagccaattctttctcatctgagagaactggtatacctctaattggggtataaattgagtatagtctattggctttctttttttgaag

SEQ ID NO: 341121 - DNA, 635 bp, Homo sapiens
ctcgctagtgagattagaggtactttcatgaactatatcttcatacatattttccaacttgcctattctctttccttctctctcagaaatgttgataaattgtagatttgttctctaagtaatctcatatttctcaatggggatgttgatttttcttaattcttttatctttatttttgtctgactatgttgattcaataaaacagtgtttgagctctgagattcttttctcagtttagtctattctgctggaaatacttctgattttattataaaatcctcacagtaaatctttcagctcaagaatttttttagtttagatatttcttaagattgctattttatctttcaggttttgaatcatttaaccggattgcttggcttccttgggttaagtttcaactttcttctcaatctaaatgagtttccctgctcttttttccatgtctgtcattttagacaattcagactgttaaaaaccatcactggggcactagtgggctctcttgaaggagacactctggctttttgcattgccagagattttgagccaattctttctcatctgagagaactggtatacctctaattggggyataaattgagtatagtctattggctttctttttttgaag

SEQ ID NO: 341122 - DNA, 469 bp, Homo sapiens
atcctcaggcctaaggaggcaagggaagggagcactkactggaccctagagagacttgtagtttagcagaggctgtctgacttaactgggccctttggtagaggaaagcagccactgccaatctacaggggggtgagctggagaataaataacacactcttttctttcatcctcttaatttctgctgatactttccattggccaaaccctaaaatgaaacagagaccaaggaaacccatatgatacaataatccatgaaggtcagcctcccaggcacggagtcagcagacagaggagggtggagagggctctggagggcacacaccaaaaaccttcagctccaaggaagaggaacacgttaatgccctagggatagacagtaccagaagattgtgttgaaatctgctttcttaagtctttattcatattaaagtcactattaattaattaaaatattataatgacatat

SEQ ID NO: 341123 - DNA, 572 bp, Homo sapiens
agctctggctggcatctggtgggtgccctctgggatgaagcttccagaggaaggaacaggcagcaatctttgctgctctgtagcctccactggtgatacccaggcaaacagggtctggagtggaactccagcaaactccagcagacctgcagcagaggggcctgactgttagaaggaaaactaacaaacaggaaggaatagtatcaacatcaacaaaaaggatgtccactcagaaaccccatctgaaggtcaccaaygtcaaacaccaaagggagataaatccatgaagatggggtgaaaccagcgtgaaaagtctgaaaattccaaaaaccagaatgcctcttctcctccaaaggatcacaactcctcaccagcaagggaacaaaactgtacagagaatgagtttgacaaattgacagaagtaggcttcagaaggtgggtaataaactcctctgagctaaaggggcatgttctaacccaaggcaaggaagctaagaaccttgaaaaaatgttagatgaattgctaactagaataaccactttagagaagaacataaatgacctgatggagc

SEQ ID NO: 341124 - DNA, 572 bp, Homo sapiens
agctctggctggcatctggtgggtgccctctgggatgaagcttccagaggaaggaacaggcagcaatctttgctgctctgtagcctccactggtgatacccaggcaaacagggtctggagtggaactccagcaaactccagcagacctgcagcagaggggcctgactgttagaaggaaaactaacaaacaggaaggaatagtatcaacatcaacaaaaaggatgtccactcagaaaccccatctgaaggtcaccaatrtcaaacaccaaagggagataaatccatgaagatggggtgaaaccagcgtgaaaagtctgaaaattccaaaaaccagaatgcctcttctcctccaaaggatcacaactcctcaccagcaagggaacaaaactgtacagagaatgagtttgacaaattgacagaagtaggcttcagaaggtgggtaataaactcctctgagctaaaggggcatgttctaacccaaggcaaggaagctaagaaccttgaaaaaatgttagatgaattgctaactagaataaccactttagagaagaacataaatgacctgatggagc

SEQ ID NO: 341125 - DNA, 572 bp, Homo sapiens
agctctggctggcatctggtgggtgccctctgggatgaagcttccagaggaaggaacaggcagcaatctttgctgctctgtagcctccactggtgatacccaggcaaacagggtctggagtggaactccagcaaactccagcagacctgcagcagaggggcctgactgttagaaggaaaactaacaaacaggaaggaatagtatcaacatcaacaaaaaggatgtccactcagaaaccccatctgaaggtcaccaatgtcaaacaccaaagggagataaatccatgaagatggggtgaaaccagcgtgaaaagtctgaaaattccaaaaaccagaatgcctcttctcctccaaaggatcacaactcctcaccagcaagggaacaaaactgtacagagaatgagtttgacaaattgacagaagtaggcttcagaaggtgggtaataaactcctctgagctaaaggrgcatgttctaacccaaggcaaggaagctaagaaccttgaaaaaatgttagatgaattgctaactagaataaccactttagagaagaacataaatgacctgatggagc

SEQ ID NO: 341126 - DNA, 473 bp, Homo sapiens
gagaggcctctgaggagctggccacactgggagctttagaagtgtaggatcaatgcctttggatatctgggtggggtagagggagttttaagtatagagaaagggggaggggagagagtgttgaaagggtgctgatggcacatctggacaaggggcagacctgggcctacttaagatggcattgcattgggctcagggtttatagagcataraatatgctttacatggaatgatgccacctccactgcctgagatgcactgtatagactgagatgctgctggaactgtggtgggggtgggcaagaggggtgggtggggaggcagtgggcataatttcccttcagagtcctgtagcacagagttctgccacagaacaccactgttctgctttaaacaccattgcaaatggttagcattcaccttagctgaatttgtagagagggagaggaaagagggaaaagaggagaaaaaga

SEQ ID NO: 341127 - DNA, 473 bp, Homo sapiens
gagaggcctctgaggagctggccacactgggagctttagaagtgtaggatcaatgcctttggatatctgggtggggtagagggagttttaagtatagagaaagggggaggggagagagtgttgaaagggtgctgatggcacatctggacaaggggcagacctgggcctacttaagatggcattgcattgggctcagggtttatagagcataaaatatgctttacatggaatgatgccacctccamtgcctgagatgcactgtatagactgagatgctgctggaactgtggtgggggtgggcaagaggggtgggtggggaggcagtgggcataatttcccttcagagtcctgtagcacagagttctgccacagaacaccactgttctgctttaaacaccattgcaaatggttagcattcaccttagctgaatttgtagagagggagaggaaagagggaaaagaggagaaaaaga

SEQ ID NO: 341128 - DNA, 473 bp, Homo sapiens
gagaggcctctgaggagctggccacactgggagctttagaagtgtaggatcaatgcctttggatatctgggtggggtagagggagttttaagtatagagaaagggggaggggagagagtgttgaaagggtgctgatggcacatctggacaaggggcagacctgggcctacttaagatggcattgcattgggctcagggtttatagagcataaaatatgctttacatggaatgatgccacctccactgcctgagatgcactgtatagactgagatgctgctggaactgtggtgggggtgggcaagaggggtggktggggaggcagtgggcataatttcccttcagagtcctgtagcacagagttctgccacagaacaccactgttctgctttaaacaccattgcaaatggttagcattcaccttagctgaatttgtagagagggagaggaaagagggaaaagaggagaaaaaga

SEQ ID NO: 341129 - DNA, 640 bp, Homo sapiens
atggcgtagcctattgctcctaggctacacacccttacagcctgatactttactgaatataccataagcagttgtaacacaatgtaagtacttgtgtacctgaacatagagaaaatacagtaagaatagagtataagagattttaaaatggtactcctgtatagggcacttaccatgaaatgagcttgcaggactggaagatgctgtggatgagtcagtgagtgtgaaggcataggaccttactgtacactactgtagactttataaacaccatatgcttaggctacaccaaaaatttttaaagcttttcttcaataaattcaccttagcttactgaaatgtatcttaaaaaattttgccggtcatggtgtctcacacctgcaatcccagcactttgggaggccaaggcaggaagatcatttgaggtcgggarttcaagaccatcctggccaacgtggtgaaaccctcatctctactaaaaatacaaaacttagccaggcatggtggtgtgcacctgtaatcccagctactcaggagactgacacaggagaatcacttgaacccaggaggtggaggttgcagtgagccgagatcgtgccactgcactcccgcctgggcaattacacgcatggagatgtca

SEQ ID NO: 341130 - DNA, 640 bp, Homo sapiens
atggcgtagcctattgctcctaggctacacacccttacagcctgatactttactgaatataccataagcagttgtaacacaatgtaagtacttgtgtacctgaacatagagaaaatacagtaagaatagagtataagagattttaaaatggtactcctgtatagggcacttaccatgaaatgagcttgcaggactggaagatgctgtggatgagtcagtgagtgtgaaggcataggaccttactgtacactactgtagactttataaacaccatatgcttaggctacaccaaaaatttttaaagcttttcttcaataaattcaccttagcttactgaaatgtatcttaaaaaattttgccggtcatggtgtctcacacctgcaatcccagcactttgggaggccaaggcaggaagatcatttgaggtcgggagttcaagaccatcctggccaacgtggtgaaacmctcatctctactaaaaatacaaaacttagccaggcatggtggtgtgcacctgtaatcccagctactcaggagactgacacaggagaatcacttgaacccaggaggtggaggttgcagtgagccgagatcgtgccactgcactcccgcctgggcaattacacgcatggagatgtca

SEQ ID NO: 341131 - DNA, 640 bp, Homo sapiens
atggcgtagcctattgctcctaggctacacacccttacagcctgatactttactgaatataccataagcagttgtaacacaatgtaagtacttgtgtacctgaacatagagaaaatacagtaagaatagagtataagagattttaaaatggtactcctgtatagggcacttaccatgaaatgagcttgcaggactggaagatgctgtggatgagtcagtgagtgtgaaggcataggaccttactgtacactactgtagactttataaacaccatatgcttaggctacaccaaaaatttttaaagcttttcttcaataaattcaccttagcttactgaaatgtatcttaaaaaattttgccggtcatggtgtctcacacctgcaatcccagcactttgggaggccaaggcaggaagatcatttgaggtcgggagttcaagaccatcctggccaacgtggtgaaaccctcatstctactaaaaatacaaaacttagccaggcatggtggtgtgcacctgtaatcccagctactcaggagactgacacaggagaatcacttgaacccaggaggtggaggttgcagtgagccgagatcgtgccactgcactcccgcctgggcaattacacgcatggagatgtca

SEQ ID NO: 341132 - DNA, 530 bp, Homo sapiens
tggcttcactgaagggctgccaagaggtggacttttgagagtgacactgcaagataattgagatcctaagtaaggctgtgagagggtgcggagaggaatccagatgagcttgctgctgtcaaatggcaatggagagctacactgagaaactcaaaacagagtgacctcaagtgatctgccctgccttggcctcccaaagtgctgggattacaggcatgagcactgtgcctggtcctyctttccttctttctttcttcctccttccttccccctcccctctcctccattcctttcccctcccctctttcatccccccccctttttccttccttgcttctttcctttcttccttcctcagggtcttgctgtctcacctaggctggagtgcagtggcatgatcactgcaccatgactttcaggctcaagtgatcctcctgccccagcctcccaagtagctgagactacaggtgcatgccaccgtgtctggctaatttaaatttttttttttttttttttttttttgagacaga

SEQ ID NO: 341133 - DNA, 281 bp, Homo sapiens
tcctttcccctcccctctttcatccccccccctttttccttccttgcttctttcctttcttccttcctcagggtcttgctgtctcacctaggctrgagtgcagtggcatgatcactgcaccatgactttcaggctcaagtgatcctcctgccccagcctcccaagtagctgagactacaggtgcatgccaccgtgtctggctaatttaaatttttttttttttttttttttttttgagacagagtcgtagtcttttgcccaggctggagtgcagtggtgtg

SEQ ID NO: 341134 - DNA, 636 bp, Homo sapiens
cagcctgaagtctgtccgacagatcatagccatgttagtcccacagtcacaggggccaatggattaaattattttatctcccttgagaactaaaaataaaatcctaagccccccacccgacttagcagacccccttttggccaacggaacccgtttcttttcttttttttcttttttgattgagatgaagtctcatgcttgtcacccaggctggactgcaatggtgcaatctcagctcactgcaacctccgcctcctgggttcaagcgattctcctgactcagcctctcgagtagctgggattacaggcacctgccaccatgcccagctaatttttgtatttttagtasagatgggatttcaccatgttggtcaggctgttcttgaacccctgacctcaggcaatctgcccgcctccctcccaaagtactgggattagaggcatgagctaccatgcccggccgcccttctctgtttccagagcattttgtattaactccctctcatgatatcttccatgataggctgaataatggcccctccaaagtgtcctcaacttaatccccagaatctgtgactatgttcctttccatgacaaaagggactttgcagatgtgattaagcatcttgagatggg

SEQ ID NO: 341135 - DNA, 584 bp, Homo sapiens
accctggccctgcctgacaatccccaggccccacactggccatgcttgccctggccctcctttggccctgcctggccctgtgctatcttagtacagggcttgcttggcctgtgctatcttagtcctgccctggccctgaacttgccctggccctaccctcaccctacactggccctgccctaccctggccttgcctgacctggccctgcctttggctgccctggctctggttctgccctggccttgccttgccctggaccctccctggccatgtttttactgtgrtccttctctggccttgccttgccctttcccctttctggtcctgccatgtttctggccctgccctgtccatgtcctggacctgactctggccctggacctccctgtccctgccctgccataccctggcccgttccttgctctacactgaccctgccctgccttggccctgtgctaccctagccctgccctggccttctgctggccctgatcctgccatggccctggccctgccatgtccctgccctggccctggttctgccctacttctggccctggccttggtcctcttatgtccctgg

SEQ ID NO: 341136 - DNA, 611 bp, Homo sapiens
ctgaccctgccctgccttggccctgtgctaccctagccctgccctggccttctgctggccctgatcctgccatggccctgsccctgccatgtccctgccctggccctggttctgccctacttctggccctggccttggtcctcttatgtccctggctgtgaccctgcccctggtttttctctggccatgaccctgccctggttctgtcctatccctggccctgtctcagttctgtcctagccctggcctttcacagtactttatgcttagtaagggctccatagtgtctgtgagttgaatgttgtgttcatagtatctgccaaaacagaaagaaaaaaaacaaaatctgaagatgagaagttaaagctttgtatataatatgccttgaattgtaagtgcttgttattagttgtattacatgtaggtcatggttttgtacacataactccaaaccattgatactgttaaaagactatatgaatatatgaaagaatatataaacgtaagaatgtatgagtatctaatgacctctccaaattaatttttatttttagctctattagatttttctcagtgtaacaaatgtttattcctatgtaattaagggcata

SEQ ID NO: 341137 - DNA, 611 bp, Homo sapiens
ctgaccctgccctgccttggccctgtgctaccctagccctgccctggccttctgctggccctgatcctgccatggccctggccctgccatgtccctgccctggccctggttctgccctacttctggccctggccttggtcctcttatgtccctggctgtgaccctgcccctggtttttctctggccatgaccctgcccyggttctgtcctatccctggccctgtctcagttctgtcctagccctggcctttcacagtactttatgcttagtaagggctccatagtgtctgtgagttgaatgttgtgttcatagtatctgccaaaacagaaagaaaaaaaacaaaatctgaagatgagaagttaaagctttgtatataatatgccttgaattgtaagtgcttgttattagttgtattacatgtaggtcatggttttgtacacataactccaaaccattgatactgttaaaagactatatgaatatatgaaagaatatataaacgtaagaatgtatgagtatctaatgacctctccaaattaatttttatttttagctctattagatttttctcagtgtaacaaatgtttattcctatgtaattaagggcata

SEQ ID NO: 341138 - DNA, 611 bp, Homo sapiens
ctgaccctgccctgccttggccctgtgctaccctagccctgccctggccttctgctggccctgatcctgccatggccctggccctgccatgtccctgccctggccctggttctgccctacttctggccctggccttggtcctcttatgtccctggctgtgaccctgcccctggtttttctctggccatgaccctgccctggttctgtcctatccctggccctgtctcagttctgtcctagccctggcctttcacagtactttatgcttagtaagggctccatagtgtctgtgagttgaatgttgtgttcatagtatctgccaaaacagaaagaaaaaaaacaaaatctgaagatgagaagttaaagctttgtatataatatgccttgaattgtaagtgcttgttattagttgtattacatgtaggtcatggttttgtacacataactccaaaccattgatactgttaaaagamtatatgaatatatgaaagaatatataaacgtaagaatgtatgagtatctaatgacctctccaaattaatttttatttttagctctattagatttttctcagtgtaacaaatgtttattcctatgtaattaagggcata

SEQ ID NO: 341139 - DNA, 611 bp, Homo sapiens
ctgaccctgccctgccttggccctgtgctaccctagccctgccctggccttctgctggccctgatcctgccatggccctggccctgccatgtccctgccctggccctggttctgccctacttctggccctggccttggtcctcttatgtccctggctgtgaccctgcccctggtttttctctggccatgaccctgccctggttctgtcctatccctggccctgtctcagttctgtcctagccctggcctttcacagtactttatgcttagtaagggctccatagtgtctgtgagttgaatgttgtgttcatagtatctgccaaaacagaaagaaaaaaaacaaaatctgaagatgagaagttaaagctttgtatataatatgccttgaattgtaagtgcttgttattagttgtattacatgtaggtcatggttttgtacacataactccaaaccattgatactgttaaaagactatatgaatatatgaaagaatatataaacgtaagaatgtatgagtatctaatgacctctccaaaytaatttttatttttagctctattagatttttctcagtgtaacaaatgtttattcctatgtaattaagggcata

SEQ ID NO: 341140 - DNA, 605 bp, Homo sapiens
aatgacaaaattgaaaagaaattgaaaggagatgagatgasatgaaatgagatgatggatgaaatgatgagatgaaacgagatgaaatgatgagaagaaatgatgagatgaaatgaaataatgaaatgaaatgatatgaaataatgaaattgagatgagatgagatgatatgagataaaatgatgagatgaaatgagatgaacgataagatgaaacaatgaaataagatgagatgataagacgaaatgatgaaatgagatgaaaaatgagatgaaataatgaaatgagatgaaatcaaataatgaaaggaaattatgaaatgtaatgatgaaataatgaaatggcaatgatgagatgagaagaaatgatgagatgaaatgatgaaatgatgagatgagatgaaatgatgagatgaaatgagattaaatgatgagatgagatgtgatgaaatgagatgaaatgatgacatgaaatcagatgaaataatgagatgaaatgatgagatgaaatgatgagatgagatgagatgaaatgtgatgagatgaaatgacataatgaaatgaaataaatgaaatgatgaaatggaataatgaaatggaaatgat

SEQ ID NO: 341141 - DNA, 605 bp, Homo sapiens
aatgacaaaattgaaaagaaattgaaaggagatgagatgagatgaaatgagatgatggatgaaatgatgagatgaaacgagatgaaatgatgagaagaaatgatgagatgaaatgaaataatgaaatgaaatgatatgaaataatgaaattgagatgagatgagatgatatgagataaaatgatgagatgaaatgagatgaacgataagatgaaayaatgaaataagatgagatgataagacgaaatgatgaaatgagatgaaaaatgagatgaaataatgaaatgagatgaaatcaaataatgaaaggaaattatgaaatgtaatgatgaaataatgaaatggcaatgatgagatgagaagaaatgatgagatgaaatgatgaaatgatgagatgagatgaaatgatgagatgaaatgagattaaatgatgagatgagatgtgatgaaatgagatgaaatgatgacatgaaatcagatgaaataatgagatgaaatgatgagatgaaatgatgagatgagatgagatgaaatgtgatgagatgaaatgacataatgaaatgaaataaatgaaatgatgaaatggaataatgaaatggaaatgat

SEQ ID NO: 341142 - DNA, 605 bp, Homo sapiens
aatgacaaaattgaaaagaaattgaaaggagatgagatgagatgaaatgagatgatggatgaaatgatgagatgaaacgagatgaaatgatgagaagaaatgatgagatgaaatgaaataatgaaatgaaatgatatgaaataatgaaattgagatgagatgagatgatatgagataaaatgatgagatgaaatgagatgaacgataagatgaaacratgaaataagatgagatgataagacgaaatgatgaaatgagatgaaaaatgagatgaaataatgaaatgagatgaaatcaaataatgaaaggaaattatgaaatgtaatgatgaaataatgaaatggcaatgatgagatgagaagaaatgatgagatgaaatgatgaaatgatgagatgagatgaaatgatgagatgaaatgagattaaatgatgagatgagatgtgatgaaatgagatgaaatgatgacatgaaatcagatgaaataatgagatgaaatgatgagatgaaatgatgagatgagatgagatgaaatgtgatgagatgaaatgacataatgaaatgaaataaatgaaatgatgaaatggaataatgaaatggaaatgat

SEQ ID NO: 341143 - DNA, 623 bp, Homo sapiens
taatgagactaggtgaaataatgaaatgagatgaaatgaaataatgaaatgaaattgaaatgagatgagaagaaatgatgagatgaaatgttgaaaggaggaaatgatgagatgagatgaaatgatgagatgaaatgaattgagatgaaatgatgagatgaaaaatgatatgaaaaatgatgagatgaaatgagatgatatgaagtgacataatgaaataaatgaaattagatgaaattaaatgaaatagtgaaatgaaataatgaaaatgaaatggaaatgagttgagatttgatgaaatgatgagatgatatgagatgagataaaatgagatgaaatgatgagatgaaatgatgaaatgagatgaaatgatgaggtgaagtgatgcactgtcacgtgtgtgtctattctttttcccaaccaacaaaaattataattcattttaattttattatttaagaatattcttaagagttgaaggaaaaataatatctacattatgggttacartctaagtataaataatacataaatatattaaaacttacaaagaatacgttttggaatcaaatataccatgcttctgtgatgacagttatttcatgctggttgtcacaatttta

SEQ ID NO: 341144 - DNA, 557 bp, Homo sapiens
atgtgcaaatcacacacaggaaatagcacaaatcaacacagatagtgtcaataaatgcaaatagtgtcagatattgaaccaagtaggtccatgctatgcccaacatcagagaaaacagttaagtatgccccaccatgtacctgaaaggcagatagctagaaggcttttgctattgacactagcaagactctatctcaaacaacaacaaaaaagtcaaatagagctttaaacctgaatcatttacatctttactttataaaatgtaaaactacttttttacccaagacttaaaatatagaattatgtaacttctactttaaacaaaatgaaaaatgttttgagtatcaaacrgtatattatctaccttgtagacagcatcttcatctaacactgccactgtgttagcaattcttaaatgatatcaaactagaagaaaagctgctcctacattttttttatttaataagacaaatttggcactagactttttctagaaatagcattcatagtatatcgatataatagtaacatcttgttttaggttaatgaattcctat

SEQ ID NO: 341145 - DNA, 557 bp, Homo sapiens
atgtgcaaatcacacacaggaaatagcacaaatcaacacagatagtgtcaataaatgcaaatagtgtcagatattgaaccaagtaggtccatgctatgcccaacatcagagaaaacagttaagtatgccccaccatgtacctgaaaggcagatagctagaaggcttttgctattgacactagcaagactctatctcaaacaacaacaaaaaagtcaaatagagctttaaacctgaatcatttacatctttactttataaaatgtaaaactacttttttacccaagacttaaaatatagaattatgtaacttctactttaaacaaaatgaaaaatgttttgagtatcaaacggtatattatctaccttgtagacagcatcttcatctaacactgccactgtgttagcaattcttaaatgayatcaaactagaagaaaagctgctcctacattttttttatttaataagacaaatttggcactagactttttctagaaatagcattcatagtatatcgatataatagtaacatcttgttttaggttaatgaattcctat

SEQ ID NO: 341146 - DNA, 557 bp, Homo sapiens
atgtgcaaatcacacacaggaaatagcacaaatcaacacagatagtgtcaataaatgcaaatagtgtcagatattgaaccaagtaggtccatgctatgcccaacatcagagaaaacagttaagtatgccccaccatgtacctgaaaggcagatagctagaaggcttttgctattgacactagcaagactctatctcaaacaacaacaaaaaagtcaaatagagctttaaacctgaatcatttacatctttactttataaaatgtaaaactacttttttacccaagacttaaaatatagaattatgtaacttctactttaaacaaaatgaaaaatgttttgagtatcaaacggtatattatctaccttgtagacagcatcttcatctaacactgccactgtgttagcaattcttaaatgatatcaaactagaagaaaagctgctcctacattktttttatttaataagacaaatttggcactagactttttctagaaatagcattcatagtatatcgatataatagtaacatcttgttttaggttaatgaattcctat

SEQ ID NO: 341147 - DNA, 569 bp, Homo sapiens
attaaggcattctggtagatttccaagaaggagcagcagccaaatagttagataaacctgttcaaccagacatgattgaaaatccaacaaatgaggttggtgggggagacaggattagacgggaaggaaacgaaagcttttctacatctccaaatatataactaaactgtttgcttttacttgaatgcttagaattccttattaatttcatagttcagtaaatattaggtcttaaagcgggaagcaactggaaagacgtttcttaacaaaagggatcatraatcagcttagttctgcttatgcccaagaaacagtaactgctatagaaactgccctactataataacttaaaaagtctatgtaagtatataaaacaaaactttttagacatttcaaaacagaaaacattggattataattctgaagagaaagaaacaaatgagttaagactggcttactgcttagagaaagagtctcggttccaacagtggaagagggtacctaaacagagcctgtgagtcatgctgagttgaggaggtaagaaaggagtttagtgatgcggagataag

SEQ ID NO: 341148 - DNA, 596 bp, Homo sapiens
gatgcggagataagaaaggagtttagtgatgctgagagggctagaatttgtagagctgcgtaaaacagaggggagagttacaaaaacagatggttctgaagacctgcagaggatactctgctcttggctgtagcatcgatcttagcactagtgaaaggaaataattcaaggcatgggaaaaataaagtagtgggatggacaatttcaagggctcacacagggctaagaagaatttatgttttcatcagctagagyggatagactgtgtaatacatgccatattggaaagaggctgaagaagaacaagaatgccttattaatggaaatatttaaataagtcccagaataaagactgctctggatccaccagaacaaagggtaaaggcaagcgtctaaagaattcagttaatctgcaagttacttacccgcacaccaggagaaaatccagtgttttttttagatgaatacaactaaaagtagcacctgaaaaatggaaaattcacaatgtctggcactcaaaaattacaaggaatgcaaagaaaaaggaaaaaaaaaccaactatgactaaagccagcagaaaaaaaataatgcaaca

SEQ ID NO: 341149 - DNA, 623 bp, Homo sapiens
tccttgtcctggccctgaaatcaaccacttctccaaggagccttggttcttcttactggagaacagtatttagaaatcaaatctyggggctaggtgtgctcattgctttggggtcctcccaatagacaaagctagggagatacagttatgtatcatataacaatgtgtggtcaacgatggacagcatacaatatacaaccattgtcttgtaaaattataatgcagccaaaaaaaatcccattgtctaacacttaccatactatgcttttcagtgttagagtatcctacttctatttattaaaaaaaaagttaactgtaaaacagcctcaggcaggtctttcagtaggtgttccaaaagaaggctttgcactatttacaacaccaaagacttggaaccaacccaaatgcccaccaatgatagactggataaagaaaatgtggcacatatacactatggaatactatggagtcataaaaaagaatgaattcatgtcctttgcagggacatggatgaagctggaaaccatcattctcagcaaactaacacacgaatagaaaaccaaacaccacatgttctcactcataagtgaaagttgaacaatgagaacatttggacacaagga

SEQ ID NO: 341150 - DNA, 623 bp, Homo sapiens
tccttgtcctggccctgaaatcaaccacttctccaaggagccttggttcttcttactggagaacagtatttagaaatcaaatctcggggctaggtgtgctcattgctttggggtcctcccaatagacaaagctagggagatacagttatgtatcatataacaatgtgtggtcaacgatggacagcatacaatatacaaccattgtcttgtaaaattataatgcagccaaaaaaaatcccattgtctaacacttaccatactatgcttttcagtgttagagtatcctacttctatttattaaaaaaaaagttaactgtaaaacagcctcaggcaggtctttcagtaggtgttccaaaagaaggctttgcactatttacaacaccaaagacttggaaccaacccaaatgcccaccaatgatagactggataaagaaaatgtggcacatatacactatggaatactatggagtcataaaaaagaatgaattcatgtcmtttgcagggacatggatgaagctggaaaccatcattctcagcaaactaacacacgaatagaaaaccaaacaccacatgttctcactcataagtgaaagttgaacaatgagaacatttggacacaagga

SEQ ID NO: 341151 - DNA, 623 bp, Homo sapiens
aacatcatacactggggcctgttgggggtggggtggagggcaaggggagggaggagagcattaggaaaaacacctaatgcacgtggggcttaaaacctagataatggtttgataggtgcagcaaaccactgtggcacatgtatacctatgtaacaaacctgcaggttctgcacatgtatcccagaacttaaagtaaaataaaataaaaaaggctttgttatcataggagatgacagcttcatgcacgcccctgaagaccttccagtgggacaatacatgaggygaaagacagtgatattgatgatcctgacccttgtgtggccctaagccagcgtgtgtatttgtgttctaattatttttattatttaaactcttaggctataaagtcccatgtgttctaatttttaacaatttttttaacaaaaaagtttttaaaagtaaaaaaggcaaaatttcaaaaataggaaaacacttataaaataaggatataatgtttttgtacagctgtataatgtgttttaagctgttattaccaaaaagttaaaaagctaaaataacgagtttatgaagtaaaaaagttacagtatgctgatgttaatttataattgaagaaaaggttttta

SEQ ID NO: 341152 - DNA, 623 bp, Homo sapiens
aacatcatacactggggcctgttgggggtggggtggagggcaaggggagggaggagagcattaggaaaaacacctaatgcacgtggggcttaaaacctagataatggtttgataggtgcagcaaaccactgtggcacatgtatacctatgtaacaaacctgcaggttctgcacatgtatcccagaacttaaagtaaaataaaataaaaaaggctttgttatcataggagatgacagcttcatgcacgcccctgaagaccttccagtgggacaatacatgaggcgaaagacagtgatattgatgatcctgacccttgtgtggccctaagccagcgtgtgtatttgtgttctaattatttttattatttaaactcttaggctataaagtcccatgtgttctaatttttaacaatttttttaacaaaaaagtttttaaaagtaaaaaaggcaaaatttcaaaaataggaaaacacttataaaataaggatataatgtttttgtacagctgtataatgtgttttaagctgttattacmaaaaagttaaaaagctaaaataacgagtttatgaagtaaaaaagttacagtatgctgatgttaatttataattgaagaaaaggttttta

SEQ ID NO: 341153 - DNA, 558 bp, Homo sapiens
atgtattatttgtttttttgttgtgagaagatgatagtgaaatgataccgaaaatggtggtggttagcatggtaattgtcaagtgaartattgattctcttccataacaaaccccagccgctcacccacccaagatagttttccatttcagtaggaatgggttttactgaaaatttcagtaagaaaaggttttctttaaaccacgttggtttcattcctctattctgtgtgctgttcggttttccttccctttcctccctttcttcctgccttccttttctcctggtttctttttatttctgtcttttactttctctttggctttctatttttcttttggtgtctttttttctcattctctttctcttagaatagctgtcgctggattccctgctgagataaattattgggtggagtatatacttgaattctgggggaaaatattgttacatatgtgctacacagatacatacatacatagaaacttttcaaaatttggtgtcatcttacaggtttttaatatcatggtcattctctctttctttgccacctttccaa

SEQ ID NO: 341154 - DNA, 558 bp, Homo sapiens
atgtattatttgtttttttgttgtgagaagatgatagtgaaatgataccgaaaatggtggtggttagcatggtaattgtcaagtgaagtattgattctcttccataacaaaccccagccgctcacccacccaagatagttttccatttcagtaggaatgggttttactgaaaatttcartaagaaaaggttttctttaaaccacgttggtttcattcctctattctgtgtgctgttcggttttccttccctttcctccctttcttcctgccttccttttctcctggtttctttttatttctgtcttttactttctctttggctttctatttttcttttggtgtctttttttctcattctctttctcttagaatagctgtcgctggattccctgctgagataaattattgggtggagtatatacttgaattctgggggaaaatattgttacatatgtgctacacagatacatacatacatagaaacttttcaaaatttggtgtcatcttacaggtttttaatatcatggtcattctctctttctttgccacctttccaa

SEQ ID NO: 341155 - DNA, 572 bp, Homo sapiens
tattgtttctcctgttgtctttctgcctagcaattcctttcctcaagctgtcctaaacagttgattaaaaaagaattactgagatcatgtttgatacagggcagtaaattttaagtatcaaatagataaaagaggaagggtatagagaatctaagttgcctttcttaattggcagaatcttccaatgtcactttcatgatttgtttgctgtttccatccttctggtctttattttttaacactgactccatgagtgcattagtccatagtcagaataaatgttttgctatgtgatgaagaaggttttttgttttttgtttttgagacagagtttcactcttgtcacccaggcargagtgcagtggtgcaatctctgctcactgcaacctccgcttcccgggttcaagcgattctcctgcctcaggctcccgagtagctgggatttcagctgcccgcccccacgtccagctaatttttgtatttttattagagacagggttttaccatgttggccaggctggtgaagagtgtttattttgtgggggaggtaaaggggtgaattttctagagag

SEQ ID NO: 341156 - DNA, 572 bp, Homo sapiens
tattgtttctcctgttgtctttctgcctagcaattcctttcctcaagctgtcctaaacagttgattaaaaaagaattactgagatcatgtttgatacagggcagtaaattttaagtatcaaatagataaaagaggaagggtatagagaatctaagttgcctttcttaattggcagaatcttccaatgtcactttcatgatttgtttgctgtttccatccttctggtctttattttttaacactgactccatgagtgcattagtccatagtcagaataaatgttttgctatgtgatgaagaaggttttttgttttttgtttttgagacagagtttcactcttgtcacccaggcaagagtgcagtggtgcaatctctgctcactgcaacctccgcttcccgggttcaagcgattctcctgcctcaggctcccgagtagctgggatttcagctgcccgcccccmcgtccagctaatttttgtatttttattagagacagggttttaccatgttggccaggctggtgaagagtgtttattttgtgggggaggtaaaggggtgaattttctagagag

SEQ ID NO: 341157 - DNA, 572 bp, Homo sapiens
tattgtttctcctgttgtctttctgcctagcaattcctttcctcaagctgtcctaaacagttgattaaaaaagaattactgagatcatgtttgatacagggcagtaaattttaagtatcaaatagataaaagaggaagggtatagagaatctaagttgcctttcttaattggcagaatcttccaatgtcactttcatgatttgtttgctgtttccatccttctggtctttattttttaacactgactccatgagtgcattagtccatagtcagaataaatgttttgctatgtgatgaagaaggttttttgttttttgtttttgagacagagtttcactcttgtcacccaggcaagagtgcagtggtgcaatctctgctcactgcaacctccgcttcccgggttcaagcgattctcctgcctcaggctcccgagtagctgggatttcagctgcccgcccccacgyccagctaatttttgtatttttattagagacagggttttaccatgttggccaggctggtgaagagtgtttattttgtgggggaggtaaaggggtgaattttctagagag

SEQ ID NO: 341158 - DNA, 606 bp, Homo sapiens
tcctctgcctgaaacactcctccctcctttttgtctgggtaactcatactcacccttcaagtcttccgttagctgtcccttcctctgagaagccttccctgtcatcaaagtctaagtgttctttctatgtgcacctgtggtagctggtttttaattgactttgttgaatgtttctatgagactataagtttggagaaggcataaaccatgtctgtgctgtgcagagtttggtggataggaggttctcaacttttcattgaattcttgcaatgagtatttcagtgctcaattgtayggtgcagaaattccatggaaaatcagagaagagagaaatcagtgaaggctgaagtgatgagtgaaagtgggacttgacctgaacctataatgataaactcctttgtgaagtttaacactctctcttctacttccctttctccgcttttttttttctgtttttcataaaatcattcattcattcagcaaatatttaagggtccagtcttcaggcattgatctaggtggtgaagatataacagtgaaaaatccctgccctcatggaatatgtgttctaatagactaaatggataaaaatgggttaaatataag

SEQ ID NO: 341159 - DNA, 574 bp, Homo sapiens
tctttgtttttctcaagcacctgtttgtccatttgcatgccagtattatggaaaacattttaaaagtatgagttatgttgcatgttcttcatcttaatggtttaaatagggaaacaaaactgataacatgtaaaacagctagcaagggacatacggcattctataattgttgctcattgtggggttcgcataacgggtgctgaaatagttcagaaaattagagtttggagggcatattgtactccagtaatgctccttgggagtgatagaatttgaatgggctctatagatagatgagatttaggcagatggaagggggcgctggtcagaggcagcctcagggcatcccaggccgaagaggtcagtatgcttttctccctcatccattattgcttcttctttctcctcctacttggtttcagtcttttggaaatgakattgacatctttctctaatgattatatttagatacatttattcacatctgtacttccttcaggtggaaatgaagggggaggaaatggagagaaagaattaatgttttccattttttaaagattaagtttattcttag

SEQ ID NO: 341160 - DNA, 574 bp, Homo sapiens
tctttgtttttctcaagcacctgtttgtccatttgcatgccagtattatggaaaacattttaaaagtatgagttatgttgcatgttcttcatcttaatggtttaaatagggaaacaaaactgataacatgtaaaacagctagcaagggacatacggcattctataattgttgctcattgtggggttcgcataacgggtgctgaaatagttcagaaaattagagtttggagggcatattgtactccagtaatgctccttgggagtgatagaatttgaatgggctctatagatagatgagatttaggcagatggaagggggcgctggtcagaggcagcctcagggcatcccaggccgaagaggtcagtatgcttttctccctcatccattattgcttcttctttctcctcctacttggtttcagtcttttggaaatgagattgacatctttctctaatgattatatttagatacatttattcacatctgtacttccttyaggtggaaatgaagggggaggaaatggagagaaagaattaatgttttccattttttaaagattaagtttattcttag

SEQ ID NO: 341161 - DNA, 574 bp, Homo sapiens
tctttgtttttctcaagcacctgtttgtccatttgcatgccagtattatggaaaacattttaaaagtatgagttatgttgcatgttcttcatcttaatggtttaaatagggaaacaaaactgataacatgtaaaacagctagcaagggacatacggcattctataattgttgctcattgtggggttcgcataacgggtgctgaaatagttcagaaaattagagtttggagggcatattgtactccagtaatgctccttgggagtgatagaatttgaatgggctctatagatagatgagatttaggcagatggaagggggcgctggtcagaggcagcctcagggcatcccaggccgaagaggtcagtatgcttttctccctcatccattattgcttcttctttctcctcctacttggtttcagtcttttggaaatgagattgacatctttctctaatgattatatttagatacatttattcacatctgtacttccttcrggtggaaatgaagggggaggaaatggagagaaagaattaatgttttccattttttaaagattaagtttattcttag

SEQ ID NO: 341162 - DNA, 597 bp, Homo sapiens
ggagtcttgcccttagttcacgaaacctgctagagcttggacacttgtttccccaaattctttactaaaaattgtttatgggaatgtattaaacatattgaggataagttyttccagaaatgataaatttatcaaggaactttgctctaaagggcatttaatgtatctttaaacgaacacaaacagagaaaacatctttttatcataagaaagcatttgaaaatggtaatattgtcgctgcagagagtagccttaaattgttgcgggatgacgtaggcctccgatatagagagtattttgacttttgattaatatttgctcccataaaggatgataccttgattagccaaatatttaagaattgggcctgcctggaattttggggttccaaatagaatttttttttaaactttccactttgtcatctattttgttatttgatattttttaagtttgattaaaatgcctactgattttaaaggtaatgatccagagcttcatctttagttgcatctgttttgatagaaaatatattgatttcaaggtaccatttctgtacctctcaatgcatcaggaggcattttcaaatctccatgc

SEQ ID NO: 341163 - DNA, 597 bp, Homo sapiens
ggagtcttgcccttagttcacgaaacctgctagagcttggacacttgtttccccaaattctttactaaaaattgtttatgggaatgtattaaacatattgaggataagttcttccagaaatgataaatttatcaaggaactttgctctaaagggcatttaatgtatctttaaacgaacacaaacagagaaaacatctttttatcataagaaagcatttgaaaatggtaatattgtcgctgcagagagtagccttaaattgttgcgggatgaygtaggcctccgatatagagagtattttgacttttgattaatatttgctcccataaaggatgataccttgattagccaaatatttaagaattgggcctgcctggaattttggggttccaaatagaatttttttttaaactttccactttgtcatctattttgttatttgatattttttaagtttgattaaaatgcctactgattttaaaggtaatgatccagagcttcatctttagttgcatctgttttgatagaaaatatattgatttcaaggtaccatttctgtacctctcaatgcatcaggaggcattttcaaatctccatgc

SEQ ID NO: 341164 - DNA, 568 bp, Homo sapiens
ggttagatcatttagcttcatagacagatatacaggactagaagggaatattcaaacacagttatctcagctttgggaatactgatgcatttttaawactttacagatttgctaaaacaaatgtttaatacattttataatcagaagaatattaacaaaaagtatcacatgtattcatgtattagctgtgcttttgaacatagcactctcctaagacccgaaatgtcatataatctgaagaaaaccgctaaaaacctttaggagatgacatatggtacaagaaaaacaggaaatgatgacagaagagagtaggaggtcaaggaaattttataatttagagacattaataatgagtttgaaagtcgtttggtgcaaaaaaaccccacctaaactaaaatgggaaaatcaggttttacaaaaaggaggcaatggggagagcagagttcagcacaaaagccaagacaacattcaaaaaaagacatcacagaccttcagtctccacttgactgctacaattatctgtggagctgtcaaccagctgatgtagagatcttgtgggaataaagca

SEQ ID NO: 341165 - DNA, 654 bp, Homo sapiens
tttagtttctcatctcttgactgtactattctgataccttttgtagctggtttttctgtctcaattttgagtccctgcagttttccctccacaccacaagcaaaactgatcttaccaaaacccaagtctgattgttgttcctctctttagacctatagtgacttcctgtgtgttagaggggtaactcaaagctctgacagtgcatcaggatcatcttggtccttaaacagaagaatgccagggcccaccgcaggccagcgactgagaattccctgcagtgcaccctggcacgtgtctttcctgaaatctccacgtgtcctcacatcctacttggatagcyaatggacatctcaaggtgaacacatcaaaaatggaacttctttttctcacaacctgtgttaactttggtctttcatgtcttggtcgatggtaaccccacccttgaagttgctcaggactaaaacttaactactattctctcagccctcccaaaggaccagttggcaggtcctccgggacctatagcccctactgccacccaagccagctcctccctggcacatgcattaccccctgactggtcaccctgcttctccagtctattttcaaagcaatacttagagtgatcctttaaaaatataaattaatgttaga

SEQ ID NO: 341166 - DNA, 661 bp, Homo sapiens
ttttgtataattataaaaagtacttgattgtaattaacgtagttcttggaataaatattttacatttctgtcacttgtatgggaaaacacaaagtaaccatgaattgcctaaaagaaatttctactgtgagttttcttattataggttatactgtcgataatgattattcartttcctgatgggatagatttcacaaaactgaatggtagtgttaagtctctttttaaaaaaatgtttacatcatagacaggagggtctcaccgtgttgtccaggctggtctcaaactcctgggctaaagcagtcctccccttggcttcccagtgtgcagggattacaggtttcagccaccacacccagccatgtaatgttaagtctataaaggaagatgtaggatgaaaaaatcatgcatttaaaaatgtattttcatggagattttatcataatgaagcaatttattttaactggtaggcatgtgtattgggaaactgttcaaggtgttgagggttaccatacatgttagtttgcctgggtcagttccagttaatgcctgctgttctgccattgatattgactgtggtttggtatttgacttagagttttaataactgaactattaccattaatagctatggcaaaataagccagcatgggtttggtag

SEQ ID NO: 341167 - DNA, 583 bp, Homo sapiens
actggtacctactcaagcctgaggcaccacacagtaaatcatcatcaataaaatgttcctggtcccttcaacacctgcccaccacacccacctgagccctaacctgccagccaactctcctcatctgctaccaccacactgttccctaagcctgtggagaaaacattctacaaaactcaaattaactaaattaaaaatgaagttccagccrggcgcggtggcgcacgtctgtaatcccagcactttagaaggctgaggcaggtggatcacaaggtcagcagatcgagaccatcctggctaagatggtgaaaccctgtctctattaaaaatacaaaaaattagccgggcgtggtgctgggcacctgtagtcccagctacttgggaggctgaggcaggagaatggcgtgaacccgggaggcagagcttgcagtgagccgagatcgtgccactgcactccagcctgggcaacagagtgagactgcatctccgaaaaaaaaaaaaaaagtgaagttccttctctagatggaagcttctttcacttcttaaataataaattaaaattattctgataggctgggtgcag

SEQ ID NO: 341168 - DNA, 583 bp, Homo sapiens
actggtacctactcaagcctgaggcaccacacagtaaatcatcatcaataaaatgttcctggtcccttcaacacctgcccaccacacccacctgagccctaacctgccagccaactctcctcatctgctaccaccacactgttccctaagcctgtggagaaaacattctacaaaactcaaattaactaaattaaaaatgaagttccagccaggcgcggtggcgcacgtctgkaatcccagcactttagaaggctgaggcaggtggatcacaaggtcagcagatcgagaccatcctggctaagatggtgaaaccctgtctctattaaaaatacaaaaaattagccgggcgtggtgctgggcacctgtagtcccagctacttgggaggctgaggcaggagaatggcgtgaacccgggaggcagagcttgcagtgagccgagatcgtgccactgcactccagcctgggcaacagagtgagactgcatctccgaaaaaaaaaaaaaaagtgaagttccttctctagatggaagcttctttcacttcttaaataataaattaaaattattctgataggctgggtgcag

SEQ ID NO: 341169 - DNA, 583 bp, Homo sapiens
actggtacctactcaagcctgaggcaccacacagtaaatcatcatcaataaaatgttcctggtcccttcaacacctgcccaccacacccacctgagccctaacctgccagccaactctcctcatctgctaccaccacactgttccctaagcctgtggagaaaacattctacaaaactcaaattaactaaattaaaaatgaagttccagccaggcgcggtggcgcacgtctgtaatcccagcactttagaaggctgaggcaggtggatcacaaggtcagcagatcgagaccatcctggctaagatggtgaaaccctgtctctattaaaaatacaaaaaattagccgggcgtggtgctgggcacctgtagtcccagctacttgggaggctgaggcaggagaatggcgtgaacccgggaggcagagcttgcagtgarccgagatcgtgccactgcactccagcctgggcaacagagtgagactgcatctccgaaaaaaaaaaaaaaagtgaagttccttctctagatggaagcttctttcacttcttaaataataaattaaaattattctgataggctgggtgcag

SEQ ID NO: 341170 - DNA, 427 bp, Homo sapiens
atttagaaatatttaagcttttcacaataaaacccttaaaatttctaagtatccatctcaatctcattatcaagagaaatgccacttagacatgaagcaaacaatgtattgtcattttttaaaaaaatttggccttttaaagctaagaactgggtggcaaatctttccagtttcctatacacctgagttcagctgagaaaacaagtacttaaatcttaagtgtgagctcagattaagtatgagatatgctttaggttcttgataaaattacatttcacagagccatatgagagagctgtcctagtccattttgtgttgctaaaacagaattccactggctgaggagtttatcacgaatggygacttatttcttacagttctggagactgggaagtccaaagtcaagggtcctgaatctgatgaggga

SEQ ID NO: 341171 - DNA, 553 bp, Homo sapiens
ttacctcctaacactgcattggggattaagtttctagcacatgaactctggggacatgctgacaccatagcaagagtcttccttaattctaaccactgraaatctttttcctttaaataccaaaatccagaagattaattcatgttcaatatcatttttagctaacaattttttaatttaaaaatactttactgtagaaaactctaataatcaatagctaacaaaattaagtggtctcaactctttagttcaatatttccttcaagttaatggtcaatttttcataactatggcatttctgtttcttttcttacagtcagggtgtctttgctgaatataaatagaacaatcaaaccaataatatcctttacataaccactatacatatatagatttaaccttagttattcttcgtatagattgtcttgtaagtttgttatgctagtactaacattagcattattattttaccaagagtccagcgtgacacagtatctgccatgttaggaatttgagtacagtgaaacagagagcaatgacaatgagaacacta

SEQ ID NO: 341172 - DNA, 553 bp, Homo sapiens
ttacctcctaacactgcattggggattaagtttctagcacatgaactctggggacatgctgacaccatagcaagagtcttccttaattctaaccactgaaaatctttttcctttaaataccaaaatccagaagattaattcatgttcaatatcatttttagctaacaattttttaatttaaaaatactttactgtagaaaactctaataatcaatagctaacaaaattaagtggtctcaactctttagttcaatatttccttcaagttaatggtcaatttttcataactatggcatttctgtttcttttcttacagtcagggtgtctttgctgaatataaatagaacaatcaaaccaataatatcctttacataaccactatacatatatagatttaaccttagttattcttcgtatagattgtcttgtaagtttgttatgctagtactaacattagcattattattttaccaagagtccagcgtgacrcagtatctgccatgttaggaatttgagtacagtgaaacagagagcaatgacaatgagaacacta

SEQ ID NO: 341173 - DNA, 627 bp, Homo sapiens
agtcatttaattgtatgagcacctcaagtggagaactgagttttattccttctgtttctcccaacaataaatgaatgcattattccttctttgtagtcaaatatctcgtgcaaataattttatcagtttttccatggtgagttgtctctacctatgaccctaaatgccaagctccctacctctctctgcacacactcaaattaaatttttggttatatatttaaaatatatgttttatctataccattgtccagcttaatattttaccaagagtccagtatgatgtagtttctgctggttaggaatgtgagtatagtcccatagacagcaatgacactgagaatgttattctagtatttcaagaggcacaatagcaacttcttcttgccttagttttcttgttagtaatgattgccaacctacagatggctacattgaagtttaaaatgaaaattactttcattttaaagttccctcataaatgtcttcatcccaaataactttttcgagcaagmaagttttccttcattaatctacatctactattaagaaacactactctgattaacaattttatatatctatattcactagggattaaggatatacagttatttaatgtagtaa

SEQ ID NO: 341174 - DNA, 557 bp, Homo sapiens
taaaaagtacacacaagggattccaacttttcttcatggctgattctaatgttggcaaataaacaaaatgaagcactacaacaaaaaaaatgaaaaacttaaatgaaaggcgacaaattatattaaaaagtgtaaggtggtacaactaaatcagtctaaactaatagaaaaactcwtgggtgaaaagaaaactattcgtccttatgagattaccaactctcacagagaaacaactgagattacattttaattaatatgtattaatacctaaaatgaaatgagaatcaatgctgagttaagtaaaatatgataagggaaccaaataatgaaagtaaaagagccctagaaggcttctttactcggaaaaagagttttcttaagagttcacaaaacaaagagactttggaactagttaccaatttcatatttaggccattgggttgaatgaacaatcaaggtacccacataaaaaacaggtaatagtaatcccattgcctctatcatcccccaagaatacacacagagatgtacatgcacacactcacaccttcatgggc

SEQ ID NO: 341175 - DNA, 540 bp, Homo sapiens
cctatgactgggtaatttataaagggaagaggtttaactgactcacagttcagcatggctggggatgcctcaggaaatgtacaatcayggcagaaggggaaatgattatgtccttcttcacatagcagcagcaaggagaagtgccgagcaaaaaggggaaaagccccttataaagccatcagatctcaggagaactcactcattatcatgagaacagcatgagagtaatggcccccaacaattaaattacctcccaccaggtgggaactacaattcaggatgagatttgggtggggacacagccaaaccatatcaccaggcatgctgatgcatgcctatattcccagctacttgggaggctgaagtaggaggactgtttcagtccaggaggttgaggctgcagtgagccatgatcgtgccactggattctatcctgggtgacaaagtgagatcctgtctcaaaaaaaaaattatttaagagttgattcaggagctaccttgagctgttgggaaaagcactgttccagtcagattgaaggg

SEQ ID NO: 341176 - DNA, 565 bp, Homo sapiens
tatgcaatcctttggattttttttttaattaaagatactgtctgctaaagaaaatgcatcaaattttcatgctaaaacacaaagaaagactttttttctcacttctgtgaaaataagctgtgaaaataagcaatttaaatctaagttgctggaactttattagagccttaagggaatgtgattaagggacctggatggatcacattaacaggcagctgtaacctaggaagctgtaagctttgcttctctgattgtttgtctgattayagattagcctttttccttatctacactgttttgtaaaatgttgcaaatgactaaaaggcagcagggaagaccccttcttgcttaactgttgatcttcattacagattaatttccctcttacctttctcacacaaagacttgatgatgactatcacattgtctaaggtggaatgttaaatgaactcttttaaattgtgaagtaaatgataacaagctgtaaagaagaaaaacaagctgtacggaaaagaaaaataactaaattattataacccacaaagcagccttacataaaaaaaag

SEQ ID NO: 341177 - DNA, 565 bp, Homo sapiens
tatgcaatcctttggattttttttttaattaaagatactgtctgctaaagaaaatgcatcaaattttcatgctaaaacacaaagaaagactttttttctcacttctgtgaaaataagctgtgaaaataagcaatttaaatctaagttgctggaactttattagagccttaagggaatgtgattaagggacctggatggatcacattaacaggcagctgtaacctaggaagctgtaagctttgcttctctgattgtttgtctgattatagattagcctttttccttatctacactgttttgtaaaatgttgcmaatgactaaaaggcagcagggaagaccccttcttgcttaactgttgatcttcattacagattaatttccctcttacctttctcacacaaagacttgatgatgactatcacattgtctaaggtggaatgttaaatgaactcttttaaattgtgaagtaaatgataacaagctgtaaagaagaaaaacaagctgtacggaaaagaaaaataactaaattattataacccacaaagcagccttacataaaaaaaag

SEQ ID NO: 341178 - DNA, 565 bp, Homo sapiens
tatgcaatcctttggattttttttttaattaaagatactgtctgctaaagaaaatgcatcaaattttcatgctaaaacacaaagaaagactttttttctcacttctgtgaaaataagctgtgaaaataagcaatttaaatctaagttgctggaactttattagagccttaagggaatgtgattaagggacctggatggatcacattaacaggcagctgtaacctaggaagctgtaagctttgcttctctgattgtttgtctgattatagattagcctttttccttatctacactgttttgtaaaatgttgcaaatgactaaaaggcascagggaagaccccttcttgcttaactgttgatcttcattacagattaatttccctcttacctttctcacacaaagacttgatgatgactatcacattgtctaaggtggaatgttaaatgaactcttttaaattgtgaagtaaatgataacaagctgtaaagaagaaaaacaagctgtacggaaaagaaaaataactaaattattataacccacaaagcagccttacataaaaaaaag

SEQ ID NO: 341179 - DNA, 565 bp, Homo sapiens
tatgcaatcctttggattttttttttaattaaagatactgtctgctaaagaaaatgcatcaaattttcatgctaaaacacaaagaaagactttttttctcacttctgtgaaaataagctgtgaaaataagcaatttaaatctaagttgctggaactttattagagccttaagggaatgtgattaagggacctggatggatcacattaacaggcagctgtaacctaggaagctgtaagctttgcttctctgattgtttgtctgattatagattagcctttttccttatctacactgttttgtaaaatgttgcaaatgactaaaaggcagcagggaagaccccttcttgcttaactgttgatcttcattacagattaatttccctcttacctttctcacacaaagacttgatgatgactatcacattgtctaaggtggaatgttaaatgaactcttttaaattgkgaagtaaatgataacaagctgtaaagaagaaaaacaagctgtacggaaaagaaaaataactaaattattataacccacaaagcagccttacataaaaaaaag

SEQ ID NO: 341180 - DNA, 326 bp, Homo sapiens
gttttgagcaaatctgtcagtgacatttttttccagcagcacagtttcactttgtatctctctgtcacattttgacaattctcacaattcaaacatttgattattatatttgctatggtaatcagtgatctttgatgttactactgtaattgttttggggagccattaaccatctccacrtaagatggtaaacttaataaatgttatgtgttctgagcactgcactgaccagctgttccctaagatacaacaatactgaaattagaccaattagtaatcctgcaatggtctctaactgttcaagtaaaaggaagagttgcatgtct

SEQ ID NO: 341181 - DNA, 602 bp, Homo sapiens
ggttggcagggctgtattccttctggaggctcgaggggagaatctttttgcttgtcttttccagcttctaagagctgtctattccttgattcatgaccccctttctccaccttcaaacctcttcttcccttctgcttctgtcatcccgtcttctctgactctgaacctccaacctcttttgtaagaacgctgtgaggctgagcatcatggcttgcacctataatcttagcacttcgggaggccaaggcaggaggatcacttgagcccaggagttagagaccaacctgggcaacgtaatgagacctcatctctacaaaaatttttttaaaaaattaaaaaatgttaaaactaggtgggcayagtggcatgtgcctgtagacctagctacttgaaagattgaagcaggaggctcagttgagcctaggagttcgaggttacaatgagctatgatcgcaccactgcacttgagcctgggctacagagtgagaccctgtctctgaaaaaacaaaacaaaaatacatcctgtgtgcccactgagacaacccagggtaatctcttctccttaagttcgttaacttattcacatctgcaaattctctttt

SEQ ID NO: 341182 - DNA, 560 bp, Homo sapiens
tggttttagtttttgttgttgttgttgttgtttgtttgtttgttttttaatctaaccattttggtggagaaaagaaagttcatcaggagatagtttataactcctcattatgatgactgacaaatatccaaagggcatgtttcttttaagcccgtgcactgtctttatccccacacagaggcaggcgctyatgtcttttacacgggacattttgaatttttatctttattatggtattagtttcttactgggttccacctcaagcttacttttgttaactggagatctttacctgtagactcgtcgtctgcttaagttagaactaagtctattccaaatgatcgattttattttactgctatagtacaccactttttatgtctttggaatatgctttgtaaaatagtaactttacagaatttttcttaattctgagaaacagttatttggtagcttcagtttcctaagaagagaggaaaatgtacctcaaaggacaggagagtccccaagatcttccaaaacctattccaaaaataatctattattattttagatggtaa

SEQ ID NO: 341183 - DNA, 560 bp, Homo sapiens
tggttttagtttttgttgttgttgttgttgtttgtttgtttgttttttaatctaaccattttggtggagaaaagaaagttcatcaggagatagtttataactcctcattatgatgactgacaaatatccaaagggcatgtttcttttaagcccgtgcactgtctttatccccacacagaggcaggcgctcatgtcttttacacgggacattttgaatttttatctttattatggtattagtttcttactgggttccacctcaagcttacttttgttaactggagatctttacctgtagactcrtcgtctgcttaagttagaactaagtctattccaaatgatcgattttattttactgctatagtacaccactttttatgtctttggaatatgctttgtaaaatagtaactttacagaatttttcttaattctgagaaacagttatttggtagcttcagtttcctaagaagagaggaaaatgtacctcaaaggacaggagagtccccaagatcttccaaaacctattccaaaaataatctattattattttagatggtaa

SEQ ID NO: 341184 - DNA, 560 bp, Homo sapiens
tggttttagtttttgttgttgttgttgttgtttgtttgtttgttttttaatctaaccattttggtggagaaaagaaagttcatcaggagatagtttataactcctcattatgatgactgacaaatatccaaagggcatgtttcttttaagcccgtgcactgtctttatccccacacagaggcaggcgctcatgtcttttacacgggacattttgaatttttatctttattatggtattagtttcttactgggttccacctcaagcttacttttgttaactggagatctttacctgtagactcgtcgtctgcttaagttagaactaagtctattccaaatgatcgattttattttactgctatagtacaccactttttatgtctttggaatatgctttgtaaaatagtaactttacagaatttttcttaattctgagaaacagttatttrgtagcttcagtttcctaagaagagaggaaaatgtacctcaaaggacaggagagtccccaagatcttccaaaacctattccaaaaataatctattattattttagatggtaa

SEQ ID NO: 341185 - DNA, 559 bp, Homo sapiens
tttttttgattgagcaccttctaaacagtcattttgtagaatatgcaaaggaatatttgtgagcccattgatgcctctggggaaacaggaaatatcttcacataaaaacgagacagaatctttctcagaaacgtcttggtgatgtgtgcattcatctcactgagttgaactttaytttgattgagcagtttggaaacagtcttttctagtatctgcaaatggatattttaagcactctgaggcctacggtgaaaaaggaaatatcttcaatataaatcagacagaagcattcatagaaacttctttgggatgtgtgcattcatctcaccgactagaacctttcttttgattgagcagttttgaaacactcttttagcggaatctgcaagtgtttatttggagcgcatgaggaatatggtggaaaaggaatcttcttcacatgaaaacgagacggaagcattctgagaaacttctctgtgatggatgcattcatttcacagagttaaacctttcctgtgattgagcggtttggaaacagtagttttttacaatctgcaga

SEQ ID NO: 341186 - DNA, 559 bp, Homo sapiens
tttttttgattgagcaccttctaaacagtcattttgtagaatatgcaaaggaatatttgtgagcccattgatgcctctggggaaacaggaaatatcttcacataaaaacgagacagaatctttctcagaaacgtcttggtgatgtgtgcattcatctcactgagttgaactttactttgattgagcagtttggaaacagtcttttctagtatctgcaaatggatattttaagcactctgaggcctacggtgaaaaaggaaatatcttcaatataaatcagacagaagcattcatagaaacttctttgggatgtgtgcattcatctcaccgactagaacctttcttttgattgagcagttttgaaacactcttttagcggaatctgcaagtgtttatttggagcgcatgaggaatatggtggaaaaggaatcttcttcacatgaaaacgagayggaagcattctgagaaacttctctgtgatggatgcattcatttcacagagttaaacctttcctgtgattgagcggtttggaaacagtagttttttacaatctgcaga

SEQ ID NO: 341187 - DNA, 559 bp, Homo sapiens
tttttttgattgagcaccttctaaacagtcattttgtagaatatgcaaaggaatatttgtgagcccattgatgcctctggggaaacaggaaatatcttcacataaaaacgagacagaatctttctcagaaacgtcttggtgatgtgtgcattcatctcactgagttgaactttactttgattgagcagtttggaaacagtcttttctagtatctgcaaatggatattttaagcactctgaggcctacggtgaaaaaggaaatatcttcaatataaatcagacagaagcattcatagaaacttctttgggatgtgtgcattcatctcaccgactagaacctttcttttgattgagcagttttgaaacactcttttagcggaatctgcaagtgtttatttggagcgcatgaggaatatggtggaaaaggaatcttcttcacatgaaaacgagacggaarcattctgagaaacttctctgtgatggatgcattcatttcacagagttaaacctttcctgtgattgagcggtttggaaacagtagttttttacaatctgcaga

SEQ ID NO: 341188 - DNA, 559 bp, Homo sapiens
tttttttgattgagcaccttctaaacagtcattttgtagaatatgcaaaggaatatttgtgagcccattgatgcctctggggaaacaggaaatatcttcacataaaaacgagacagaatctttctcagaaacgtcttggtgatgtgtgcattcatctcactgagttgaactttactttgattgagcagtttggaaacagtcttttctagtatctgcaaatggatattttaagcactctgaggcctacggtgaaaaaggaaatatcttcaatataaatcagacagaagcattcatagaaacttctttgggatgtgtgcattcatctcaccgactagaacctttcttttgattgagcagttttgaaacactcttttagcggaatctgcaagtgtttatttggagcgcatgaggaatatggtggaaaaggaatcttcttcacatgaaaacgagacggaagcattctragaaacttctctgtgatggatgcattcatttcacagagttaaacctttcctgtgattgagcggtttggaaacagtagttttttacaatctgcaga

SEQ ID NO: 341189 - DNA, 487 bp, Homo sapiens
ccaccttaattgtttctctattggaaaagtttgtgaagcaaacactagtaaaaaaatcatatgaatatgagctaggaggctaagattcaactggggagtaatgaattcaataactaaatcattaatatgttccacaagtcataaattaactagtcaaaatttcataatcataatgccttaaagctaacattataacaaaattcttaagaattcagagtatttgtttcaaaataaaatcaatacaaaaaaatatagattttacatttacataatkagaatcccattttaaaatccaagaaaacatccatcaagcactaattataactgcctttgattgaaaaactgcacatttgttaaacgcatttaagctgacatcataccacaatagcaaaaagtgttgtggttgcgtgaacgattctcttcctatagatagcaattagaaaatattaatacaacatacaacataaaaataattatttaaatacac

SEQ ID NO: 341190 - DNA, 487 bp, Homo sapiens
ccaccttaattgtttctctattggaaaagtttgtgaagcaaacactagtaaaaaaatcatatgaatatgagctaggaggctaagattcaactggggagtaatgaattcaataactaaatcattaatatgttccacaagtcataaattaactagtcaaaatttcataatcataatgccttaaagctaacattataacaaaattcttaagaattcagagtatttgtttcaaaataaaatcaatacaaaaaaatatagattttacatttacataattagaatcccattttaaaatccaagaaaacatccatcaagcactaattataactgcctttgattgaaaaactgcacatttgttaaacgcatttaagctgacatcataccacaatagcaaaaagygttgtggttgcgtgaacgattctcttcctatagatagcaattagaaaatattaatacaacatacaacataaaaataattatttaaatacac

SEQ ID NO: 341191 - DNA, 577 bp, Homo sapiens
aactacacaatcaagtctgtatataaaccatttatcagtatgatgataggatcaaattcacacatatcaatactaaccttgaatgtaaatagagtaaaaactacacttagaaggcacagagtagaaagttgtataaagaagaaagatgcaactatatgctatttcgtcttcaagagatctactgtacmtgtaatgacataggtttaaaacgaacaaatggataaaaatttactgagcaaatggaaactaaacagagccaaggttgccattctagtttcagacaaaatagtctttaaaccaacaaagatcaaaaaagacaaagaaggcaattatataatgataaatgattcaattcaacaagaagactttactatcataagtaaacatgcacccaacactggagaacccagatttataaaacatgtttttagggacctataaggagatttagataaccacacaataatgctgggagaatttaacataccactgacagtatcagacagatgattgaggaaagaaaactaacaaagatattagggatctcaacttgacacttgagcaaatggacctagca

SEQ ID NO: 341192 - DNA, 585 bp, Homo sapiens
accactgacagtatcagacagatgattgaggaaagaaaactaacaaagatattagggatctcaacttgacacttgagcaaatggacctagcagatgcacagaaaatgccacccaataacaagagaatatacatttttgccatctgcacgtggcacataccttaaaatagaccacatgctcagctataaaaacaattaacaaactcaaarcagccaaaatcataccaaccagtcttggataacagcacaaaaaaatagaaaccaatactaggaagatctctgaaaaccatacagttaaatagaaattaaacaactactactgaatgacttttgggtaagcaatgaagttaaggcaaattcaagaaattatttgaaactaatgaaaacaacaaagacacaacataccagaatctcttgtacacagctaaagcagtgttaagagcaaagtttatagcagtaaactccctcatgaaaaaataggaaagatctccaattaataatgaaatattacacctagaggaactagaaaaacaaaagcaaagcaaatccaaagctagcagaagaaaataaatgacaggaatcagag

SEQ ID NO: 341193 - DNA, 289 bp, Homo sapiens
tttgtatgtccataagacacaagatataattggaaataagtagcaaatacatatttaaattatctccaacatttgaaaataataaaaagtgacttaaagttattcatcagtaaaataagttaacacaatgaatataataaaatgcttaaaattacattaatggtaacaaacatactatcaaaacttagatggaaaatcaatagtacataaatattgtttagctttaaatgctttcccatgtacatargaaagattgaacagtgaaggcctagaaattcaatcaagctgc

SEQ ID NO: 341194 - DNA, 607 bp, Homo sapiens
aatacaaaagtttaatacaaaccaaatagatcatacctgagatttttcaaattgctttcaaaattaaacaaagttgcttctcaagaggttggactgctmttcattttgcctttttattgaaaaatgcattatgatgttttttgtaaaacatgaaattgcatgtgattgatttattatgttttctattcagctaaattgaggctaaatagttagcagtagtctttcttgatggtaccgtgcaaataatattatcctacatttcttacagtaaatgaataatttgtagtaaattggattattcacaaatttgtatgtaagggagttgggttataatatggaatgaattatcattgtgctttgaggaagtctgagtaaattatagggacttttagttatattgtaagatacaaaaacaggtttaaatacattaaatttaagagcagtgcataagattgcaataagaaaagaaagtcatatccataagaggaatatataaattaccaaaggaaaactacgtcatttgatatagtataataccaaatactttattttaaatagtgaactctaaataaaataagtagatgcaatttaatgattgccttgaagg

SEQ ID NO: 341195 - DNA, 593 bp, Homo sapiens
aaatagtagtttaacaaagaaaataaaatcatgtgaagttgatatattttctagtttacaaatctatccacaagagatatgttctaaggatggaaataggcaataaaccatttaaaaataaatgaaaagttaaaataaatatagcaataaattgttaggtagaagataaccagaatggagaaataataactttagttatctcagctgaagtatgtgggttatgatgtgcttggggaacaacttttcagtctaaaacaacaacaacaacaacaacaaaataggtggtgcaactacctaaagaaaagataggctgggtgtgtctgaagaaaatgtggctctgctataatgaacaaggtgaagaacactaatatattcagaataaaataaaggaaattaccagcagccaaaaccagaggtagtcaagaacctgatagttaagcaggccttaaatgtaatgggtttctgggaacttgacatttattgagatgtctctagatcttcygataatagaattagcagaattacagtataaagtaatgcttattctcaaacacatgaaatacagctgtcgatgccaagtaaagagttgatta

SEQ ID NO: 341196 - DNA, 645 bp, Homo sapiens
gtcataaaatatttatgagtcagattcaaaaggcatgcagattaagactagaggtcacaaaagccaattaagtaattaagaaatatcgctgcagaatacattatataatgtatcaaatgttgytatcatcaaaatggtcctcataaaaagtatgtgatttgggttataaatattaattacttttatacaaatatgataaaaatttaaaagtaggagaaaagtctgcctacttttaaaatagaaacaaatatttgatttgcaagaaattcagagagtttaaaaaataaacagctaggacataccaggaaatgaataaatgccagtacctaattcaaatatgaatagaaaattaatataaaaataagcttattgagtcagaaagatggccttctttcctgtccttaattttctcttttagaatataaatttcctttttggaatataaatcacagctttatattctgtgattttgccctatgcccacagcacgttcaagaattgccaggccctcccaatgtcaatgaaaaaatacgtgcaaaatcacatttgttgttctcatagtgttatttctcatacccccaaaaggaatgtattagtcattgggaatgctatacatataaagtaaataaaataatgaataaattt

SEQ ID NO: 341197 - DNA, 583 bp, Homo sapiens
ggtttccatttccatgcaaatggaaaacaaaaaagagcagaagtcactaatcttatatcagataaaacagactttaaattaacaacagtaaaagaggatccagtaagccattatataataaagagtttatagttcaacaagaagacttaaatatccgaaatatatgtatgcatccaacattggaatgctcgaattcatagaacaagtacttctagacctacaaaaagacatatagctccacaataacagtgtgggaattcaatatcccactgaaagcattwgtttatcaaggcaaaaaactagcagagaaattctggacctaaactcaatactttattggaccaaatggacagctacagaatactccacccacaaccacagaatatacatttttttcaactgcacatggaagatacactaagatcaaccacttgctcagtcataaagaaagtcttaataaattcataaaagcaaaaccatatcaagccatactatcaaagacagtaaaatgaaagtaaagatgaataccaagaaggtctgtcaaaaccacactagcacatggaaagtaaacaatttactcttg

SEQ ID NO: 341198 - DNA, 561 bp, Homo sapiens
ccaacacggttgcaaaactggatggagaatgagattgatgaatttacagaagcaggtttataaaaygggattatatcctggataatatcctgaaggtgggtaataacaaactcctctcagctaaaggagcatttcctaacccaatgcaaggaagctaagaaccttgataaaaggttacaggaactgttaaatagaataaccagtttacacaggaacataaatgacctgatgaagctgaaaaacacagcacaagaactttgtgaagcatacacaagtatcaatagccaaatcgatcaagtggaagaaaggatatcagagattgaaaatcacctcaatgaaataaggtgtaaagacaatattagagaaatacgaataaaaagggatgaacaaagcatccaagaaacatgggactatgtgaaaaaaaaaaaatctaagattgattggtatacctgaaagtgacagggagaatggaaccaagttggaaaacacacttcaggatattatccaggagaatttcctcaacctagcaagacaggccaacattcaaattcaggaaataca

SEQ ID NO: 341199 - DNA, 561 bp, Homo sapiens
ccaacacggttgcaaaactggatggagaatgagattgatgaatttacagaagcaggtttataaaacgggattatatcctggataatatcctgaaggtgggtaataacaaactcctctcagctaaaggagcatttcctaacccaatgcaaggaagctaagaaccttgataaaaggttacaggaactgttaaatagaataaccagtttacacaggaacataaatgacctgatgaagctgaaaaacacagcacaagaactttgtgaagcatacacaagtatcaatagccaaatcgatcaagtggaagaaaggatatcagagattgaaaatcacctcaatgaaataaggtgtaaagacaatattagagaaatamgaataaaaagggatgaacaaagcatccaagaaacatgggactatgtgaaaaaaaaaaaatctaagattgattggtatacctgaaagtgacagggagaatggaaccaagttggaaaacacacttcaggatattatccaggagaatttcctcaacctagcaagacaggccaacattcaaattcaggaaataca

SEQ ID NO: 341200 - DNA, 590 bp, Homo sapiens
aagttaggacacactatactatttgaccctgtgttacatatgaaaaagaatttttaagtaatctagtttatagtttcttaaatgttggcatttaaaatattttaacagtatcaaataaaaatattttgaagaacaaatattttatgtgcaagcttctttaaacaaataataaaatctgtcccaaataaacagaatttattatgaacaatatatawgaaagcagaaaggcatgaactatcaacctaattgtaaagtcagagctgaactttattcaggtatatatccaatttttaacttttgaaagtgattgcatcttgatttgtcataataagtacagactttctatttttgactggaattatagtaattaagctataattaacttgtgaagataatagtggctagagtcatttatttatgaataaaacatgaaaattggcttcaagataaggcaacatattcttcacacacaagttttatttaaactcatttatgtttttatttgcaaatcagcccaccataaatggggcccctacaacaaaaggctgtggaatctggctcagttgcaatatagcatgcatcctatttgt

SEQ ID NO: 341201 - DNA, 590 bp, Homo sapiens
aagttaggacacactatactatttgaccctgtgttacatatgaaaaagaatttttaagtaatctagtttatagtttcttaaatgttggcatttaaaatattttaacagtatcaaataaaaatattttgaagaacaaatattttatgtgcaagcttctttaaacaaataataaaatctgtcccaaataaacagaatttattatgaacaatatatatgaaagcagaaaggcatgaactatcaacctaattgtaaagtcagagctgaactttmttcaggtatatatccaatttttaacttttgaaagtgattgcatcttgatttgtcataataagtacagactttctatttttgactggaattatagtaattaagctataattaacttgtgaagataatagtggctagagtcatttatttatgaataaaacatgaaaattggcttcaagataaggcaacatattcttcacacacaagttttatttaaactcatttatgtttttatttgcaaatcagcccaccataaatggggcccctacaacaaaaggctgtggaatctggctcagttgcaatatagcatgcatcctatttgt

SEQ ID NO: 341202 - DNA, 550 bp, Homo sapiens
gttggatttattagctttgctgyttcccttctttttacacaagaaataattctagtttttcatgtttgcattcttcacttaagttaaaaatattacacacacacacacaaagacacatcttacttcttaaaaccccatatgtactctaagaatattttgagaaaggagaaatcagttccacttaatttcattcaataaccaatggttagttatcaaatagatagaataagggggaaactctgttttctttgtgattaaaacacaacataaacttaacctctttataaaattgtattaaagtgaaatacttttctacatttagtcatctgaattaaaacaaattttcttgataacaatgttcttccggtcagctattgtcccttattatgtgtcatattcgtcataaatgtaatgcaatggctctttaattatataaatttaaaagtcaagactggagctgaaagggaaatctaaaaataaatttcaaaaatttaagtggtttaattttgtgagttttctcttagtaaagagactatcccaaatattaata

SEQ ID NO: 341203 - DNA, 550 bp, Homo sapiens
gttggatttattagctttgctgcttcccttctttttacacaagaaataattctagtttttcatgtttgcattcttcacttaagttaaaaatattacacacacacacacaaagacacatcttacttcttaaaaccccatatgtactctaagaatattttgagaaaggagaaatcagttccacttaatttcattcaataaccaatggttagttatcaaatagatagaataagggggaaactctgttttctttgtgattaaaacacaacataaacttaacctctttataaaattgtattaaagtgaaatacttttctacatttagtcatctgaattaaaacaaattttcttgataacaatgttcttccggtcagctattgtcccttattatgtgtcatattcgtcataaatgtaatgcaatggctctttaattatataaatttaaaagtcaagactggagctgaaagggaaatctaaaaataaattycaaaaatttaagtggtttaattttgtgagttttctcttagtaaagagactatcccaaatattaata

SEQ ID NO: 341204 - DNA, 569 bp, Homo sapiens
acaaagggaaggaggaacatgagggaagatggaaaaatagaagagtagataaatctaataagccaacattgagaggcaactatttatgaatctctctggtttcttgtcattttgcagaaacattgactgcttttgttctagactgtctttttaacgaagtttgtttagtagttaggaagacaaagtgtctaaccatggagtagsctgacttactacccattataaaatattagtttcctaaatgaatgatttctttcatataatgtgtaaacagttacatttacaggcatccatctgggttcagctgggttgctctcaagagacttaatggcaaaggggactgaggaaatacacggatgctcatgctgtttgcattatcataaagcaataaaattccatgtctctgaaccatgagtctcatgtgtgttctgccagcatctataaaaccgtagccacctaaactgttagcttgcaagtcgaataaaatcacaaatctttcccagatcttgacaattttagctatgaagatggaatactgacatagataaacatttatgaaaaaggaagaa

SEQ ID NO: 341205 - DNA, 569 bp, Homo sapiens
acaaagggaaggaggaacatgagggaagatggaaaaatagaagagtagataaatctaataagccaacattgagaggcaactatttatgaatctctctggtttcttgtcattttgcagaaacattgactgcttttgttctagactgtctttttaacgaagtttgtttagtagttaggaagacaaagtgtctaaccatggagtagcctgacttactacccattataaaatattagtttcctaaatgaatgatttctttcatataatgtgtaaacagttacatttacaggcatccatctgggttcagctgggttgctctcaagagacttaatggcaaaggggactgaggaaatacacggatgctcatgctgyttgcattatcataaagcaataaaattccatgtctctgaaccatgagtctcatgtgtgttctgccagcatctataaaaccgtagccacctaaactgttagcttgcaagtcgaataaaatcacaaatctttcccagatcttgacaattttagctatgaagatggaatactgacatagataaacatttatgaaaaaggaagaa

SEQ ID NO: 341206 - DNA, 617 bp, Homo sapiens
ctttgtggggccgaggcagacggatcactttaggtcagaagtttgcgaccagcctggccaacatggtgaaaccccgtctctactaaaaatacaaaaattagctggaaatggcttgaatccgggaggcagaggttgcagtgagccgagatcatgccactgcactccagcctgggtgacagagcgagactctgtctcaaaaaaaaaataataataataataaaagaaaatgtttcaggtattatctcacaattcagagctaaacaaaaacattaaagttaaaaatacatttttcttccatttttgggtcaaatgcatttaaaygtatttgagctcatgctctgcatattctctacaagtgattgtgtcttttttcatttgaacctacagtataaacattttcaattgctgtcttattcaacttgaactgttataacaaactactatagactggtggcttaaacagaaatttatttctcaaagttttagaggctggaagtttgataccaggatgccagcatggttgggttctggtgatggccctatcttgggtaccagcctgcagatttcttgcatcctccttatgtagcacagagagagcaagagagcccattggggtc

SEQ ID NO: 341207 - DNA, 617 bp, Homo sapiens
ctttgtggggccgaggcagacggatcactttaggtcagaagtttgcgaccagcctggccaacatggtgaaaccccgtctctactaaaaatacaaaaattagctggaaatggcttgaatccgggaggcagaggttgcagtgagccgagatcatgccactgcactccagcctgggtgacagagcgagactctgtctcaaaaaaaaaataataataataataaaagaaaatgtttcaggtattatctcacaattcagagctaaacaaaaacattaaagttaaaaatacatttttcttccatttttgggtcaaatgcatttaaacgtatttgagctcatgctctgcatattctctacaagtgattgtgtcttttttcatttgaacctacagtataaacattttcaattgctgtcttattcaacttgaactgttataacaaactactatagactsgtggcttaaacagaaatttatttctcaaagttttagaggctggaagtttgataccaggatgccagcatggttgggttctggtgatggccctatcttgggtaccagcctgcagatttcttgcatcctccttatgtagcacagagagagcaagagagcccattggggtc

SEQ ID NO: 341208 - DNA, 370 bp, Homo sapiens
actggtccattacattgaagacattatgctgattggatccagtgagcaggaagtggcaaacacactggacttatcrgtgaaacatttgcatgccagaggacaggaaattaatctgactaaaattcagggaccttctacctcagtgaaatttctagggttttagtggtgtggggcatgttgaaatattccttctaaggtgaaggataaattgctgcatttggcccctcctacaatcaagaaagaggcacaatgcctagtgagcctgtttggattttggaggcaagacattcctcatttggatatgtttgttactctggcccatttatcaagtaacatgaaaggctgggagttttgagtggggtccagaaca

SEQ ID NO: 341209 - DNA, 370 bp, Homo sapiens
actggtccattacattgaagacattatgctgattggatccagtgagcaggaagtggcaaacacactggacttatcggtgaaacatttgcatgccagaggacaggaaattaatctgactaaaattcagggaccttctacctcagtraaatttctagggttttagtggtgtggggcatgttgaaatattccttctaaggtgaaggataaattgctgcatttggcccctcctacaatcaagaaagaggcacaatgcctagtgagcctgtttggattttggaggcaagacattcctcatttggatatgtttgttactctggcccatttatcaagtaacatgaaaggctgggagttttgagtggggtccagaaca

SEQ ID NO: 341210 - DNA, 370 bp, Homo sapiens
actggtccattacattgaagacattatgctgattggatccagtgagcaggaagtggcaaacacactggacttatcggtgaaacatttgcatgccagaggacaggaaattaatctgactaaaattcagggaccttctacctcagtgaaatttctagggtkttagtggtgtggggcatgttgaaatattccttctaaggtgaaggataaattgctgcatttggcccctcctacaatcaagaaagaggcacaatgcctagtgagcctgtttggattttggaggcaagacattcctcatttggatatgtttgttactctggcccatttatcaagtaacatgaaaggctgggagttttgagtggggtccagaaca

SEQ ID NO: 341211 - DNA, 569 bp, Homo sapiens
tttgtttatgctattgaatatcatcattccaatgtgctatattatttacctaagtagaaatttatatcagttcaggatagtggtattttcttactgagtgtctcttcatttactgtgaagaatacctgtgagctgtgcagtactctactactattgataargcaatgaacaaaatagatgacttacttggttttacagagtaaaagtaagagaattctataccacagattgtgcaatgtaaatttgcagacatttttaacctgtttattcacaaatttaaggataccttgaagtagcaatagaatcactaaacagtagtaaaaatagaatatgcatgagaacttcaattcttttctgaaatagatttatgataataagggaaacaactagagactttaagctgagcaattctttaaccttgaatcttgttctagcttatattgtagcatgctattatcatattacagtttatcaacaaatgcagctggatgggtaaataatataagaagttattgaataatggagaaatacatgggtagagcagtcttggtgcctcttctaactgatca

SEQ ID NO: 341212 - DNA, 615 bp, Homo sapiens
tttcaccatatacaaagatcaactcagaatggattaaagacttaaatgtaagacctgaaattataaaacttctagaagaaaacatagggtaaatgattcacaacattggactaggcaaagatttttttggataagacctcaaaagcataggcaacaaaagcaaaaatagacaaatgagattacctcaaactaaaaatcttctgcacagcaaaagaaatatcaacatagtgaagagacaacctatagaatgagagaaaatatttgcaaacaatacacctgacaaagtgttaacatccagaagcgaaaacaactcaatacaaaaaaaaaatctaaattagaatggtcaaaaggccttaataagcatttttcaaaaggagacatacaaatgaccaagagctatatgaaaaaaatgctcaacatcaccaatcatcaaggaattgcaaatcaaaaccacgatgagatatcacttcattccagttagaattgctattatcaaaaagaccaaaaaaaatgtkggttagggtgtgggaaaacttgaacttttacacactattggtgggaatgtaaattagaacagccattatggagaatagtacggaggttcctcaaaaaact

SEQ ID NO: 341213 - DNA, 452 bp, Homo sapiens
agaatagcaaaaccactatctttaaggaaaaaatagataaactgaaggatactaaggtgaaaaacatttgttcttttaatcaaaataagtgaccatggtgagtctcattattttagaagacttatttgccaaggttgaggacacacctgggaraaaacatggatccacaggaaaaattgtggtgcatgctttttccaagagggcctgggggccttgatattaaaaggtaaaagggtggtgtattagcctgttcttgcattattataaagaaatacagagactgcataatgtataaagaaaagtggtttaattggctcacacttttcaggctgtacaggaagcgtagcagcttctgcttctggggaggccttaggagcttccaatcatgccacaggcaaagaaggagtaggaataacatgcttttgccctgtttccccacccaaatctcattt

SEQ ID NO: 341214 - DNA, 614 bp, Homo sapiens
agaaaagtggtttaattggctcacacttttcaggctgtacaggaagcgtagcagcttctgcttctggggaggccttaggagcttccaatcatgccacaggcaaagaaggagtaggaataacatgcttttgccctgtttccccacccaaatctcatttcaaattgtagtcttcacatattgagggaaagaccttgtaggaggtgattgattcatgagggyaattttccccatgctgttctcatgaaaatgagggatttctcatgaaatctgacggtttaaaagtgtttggctccctcactctctttcccctgctaccttgtgaggaaggtgtttgcttctcctttgccttctgacatgattgttaagtttcctggggcctgcccgccctgcagaaccatgagccaattaatgctgttttctttataaactacccagtcgctggtattttttagtaatgcaagaatgagctaatacataaaattggtaccatggattggggcaatgctataaagacatctataaatgtggacgcagctttgggactaggtaacagacagagtttggaagagtttagagggctcagaagaagacagcaagatgagggaaagtttgga

SEQ ID NO: 341215 - DNA, 490 bp, Homo sapiens
tcttcaggtattttacacacaaattatgtctttaaaaaatgaaaacgctggtgttttattgaggatttttgcatagatgttcatcagggatattggcttgaagttttccttttttgttgtgtctcttcctggttttgctataaggctgatgacgggtcaataggtgcagcaaacccccatgacacacgtattcctatgtaacaaacctgcacgtactgcacatgtatcccatttttttttagaagaaataaagaaaaaatgaaaatgccrttttaatttttactttgtgctccttatgacatttgtattttttcttgccttattgtactaacatattaggagacacagtagaaattctaaacttgttcttgctttttaattatcttgtttattcaaattttaatatatatagggttgttcacattttctattcctttgcattcatctttgtaagtagtgcctttcaatggatttgaccatctcatctaat

SEQ ID NO: 341216 - DNA, 565 bp, Homo sapiens
ttaggtttctgattttgggtattgatatacttcacttggtgtgttagttgtcactttttccaaaggaacacacgtagaatacaaagaatgaggtgtgtggtgagtatatatgcaaactttccacttttaattatacttttttcaaatamttaattatttgcatttaattattaaaattaccaagtagcattaattataaaaattctagcaagtagcatgatattttcagatcaagttctccatacatacctaatatcttacaaatgcatctgctagtcctaaaaaactggatttaatattttctcaaataataatgttatataaaattttctcaagaacttgtgcaaaaatttatatttgcaaataatattagatcaatattatagctcagataaatgttgctgtagctcagaaaaatattatactattaactatactaatacattgtagcaggacaagcctcagacaaaacccttcagacactggattaaagaaggaagaggctttattcagccaggagcgttggcagactagcatctcaagaacccagctctctgaagaaaga

SEQ ID NO: 341217 - DNA, 565 bp, Homo sapiens
ttaggtttctgattttgggtattgatatacttcacttggtgtgttagttgtcactttttccaaaggaacacacgtagaatacaaagaatgaggtgtgtggtgagtatatatgcaaactttccacttttaattatacttttttcaaataaytaattatttgcatttaattattaaaattaccaagtagcattaattataaaaattctagcaagtagcatgatattttcagatcaagttctccatacatacctaatatcttacaaatgcatctgctagtcctaaaaaactggatttaatattttctcaaataataatgttatataaaattttctcaagaacttgtgcaaaaatttatatttgcaaataatattagatcaatattatagctcagataaatgttgctgtagctcagaaaaatattatactattaactatactaatacattgtagcaggacaagcctcagacaaaacccttcagacactggattaaagaaggaagaggctttattcagccaggagcgttggcagactagcatctcaagaacccagctctctgaagaaaga

SEQ ID NO: 341218 - DNA, 565 bp, Homo sapiens
ttaggtttctgattttgggtattgatatacttcacttggtgtgttagttgtcactttttccaaaggaacacacgtagaatacaaagaatgaggtgtgtggtgagtatatatgcaaactttccacttttaattatacttttttcaaataattaattatttgcatttaattattaaaattaccaagtagcattaattataaaaattctagcaagtagcatgatattttcagatcaagttctccatacatacctaatatcttacaaatgcatctgctrgtcctaaaaaactggatttaatattttctcaaataataatgttatataaaattttctcaagaacttgtgcaaaaatttatatttgcaaataatattagatcaatattatagctcagataaatgttgctgtagctcagaaaaatattatactattaactatactaatacattgtagcaggacaagcctcagacaaaacccttcagacactggattaaagaaggaagaggctttattcagccaggagcgttggcagactagcatctcaagaacccagctctctgaagaaaga

SEQ ID NO: 341219 - DNA, 555 bp, Homo sapiens
ccaactttagaaaacagtttggtagttcctcaaaaaggtaaaagcaaaactaatatatgacccaagtataaktatgtatcaaagagaaatgaaaactcataagtatgtatctaagagaaatgaaaacatgtccacacagggacatacatgttcatagcagctttattcataatagccaaaaactagaattgatctaaatgcccatcaactggtcgatggatggacacagcatggatgctgatagaaaggcatactatttaacaataaaaaggaacaaactgctgcacatgctacttcatggataaatgtcataaacatgttaaattaaagaagccagatgcctagacaaagtactgtatggttcatttacataagacattcaaaagaggaaaatttatagaaacagaaaatagattagtaggttactagggctgggggtgagattggggatttattggtatgtgagatcttaatgggggaataagattgcttaaaaatcagtttatgttaacggtcccaccactcattgtagttactaaaattcacttgaaatga

SEQ ID NO: 341220 - DNA, 515 bp, Homo sapiens
caagctttacaggctggagaatatctgtcagaactactcaactttgcttttgtagctgtagggtaagaaagatgtattttccttacccactctaggcttatggctgaggyccctataacaaggaacagcttaacaaagtaaagacacacaaatgtacttaatataagttgtatgtgacatggaagccttcataaggaaaagaagacccaaagaaatagttaaacctatgtgttttttatggtaggtttgatgaagactggatagatgtggagaaatatgataggccctttggcctgtcatatttctgataataaattggaaaacttagtgaggtctgttcagattcttttctgtgaccttttgtctttgggcataaggatataaggacgctccttttatcttgcaattgggaaggtacttttcatgtaagggtctcctgacctgcttttgggaatgtcagaacactcttcaattgttctacggcctgatacagggcataggtagagaagaaaggt

SEQ ID NO: 341221 - DNA, 575 bp, Homo sapiens
ttaacaaagtaaagacacacaaatgtacttaatataagttgtatgtgacatggaagccttcataaggaaaagaagacccaaagaaatagttaaacctatgtgttttttatggtaggtttgatgaagactggatagatgtggagaaatatgataggccctttggcctgtcatatttctgataataaattggaaaacttagtgaggtctgttcagattcttttctgtgaccttttgtctttgggcataaggatataaggaygctccttttatcttgcaattgggaaggtacttttcatgtaagggtctcctgacctgcttttgggaatgtcagaacactcttcaattgttctacggcctgatacagggcataggtagagaagaaaggtgagagttatctttctgcctccgtgattttgctgaaatttcatcagcataaaatattaaatatgccacagtgctacattttggggtaacatgttctgaactccattatagagataacataaccataggcagaatgctttttaaaaaaaaatataagagcattctaataatacagtgttatttaaaaaaaa

SEQ ID NO: 341222 - DNA, 575 bp, Homo sapiens
ttaacaaagtaaagacacacaaatgtacttaatataagttgtatgtgacatggaagccttcataaggaaaagaagacccaaagaaatagttaaacctatgtgttttttatggtaggtttgatgaagactggatagatgtggagaaatatgataggccctttggcctgtcatatttctgataataaattggaaaacttagtgaggtctgttcagattcttttctgtgaccttttgtctttgggcataaggatataaggacgctccttttatcttgcaattgggaaggtacttttcatgtaagggtctcctgacctgcttttgggaatgtcagaacactcttcaattgttctacggcctgatacagggcataggtagagaagaaaggtgagagttatctttctgcctccgtgattttgctgaaatttcatcagcataaaatattaaatatgccacwgtgctacattttggggtaacatgttctgaactccattatagagataacataaccataggcagaatgctttttaaaaaaaaatataagagcattctaataatacagtgttatttaaaaaaaa

SEQ ID NO: 341223 - DNA, 611 bp, Homo sapiens
actaacttgttcctttttatttttgtgtcactaacacaacaagtaatggaaatttatatattgagtaaaaaaaagtagtaatagtagtattttcattggggtaaattatgattattttttaaaaatttccttaattgagttatttctgcatagcaacggaaggaagaaacagaatacccatgttgttcttaaaagaagacaatattataatacttggtaatatctaggggcttaatgcatcttgcaatatgatatgtatatagtttcatatgctgatttatcactttagttaggcaaaactatacaaaaattcattaaaaatattttagcattttttagaacatgagttgcaattttgcttggtatcaacrtagaaaaggcaagctaatagcaatatgggaatggttaatgcctgtacttaatacatatttgttgaaatagtgaatgacaaatagtatggcaaaatcatacctttgatataaaatgatatgggcaaatatagggtggaattgctatacttaattaaaatatatatatagccagttgattttttatgtaatagcttctgttttgtaaacaagtatcttattctactttttaaaactgtagga

SEQ ID NO: 341224 - DNA, 508 bp, Homo sapiens
ttctcagattccagctgatagtagctttattttagcatttgcttccaagatcaccttagcagaaggaaaagatgtgatcatttattctcaggctttgtaaaactacagtggaattgattcatgccgyttcaaacatttcattgaacaaagctgctactgtactctattttatactctatgctattcaaatcatttgataaatatgaggagagctagcattggccaggattggtaacaaattggatgaggcataaaagaaaaagtaaggaatcttagatgactccaaattctctagttcaaattggataggttgttaaactacaagtgcaaagaattagagaaaaagagaactaaaatacacagacttcagcttgtgtgagagaatctatcaggaattatgtgtgtgtgtgtgtgtgggtacacgtgtgttgggtatgtagcaggttttgtatcacagagtaaatgcttgactgacatttaacttaccactcctaatattaatgtgctt

SEQ ID NO: 341225 - DNA, 628 bp, Homo sapiens
caacaatttgagtacataacctttgatgtaaagaattattaatgagggattgatgacacaaaatttggtaagacttaaagaaaactaaaaagagagatagatagtactatattaggttgaaagcttgttccctccaaaactgacattgaaatttcattgctatgttagtagttttgaagggtgggacctttaagaggtgactaggytatgggggttctgccttcatgaatagactgatgccactatgaaaatgaactaatgggagtggtgggttctgccatgtgagaaacagtgtttctccctcccagaggatgcagcattaaaggtgtcatttgtggaactagagaccaggccctcaccagacacccaaccctgcctgcactttgatcttggacttctcagcctccagaactgtgagaaatacatttgttctttataaattgcccagtcacagaaattctgttatagcagcacaaaattaactaagacagatatagggagattagatagatagatagatagatagatgatagatagatgatagatagatagatagatagatagatagatagatagatttaaaaaaagaagatgtaagaggcagccattaacaatagaactgtaacag

SEQ ID NO: 341226 - DNA, 628 bp, Homo sapiens
caacaatttgagtacataacctttgatgtaaagaattattaatgagggattgatgacacaaaatttggtaagacttaaagaaaactaaaaagagagatagatagtactatattaggttgaaagcttgttccctccaaaactgacattgaaatttcattgctatgttagtagttttgaagggtgggacctttaagaggtgactaggctatgggggttctgccttcatgaatagactgatgccactatgaaaatgaactaatgggagtggtgggttctgccatgtgagaaacagtgtttctccctcccagaggatgcagcattmaaggtgtcatttgtggaactagagaccaggccctcaccagacacccaaccctgcctgcactttgatcttggacttctcagcctccagaactgtgagaaatacatttgttctttataaattgcccagtcacagaaattctgttatagcagcacaaaattaactaagacagatatagggagattagatagatagatagatagatagatgatagatagatgatagatagatagatagatagatagatagatagatagatttaaaaaaagaagatgtaagaggcagccattaacaatagaactgtaacag

SEQ ID NO: 341227 - DNA, 543 bp, Homo sapiens
tgctatgatctgaatgtttttgtccctttcctccaacccccaattcatactttgaaattctaatccacaatgtgacaatattaggcagtggagcttaggagaggtacttaggtcacaagagcagagcgctcatgaatggacgtagtgcccttttaaaacagactcaaaggagttaatttaccatttctgccatgtaaggacacagtaagaaggtgctatatacaaaccaggaaatgggcccttatcaagcatcacatctgccagcaacttgattctgaatttcccagcctccrtaactgtgagaaataaatttctgttgtttgtgagctacctagtctatagtactttgtaatagcagcctgaaccaactaaaaacaggtggtgttggtgaagtattatgtgggaagaaggcaattcatatcccaaatatacctatttaaataagagcaaatctctgcccttccatgatggaagaggtccaatctaatcaacagctatgaggatatttagcctaccaaggcaatgatgttaaatctagtcctg

SEQ ID NO: 341228 - DNA, 523 bp, Homo sapiens
ctatataggatatcaacctctatcatatttattactgcctrtctaactcaccttgtctctttttctctgtgatagttggtgtggtggtaaggtgtgtacggaagagtgatactctgcaatcctgtgattaggtctctgatttagtgagcctctggctgtgattttcaaatgtccttctcagcttttcattttgttttccatctttatgtgaaaatgaagactagaaggatctggagttgagttattttccttcctctactcaattaggttctgataaaacacatattgactagattttgataaaattgtttcttctgagggaagccctttgttaaagagaaaaaatatactgagcaatttcaaaatacccgaagcatgagatttttctctggtgttcatcttagaaacctgatggggttcctggaactaaaactagtgagcccttgtgactgggtcactgagtttttaattcccaagctagttcacaatgagccttcagcaatttgccctctcagttgaagta

SEQ ID NO: 341229 - DNA, 523 bp, Homo sapiens
ctatataggatatcaacctctatcatatttattactgcctgtctaactcaccttgtctctttttctctgtgatagttggtgtggtggtaaggtgtgtacggaagagtgatactctgcaatcctgtgattaggtctctgatttagtgagcctctggctgtgattttcaaatgtccttctcagcttttcattttgttttccatctttatgtgaaaatgaagactagaaggatctggagttgagttattttccttcctctactcaattaggttctgataaaacacatattgactagattttgataaaattgtttcttctgagggaagccctttgttaaagagaaaaaatatactgagcaatttcaaaatacccgaagcatgagatttttctctggtgttcatcttagaaacctgatggggttcctggaactaaaactagtgagcccttgtgactgggtcactgagtwtttaattcccaagctagttcacaatgagccttcagcaatttgccctctcagttgaagta

SEQ ID NO: 341230 - DNA, 626 bp, Homo sapiens
tgacagtcattgcttatgtggtaaatgttgtcagtgccaagaactatctggcatggctgccagctacaggtccattattttaattgcctttaacctataatcaatatttactgctttccatagaaagagactgcatagctaagcagtacaaaaagtgagtttattcttctgcatgttagtttttgcttttacatctaaaaggtagaattaaatgcttcctctgggtactacctttttttttwatcaaaactatctcctactacttattttgtgaaatgctcacatcatccaaatcatgtctatttcaaacaaagcaatttgaatttatgactgagactcaaattctgctttatcataaattacctacatctttttttttgtcattgtaagaaggtactgaattttaatagcatttgtggggaaatgcatgcttccaaatataaaatcttcaggattttcttggatattttggaaaaaagataagcctgcaggtaaaaatcaagagatcctaattgggaggaggcagaatataaaggctaggatgatggtttcatctttcgagcatgcaattttacaatggagagcctttgagattattcaactttagaatggcattacacaaatga

SEQ ID NO: 341231 - DNA, 520 bp, Homo sapiens
gtgggaccacccccaagacctcagaactctagagttaccaatatgcaatgccagcctaggagagstgcaggctcaagactccaatctatgacagctactgtgtaggccgagcccagcaaagccatgtgggcagggatgctggagccttcagggcctaatccccactccagtgtgccaagaaggtgggacatccagtcagagaatattattgtgaagccttaacatctgatattgtccaatctgttggatttgagacttacttgagaaagattactccctttcttttccttcctgtttctcatttttggggataggaatgtctatctatgtctatgcctgaactgccattgtattttggaaggacttactaaatttcataggcttacttacatctggagggaaagttgttggcatgagttaagaattttgaggctatttggatggaattaatgtattttgtatgtgagttggacatgaattttgggtacaggggaagaatgcgatagaatgtttctttcct

SEQ ID NO: 341232 - DNA, 628 bp, Homo sapiens
cactcatatgacttcattttaccttaattatgtctttaaaggccctatctccaaatacacccaaattctgaggtgctgggggttagggcttaataaatatacattttggaatggcacaattcagcctataaccctatggtttttgatgttttatttacctctgtttttctgtctgctctttttggaactccttttacttaagtgatgtaacttctggactgatactctaatagtcctccctcttccattttctacyaatttatccttctgttatatgtgtgaaaggactttctcaagtttatattttctccattctatttaattttttaactgttctagtatcatgttttcaatttccacagttcacttactctctcattttctctggattaaaaaagtactactttatcttttgatagatattaataatggatgttttaaaaataaaatttttttcttgcattgtctgtgtttcttaaacattttttgttgattctgtctcccttctaaatatagaggcttttcatctagtgcctcctgatccctgatcatagatgcatgtttcagagtgactcactgaagagctctgtgggtgggaagaacttttggacactgacattctctgtag

SEQ ID NO: 341233 - DNA, 558 bp, Homo sapiens
gccctcatttctttttctatattatgcagtttttaaaagctaagagatttacttgatataagaacaaaaagttacatttaggtcacattaatgtacagtcacgtgccatataaccatgttccagtcgacaaaaggccatacatatgatggtctcacaagattataatatcatatttttactgtaccttttctaattatagacatatttagatacacaaattccattgtgttacatttgcctacagtattcagtatagtaacatgttgcgcagatttgtggtttaggagcaataggctgtaccatatagcctaggtgtgtagtaggctctaccatctaggttcatgtaaggacactgtacgatgttctcacaatgaccaaattttccaataatgtgttaattgtaagcattgcttaacaccagggatatattctgagaaatgcatagttaggcgattttgtcattgtgggaacatcatagagtatccttacacaacctactacccaactaggctatatggtatagccgatygctcctaggctacaaacctgtgcagaat

SEQ ID NO: 341234 - DNA, 599 bp, Homo sapiens
acaaaccttttgtttgttgcctcagaatttctttacctggtggtcttctcctttttcttttcaactctaagtgctaatcatgaatccctagttaagccccaccttctccatccacacttcccaggtctctggcttcttcctcttgtatcagtgcttcacaaacttaactgaatataggacttagcctaaaaaaaattggtacttcagcctcacctccagctcccagagatgtgtatttaatttgtctggggcatgttcctggtacttggatttttaaactctccccagatgattctagtctgcagtgaaagttaacaaacactgtcatatgcatttcarttataaatcacctgaacagtttatcaagcaatttaataagacacataccacctttgtgatgttcatatattttatgaataaaagattttttctgggggtctcatttgcttctgtataaatgttcaaatatttgtgaactactggggtcatatgtaaaattattatatttttactatactgtataaaaacaaaataatttgaatcatcaataaacatttctcttttaagtgtgtaattatgcaaattatgattcaaatctc

SEQ ID NO: 341235 - DNA, 546 bp, Homo sapiens
gtgattaactgtttaattggttgcctgagtttagagtgtcctaaggagtacatacttagatcaggcacagtggcccacacctgtaatcccaacactttacgaggctaaaatgggagactcccttaaaaccagaagttcaagaccagcctgggcaatatagtgagatcccatctctaaaaaagaaaaaaaagaaagaaaagaagtacatatttaaggataacatgcaaactgcaacaaagaaaattaattacaggagaaaacaaatctagcactaggtattgtaacatgtacattcaaaagtccaaagcaaagagtattaataaaagaaaacaaaaaccttagtaactataaagttaaagtcactgtaaggtcagcacgactgacagagttgacaatcattccttctccaatgtgtaaatgaacacggagtaatagcacatcagtagtatgaaggggaactttgagaggctttgtatagtgtgatttaacatttgctattgtataaaarggggcatggttgtaaatatgaggtctaatattcattgt

SEQ ID NO: 341236 - DNA, 583 bp, Homo sapiens
tgcctgttattatttggctttttagtaatggccattctgactggtgtgagatgatatctcacggtggtttagatttgcatttctctaatgatcagtgatgttgagcttttttctgctgaaaagtgtctattcatgtcctttgcccactttttaatagggttgtttgtttatgagacaacgttcccaccatgctcccagctctccaggcaagtctattgtatagtggattctaatttcttgattggatcttgactcgtaaaagtcaaaaagatatttaaaagttctaatttttaaaaaataatggtcaaaaaatatctcagaaaaagatgtcccagcargaattccttgtctgcagaaatcctcaaggtctttaatatgctaaagtacagtgtagatttcaaatagagaaatattgtgtgcagcatgtccctagttatttttcaaagaaccattttgtttgcttgtgttgttttattttgttttccatggaatatctacaaatacctcacggaagtagtgttacataaaacataattttcaaatgtcgatcaagataagctatgtatagtttgaaaattctgta

SEQ ID NO: 341237 - DNA, 543 bp, Homo sapiens
aaggggttttttagttgagtggccactgacagctcctgtgagttcagcattccagggagagagagggtcaagaatgtgcctggctgacttaatccaatcctaactccttaatatacattcaagctccttcaaaagtaaccacttatatcattgtcctctccagtggcttcccaataatacacattacagcccagctatactggacttcccacacttcctagaacatgtcatgccctcaaatatgtgcatgcagataagttcttacagtgacattttatgtgctctcaaaaaaaaaaaaatggttgctgtcatgaccaactgctgtttcctcttcccaccatatttctcccttcatcatctccccttatccttaagggactcatataaaacatcatcttctttctgaattctcaaatgggacaaatttctcttgtatcattatagtttatttatgaaagtttttctcaaagtgtaacwtaagaatgtatattcaggagccaatactgtccccaggagccatgagtccctgagactcatgtttta

SEQ ID NO: 341238 - DNA, 651 bp, Homo sapiens
ggggtaactgcatttattttctatttttcacatggaagaccttcaaatatttaaagatgtattgttattgagtttccactttcctaggatatacatggcagtcccttaatcaagttcatgtttgaataaaaacctagaggatgtgaggaaactagccatatgaatacctggagtaagagcatcctagacataattatgtttataaaacatgatttctgaatccctcactgttgcattgcccttttcttttcttgctcataaggttaatgatgccagtgacatctgggctttgcagagagactgacctaggcctgaggacttgatggtcacttatgaattgtgcagtcttggggatgttgcttaatttatgtaagatttgtttcctcatctatgaaatatgactaagtaagacgtatttcatgggccaattttgaggaatgactaagatcacatagataaagcacttggcatagtatctaagatatattaagtaggcagcaaatatatatgtaattattctacttttttctctgagctgatcatctgaccaagtggctgcaygtacaagttcgacaagttaagtttatgtggaccttgcagtgtaacactgctataaaaattcaacaaacaatgcgaaattctaatagtaag

SEQ ID NO: 341239 - DNA, 596 bp, Homo sapiens
tataacatggtcttcattctgatctgctttaaggatcatcaatgcgttcatgttcacttcaaaactgtaccttctttattaatctattcaaaaataatatttcattatcactttttaatcaattcaatggtgcacttttcagtgttttaacatttttgaactaggmatgaacagaaaaaattgacaatatgtcatagttaaattgatagagctaattaaattttattgtgaaagaaaataatggtgcgtgcagctcacaagtttaattgacagagcttattaaatcttattgtgaaagaaaattataatatatgcagctcagaatatatgaaggtcttagaagcttgaagacatgaggttaagtacctagaatttgactattttttccactgtcaagccaagttgtgatcattaaactaaaaagaaaattccaatattctctattccagtatcacagaatataatacttgcattttgtctcttctagacataccaagataaatgttccacaaagggaagtcaaaattttccatacaaaagaaaaccagagtaaactgctatgcctggatttctaaaactacttaaacaaatggcta

SEQ ID NO: 341240 - DNA, 452 bp, Homo sapiens
tcaacacaacaagggtcatatatgagaagcctacaggtaacatcacatctaatggtgaaaagcagaaagtgtttcttctaaaataccagcaggataaagatgtccactcacaccacttctgttcaacataggacaggaagccctagccagagcagagtcaagagatagaactaaaagccatccaaatcagaaataacaaaggaaaattatttctgttaactgaaattgtctcagttagagattatacggaaaattctaaagtcttcatcaaaacactgctagaactgatacattagttcaatacagttgcaggatacaaaatcaamttacaaaaatcagtagcatttctataaaataacaacaaactgtctggaaaagggatttaaaaaaccatcttacttacaaagcatcaaaaaaaaatacttaggaataaatttaaccaaagatgtaaa

SEQ ID NO: 341241 - DNA, 591 bp, Homo sapiens
ttatagggtaatttagagggtaacttgtccgctagcacatacatgggcagctagacctggcattctgacccatgacatttgactttgtgtcctgtgtttaaccacatcaatatatatctgtcatgagttgtccaaaccatggggtatgccgtagatcactccagattggttatttgtttctatattttatcctctattttcccttcaggaaacactatatgctttttgtcagtcatggtgttaatggcacaatagaaatattccaaaaaatcaacccaggaagcaaaaatgaacaaatgtttatagaatarcagataagctctaacaatttttaatgcatattatttaatgtactgagcagctagaattcatacagtcagttcccaactaaaatggtaaacaattaagatcaagtgcatgctgccttctgcatttttgaaaaaatcataatgggaggcagattagaccaagaaaaggcaaacattttaagaaaattgctgcttaagaacttccatccaccagtaaaggagctgctgctgtagtcaaaagccacataaaaatattagtttccaaacctatgtaatagacaga

SEQ ID NO: 341242 - DNA, 591 bp, Homo sapiens
ttatagggtaatttagagggtaacttgtccgctagcacatacatgggcagctagacctggcattctgacccatgacatttgactttgtgtcctgtgtttaaccacatcaatatatatctgtcatgagttgtccaaaccatggggtatgccgtagatcactccagattggttatttgtttctatattttatcctctattttcccttcaggaaacactatatgctttttgtcagtcatggtgttaatggcacaatagaaatattccaaaaaatcaacccaggaagcaaaaatgaacaaatgtttatagaatagcagataagctctaacaatttttaatgcatattatttaatgtactgagcagctagaattcatacagtcasttcccaactaaaatggtaaacaattaagatcaagtgcatgctgccttctgcatttttgaaaaaatcataatgggaggcagattagaccaagaaaaggcaaacattttaagaaaattgctgcttaagaacttccatccaccagtaaaggagctgctgctgtagtcaaaagccacataaaaatattagtttccaaacctatgtaatagacaga

SEQ ID NO: 341243 - DNA, 591 bp, Homo sapiens
ttatagggtaatttagagggtaacttgtccgctagcacatacatgggcagctagacctggcattctgacccatgacatttgactttgtgtcctgtgtttaaccacatcaatatatatctgtcatgagttgtccaaaccatggggtatgccgtagatcactccagattggttatttgtttctatattttatcctctattttcccttcaggaaacactatatgctttttgtcagtcatggtgttaatggcacaatagaaatattccaaaaaatcaacccaggaagcaaaaatgaacaaatgtttatagaatagcagataagctctaacaatttttaatgcatattatttaatgtactgagcagctagaattcatacagtcagttcccaactaaaatggtaaacaattaagatcaagtgcatgctgccttctgcatttttgaaaaaatcataatgggaggcagattagaccaagaaaaggyaaacattttaagaaaattgctgcttaagaacttccatccaccagtaaaggagctgctgctgtagtcaaaagccacataaaaatattagtttccaaacctatgtaatagacaga

SEQ ID NO: 341244 - DNA, 610 bp, Homo sapiens
tgattagctcccattaataagtgagaacacatgctatttggttttccattmctgtgttaatttgcttaggattacggcctccagctgcatcccagttgctgcaaaggatatgatttctttttatggctgcatagtattccatggtgtgtgtgtaccatgctttctttatccaatccaccattgatgggcacctaggtttattctatgtctttgttattgtcaatagtacagtaatcagcatgagtccttatgtctttttcattagaataatttattttttctttggttatatagccagtcatgagattgctgggttgaacagcaactctggtaagaactttgagaaatctttaaactcctttacacagtggctggactaattcacattcccactaatagtgtataagtgttcccttttctctgaaggcttgccagcatctgtaatttgactttttaataatgatttaacattttgactgatgtgagatagtatgtcactgtggttttgatttgcatttctctgatgattaatgatattgaatacttttctatgtttgttggctgcttatgtgtcttcttctgagcactctgtttatgtcctttgctcatt

SEQ ID NO: 341245 - DNA, 610 bp, Homo sapiens
tgattagctcccattaataagtgagaacacatgctatttggttttccattactgtgttaatttgcttaggattayggcctccagctgcatcccagttgctgcaaaggatatgatttctttttatggctgcatagtattccatggtgtgtgtgtaccatgctttctttatccaatccaccattgatgggcacctaggtttattctatgtctttgttattgtcaatagtacagtaatcagcatgagtccttatgtctttttcattagaataatttattttttctttggttatatagccagtcatgagattgctgggttgaacagcaactctggtaagaactttgagaaatctttaaactcctttacacagtggctggactaattcacattcccactaatagtgtataagtgttcccttttctctgaaggcttgccagcatctgtaatttgactttttaataatgatttaacattttgactgatgtgagatagtatgtcactgtggttttgatttgcatttctctgatgattaatgatattgaatacttttctatgtttgttggctgcttatgtgtcttcttctgagcactctgtttatgtcctttgctcatt

SEQ ID NO: 341246 - DNA, 567 bp, Homo sapiens
acctatggttttcaaaaccaccaacttaggtgtgatctagagaatcaagaaattgctacggttacttataaatcaggaaatggaaccatggccaattgccacagctgccctgcagtaaaaaggcagatgattggcaggaagaaaatcatacttattaaagttcaaatgtctgatgccactgctgaagaaaaaataacacctgctgccccctttctgtcttccaaatattgtgcaagagcatgagcaagtatcaccgagaatgccaacaccctaaaatgaaatggaaacagacaagcaggaggaagaggaagcgaactggaagagaagaaaggaggggagaagaaaagcaagragctcaaaacaaaacaatgaaaatctagcacatacagtttgtccttatgaaaaagtaaactctatgttatctttaactttcctcttacctcaaatagggagaagatgaaatttccaatcaacttcacagtactgttttaaagagacagaatgaccaggtgagtgtaatgctgatgtcaactaatgtaatctgtcctctgaaatttaaaataaatt

SEQ ID NO: 341247 - DNA, 615 bp, Homo sapiens
atctaccatgccacatcttgaacagcagatgaatttacattcagagacacatggatcattaaaagattctttarcaatactccaacctaaagaactcaactcttttacttaattagttttttgtttgtttgtttgttttgcccactggcaactctatctgccctcacatcagtacctgaatacataatcaattctaacccttcatcatttaaggactcactatatagcatttcatttggagctagcagatctaggtttctaaactcagcaccttaccagcaaattattttatcttttctttgataaatggtaacaatgagcttggaataagaattctgtaattactgaattatcataacatcatagatttgttatgattagtcaaattaatcaaatttgttaaattagatcacgtgtataaaatatcctgctgcaaaacaactggtaaatagtagatgttcaataaaatggttccataaacacttcttttacagaattaaaaaaaaatctcttcttcctcattcagccatctgctatcttttttcttatgaatcccgacccttggtataaccttgctttctctcccatcacgactttgccaccactaagtttgta

SEQ ID NO: 341248 - DNA, 615 bp, Homo sapiens
atctaccatgccacatcttgaacagcagatgaatttacattcagagacacatggatcattaaaagattctttaacaatactccaacctaaagaactcaactcttttacttaattagttttttgtttgtttgtttgttttgcccactggcaactctatctgccctcacatcagtacctgaatacataatcaattctaacccttcatcatttaaggactcactatatagcatttcatttggagctagcagatctaggtttctaaactcagcaccttaccagcaaattattttatcttttctttgataaatggtaacartgagcttggaataagaattctgtaattactgaattatcataacatcatagatttgttatgattagtcaaattaatcaaatttgttaaattagatcacgtgtataaaatatcctgctgcaaaacaactggtaaatagtagatgttcaataaaatggttccataaacacttcttttacagaattaaaaaaaaatctcttcttcctcattcagccatctgctatcttttttcttatgaatcccgacccttggtataaccttgctttctctcccatcacgactttgccaccactaagtttgta

SEQ ID NO: 341249 - DNA, 626 bp, Homo sapiens
taaaactaataggagccagactctctagatgtagttggaaagtttgggatgttggctgtgtgtttcaggtctttctataatcatggtgaggctaagcatgagtctttttgctcacacttcctgcackaagctgagtagagaatttgtggaaaatgtctgttttcacattcaggctgtgccctctgatcctggggagacagctgctagaaacgtccccattgtacatctatgtctttgttttctatggtatagtgccattcagaaatgcatagccccatctactcatagagctagtccattaaagagaaaattttttcagtaaaagaagttgttgcacttgctgcatgatcaaactttctagaaaaaagcaggtaggcctagatttatcactggggtgagagagagggaatgcttatgaagtgttgagctttgactctagctactggtgggctgtggtttgttttctccactagcttcctgatgcaagtttattagaagccagattatcaagtagacaccgaacgtgagtgttgtaaatcccttcagagagaaaaggggagttacacattcccaacccctttctgcactgcccccagagaatatagcccccgcaagtgtttgcacat

SEQ ID NO: 341250 - DNA, 626 bp, Homo sapiens
taaaactaataggagccagactctctagatgtagttggaaagtttgggatgttggctgtgtgtttcaggtctttctataatcatggtgaggctaagcatgagtctttttgctcacacttcctgcacgaagctgagtagagaatttgtggaaaatgtctgttttcacattcaggctgtgccctctgatcctggggagacagctgctagaaacgtccccattgtacatctatgtctttgttttctatggtatagtgccattcagaaatgcatagccccatctactcatagagctagtccattaaagagaaaattttttcagtaaaagaagttgttgcacttgctgcatgatcaaactttctagaaaaaagcaggtaggcctagatttatcactggggtgagagagagggaatgcttatgaagtgttgagctttgactcyagctactggtgggctgtggtttgttttctccactagcttcctgatgcaagtttattagaagccagattatcaagtagacaccgaacgtgagtgttgtaaatcccttcagagagaaaaggggagttacacattcccaacccctttctgcactgcccccagagaatatagcccccgcaagtgtttgcacat

SEQ ID NO: 341251 - DNA, 592 bp, Homo sapiens
gacagctgctagaaacgtccccattgtacatctatgtctttgttttctatggtatagtgccattcagaaatgcatagccccatctactcatagagctagtccattaaagagaaaattttttcagtaaaagaagttgttgcacttgctgcatgatcaaactttctagaaaaaagcaggtaggcctagatttatcactggggtgagagagagggaatgcttatgaagtgttgagctttgactctagctactggtgggctgtggtttgttttctccactagcttcctgatgcaagtttattagaagccagattatcaagtagacaccgaacgtgagtgttgtaaatcccttcagagagaaaaggggagttacacattcccawcccctttctgcactgcccccagagaatatagcccccgcaagtgtttgcacatccatttaaaattacctctctattctgtgatctagagagactcgtggatgcctactcattttgttccagagctaagaagtttaggactgagtcctttgggaggtagctgtgcaatttggagcagttgctgcataacatctaacagaaggaaccagggagctg

SEQ ID NO: 341252 - DNA, 546 bp, Homo sapiens
ttaattttattaaaacaattattaacataaaaccaggcatgtatttatttatgttcaccagctgctggttcatatgttgtgaactttttacatatcaagtaatatttaatcttattcaaaarcagggtactatttcatttaatagatgtggtaaatttcattcctgtgataactgtggaagtcaaattgctaggtcagagaatactatggtatttagagccaattttctctgaagaaaagtttttctaatatatacttccacaagatgagtgtaagaaagattgttttcagatatccctgatggtattattaactatctttctttaagatttatcaatttgatatttaaatttcttcctgttattttagcaggacatgtaaacttcttcctcctattttagcaggacatataaacacataaatagcctctctgaaaattgccaaaaatgtttgattgttatgaaattgaacaagttttcagagaggctatttatatgttttagatgttagtaaattctctatagtacttatggatttgtaaaagtg

SEQ ID NO: 341253 - DNA, 546 bp, Homo sapiens
ttaattttattaaaacaattattaacataaaaccaggcatgtatttatttatgttcaccagctgctggttcatatgttgtgaactttttacatatcaagtaatatttaatcttattcaaaagcagggtactatttcatttaatagatgtggtaaatttcattcctgtgataactgtggaagtcaaattgctaggtcagagaatactatggtatttagagccaattttctctgaagaaaagtttttctaatatatayttccacaagatgagtgtaagaaagattgttttcagatatccctgatggtattattaactatctttctttaagatttatcaatttgatatttaaatttcttcctgttattttagcaggacatgtaaacttcttcctcctattttagcaggacatataaacacataaatagcctctctgaaaattgccaaaaatgtttgattgttatgaaattgaacaagttttcagagaggctatttatatgttttagatgttagtaaattctctatagtacttatggatttgtaaaagtg

SEQ ID NO: 341254 - DNA, 513 bp, Homo sapiens
ttcaaaaacctaaacatccacttaagcccattagcttcccagcaatggttcttatctaaattgaaaaggctgaaatgacagacatacaattcagaatctggatggcaagggagctcatcaagattcaggagaaagttgaaacccaacccaaggaatccaaaaagtccaataaaattatccaggagctgaaaaataaaatatcaattttaagaaatatccattctaagaatgaaaaaaatatccattttaattctggaaatgaaaaattaactataagaatttcataatacaaayagaagtattaacagcagaaaagaccaagctgagcatagaatcccagagcccaaagaccagtttattgaatcaactcagttagacaaaaataaagaaaaaaaacttaaaacgtgaacaaaacctctaacaaatatgggattatgtaaaaagaccaaacatatgactcactgacattcctgagagaggaaagagtaagcaacttgggaagcctatttgagg

SEQ ID NO: 341255 - DNA, 605 bp, Homo sapiens
actgcctccctgtgagtttctccatccagagagcgaggtcaataacacccaggggtggttgtgaggattgaatgtgcagccatatgtaatcatcatcatcataytttataatcgagcacttgctcgttgcctgatcctgagtcatcattcctttctgacattatcagattaagtcttcagttcatattatttgccttactttacaggtgagaaaacagacatgcagagaggttaggttaattgcctttggtcttataactaataagagggaagggttttttattgtggggggttttctagaacctgtgccccccttgcttgttagtccccgtttccctctggaaagttccccaccaagtgtggtctttgaggagagcagtgatggtgctacctctcacagtggaagctctagggcagcttgtcccaggctgtggggccagaagtaaactcagctgagaccctcaaccagtcttcagtccttggtgctctcagatttggtcccccagcctccgtggattcagataaccccaaatttaccttccctttttgcttaatatgggcagagtctctctgtagcttgcaaccccaggactctgcttgcaaca

SEQ ID NO: 341256 - DNA, 605 bp, Homo sapiens
actgcctccctgtgagtttctccatccagagagcgaggtcaataacacccaggggtggttgtgaggattgaatgtgcagccatatgtaatcatcatcatcatactttataatcgagcacttgctcgttgcctgatcctgagtcatcattcctttctgacattatcagattaagtcttcagttcatattatttgccttactttacaggtgagaaaacagacatgcagagaggttaggttaattgcctttggtcttataactaataagagggaagggttttttattgtggggggttttctagaacctgtgccccccttgcttgttagtccccgtttccctctggaaagttccccaccaagtgtggtctttgaggagagcagtgatggtgctacctctcacagtggaagctctagggcagcttgtcccrggctgtggggccagaagtaaactcagctgagaccctcaaccagtcttcagtccttggtgctctcagatttggtcccccagcctccgtggattcagataaccccaaatttaccttccctttttgcttaatatgggcagagtctctctgtagcttgcaaccccaggactctgcttgcaaca

SEQ ID NO: 341257 - DNA, 634 bp, Homo sapiens
agagaggaaagtttaaaataagaggcagtaacatgtatcgtctaaaacatgtgtatttattatcatgaagcacaacacttgttcaaattatggtcgaattaacttttaaaatactacatcatgcctgaaataatggtaagatactggtatgataaagttaataatataaatgaacatttattgggtatttactatttttccagcactgtgctaagcattatattaatcytcacattaatccactatagtagaaaggaaaatagaagtagcaaatttgactgaattgtcctcccctgttgctctgctaggagggagagatagactgacattgaactcaggtcacctgattctttccagtgatattgtggcagtcaggactcttccagtggcaaatgataggaacccaattcaaatatgcctaattaaacagtaacaaaaaaatgagatgaaggattcatagaatagaaaacatagggatgagttcagaacttactaaacatcatcaagattctttctaccctttgcccttctctcagctgttttgcttggcatgttggcagatggcattttttccaggcagtccagggatgttcacagaaactccaagtttatatcagctggcttagcaaacatc

SEQ ID NO: 341258 - DNA, 562 bp, Homo sapiens
tacatttttatgttactatctgtttctatagcatgacaatcagggagcatgtatgtgcatcatatttgggttgcacttgttcttagataatwtagaaaggtctttttctgtattaagtgctgtatgggagcaatagtaatccattcatctttagttttggatccctgaatccctcatattcttagaatcaacaaatatgtttatgtcatctactaagtgccaggcacatttggaagtactaggacataaaacgtggacaagaaaatatgttctcagcctgcacatagacctacagggaaagaagatgatccccattctgacagctgtgtggggcacccagaggaaagggaaaacaagtcttcctgagtggatcaaatagtctttcataatggtgatccttgcactgaatctcttcagggacaattttgtagttttgaatgtgtttctgtctgtataggttaaaatgtcatggaatttgtagcaaactattttgtaacaactgttccaagacaaatataacaatatcaaatactcaagtaataatgaaatatttgctattcaa

SEQ ID NO: 341259 - DNA, 443 bp, Homo sapiens
cttttcctccctgtttcatgttaatagcagttatacatctggaacaaaaaggaagcagagcttaatgaattttcccaggatctagcacatgaaaaatacccaagatagcgaaatgggaatagactttgctcaattactgcactacattcttcacatatatgaaagttagactataacaggtaccaccatttttcttattctctttcttttctcagtcccagcaaccttttctaactttgtaaggggagttacttccaatctgttaatatataaaaggtatgtgagattctatgcaagctatatagcctgcattaaaattgtggtctaatcttctaatacatctttctagtcataagggtatyagatcagtagatatgctaattgtgactaaactcaaccttacacagagaagcctcagcaggctctgttatgagcaggaagca

SEQ ID NO: 341260 - DNA, 638 bp, Homo sapiens
attaattacctttaacatcattgtccactagaactaccaaaaagacacctcaaatgcaggatggtgggtcagtagattaatcttctcatactgtattcaaaagcaaaattcaacacttaatttgagatacatttttctttcctggatggaatgaaagaagaaaaagaaaacgggaaggatggtgcttttgaaagatttgcctgtgcttttaactaatttcaaaccccagcttcaaatgcagtgagttgtttcatttgatcagcaataagtcatatcctgcaaaaggcagctccctgaaggggaagtggctccaacactgtttccatggctccctgctgtaacagtattttttactgaactaagccttactaattttagccatggattatctggaaagcaaggaagaaatagatgaaaggcaatyttaccttagccacactgagcccctaagaaccttttactaagaaagttgctgctagaaaaggcaaccatataattgcaacaacttggggatgtttgtcaactgttgtccatcagcacttggatataggagggagatcctgtttttctaaggaggaaatagaaactcggcagtgaaatgatttgattttgatcattacagcctttataagacaact

SEQ ID NO: 341261 - DNA, 513 bp, Homo sapiens
atgcttgatatatatttacatattgtcttctcagacaatcattaaacaaagacctccgctagccctgagttatattcagctttaggtaactataaaataaaatgttcttgctcccccatcttgctgccactttctgcagatctttgttagtggcgttcctaagcttctgcattataatatttctcatagtcaattatatccaacaatgtctgtgtacatgtagatggtccaccatggcttccttggaaatctgcccattccttggatgcctttcttgctgtcatttctgttgctcatagattctacccattatttttctggttgcttgcattgttgctccttttctcagtrtggttttctagaccagcagaggccacatagtcactaagatgctgcactgagagaggaaatgataaaagcaagaaagtctctcaaggaagaaggatcccttgtgcaaagggtgaaaggtgttattactcaagatgaaattagggtgctgttgaagtggaattt

SEQ ID NO: 341262 - DNA, 613 bp, Homo sapiens
ttggcagtcttatgctattgctttagaaaagtgaggtttttgttttgctttgtcattacyaaaatcagaagaaagggaatttgttagtgagctagataccaaatatactcggctttcatggatcaacctgttaaaaatttagtgtctatcactgatacagcttatttaatgttaaactcagtaatgtcaaattcagataacttcgtaccccaggaaagaagacaggaagacgatggctataaatattttcttccaatgtctggggacttggagataagatatataggctttaatgagtgctgagtctgccttcttgaacagaaacctaaaatttctttgtgtgttttccaaagtttttaggatcagcatgtatcacttaaaaaacaatatatattttatttacaggttaattttttaattacccaattcctagtgtctgttattctcttggagggataaggataacccattggttttctagattaccatttgtttaaatagaataaaacattaaacagttatttcaaagcttggttaaaatctatttacaattacctttaaaaaactgtatctgttcaaaacagttgtgtgtctgacccaagtgtgcagaagt

SEQ ID NO: 341263 - DNA, 528 bp, Homo sapiens
atagtgataaacacctgagaagtatttcctttaaccctcacaagtgctcttaagctgagatattattacaaaattcattttgttcctaggaaaaactaatttgctttagatgaacaaaagtagcaaatgattaagaaatgactaagcttggatttgaaaataggtcagtgtgataccagactctgcagctgttctcctttagtatgtggcaaggctgctcagagtactccttccccaagtcatctcacagcctccctcttctccagtcccaacttgcagttttccctggagaccaagggatgttgccaacaataatggtcttcaatacactgttgcaaaaattataactgagacacttgatgcagaacttttgctttctagtttagctaaaactgggttcttgtcacacgactagaaaagattaggcatgtggacacactgaagggtgaagagagccaaatttattgggcaaaaaggaaagaagaaaaaacactcagtaaagcaaragggagtgctgccagcagctcc

SEQ ID NO: 341264 - DNA, 544 bp, Homo sapiens
tactgcttcctgaaagagagagaaacaattgattcacttagacaaagtagttgggaccagtacccattttaaatggattttcactagagtctaaaacatccccacctgaaacatagaggggtatgatctctccaaggcaggagcaacagttacttaaattctgcagcttctgaatgtgaagttgctacctggatttatctcacacacagccagatgctgtgaggtagaaattgcagtggattcatagtatgatagggtacaactgcatgatttgggcccttctcttggctctgtggatctgcatataaaagtgagcctgtctgaaaccatccatcattgatactggacgccttcccagccttgcagaatgaacccttctggaatctgttggcccatcacaaagcgtgggtcttctcagttgctctgcttcatccagctgggtcctttccytctcccagtggcacaggtactgatttacctttcagttcctgaaaacctgctgatgcatctagccaaaaacattctctgttttgttaaaatgtcc

SEQ ID NO: 341265 - DNA, 482 bp, Homo sapiens
cattttttttactctagtttttaaatttttctctctagtcttggttggaagcattgtaaaatggcttcttactgaattcagacctactcctgaagccaatcatagcacagtgtagaaaatgcatgaggtataaattactgaaataaagtgattaaaatgctttcagkttccaaagaaaagatggcttctctagcaggatatgtgtcagaggacattacttgattactaagacaatcctttcatccctggtgagtaaatatagagcccatgagaggttctgcattgacccatggatttcactcagatggttccagcaactctggggaaatgatacaagattaacctgggtattttagaaagagtcctagaagattttagcatgctgccatctacgttagtgtgttacagtggtgtcattgagctaaatccaagttgacatactgaacagtgacaatttaccatgactgtgaaaggcttttgca

SEQ ID NO: 341266 - DNA, 482 bp, Homo sapiens
cattttttttactctagtttttaaatttttctctctagtcttggttggaagcattgtaaaatggcttcttactgaattcagacctactcctgaagccaatcatagcacagtgtagaaaatgcatgaggtataaattactgaaataaagtgattaaaatgctttcaggttccaaagaaaagatggcttctctagcaggatatgtgtcagaggacattacttgattactaagacaatcctttcatccctggtgagtaaatatagagcccatgagaggttctgcattgacccatggatttcactcagatggttccagcaactctggggaaatgatasaagattaacctgggtattttagaaagagtcctagaagattttagcatgctgccatctacgttagtgtgttacagtggtgtcattgagctaaatccaagttgacatactgaacagtgacaatttaccatgactgtgaaaggcttttgca

SEQ ID NO: 341267 - DNA, 589 bp, Homo sapiens
cgccgggtcccaggcaccccctgagacccaagcagctgcaacataacaccatcttgaaactccagctcggaccagactacatcatactctgggtctcaaaagcccctgtagcttcatatccctggagccctactgacattcccctatgtccagccagaggattgcaagattgcagtgccagctgttcccagtggtgtctctgggtccccagcactctagcctatgctgtgtcctataccccagggatcaggtggratggcacaccagggagccttctcctaggacaaagggagccaaagtacatggcccccagagcctggtagttacctgcctggagccaccgccatggctgcaacccctcacccccaccccagcaacagggctgacatgcagctgcatgcactttcagaaagcctggggactggcctacctgtgtgttgtcctggggcatgagtacaggcttgcccctcccactgccattggtccccatgtgcaccatccaggggcataaggacaagcatgccctgcccaccaccatcacctccagcacctaagcatgctatccagggatctggggattgaactgcct

SEQ ID NO: 341268 - DNA, 576 bp, Homo sapiens
tccaaagcacattaaagtcaaactggtcagaagtcaaagacaaagagaattctaaaaacagaaaaggaaaaacatcaagtgaaatataagggaatctccaatggactaatagtggatctctcagcagaaaccttataggacaagagagaayggggtgatatattcaaagtgaacaaagaaagaaaagaaaaaagaaaagagaaaaagcttccagttaaaaatactatagctagcaaagctatccttcgaaaatgaaggagaaatagtctcacatacacaagaaaactgagaattcattgtcactagatggccttacaagaaatgcttaagatagtcctacatctggaaacaaaaagataatatcatcattaaaacacatgaaagtataaaactcactcatagagcagatatacaaatgagaaaatgaaatgaatcaaacattgtcactacaaaaaactatcaatgtgtaaaggtaaataataaatgaagaagaaaagaacaaaggatatacaagacaatcaggaaataaactgacaggtgtaagttctcacctgtcaataacaacactgaatgtaa

SEQ ID NO: 341269 - DNA, 569 bp, Homo sapiens
agcccctgtgatggtgtccagctcataaaagtgagtgaggccccagtacatgagagaggcagagagcctgcctctgtgactcatctttccactgggaatctgagcaacttggactgcaagmgcacactttgtttccctcaagccccagagctaacttaaggagacagctggaagtactgaggggaaaagacactgagaaaagctgtaggcattttttcagaccccagaccaagaacagggtgccatttttaatccaggcacgtacaaagtcagacattctttggtgacctggcagcctggccatgcaggcattttagtcttgggccagagattggagcacttgttttggcatgcagtaggggcctccatagccagaactgtgggaagtgcctcagcagtaggtgctggaattctgctctcccccatcatagactggggatgagaggagagctactacagctgcagtttctctggaaaatgagacttgtagctagggctagcttggcaacctgaaactgggctgcatgtgtcattgctgtgtcattcccagcctgttcccctgagattgt

SEQ ID NO: 341270 - DNA, 556 bp, Homo sapiens
tgatcaagtaggcttaattcctgagatgtaaggttggtgcaatacactcaaatcaataagtgtgattcaccacataaagagaattaagaaaagccatatgataatctcaatagatgcaaaaaaagcctcccataaaatctaacatcgcctcgtgtgaaaagcccacaacagactaggcatcaaaggaacacagctcaaaataataagagccatcaaacccacatccaacatyatattgaatgaatgggcaacagctgtaacaattccccttgagaaccagaacaagacaaggatgcttaccctcaccacacctgttcaacataatactagaagtcctagccagagcatcagataagaggaagaaataaaaggtatccaaacagggaaaaaaaaaaagaagtcaaactatctctctttactgaagatgtgattctataactggaaaaccacaaagactctaccaaaaggctcctggaactgataaacaacttcggtaaagtttcaggatacaaaataatgtacaaaaatcagtagcatttctatataccaaaaatgt

SEQ ID NO: 341271 - DNA, 567 bp, Homo sapiens
gatccatgcacatttacctctagaggcaggctagtcagatccgtttgtccttcttaataactgaattgtctgagaggagtaatgacttctgtagtccttgtcctcaaatccctcaaattactataaatagagccmtttagcatccatctgcaggtccagctttgctctaggctctaaaagtatttttttcctgaattttgggggaatccaaggattcccaggttctacatcatctactttgctctggcaccactctagtcttgtgctacagatagaatggctgggttctcaccttgttcttgatcccaagacacttgcaatacacatagtttcagaaattggtttgataggttagtattttgatccaaacaggtttttagagactagacttctcccttgcattgcacaatcttcccaaggacaataatctcattttttttcctttggagacagtctcgctctgttgcccagggtggagtgcagtggcatgatctcagctcactgcaacctccgcctcctgggttcaagcaattctcatgcctcagccccctgagtagctgggtctat

SEQ ID NO: 341272 - DNA, 499 bp, Homo sapiens
gttctttcctcattgtaggtttttgacacttttctcaaaaatgagttcactgtagttgtatggattcatttctgggttmtttattgtattccattggtctatatgtctgtttttatgccagtgctatgctgttttggttactgtaactccatagcgtaatttaaagtcaggtaattcctcattctttttgctcaggatagctttggctgttctgagtattttgtgatttcatacaaattttagaaatatttttcctatttctgtgaaaaatgtcattggtattttgatggggattgtattgaatctgtagaccactttgggtagtatgcacacttttaacagcattgatgctttcaatccatgaacatgaaatatctttccctttctttctgtcctcttcaatttctttcatcaatgttccatagtgtttattatatagagatctctcacttttatggttaagtttattcatagatattttatttgtagctactataaa

SEQ ID NO: 341273 - DNA, 626 bp, Homo sapiens
tgtctcacaccagtcagaatggctattgttaaaaagtaaaaacaaacaaacaaaaaaaaacccagaaatattggcaagactatggaaaaaagggaatgcttataccccattagtgggaatgtaaattagttcagccactgcagaaagcagtttggaaatttctcaaagaacttaaaacagagctaccatttgacccagtggtcccattactaggtatatatccacaagaaaataaatctttctaccaaaaagacacatgtacttgtatattcactgcagcactattcacaatagaaaagacatggaatcaaccttggtgcctatcaatggtggatgagataagaaaatgtggcacatatataccatggaatactacatagccataaaaagaatgaaatcatgtcctttacagtaacatggatgcagctggaggccataatctkaagcaaactaacacaggaacagaaaaccaaacaccacatgttctcatttataagtgggagataaacactgagtacacatagacatgaagatgggaatagacactgatgactactagagggaagaagaagggaaggaagagtgagttgaaaaactacctgttgggtatgatgctcaccacctgg

SEQ ID NO: 341274 - DNA, 617 bp, Homo sapiens
taacctctgcagacttaaatgtccttgtctgacagctttaaagagagcagtggttctcccagcacgcagctggagatctgagaaygggcagactgcctcctcaagtgggtccctgacccctgacccccaagcagcctaactgggaggcaccccccagtaggggcagactgacacatcacatggccgggtactcctctgagacaaaacttccagaggaacgatcagacagcagcattcgcggatcacaaaaatccatggttctgcagacaccgctgctgatacctaggcaaacagggtctggagtggacctctagcaaactccaatatggaaattattaactaagttatgatgcaaccataggattaactattaagctaccattaaatattagaggtccacgtaaactctcatcttcagtctgggaatccttcaccctatagctctagagcctggctactcaaagtgtaatctgtagaccacttgcatcagcatcagcttgttaaaaatgcagaatctcaggttgctccccagagtgactgaattagaatctacattttaacaaaatcccaggaggtagctatgcatattagagtttgaggcatcatgacctagaaga

SEQ ID NO: 341275 - DNA, 578 bp, Homo sapiens
tcactacactgtggttcttgcaaacttctacatgtattgccttgacgatcttgggcaagatctggaagacttctctggattaccaggtagagattcttgttctcttcccttattttctcccaaacaaagcccctctctctgttctgagccacctggagcagagggtggggtgacacaagcacccccatggccacaaccactaggactgtactgggtgagatgtaaagccagcataacyctgggtcttgcccagtgcttactgtaaccattgcttgtctatgacctatgtttacttcaggacttggggctctataatcagcaggtggcaaagccatccaggcctgtgtccttcccttcagggtgatgaggtctgctaggctctaggcaggtccagaggtggcagctgtgagccataaactatagtcaaaaaccttagaagtccacctagtattctattgtactgaatttgagctggcattcaaaccaaaagatgccatccttcccactcttccttcccctttccaaaggcagaggagcttcactccatggccaccacttccacaggccacaggaggtaa

SEQ ID NO: 341276 - DNA, 496 bp, Homo sapiens
ctcactcaaagcccttgatgtagtattgggtattcctgctggctatttgtaccaaggccttttcaattagcaggtaattaatcctgccagtactgtgtccttccttttgagtcagcaggttcccttctggcccagcatgtttctagaaatgtagtctgtgaattagggcctagaaacggggcctcatggctctgaccactgctccatcctgctgtggctgagctggtatccaaggtgcaagacaaagtccttcccactcttccttcttctttcctcaggcagagagaaggggacttttttggagccatgagctgtgtagcgtggagttaggggaggggtgatgccggcactcccttagcagccttggctgatgcttcagtaggtctcayggccccctcatccactggctctgggcccagttcagcacttgggacttgccacagaactgcagctcctgtggcctagactacccttcaggtttatgcagaaccacaga

SEQ ID NO: 341277 - DNA, 514 bp, Homo sapiens
agggtctaagtcttgtcaattccatgaaggttgagagaagtaagaaagctgcagaagaggttgaaactatcagaccttggttcaggaggtttaaacaaagaaaccgttttcataaaagaaaaatgcaaggttatacagcaagagctgatttagaagctgcagcaagttatccagaaaatctagctaggaaaattgatgaaggtggctacactaaacaacagatttccaatatagacaaaacagccttatattatgagatgataccatctaggacttttacagctagagagaagtcaattgcctggttccaagcttcaaaggtttactcccttgttaggggttaatgctgctgttaactttaagctgaattcagtgtttacttaccattctgaaaatsctaaggtccttaagaattttgctaaatctactccatctgtgttctataaacggaagaacaaagtcttggtgacaacacatctgtttacatcatgacttactatatattttaagcctt

SEQ ID NO: 341278 - DNA, 514 bp, Homo sapiens
agggtctaagtcttgtcaattccatgaaggttgagagaagtaagaaagctgcagaagaggttgaaactatcagaccttggttcaggaggtttaaacaaagaaaccgttttcataaaagaaaaatgcaaggttatacagcaagagctgatttagaagctgcagcaagttatccagaaaatctagctaggaaaattgatgaaggtggctacactaaacaacagatttccaatatagacaaaacagccttatattatgagatgataccatctaggacttttacagctagagagaagtcaattgcctggttccaagcttcaaaggtttactcccttgttaggggttaatgctgctgttaactttaagctgaattcagtgtttacttaccattctgaaaatgctaaggtccttaagaattttgctaaatctactccayctgtgttctataaacggaagaacaaagtcttggtgacaacacatctgtttacatcatgacttactatatattttaagcctt

SEQ ID NO: 341279 - DNA, 598 bp, Homo sapiens
agttcaatccttgctgattgaaagtttttgagaggttcaagacttcagtagagaaagtaactttagatgttgtgaaaacaggaagaraactagatttagaagtgaagtctgaagatgtgactgaattgcttcaatctcatgataaaactggaatagatgagtagtttcttcttatgcataagcaaggaaaatggtttcttgagatagaagctagttttggtgaagagcctgtgaacactgttgaaatgacgacaaaaggcttagaatattacataaacttagttgacagtggcagggtttgagataatacattccaattttgagagaagttctactctgggtaaaatgctatcaaacttttcatcacacgctacagagaaaacttttctgaatggaagagtcaatcgatgtagtgaccttcactgttatcttaagaaattgtcacagtcatctcaacctttaggagccaccagactgatgagtcagcagccatcaatactgagacaagaaccttcaccagaaaaaagatgatgacttgcttagggttcagatgtccattagcatttttaagaataaaacatttttaaattaaaatatg

SEQ ID NO: 341280 - DNA, 621 bp, Homo sapiens
gtggaagttactagagagcagattactttgattactacccaagaagtttgtaagatggagcagtttcgtgaaatggtgtgatttcatgaaagacttggggatgctacttgacttttcttgcttttaaaatagaatcctacttggtctcctgaaatttttttctatagattatgaatttttggactacaaaaccaagctacacttaaacacatcccataagaacttgaagtatgtcaattctatctttctgacaggaagagatatttaagcttccataagaagtcaatgtaaaggttattatattctgtaggttgaagtgygttaccctataggaacctttaaaataagggcatatcatttcaattaactttttttaaaaaaaacttattccatatatgtcttaactgaagccagcaaacaacaattcttttttaatcaagctttataaaagggaggtgaagtattttttacttatgagaaatatctccctgagcgcatgatcaaggtgggattggaacaaaagcttctgcttgcctatttctcatctgctagaccatgatacagttatcaccactatcactgatgatgatagctggttagtctaatagcatgaagatttaa

SEQ ID NO: 341281 - DNA, 421 bp, Homo sapiens
agccaaagggggaaagccccttataaaaccatcagatttagtgagaactaaccactatcatgagaacaggatagggggacagcccccaggatttaattatctccacatggtttgtcccacaacacctggggatttgagtggggacacagccaaaccatatcactggatactacagatgaaatgaaaatacacctctgaaaagtraaaagaagaaggaaagcgactagagacttcaggactggaggagcaacagggtggtgagatccctgggtgctctttttgtcttatgtatctcagacctggagctaaaggggccagcaacccagaaacaccaacgtgtgtgtatatgccccaaaacaaagcctcctcttcctagccaaaggatcaagaaataaatatcagggagatcgtgtggaaagcc

SEQ ID NO: 341282 - DNA, 346 bp, Homo sapiens
tctcatagttgaacagctttgtcttctcctttatcaatcatgcactgtgcaggcgcttttatcaaagaccatgtgaaaagttcagtgttgtctttctgcttcctgggcacaaagtagccaattctggaagtgaagtctttccctttatggtttccaatgcaaaggcagcacctatcaggcccctggtttrtgacatggctcctgtgtgtgacaaagtttgacagatcacctagtagcagcaaccacctacctttcacagttgtgctgagttttggtgcgcaagacatcttctttttgcagttttcttctaaatttcttagcttaatattcaaatttcagccccatt

SEQ ID NO: 341283 - DNA, 448 bp, Homo sapiens
cttctacataccagtctttgtagctacgttattgtaggtggagtatcttgaagcatgtaaggagagccacagtactgcatgtgtgcatgcacaatgtttttggttgtattgacacacagatgtgtcttcaaataccatgcaatcttttcagacactggtaagtaataagtaagtgacacttctattacactgattgacatttcattatctaaatgctttgccttctttttgctttgggaatattagtcatcagttcctcaaagcarttacactgtctgtgttactccagttattcaaagggcatcgggggattatttaaaaaaaatactaaaataaaacaagtccttagaataatgtcctgagctcagagaattcggccactggaaaataaataaataaataaataaataatcttgcaactcctatgttacttgaagttaggaaaggc

SEQ ID NO: 341284 - DNA, 497 bp, Homo sapiens
tctgagctattagtccctggttgaatgtgaaacataaacttcctgaattatgaaagcaatatccaagccacacacacacacacacacacacacacacacacacacacacacacacacacacatatccagaggtaatgagtggtgraaatttaactgaccaatggggctgaagcacaacctttaaccaatatttggggtttatggactcaggggctaatctcaggaaactgagctaaaagacgcaaacaaggagaaaaattttgagaagggacatctgaggctgcacatgggagggaaaatgggcttcacaaaatcaattcagacaaattactaataaataaacaaaacaaatgccaaaacaaacaatagcaacaagtcacagaggcagaggagtcaatatataattcaaagtgcttagcacattgccaggctcatattaatcactagtttagagtcaaactgactgagtcctaacattgttctgatactcacttgct

SEQ ID NO: 341285 - DNA, 573 bp, Homo sapiens
atggctggggaagcctcaggaaacttacaattatgatggaagaggaagcaaacatgtccttcttcacaaggcagcaggagatagaagaatgagcaaaaggggtaaagccttttgtaaaaccatcagatttcatgaaaactcactcactatcatgagaataacgtgaaggtaactgcttccatgattaaattaccttctactgggtccctcccaagacacgtggggattatggaaactactattcaagttgagatttgggtggggacacagccaaactatatcactgtgaggcactgctggcagtcctagaatagatatttattaggtaccaaccatgtcaggtgattcagtgattgttaaactgaagctcttgccttcaagaatttcacagcttttattatgtaatagtgttcttttgcrctaggaatctcagagttctgctaaggtatttccttgttcaggtaaattatcagctatatttctgaacaccagatttcggactcttcaagatcaatctattcctttgcatctggcccaggctacagccctccagatgactaagagttgcactaa

SEQ ID NO: 341286 - DNA, 589 bp, Homo sapiens
aaaggaaagggaaagtaaaatccacatgtggatctaaaaaatggagaatgagaggtattggtgagcaccctcatggataccatagtgatttaatttaatcagacatattggccaggcgccatggctcacgcctgtaatcccagcactttgggaagctaaggaaggtggatcacttgaggccaggagtttgaaaccagcctggcatggtgaaaccccatctctagtaaaaatacaaaaattagctgtgtgtggtggcctgtgcctgtagtcccagctactcatgagaatcacttgaaccagggaggcgtaagttgcagtaagccgagatcrcgctacttcactccagcctaggagacagaacaagactctgtctcaaagtaaataagtaaattaattactcagaaatgtggataaaaatagcaataaataatacaacagcgttttccaaggcatattttgcagaattctttccagaagaatatttgtaggtattcacagaatagtttccttaggtgaatttgccaaatattctgttacttaaaattcaagattgtctactgtaagatttcacaaaacttgtatatgctaa

SEQ ID NO: 341287 - DNA, 589 bp, Homo sapiens
aaaggaaagggaaagtaaaatccacatgtggatctaaaaaatggagaatgagaggtattggtgagcaccctcatggataccatagtgatttaatttaatcagacatattggccaggcgccatggctcacgcctgtaatcccagcactttgggaagctaaggaaggtggatcacttgaggccaggagtttgaaaccagcctggcatggtgaaaccccatctctagtaaaaatacaaaaattagctgtgtgtggtggcctgtgcctgtagtcccagctactcatgagaatcacttgaaccagggaggcgtaagttgcagtaagccgagatcgcgctacttcactccagcctaggagacagaacaagactctgtctcaaagtaaataartaaattaattactcagaaatgtggataaaaatagcaataaataatacaacagcgttttccaaggcatattttgcagaattctttccagaagaatatttgtaggtattcacagaatagtttccttaggtgaatttgccaaatattctgttacttaaaattcaagattgtctactgtaagatttcacaaaacttgtatatgctaa

SEQ ID NO: 341288 - DNA, 589 bp, Homo sapiens
aaaggaaagggaaagtaaaatccacatgtggatctaaaaaatggagaatgagaggtattggtgagcaccctcatggataccatagtgatttaatttaatcagacatattggccaggcgccatggctcacgcctgtaatcccagcactttgggaagctaaggaaggtggatcacttgaggccaggagtttgaaaccagcctggcatggtgaaaccccatctctagtaaaaatacaaaaattagctgtgtgtggtggcctgtgcctgtagtcccagctactcatgagaatcacttgaaccagggaggcgtaagttgcagtaagccgagatcgcgctacttcactccagcctaggagacagaacaagactctgtctcaaagtaaataagtaaattaattactcagaaatrtggataaaaatagcaataaataatacaacagcgttttccaaggcatattttgcagaattctttccagaagaatatttgtaggtattcacagaatagtttccttaggtgaatttgccaaatattctgttacttaaaattcaagattgtctactgtaagatttcacaaaacttgtatatgctaa

SEQ ID NO: 341289 - DNA, 589 bp, Homo sapiens
aaaggaaagggaaagtaaaatccacatgtggatctaaaaaatggagaatgagaggtattggtgagcaccctcatggataccatagtgatttaatttaatcagacatattggccaggcgccatggctcacgcctgtaatcccagcactttgggaagctaaggaaggtggatcacttgaggccaggagtttgaaaccagcctggcatggtgaaaccccatctctagtaaaaatacaaaaattagctgtgtgtggtggcctgtgcctgtagtcccagctactcatgagaatcacttgaaccagggaggcgtaagttgcagtaagccgagatcgcgctacttcactccagcctaggagacagaacaagactctgtctcaaagtaaataagtaaattaattactcagaaatgtggataaaaatagcaataaataatacaacagcrttttccaaggcatattttgcagaattctttccagaagaatatttgtaggtattcacagaatagtttccttaggtgaatttgccaaatattctgttacttaaaattcaagattgtctactgtaagatttcacaaaacttgtatatgctaa

SEQ ID NO: 341290 - DNA, 593 bp, Homo sapiens
agtctttcaggttcatatcttacatcttgtctttttccagactatgaactcccagaacagaaaggatcaataattaatttttttcttaaagtatctggtgtgctaccttacccatagaatgttatcaataacttttgttgtaatttaattctccatccacgtggaaaaaaacaacaaatgttaaaacagcaccaattttcactaytgttttagaccttgtttttaaaagatgctttttttagatgaaaaattagttgtatcataattttataaatcttatttatactgataaaaaatattacagtaaagcaattcctccaatccacttatttgcagagcattgggtatacagatatttagcatctactgcacacataaacactgaatattaggaaaataaattgcttttttatttcttactttttttctgtccttctaaatgccagtacagtaacagttctgtcaaaacaagatgcttaattatggcacctctgcattgggaggttatcaatgtagacaaaactgttgacacattatagctaagatacagcagagtgaaaagtttaatcagctgtataaacaccaatgaattg

SEQ ID NO: 341291 - DNA, 593 bp, Homo sapiens
agtctttcaggttcatatcttacatcttgtctttttccagactatgaactcccagaacagaaaggatcaataattaatttttttcttaaagtatctggtgtgctaccttacccatagaatgttatcaataacttttgttgtaatttaattctccatccacgtggaaaaaaacaacaaatgttaaaacagcaccaattttcactactgttttagaccttgtttttaaaagatgctttttttagatgaaaaattagttgtatcataattttataaatcttatttatactgataaaaaatattacagtaaagcaattcctccaatccacttatttgcagagcattgggtatacagatatttagcatctactgcacacataaacactgaatattaggaaaataaattgcttttttatttcttactttttttctgtccttctaaatgccagtacagtaacagttctgtcaaaacaagatgcttaattatggcacctctgcaytgggaggttatcaatgtagacaaaactgttgacacattatagctaagatacagcagagtgaaaagtttaatcagctgtataaacaccaatgaattg

SEQ ID NO: 341292 - DNA, 559 bp, Homo sapiens
actatgtgtttcgtgctttcatacatatatattatttcatttaattctaacatccttgtaattttaccaaaaaatccaaggtttagcttttgctcaaagtcacagacactgtgtggtatttaagyttgtattctagtcctatgctctttcttcccccctacatttttattctccaggattacgaaattcccctagcttgagggtaatgatattttcttcctctctccttcccctgttcccattctccttccctttctccatccctgctttcctttcttccttccttccacagatatttaatgagatctaggttcaaagattgattataggtactgtaggttcaaagaaaatatgacattggcccacaccaaggaggaattactaagctactggggggaccaggtatttaaataaaaaatgtaatgatgtagtaacaatgcgattattgtgtatataagtggcacaaaggcatggtctattttgccaaggagggttataaaaggcttcataacaaaagtgacaattgaactgagtctgaaaggataagtgatatgatttg

SEQ ID NO: 341293 - DNA, 559 bp, Homo sapiens
actatgtgtttcgtgctttcatacatatatattatttcatttaattctaacatccttgtaattttaccaaaaaatccaaggtttagcttttgctcaaagtcacagacactgtgtggtatttaagtttgtattctagtcctatgctctttcttcccccctacatttttattctccaggattacgaaattcccctagcttgagggtaatgatrttttcttcctctctccttcccctgttcccattctccttccctttctccatccctgctttcctttcttccttccttccacagatatttaatgagatctaggttcaaagattgattataggtactgtaggttcaaagaaaatatgacattggcccacaccaaggaggaattactaagctactggggggaccaggtatttaaataaaaaatgtaatgatgtagtaacaatgcgattattgtgtatataagtggcacaaaggcatggtctattttgccaaggagggttataaaaggcttcataacaaaagtgacaattgaactgagtctgaaaggataagtgatatgatttg

SEQ ID NO: 341294 - DNA, 539 bp, Homo sapiens
tcattcctgtattaccacctttttacagactcatcatacatgcatcctgctgagctggtacaggtgtgtttagcaggtacatcagctgtgtcacacctgctgtcagaaacagccttttatagaacagtagcgcaggcctcaccacagtgggaggcatgaggggaaacttctggattggattagtcacctcttactgcctcattatgtttgatgcccacaagggacagattgatctcaatttagaccagattaaagttttcaaaacttttctattgagctgcttcatttggcaycctctttgagagtgccacgttatggtgggtttagctcctccctttcaaagcatttccaccgactgggatgatggtaacaagcttcttaccatgactactgaagctgcaggtaacttcaggtggtatgtgctgaaccgggcttgtgcactaatctggctctccttgtgaatggcttgttcattatgccaatatcaaagtgcagggagacaagaatttgaaagagtagtcttgggctatggagtttga

SEQ ID NO: 341295 - DNA, 561 bp, Homo sapiens
attataaaattatcagtgaattatgccagactataaagcaatatttaggaattactgaaaagattttttgctacatccgcattaccaggattacaaacagaaatcaaaaaacaataaccagaacactagagcttttccaatttaatcctgatattttttttcttttctaagccataatttaaattctctaagggcaaccattgtttttgaggacttactgtttttctttccttttttttttctttttgagacagagcctctctctactgtgcaggctggagtgcattggtgccatcttggctcactgcagtctccgcctcctgggttcaagcaattctcctgtctcagcctccagagtagctgggactataggcatgcaccaccacacctggctaatttttgtatttttagtagagacgaggtttcaccattttggccaggctggcctcgaactcctgacctcaactgatctgcccacctyggcctcccaaaatgctgggattacaggcatgagcccccgtgcctggcttatttttttttctttttaattacaaagcatac

SEQ ID NO: 341296 - DNA, 579 bp, Homo sapiens
gtaagtaaacggtagagtcaacatttaacaaagccctcctaatatcaaattacctataatgataccataatcacataacatttgatttaataaaaatcttaaccaatgagaaaattgccagctgatactttgaacagtgcttattaactgaggcaaaggagacaactctcagtatgacacatgtaatcaatccatcaaagatagaatgcaaaaaatgtgtcatttgctgtggcctaatttaagcttgcacttgaagtggacactgggaactgtgtctcgttttcttccttcttggtgaggattagtttgggttagaatccaactgacttgggaaaatgtatttgtatcctttgtaagtaacaaaatagaaaaggaaaaagacaaagctccagattgggagaggagaactccccgttttatagccagtacttgacttacaaatgcagtgaaaactcaggttggtttamccgctccttcccaatttatctctgtcttacagtgagtgttcacaaatgttctaatatgaagatataattagaaagtaaaatcttagttagctagagctcaattaactatacc

SEQ ID NO: 341297 - DNA, 566 bp, Homo sapiens
aaatccgattataatgcctgagaccaaggctagccttgaatcaaatcacttaagccctggaaccagtgactggtgacacaattaccactggaaataaaagggctgaaagaatcatgcaagcattttagtgagttatttgtatatgtccttacaatctggagaagtacaatatgactgccaattcttccttatgccctccaaattcccagacaaatgctttgtgtcacaatttattcccttacatcataaatcatactttgaaaccctacacttataaaacttcatttagttgccatgatgtatctggtagcyatcatcacaagagtattaagggttcagtgtgtgtacacacatatggatgtgtgtgtgtctgtgtgtgtgtgttctcttttcagaagacggatcgtcagcacagttccctgctattgtgtgagtggtaaatgccacagtgcacagtcatttattgtatctcaaactgttactggcattaataactgtagaactatggctgtatttgttgtgtcagccagacatattcttgctattaacttttgaataacagcagc

SEQ ID NO: 341298 - DNA, 545 bp, Homo sapiens
atttaccactcacccaaattgtccctctttattttcactccatatccttctttcaagccctatattagttccccattgttgctgtagcaaaataccacaaacttagtggcttaaaacaacataaatgtgttagtttatagttctgaaagtcagaagtcccaaaatgtgtctcatgaggataaaaccaaggaatcctcagggctgcatttcttctgggtgctctaggggagagccagctcctcacccttcccagcaactcgtttcctgcactccttgctgaggggcctcactctgaccttggcttccatgctccaatctcctctgactctcactctcctgcccctctctctctttagaaggatctttgttaatgtattgggccaacctggataattgaggctaactttcccatcttaagagccttaataacaactgaaaaattagttttccacgtaaagtagtaygttcacatgttccaggaattaaaacatgggcatctttgtggggggcaaaattattcccatcacaaagaccagttccaatgt

SEQ ID NO: 341299 - DNA, 532 bp, Homo sapiens
tctatagtctactgttgaaaatatagctactttcattagtgaaagcaattgctggctatgtagtcatctagatgaatgggcacaaccaccatgaatactagaacatgcaccagtacacacttgggtgatcaatttaggaagctggatttataaaaagtttggtatccttactttggcaggcatatttatgctcaaatgacttggcactggsaaaaagcaatagaaacaagggataccctatagctattgattttattactggtaatttatcttcaggcatagaaaaccttaatggaactggacctaatctaggctatattacacactccttctgtaatgaaacactttgattttacataaataatgaagactagacttttatatataatgacacagatataaaatcagaacatgacaatgataccctcaaccatgttatcagacaactcctcaaaactagacatgggtttattggaaactctaaaggcaaatggaatgcttctttagttccactatctaaaataaatgatag

SEQ ID NO: 341300 - DNA, 532 bp, Homo sapiens
tctatagtctactgttgaaaatatagctactttcattagtgaaagcaattgctggctatgtagtcatctagatgaatgggcacaaccaccatgaatactagaacatgcaccagtacacacttgggtgatcaatttaggaagctggatttataaaaagtttggtatccttactttggcaggcatatttatgctcaaatgacttggcactggcraaaagcaatagaaacaagggataccctatagctattgattttattactggtaatttatcttcaggcatagaaaaccttaatggaactggacctaatctaggctatattacacactccttctgtaatgaaacactttgattttacataaataatgaagactagacttttatatataatgacacagatataaaatcagaacatgacaatgataccctcaaccatgttatcagacaactcctcaaaactagacatgggtttattggaaactctaaaggcaaatggaatgcttctttagttccactatctaaaataaatgatag

SEQ ID NO: 341301 - DNA, 532 bp, Homo sapiens
tctatagtctactgttgaaaatatagctactttcattagtgaaagcaattgctggctatgtagtcatctagatgaatgggcacaaccaccatgaatactagaacatgcaccagtacacacttgggtgatcaatttaggaagctggatttataaaaagtttggtatccttactttggcaggcatatttatgctcaaatgacttggcactggcaaaaagcaatagaaacaagggataccctatagctattgattttattactggtaatttatcttcakgcatagaaaaccttaatggaactggacctaatctaggctatattacacactccttctgtaatgaaacactttgattttacataaataatgaagactagacttttatatataatgacacagatataaaatcagaacatgacaatgataccctcaaccatgttatcagacaactcctcaaaactagacatgggtttattggaaactctaaaggcaaatggaatgcttctttagttccactatctaaaataaatgatag

SEQ ID NO: 341302 - DNA, 449 bp, Homo sapiens
aatcttctctcagaggcaactggttatgaacattaatcacatttacaaaaaacctccacagcaacacctaggytagtgtattagtctgttcacacactgctgataaagacatactcaagactggacaattttccaaaaaagaggtttaatatggacttacagttccacatggctggggaagcctcataatcatggtggaaggcaaggaggagcaagtcacatcttacatggatggcagcaggcaaacaaaaagagattgtgcagggaaactcccctttataatgccatcagatctcatgagacccacccaccatgagaacaccatgggaaagacctgctcccatgatccagttacctcccaccaggtccctcctataacacatggggattcaagatgagaattgggtggcgacacagccaaaccatatcaactagtatttgaatgaata

SEQ ID NO: 341303 - DNA, 546 bp, Homo sapiens
aagttcagaaggtaaagtagcttcaggattatggaagcaatgttaaaacgtgtggactttattctgtaactgctgaggatttttgaagaattttaagtgaaaaagcaacatgaattagatctttgggtaaaatagatttcacttgtgtaacagcgaagaaaacaagataatgggttttgctgtttcttctgaagaaagaggagtagaatttcaatcataggcggaaatgttcccttgaagcagggcacagagccatttgcattagtgtgtgtgtgtgtgtgtgtgtgtgtgtgtgtgtgtgtgtgtgtgaaacatacacacaatgagcttaaaaacagacaaataacaaatccagatgacataataattccagtaaaaaaggggwgaaggaaaataatgtctaataaaaataatttctgacttaacagtaagtaggagccatttttttctaggcttacctagaccggcacctatgcccagttggtcaaacattttcttccagattcacttgaatgtcaagttctaggcataagcttagggtttctc

SEQ ID NO: 341304 - DNA, 546 bp, Homo sapiens
aagttcagaaggtaaagtagcttcaggattatggaagcaatgttaaaacgtgtggactttattctgtaactgctgaggatttttgaagaattttaagtgaaaaagcaacatgaattagatctttgggtaaaatagatttcacttgtgtaacagcgaagaaaacaagataatgggttttgctgtttcttctgaagaaagaggagtagaatttcaatcataggcggaaatgttcccttgaagcagggcacagagccatttgcattagtgtgtgtgtgtgtgtgtgtgtgtgtgtgtgtgtgtgtgtgtgtgaaacatacacacaatgagcttaaaaacagacaaataacaaatccagatgacataataattccagtaaaaaaggggagaaggaaaataatgtctaataaaaataatttctgacttaacagtaagtaggagccatttttttytaggcttacctagaccggcacctatgcccagttggtcaaacattttcttccagattcacttgaatgtcaagttctaggcataagcttagggtttctc

SEQ ID NO: 341305 - DNA, 553 bp, Homo sapiens
acacatatcccaaggcatatcttactgaaatgacagaatatcaacaaaaaagggaaaatttagaaagtggtggtggtagtgaggacattacctataaatgaacagagataagaattacagtggacttaatagaaaccatgcaaataaacagagagtggaataaaatagtaaagtattgaaaaaaatccccattcaaactagaattccatatccagtaaaatycttcaaaagttgaaggctttctcagagaaaacctgatggaattcatcaccaacagacctaacctgcatgcaatgttaaaagagttattgactaatatctttcatgaacataaatgcaaaaatcctcaaaaaaattaacaaatccaaaaatgtatagaatgaattactatagtacttctttatccacggtttcactttccatagttccatttacctgtgatatagtatgataggatatattgagagatgacattcatataacttttattacagtatattgctatgttgttctgttattacttattgttgttaatctcttactgtacctaatt

SEQ ID NO: 341306 - DNA, 553 bp, Homo sapiens
acacatatcccaaggcatatcttactgaaatgacagaatatcaacaaaaaagggaaaatttagaaagtggtggtggtagtgaggacattacctataaatgaacagagataagaattacagtggacttaatagaaaccatgcaaataaacagagagtggaataaaatagtaaagtattgaaaaaaatccccattcaaactagaattccatatccagtaaaattcttcaaaagttgaaggctttctcagagaaaacctgatggaattcatcaccaacagacctaacctgcatgcartgttaaaagagttattgactaatatctttcatgaacataaatgcaaaaatcctcaaaaaaattaacaaatccaaaaatgtatagaatgaattactatagtacttctttatccacggtttcactttccatagttccatttacctgtgatatagtatgataggatatattgagagatgacattcatataacttttattacagtatattgctatgttgttctgttattacttattgttgttaatctcttactgtacctaatt

SEQ ID NO: 341307 - DNA, 553 bp, Homo sapiens
acacatatcccaaggcatatcttactgaaatgacagaatatcaacaaaaaagggaaaatttagaaagtggtggtggtagtgaggacattacctataaatgaacagagataagaattacagtggacttaatagaaaccatgcaaataaacagagagtggaataaaatagtaaagtattgaaaaaaatccccattcaaactagaattccatatccagtaaaattcttcaaaagttgaaggctttctcagagaaaacctgatggaattcatcaccaacagacctaacctgcatgcaatgttaaaagagttattgactaatatctttcatgaacataaatgcaaaaatcctcaaaaaaattaacaaatccaaaaatgtatagaatgaattactatagtmcttctttatccacggtttcactttccatagttccatttacctgtgatatagtatgataggatatattgagagatgacattcatataacttttattacagtatattgctatgttgttctgttattacttattgttgttaatctcttactgtacctaatt

SEQ ID NO: 341308 - DNA, 583 bp, Homo sapiens
ttaaatgaaaacagattacttcatgtctccaagccaaatatgtttagttctttaagatgcccatttaagtgtgaaggaattagaggaggtagtcagggaataagtctcttctaaaatctctagttagaggacagctacatttctttcaattaaaatttaaaaagaaacttaaagatcatctcctccttcagctatgctggcaayctgaatagttaatgtttctctttgctctaaattatgctcattcttatccttagccatcagtagcaagaacataacttggagacatattgatgggagataatttcaccataaaatgtatttggacacacaattaaaaatacaaagtctttttagcccaaaggcagataaacaactaaccataaaaccaatgctctatgaacccacggacacaaaaaataattattttcttatcactaagccaatatttaaaactattaattgatctctcttagcctcccttgccattttagataaggtcttcatccaacttaatgttgtaaaagctagttaaatcaacaaattactaagaccctcttttttactgctctaattaagagtt

SEQ ID NO: 341309 - DNA, 569 bp, Homo sapiens
taaataccatttccaactaaaaggagacaatgctctctggagaaatagctaattccagggttagaggaggagagtacaaaacgagataagaacattttgtcatgccagaaattaaggagtgctaaaaagtgttgggtgcatgtcacaaaaacagagaagctagcttgaagccccaagccccagtcaaatggcttttgcaaaattatgatcataagagaaatctgacatcgttaactccaacttgcttctaacttccaagctatccttggtcattccaggstgtagacaaagctgactttcggagaaatttaatttatagcttaaccttaaatcaaggatgaaaatagcccttctccaaactaaaccaccattgtaaaattaatgaaagtccacaaggttaggattaagagatgggcctgattactgctaaaatggggatataatctcaggagtcatgtagcaggaggtagcaagatttgtgacttcctcaattactcctatagataacatcactgttagagaatctaagatcagttttttgagatgtctttcagatcaatcccaccgga

SEQ ID NO: 341310 - DNA, 590 bp, Homo sapiens
ttacacattggctaagaccttggctctgcatttagcttttcttgaactattgctatcaaagatcaaatacatatcttatgatttcaagtcagatccaggaggcgatatgcccaataatttaaaagtagtccctttaggctaagacaccatctgctgaaaataagtcaccatgtcttttgtcctccagatttatttcttcttatcaattatttgcttctgctaggcctcagtttagcrccttagactccagttaccgctccactgaaatcgttccatcatccctactgactgccagaaattgacctttcttttctttgggcccttgcctttgggactgagcttgatgaatgcctacctcaaaagttaatcctaccactctttctccaacactgtgtgggaagctttttcaaagctcaagtagtaaatccttgactgccagcttgtaaaatttgtgtttaattttctagacggtgtttttattgactttccacatcagttctttgcactcatgacgattccattctctcttttttaggatgcatccaaaccaaccacgatattttccatttccaaactcctcatattcatgc

SEQ ID NO: 341311 - DNA, 590 bp, Homo sapiens
ttacacattggctaagaccttggctctgcatttagcttttcttgaactattgctatcaaagatcaaatacatatcttatgatttcaagtcagatccaggaggcgatatgcccaataatttaaaagtagtccctttaggctaagacaccatctgctgaaaataagtcaccatgtcttttgtcctccagatttatttcttcttatcaattatttgcttctgctaggcctcagtttagcaccttagactccagttaccgctccactgaaatckttccatcatccctactgactgccagaaattgacctttcttttctttgggcccttgcctttgggactgagcttgatgaatgcctacctcaaaagttaatcctaccactctttctccaacactgtgtgggaagctttttcaaagctcaagtagtaaatccttgactgccagcttgtaaaatttgtgtttaattttctagacggtgtttttattgactttccacatcagttctttgcactcatgacgattccattctctcttttttaggatgcatccaaaccaaccacgatattttccatttccaaactcctcatattcatgc

SEQ ID NO: 341312 - DNA, 450 bp, Homo sapiens
gagttcaaatttagattgagacttcaaagataagtggartaaacaagaaaggctatgggataagagatgagagaaaaagtagacttactgagtctctgagttgccatacgtcttcttggtcacagtctgtatcctctccgaagcaatgattttccccatgctactgttacacagataaccataaaacctcttgcttgtacatgttcaacaattaaaaaaaaaaccaaaaaactcccttctgtagcttttagctttactgttggacactgttcatgactatcattgtgagaaaatgcttctgatttccctataacttgccctcattgtccctagttttgccatctggagtagcatagaaccagtctgttgcatgaggaaaggcacagagccaggaatgagcactatgccttcctgagacattaaggggtaatgttctgattatagtggaag

SEQ ID NO: 341313 - DNA, 481 bp, Homo sapiens
gcagattacttgagcccaggagttagagataagcctgggcaacatagaaaaaccctggctctacaaaaaatacaaaaaaaaaaaaaattacctgggcatggtggtgtgcactgtagtcccagctctacttgagaggttcaggtaggaggatcaattgagaccaagaggttaaggttgcagcgagctgtgatcatgccacttcagtccagcctaggcaacaaagcaagtctctgtctcaaggtaaaaacaaaaaaatcacataacamaccaatactatgcacttctggatgtgaggctctaagatgaacatagttacactttgtgggattcttgccaaaaatttgtaacctaaatctaaccattagataatatcagataaatctaaattgagaaatattctacaaaataattgctgtgaacttcaaactttcttttagtgtccatttatattgtattctaaggcctctacaaatatatccag

SEQ ID NO: 341314 - DNA, 583 bp, Homo sapiens
gaagctaccatttactctgtgtctactatgtgccagggggcctgcttggcactttattcattactcttaatctttaaaataatcccgtaaggtaggtgttaatatttgttatatttttctacttccaggatgataaactgatgctcagagaggttaggttatgtaagtaaggtagaaattatataaccaaggtgatatggtttggctttgtgtccccacccaaatctcatgtcaaattgtagaccctagtgttgaaggaggggcctggtgagaggtgattgaatcatggaggtggacttcctccttgctgttctcgtgatagagttctcatgagatctggttgtttaaaagtgtgtagcacctctcygtctccctttctttctctctctctcctgccagcaatatgaagacatgcttgcttcccctttgccttctgctgtgattgtaaatttcctgaggtcttccaaaagcagaagctcatacagcccaccaaaccatgagccaattaagcctctttattttaaattacccagtctcagatatgtctttacagcagtgtaagcagggactaatacacaaggca

SEQ ID NO: 341315 - DNA, 631 bp, Homo sapiens
tttcaggcatccttcagcaaagttgtatttcttccttccagtgcattatatacgacttttasattcttcacacttttctagtgctgtgagctctagcactatgaaatagctacctcatttatttaatttattatgataatttttcccatataattaatcttctataacctttatttaatagctacagagtattcaatcttctgaatatattatagattatttatctaattttctatcatcagaattttaggtcactttcatttattcacattaggaaacatgcttatgtggtgtgcatgtttctccaggaaaaaagaattagagtgaacaaaatatgctgggttttaaggctttgtgtatattttgccaaatgccctcaagaatggttttaccaaattatactactgatagcaacaggaggcagaataattctaggcagagaggggtgggtccctggcgaaattccactctcaagccaaaaagcctgagatggggcccaaagtgagaacttatatccatgttttcccactggaatgctgccttttcgtaaaccacccatggccctgactcaccccatcctgtgccttataaagaccccaggctcagccagcagaggggagaagcaggtgga

SEQ ID NO: 341316 - DNA, 569 bp, Homo sapiens
accatcagggccattttactagaaagttcgaattatttattcatgataatcaaccccaatctaaagaggtccaatttcttgtatcttacctaatttttcccaatcaatgaatcagagaaaactgaccagcaaagaaaacattaaggatcgaaactatttagaatctacatcatttggggaaactcagatgaactttgcatatctcagcaaaggctagtatctattgacatttgagttacttgtttcaaaatgacccactaggtatctggactctttcccaacttcgtatagcctgagtggaatctgaaaaattgactattagttaacatttaatttaggcatcaaaggaactgcagcttcagtctttgaaaaaaatctgctttggacataaagtgaggtctaaattgatgtgatgcattatgatgsaaagagcacattgtcacatggcacactgcagggagagccatgggggtatagatataaagcatgtccaggtttgactccctcacaactggaaaaaacaaaataattaaatttgaagagactagcaaaagaaaaattgggttgcc

SEQ ID NO: 341317 - DNA, 476 bp, Homo sapiens
tgtggtactgttacaaatacaaatacatagaccaatgaaatgtaatagagaacccagaagaaaccccacacactcacaggagattcattttcaacaaaggtgaaaagaacatattgaagagtctcttcaataaatggtgttaagaaaagtggatatccatatgcagaagaaaggaactaggcctctatctcttgccatacaaaaatcaaatcaaaatggattaaatacttaaatataagatctcaaactgtgaaactactacaagaaaacattgcggaaattatccaggacacggtccggacaaaaatttcttgartaatacgccacaagcacaggcaaccaaagcaaaaactggacaaatgggatcatgtcaagttgaaaacctactgcacagcaaatgaaacaatcaacaaagtgaagtgacagtccgcagaactggataaaacatttgcaaactacccatcagacaaagaatt

SEQ ID NO: 341318 - DNA, 548 bp, Homo sapiens
taattattacacattgcatgcttattttaaaatatctcatgtaccccataaatacaaatacctactatgtaaagaccaaaattaaaattaaaaactaaacaaaataaaatgagagatatgtgtttcttcccttcacttgaacatttagaggtgtactttcaatatttttgtatctcagggaatagggaagcccaaagagagggagagagttggagaaatagcttttcagtggagcagtcataaaacatccaatacttactgattaagttcattgtcttatgtgggagcagttagtgrtgcctcaaaacaattagaatagtaacatcaaagatcactgctcatagatcactgtaccagatataatgatgaaaatctttgaaatattgtgagaactattaaaatgtgacacaaagacacaaagtgagcacgtgttggaaaaatggtgacaatagccttgttagacatagggttgccccaaatctttgatttgtaaaataaaaaacactatctcagaagtacaataaaatgaggtatacctgttaataaca

SEQ ID NO: 341319 - DNA, 548 bp, Homo sapiens
taattattacacattgcatgcttattttaaaatatctcatgtaccccataaatacaaatacctactatgtaaagaccaaaattaaaattaaaaactaaacaaaataaaatgagagatatgtgtttcttcccttcacttgaacatttagaggtgtactttcaatatttttgtatctcagggaatagggaagcccaaagagagggagagagttggagaaatagcttttcagtggagcagtcataaaacatccaatacttactgattaagttcattgtcttatgtgggagcagttagtggtgcctcaaaacaattagaatagtaacatcaaagatcactgctcatagatcacygtaccagatataatgatgaaaatctttgaaatattgtgagaactattaaaatgtgacacaaagacacaaagtgagcacgtgttggaaaaatggtgacaatagccttgttagacatagggttgccccaaatctttgatttgtaaaataaaaaacactatctcagaagtacaataaaatgaggtatacctgttaataaca

SEQ ID NO: 341320 - DNA, 548 bp, Homo sapiens
taattattacacattgcatgcttattttaaaatatctcatgtaccccataaatacaaatacctactatgtaaagaccaaaattaaaattaaaaactaaacaaaataaaatgagagatatgtgtttcttcccttcacttgaacatttagaggtgtactttcaatatttttgtatctcagggaatagggaagcccaaagagagggagagagttggagaaatagcttttcagtggagcagtcataaaacatccaatacttactgattaagttcattgtcttatgtgggagcagttagtggtgcctcaaaacaattagaatagtaacatcaaagatcactgctcatagatcactgtaccagatataatgatgaaaatctttgaaatattgtgagaactattaaaatgtgacacaaagacacaaagtgagcacrtgttggaaaaatggtgacaatagccttgttagacatagggttgccccaaatctttgatttgtaaaataaaaaacactatctcagaagtacaataaaatgaggtatacctgttaataaca

SEQ ID NO: 341321 - DNA, 606 bp, Homo sapiens
aaaatggtgacaatagccttgttagacatagggttgccccaaatctttgatttgtaaaataaaaaacactatctcagaagtacaataaaatgaggtatacctgttaataacagttcaccgtgataaatgstatgttagatcaagtccatgatgctgagggtaaaaaggaggtaaagaaaggtcttctgaaaaattattctaagttgagtcattatctagcaatgagtcattatctagcaatgagagtgaagaaggtttgctgggaccttgaaaatggtccagtatgtctcatgagaccaagatgagagaataaagggatagaagtaaatagagtttgtctttcaaagaagttctgagatccactcatggcatgatattaagctctctgtgtatatgtatattatgaacaacaaaataaaacatggcatcaattaaggacagtagaaaatgtttggttcagctataaagatggtgtatacatttttctgaatgtcaattttatagctgagaattaatgcaaaaacatgttcattgatggaaaacataaactttaattcctttttcacggattagatactaaggtgggagacatccttaggtaacaga

SEQ ID NO: 341322 - DNA, 511 bp, Homo sapiens
ctggttctgagtgctgcccaatatatatacatatacatatatatacacatatacatatatatttwtatatatatatacacacacacacatatgtatatataaataaaggaaattcctggatgactatatatatacatacatatatgtgtgtgtgtacctattaggtatgtgtacatatatatagtttgtgtatatgtatatttctttgttcacatatactctatcaaatttaatttgtctacagtttttctttaaagcagcatataataagctttgctgcttatgttaggcacttctcagtttccctgattgtctgtcattatcattttactgataagaaaattcagtctccaagaggttaacgatttttcttaggattacacagctagtaatctgtagcacagaaattcaaatctatatgtagtctaccacaaaagaaaaaaaaaggaatggaagagacagatgaaagagtcagagaaacaggtgaactggaaaagtgcagcatcatgat

SEQ ID NO: 341323 - DNA, 573 bp, Homo sapiens
tgcttatgttaggcacttctcagtttccctgattgtctgtcattatcattttactgataagaaaattcagtctccaagaggttaacgatttttcttaggattacacagctagtaatctgtagcacagaaattcaaatctatatgtagtctaccacaaaagaaaaaaaaaggaatggaagagacagatgaaagagtcagagaaacaggtgaactggaaaagtgcagcatcatgatggcataggggtggagagaaagctttcctcttgggccgctgaaggttcactgaaccatcaactcacaaaaggcagattaattggagaaaaagcatccaaatatatttaacatgcaaatggagagaatcagagtgattactccatccccaagaggattcagaagcacataatcttcttggcaaaacaggttaygggacagggtaggaaagcaattctgttgaggggaatactagagagaatgagtggatcagggaacagagatcaactgtattatcttgtgaaaagatctgtttaggcgtggttacattcttggtcttacagggaggagaagaaaaaaaaa

SEQ ID NO: 341324 - DNA, 468 bp, Homo sapiens
cacttgagaccttttgaggtccagcttctatgagtgttatgatgacatataattcacatttcaaggcagcttaagccatctgttcattccctaaagaaactaatttgcttctgttcttccacagtgagaagctgtactcttctccctacagactaccttctttattataacagagactttgtgaaatgttcagatggatgattcagggtgaaatctgtgaccattctcaggaaaactatctcatagtrcttgtcctgtgaaaagaggatgagatacaccaagtgcattttctcctcctcctcctaatcctcctcctacattttagcatcatcatcatcatgaaagctggaaaactcctctagtttccagcaaatcatttagcctttctcatcatattgcctctatttgtaaaataagatggttggatcaggctatttctgcagtccccctcagctttaaaatttgaga

SEQ ID NO: 341325 - DNA, 417 bp, Homo sapiens
agatacaccaagtgcattttctcctcctcctcctaatcctcctcctacattttagcatcatcatcatcatgaaagctggaaaactcctctagtttccagcaaatcatttagcctttctcatcatattgcctctatttgtaaaataagatggttggatcaggctatttctgcagtccycctcagctttaaaatttgagagaattgtaaaattaatcacagtgagctcactctgtataagacacagggaaaagagcatgactataaatcataatccttaccctcaaggggcctaaaactagagtgaatctggaaaactgggaatcacaacaaaaattaacagaaaacatcactaggaaatactaaaatcttaatatgatcttatatgatatttaataatatttaccattgaaggttaga

SEQ ID NO: 341326 - DNA, 478 bp, Homo sapiens
tataaaatattttcatttacattcacttgatcatagtattcacctcctaataatctatattacagcaacctaggtgtactgactccaaaacaagttcttgccaccacatggccttgcccgagcattataacttttaaaataacatttgatgtcccactttatacccttggataaggtagagctgaagtgatctggatatcagatgtcaagaaggaatgaaaacaggataaagcaaatgttattcgagttgggggccaaataaacactatgctattcaaataaaccctaaacacaatgggygtctgagctatttttattgtatgtgttaagatgtaattaagagtttttttctcttcatatttttcctgtatatatttgaatctagagaatccaagtcattctaaaagatgtcactcctgtcagcttccagctattttgtatagtgtttaatcaactgatgaagttgggtgcatgtctt

SEQ ID NO: 341327 - DNA, 606 bp, Homo sapiens
ttacttacctactctcagcctcagtttccccatctctaaaataaggctaccaatacctaccttctctggccattgtcaggatgaatgaaagagctctgaaagtatttctgtaattagcagacatcagagattgttattctccaaggtaagaggcccccctagatccctggcggtgacagtgtcaagattctttttccctcctctgcggtgcccrctccttttccagccttgtggctggctctcatcctcctttccgcaaccccccactcctccttgggaccaccttggcgggcccagcttctcgcagcctgccatattccataggtgcccccattctaaaacctgtaggggtgccctgcacaggcgcacggttggtcgaggtgggacaggtggcgggggtctccactggcctgcgtccgcgccccccaccctgtttaggagttcctgtttggagatggctccccctcgtcctcagctcgtctctgggctaagcaggggaggagagaaataaaaggtggggggcctggaagggggttcccaccttctcagtccgggacgcgagacgggaacgcagccctggcgccccaacgctgcaccaccgtgggt

SEQ ID NO: 341328 - DNA, 603 bp, Homo sapiens
gctttttcttacatgcctaaaatttacagctcacacacctcataagctttatactgctttgctctccctgcactcccctctgcttcgtttgcctcttttctcgattccttttttcattcccctctacctcccatgcttacttcctctccttttagacacacttcttttcatyttctctattttcctgtaagatccaaagtcatttttgataaaacagccaactctagatgttctgggaaagatagtcattatttttgccgactactgaacatgagaagactctctatgtctgtaatgtgatgagagttgttcctcctgtttcaaaggctatgattgaaggcaccaaggaggaaagataaaaagacatacatagcaatgtgagaagacatctaataggttagaatatattcacacaaatataaaggtatctatttggaagtgaaaagcccggagaaatgcatgggaagaggtcacttccttgaacatctttactttttaacaaagctgacagacacacaatcaaaagaccccaaaatgccgtctgcagacctgaatggagggtgtcttgagtgccttgctctacaggcaagaggaactggaagg

SEQ ID NO: 341329 - DNA, 603 bp, Homo sapiens
gctttttcttacatgcctaaaatttacagctcacacacctcataagctttatactgctttgctctccctgcactcccctctgcttcgtttgcctcttttctcgattccttttttcattcccctctacctcccatgcttacttcctctccttttagacacacttcttttcatcttctctattttcctgtaagatccaaagtcatttttgataaaacagccaactctagatgttctgggaaagatagtcattatttttgccgactactgaacatgagaagactctctatgtctgtaatgtgatgagagttgttcctcctgtttcaaaggctrtgattgaaggcaccaaggaggaaagataaaaagacatacatagcaatgtgagaagacatctaataggttagaatatattcacacaaatataaaggtatctatttggaagtgaaaagcccggagaaatgcatgggaagaggtcacttccttgaacatctttactttttaacaaagctgacagacacacaatcaaaagaccccaaaatgccgtctgcagacctgaatggagggtgtcttgagtgccttgctctacaggcaagaggaactggaagg

SEQ ID NO: 341330 - DNA, 596 bp, Homo sapiens
aactactttatgcccagagaaaagaaaagagcagcatggttcttacatgtttgctaagctcttgacccatgctctcatgagtaccctatcccatctggatctgagtgttgcccttcactatccaccttctttcatttaacagttattcrctggacacctcctatgtgtcaggcactgtcttagatgctggattcttggtgatgaacatggcagacaaggtccctagcctcagggagtgaacatactagttgtcagagggaatgggggatgggagtaagcaaaaacaaaaacaaaaacaaataaacaaaaaaaaccaataagcaaacagatactcagaaccctgaactgtttctgacatatagcaggtgttcaataaatatttgtgatttaatggaatgagcaagatagtttctgatagtgataagggatatgaaggatattgatgtgaaatagagcatttagacagggtcaacatggaaggctctgtgaaaaggtgatgtataggccaatatgcaaaggaaaggaaggagcctgcagaaaaggtgtccctaaagttgaggaagaagcaagtgaaacatcagggagttagtaacaaa

SEQ ID NO: 341331 - DNA, 616 bp, Homo sapiens
agcatggttcttacatgtttgctaagctcttgacccatgctctcatgagtaccctatcccatctggatctgagtgttgcccttcactatccaccttctttcatttaacagttattcactggacacctcctatgtgtcaggcactgtcttagatgctggattcttggtgatgaacatggcagacaaggtccctagcctcagggagtgaacatmctagttgtcagagggaatgggggatgggagtaagcaaaaacaaaaacaaaaacaaataaacaaaaaaaaccaataagcaaacagatactcagaaccctgaactgtttctgacatatagcaggtgttcaataaatatttgtgatttaatggaatgagcaagatagtttctgatagtgataagggatatgaaggatattgatgtgaaatagagcatttagacagggtcaacatggaaggctctgtgaaaaggtgatgtataggccaatatgcaaaggaaaggaaggagcctgcagaaaaggtgtccctaaagttgaggaagaagcaagtgaaacatcagggagttagtaacaaactgattgcatttgaggacagagagagaacaatgtgactgagacaaactgagc

SEQ ID NO: 341332 - DNA, 577 bp, Homo sapiens
gtcaggcactgtcttagatgctggattcttggtgatgaacatggcagacaaggtccctagcctcagggagtgaacatactagttgtcagagggaatgggggatgggagtaagcaaaaacaaaaacaaaaacaaataaacaaaaaaaaccaataagcaaacagatactcagaaccctgaactgtttctgacatatagcaggtgttcaataaatatttgtgatttaatggaatgagcaagatagtttctgatagtgataagggatawgaaggatattgatgtgaaatagagcatttagacagggtcaacatggaaggctctgtgaaaaggtgatgtataggccaatatgcaaaggaaaggaaggagcctgcagaaaaggtgtccctaaagttgaggaagaagcaagtgaaacatcagggagttagtaacaaactgattgcatttgaggacagagagagaacaatgtgactgagacaaactgagcaagagggagagtagcacaaactgatgtcagaaaggtagagggagctcagctatgctggcactatggatcaaacaaaggagtttgggcttaatttc

SEQ ID NO: 341333 - DNA, 561 bp, Homo sapiens
actgccttggactaattagttttgacctccaggatccgggaaaaaagtcatactccctcaaagcacctggaagaaggtggctacattaaaaaatatagggcttttctgtagactaatagatactgagtaagcaaccaatacagtctgctttagacagttattacagggtccaggcagagggtgatggtggttcgtattagggtaatggagtaggggcggagagaaggacacacctaaaagcaacaagatttgctgrtggattggattaggagggagaagggaaaaaacaagacagaaggaatgatgcattagtttagacctgagcaattaaatcaataatttacttagataagaaatgttgggtagaaacaggttgagatgaaggtgaagttacacatttgaatagttgcacatagacagattaatacatgaatttgaagctaagagggagatcatggctgattatatgaactggagagtcatcagcatatagaaggaatttaaaaccacggaactgagtgaaatccttacggacaagggtagcaagggaggaatgcaggt

SEQ ID NO: 341334 - DNA, 630 bp, Homo sapiens
cacaaataacattatattgctttaaacgaactactacttcaaataggacaaatgatatataatgagcttttttatatcttaaaaattaagatgtacttttgttttaatcaatggaggttaaagttatagtttaaaaggtatacctcttctaattaagatatacctcttcttctaattaaaccctccaagtcaggcagccatctacagtgcattaaagttcagattttgcataaaaactcattatctaaacttgatgggttttccttcctttcaatacaccacaccctcagaaggggtctaaaccaacaagaccctttaagaaatgcaaaataagacctcaccttggctcactgctgttcactgacaaacctgaggaattctaattctacttggaaagaaatagtcttctatggggaataaaacattttaaaagaaaaaaactatattttttgttatatccacatgcatcttgagacactgttttatattgcaacagatagagtccattacttcctctactggccaagcctagaaaaagagttactctattcccaacaagaaggaagaggtgttatttaaaacacacacacacacacacacacacacacacrcacacactcacccccccca

SEQ ID NO: 341335 - DNA, 486 bp, Homo sapiens
ctgtatatcaaatttgaaaaatcctgccagataattctaataggagactgatgaggagacatattgtatggtggttacatttcagtctctggagtctcccaaacatgggttcccatttctattccattggctactagctatgtgactttgggcaggtgaattagacttcagagtttcaatgtttccttctataaagtccagatgctwattacaataactatttcaaatgcttatggaaatgattaaattaaaaacacataaagcacagcacacagtatgtgatgcagagcaactgcttaataaatgtctgctgtaaatggatgcataggccagtctggaaagaccacatggggctctaatgtgcgttggtcagaccctgcccatcctcagaagtagaaaacaaaatgaaggcatagatctgactgcagagttggtgaaggcataaggccagtgctgcccttattggctatttgggactattcagct

SEQ ID NO: 341336 - DNA, 599 bp, Homo sapiens
gtgctttaaacatatgcagttaattacatacaattattcctcagtgaaactgcttaaataatttctggaatctgctacttttctccatgtctattaaccacacgcgagtgccttctataatagattgaccatcccctcactctcccctcctgtccattcctcactgcagccagagtgattttttaaaaaagtaaatttctatgtgtcaattcactgccmaaaattactcataaagactcaaagacttattcttgtcttaaaaatcttaattattcttgctccttcctgagttctggtctctcttccattttatttccctatctttaaccaccctgcactttttgtcccctgaacttgccaaaactgttcctgtcttggggcctttccacattcctgttccttttgcgtgggactctgcccttcttcaggcaaatgcctaactatccttttgtctcagcttcaatgttatttcctccaagcatccttctttaatataccaggccaggttaggtgccacaggaagcgcttgcctacgtttcctctgcagcaccaataacacatgtgagtaattatctgtgcaatgttatgtttcactatct

SEQ ID NO: 341337 - DNA, 563 bp, Homo sapiens
acatacaattattcctcagtgaaactgcttaaataatttctggaatctgctacttttctccatgtctattaaccacacgcgagtgccttctataatagattgaccatcccctcactctcccctcctgtccattcctcactgcagccagagtgattttttaaaaaagtaaatttctatgtgtcaattcactgcccaaaattactcataaagactcaaagacttattcttgtcttaaaaatcttaattattcttgctccttcctgagttctggtctctcttccattttatttccctatctttaaccaccctgcactttttgtcccctgaacttgccaaaaytgttcctgtcttggggcctttccacattcctgttccttttgcgtgggactctgcccttcttcaggcaaatgcctaactatccttttgtctcagcttcaatgttatttcctccaagcatccttctttaatataccaggccaggttaggtgccacaggaagcgcttgcctacgtttcctctgcagcaccaataacacatgtgagtaattatctgtgcaatgttatg

SEQ ID NO: 341338 - DNA, 599 bp, Homo sapiens
gtgctttaaacatatgcagttaattacatacaattattcctcagtgaaactgcttaaataatttctggaatctgctacttttctccatgtctattaaccacacgcgagtgccttctataatagattgaccatcccctcactctcccctcctgtccattcctcactgcagccagagtgattttttaaaaaagtaaatttctatgtgtcaattcactgcccaaaattactcataaagactcaaagacttattcttgtcttaaaaatcttaattattcttgctccttcctgagttctggtctctcttccattttatttccctatctttaaccaccctgcactttttgtcccctgaacttgccaaaactgttcctgtcttggggcctttccacattcctgttccttttgcgwgggactctgcccttcttcaggcaaatgcctaactatccttttgtctcagcttcaatgttatttcctccaagcatccttctttaatataccaggccaggttaggtgccacaggaagcgcttgcctacgtttcctctgcagcaccaataacacatgtgagtaattatctgtgcaatgttatgtttcactatct

SEQ ID NO: 341339 - DNA, 599 bp, Homo sapiens
gtgctttaaacatatgcagttaattacatacaattattcctcagtgaaactgcttaaataatttctggaatctgctacttttctccatgtctattaaccacacgcgagtgccttctataatagattgaccatcccctcactctcccctcctgtccattcctcactgcagccagagtgattttttaaaaaagtaaatttctatgtgtcaattcactgcccaaaattactcataaagactcaaagacttattcttgtcttaaaaatcttaattattcttgctccttcctgagttctggtctctcttccattttatttccctatctttaaccaccctgcactttttgtcccctgaacttgccaaaactgttcctgtcttggggcctttccacattcctgttccttttgcgtgggactctgcccttcttcaggcaaatgcctaacyatccttttgtctcagcttcaatgttatttcctccaagcatccttctttaatataccaggccaggttaggtgccacaggaagcgcttgcctacgtttcctctgcagcaccaataacacatgtgagtaattatctgtgcaatgttatgtttcactatct

SEQ ID NO: 341340 - DNA, 599 bp, Homo sapiens
gtgctttaaacatatgcagttaattacatacaattattcctcagtgaaactgcttaaataatttctggaatctgctacttttctccatgtctattaaccacacgcgagtgccttctataatagattgaccatcccctcactctcccctcctgtccattcctcactgcagccagagtgattttttaaaaaagtaaatttctatgtgtcaattcactgcccaaaattactcataaagactcaaagacttattcttgtcttaaaaatcttaattattcttgctccttcctgagttctggtctctcttccattttatttccctatctttaaccaccctgcactttttgtcccctgaacttgccaaaactgttcctgtcttggggcctttccacattcctgttccttttgcgtgggactctgcccttcttcaggcaaatgcctaactatccttttgtctcagcttcaatgttatttcctccaagcatccttctttaatataccaggccaggttaggtgccacaggragcgcttgcctacgtttcctctgcagcaccaataacacatgtgagtaattatctgtgcaatgttatgtttcactatct

SEQ ID NO: 341341 - DNA, 575 bp, Homo sapiens
ttcaaaaacatttgttgaatgatgatggagacaaaactgcaactaacttcctgacccagaactcacttcctgacttscaaattggatttttctcagcccactcatgcaaaattcatccttccatatctgatagccatatgtacttgtcctatagctatttaggtctcaaactggtaagcattaagaaatgtgtaatagaggagtatctttacatattaaagacttcaaaaccaaagtattagactttttataaaagaaggttagcaatgtttaccagagccaaattcatagatctgttcagtttttaaagtcagtcatgctcatcttaaagatacatttattctggaagctacatttcaagacaggtaacataggagaaaaccaggttagagagccagggccttatagaaaacgaagtcatagctccttgctgaaggcagactgacccttgatccagcactaccatgtctttagcaaagcagtggcctagattctccacatagctgagtgtgtggagctggaaagataaagattgcaaatatggccactttccaaaacagcttcctaagaaacag

SEQ ID NO: 341342 - DNA, 485 bp, Homo sapiens
ccctttttcaaattccacccaaaataaggaaaacaaggatagatttttatagagaaaaatatcgctatcccctgttatcttctttgagctgtggaatcacctccacacatgttcacaggaatcccaacagagctggcatgctttctcagctttcttccctgtcctcccttttgtggacccagtgtgactaaatgagatggtgcatttcagactcagattcaataaaaggttcctgagcatctccttctgtgctactggggcaaatgccacagctaacttaaattacatttctaaccccttcatctggccactttccagcatacaggctgaaaaagctaaaaatatgctttcattacttttcttgagtgtgaggatggttttgtgacagagctttgtccaataagaaataagcrgagacattgggatgacttttaggactgctttctttttccagatgaaaaagagtccctagaggtacttatcac

SEQ ID NO: 341343 - DNA, 583 bp, Homo sapiens
aaaacacattttatcaataactgatatattagactgaggaaaaatattattcaagatgtagatatgagtgagacataatcttttcaagagcacctagcacatttataaaaactgatgtgtaagagaacataaagcaaatttgaacagatatcaaataatctataaaatacactccatattatccaatcacatttttaattaagttacagaaataatgcttaaaaaaactatgcaatatgaaatyttaaaaacacacctttaaacaatatatagaccaaagaaaaactcatatttgatgctagaagatgcttagataaaaataaaaatgaaaacactaaatatcaaaatttgcaaacataaagctaaagcactacttcaagggaaatttatagtcttaaatgcatattttaaaaaagtttttaaaagactgcaaattactaacctaaagatataagtaattattaaaaatatcaactgaatagactaaagaaaaaagaaagaaaatcatacaggaaaaataatggaaaacaaaaattaaatagaattaatagaattaaaagttggttatttgaaaaggccaata

SEQ ID NO: 341344 - DNA, 588 bp, Homo sapiens
aaatcaccaaaatcaattctcaatgaaataaaaaataatttggtattataatcatcaaataaattgaattaatttcccctaaagtaaatatctgacccagaaagttatactagaaagttctactaaacattgacagaaaagattatttcaatcatacacaaaatgacacaaaatcttwaagagactaggaaaagagataatgtgccataactcatttttaaggcttgtacacctttaataataaaatgcagattaagagagaaaaaaaaatcacagtttgatctcactcacaagtttagtcacaaaatttttaaaatattagcaaaccaaatagctgaacacacacacgcatacacacacacattcatgtatatccatgtatataaaaaagcaacacattgtgaacaagttggatttatctcagaaatacaagttttcataaaaagtataaaatatagcaatataatttattactttaaaagataaaaggaacaaaacacatgattctctcaatagatacagaaaatcaactgataaaattcaatatccattcaggttttcaaaaagtctatagccaatgtcctactt

SEQ ID NO: 341345 - DNA, 483 bp, Homo sapiens
aagtgatccctagttgccctcattgctcatttacatcatacactcctaccagcaccatgacagtttacaaatgccatggcaacaacccagaagttaccacctttccatggcaatgactcagaagttactgaccctttcctagaaagtcctaaataacccacccctctatttgcattaacccgccctttaatttgtatgtaattggaagtgggtataactgggtatatattcagttgccaacagctcatacattgctgactctgggcacactgcctatgagttacccctgctctgcatggagcagtactgttcaataaaagactgctgtcaaacattactgagttgcccttgaattatttcctgggtgaagccaagaactctcctgggctaagcccagttttgggsgtcacttgtgttgcatcaatataataatcacatatgacttatggtacaatgaaatgaaaagggattcaaattaataaa

SEQ ID NO: 341346 - DNA, 483 bp, Homo sapiens
aagtgatccctagttgccctcattgctcatttacatcatacactcctaccagcaccatgacagtttacaaatgccatggcaacaacccagaagttaccacctttccatggcaatgactcagaagttactgaccctttcctagaaagtcctaaataacccacccctctatttgcattaacccgccctttaatttgtatgtaattggaagtgggtataactgggtatatattcagttgccaacagctcatacattgctgactctgggcacactgcctatgagttacccctgctctgcatggagcagtactgttcaataaaagactgctgtcaaacattactgagttgcccttgaattatttcctgggtgaagccaagaactctcctgggctaagcccagttttgggcstcacttgtgttgcatcaatataataatcacatatgacttatggtacaatgaaatgaaaagggattcaaattaataaa

SEQ ID NO: 341347 - DNA, 663 bp, Homo sapiens
ccaggtaaagaggggaaggagaagtaaaccagtgtatatgatcattttgagccaccttttcctgcacagactgaaatgrttatttaaaaaacttggtcttaattttgatttggctattattcagctatgtaacctcagctgaatgtcctaatggccattcatctcagctttatctgctagattgaaggacctctaaagttctactcaattgaaagacaaatatataatacacagattactactcagttagtataagcaaaatggctttttaaaaataagctttgagccatatagcagtgtttcttgcaataggtttgaatactcacagaaactccttcaggtaaaaatactagattaaaaaattcttcttaatgtgtagcagagctgacggaccagaaagagaatttttcagtggacagaaacaacaagaaagcattaatccacagaggtaagtaaactctgcagctggagcttgaatggaggtaaatgtgagtctctggtggcttagcttctggcattcagaggactgcagagcctgagagtcacatcgttaaaggataaacaacacagaacttctcccctgcttattaaacagatattatccccaacatcatgcctgtcttagacttgctttgtgtaaaaaagaaacaaaagtcccctcag

SEQ ID NO: 341348 - DNA, 555 bp, Homo sapiens
cttaccaaaacagcatattgtggttggattgttaaaaatgggatgagaaaatggcctttctcttgatattgctatgtataaatattggaaatgagctattgccttgcaaattatgatgtacgaattgaaaacaatttattatataaaaatccatttatccaaaagataaattaaagaattatttgatttataaagagtgtcacrctgagccagacttaaatagcatatccttgatatattcaagatggtcgtgtggggtgaagtcatctgctaaaattttaaagtttatatcagattttccctaccagaggcttttttttcctattgaaaaagaaaaaaatattgttttccattgccggtggttatattaactaagtttattgaatgatcattgatatattacttcaaagtggataattgggtagagaaatactgatcccagtggtttccagggaggtttaatgtccagcctatgtgcatctcattgctggatgtgatgtgctgaataaaccacagtcccttatctcacaagctggagtcccaggaagatgtctt

SEQ ID NO: 341349 - DNA, 555 bp, Homo sapiens
cttaccaaaacagcatattgtggttggattgttaaaaatgggatgagaaaatggcctttctcttgatattgctatgtataaatattggaaatgagctattgccttgcaaattatgatgtacgaattgaaaacaatttattatataaaaatccatttatccaaaagataaattaaagaattatttgatttataaagagtgtcacactgagccagacttaaatagcatatccttgatatattcaagatggtcgtgtggggtgaagtcatctgctaaaattttaaagtttatatcagattttccctaccagaggcttttttttcctattgaaaaagaaaaaaatattgttttccattgccggtggttatattaactaagtttattgaatgatcattgatatattacttcaaagtggataattgggtagagaaatactgatcccagtggtttccagggaggtttaatgtccagcctatgtgcayctcattgctggatgtgatgtgctgaataaaccacagtcccttatctcacaagctggagtcccaggaagatgtctt

SEQ ID NO: 341350 - DNA, 494 bp, Homo sapiens
aattattttgcatgctttgcccaaagcaagtattagtattgaaacatctcacttccttgcctgtgaccagaccacgagttctccttgttatcccacataagcagttgtctttggctttacaagagaagatggatgaggcctatctctgaatcacatctttttggccagttttctgcttctactccttttaatccgggagctggatcctgtgttctcagattctcttcagcccctacaccaggcaacccctgagaaagagtcactaartaggcttcttacaagaggaaatctgattccttggcggaggaatagctagagataggagtcgaccttgctgctctgagttcctgatagcagtgctctgctttcttaaactaggacacaagggttttgaagtagccccatgcccctgtggctctttggtttttgttggaaagtagccagctcatgaggacaggggtgggggttttcgagtgcaaggtgagaggaaatga

SEQ ID NO: 341351 - DNA, 558 bp, Homo sapiens
ttctgcttctactccttttaatccgggagctggatcctgtgttctcagattctcttcagcccctacaccaggcaacccctgagaaagagtcactaagtaggcttcttacaagaggaaatctgattccttggcggaggaatagctagagataggagtcgaccttgctgctctgagttcctgatagcagtgctctgctttcttaaactaggacacaagggttttgaagtagccccatgcccctgtggctctttggtttttgttggaaagtagccagctcatgaggacaggggtgggggttttcgagtgcaaggtgagaggaaatgaggccaaagattacatccaaagtgcaccctctccttcaggacacttctcccttcatttccaaatctcccttcatttccctcyttccttgccttgccgacattaattcttacatcagatgcatttgtcttcatccctctgaagcaagagtgtctttaatctcggaaccctaaaagctgagtagtagaaaagctgcaccacacaacgccgtgtgaataatgtccctgctgttgatag

SEQ ID NO: 341352 - DNA, 558 bp, Homo sapiens
ttctgcttctactccttttaatccgggagctggatcctgtgttctcagattctcttcagcccctacaccaggcaacccctgagaaagagtcactaagtaggcttcttacaagaggaaatctgattccttggcggaggaatagctagagataggagtcgaccttgctgctctgagttcctgatagcagtgctctgctttcttaaactaggacacaagggttttgaagtagccccatgcccctgtggctctttggtttttgttggaaagtagccagctcatgaggacaggggtgggggttttcgagtgcaaggtgagaggaaatgaggccaaagattacatccaaagtgcaccctctccttcaggacacttctcccttcatttccaaatctcccttcatttccctccttccttgccttgccgacattaattcttayatcagatgcatttgtcttcatccctctgaagcaagagtgtctttaatctcggaaccctaaaagctgagtagtagaaaagctgcaccacacaacgccgtgtgaataatgtccctgctgttgatag

SEQ ID NO: 341353 - DNA, 545 bp, Homo sapiens
agaaaagctgcaccacacaacgccgtgtgaataatgtccctgctgttgatagtgtgaaccagaacaaccatgcacagcagccctgagacatgggttcctagagagagtcatctcggtaaatggatgacttctttttctggaaaggaatccacctgaatgccatgtcccagctttctctgttattgtccattcacggccaccctgtgatagctaggttttctcaagctgaactaaggactttggttataaaaggagaaaaaagatataatttcctgtggacagcaaagtgaccctgcatctaggaaatttactcattttttcagaggtgtggaaagactagggcacagaccagcgggcctgagccatcagaaaggttcttttttgtccaggtagttatagtgcccctgttgggggagtaccgcacccagatttccctgacttggtgttcacagaggacttgatgcaattgtggtttaaaaaaataagcctaagtcacagttgsaactgaagtgcctcacccagtctgtcatctgtaccaacttgtg

SEQ ID NO: 341354 - DNA, 545 bp, Homo sapiens
taggaaatttactcattttttcagaggtgtggaaagactagggcacagaccagcgggcctgagccatcagaaaggttcttttttgtccaggtagttatagtgcccctgttgggggagtaccgcacccagatttccctgacttggtgttcacagaggacttgatgcaattgtggtttaaaaaaataagcctaagtcacagttggaactgaagtgcctcacccagtctgtcatctgtaccaacttgtggaaaggaaagtgctgagtgtgagcacttttgtccatagaaagcaattagaatgctctgttggttgcctttatggtgttttatatgttaatgatgtgggacataaacttgcaggcctcagagactagcctttaaggcagagggaacagcaagcgcaaaggccctgaagtggtagcattattgatatgattctagaaatggtgacttcagaggtggctggagaggtgtgaaasagatggagagtgataagacgtgtatggtcaagagttagagagggtggatcatgcagagtcttgtaaac

SEQ ID NO: 341355 - DNA, 512 bp, Homo sapiens
aaaaactaccaatgactgggctgcaccctagaccrgttttaaatcacagtctctgggaaatgggcctggtatcagtatttttaaagttcatctattgattctaatgtgcagccaagtagagaacaacctttgagaccattgggcaaagaatgcatccgcctaacccttctcagctcagctcacatttgtttcttgcaaaattaggaaagatagtatcaaaaactaggaaccttgactgttaccctgtacagctagtgcccatatcaactgattcttaactttcttttcccaacgttatcctacatttttcttttaagggctcattgaacatatcataaggctctattatgtccaccaatctgagaggggaaaaaacaaacaaatcaagaaaaatcttgtctaaatagtgtgtcattaaaaggtcagaatatagaaccttcacaaatgtcaccctatgttaaattataatgaagtcacttattagaaaatgtacatgtaaaataataattaaa

SEQ ID NO: 341356 - DNA, 512 bp, Homo sapiens
aaaaactaccaatgactgggctgcaccctagaccagttttaaatcacagtctctgggaaatgggcctggtatcagtatttttaaagttcatctattgattctaatgtgcagccaagtagagaacaacctttgagaccattgggcaaagaatgcatccrcctaacccttctcagctcagctcacatttgtttcttgcaaaattaggaaagatagtatcaaaaactaggaaccttgactgttaccctgtacagctagtgcccatatcaactgattcttaactttcttttcccaacgttatcctacatttttcttttaagggctcattgaacatatcataaggctctattatgtccaccaatctgagaggggaaaaaacaaacaaatcaagaaaaatcttgtctaaatagtgtgtcattaaaaggtcagaatatagaaccttcacaaatgtcaccctatgttaaattataatgaagtcacttattagaaaatgtacatgtaaaataataattaaa

SEQ ID NO: 341357 - DNA, 541 bp, Homo sapiens
ttattacctcttattagctgtgtgttcctggacaagttatttaacctctgtgtcctcattttctcatcagtaaaatgtattactagtatctgggttactagttacccagataaaatacaggctgccagttcaatttgaatttcagataaacgacagggaatattgcatggcacataattatacaaaacaatcatctgttgtttatctgaaattgaagtagaactgggcatcctatatttttatttgtgatgctgacaaccctatactagtacctatctcgcaatgcatgcgaaataccatagtacctggtatatgctcatagtaattacacgtagtaaatgctcaataaatactagccattatttctattattataattttcccattgttaacacttattaktacgtaattattattgttgtgatgactatgtatattccaagaatgggtataccttttttatttaaccattcttttgaggctattctagcttgtaatttttttttagtgtgaataatgtcttgtatttatagtcccctgt

SEQ ID NO: 341358 - DNA, 574 bp, Homo sapiens
atcatgtaccagtttattttttgagaatcttaatgtttttttctaccaatttccattaattagaatgtaaatattctgtcaaattagctcacagaaggaatattgtatagtgaatgagctcaggttgtctgactataatcaacccattatattaaagtgtcttttgaaatttcaggggtggttcaataaatagggattcgttgtaacactmttttccaatgcaaaatgctgcatttatttatatgaaatatgaaaaagttgttataatttgaatctctttttctttatgttttctttcccactccaacctaccccaccctacccttgtgcagctgttacttaaccacgttgaattgatcaatcttttctagttataattaagttaaattccaaaaacatttattgagggccccttaagtgctatgtacaaggttgggcatctgtcattcaaagatacattagacatgcttactgcctctatggaattgacataaaacaataatggcaattaataaaatcaagaagggagatatctactggatacagtacagaaaaaagaggagagaagtaatta

SEQ ID NO: 341359 - DNA, 574 bp, Homo sapiens
atcatgtaccagtttattttttgagaatcttaatgtttttttctaccaatttccattaattagaatgtaaatattctgtcaaattagctcacagaaggaatattgtatagtgaatgagctcaggttgtctgactataatcaacccattatattaaagtgtcttttgaaatttcaggggtggttcaataaatagggattcgttgtaacactcttttccaatgcaaaatgctgcatttatttatawgaaatatgaaaaagttgttataatttgaatctctttttctttatgttttctttcccactccaacctaccccaccctacccttgtgcagctgttacttaaccacgttgaattgatcaatcttttctagttataattaagttaaattccaaaaacatttattgagggccccttaagtgctatgtacaaggttgggcatctgtcattcaaagatacattagacatgcttactgcctctatggaattgacataaaacaataatggcaattaataaaatcaagaagggagatatctactggatacagtacagaaaaaagaggagagaagtaatta

SEQ ID NO: 341360 - DNA, 574 bp, Homo sapiens
atcatgtaccagtttattttttgagaatcttaatgtttttttctaccaatttccattaattagaatgtaaatattctgtcaaattagctcacagaaggaatattgtatagtgaatgagctcaggttgtctgactataatcaacccattatattaaagtgtcttttgaaatttcaggggtggttcaataaatagggattcgttgtaacactcttttccaatgcaaaatgctgcatttatttatatgaaatatgaaaaagttgttataatttgaatctctttttctttatgttttctttcccactccaacctaccccaccctacccttgtgcagctgttacttaaccaygttgaattgatcaatcttttctagttataattaagttaaattccaaaaacatttattgagggccccttaagtgctatgtacaaggttgggcatctgtcattcaaagatacattagacatgcttactgcctctatggaattgacataaaacaataatggcaattaataaaatcaagaagggagatatctactggatacagtacagaaaaaagaggagagaagtaatta

SEQ ID NO: 341361 - DNA, 613 bp, Homo sapiens
tgtaggtgaaagatggtggtggcttggaccagagtgatrgcagtggagatagtaggaggtggtcagattctgggtagctggaaggtggagatgacaacatttactaatagatggatattgagtgtgaaagacagagaggagtcaagactaagactgtggcctgagcagctaggagaatagagttgtaggagaagtaattttgaggggaatgaccagcagctcagttcttgatgtgggatattggaaatgcttattagtgagcccagtggggatacagactagccgtctggatatatgagcctggagtttgggaaagatggctaggctgaaggtataaacatgggagtcatcagcatgtatgtgatatgggtctggctgaaattatctaggaaggcacagtgaatgggagagtgaaggggacccgcactaagttctggaactgtccaacggtaagaggctagagagaacttgaggaactacaaaggaagattaatgaagagagactagaaatgaaagagaaaatccaagcaagagtgttgacctggaacccaggatgaagaagaaggtgatcaaataagaaggaataagcagctgtgtcaagtgctactgttag

SEQ ID NO: 341362 - DNA, 613 bp, Homo sapiens
tgtaggtgaaagatggtggtggcttggaccagagtgatagcagtggagatagtaggaggtggtcagattctgggtagctggaaggtrgagatgacaacatttactaatagatggatattgagtgtgaaagacagagaggagtcaagactaagactgtggcctgagcagctaggagaatagagttgtaggagaagtaattttgaggggaatgaccagcagctcagttcttgatgtgggatattggaaatgcttattagtgagcccagtggggatacagactagccgtctggatatatgagcctggagtttgggaaagatggctaggctgaaggtataaacatgggagtcatcagcatgtatgtgatatgggtctggctgaaattatctaggaaggcacagtgaatgggagagtgaaggggacccgcactaagttctggaactgtccaacggtaagaggctagagagaacttgaggaactacaaaggaagattaatgaagagagactagaaatgaaagagaaaatccaagcaagagtgttgacctggaacccaggatgaagaagaaggtgatcaaataagaaggaataagcagctgtgtcaagtgctactgttag

SEQ ID NO: 341363 - DNA, 581 bp, Homo sapiens
ttaatcagcacatgattaattttttagacatgacaataaaaaggaaaagttaaatccaacaggtaaaaatcgcatgggccacatttactgaccataaaataatcagtgagagattaagaagtaacaataacaatgccaaaactctaaacacttaaaaattgaactctttcagagatctcttgagttaaaaaaaatcagaaatggacactgaaattatagacattgagaatacaatggagtataaccaaagctatatctagatgacaatttctaattctcagttgttaatagcaaataaatacagcaatagaaaaaaaaatgcattgaagttaagagcctaaaaatagaaaggtaaagcaaatcaaaagagraaaaaaaataagagcaaagcatcaataaaaccaaaagaagaaattactgaattagaaagtgaaaaatcccaaagaagcagtgttaataaataaaacccaggtgtgtctttctgaaataaaaaataaataaatattgtgctattctgatcaaggaaaaaatgagaaaacacaaatataaagcaaaaagaataagaaagaggatttaataac

SEQ ID NO: 341364 - DNA, 632 bp, Homo sapiens
ggtcatgactttgggacacagcatgccgtttagagatcaattagtgttagttctattattaatcccctcagtggaagcctttttaatgtttcacaaaaatcggcataamtgacttctgtcccattctttatttttgctttcttttacttcctccattaatctcttttcttttcctccacccaccttctagtgcccttatccattattgttttctctcctcttttttcatcttatcccctcttacttcattttatcctccagactttttattggtgtttttttttccttctgcataccttaagtgacaatgtaatgcaatctagctattcactcatcacgtttaacaggaacttaccatggactggtcactgtccttggtgctggggttgtgaaaaagaaagacatgatccttgtcctcaaggagattaccttttcgtggaggatacagacaagtaaacaggcaattgaaactcagtgcaataagggaaagtgtggtttgatctgggagcacataggaggggcacctatcccaaacttggaggaagtggtgtcaagaaaggcttctccagagaagaaataaataagctctgaagtgtcatgggaatgagtgttccagtaaagcatttggagga

SEQ ID NO: 341365 - DNA, 281 bp, Homo sapiens
tctctttttttacaggaaggcacagaggttactgagattgagcaattattacacttaytgtcattaaattcttctttgtgttattgttattatcaatcccatctgccactgcagctctaggatacaagcagcttcctacgtggtggatatgagataggagccttccagccactggtactccagaagcctttggaggaggggaatccaatcatgtggggaaggaaggaactataatgtctcatcatctccacaagcagaaccaagccttttctgaagccttt

SEQ ID NO: 341366 - DNA, 529 bp, Homo sapiens
agcttcctacgtggtggatatgagataggagccttccarccactggtactccagaagcctttggaggaggggaatccaatcatgtggggaaggaaggaactataatgtctcatcatctccacaagcagaaccaagccttttctgaagccttttgtgggcactcacctgtgtgtcagtgcatcagcccagactgggaagcccagactcagagtcatgttgcagtgtaggcatgaggatatgtaaacaagcaactgaggctcccttctatgctgtgcaactcgtgtatgacataggatcctatgatattagcttgtcatagcagccatcctgcccaatggtctcacttctccttttgccttcattgttctacagtagcgcatgtgagagagatggtggtatcttaagatagggtagcactatggaaaaggagaaaattggacaaattctagatatttttggaagtataaatgtcatgacttgcagatgtgggaagctgagagaagaggggcaatagagatatgatgactac

SEQ ID NO: 341367 - DNA, 472 bp, Homo sapiens
gaagcatttgagggagtaattcagaaagagaaaaggagtgggctgatcccagacccttcccatcccatggccctgtgaggctgcggagcttgccggagccccagcaccagctcagaaattgtcatcctccaggcacacttccaattcaattaatcatgttaatatctataagtaaagtgcagtcaacagttactttaacagtgaatgctaattattagtaggatccatygcttaagaaggactttttgccaatcttgtcatgtctggggaaaatatcaggaatagagttggcatttctgagaaaataggatgatcaaactattaacgtcgtccatgttataggtggacccggcttggaccatcagtgtgattattacaggtgaagattaaggacacttgagagaaatgttacaattaagatttcctctccccttgctaaataaatggtttcttgctgttgcctctcacaatg

SEQ ID NO: 341368 - DNA, 628 bp, Homo sapiens
ggagcattaacttgggtctgcagggccataccatttttaagacactgagccaggtaaacagagcactctgctgccttaaatataagaagtttgagggctagtaaaatgaattggaacatggaaattggcaaatggcattaaatgcaatttttttttgtgactgacacagagggaagaacatctgaaatatgactgtttctggctctctgattccttcctcagaaggctgcccagatgattctgcctatgttaactaaggagctggcctaaaattagcattgagagaacactttctgttataccttctatttgcaaagtgctgtctcatcagcgtgaccagttcctcttcacactggcatcaccacccctgcattgcccggatggggcaggggtgctgaagctagacactgacagcctggagccatataccctaagagccagatttaagttcttgtgtcmataaccctgttgcacctgagtccccacttgctgcctaacaggaaggttcaggaatcattattaggtttgctactgggtttctgctttctttttactcgattgctccagaaattatttaattgggggaaaatctacttaaaaatattttacacccacataattggaagtg

SEQ ID NO: 341369 - DNA, 497 bp, Homo sapiens
agccatataccctaagagccagatttaagttcttgtgtccataaccctgttgcacctgagtccccacttgctgcctaacaggaaggttcaggaatcattattaggtttgctactgggtttctgctttctttttactcgattgctccagaaattatttaattgggggaaaatctacttaaaaatattttacacccacataattggaagtgcttgcaaaatctacaatgttttctacaccattggattctggcctgtgcagtgtaaatggaaacactcagatgtgctaggattcttgtgaaattacagaaaatctgatgtgcagagttttagaccattgagactttttgctgaaaagaactgtgaaacgaaactcaaraacatgtagggactggggacaggccaaagaggtcaacaaccctctggtgtgtccacaggaagtgggatcccaacctgccctgtagggctgtgtggagttggaggggaatgggattcaggaa

SEQ ID NO: 341370 - DNA, 497 bp, Homo sapiens
agccatataccctaagagccagatttaagttcttgtgtccataaccctgttgcacctgagtccccacttgctgcctaacaggaaggttcaggaatcattattaggtttgctactgggtttctgctttctttttactcgattgctccagaaattatttaattgggggaaaatctacttaaaaatattttacacccacataattggaagtgcttgcaaaatctacaatgttttctacaccattggattctggcctgtgcagtgtaaatggaaacactcagatgtgctaggattcttgtgaaattacagaaaatctgatgtgcagagttttagaccattgagactttttgctgaaaagaactgtgaaacgaaactcaaaaacatgtagggactggggacaggccaaagaggtcaacaaccctctggtgtgtccacaggaagtrggatcccaacctgccctgtagggctgtgtggagttggaggggaatgggattcaggaa

SEQ ID NO: 341371 - DNA, 404 bp, Homo sapiens
ggattcttgtgaaattacagaaaatctgatgtgcagagttttagaccattgagactttttgctgaaaagaactgtgaaacgaaactcaaaaacatgtagggactggggacaggccaaagaggtcaacaaccctctggtgtgtccacaggaagtgggatcccaacctgccctgtagggctgtgtggagttggaggggaatgggattcaggaaatggagaccagctttgtggcctgctgtgagactttgggcygcctgcaccctctcctgggccatttctcacctttacaatgggggaagagattcctcctagcctggctatgcacttgcatctgtataaaacctgtcacagtgctttcatagtgttggctgaaattctttttaagcttggcactactgtattggc

SEQ ID NO: 341372 - DNA, 404 bp, Homo sapiens
ggattcttgtgaaattacagaaaatctgatgtgcagagttttagaccattgagactttttgctgaaaagaactgtgaaacgaaactcaaaaacatgtagggactggggacaggccaaagaggtcaacaaccctctggtgtgtccacaggaagtgggatcccaacctgccctgtagggctgtgtggagttggaggggaatgggattcaggaaatggagaccagctttgtggcctgctgtgagactttgggccgcctgcaccctctcctgggccatttctcacstttacaatgggggaagagattcctcctagcctggctatgcacttgcatctgtataaaacctgtcacagtgctttcatagtgttggctgaaattctttttaagcttggcactactgtattggc

SEQ ID NO: 341373 - DNA, 467 bp, Homo sapiens
aaataaggtgatcatagggacagagatagaagacagatctgagaaattattacgagataaaactggcgggaactggtgactgttggatatgggaaagtgaggatgtggtgatggtaaaagaagtttctagtataactccaaatttccaacctgagtgactgagggtgggactggtgtcacccatgaagataaaacatacagaaatcagtctgggggtgggggatggtgtattcactcacttaatatttggacaccagaaattggctcaaacataatagtgaacaagacagataaatagagcttacattctagttgggggtgaggcgcaaacaataamcaagtaacaaatattatatagattcagacacatatgatctgaagagaaataaagccagggaaggaaaaggcacatatggggacttttggggaaggtgctgactgaacagagaggataaatgaagtgagca

SEQ ID NO: 341374 - DNA, 577 bp, Homo sapiens
taaaaaatcactggttttgttaccctgatacttacttcacgcctaatctcactccataagtgaccatccctcacacataggttgagagtgagcaatgggatcagggtcaagaatccactataaataattgttttacacatttagaaatgtttttaaagctaaacatttatctgtttgcttttagatagtgtcaaaatgcaagtagcatttattttctctctctttctacatcacgtcttctggaaaaatcatgctctcaggttgaaagttggtggtggtggcaatagcaatgccagtcaccaaagaaggagctgtggcagtgggcattgagaggagaagagattggacctgaaagaaaagagaatgagctctaacataagccttgagatatgraagatgaaggaaagtgagcccaggccccagggctgcattttgaggtgtgtatctatgaggcagaagtaggctgagacataggaaagaggggataaaaacttgtggcctgcaggacagatcaatgcacgtaggcagctcaggtaggaggtgactttggccattcttcaaactgatgttatttaaa

SEQ ID NO: 341375 - DNA, 553 bp, Homo sapiens
gcttttatttaaaagatgctttccttgtttatgaaatatcctaagtattttatgatacaaaatcttataaaatagcctaagaaacacataataccataaaggaaagttaatagccaaataccaagtcaattagaacatgacaagattttgaataattgatggagataagtgaagactttagatgcaaggaacagaaatcttcaagtggcaagagattagcataaaactgtgttgcctttttggagggtccaatcacacttcaaggctgggtagttactaatttttttacaaaattacaatattgtaatagcaataacaatagctccacattcgagttcctaacaagtgtcaatgatgtgataaggcaattcattgattatcatgaaaacccatgatyactacaaattaacagataaagaatctaggcacagaaaggtgaaataatttgctgaaggctactcttaaccactgtactctaatattaaaaagtcttcttggctaatgcgattgggatcagttaattgaaaaagtcagttaaaccaaaaactgcctc

SEQ ID NO: 341376 - DNA, 507 bp, Homo sapiens
atccaaaaattctatccaagaaacaaccttgcacagcactgtctgtttttaataagaatttacacaaaagtggtggctcaaatcctcatawctttctatgtggcagatagtctcaaactttcagctccaaaaatttttacacatcaaataaattctatatctggctttgtgtaaatggctccaaaaatctactctcatggccacagctaggctgccatcgaattttaattgcaaactgaatacccttttacagaacaggtgtagaagaaaggaagtggaaatgtaaaaagcagtaatatcataacatcactgtattctgaagggcttgtagaaagtgtcaaggtatcaaaaacagttttgctgaaatcagtaggatgcaacatgagaggggtacctttacatgtcagaatatctactgatgcaaaacacagagctggcaaagagtatgagtcataaatagtttcccagacatgacagaggaaacctgttctattggatctgatctca

SEQ ID NO: 341377 - DNA, 507 bp, Homo sapiens
atccaaaaattctatccaagaaacaaccttgcacagcactgtctgtttttaataagaatttacacaaaagtggtggctcaaatcctcatatmtttctatgtggcagatagtctcaaactttcagctccaaaaatttttacacatcaaataaattctatatctggctttgtgtaaatggctccaaaaatctactctcatggccacagctaggctgccatcgaattttaattgcaaactgaatacccttttacagaacaggtgtagaagaaaggaagtggaaatgtaaaaagcagtaatatcataacatcactgtattctgaagggcttgtagaaagtgtcaaggtatcaaaaacagttttgctgaaatcagtaggatgcaacatgagaggggtacctttacatgtcagaatatctactgatgcaaaacacagagctggcaaagagtatgagtcataaatagtttcccagacatgacagaggaaacctgttctattggatctgatctca

SEQ ID NO: 341378 - DNA, 507 bp, Homo sapiens
atccaaaaattctatccaagaaacaaccttgcacagcactgtctgtttttaataagaatttacacaaaagtggtggctcaaatcctcatatctttctatgtggcagatagtctcaaactttcagctccaaaaatttttacacatcaaataaattctatatctgrctttgtgtaaatggctccaaaaatctactctcatggccacagctaggctgccatcgaattttaattgcaaactgaatacccttttacagaacaggtgtagaagaaaggaagtggaaatgtaaaaagcagtaatatcataacatcactgtattctgaagggcttgtagaaagtgtcaaggtatcaaaaacagttttgctgaaatcagtaggatgcaacatgagaggggtacctttacatgtcagaatatctactgatgcaaaacacagagctggcaaagagtatgagtcataaatagtttcccagacatgacagaggaaacctgttctattggatctgatctca

SEQ ID NO: 341379 - DNA, 553 bp, Homo sapiens
atattgaaggcttgggaaaggatccttttagatgggtgaagagaaagcagtgcctggtcccaagccctgaaaacttcttacatttaaaggtccaatgaagtagaagcttccgcaaaggaaattgaaaagataaagtcaaaaaggagaggcaagagaatctaacatcatggaatccaggagtaatgagtgttttcacaaggagggagtgatcatttataacagataccactgagaagatgagaatggagaggtgtctgttcagcaacataggggcacattggtgacagcaatttaggtagagcccttggtgcctgtcccagatagaagtgagctgaggaacaagtcaaagatatggaattagagttatttcttttaaataggcttttagagaaatttggccagataagctaagaaaatgacaagcagtagctgggagagggccatgctttcaaggaagaggtttatttaaaaatatagagtatatgtttaaataktaatacagagaattcagtgggaaagaaaagactgaagaatgaggacagcaaagataatc

SEQ ID NO: 341380 - DNA, 589 bp, Homo sapiens
tagtgcacaggtgctatatacatattatatatgtgtactagatttcccaaatgaaactttacaatttatgaaagatatgtttaccaaatgattccaaaattaaccttccccattgcccttttaattactgattctctgggcaagaattttaaaacattatttttcctgcagtcgaaacagcttctgtcagccagtcattcaacatgtagtgagaatcccttcyaatgatcctagccactgggaatattgagatgaatgaggcatagtctttaccctcaatgcccttagagggttgagcagagatgcagagaatattacaatactgtgagctaaggaccatgtttcagaagctttaggaggcaaaggagagtttacttaataaattcttttaaaatatgttttttgtgctaaatttgcaaagatgtgtagaagtttgaatggcacgcaaaatgagaacggacaagaaggagcatgtgaaaagttaaggaaccctgcaagaacaccataaagtgtataccagggtaatttgttgacctaatgatggttgtcttgtttctgcttctgtgaaagagttgggaagaatgtgagt

SEQ ID NO: 341381 - DNA, 535 bp, Homo sapiens
ccgcctggccacagtgggctctgacatgggcctctccagtgaagtgcggtcctcagccactgtctgctcggttcagcccagcccaccctgtccgggaggaggggtcctggccctgccctgccctggctgccttggcctctccttgccacctctctcccagccctggtccttggagccaccgtgaggggcccagatgccctccaggatggaagcctcatcctccactgccaggtgctgaaggctccctagggtcacgccctcttccagggatggatgtggggtgcaagacccagccaccctctggttggaaccatcactaaccagcccagccaatcgtggggggctgaaggctccawttgctcagcagggacttggctcagccctggagggccctgaaggggcctgtccgacagataggcctgtgcaggtcacagcgtcaccaagggtcctggcccagggccagtgctgtgacctgccactgggtatggttgggagcctggggacccaacacccctaccttgggcctggaggaagg

SEQ ID NO: 341382 - DNA, 640 bp, Homo sapiens
gaaatcgggagaggaaaagggcggggagggagggggaagacgccgccgcgctccaggagcctcgcctgcccgtaggtggctgggcctgtgtgtataaagtcggggctggagcggctgcaggggagcagccgtgaaatgggggcagggagggcggcgaggaactggggacagatcctggggccaytgtgggggcagcaggggcccctgcttctgtgtagagaggatcgtgggggcacaggcgggagctgccacagtccagggaggtcgctggcccggcccctcacccttctgttcctgctggcggttccctgcagagatggttcctcacccaccgtctctgccctctgggtcctgggcgtatcgcatgggggacgggacactctgtccgccttgtccctgcctggcccgctgccctatggaagagcaggagcgccgcacgggtgcctccgaagggcagcctcgcagcacatctgagggtgcttggtgcaccgccctggcaccaccatacctgagagctcaggaggtgcgggtggtgcggagggctcgcgtcgggtggtggctctgcgagtctgggaggaaggctctggtctcctcctcaccttgtccacgcgtcttctctggagcagggtgggggctgcca

SEQ ID NO: 341383 - DNA, 598 bp, Homo sapiens
gggctgcttcccgggtctctagggtggaggaggcctcccccagtccccttaccacctctgcctgagtcaagagaccgggccccttccccagccttcctgccatgccagtgtgccagtcacgctgactaccaggcccagcattctctgattggtctcagagctgggtcgcatggcacggagacaccgcaggcagtgcccatggcagggagcaggacctgaaagggcccgggtgctcagagggctggactcacccgaggagccgcattggtttgtcagatgtgtttctgctgagctggggcttctgctgctgggagcgcaagtgctgaggctgtcaccctgggggcaggcagtgcactgggcctgcttgctgtgcatgcactgccctgactgcgaggccactgatctgggccacgtgtatgtgtgcatctgtgcccaggatcaatgacgtggcctggggtgaggcccctctcagcctgcacggcccacatgacatggcgcrggggctgctctgacctgccacggcagtgccctcggagtgggtagagtgtgggtgtccagggttggtcctcagagtccttgcatgggccacttggcagca

SEQ ID NO: 341384 - DNA, 597 bp, Homo sapiens
actcaaaatattgctatgatcttagtaagaaattaataaggagttcaccaaatcaaaccaaccatggtggttggcaccaattttggaaatttttccattatgtagcttggaaaattaaggtacttcctcaaaaactcattagtcatttgagcaatagctagagtatttatatataggtttttttagaattaaagagatctcacttaataatgcagtgcaaaatactgattagccatatttgacaatacaatgcatattttaatataacttgctatttgtttttaactgtcaaaataaaattcttagtttatattggaaccccattttctaagcaagaataattatgtggtaaaaagttacctagaattcaacaagtttaattttttaataaaaataaacttagaggagtagctatatagaatttttccttactgagcaatatcatgattcttcacagttatctrtgtcaacacaaacgaactcatattgaaagtttactcataaagaagaaatacctgtattatctataaaatttctaaattaaagagttgtcaattatttagtatcaagtttaagtaaaaaaatcaatttaattca

SEQ ID NO: 341385 - DNA, 613 bp, Homo sapiens
atagatttgcatgactattctttagaattcagttcagtaacaaaaaatgggcacttctagatttggtttctggtctttcagatccctgcaatgtaatttatgaaagcacaaacagaatgatatgtcccgggtgcttcaataattaaaggggcttccagaagrgccactgctctcacagagcaacatttgctttcaaagaactagctctagctaaaaaagcaggagacagtgcccagtctgagaagcttccatgttcttaatgtcctgatattctccctctcacacccaccataactcactactcaagaaattgtatggctagagtcaccagcaagagtaattttgcacaacaaatgcccagctaggaattactcttcatccacatgggctgaaaaatcccctccatatagagacataaggatatctgacctggagaagcttgctctgcaccctcaagcagcattaccaaggacagtgggagccatgaggcatgaaataaaccaagatgaaaatagcaccacataacctctgaaaattacacagtcattgcaactaaaacccacaaaagtaggccaggacctacatgccaaacctaaatagaggaattgactgt

SEQ ID NO: 341386 - DNA, 529 bp, Homo sapiens
gcttataatcaaggcgagaacaaatcacgaatcaataatctaagtgtctacctcagaaaagaaaaatataagagcaaaataaacccaaagcaagcagaagggaggaaacaaaaaccataagagaggtaatcaatgaaattacaaacaggaaaacaataaagaaaatgagcaaaaaaaaatggtttctttgaaaaaacatcaataaaatcagtaaagtctagcaacactgatgaaaatgacagctaagtaaacaaaaatcaacataaggaacaagataggggttatcactatagataatatagmcattacaagaataataaggggatatcacaaacagctttacattaaaaaatttgacagtttaaatgaaccaatcccttgaaaaaaacccaaactaccaaaactcaaccaagatgaaactgataatctgaatcattttataaccattaaaaacatgaaatgtataatttaaagttttttgaaaaaaaaatcttcaggccaaatagttttgctggaaaattctaacaac

SEQ ID NO: 341387 - DNA, 514 bp, Homo sapiens
attttacttaacaagcattaaattttatgctatgtggagaatattaaatttatatgcagtctttaataccttacacaaacaaactgccttttttcccacagggtgaaaatgattttatttttcagcacatacacacaatcagtaaatcatacacattaaaggcacagaactaaaagttttccttgctttaaaaccaacagttagcctgaacccctggggtgcttttgtcaccacactgtcattcacacatmccatgggagatgtgggttctatttctacatatctggtgtatataactacacttcaagaagctataataaatatatagcaccaccattcaatgttctgcaaagacagaaaattctacacttttttcaaggaaatattacaaaaacaattctgcacaaagcactaacacagtgtcacacaggaatgaacgaaacctcctcagtgtaatagagagccatttggatgtgtaaaatcttattggccattctgacccagccaatttaac

SEQ ID NO: 341388 - DNA, 587 bp, Homo sapiens
ctataataaatatatagcaccaccattcaatgttctgcaaagacagaaaattctacacttttttcaaggaaatattacaaaaacaattctgcacaaagcactaacacagtgtcacacaggaatgaacraaacctcctcagtgtaatagagagccatttggatgtgtaaaatcttattggccattctgacccagccaatttaacacagaatattctgataaagccttaaaaaagactaacatccaattattattatgtgtttgtgtattattttatgttatcattaaattattattattttacgttaaaatttatttgttcttccattcctcgtttcaattctgtggattaagggtgaggaacaagtcaggggtgtttgtttaatatattgcttagtaataaggatagtgttttggcattctggctgacttgcattaaatatttaaaacaaataactagaatttaggctgggacccaagttggcaaaacccactgttacatactgagaatcctggctgttgcataagcagaattaagaaaatttgagtacaaaaggaattttctaaaggaataatagaacagttgctt

SEQ ID NO: 341389 - DNA, 558 bp, Homo sapiens
gtaaaattcccataaggctctgcttgtgaaaacaattgctaccattttgaaaagtttataaggaaaacatgtagaatggatgagtagcttaaaggagtaataagatacaatatctgaatatttttaagaaaaaaagtaataaaacaaaatgatacattggactttggggactcaggggaaaggatgggggttggtgagaaatagaagactacacactgggtacagtgttcactgcttgggtgatgggtgcaccaaaatctatgcatgtmaccaactaccacctgtttcccaaaatcctattgaaataaaaaaaattaaaaagtagatgaacatagagggctactgaaaggcacagaaatatacctgtagagacgtattagatatattagggtgtaacagcaagtgggagaagttgaaattaaaagcatttgaaagtaaagaataggaaaaagggtcagaacttcaggaataatttaaaagtggaggaaagaaagttttctatactatactttattgataaaggttctacttcttcaaacacttggaaattattgaaat

SEQ ID NO: 341390 - DNA, 589 bp, Homo sapiens
ggctactgaaaggcacagaaatatacctgtagagacgtattagatatattagggtgtaacagcaagtgggagaagttgaaattaaaagcatttgaaagtaaagaataggaaaaagggtcagaacttcaggaataatttaaaagtggaggaaagaaagttttctatactatactttattgataaaggttctacttcttcaaacayttggaaattattgaaatacagcctaatgttcattttgcaagtgaagtcaataggtaagatggtttacccaaagtttctagctagttggtgacagagacacaactagaatttagttctcctgacacaatactaattattcttactactttactgattcttctttccttgtctccttcctatccttatttttaatgtcacattacttcgaaaattgtgagaaaaatctcctatttattatgacaaaggttgttgactctcaccaccataggatccatcatagagcacttagaaactttcaggaaatgaggtataacatcggtcagcatcttgtcatatcattggagggcactcttaaagaagtcattatatgaaaaagacacttgca

SEQ ID NO: 341391 - DNA, 493 bp, Homo sapiens
ggtttatttttgaacactcaattttattacactggcctacatgtctatatttatagcagtaccactgtccaattaagaccactatcttaattactgtagttttaaaataaattttgaaatcagaaagtattagtccttcatagttcaagggtgttttatctgtttgggtctcttgtattttmtttatttatttatttatttatttatttatttatttatttatttttggtgacagggtctcattccatcacccaggctggagagcagtggtgtgacctcagcttactgcagcctcaacttcctgggctcaggtgatcctcccacctcagcctcccaagtagctgggactacagacatgtgccaccacacctggctaaatttttttttgtattttttttttggagacagagttaaaactacaaaaattagccaggcattgtggtgggtgcctataatcccagctacttgggagcctgatgcaggaaaattgctt

SEQ ID NO: 341392 - DNA, 493 bp, Homo sapiens
ggtttatttttgaacactcaattttattacactggcctacatgtctatatttatagcagtaccactgtccaattaagaccactatcttaattactgtagttttaaaataaattttgaaatcagaaagtattagtccttcatagttcaagggtgttttatctgtttgggtctcttgtattttatttwtttatttatttatttatttatttatttatttatttatttttggtgacagggtctcattccatcacccaggctggagagcagtggtgtgacctcagcttactgcagcctcaacttcctgggctcaggtgatcctcccacctcagcctcccaagtagctgggactacagacatgtgccaccacacctggctaaatttttttttgtattttttttttggagacagagttaaaactacaaaaattagccaggcattgtggtgggtgcctataatcccagctacttgggagcctgatgcaggaaaattgctt

SEQ ID NO: 341393 - DNA, 493 bp, Homo sapiens
ggtttatttttgaacactcaattttattacactggcctacatgtctatatttatagcagtaccactgtccaattaagaccactatcttaattactgtagttttaaaataaattttgaaatcagaaagtattagtccttcatagttcaagggtgttttatctgtttgggtctcttgtattttatttatttatttatttatttatttatttatttatttatttatttttggtgacagggtctcattccatcacccaggctggagwgcagtggtgtgacctcagcttactgcagcctcaacttcctgggctcaggtgatcctcccacctcagcctcccaagtagctgggactacagacatgtgccaccacacctggctaaatttttttttgtattttttttttggagacagagttaaaactacaaaaattagccaggcattgtggtgggtgcctataatcccagctacttgggagcctgatgcaggaaaattgctt

SEQ ID NO: 341394 - DNA, 603 bp, Homo sapiens
atccccagaatgtagtctttataactgaaaatttctgccatttgactaacatcttcccatttcttccaccctcaccccttggcaaacaccattctactctctgttcatatgagaaactcagagagttatttggattccacataagtgagatcatatagtatttatctttctgtgtctggcttatttcacttagcttaatgtcctccagattcatccacaaatggcaggattttgttctttattatggctgaatatttctttacatacatctgtgtgtgtgtgtatcacattttcttcatttatctgttgatagacacaggttgatgwtacatcttggctattttgaataatgctgcaatgaacatggaagtgcagatatctcttcaaaatcctgatttcatttcctttggatatgtatccagaagtggagttgctgaaaattataattttacttttaattttttaggaacctccattgtgttttccataatagctgacccaatttacatcctcaaaaactgtgtacaaatgttcccttttctccatacactaactggcatttgttatctcagacttttgataatcatcattctaacaggtgtg

SEQ ID NO: 341395 - DNA, 414 bp, Homo sapiens
tcattttgtttgtagtttttaattgttgaattgttatttttgtttgttatattttttttattttttaatgccatattttcaatccacggttggttgaacatgcagatgtgaaacctgtggatacacagggtcgactgtatttggtaacctaattaattttctaagattctttgataataatttatttataaaactcaagttagtactttttaatcacattgagattaaaaacatataaggagaaaaacctaaggggtcagaaaaaactacataggcattatataaaattactgttaagatactgatcccagttatcctcatttctcacrtttatcaattaggagtatttaaatttgcttttaatctcctagataatgcatatagtggcagttttcataagtcagtgttctattg

SEQ ID NO: 341396 - DNA, 512 bp, Homo sapiens
tacacttttttttgtttgaatgctggagattgtatataaaatattatagaaataatttaagacttaggatgattttgcagggaaattttagtgtgcttcttgaaagagactaggggctctagcagttagcgatcaggggatttaaagctgggttttggtctctgtgaggacctgtctacttctggttcacctctatgttttggtattacccttakacctgtggtcatgttcccatctcaaagtggggagggctttctaaggtctttgccctaggaattcttaggctccagtttatgttctcttggccctggctgtcaaaaatgctgctcagcttctcaacctttccattaccttttctggagccagaagatgcccacaggataaaagcaccaccaagtttacttttcacttctcaggtttatcttctgccatatcttggtacaataatttttcgttactttgttagctgaccagcatagggtaattcaaatgatataacctgctattttata

SEQ ID NO: 341397 - DNA, 589 bp, Homo sapiens
aaaagcaccaccaagtttacttttcacttctcaggtttatcttctgccatatcttggtacaataatttttcgttactttgttagctgaccagcatagggtaattcaaatgatataacctgctattttatatgtatatatgctaagtttcacaataattctgtgaaggaattattgctattatttccagtttgtaaatgaagaaaataagcataaaaaatagttaaccagagcttctaatatatatactgtgtatacattaaataaaagcatgttaaataacatttatattgtcaaatcttcctattgccttgaatattccattaaagttagacttttcatggctttagtcttcaakaaatttaaatgtatgttagatgtcctctttgaaaaagtagaagtaagttctctattttaaaggtattccatccaaaaataaaataatttgtttttaaattagaaagtaagagacattctagctgcatgtggtggtaggggggcatacctgtagtcccagatactcgagaagctgaggagggaggatggctttaatccaggagttagacaccagcctgtgctggacagcataac

SEQ ID NO: 341398 - DNA, 419 bp, Homo sapiens
tatacttaaaagataaaaaaagacattggggttaaaaatatgtacaagattatagaggaaaaaatgcatactggacactttccagatgtcagacttgtgccatgtctttatgcactatttattcctgccccccaacccccccccaaaaaaatctgcaaagtaagtttcgttaatcttattttacatttaaagaatttgagatttagaaagtttatataatttgatcaaggttatgtagctagccaattgcagaactaaatttgaatccagatatatctgtttggaaaaaagaaaaaagctttgctttttttcaktataggaaactggagaatgcccagagtagaattttattacctgagtacttaataacaagagttacttctcacctagtgcttactacgtgctcagcattatgccaa

SEQ ID NO: 341399 - DNA, 606 bp, Homo sapiens
attcaacttgtttgccttaattagttagtttatctgaaagctatgtcaaataggtaatagcatatatttagttatttcaatagtacttggcatcttacatatgaaaaggtacagttatggagggaagaaaacacaggttctgttcctcccacctccatcaagcttttaacagatttaatgttgttttctgccttctatactgtttgccttcctttttgaattggtctcacccatctctcactgccccccactctcgggacccctcagtctccatttctctctcaatttcctaaaagtgacatcaattttccatgaattacctaagaacgacttaccaamaaaaattacattgttatgaataatgtacgcaaaactgttgatactggctaacttaggggaaagagctttttccatttttaatcttacagttttatatctgttcacattttccaaatatacgtatgaattatttatgtattgccttttagtatccatagaaattatatgggagttgccatcacggaccatttttctttccttctttaaagtttcctatacttaaaataactcataaatataatttctaaagtaagcacaaattctcac

SEQ ID NO: 341400 - DNA, 606 bp, Homo sapiens
attcaacttgtttgccttaattagttagtttatctgaaagctatgtcaaataggtaatagcatatatttagttatttcaatagtacttggcatcttacatatgaaaaggtacagttatggagggaagaaaacacaggttctgttcctcccacctccatcaagcttttaacagatttaatgttgttttctgccttctatactgtttgccttcctttttgaattggtctcacccatctctcactgccccccactctcgggacccctcagtctccatttctctctcaatttcctaaaagtgacatcaattttccatgaattacctaagaacgacttaccaaaaaaaattacattgttatgaataatgtacgcaaaactgttgatactggctaacttaggggaaagagstttttccatttttaatcttacagttttatatctgttcacattttccaaatatacgtatgaattatttatgtattgccttttagtatccatagaaattatatgggagttgccatcacggaccatttttctttccttctttaaagtttcctatacttaaaataactcataaatataatttctaaagtaagcacaaattctcac

SEQ ID NO: 341401 - DNA, 561 bp, Homo sapiens
aggttgaataattagctatttctgccctttactagttgttagatttawcattatcaacctttgcagtgaaaagtagaaaaaatacaaactgcaccaacagttgggctagtcatacattttacacagtgacaatatcccattaaaatggtattcttaaagaggagatgtgtgaattaatatgcagtggcacatagaattaaccaggcatcatcattttatttcagaagcactcatatgattaaatttctgagctaaaaattcatccttaaaagttatactttagcagaatgactgattttattttatagctgtcaatttgattgacaagtaggatccatcaagtgtgtttctattcttgtaatccagggacaccttgaaaagatttcgcaagagaaaagaaagaaatattatagaaaaaaaaaaggaaatcgcatgtctaattaagagcttaatttgtgatgaaaatacataattttttttttacatccactatggtgctaaaacaactacactggaaaaatcccttagttatggggtaattggtatgaatcaaatatcttt

SEQ ID NO: 341402 - DNA, 583 bp, Homo sapiens
tgcctgtcctttagccaaagagaaaatacttttgtttttgccccagtttttttgtcctggtagtggggctaaagatggaaattcgccatttgtttctrtaatagatactgataaggaccaccaaaatgatggaaaatgtgcaagcttcaaagcaaaagcctacaagaagggagtataaactgaaaaagttacattagatagcacagatttgctgggctcaaaatatatccctctggctgtcattagcacagaactatagtaggatttaagaaatgtttgaagaattcatggcaaaagataaaatgtgttatccagttgcaagacatcatagagaccatgagggaccacatttgcaaatatagttcattctgacaacagttgtgtgtgcatcttaggacagtcattacatatggttagtcattatttatggaatatctattgtatacagatgggttggtagttaagaaggaaatattctttagctcctgttgctacaaaataaacattgatcagtgtttacaccatgccaagaaagtatttgaatattaaaatctcaattcactaaatggtggtatgtggcaac

SEQ ID NO: 341403 - DNA, 659 bp, Homo sapiens
tactatttttgaatgttggggaagcgctagcaagctctttctttgttcactcagtaaaacaggttttatatggctcttcaaataactcctaaaacaaacttattataagacatgacaagtaaaccttcctgcttattayttttcataagcacatcttcaaaaatgtccaaaaaaatgtaaggtcaaaaggataagggtggggaaagcttgtacaagataaaagttaaattctttgggaaggcaaccattccgatgatttaaaaagcatttatgtaacatggtgaaaccctgtctctactaaaaatacaaaaattagccgggtgtggtggtgggtgcctgtagtcccagctactcaggaggctgaggcaggagaatggcatgaacccaggaggtggagcttgcagtgagctgagattgcaccactgcactccagcctgggtgacagagcgagactccgtctcaaaaaaaaaaaaaaaaaaaagcatttatgttgatgattgatgagacacagaaagatatttgctatactagaagtttacagagtttctcatatcctcctcaactttcttgttttcagtactcttttcaattaggaatgataggaaactgtatttcttttccttgatggagtaacaaagggtgataggaatactccttat

SEQ ID NO: 341404 - DNA, 659 bp, Homo sapiens
tactatttttgaatgttggggaagcgctagcaagctctttctttgttcactcagtaaaacaggttttatatggctcttcaaataactcctaaaacaaacttattataagacatgacaagtaaaccttcctgcttattacktttcataagcacatcttcaaaaatgtccaaaaaaatgtaaggtcaaaaggataagggtggggaaagcttgtacaagataaaagttaaattctttgggaaggcaaccattccgatgatttaaaaagcatttatgtaacatggtgaaaccctgtctctactaaaaatacaaaaattagccgggtgtggtggtgggtgcctgtagtcccagctactcaggaggctgaggcaggagaatggcatgaacccaggaggtggagcttgcagtgagctgagattgcaccactgcactccagcctgggtgacagagcgagactccgtctcaaaaaaaaaaaaaaaaaaaagcatttatgttgatgattgatgagacacagaaagatatttgctatactagaagtttacagagtttctcatatcctcctcaactttcttgttttcagtactcttttcaattaggaatgataggaaactgtatttcttttccttgatggagtaacaaagggtgataggaatactccttat

SEQ ID NO: 341405 - DNA, 659 bp, Homo sapiens
tactatttttgaatgttggggaagcgctagcaagctctttctttgttcactcagtaaaacaggttttatatggctcttcaaataactcctaaaacaaacttattataagacatgacaagtaaaccttcctgcttattacttttcataagcacatcttcaaaaatgtccaaaaaaatgtaaggtcaaaaggataagggtggggaaagcttgtacaagataaaagttaaattctttgggaaggcaaccattccgatgatttaaaaagcatttaygtaacatggtgaaaccctgtctctactaaaaatacaaaaattagccgggtgtggtggtgggtgcctgtagtcccagctactcaggaggctgaggcaggagaatggcatgaacccaggaggtggagcttgcagtgagctgagattgcaccactgcactccagcctgggtgacagagcgagactccgtctcaaaaaaaaaaaaaaaaaaaagcatttatgttgatgattgatgagacacagaaagatatttgctatactagaagtttacagagtttctcatatcctcctcaactttcttgttttcagtactcttttcaattaggaatgataggaaactgtatttcttttccttgatggagtaacaaagggtgataggaatactccttat

SEQ ID NO: 341406 - DNA, 637 bp, Homo sapiens
accaacctaaatgcccatcattgataggctggataaagaaaatgtggaacatatactccatggaatactatgcagccataaaggggaacaagatcatgtccttttcagggacacagatggttcctggaagccattatccttagtaaactaacgcaggaacagaaaaccaaataccacatattctcactcgtaagtgggagctgaatgatgagaacacatggacacatgaggggaacaacccacagtggggcccttcagtgggtagtgagtggaatgagggagagcatcaggaagaatagctaatrgatactgggcttaatatctaagtgatgggatgatctgtgcagcaaaccaccatagcacatgtttatctgtgtaacaaacctgcacatcctgcacataaaagttggaaagaaaaaaaaagaaaattcatccatttgaaattcatgtgctacttttttctccccacttattatttgattttgttgagtgtattttgataacaacatgaactgtgaataaaatggcatgcaattgaaaggcagtaattgctaggtaagtaatactaagtaggtatagtggggtcatatttttaatcaagtgataaatagttggagagaacaaaaatgaacagcct

SEQ ID NO: 341407 - DNA, 593 bp, Homo sapiens
aatactattcagccatgagaatgagatcctgttatttgcaacaacatgaatgaaactggaggacattatgctaagtgaaataagcccagctcagaaggatgactattgcatgttctcacccatttgtgggagctacaaattaaaacagttgaactcatggagatagagagtagaatgatggttaccagagactggaaagggtactggaaaggagagaggaaaatggggttggctaatcggtacaacaatrtacttagatacaatgaataagatgtagtatctgatagcacaacagggtgactagtcaggaataattttttgtacattttagaataactgagggaatacaactggaatctttataactcaaataaatgattaatgtttgcagtgatggatatctcatttaccctgatgtgattattacacattgtatgcctgtatcgaaatacttatgtaccccataaatatatataccttctatatagccataaaaataaaaaattaaaaaaataaaaattaaaagaaaatactaggagagtattttattccatcaattctaaaacacacctttttccttcctgttgtttaaa

SEQ ID NO: 341408 - DNA, 593 bp, Homo sapiens
aatactattcagccatgagaatgagatcctgttatttgcaacaacatgaatgaaactggaggacattatgctaagtgaaataagcccagctcagaaggatgactattgcatgttctcacccatttgtgggagctacaaattaaaacagttgaactcatggagatagagagtagaatgatggttaccagagactggaaagggtactggaaaggagagaggaaaatggggttggctaatcggtacaacaatatacttagatacaatgaataagatgtagtatctgatagcacaacagggtgactagtcaggaataattttttgtacattttagaataactgagggaatacaactggaatctttataactcaaataaatgattaatgtttgcagtgatggatatctcatttaccctgatgtgattattacacattgtatgcctgtatygaaatacttatgtaccccataaatatatataccttctatatagccataaaaataaaaaattaaaaaaataaaaattaaaagaaaatactaggagagtattttattccatcaattctaaaacacacctttttccttcctgttgtttaaa

SEQ ID NO: 341409 - DNA, 558 bp, Homo sapiens
gaaggcaaaattggcaagatacttcctaagcgattttagtgtacaaagtctagtttctgaatataagttgtttttccttttatttttaagaaacctgtgattttttttccataaatgtrtatatcttttttcactgaattctttttaaatgactggagcaaaggagtccttgaaaaatgtgacctgagtaccgtgtttagtagattgaaaattcttcaggggcataagaaattaagaatgtggttttcttccaagatcaagaagctaaggtcatctaatggagaagttcatgtcatccatcacatgttctcatcttgcagatgtggaaaaatgccagtggctggcttctgtttgacagattcagtgagcctgcttcagaggactctgagccaggaaactctcaaggtgggctgcatcccacaggacagctcttgaatttggacagctcttgaatctggtctcatgttgtcaggatgacttggctcaccacaacgtggatgtccttctttgtagcttccttctttcttcagaccttacacaggccctgctatgggaatg

SEQ ID NO: 341410 - DNA, 558 bp, Homo sapiens
gaaggcaaaattggcaagatacttcctaagcgattttagtgtacaaagtctagtttctgaatataagttgtttttccttttatttttaagaaacctgtgattttttttccataaatgtgtatatcttttttcactgaattctttttaaatgactggagcaaaggagtccttgaaaaatgtgacctgagtacygtgtttagtagattgaaaattcttcaggggcataagaaattaagaatgtggttttcttccaagatcaagaagctaaggtcatctaatggagaagttcatgtcatccatcacatgttctcatcttgcagatgtggaaaaatgccagtggctggcttctgtttgacagattcagtgagcctgcttcagaggactctgagccaggaaactctcaaggtgggctgcatcccacaggacagctcttgaatttggacagctcttgaatctggtctcatgttgtcaggatgacttggctcaccacaacgtggatgtccttctttgtagcttccttctttcttcagaccttacacaggccctgctatgggaatg

SEQ ID NO: 341411 - DNA, 571 bp, Homo sapiens
agaatgcatcagtctctttaatagcagaattgatcaagccgaagaaagaattagtgagcttgaagacaagctacttgaaaatacacagtcagaggaataaaattaaatacctagcaatgaacttgaccaaataagtgaaagatctctacaatgaaaggtatataacattgattcaagaaattgaagaagacacaaaaaatggaaatatatttcatgttttgaagaagacacmaaaaatggaaatatatttcatgttgatggattggaagaatcaatattgttaaaacatccatactacccaaagcaaactacagattcaatgcaattcctatcaaaataccaatgacattcttcacagaaatataaaacataaccttaaaatgtatacagaatcacaaaagacccagaatagctaaaactatagagcaaaaagaacaaaactcaaggaattacaatacctgacttcaaattatactacagagctatagtaaccaaaataacgtggtactggcataaagaccaacacattgaccagtggaacagaacagagaacccagaatatagccataca

SEQ ID NO: 341412 - DNA, 586 bp, Homo sapiens
attattttatttcacataacagtcccttactgtctgaatttgaagataagaaacatttttaacaataagaaacattttgttggccaggcgcggtggctcackcctgtaatcccagcactttgggaggccgaggcaggcagatcacctgaggccgcgagtttgagagtagcctgggaaacatggcaaaaccccgtctctactaaagatacaaaaattagccgggcatggtggcgcacgcctgtagtcccagctactcggtagatcgaggcaggagaattgcttgaacctgggaggtggaggctgcggtgagccaagatggcaccactgcactccagcctgggtgacagagactctgtctcaaaaaaaaaaaaaaaaaaatttgcaaatatgtcctttttattggtggagaagcatatgacttacatttttaaataaatttttgattttagaatgtttttcgtttttcagaataatttgcaaagatagtccatagaatacccaagtatcccacacccagtttcacccagaactaatatggtacaattgttacaattaacaaaccagtatcaatacattattattagct

SEQ ID NO: 341413 - DNA, 586 bp, Homo sapiens
attattttatttcacataacagtcccttactgtctgaatttgaagataagaaacatttttaacaataagaaacattttgttggccaggcgcggtggctcacgcctgtaatcccagcactttgggaggccgaggcaggcagatcacctgaggccgcgagtttgagagtagcctgggaaacatggcaaaaccccgtctctactaaagatacaaaaattagccgggcatggtggcgcacgcctgtagtcccagctactcggtagatygaggcaggagaattgcttgaacctgggaggtggaggctgcggtgagccaagatggcaccactgcactccagcctgggtgacagagactctgtctcaaaaaaaaaaaaaaaaaaatttgcaaatatgtcctttttattggtggagaagcatatgacttacatttttaaataaatttttgattttagaatgtttttcgtttttcagaataatttgcaaagatagtccatagaatacccaagtatcccacacccagtttcacccagaactaatatggtacaattgttacaattaacaaaccagtatcaatacattattattagct

SEQ ID NO: 341414 - DNA, 594 bp, Homo sapiens
acttaattataaatgggtgtgtgtcattgtccttgacaccatgagaaatataatggctatcaggaagtgggggaaaggaacttagatcttttcgaatgtctactatgggcctgttgtttctctcagttgattctgctaacagcccacctaagaaagtattaatcatgccaagaaggtattatcattattatcttatgaatgaaaacttcacagaggtagctgaatgcctaaaattcacacagctagagtatcttttaagagtccttcttttgcaagtgacaaaataaataagctggcataaacaattaaaggaatccactgactcaaataacagaagcccagaagtaggactagctctctaagaggmtagatatagctgcaaaattgatattaccatgaacttggcatctctgttgttctctttggtttcccttcccagcattggccttatcctcaggctctacaagcggatctgctgcagccccagtccccctcactctgacaactatggtgtcaaattggctctagccgttcactagaacgctgtaccgtgttcacaaatgtatcctgcactagctgggggaaaagaggatc

SEQ ID NO: 341415 - DNA, 635 bp, Homo sapiens
agctattgtatcttttacagcaaatgaaaactctaaaacaacaaatgaagacttatttctgtttatactctgagcacttagaacagagtctgtgattaagattggatgtattttagatgaggcaatcaataagagtaaaagctcacaggcttgaatgcagcaagcagtttagggagtgtgctgagtagagcagtcaggaaatatttagtgtagaaaagcatgaacagtaagatggagaagggatggaaggtttctggtgytggatttaataattgtgtaactagtattttctgagtttcaattggaatatgctaactcttctgtgtagatgaagtaggtaaaaccagattaaatctgattttgtttatctgattaagtctgatgggcccagaagaaacagcctgaggcatcacttaaatttgggcattttttataatgcgctgaactcggagccaagtgaactaagatctagagctgagcctaacactaatgtaatgttttcattgtgctcttttgagcttcagtctatttgtaaaatgagggagctggactaaaggatccgtgccgccctcctaatccaacactcctcctttactaagctaaaagagagttttggcttgctgagatggaactgt

SEQ ID NO: 341416 - DNA, 581 bp, Homo sapiens
tacctggaagatttttaaaaattccaaattgaacttctatagaggaaaattacaatgtctgagatgaaaaatatgttgaatgtgattaataacaaattagacattgcaaaagaaaatattataaatttgaagacatagcaatagaaattatcccaaataaatggagamaattattttaaatgaatagatcatcagtggactttggaagtaattcaagctcctaacatatgtgtaattggaatctctgagagggagaggtagacagaaaaaaatattcaaagaaatagaaaattaccaaatttgataaaaactataaacccacagatccaagagctcaacaaacccaaaacacaagaaaaaaacatcaaggtaaatcataactaaattacctaaaactgatgataaaagaaaaacttaaaagcaaccagaagtaaaagatatgttatatatagaagaattaagataaagatgatagcagattttttatccaaaatgatgcaagatgggagccagtggagcagcatctttaaactactgggggtaaaaaactctttaaacctagaattcaatatgcagtgaaa

SEQ ID NO: 341417 - DNA, 538 bp, Homo sapiens
tgtagaagtgatataccttctcttgggatttcagtctgctcaggctgctataccaaaacaccatagactgggtggcttaaacaacaggaatttattcctcatagttatggaggctggaaagtccaagatcaagatgccagccaattcacttcccaggtgagggctctcttcctagcttacaagtggctgccatcttagtgtgtcctcaaagaggaaagaaagcaagctcaagtcacttcttcttataatgatgctaattccatcattgaagtccccaccttcaagacctcatctaaacttgattaactccaaaatactctacctctaaataatatcacattaagtagggcttcaactatgaattttggggggtcataaatattcagttcayactgtttgtaaaaatcaaaaacaccaatctgtttgcagttgccaccactcttcagaaattaaatatcgatagggacaaaaacctcaaaacactttgaaaaattcagcaagacacatcattaatattaacttctgcttagcaactaaa

SEQ ID NO: 341418 - DNA, 601 bp, Homo sapiens
tattctcaactctttataggaaagctcactgaaatgcttatgatgtaactgtgagactgatgcactgaatatctttattttatggggtatagaactggagaaaagtcaagttaaagtgcttaaaggtgaaaagatggggatgctaaagattgtatttaaaatagcactggaacactgcaaccatggcagaatggaatcagagaaaggcaaagtctttctccctgcttatctaaaatcaaaggctttcccaaagacaaatgtaaaacaaagcaaaatgtacatgaatttgcttcaatagtcaatgccattattattgttactatttatatgccaytgatttacaaaattagatactggttctttatgttcatgtgagaacaatctgagaagcaaaatattacgtatgttgtttatgttgacttttactgaaaatttgcctttctaattacaagagaaacaaaattataacccaggctttcttcaatttgcctagctcttacttagtattcatacacctgtaacatcttggcagttaagcattggaaaggctttcattttctcagtgcttgatatatgcacagcaaaatccacagcttcttcc

SEQ ID NO: 341419 - DNA, 460 bp, Homo sapiens
gttctctgtctcccctggagagagggagattccctttccgggtctgctaagtaacgggtgccttcccaggcactggggccaccgctagaccaaggcctgctaagtaaccagggccttcccaggcactggcattaccgctaggccaaggagccctccagcggcccttctctgggcgtgaatgagggctcacactctygtcttctggtcacctctcactgtggcccttcagctcctaactctgtgtggcctggtttcccccaaggtaatcataatagaacagagatcattatggtaatagaacaaagagtgatgctacaaactaatgattaataatagtcagatataatcctatccgtttcctatctctagtaaaacttttcttattctaattattttcttcgctgtactggaacagcttgtgccttcaggctcttgcctgggcacctgggtggcttgcggc

SEQ ID NO: 341420 - DNA, 460 bp, Homo sapiens
gttctctgtctcccctggagagagggagattccctttccgggtctgctaagtaacgggtgccttcccaggcactggggccaccgctagaccaaggcctgctaagtaaccagggccttcccaggcactggcattaccgctaggccaaggagccctccagcggcccttctctgggcgtgaatgagggctcacactctcgtcttctggtcacctctcactgtggcccttcagctcctaactctgtgtggcctggtttcccccaaggtaatcataatagaacagagatcattatggtaatagaacaaagagtgatgctacaaactaatgattaataatagtcagatataatcctatccgtttcctatctctagtaaaacttttcttattctaattattttcttygctgtactggaacagcttgtgccttcaggctcttgcctgggcacctgggtggcttgcggc

SEQ ID NO: 341421 - DNA, 564 bp, Homo sapiens
tctgtgtatcttcttatggtttcagctttgaccctgagaatgactccctttcaatgttacaagacctggctcctcttcttggagacatgcttgcaaaattcacccctccttcctgcctccctggttttcccacaagaattctcttgaactcacatgacttcttcctacaggagatctccaagcctgcacctccagcccatccaaccacaaagaactttgaaacctcttaacctgtcttgtcatcttagttcatgcaaatagcaacccctagagatttgtagtgcacagcctgaacaaccacaggggcaaacttcccttcctgtctctgaagtctcgctttatccttattgtctcacccctagaacttcaaggagcctcataactcatagcccaatccctactctttctgtagacmcattttcgaaaatgcagaattgcagaattgttctgccggaagacacctccagaacatcttacatatctgagtgtgtaaatgaggaaacataggtttagaaagtggcaggctagtcactacaaccaagaccttctaactttctgtctggt

SEQ ID NO: 341422 - DNA, 628 bp, Homo sapiens
tggctcctcttcttggagacatgcttgcaaaattcacccctccttcctgcctccctggttttcccacaagaattctcttgaactcacatgacttcttcctacaggagatctccaagcctgcacctccagcccatccaaccacaaagaactttgaaacctcttaacctgtcttgtcatcttagttcatgcaaatagcaacccctagagatttgtagtgcacagcctgaacaaccacaggggcaaacttcccttcctgtctctgaagtctcgctttatccttattgtctcacccctagaacttcaaggagcctcataactcatagcccaatccctactctttctgtagacccattttcsaaaatgcagaattgcagaattgttctgccggaagacacctccagaacatcttacatatctgagtgtgtaaatgaggaaacataggtttagaaagtggcaggctagtcactacaaccaagaccttctaactttctgtctggtgctctatgacacatacagcccccactgtgctcagaggtcctcatggagcttcctttactaaatgtaaaagactaaattcatttgcctacagtttccttttctttcctttcgatcactttatattttctga

SEQ ID NO: 341423 - DNA, 573 bp, Homo sapiens
ccatataatttcacttaattttatgcacacttcygatactcattattagtatatctaccataaaaagtaaatgcaatttgaacttaaaatactgatttttaaaaaattaacttctgggcagctttgaggttaaaagcatgaggctgaaactactggcaaaaattaggtttgaaactacagttatctacagatttcaattatatacgctacccttttctccattaccccctaggaaactgaaagttgaatatattaacttgttatattatcttcactccagaagcttttacagacaagtttgagcttatctattacttgtgaattttaaaaatgtagacattattgcgttgacatcctggtttcaatacttggtaattttatctgtttcctctctctctctttcctcaccaaaactttactgttcttttgcattcgccattttcaactcttcttgaagagaacaaaaagctcacttaccacctcacctcccttctactaaataaaaagaagcaaaacacatcatttaattgtaaaatatgaaccttcatattttaaatattcctgattcattat

SEQ ID NO: 341424 - DNA, 573 bp, Homo sapiens
ccatataatttcacttaattttatgcacacttccgatactcattattagtatatctaccataaaaagtaaatgcaatttgaacttaaaatactgatttttaaaaaattaacttctgggcagctttgaggttaaaagcatgaggctgaaactactggcaaaaattaggtttgaaactacagttatctacagatttcaattatatacgctacccttttctccattaccccctaggaaactgaaagttgaatatattaacttgttatattatcttcactccagaagcttttacagacaagtttgagcttatctattacttgtgaattttaaaaatgtagacattattgcgttgrcatcctggtttcaatacttggtaattttatctgtttcctctctctctctttcctcaccaaaactttactgttcttttgcattcgccattttcaactcttcttgaagagaacaaaaagctcacttaccacctcacctcccttctactaaataaaaagaagcaaaacacatcatttaattgtaaaatatgaaccttcatattttaaatattcctgattcattat

SEQ ID NO: 341425 - DNA, 556 bp, Homo sapiens
taacaccagggccaccagtgactttcttgtccccctcttagctaagccataagcagaaggcccaggcaggagttaactaattagtcattttgtcccaaatgttataaatggttgtgctaaagcagcccaggttcacagytcttaaaagtattcttaatatttcaaagtgcaggaaacaagctgtatcttggtgaaatacctttatatctacaatgcaaaccagcctttcgagaccttttagggaacatttcaattataacaaaccttatcaaataaggaaaggacataacagactagaagtaactgttttattcaataagaggcaactatatttcatatctttattaattggagttttacatgccaataaacattctcatcctaagatcatatcactcagatgtaagacctggatatttatttttttagtttaagcattgttttaactcatgatgttctctctgccttaatgttcctctcggttctccccttattgtactttcctgaagtttctaattgaatatgtgctctcacacatctccaaactattccagac

SEQ ID NO: 341426 - DNA, 528 bp, Homo sapiens
tatcaaatacatctagtatgtgattaccctttccccactccactaccttgtggastacttccatctttttaaaatataaatatcacctgaaatgatactgactggaatattatgaaaagtttaacctgtacttcaactatctaatagctcagagcacaaatattttgatgccttttgaagtagcacttggattcaaagtaaatgagtaccttactcctacctggaccagtagtactactgtttattctgtcttctgtgtggacctcacctgctccctgtgcacctcacagaggacagcacctcagccctcccaaatgatccattgtctctggaaccaaagtggttttccttttattagggttggatagagattagaagggtgccacagggtaggtagggcagtgttcacattttgccactaggggatatgggaaggaaaagaaaatgtgtgaccaagaaaaggacctgcttttcttaaagcatatgttagagtgcacaaaatctggactaaggcaggagacatgggat

SEQ ID NO: 341427 - DNA, 447 bp, Homo sapiens
acaggtgatttccatctctgtggaggtattaatatagccatctttcaaataaaaaaaataatatgttagaaagattgtactcattttggaaagaatgtaatgaatgtctacctgrgccagatagtttcatgtgaattatctaatttactcctcaaactaaccctatggaggaaagaagatatttttcccagtttacaatcaggaatctaaagcatagaggctttaccttgcctaaggtcacacagtcggtgttccatatgtaattcaattgagtgctctgtctccaacatcagtttttaaaaatgttttcacatggtgattatcaaatcttttctaccatccaaaacagtgcaggatatttcatattagcaagataagtagcaaaagagtttctcaacttgcctcctcttcatttacaggcatggagtttgcttttattttgtttgt

SEQ ID NO: 341428 - DNA, 641 bp, Homo sapiens
atctaatgtgtcattgctgaatacagctagttacagtttttggcttcttgtcctgccaacactgccagggttgtgggtgtcgaactgggaagtggaatctcactgcactaggtattctcttactttatgggattctctagtgtttttcttgtgccaaggcctcttaaaggaccttgaatactgttgtggactgaatatttgtgtcccccccaaaattgataccttgaaatttaaatgcccaatatcacagtatgtagaggtagggccttaggatgtaggaatgggattagcaaccttatgaaagcaaccccagagagctttcatcctctttccatcatatgtcacgtgaagctacaagaagaatttggcaatctacaacccacaagagagccctcaccaaaacyctaccatgctggcaccttgatctcagactctcagcctccagtaccatgagaaataaatttctgttgcctataagccacgaagtctaaggtactttgttataatagcctgaattgactaaggaaaatgcttattttgattctaaccctctgctatgtttcgaatgactgtcctctccaaaactcatgttggaacgtaatccccaatgtaacaatattgagaggtggggcctataagtg

SEQ ID NO: 341429 - DNA, 632 bp, Homo sapiens
gtcatctgctcatatgatcagcaaccagggtttatgaagaaaattacagcagtaaagtattatttcaaacactgcttgtgtcaggactagtcaacatgcaaaacattctcaaagtcagataacacacaaaggcagcaagtgtggggtacttaaccgcgcccgtggatacagaggatgttatggatgagattcaggggcctccctgcaactttacgcacaacttcggatatatttacttttctgtggagtgggtccacagctttcatatctcagggatagcagcacatatgtatgagctctgtgaccacaggcatgctcctaacctctgtgttttcactgactcatttgtaaagttacctaacctgtgtttattgaatcacttgtaaaataacaggattagcataagcattagatctctaagataatgcagctttaaattctatattttccctaatccatgcttcatggagatgcattcatgcaagacttagtagtaacrgaatatttacgacatgtcaggcattgtattaaatacttcacatacaatgcctcatatgtgaaatcctcaaagtaatcaaaaaaggttagatactattattcatcttattattattattttagtatatttaaca

SEQ ID NO: 341430 - DNA, 450 bp, Homo sapiens
tgaattggttagctatcagcataataagctgtataaccaccatcccaaaactcagtggcttaaaacagaaatcatttattctctcttgtgtttgagatcaagtcgagtttgacaggcctacactaggattggatggtgctggctcccagagtcaggttggatatcgatctgctctatttgttttttatctttggcataacaagctacccaatacatgtgcttctcatggcagcagcagaagcataagcgggtctagtagaaacagtggatgactcctaaggcttagratcacaattagtacccaacacttctttctgcctgcattctgttgtctcagtcaattcacattcccagcctcagtatcaatggggcaggaaaataaagtggttgacattagagggagtactacaaagtcacatgacaaagaatgtggaaactatagaaagatga

SEQ ID NO: 341431 - DNA, 598 bp, Homo sapiens
tcatttccattttttctatttaacatagacacaggctcagaatccttcttaagatgaatactggaggttactgtcactatcctaatttatctactgaataaaacctagttgctatctctagaaagataatgaattctgacaaagatcaagaccacttactcaaatgtattttttggyagctcagcaccatttttcttcctctgtagtcatcaaatctttatgaatcttctgcttggagatacatttctatcctgaccatctattttgccacaattgcaatgatttataataataacaatgagatgttattcagtgtatggttagatcatgctacctattgaaaaacaaaaagacaagtcaagcctgatgcttttatatatgggaagtaagtatgccattgaagtagtcactactaaactgttcatcagtttgcagttcttctttacttttccaggcatccactctattggaagttaggtctggctaagacagaagagttccctggaccccttcacaggacttgcaacagtcctgtatggctcactgactggctgctgcactcaaaccccttgcaggacagggagcatgcaggcgagcg

SEQ ID NO: 341432 - DNA, 372 bp, Homo sapiens
attcactataacagaggagtaactatgagacgctataaatacatawaaagaactctaaagaataccctaggtctgagggagagtacctgaagaagacaaaatttggaagggaagccccctccctaagctgagatttagacctcttttgaggtacagtttcaattcatttgttggagaagatctctgagccactccagtatagcagtcaccccatgtctacagggcatactttccaagacacccagtggatacccgaaacagaaggtagtaccagacctgactgctgtcaatccaaacatgtttctgttcatgttttccactcacagatttaatgccttttccttggtaatttagtacttaacatgcactgta

SEQ ID NO: 341433 - DNA, 553 bp, Homo sapiens
tatgctctttacatactaatctgcaatgcatctctgttatatatcgtctccatatatatgtgtgtgcatatatatagatagatatagatagatatatagacatagatttatttttagcctctccattctgttccattggctcatctgtgtrtctatgaatgtcacactatctgtataactatggttttataataaatatctatatcagataaggaacatctctctctccagtcacaaacttctttttcaggattatctttgctaatgttggccttttgttcattcattcgtgtgtgtgtgtgtgtgtgtgtgtgtgtgtgtgtgtgtgtttattagaatcagctgtcaagttccacagtgaattttggggaaattttaattgacctgtcattgaagctataaatgagtttggaaagaatccgcattttttcgtattgagtcctctatccataagcaaagtacatcttttcatttcgttaggcattctttcatactctccaataacgttatgtaattttctacttaaaggtcatgcacatcctttattagatgt

SEQ ID NO: 341434 - DNA, 561 bp, Homo sapiens
tcagattcataaaacaagctgttcttgacctacaaaaaggcttagacaaccacacaataatagtgggagacttcaacaccttactgacagcattagatcatcaagctagaaactaacaaagaaattctggacttaaacttgacacttgaccaattggacytaataggcgtttacagaacactccacccaacaaccacagaatatacatttttcttatctacacgtggaacatattctaagaccacatgcttggtcataaagcaaatctcaacaaattaaaaaaaattgaaattgtactctcagtccaaagtgcaataaaatagaaaccaatgtcaagaagatctctcaagactacacaatcacattaaattaaacaacttgctcttgaataattcctggctgaacattgaaattaaggaataaataaaaaacactttgaaattaatgaaaatatggacacaatttatcaaaatccctggaatgcagctaaaggggcgttaagaggaaagtttataaccctaaacaccttcatcaagaaattagaataatcccaaactagtc

SEQ ID NO: 341435 - DNA, 561 bp, Homo sapiens
tcagattcataaaacaagctgttcttgacctacaaaaaggcttagacaaccacacaataatagtgggagacttcaacaccttactgacagcattagatcatcaagctagaaactaacaaagaaattctggacttaaacttgacacttgaccaattggacctaataggcgtttacagaacactccacccaacaaccacagaatatacatttttcttatctacacgtggaacatattctaagaccacatgcttggtcataaagcaaatctcaacaaattaaaaaaaattgaaattgtactctcagtccaaagtgcaataaaatagaaaccaatgtcaagaagatctctcaagactacacaatcacattaaattaaacaacttgctcttgaataaytcctggctgaacattgaaattaaggaataaataaaaaacactttgaaattaatgaaaatatggacacaatttatcaaaatccctggaatgcagctaaaggggcgttaagaggaaagtttataaccctaaacaccttcatcaagaaattagaataatcccaaactagtc

SEQ ID NO: 341436 - DNA, 539 bp, Homo sapiens
agaagaataaaaataattaaatttagagaacttcatgaaactgacatgcaaaaatccatttaaaagatcagtgaaaccaagaattggttattcaaaataataaataacattgatggaatgctagctggactaacaaaaaaaaaaaaagagagaagatccaagtaagtaaaatcataaatggcaaatataacattacagctgatccaaagaaattcaaaagatcctcagaaactactatgaatgactttatgcacataaattaaaaatctagaagaaatgaatgcattactggaaatgcacaaccttgtaagactccattatcaggaagagattgaaaccttgaatagacaaatatcaggtactgaaattgtatcagaaacaaasaaacaaacaaaaacctatcaaccaaaaaaagccttggaccagatggattcacagctgaattctaccacacatatgaagaactagtaccagtactactgaaactattacaaaaaattgaagaggagggactcctttctaacacattctatgaagcc

SEQ ID NO: 341437 - DNA, 520 bp, Homo sapiens
gaacaatagacacactgcggactactggtggaggaagagggaggaaagcatgagctgaaaaactacccattgggtactatgatcactacctaggtctaatatacccatgtagcaatcctacacatgctatgtgtaggatatgctgtgtatctaaaacaaaagctgacgtttaaaaaataatcagggaacaactctctgtatgttagaacaaagcatatacctgtacatgcctatcaattagctcaaatgagcatgactacttgaagagtakgattttgcagagccatgttagcactgtgcagtacttctgaagttctacctcaaaatactataatacagagaaaacatgagcaaatatattaaaaaaaacattcttttttggtgttagaaaactgcattcagctctttttgatggatttgctagttggttcattgaaacaaattctcagctaattcaaacaactcatgcattttgctgttatcgcccacaaaattgatgtatttgtccaaattgctagtt

SEQ ID NO: 341438 - DNA, 596 bp, Homo sapiens
aagggagacaaatcatgatatcatcaaatccaagggtcacttgaaagtattttaagctttgaatatgaaatctaagaatgttgttttgtactatataaataatcttacccttttatttttaaaatacatacctgactatgtctctaatcccatgccaagcaatacaaggaacttagaagtaataccaatcctttgtgaggcctaggtaggcagatcacctgaggtcaggagtttgagaccagcctggccgacatggtgaaaccctgtctctactaaaaatacaaaaattagccgggtgtggtgatgtgcacctgtaatcccagctactcaggaggmtgaggcaggagaatcgcttgaacctggaaggtggaggttgcagtgagctgagattgcgccattgcactctagcctgcatgacagagcaagactccatctcaaaacaaaacaaaaacaaacaaacaaacaacaacaacaacaacaaaaaacagaagtaacaccaatcagccctcccatcttccatgttatttgtctagtattatagtctcatcttctttttggtcatatcaaccgagaaaattattcatcaatatgattgt

SEQ ID NO: 341439 - DNA, 194 bp, Homo sapiens
tgcttggacttgactgataaagcccctaatcttcctttttgcttccttgcacccatttctgatagtctccccatgcaaactccttgtttcattcttttacaaggctaaatagtatgcctctgtgtgtgtgtgtgtgtrtgtgcacgcgtgtgtgtgtgtgtgtgtgtgtgtgtgtgtgtgtgtgtgtgtgtctc

SEQ ID NO: 341440 - DNA, 350 bp, Homo sapiens
gtctggtgcagttttccaacttcctcttatcttgtctgaaaacctgccctgcacaaagtcttttctgatctttcataaaacgctgtttgttttcctaatacagtatttatttattgttttgaaatctgatgcctgtgtcttcttcccagtgaacagtaagcttctttagaatgtgcataatggcttattcatctcatattataccataakctgccacagtgtctggtacaaggaaggtgctcaagaaatatttgctgaatatattaaacttttgtatatcattcaagataaggaattgaatttgcccacaaaatcaacatggaatcttatatggaaaagcagagtcattt

SEQ ID NO: 341441 - DNA, 613 bp, Homo sapiens
tgcggcattatttctgagggccctgttctgttcattggtctatatctctgttttggtacaagtactatgctgttttggttactgtagccttgtagtatagtttgaagtcaggtagcgtgatgcttccaggtttgttcttttggcttaggattgacttggtgatgtgggctcttttttggttccatrtgaactttaaagtagttttttccaattctgtgaagaaagtcattggtagcttgatggggatggcattgaatctataaattaccttgggacaagggctaatcttttctctgttttgcgggtaagcagatggagacacaaaagatttgtaacctacctaagggcatgtagccggtaacctaggattcaaatccgggtctctcttcactccataacccttaactctcctgttataaaatagaagaagacagaactgaaggtgggctccaaggatgattcagcttgttcagcctattcaaataatcctagagctgtccaaagatatgagatttgactttatacttcttatttgtagctaccttcaaaagtagacctggggctctgtccatatgcaaacttatatggtacaccttcactcaatgtattgttt

SEQ ID NO: 341442 - DNA, 511 bp, Homo sapiens
cttgggaagatgccaatcaaaatgtcatgcatttaggatctgctgtaatctcagaattgttacttagattgggagtcataagagctggcatcctacacttgctgagtgaccttggggaagttatttgacctccctgagactcagtttcttcatctgcaacatgataaagacttatatctacctgatagaattgctgtattatatgaaaatattcatgagaaagtgctttataaatgataaaaaccctaaaatattaatttgatgatgatgctaatgatgaaagtgacaaaaatgtaaatggatatgggctgtagaaaaaggataattgtagtgwatgttcttcttaattgtgattgtgactaggtctccctgcctggtttagggatatcctagggtgctaccgcccactgcctacatattttaacccacccagccataattaccagtgatttgtcatctgtctcccttgcacatgatggcaagtatctcttattcccttgccaaaccctcc

SEQ ID NO: 341443 - DNA, 567 bp, Homo sapiens
attttcccttgaagattctaactctttattcacagtcaccacttctctctcaaatttaatgggcaagtatatctgtttggtgaagcctagatcacatacagaagcttagacataagggaatctggwcaatgcagttttgtgattgcaagactcttactagtgaaaaatatggtagaagaggattgggaaggatatggaatgagccaatctgtaatatttgtcatatttcctctctgagatttcttgaaattaaacagcttcagttccttcaaatgttggaggctgttgagatttaagtcggtttgccatcctggtacttcttctctgagaacaccactatttgaatatctccttcaaaatgtcataccaagaacatgataaatttttcaggtatattttgacctgtgaaaaatggagcagtcctactacctcttcaagacactgaacatctattgatatagcctccaaatgctgttgatttatggagcttattgtgtaggacagcaagtccttttcacatgtcttactgttttttgtgctttttgtttttttgttttgagaaggagt

SEQ ID NO: 341444 - DNA, 521 bp, Homo sapiens
ggaggccaattagtgtgaaggaatgagcactggcctgggaggcttggaactcgggttcttgtcttgtgtctgtgtatgaccatgccaagtcccttagcatttctgatcctgagtttcttcatttacaaaagggaataaggccatttttctgtgccttccttagaaggttagtgtgaaaataaaaagcaataatgaaagtggatatttataaaaaccatgaagcactatggcctcatggtttttagagcctaatggtatggccataggaggtcctatttaccatcktcaatagcccaacccagctgatggcaattgtgtgtcacacatggtatggtaaatgtttaaactcacaattcctgttaactctggtagcttatatttaaataaatgaacttaactttgatatagttcagaacttacacaggtaaattcaatgaggggaaagatcaatgccatctaatattgattttttagaaataacaaatagttagattgtttgatactcacaataattttgttaa

SEQ ID NO: 341445 - DNA, 521 bp, Homo sapiens
ggaggccaattagtgtgaaggaatgagcactggcctgggaggcttggaactcgggttcttgtcttgtgtctgtgtatgaccatgccaagtcccttagcatttctgatcctgagtttcttcatttacaaaagggaataaggccatttttctgtgccttccttagaaggttagtgtgaaaataaaaagcaataatgaaagtggatatttataaaaaccatgaagcactatggcctcatggtttttagagcctaatggtatggccataggaggtcctatttaccatcttcaatagcccaacccagctgatggcaattgtgtgtcacacatggtatggtaaatgtttaaactcacaattcctgttaactctggtagcttatatttaaataaatgaacttaactttgatatagttcagaacttacacaggtaaawtcaatgaggggaaagatcaatgccatctaatattgattttttagaaataacaaatagttagattgtttgatactcacaataattttgttaa

SEQ ID NO: 341446 - DNA, 385 bp, Homo sapiens
aattcccactttggcaaccagtccaaaccacttcttccaatacagttttactgactataaacaaatatttraattaacctggctcctaggcctcttttcttgattactttcagaaagacaaaggaaaagctgagtaatgagctcctgccaactccaacacaggtgtctgtgagtctagaatggaatccagcaaaatgaagccctctgatttattgaggagatatatgtgtctgtgcattcttttcctttgttttatttggtcttgtttgaaatatgaacagttctaaatcccaggcaggtagcaactattttcctggacgtagtccaggtaatgctgtgtggctggtatatacccagaaaccacattttcagggcttctgaaggc

SEQ ID NO: 341447 - DNA, 604 bp, Homo sapiens
ttatcattaggggcatgtcttagtccatagagttttttgtaacagaataatacagattgggtgtcttcaacaacagaaatctatttctcatagttctggaggctgggaaggtccaagatcaagattgctggcagatccaaggcctggtgacagttcactttctggtttgtagatgattatctactgttatatcctcagatgaaagggagagagagaaagtgaaagagagaaactctgtcatgtctcttcttcttataagggtacagatcccattcattagggccccaacatcctgacctaatcaacctccagaggcctcacctcaaaatactatcatgttggggtttaggcttcaacatatgaattttgaggggacacaaacatttagctcacagtaaggtgytttcatggcagtaatgaagctgccctgagtctcattcctggcctacttaggaaggttgtacgaaagtcagtgaacttcatctctgttgaaaacaacttattttgcatacgtaccataagaagtcatattttaaataatcctaacatcaagtgctttctcaaaagattaacttagaattgttcaaaatcactcactgttaga

SEQ ID NO: 341448 - DNA, 572 bp, Homo sapiens
gaaagttcatagcactaaatgactacatcaaaaagttggaaacagcacaaatagacaatctaaggtcacacctcatggaactggagaaacaagaaaaatccaaacccaaacccagcagaagagaagaaataacaaagatcagagcagaactaaatgatacaaaatgaaacaaaaaaaaatacaaaaaataagtgaaacaaaaagcttgttctttgaaaatataaataaaattkgtagaccattagcaggattaaccaagaagagagaagatccaaataagctcaactgcaaacaaaatgagatatattacaattgacaccaaataaattttaaaaaaagattattcaaggctactatgaacacctatatgtgcataaactggaaaacctagaggagatggacaaattcctggaaatatacaatcctcctagattaaaccatgaagatatagaatatctgaacagaccaatgacaagcagtgagattgaaatggtaataaaaaaaattcccaacaaaaaaaaaatcctggaccagacagattcacagctgaattctaacaaacattcaaagaa

SEQ ID NO: 341449 - DNA, 572 bp, Homo sapiens
gaaagttcatagcactaaatgactacatcaaaaagttggaaacagcacaaatagacaatctaaggtcacacctcatggaactggagaaacaagaaaaatccaaacccaaacccagcagaagagaagaaataacaaagatcagagcagaactaaatgatacaaaatgaaacaaaaaaaaatacaaaaaataagtgaaacaaaaagcttgttctttgaaaatataaataaaatttgtagaccattagcaggattaaccaagaagagagaagatccaaataagctcaactgcaaacaaaatgagatatattacaattgacacyaaataaattttaaaaaaagattattcaaggctactatgaacacctatatgtgcataaactggaaaacctagaggagatggacaaattcctggaaatatacaatcctcctagattaaaccatgaagatatagaatatctgaacagaccaatgacaagcagtgagattgaaatggtaataaaaaaaattcccaacaaaaaaaaaatcctggaccagacagattcacagctgaattctaacaaacattcaaagaa

SEQ ID NO: 341450 - DNA, 523 bp, Homo sapiens
aagcaaaaagaacaaacctggaggcatcatattactcaacttcaaattatatgattaggccatagttaccaaaacagcatggtactggtttaaaaataggcatatggaccaatgaaacagaatagtgaacacagaaataaagccaaatacttaacagccaactgrtctttgataaagcaaacaaaaacataaagtgggaaaaggacagtctattcaactaatgatgctgggatacttggcaagccacatgtagaagaatgaaactggatcctcatctctcaccatatccaaaaatcaactcaggatggatcaaagacttaaatctaagacctgaaaccataaaaattctagaagataacatcagaaaaacccttctagacattggcttaggcaaaaacttcattaccaagaacccaaaagcaaatgcaacaaaagcaaagataaatagatgggacttaattaaactaaaaaaaacttctgcacagtaaaaataaaaaataataatcagcagagttaacagaca

SEQ ID NO: 341451 - DNA, 297 bp, Homo sapiens
cgtataactgcaaacaatcaaatttttttctgctttactttcatgttcataagccctctgcttatattccctaggcaaagcccccaatccacttctggtatggagctgccagattgatragtcactgtttgttcaaataaaatcttcaaaaattttattatgcctcagtttaccttttaaaattaataattttctacatatattaggtaattgatttttattttataatttccaatggtgtacttgtcatatatcattttgttgtgtatgttttatcatatctagagatacatatta

SEQ ID NO: 341452 - DNA, 297 bp, Homo sapiens
cgtataactgcaaacaatcaaatttttttctgctttactttcatgttcataagccctctgcttatattccctaggcaaagcccccaatccacttctggtatggagctgccagattgataagtcactgtwtgttcaaataaaatcttcaaaaattttattatgcctcagtttaccttttaaaattaataattttctacatatattaggtaattgatttttattttataatttccaatggtgtacttgtcatatatcattttgttgtgtatgttttatcatatctagagatacatatta

SEQ ID NO: 341453 - DNA, 604 bp, Homo sapiens
taacaattgcaatcagaatttgttacaactaataattaatttaggataaatttgaatgttttaaatactgtcttcttatcaaagtacatgatacattgttccatttattaaattctttattgccttttgatataccatatagctctcccagtatagattttttcaaatttgcatttgcaccataaattttaagttagcattttttgctatctagcgataatgaaatatattcccaatatacttacaaatgcactgtcactgaaatatgtgacaatactattgaattgtatatgtcaattttgtagctaattagatctttaaataggcgtttttttataatgacttgggattttcagaaattgttaatatagaatacaaatactattaattttgtctctcttttgaaaaaaggcaaatagtaatacatatttacatgctattcttaaattttaaggaactgttttgattatggtgatatttrctttttgtttaagaaagtttaacaggattgaatactaatttcaaccaaattacctcttgctatatattttgattaaatgatttgtttattttacaactaactgtgttgcttaatattaattta

SEQ ID NO: 341454 - DNA, 509 bp, Homo sapiens
aagcaatgaaatacaaaacaaaatctgtattttgtaaaaatatattataaaatgtttcatgggaaaaagacaatgctcctgaaactggaacagatactgtcatattaacagtggtgcgttagaatggaagttacatcttcttgttgctgagaaccttaggcccatcctggaccagttccaggtcttatgagaatgtggtacactatgataactgcttagaaattgctgagaaatccttgaatctcgaaatgccsacataaatctttaaagtggtcattatttacaataacattagtaaccctttttcttgaaaactaatagtataatacaattagttgttaaaattttttgtttcaaaatagtacttataatatctatccagagaccaaaacaatatctttggtaattaagaaaagtgcaatttatattttaaaataaaatattgaatttaaagtggttttatctttatgtgataatatttaattagctcataaatacttaagattatt

SEQ ID NO: 341455 - DNA, 582 bp, Homo sapiens
gcatttattaattacagctgtwtgtaaggtgctacgaatgtattaaagatagagggcttaaaacaaaagttactctcatgtaacataatcaaacaaaacgtagattagtaaaaggaatataatctatttttttcagccttgaattgtgttgggtatttgggatgatttctcataaatcacatgcagctaaatagcctttcaaaacaccttatctaaattcggtgtataaagaggaaaaggacttgttgaaactgacataggcaatgccaaaatatggattcatgtatctgtatgagccatttaagaacttatgctgtttttttttaacttcatgaaacaagacaggttaagcagtataatggtaaaggaaatgtctttatgattaagaagtcattagaaaccttggaggacctagttgtatagactgttagaagaggcagacataactctcagtgattaatgaattagcctgaggaagagaaagccaaaaatgacataatattctgagaaatataaccgaggaaatacagccaagaatatgatcttcagagaagtagcagaatcattggaagatcctttaag

SEQ ID NO: 341456 - DNA, 582 bp, Homo sapiens
gcatttattaattacagctgtatgtaaggtgctacgaatgtattaaagatagagggcttaaaacaaaagttactctcatgtaacataatcaaacaaaacgtagattagtaaaaggaatataatctatttttttcagccttgaattgtgttgggtatttgggatgatttctcmtaaatcacatgcagctaaatagcctttcaaaacaccttatctaaattcggtgtataaagaggaaaaggacttgttgaaactgacataggcaatgccaaaatatggattcatgtatctgtatgagccatttaagaacttatgctgtttttttttaacttcatgaaacaagacaggttaagcagtataatggtaaaggaaatgtctttatgattaagaagtcattagaaaccttggaggacctagttgtatagactgttagaagaggcagacataactctcagtgattaatgaattagcctgaggaagagaaagccaaaaatgacataatattctgagaaatataaccgaggaaatacagccaagaatatgatcttcagagaagtagcagaatcattggaagatcctttaag

SEQ ID NO: 341457 - DNA, 507 bp, Homo sapiens
cacttaaaatgagagttttgatagaaatctgtgtgtgatcgtgtatgtgtttgcaggagggaatgatatggagcagtcaatacatttattcccccaactttattcctttgtccttttctgatctacccattaccaaaagtccttttaattcctatttctgtctagtgagaatctattactttcttctttattttagtttcacgactttatgaacttggcaaatggtggcagcggtaaaagtctattacttaggaagaaaactataggcaaatcttttttwaaaaatcatatcctaacaatgtacatatttaataagcactagtaagtacttatatgagagaagtaaaaaatgatataagaatgtctaagatggttacttattctgaacttagcaaggtcaacagaatacaacaaatatatgttaagctaaaatcagaaaacagaaaagaaataaagaaacaaacctgaacacactactggaaaaatagtttagtttcctatgtaaaa

SEQ ID NO: 341458 - DNA, 606 bp, Homo sapiens
atattttgtgttagtagtaaactcattataaacatacgagttatggccgtgccaatactgccaacatcaatatatgctaagcactttttatgtgcaggcattgttccaaacaagttgtactcttcattttttatctttcttttacccactcaagaaatagaaccaaaagaagaagggaataaggagaggaaatttaataaatatacaaaagatattaaaagccaattctctctctcttactgcacacatgccgagaccagctcggtcggggagaccctaacccagtggcactagaggaattaaagacacacacacagaaatatagaggtgtgaagtgggaaatcaggggtctcacagccttcagagctgagagtcccraacagagatttacccacatatttattaacaacaagccagtcattaccactgtttctatagatattaaattaactaaaagtatcccttatgggaaatgaagggatgggccgaattaaaagaataggttgggctagttaactgcagcacgagcatgtccttaaggcacagatcactcatgttattgtttgtggcttaagaatgcctataagtggtttcctgttctgggcg

SEQ ID NO: 341459 - DNA, 409 bp, Homo sapiens
caaatcaaaaccacaattgagataccacttctcaccaactaggatggcttttttaaaaatttaacttatattttaagttcagcggtacaattgcaggtttgttatataggtaaacttgtgtcgtggtaacttgttatataggtaaacttgtgtttgttgtatagattattttatcacccagctatcacacctagtgctcattaattatttttcctgatcttcttcctcctcctaccctctgtcaggcctctgagcagaagctaagccatcataacccctgtgacctgcatgtatacatccagayggcctggagcaatggaagaacaacaaaagatgacattccatcatttgatttgttcctgccccaccccaactaatcaatcgaccttgtgacattcctcccctggac

SEQ ID NO: 341460 - DNA, 622 bp, Homo sapiens
atataaaagctatttaattttgccatctgttctcagaatgattacatataaattaattgtgggtaataatttttagaatgcattgaatgccaagatactcaaaatgttccaaagggagaatttatttaatttcattttccaaagtaataaagcaaacttctttaaaaagtgaaataatgatacagtctttgctactttaatgtaattttcattttttccttttttmaagattttggaggaaatcgtatccaaaattttgcccaaattcctcacactgttagtaggtttttgcttaagtaggaattcatttatgacttttatctactctcatgtttgccaccttttagcactaaaaattaacattgaaataataaatcctaactcttctaaagttgtcagcataggtaaaaataatgttgcaatagtaagatagaaaacaagtcatttgtttataggtaggtattttttaaaagatgtaaatagctgacagagaagcctgaagtacctcaagagaagaaacaaaacaaaattaaacaatgacaaaaaatttaactaggaattattaagcagctgtcacatgcttggaactctcataagtggtttaacagaacaaacgaggttc

SEQ ID NO: 341461 - DNA, 607 bp, Homo sapiens
tttttccttggaaatttcatggaggcatgatttccatgccagtaagtttgtaagagataggcttagacagatttaggtaaatgattaaaggtcagtttgtgaataggatactcttatttacatgtctaaagtttaatgagtttttctccatgaagaatattcagaaatctctttccattttaatactatggtatcggaggaaacttaggagtaaatgatatagtaaactatttccccatttgtagagtctccacctctgtctttttacagatactattccctcacttctgaaacaggaaggaaaacaaatataaaagttatggtgaaacatggctgttgtagactgaatgttttagacatctcaaaattcatacattgaaacctaattcccaatgtgacagtatcaggagatgtggcccttgggagatgattaggtcatgaatgggattggtacccttataaaaggggacccaccctattataagcttcctcacccagtctgccatgtaaggacgcagcaaaatctggccatctacsaaccaagaagtaggccctccgcagacacaaaatttgccaggatcttgagcttcccaggctccagaatcga

SEQ ID NO: 341462 - DNA, 575 bp, Homo sapiens
aggtacttagacatgtgcagttcgagatccaaagttcagcaccataaatcttagagcagaccatctggagctaaaaatatttaagaacaggtgttataaattgcccatttatgttcatataggagcaagatggtagtagaaaatctgctttcaagtagaagtacatcttgatggacatttcagaataaattatctgccaaatatactcttaagtgtrtaaatagattttgtcatataggtgaggttgcttgggagcatctgtttacattttggaaatttcaagttaagtttccattttagaatatttgttgcttgatagatctttttacaggaaatatttaacaggagatttttcttaaggtttcttttctttgtaacataaagctattttgtcagagaataattaatatgtcttcttacttattatggcaggtatacccaacaatcccttatttgcaaatatctttattttatatacaatcacctctttgcattcataggggattggttctagaactccctgaggatacacaaatccgtggatactcaagtccattatataaatggtgtagtgt

SEQ ID NO: 341463 - DNA, 575 bp, Homo sapiens
aggtacttagacatgtgcagttcgagatccaaagttcagcaccataaatcttagagcagaccatctggagctaaaaatatttaagaacaggtgttataaattgcccatttatgttcatataggagcaagatggtagtagaaaatctgctttcaagtagaagtacatcttgatggacatttcagaataaattatctgccaaatatactcttaagtgtgtaaatagattttgtcatataggtgaggttgcttgggagcatctgtttacattttggaaatttcaagttaagtttccattttagaatatttgttgcttgatagatctttttacaggaaatatttaacaggagatttttcttwaggtttcttttctttgtaacataaagctattttgtcagagaataattaatatgtcttcttacttattatggcaggtatacccaacaatcccttatttgcaaatatctttattttatatacaatcacctctttgcattcataggggattggttctagaactccctgaggatacacaaatccgtggatactcaagtccattatataaatggtgtagtgt

SEQ ID NO: 341464 - DNA, 584 bp, Homo sapiens
taggcaacacccataggcatgggcaaacatttcatgacaaaaatgtcaaaagcaattgcaaccaaagccaaaattgacaaatggaatctaattaaattaaaaaactgctgaacagaaacacacacacacacacacacacacacacaaacctaccaccaaartgaacagacaacctacagaatgggagaatatttttgcaatctatccatgtggcaaaggtctaatatccataatctacaaggaacttaaacaaatttacaagaattaaacaaataaccccattgaaaagtgggcaaaggacagacacttctcaaaagaagacatttatatggcaaagaaacacagggaaaaaacctgaacattactaatcattagagcaatgcaaatttccttgtctttaaagaaatttctgttgggctgtcatccattgctgcaaaagaaatatatatttaggaatcactgcttgattttcagctccctcaaattattgttacagttaattaggttttcccagtctttttgcttatttcacaaacaaaataaaccctataattttttaaaggcatatgtcttactcttcactg

SEQ ID NO: 341465 - DNA, 517 bp, Homo sapiens
tgtttcttaaacctctttaaaattactttttggkaacatagatttttgttgtctaacatccatccacattctgcttttcattttcccagctctattagttcctggtaaattttgtgcagatcacatcatgcagttctcttgggtgcacaagaatcaaataaagaggctcagccacccatgtctattcctctgccttttgcaaaagacaatctttcctaattagcaggtgtctggttggtttaattcccctgtcactgccaagttctgtaccttggctaccaagaaactgtttcttgaagagattactttctttgactattactgtaaaatacataattactagctttctttaatctgattaattttctccattgatgtctaattgtttatgtttctctactttttggcctgagaacacatatatagtaaatttgttttaaatcgatgtgttcctgaatatatactttgtaagagtaactgggcaatacatatatttttaaatatgtgtttcccctgc

SEQ ID NO: 341466 - DNA, 563 bp, Homo sapiens
accaatatatgttcctgaagaattaggagagtaaataaggatggtcaggcagccagctttcccggtttgaactcttcatttccttcatggtgtgtatgcaaagttgagaattgtcagacctgacttgtaattccctgtggctgaggcactgttgctagggacaggacaacctggaccaagagccaaattgagtgtatggcataaactcacaggggtctttagcatgaacaggaggtgacaggaacctgaaccacccaaagtcagtgtctttgctctgactgagctgagaaagtggagatggcaggctgaccaagcacgggcatttgaagagcttgccagcagagtctcaatggtttctgacaatgtcaagcatggcccagtttctgacaacgttaagcacggccccagccctgtgctcccaaaacacaggaacagtcaagaatctcccaagcatttggggttctccgacatggctgactgcaaagaaccagcgtttgmcacatgactttgataagactcatgaacggcccctgttttacctaagacaagtccagacaggcctc

SEQ ID NO: 341467 - DNA, 601 bp, Homo sapiens
tgttacttaacttgaggcaattgaaagtttgcaaaaacaaaaacrttttcctctcatgtcccatgctcactgaggggatatagaaaaccgtaaagctcaaatggcacagctcaagctctgatcttttctgaagatgatcttttctctacctattaatctttcttggaaatattcacctagagaggaaaaatgctttttcttccatcacaaaagaggcaagcctttgaaaaccagtctttgttcttcacaatgtgaacttgtataatgtacaaagaagtctctcagaagcccataaacaaaagaacaccttgctgtacacaagttatctgtttaactaagagccctttcttctcctctgtcctgatttaaagtatttcaatgtgccacaaaactaagatctaatcattgcaacacttggcaaaggattcccactgagattttagaaaaaagcaacatacaattttatgttaagatgggctccaaaagcacattggaaattggttagagattgtttacttttctcattaaaaatatttaagaaaattagattttcagtgaaagatatgcactgcttttagaaataatgtttataagttatttg

SEQ ID NO: 341468 - DNA, 516 bp, Homo sapiens
ccctttcttctcctctgtcctgatttaaagtatttcaatgtgccacaaaactaagatctaatcattgcaacacttggcaaaggattcccactgagattttagaaaaaagcaacatacaattttatgttaagatgggctccaaaagcacattggaaattggttagagattgtttacttttytcattaaaaatatttaagaaaattagattttcagtgaaagatatgcactgcttttagaaataatgtttataagttatttgccaacataaatattttcaaatgaagttgtggaatgtacatgttaatccatatagttgacttgtactattatacctgaaccagaagcactgatcaaaaacaattgtttatatcaaaagtatactttttttgttttcttttcaactgtgggaagaaattttgacttgtggaacagatagacttttgctatcatcctaagttgaaagttctagcctgccaaaaatgtaaagcattttgccctatgtgaactttacccat

SEQ ID NO: 341469 - DNA, 540 bp, Homo sapiens
gaatgtttaaaaattatgagtacaggaagtcattttggccagatgcagaggctcatgcctgtaatcttaacattctgggaagctgacccaggagggttgcttgaggccaggagtttgagatcagcctgggcaacatagtgagatcccatcttcataaatacataaaagataaaataaattagctgggcgtgttggtacstacctgtagacctagctactcgggaggctgagatggaaggatctcttgagcccaggaggttgaggctgtggaaagctgtgctcaggccagtgcactccaacctaggttatcgagcaagaccttgtctaaaataaatataaacaaatataaagaagataaaagtaatttgaagtgaataacccaagaaaaaattacgcaacatttatcaaaatgagatatctcattaagctctcatctaagaaactgaaataattaaaattgcttttgatattcatataaaaatgaacttgtactcacacataatgaaaataatactaaaaataaatatgtcacaaaggaga

SEQ ID NO: 341470 - DNA, 540 bp, Homo sapiens
gaatgtttaaaaattatgagtacaggaagtcattttggccagatgcagaggctcatgcctgtaatcttaacattctgggaagctgacccaggagggttgcttgaggccaggagtttgagatcagcctgggcaacatagtgagatcccatcttcataaatacataaaagataaaataaattagctgggcgtgttggtacgtacctgtagacctagctactcgggaggctgagatggaaggatctcttgagcccaggaggttgaggctgtggaaagctgtgctcaggccagtgcactccaacctaggttatcgagcaagaccttgtctaaaataaatataaacaaatataaagaasataaaagtaatttgaagtgaataacccaagaaaaaattacgcaacatttatcaaaatgagatatctcattaagctctcatctaagaaactgaaataattaaaattgcttttgatattcatataaaaatgaacttgtactcacacataatgaaaataatactaaaaataaatatgtcacaaaggaga

SEQ ID NO: 341471 - DNA, 554 bp, Homo sapiens
ggacactaacgtgtattttaccagtgctcgctacacagccattgctgatttcactactgatcggggaaaacttactgttcaaggcattcattcatcatgcagtgagaactgatagatcattaaacttatgccacttttctaggttttagagatagatacaaaatgtaacagatgaaaagtctagcccttttagagtatatattttagtaatgtatattactaagaagagaaaagtttcttgaragcaggaaattatatgaatcatattcttaaactgaagaatgttataaatctgtattttttgctttaagtaatataaaaactaaatttatatctgagactacaaatcttgaaacataaattagcaattgttccagagaaatgggtggataagtgaggagaataagctcaattattgctaaataaaaacaaaggcttgaaatattctcagaatgtttttcttccagatattaaaatacaaatattaatctaattatctaacagaacacatcttcctccaaaattatacctattctggtcctagtgattgttaa

SEQ ID NO: 341472 - DNA, 610 bp, Homo sapiens
caaatttgcatctctgagtcttctctttgctatagatagatagggaaagttaaattacagtccaatacttttatcattttgattaaaatgtaagaatagaaaatagtggagggtttttagttgagaattaaagattgaatatgcaagataaataagggaaaatcaataacatagtttgctttagcaaaaatatgtgawtttcaaagtacaggtaagggggaattaaccttagaagagatgagcgtgcaaatgcgtgtctatatattttagtactaaaatgtatttgtgatctaatcttatgacttttattttctttgaaaggtagatggcaaaaacatctgttggagtgagagaaaggtgtagtaatcaaaatctgaggagaggagagaggatcaaatatttttttgaagagtgaggtagatgggcagtagcaaaggcttgtgagtgatgataatgcatttttaggaggctgatatgacctcatgtgtgaaattatcttgtattggtgagctgctggggtaagggcatgctgtgttattatagttcaggtcatccaaggttgctgttttgcttggtaggataaataggaataacagaagaacaagagagt

SEQ ID NO: 341473 - DNA, 610 bp, Homo sapiens
caaatttgcatctctgagtcttctctttgctatagatagatagggaaagttaaattacagtccaatacttttatcattttgattaaaatgtaagaatagaaaatagtggagggtttttagttgagaattaaagattgaatatgcaagataaataagggaaaatcaataacatagtttgctttagcaaaaatatgtgaatttcaaagtacaggtaagggggaattaaccttagaagagatgagcgtgcaaatgcgtgtctatatattttagtactaaaaygtatttgtgatctaatcttatgacttttattttctttgaaaggtagatggcaaaaacatctgttggagtgagagaaaggtgtagtaatcaaaatctgaggagaggagagaggatcaaatatttttttgaagagtgaggtagatgggcagtagcaaaggcttgtgagtgatgataatgcatttttaggaggctgatatgacctcatgtgtgaaattatcttgtattggtgagctgctggggtaagggcatgctgtgttattatagttcaggtcatccaaggttgctgttttgcttggtaggataaataggaataacagaagaacaagagagt

SEQ ID NO: 341474 - DNA, 610 bp, Homo sapiens
caaatttgcatctctgagtcttctctttgctatagatagatagggaaagttaaattacagtccaatacttttatcattttgattaaaatgtaagaatagaaaatagtggagggtttttagttgagaattaaagattgaatatgcaagataaataagggaaaatcaataacatagtttgctttagcaaaaatatgtgaatttcaaagtacaggtaagggggaattaaccttagaagagatgagcgtgcaaatgcgtgtctatatattttagtactaaaatgtatttgtgatctaatcttatgacttttattttctttgaaaggtagatggcaaaracatctgttggagtgagagaaaggtgtagtaatcaaaatctgaggagaggagagaggatcaaatatttttttgaagagtgaggtagatgggcagtagcaaaggcttgtgagtgatgataatgcatttttaggaggctgatatgacctcatgtgtgaaattatcttgtattggtgagctgctggggtaagggcatgctgtgttattatagttcaggtcatccaaggttgctgttttgcttggtaggataaataggaataacagaagaacaagagagt

SEQ ID NO: 341475 - DNA, 348 bp, Homo sapiens
ttctgtgctagatgcttcctgcccctgaacaacaaactctaagttcttcagcttttggactattggacttacaccagtggtttgccagggcctctgaggtttttggccaagactgaagactgcactgttggcttccctacttttgaggttttgggacgcggactgatccaccactggcttccttgctcctcaacttgcagaggacctatcgtgggacctcaccttgtgatsgtgtcagtcaattctccttaataaactccctttcagatatacatataacctattagttctgtccttctagagaaccctgactgatacaccactcaatagacaagcagaacatagcaa

SEQ ID NO: 341476 - DNA, 602 bp, Homo sapiens
acttgtacatttaatggcagcattaaatgcttctgtatgccacttaatgaaactacacttcaatatgaatgtaaaattaagggtagagaccycacaacatcctctgctgcaagtcatgtacaatatccaaaaattaattccatgaataattattaaaagtttactttgatttccatttctctaataagcagtaatgatgagctttttttcatatgtttattggccgctgttgcttaggttttcttctatggtttttatgatttggagttttacatttaagtctttactccatcttgagttaatttttgtataaggtgtgaggaaggggtccagtcttagttttctgcatatgactagccagttttcccagcgccatttattaaatagggaatcatttccccattgtttattcttgtcaggcttgttgaagatcagatggttgtagatgtgtggtggtatttctgaggtctctgttctgttccatttatctacatgtctgttttggtaccagtaccatgctgttttggttactgtagcatttttttaacagtgaattccagaaaaggagttaggtttattattgtaggttagtagtcttaatt

SEQ ID NO: 341477 - DNA, 612 bp, Homo sapiens
ggccgctgttgcttaggttttcttctatggtttttatgatttggagttttacatttaagtctttactccatcttgagttaatttttgtataaggtgtgaggaaggggtccagtcttagttttctgcatatgrctagccagttttcccagcgccatttattaaatagggaatcatttccccattgtttattcttgtcaggcttgttgaagatcagatggttgtagatgtgtggtggtatttctgaggtctctgttctgttccatttatctacatgtctgttttggtaccagtaccatgctgttttggttactgtagcatttttttaacagtgaattccagaaaaggagttaggtttattattgtaggttagtagtcttaattggatagcctctgtattttttgataagttcttattttaagtgacgatgtaacaggatctgggatgtaatgtgaggtccttgtcaaaatagaaagcatgtatcatagatttctaaatagtcatgcagagcagctaagatatgcaagaaacttgcccagcaacaactatgtaatttttgctaaccatatggtattctttctccaattgcccttcatattttgtattccaaatga

SEQ ID NO: 341478 - DNA, 612 bp, Homo sapiens
ggccgctgttgcttaggttttcttctatggtttttatgatttggagttttacatttaagtctttactccatcttgagttaatttttgtataaggtgtgaggaaggggtccagtcttagttttctgcatatgactagccagttttcccagcgccatttattaaatagggaatcatttccccattgtttattcttgtcaggcttgttgaagatcagatggttgtagatgtgtggtggtatttctgaggtctctgttctgttccatttatctacatgtctgttttggtaccagtaccatgctgttttggttactgtagcatttttttaacagtgaattccagaaaaggagttaggttkattattgtaggttagtagtcttaattggatagcctctgtattttttgataagttcttattttaagtgacgatgtaacaggatctgggatgtaatgtgaggtccttgtcaaaatagaaagcatgtatcatagatttctaaatagtcatgcagagcagctaagatatgcaagaaacttgcccagcaacaactatgtaatttttgctaaccatatggtattctttctccaattgcccttcatattttgtattccaaatga

SEQ ID NO: 341479 - DNA, 612 bp, Homo sapiens
ggccgctgttgcttaggttttcttctatggtttttatgatttggagttttacatttaagtctttactccatcttgagttaatttttgtataaggtgtgaggaaggggtccagtcttagttttctgcatatgactagccagttttcccagcgccatttattaaatagggaatcatttccccattgtttattcttgtcaggcttgttgaagatcagatggttgtagatgtgtggtggtatttctgaggtctctgttctgttccatttatctacatgtctgttttggtaccagtaccatgctgttttggttactgtagcatttttttaacagtgaattccagaaaaggagttaggtttattattgtaggttagtagtcttaattggatarcctctgtattttttgataagttcttattttaagtgacgatgtaacaggatctgggatgtaatgtgaggtccttgtcaaaatagaaagcatgtatcatagatttctaaatagtcatgcagagcagctaagatatgcaagaaacttgcccagcaacaactatgtaatttttgctaaccatatggtattctttctccaattgcccttcatattttgtattccaaatga

SEQ ID NO: 341480 - DNA, 574 bp, Homo sapiens
gaaaaggagttaggtttattattgtaggttagtagtcttaattggatagcctctgtattttttgataagttcttattttaagtgacgatgtaacaggatctgggatgtaatgtgaggtccttgtcaaaatagaaagcatgtatcatagatttctaaatagtcatgcagagcagctaagatatgcaagaaacttgcccagcaacaactatgtaatttttgctwaccatatggtattctttctccaattgcccttcatattttgtattccaaatgattagctaatagtttataattgtttatgttaagtattcatttcttggtctaaaaatcttagtaacttagaatttgataatgttacccaggggagaacaaaaaagaaatatatattaattttctctttgctttatgtctgttttaaataatttttgaatgaaaaatctgcccttgatgattagttgctttgtgttaagagtgctttaatggtcttttattaagctttattaaaaaatggtcttttggactctttaataaattttttttctgatttcctaatgaggtcttcccatgtagccaa

SEQ ID NO: 341481 - DNA, 574 bp, Homo sapiens
gaaaaggagttaggtttattattgtaggttagtagtcttaattggatagcctctgtattttttgataagttcttattttaagtgacgatgtaacaggatctgggatgtaatgtgaggtccttgtcaaaatagaaagcatgtatcatagatttctaaatagtcatgcagagcagctaagatatgcaagaaacttgcccagcaacaactatgtaatttttgctaaccatatggtattctttctccaattgcccttcatattttgtattccaaatgattagctaayagtttataattgtttatgttaagtattcatttcttggtctaaaaatcttagtaacttagaatttgataatgttacccaggggagaacaaaaaagaaatatatattaattttctctttgctttatgtctgttttaaataatttttgaatgaaaaatctgcccttgatgattagttgctttgtgttaagagtgctttaatggtcttttattaagctttattaaaaaatggtcttttggactctttaataaattttttttctgatttcctaatgaggtcttcccatgtagccaa

SEQ ID NO: 341482 - DNA, 574 bp, Homo sapiens
gaaaaggagttaggtttattattgtaggttagtagtcttaattggatagcctctgtattttttgataagttcttattttaagtgacgatgtaacaggatctgggatgtaatgtgaggtccttgtcaaaatagaaagcatgtatcatagatttctaaatagtcatgcagagcagctaagatatgcaagaaacttgcccagcaacaactatgtaatttttgctaaccatatggtattctttctccaattgcccttcatattttgtattccaaatgattagctaatagtttataattgtttatgttaagtattcatttcttggtctaaaaatcttagtaacttagaatttgataatgttacccaggggagaacaaaaaagaaatatatattaattttctctttgctttatgtctgttttaaataatttttgaatgaaaaatctgcccttgatgattagttgctttgtgttaagagtgctttaatggtcttttattaagctttattaaaaaatggtcttttggactcyttaataaattttttttctgatttcctaatgaggtcttcccatgtagccaa

SEQ ID NO: 341483 - DNA, 561 bp, Homo sapiens
cctagattttgaaattattatgatcagattacagaaaaatgagatgttaaaaatgggcaataagaaagattataaaaattatgtgtggacttttaacagttaaatacagagcrtattagaagtagtttaagagagaatcagtaagatgtaagctgaagtatatagaaactatacttatggcaaaaaggagatattataaagaggaatataaaatattaatagatttagagaacgaaataaaattgaaaacacctttaattagagtctcacaggaaaagaagagatggagtaaagaataggcaaattctcaaagaaagtgcttgctaattttctggaactagtgaaaaacataattctacatattgcgaaatcacaatatatataaagagaaatgaataagaataaatctacattcactccattaattgtatattatagtgtagcaaagattaaaaagacattaaaaacaactagggagctattccgtgctctaggatgcttggggatatagatcaaatcaagagacattttccaaatatacacagtagcatcaccagtagt

SEQ ID NO: 341484 - DNA, 622 bp, Homo sapiens
ccacaaggagatatttttttttttttttttttttttttgagacggaatctcgctctgtcgcccaggtcrgactgcggactgcagtggcgcaatctcggctcactgcaagctccgcttcccgggttcacgccattctcctgcctcagcctcccgagtagctgggactacaggcgcccgccaccgcgcccggctaattttttgtatttttagtagagacggggtttcaccttgttagccaggatggtctcgatctcctgacctcatgatccacccgcctcggcctcccaaagtgctgggattacaggcgtgagccaccgcgcccggcccacaaggagatattatctcaccccagttaaaaatgaatattgtcaaatacacagaaaataacagatgccaatagggatgcgggaaaaagagggagaaaggaatactcattgactgttgttgggaatgcaaattagtacagcaactatgaaaaacagtaacaagattcttcaaaaaactaaaaatagaatcgccatacgatccagtaatttcactgctggatacatattcaaaacaaaagaaattagtatattgaagagatatctgcattctcatgtttactgcagcattattcaca

SEQ ID NO: 341485 - DNA, 318 bp, Homo sapiens
tttcaatattacttaaagatgttcatttagtggcaaatatttttttttttgcctagaggcagatattttgccacatggctatttatgaaactgtatttaaatgcatgtacacatataaaagctgccactgtggctgtaaactattacaagttatcaagattaaaaaataaacaaaaaatatttcagtttttctatgaaatgtctttactcgagtccaaatttagaggyttaaaatgcttcaaattaataaaaccaagtgtttcacatatttcagttggaatggcatttgtcctagttttattagtgaagcagcagact

SEQ ID NO: 341486 - DNA, 318 bp, Homo sapiens
tttcaatattacttaaagatgttcatttagtggcaaatatttttttttttgcctagaggcagatattttgccacatggctatttatgaaactgtatttaaatgcatgtacacatataaaagctgccactgtggctgtaaactattacaagttatcaagattaaaaaataaacaaaaaatatttcagtttttctatgaaatgtctttactcgagtccaaatttagaggtttaaaatgcttcaaattaataaaaccaagtgtttcacatatttcagttggaatggcrtttgtcctagttttattagtgaagcagcagact

SEQ ID NO: 341487 - DNA, 500 bp, Homo sapiens
cttcttcctgctggaaaacttggctaaataactcatattaatattttagcctcatttggctttaagattatctcataaggatatcctatataaatggtrgttaatatttctgagcaccaacttcccttactccagctttcagacttcttcccattgttatgacaattgaaggctttttaaattcctgttttaggagaagtggcccaaaatttgccacagatctatgatgttttaattaatactgacctctgaatgatctagaaaataatggtaaaccatgtatacatatttgtgtgtgcacatgtgtgcatgtatccatagcatctgtgtgtgtgtacattttatagattgtctttgtatgaagaaatatactgaatatccaaataagcataatttctatacaagtgaggtatgtgggttaaaatctagtgaacaaaatataactatacattcatgatttggaaactttttaacatgattcttgaggaattactcaattg

SEQ ID NO: 341488 - DNA, 588 bp, Homo sapiens
tgttatgacaattgaaggctttttaaattcctgttttaggagaagtggcccaaaatttgccacagatctatgatgttttaattaatactgacctctgaatgatctagaaaataatggtaaaccatgtatacatatttgtgtgtgcacatgtgtgcatgtatccatagcatctgtgtgtgtgtacattttatagattgtctttgtatgaagaaatatactgaatatccaaataagcataatttctatacaagtgaggtatgtgggttaaaatctagtgaacaaaatataactatacattcatgatttggaaacyttttaacatgattcttgaggaattactcaattgttaattgtttctgccttctctaccaaaatgactaatatttggactgaaaagaaaaaaagagaacctcggtaaggaaaagtggaatttctgtaggtggtaactctggaatatcccaccaagagaatgaatcagattaaaataatgactgtagaaatttccttgttagtgaatattcagcctggctttaaggaaaatgtagctctctcttactgctttgtatcttatttcttttactatgtcaa

SEQ ID NO: 341489 - DNA, 557 bp, Homo sapiens
ctgtgtgtgtgtacattttatagattgtctttgtatgaagaaatatactgaatatccaaataagcataatttctatacaagtgaggtatgtgggttaaaatctagtgaacaaaatataactatacattcatgatttggaaactttttaacatgattcttgaggaattactcaattgttaattgtttctgccttctctaccaaaatgactaatatttggactgaaaagaaaaaaagagaacctcggtaaggaaaagtggaatttctgtaggtggtaactctggaatatcccaccaagagaatgaatcagattaaaataatgactgtagaaatttccttgttagtgratattcagcctggctttaaggaaaatgtagctctctcttactgctttgtatcttatttcttttactatgtcaattctcaccttagtagaaatactactagttctagtaccatggctatcatagatgcaccattatattccatttagtttcttcctcaggttccctaacaattgtttgaaactgaatatatatgtttatgtgtgtgtgtgttc

SEQ ID NO: 341490 - DNA, 588 bp, Homo sapiens
gccttaggcatatctcctaatgctatccctccccgctctccccaccccacaacagyccccagagtgtgatgttccccttcctgtgtccgtgtgttctcattgttcaattcctacctatgagtgagaacatgcggtgtttggttttttgtccttgcgatagttgactgagaatgatgaattaaaataaaaatgcatgcactttcaaatgtacttagtgcaacatattgaacttacattccagttttcctggaattacttgtgtcttgagctaaaggctgtatttggtataacagggaaggaaagaaattatttttcctataaaattagtttaaaaacacatataattaaacaaaataaaaatattatcccatcttttaaagaacatttactaagtcacagatattacccgaagtttagaaaatcacctaagaacaattgtttaaaaattatttagggaaaatgaagcaaaattgtttttacaatctgagattttaacagccagtgcactcctgttcttcagctgaacgtccccttcattctgaatgtctgcagtagaattgaattggggagcagttaggttccaggaac

SEQ ID NO: 341491 - DNA, 588 bp, Homo sapiens
gccttaggcatatctcctaatgctatccctccccgctctccccaccccacaacagtccccagagtgtgatgttccccttcctgtgtccrtgtgttctcattgttcaattcctacctatgagtgagaacatgcggtgtttggttttttgtccttgcgatagttgactgagaatgatgaattaaaataaaaatgcatgcactttcaaatgtacttagtgcaacatattgaacttacattccagttttcctggaattacttgtgtcttgagctaaaggctgtatttggtataacagggaaggaaagaaattatttttcctataaaattagtttaaaaacacatataattaaacaaaataaaaatattatcccatcttttaaagaacatttactaagtcacagatattacccgaagtttagaaaatcacctaagaacaattgtttaaaaattatttagggaaaatgaagcaaaattgtttttacaatctgagattttaacagccagtgcactcctgttcttcagctgaacgtccccttcattctgaatgtctgcagtagaattgaattggggagcagttaggttccaggaac

SEQ ID NO: 341492 - DNA, 588 bp, Homo sapiens
gccttaggcatatctcctaatgctatccctccccgctctccccaccccacaacagtccccagagtgtgatgttccccttcctgtgtccgtgtgttctcattgttcaattcctacctatgagtgagaacatgcggtgtttggttttttgtccttgcgatagttgactgagaatgatgaattaaaataaaaatgcatgcactttcaaatgtacttagtgcaacatattgaacttacattccagttttcctggaattacttgtgtcttgagctaaaggctgtatttggtataacagggaaggaaagaaattatttttcctataaaattagtttaaaaacacatataattaaacaaaataaaaatattatcccatcttttaaagaacatttactaagtcmcagatattacccgaagtttagaaaatcacctaagaacaattgtttaaaaattatttagggaaaatgaagcaaaattgtttttacaatctgagattttaacagccagtgcactcctgttcttcagctgaacgtccccttcattctgaatgtctgcagtagaattgaattggggagcagttaggttccaggaac

SEQ ID NO: 341493 - DNA, 588 bp, Homo sapiens
gccttaggcatatctcctaatgctatccctccccgctctccccaccccacaacagtccccagagtgtgatgttccccttcctgtgtccgtgtgttctcattgttcaattcctacctatgagtgagaacatgcggtgtttggttttttgtccttgcgatagttgactgagaatgatgaattaaaataaaaatgcatgcactttcaaatgtacttagtgcaacatattgaacttacattccagttttcctggaattacttgtgtcttgagctaaaggctgtatttggtataacagggaaggaaagaaattatttttcctataaaattagtttaaaaacacatataattaaacaaaataaaaatattatcccatcttttaaagaacatttactaagtcacagatattacccgaagtttagaaaatcacctaagaacaattgtttaaaaattatttagggaaaatgaagcaaaattgtttttacaatctgagattttaacagccagtgcactcctgttcttcagctgaaygtccccttcattctgaatgtctgcagtagaattgaattggggagcagttaggttccaggaac

SEQ ID NO: 341494 - DNA, 475 bp, Homo sapiens
aacaagtgggtttctctaaagcacagtttggctttttactagaatatcaagtcacttttttgggtgaggagagcacaatgggagtgggcagctggtgcaaataaacatttaaaattacttaaaacttcaacaaatgggatctgtatttaaatstgttttggtctgtcttccctttgttttttctaatccattccaacaatgcaaacctcagccactgtcaagggcaatctcagactggaggttgctgcctagggtgagattctagcaagactgacaagcagagctcagagaaaagtctgcatgggaaaacagaaccagacttagaaggcattgctgatgaattccattttcttactacagaagagctagcaaaaactgcaatatgatttgtaaagtcagtgtaatcttatggacattataccaagtcacaacatgaggcatgagatacctcagatgttgttccctctaaatctca

SEQ ID NO: 341495 - DNA, 475 bp, Homo sapiens
aacaagtgggtttctctaaagcacagtttggctttttactagaatatcaagtcacttttttgggtgaggagagcacaatgggagtgggcagctggtgcaaataaacatttaaaattacttaaaacttcaacaaatgggatctgtatttaaatctgttttggtctgtcttccctttgttttttctaatccattccaacaatgcaaacctcagccactgtcaagggcaatctcagactggaggttgctgcctagggtgagrttctagcaagactgacaagcagagctcagagaaaagtctgcatgggaaaacagaaccagacttagaaggcattgctgatgaattccattttcttactacagaagagctagcaaaaactgcaatatgatttgtaaagtcagtgtaatcttatggacattataccaagtcacaacatgaggcatgagatacctcagatgttgttccctctaaatctca

SEQ ID NO: 341496 - DNA, 573 bp, Homo sapiens
gtgggattttaaaaattaattaattaattaatttatttatttatttattttgagatggagtctcactctgtcacccaggctggagtgcagtggcacaatctcagctcactgcaagctctgcctcccaggacatgccattctcctgtctcagcctcccaagtagttgggactgcaggtgagtgccrccatgcctggctaattttttgtatttttagtagagacgggttttcactgtcttagccatgatggtctcaatctcctgacctcgtgatctgcccacctcagcctcccaaagtgctgggattacaggcgtgagccaccatgcccaggctgtagcgggattttttaaggaatcagagagactgatggggttgaggaggatatttattatttaggtgcaccggcccagtcagattaacatccaaaggactgagtcctgaacaaagacttaagttaacttttaagcattttgtggggtggtggagagtggggagatctgtgcagggggaagcatattacagaagtgagaaacaaagacagttattcaattaattgagacatgcattatatcat

SEQ ID NO: 341497 - DNA, 541 bp, Homo sapiens
cactagccacagaaaaacaggcagttaatttttaaagggctccagctctttctctttctcagggggaaytgggttttctcacatacaactgagtttctgcttacacattctttaatttcttttaattcctgttccacttggaccagggccagggcatcactgtcctgtaccacccccaggaggtgttccttgcatcctggcccttctagctccagccttggttcaaagggctgcagatagagctcaggtcatggcttcagagggtgcaaactataagccttggtgccatgtggtgttaagcctgcaggtgagcaaagtgcaagagtgaaggaggcttggcattccctgcctaaatttcagaggatgtatgagaaaggctggatgcccagggagaagactatgcacgactggagctctcaaagaggacctcttctaggacagtgccaagtggaaatgtggggttggaggcccactcggggtcctgactaggggggctgcctagtggagctgtgggaggggggctgctgccctccagatccca

SEQ ID NO: 341498 - DNA, 597 bp, Homo sapiens
acagcatcttcacaatgcctgggaaaggaggagagatgaagctcactagccacagaaaaacaggcagttaatttttaaagggctccagctctttctctttctcagggggaattgggttttctcacatacaactgagtttctgcttacacattctttaatttcttttaattcctgttccacttggaccagggccagggcatcactgtcctgtaccacccccaggaggtgttccttgcatcctggcccttctagctccagccttggttcaaagggctgcagatagagctcaggtcatggcttcagwgggtgcaaactataagccttggtgccatgtggtgttaagcctgcaggtgagcaaagtgcaagagtgaaggaggcttggcattccctgcctaaatttcagaggatgtatgagaaaggctggatgcccagggagaagactatgcacgactggagctctcaaagaggacctcttctaggacagtgccaagtggaaatgtggggttggaggcccactcggggtcctgactaggggggctgcctagtggagctgtgggaggggggctgctgccctccagatcccagaatgatagagcc

SEQ ID NO: 341499 - DNA, 597 bp, Homo sapiens
acagcatcttcacaatgcctgggaaaggaggagagatgaagctcactagccacagaaaaacaggcagttaatttttaaagggctccagctctttctctttctcagggggaattgggttttctcacatacaactgagtttctgcttacacattctttaatttcttttaattcctgttccacttggaccagggccagggcatcactgtcctgtaccacccccaggaggtgttccttgcatcctggcccttctagctccagccttggttcaaagggctgcagatagagctcaggtcatggcttcagagggtgcaaactataagccttggtgccatgtggtgttaagcctgcaggtragcaaagtgcaagagtgaaggaggcttggcattccctgcctaaatttcagaggatgtatgagaaaggctggatgcccagggagaagactatgcacgactggagctctcaaagaggacctcttctaggacagtgccaagtggaaatgtggggttggaggcccactcggggtcctgactaggggggctgcctagtggagctgtgggaggggggctgctgccctccagatcccagaatgatagagcc

SEQ ID NO: 341500 - DNA, 597 bp, Homo sapiens
acagcatcttcacaatgcctgggaaaggaggagagatgaagctcactagccacagaaaaacaggcagttaatttttaaagggctccagctctttctctttctcagggggaattgggttttctcacatacaactgagtttctgcttacacattctttaatttcttttaattcctgttccacttggaccagggccagggcatcactgtcctgtaccacccccaggaggtgttccttgcatcctggcccttctagctccagccttggttcaaagggctgcagatagagctcaggtcatggcttcagagggtgcaaactataagccttggtgccatgtggtgttaagcctgcaggtgagcaaagtgcaagagtgaaggaggcttggcattcyctgcctaaatttcagaggatgtatgagaaaggctggatgcccagggagaagactatgcacgactggagctctcaaagaggacctcttctaggacagtgccaagtggaaatgtggggttggaggcccactcggggtcctgactaggggggctgcctagtggagctgtgggaggggggctgctgccctccagatcccagaatgatagagcc

SEQ ID NO: 341501 - DNA, 541 bp, Homo sapiens
cactagccacagaaaaacaggcagttaatttttaaagggctccagctctttctctttctcagggggaattgggttttctcacatacaactgagtttctgcttacacattctttaatttcttttaattcctgttccacttggaccagggccagggcatcactgtcctgtaccacccccaggaggtgttccttgcatcctggcccttctagctccagccttggttcaaagggctgcagatagagctcaggtcatggcttcagagggtgcaaactataagccttggtgccatgtggtgttaagcctgcaggtgagcaaagtgcaagagtgaaggaggcttggcattccctgcctaaatttcagaggatgtatgagaaaggctggatgcccagggagaagactatgcacsactggagctctcaaagaggacctcttctaggacagtgccaagtggaaatgtggggttggaggcccactcggggtcctgactaggggggctgcctagtggagctgtgggaggggggctgctgccctccagatccca

SEQ ID NO: 341502 - DNA, 597 bp, Homo sapiens
acagcatcttcacaatgcctgggaaaggaggagagatgaagctcactagccacagaaaaacaggcagttaatttttaaagggctccagctctttctctttctcagggggaattgggttttctcacatacaactgagtttctgcttacacattctttaatttcttttaattcctgttccacttggaccagggccagggcatcactgtcctgtaccacccccaggaggtgttccttgcatcctggcccttctagctccagccttggttcaaagggctgcagatagagctcaggtcatggcttcagagggtgcaaactataagccttggtgccatgtggtgttaagcctgcaggtgagcaaagtgcaagagtgaaggaggcttggcattccctgcctaaatttcagaggatgtatgagaaaggctggatgcccagggagaagactatgcacgrctggagctctcaaagaggacctcttctaggacagtgccaagtggaaatgtggggttggaggcccactcggggtcctgactaggggggctgcctagtggagctgtgggaggggggctgctgccctccagatcccagaatgatagagcc

SEQ ID NO: 341503 - DNA, 548 bp, Homo sapiens
cctgcttgctcctgctctggccatgtgacataccttcttttgcttcaycttctgccatgtgtaaaagctccctgaggacccttcttgaagccaagcaactgccaatgcaaagcttcctgtacagcctgcagaactgtgagccaagtcaatcttttttttcagtataaattatgtagtgcttaggtattcctttatagtaatgcaagaatgccataatacaaggcataatggtttgcattttaaaaatgaaaattaaatttttgtaatttatcatgaaaagatgaaatgagttaataatgagcaatatctacatgttgtcttagaggtgctgacaatctgtcaaggaattacatgcattgatcaagcagtttaccttcaagttgaataacaagatattcctatctaacataacaaaattttgacattatttgggagactggaaataatgctaaataatatcagattgtcaaagtcaaataaatatagagacaaacatctgaaattaaaatgttttatttgagatacaagtattacagtttcacacatac

SEQ ID NO: 341504 - DNA, 342 bp, Homo sapiens
ggagactggaaataatgctaaataatatcagattgtcaaagtcaaataaatatagagacaaacatctgaaattaaaatgttttatttgagatacaagtattacartttcacacatacatgcagaatgggtgtctttagtatgtccaaaacataaagagaaagttagaggttttataaaaaagggagacagagagaaaaacggtatgtatttctctttgagaaagttcactggcaccagtaaggtttttgagagctggcaggctctgataggtgagggacagtggtgggtaaagctagtcttagtgttcaagaggttgtttcagtaaccatttgataaaactg

SEQ ID NO: 341505 - DNA, 342 bp, Homo sapiens
ggagactggaaataatgctaaataatatcagattgtcaaagtcaaataaatatagagacaaacatctgaaattaaaatgttttatttgagatacaagtattacagtttcacacatacatgcagaatgggtgtctttagtatgtccaaaacataaagagaaagttagaggttttataaaaaagggagacagagagaaaaacrgtatgtatttctctttgagaaagttcactggcaccagtaaggtttttgagagctggcaggctctgataggtgagggacagtggtgggtaaagctagtcttagtgttcaagaggttgtttcagtaaccatttgataaaactg

SEQ ID NO: 341506 - DNA, 605 bp, Homo sapiens
attttaaaaatgaaaattaaatttttgtaatttatcatgaaaagatgaaatgagttaataatgagcaatatctacatgttgtcttagaggtgctgacaatctgtcaaggaattacatgcattgatcaagcagtttaccttcaagttgaataacaagatattcctatctaacataacaaaattttgacattatttgggagactggaaataatgctaaataatatcagattgtcaaagtcaaataaatatagagacaaacatctgaaattaaaatgttttatttgagatacaagtattacagtttcacacatacatgcagaatgggtgtctttagtatgtccaaaacataaagagaaagttagaggttttataaaaaagggagacagagagaaaaacggtatgtatttctctttgagaaagttcactggcaccagtaaggtttttgagagctggcaggctctgataggtgagggacagtggtgggtaargctagtcttagtgttcaagaggttgtttcagtaaccatttgataaaactggtttcagcttaaagcaggtaatttcagcagccaggcatgcagagaattacgcttttggagtggtgttt

SEQ ID NO: 341507 - DNA, 605 bp, Homo sapiens
attttaaaaatgaaaattaaatttttgtaatttatcatgaaaagatgaaatgagttaataatgagcaatatctacatgttgtcttagaggtgctgacaatctgtcaaggaattacatgcattgatcaagcagtttaccttcaagttgaataacaagatattcctatctaacataacaaaattttgacattatttgggagactggaaataatgctaaataatatcagattgtcaaagtcaaataaatatagagacaaacatctgaaattaaaatgttttatttgagatacaagtattacagtttcacacatacatgcagaatgggtgtctttagtatgtccaaaacataaagagaaagttagaggttttataaaaaagggagacagagagaaaaacggtatgtatttctctttgagaaagttcactggcaccagtaaggtttttgagagctggcaggctctgataggtgagggacagtggtgggtaaagctagtcttagtgttcaagargttgtttcagtaaccatttgataaaactggtttcagcttaaagcaggtaatttcagcagccaggcatgcagagaattacgcttttggagtggtgttt

SEQ ID NO: 341508 - DNA, 537 bp, Homo sapiens
tgacccaattcatatgatcaatttttacatttacccctttccatcaagatctttctcttaaagcatcaaccatgtttatagttgtacaacaaccacaagttaggtttaatcatcccttagtgctaggatggacctgtcccagttgctccgtcccacatctgggaaaggtatggaggtctacatcaggtctatgtcaagatttatggcttaaaatgtctatccaaggaaaaaataaaactgaccagtaatcccaggagagaaacataccttggcaaattckaagatatttctaattttatttaacaattttaaaattaattaatgtatcaaagattcacctaactcatgtcaaataaaatatgtttgcactaattaatatatattttatatgaacattcctttatttaaaccatccttttttcctagagtgatggattaggggctttcagtgtgcctcagccacttggaagtagaaaaataagcataaagataaactttgtgagcttcaattcaagaagaaaaataggaattcacagg

SEQ ID NO: 341509 - DNA, 537 bp, Homo sapiens
tgacccaattcatatgatcaatttttacatttacccctttccatcaagatctttctcttaaagcatcaaccatgtttatagttgtacaacaaccacaagttaggtttaatcatcccttagtgctaggatggacctgtcccagttgctccgtcccacatctgggaaaggtatggaggtctacatcaggtctatgtcaagatttatggcttaaaatgtctatccaaggaaaaaataaaactgaccagtaatcccaggagagaaacataccttggcaaattctaagatatttctaattttatttaacaattttaaaattaattaatgtatcaaagattcacctaactcatgtcaaataaaatatgtttgcactaattaatatatattttatatgaacattcctttatttaaaccatccttttttcctagartgatggattaggggctttcagtgtgcctcagccacttggaagtagaaaaataagcataaagataaactttgtgagcttcaattcaagaagaaaaataggaattcacagg

SEQ ID NO: 341510 - DNA, 537 bp, Homo sapiens
tgacccaattcatatgatcaatttttacatttacccctttccatcaagatctttctcttaaagcatcaaccatgtttatagttgtacaacaaccacaagttaggtttaatcatcccttagtgctaggatggacctgtcccagttgctccgtcccacatctgggaaaggtatggaggtctacatcaggtctatgtcaagatttatggcttaaaatgtctatccaaggaaaaaataaaactgaccagtaatcccaggagagaaacataccttggcaaattctaagatatttctaattttatttaacaattttaaaattaattaatgtatcaaagattcacctaactcatgtcaaataaaatatgtttgcactaattaatatatattttatatgaacattcctttatttaaaccatccttttttcctagagtgatggattaggggctttcartgtgcctcagccacttggaagtagaaaaataagcataaagataaactttgtgagcttcaattcaagaagaaaaataggaattcacagg

SEQ ID NO: 341511 - DNA, 536 bp, Homo sapiens
gaaaagctgcaggcatttccccagacctgggactgagakaaggatgccctttttaatctgggctcatacaaagtcaatcattttttggtgcctggcaatggtggccactgcagacactttaatcttgggctaggaattggagtgctttctctggagcaggggagcagcctcaacagccagaattgagtgttgagtgtggaaagtgccccagcagtaagtgttggaattaggctctctcctcttgcaggactgtagtgggaagagagttgctaaagcagaggtttctcaaggatggtgagacttgcagccaagaacagctttgcaacctggaactggtctgtgtgtgtcattgctgggtgtctcagcctgctcccttggtcagttgagagagtactccatcagctccaagaaacaagagggaggtgaaccccatcccccaggagacctaaactttggtgaggaccagccctaagggaaggaggaatacagcttgccaaagccaccccttgggtcaaaggaaacacgatcactatatc

SEQ ID NO: 341512 - DNA, 536 bp, Homo sapiens
gaaaagctgcaggcatttccccagacctgggactgagagaaggatgccctttttaatctgggctcatacaaagtcaatcattttttggtgcctggcaatggtggccactgcagacactttaatcttgggctaggaattggagtgctttctctggagcaggggagcagcctcaacagccagaattgagtgttgagtgtggaaagtgccccagcagtaagtgttggaattaggctctctcctcttgcaggactgtagtgggaagagagttgctaaagcagaggtttctcaaggatggtgagacttgcagccaagaacagctttgcaacctggaactggtctgtgtgtgtcattgctgggtgtctcagcctgctcccttggtcagttgagaragtactccatcagctccaagaaacaagagggaggtgaaccccatcccccaggagacctaaactttggtgaggaccagccctaagggaaggaggaatacagcttgccaaagccaccccttgggtcaaaggaaacacgatcactatatc

SEQ ID NO: 341513 - DNA, 536 bp, Homo sapiens
gaaaagctgcaggcatttccccagacctgggactgagagaaggatgccctttttaatctgggctcatacaaagtcaatcattttttggtgcctggcaatggtggccactgcagacactttaatcttgggctaggaattggagtgctttctctggagcaggggagcagcctcaacagccagaattgagtgttgagtgtggaaagtgccccagcagtaagtgttggaattaggctctctcctcttgcaggactgtagtgggaagagagttgctaaagcagaggtttctcaaggatggtgagacttgcagccaagaacagctttgcaacctggaactggtctgtgtgtgtcattgctgggtgtctcagcctgctcccttggtcagttgagagagtactccatcagctccaagaaacaagagggaggtgaaccccatyccccaggagacctaaactttggtgaggaccagccctaagggaaggaggaatacagcttgccaaagccaccccttgggtcaaaggaaacacgatcactatatc

SEQ ID NO: 341514 - DNA, 430 bp, Homo sapiens
aaattaggcagcaactcttatcattcaaaatgcataagaaatttggctaagcaattgtacttctagattatttatttatttatttattattgggacagagtctcactctgtccccagactggagtgcagtgacaggatctcagctcactgcaacctctgcctcgtgggttcaggcaattgtcctacctcagcctcctgagtagctggggctacamgtgcacatcaccatacccagctaatttttgtattttttgtagaaacggggttttgccatgttggccaggctggtctcaaaacttccgacctcaggtgatccacccacctcgacctcccaaagtgctgggattacaggcactaggtccctaatttagagccacattgtttaatgtctaaaaccactcttgcatatttattactgcattgtttgaac

SEQ ID NO: 341515 - DNA, 430 bp, Homo sapiens
aaattaggcagcaactcttatcattcaaaatgcataagaaatttggctaagcaattgtacttctagattatttatttatttatttattattgggacagagtctcactctgtccccagactggagtgcagtgacaggatctcagctcactgcaacctctgcctcgtgggttcaggcaattgtcctacctcagcctcctgagtagctggggctacacgtgcrcatcaccatacccagctaatttttgtattttttgtagaaacggggttttgccatgttggccaggctggtctcaaaacttccgacctcaggtgatccacccacctcgacctcccaaagtgctgggattacaggcactaggtccctaatttagagccacattgtttaatgtctaaaaccactcttgcatatttattactgcattgtttgaac

SEQ ID NO: 341516 - DNA, 430 bp, Homo sapiens
aaattaggcagcaactcttatcattcaaaatgcataagaaatttggctaagcaattgtacttctagattatttatttatttatttattattgggacagagtctcactctgtccccagactggagtgcagtgacaggatctcagctcactgcaacctctgcctcgtgggttcaggcaattgtcctacctcagcctcctgagtagctggggctacacgtgcacatcaccatacccagctaatttttgtattttttgtagaaacggggttttgccatgttggccaggctggtctyaaaacttccgacctcaggtgatccacccacctcgacctcccaaagtgctgggattacaggcactaggtccctaatttagagccacattgtttaatgtctaaaaccactcttgcatatttattactgcattgtttgaac

SEQ ID NO: 341517 - DNA, 430 bp, Homo sapiens
aaattaggcagcaactcttatcattcaaaatgcataagaaatttggctaagcaattgtacttctagattatttatttatttatttattattgggacagagtctcactctgtccccagactggagtgcagtgacaggatctcagctcactgcaacctctgcctcgtgggttcaggcaattgtcctacctcagcctcctgagtagctggggctacacgtgcacatcaccatacccagctaatttttgtattttttgtagaaacggggttttgccatgttggccaggctggtctcaaaacttcygacctcaggtgatccacccacctcgacctcccaaagtgctgggattacaggcactaggtccctaatttagagccacattgtttaatgtctaaaaccactcttgcatatttattactgcattgtttgaac

SEQ ID NO: 341518 - DNA, 605 bp, Homo sapiens
catccattctctcccacagcatagtcattttcttccactccgttgtagaaattgtccttctagtggcaagagtgacgtgagtgatatgcggaaatttctttccaagcttgttggagaagcttcctctgcctgcttctttttggcsacctcctgccagggtaagagcagagggcctccagggctgctctgtcacccccaacagcatggacctcactgcagtcactccggaagcttccctctaaaggaagcttgtgcaggaaacatcatgcatcgagcagcatggggacaggggctggcagctgggtaggtctcacactcctgacactgagactccaggatactcctctgtccccacccagggcagatccctgccctaaaatttttccccctcatgtccagcaaatgctgcatggagccctggatttctacgtggaaagctaggaagagggagagctgaaatgaggatgtaatcaccctttccaaagaggtcagtccagtactaccctgtgctcctgggcaagctctccaggctgaggtaacaggagcaggggttatgtcaggtgaaggttgaagtgagagacctcccaggaggtgtagaatattcc

SEQ ID NO: 341519 - DNA, 538 bp, Homo sapiens
ccacaactcagttgaaaagggacctggagggacttctgcagtgagtgtccaacctcacatggtctgaaggggcacaggcaagaatcattcatatcccctatcctgggccaggctgggaaagccagtgtgccaggactggggcagcacctgtgaactgcaccaaccacaagggcaggtggtgggctactgatcaccacacagtgggtcttgtgatggcccaggggctgcctgccaggcacaagagggcggctgggtccagaccacatgtgagcagcccatggagtsatctcagccgctctccctggctggaagggtctgggaagtggggaccaagcaggaacagccacctggttgacctcctccctgtctactgtgctcctacggggttaaggcaaaggggaaattggatccttgccaggtttccaataaacaggcttcctcaggatgcaaactcatttcatgaaaagagcctggccccatcaggcacctcagcaacttgtcaaacaggtctcctgcaaggtactatcctgtgtgcaac

SEQ ID NO: 341520 - DNA, 511 bp, Homo sapiens
agctagtaatccagaaaattctcctgggtcttgttgaaggctgtcaaggtggtacttctctgagtctggaagaattacagcattattgggtataaggtgctccataaagcagatatggcttagatcacaacacccaactcttttcawatatgtgaaaagccttcccaagaaagacagctacaaataatcccagacagtgaagactacaataaatactcaccttttctctctttaaattttattttttaaacctctcatatggtgttgcatgcccaagattttaatgtccagacactgaagaacatctactagcatcaactccatccaggaaaacatgacctcaccaagtgaactaaataaggcactggggacaaatcctggagaaaaagagatatgtgatgtttcagacagagaattcaaaatagctgtatttaaaaaaaaactgaaagaaatttaagataacaaagtaaggaaattccaaattttatcagctaaactcaacaaatagatt

SEQ ID NO: 341521 - DNA, 301 bp, Homo sapiens
taaagcagatatggcttagatcacaacacccaactcttttcaaatatgtgaaaagccttcccaagaaagayagctacaaataatcccagacagtgaagactacaataaatactcaccttttctctctttaaattttattttttaaacctctcatatggtgttgcatgcccaagattttaatgtccagacactgaagaacatctactagcatcaactccatccaggaaaacatgacctcaccaagtgaactaaataaggcactggggacaaatcctggagaaaaagagatatgtgatgtttc

SEQ ID NO: 341522 - DNA, 511 bp, Homo sapiens
agctagtaatccagaaaattctcctgggtcttgttgaaggctgtcaaggtggtacttctctgagtctggaagaattacagcattattgggtataaggtgctccataaagcagatatggcttagatcacaacacccaactcttttcaaatatgtgaaaagccttcccaagaaagacagctacaaataatcccagacagtgaagactacaataaatactcaccttttctctctttaaattttattttttaaacytctcatatggtgttgcatgcccaagattttaatgtccagacactgaagaacatctactagcatcaactccatccaggaaaacatgacctcaccaagtgaactaaataaggcactggggacaaatcctggagaaaaagagatatgtgatgtttcagacagagaattcaaaatagctgtatttaaaaaaaaactgaaagaaatttaagataacaaagtaaggaaattccaaattttatcagctaaactcaacaaatagatt

SEQ ID NO: 341523 - DNA, 301 bp, Homo sapiens
taaagcagatatggcttagatcacaacacccaactcttttcaaatatgtgaaaagccttcccaagaaagacagctacaaataatcccagacagtgaagactacaataaatactcaccttttctctctttaaattttattttttaaacctctcatatggtgytgcatgcccaagattttaatgtccagacactgaagaacatctactagcatcaactccatccaggaaaacatgacctcaccaagtgaactaaataaggcactggggacaaatcctggagaaaaagagatatgtgatgtttc

SEQ ID NO: 341524 - DNA, 511 bp, Homo sapiens
agctagtaatccagaaaattctcctgggtcttgttgaaggctgtcaaggtggtacttctctgagtctggaagaattacagcattattgggtataaggtgctccataaagcagatatggcttagatcacaacacccaactcttttcaaatatgtgaaaagccttcccaagaaagacagctacaaataatcccagacagtgaagactacaataaatactcaccttttctctctttaaattttattttttaaacctctcatatggtgttgcatgcccaagattttaatgtccagacactgaagaacatctactagcrtcaactccatccaggaaaacatgacctcaccaagtgaactaaataaggcactggggacaaatcctggagaaaaagagatatgtgatgtttcagacagagaattcaaaatagctgtatttaaaaaaaaactgaaagaaatttaagataacaaagtaaggaaattccaaattttatcagctaaactcaacaaatagatt

SEQ ID NO: 341525 - DNA, 301 bp, Homo sapiens
taaagcagatatggcttagatcacaacacccaactcttttcaaatatgtgaaaagccttcccaagaaagacagctacaaataatcccagacagtgaagactacaataaatactcaccttttctctctttaaattttattttttaaacctctcatatggtgttgcatgcccaagattttaatgtccagacactgaagaacatctactagcatcaacwccatccaggaaaacatgacctcaccaagtgaactaaataaggcactggggacaaatcctggagaaaaagagatatgtgatgtttc

SEQ ID NO: 341526 - DNA, 511 bp, Homo sapiens
agctagtaatccagaaaattctcctgggtcttgttgaaggctgtcaaggtggtacttctctgagtctggaagaattacagcattattgggtataaggtgctccataaagcagatatggcttagatcacaacacccaactcttttcaaatatgtgaaaagccttcccaagaaagacagctacaaataatcccagacagtgaagactacaataaatactcaccttttctctctttaaattttattttttaaacctctcatatggtgttgcatgcccaagattttaatgtccagacactgaagaacatctactagcatcaactccatccaggaaaacatgacctcaccaagtgaactaaataaggcactggggacaaatcctggagaaaaagagatatgtgatgtttcagacagagaattcaaaatagctgtatttaaaaaaaaactgaaagaaatttaagataacaaagtaaggarattccaaattttatcagctaaactcaacaaatagatt

SEQ ID NO: 341527 - DNA, 590 bp, Homo sapiens
aagataacaaagtaaggaaattccaaattttatcagctaaactcaacaaatagattgaaatagttacagtaaattaagcagaaattctgagctgaaaaatgcaattggcatgctgaagaatgcattagagccatgtaatagcagaatggatcaagcagaagaaatagtgagcttgaagacaggctctttgaaaatacayagaagagacaaaagaaaaagaataaaaacaacaaatcatgccgacaggatctagaaaatagcctcacaaagacagatctaagagttatttgttttaaagaagatgtaaagaaagaggcaggggaggatctagaaaatagcctcacaaagacagatctaagagttattggttttaaagaagatgtagagaaagaggcaggggtagaaaaatttattcaaagggataataacagagaactttccaaacctagagaaagacagccatatccaactacaaaaatgttatagaacattaagcagatttaacccaaaaaagactacttcaaagcattcaatagtcttccaaaagtcaaagataaaagttcttaaggaagaaagagaaaagaaacaaa

SEQ ID NO: 341528 - DNA, 590 bp, Homo sapiens
aagataacaaagtaaggaaattccaaattttatcagctaaactcaacaaatagattgaaatagttacagtaaattaagcagaaattctgagctgaaaaatgcaattggcatgctgaagaatgcattagagccatgtaatagcagaatggatcaagcagaagaaatagtgagcttgaagacaggctctttgaaaatacatagaagagacaaaagaaaaagaataaaaacaacaaatcatgcygacaggatctagaaaatagcctcacaaagacagatctaagagttatttgttttaaagaagatgtaaagaaagaggcaggggaggatctagaaaatagcctcacaaagacagatctaagagttattggttttaaagaagatgtagagaaagaggcaggggtagaaaaatttattcaaagggataataacagagaactttccaaacctagagaaagacagccatatccaactacaaaaatgttatagaacattaagcagatttaacccaaaaaagactacttcaaagcattcaatagtcttccaaaagtcaaagataaaagttcttaaggaagaaagagaaaagaaacaaa

SEQ ID NO: 341529 - DNA, 590 bp, Homo sapiens
aagataacaaagtaaggaaattccaaattttatcagctaaactcaacaaatagattgaaatagttacagtaaattaagcagaaattctgagctgaaaaatgcaattggcatgctgaagaatgcattagagccatgtaatagcagaatggatcaagcagaagaaatagtgagcttgaagacaggctctttgaaaatacatagaagagacaaaagaaaaagaataaaaacaacaaatcatgccgacaggatctagaaaatagcctcacaaagacagatctaagagttatttgttttaaagaagatgtaaagaaagaggcaggggaggatctagaaaatagcctcacaaagacagatctaagagttattggttttaaagaagatgtagagaaagaggcaggggtagaaaaatttattcaaagggataataacagagaactttccaaacctagagaaagacakccatatccaactacaaaaatgttatagaacattaagcagatttaacccaaaaaagactacttcaaagcattcaatagtcttccaaaagtcaaagataaaagttcttaaggaagaaagagaaaagaaacaaa

SEQ ID NO: 341530 - DNA, 590 bp, Homo sapiens
aagataacaaagtaaggaaattccaaattttatcagctaaactcaacaaatagattgaaatagttacagtaaattaagcagaaattctgagctgaaaaatgcaattggcatgctgaagaatgcattagagccatgtaatagcagaatggatcaagcagaagaaatagtgagcttgaagacaggctctttgaaaatacatagaagagacaaaagaaaaagaataaaaacaacaaatcatgccgacaggatctagaaaatagcctcacaaagacagatctaagagttatttgttttaaagaagatgtaaagaaagaggcaggggaggatctagaaaatagcctcacaaagacagatctaagagttattggttttaaagaagatgtagagaaagaggcaggggtagaaaaatttattcaaagggataataacagagaactttccaaacctagagaaagacagccatatccaactayaaaaatgttatagaacattaagcagatttaacccaaaaaagactacttcaaagcattcaatagtcttccaaaagtcaaagataaaagttcttaaggaagaaagagaaaagaaacaaa

SEQ ID NO: 341531 - DNA, 542 bp, Homo sapiens
aaagaaacttttaccttagaatagaatrtacagtgaaaatgttcttcaaaaaaaagaagaaatactgactttttcagacaaacaaaagctgaagtattttatgaataccatacctgtcctaaaggaatgctaaagggagtacttcagtcaggaagaaaaggacattaatgagtaataaatgatcacctaaaggtaaaaaaaaatcctcactgctaataggatacaaaacaaaacagaatattataacactatagctgtgtggtgtgcaaactactcttatttaaagtaggaatactaaataatatccaatcaaaagtaatagctacaacaacatttcaagacatagcacaataaaatataaatagaaacaacaaaaagttaaaaagttaagggatgaacacgacccgtcctgagccggcagatgtggtggaagccccggagctccggagctcccggaaggactggagcgtgggcggaaaggaggccgcccctagagccggaagcctgcgcaggggacagaggcctccggcgccccccagcaa

SEQ ID NO: 341532 - DNA, 542 bp, Homo sapiens
aaagaaacttttaccttagaatagaatgtacagtgaaaatgttcttcaaaaaaaagaagaaatactgactttttcagacaaacaaaagctgaagtattttatgaataccatacctgtcctaaaggaatgctaaagggagtacttcagtcaggaagaaaaggacattaatgagtaataaatgatcacctaaaggtaaaaaaaaatcctcactgctaataggatacaaaacaaaacagaatattataacactatagctgtgtggtgtgcaaactactcttatttaaagtaggaatactaartaatatccaatcaaaagtaatagctacaacaacatttcaagacatagcacaataaaatataaatagaaacaacaaaaagttaaaaagttaagggatgaacacgacccgtcctgagccggcagatgtggtggaagccccggagctccggagctcccggaaggactggagcgtgggcggaaaggaggccgcccctagagccggaagcctgcgcaggggacagaggcctccggcgccccccagcaa

SEQ ID NO: 341533 - DNA, 542 bp, Homo sapiens
aaagaaacttttaccttagaatagaatgtacagtgaaaatgttcttcaaaaaaaagaagaaatactgactttttcagacaaacaaaagctgaagtattttatgaataccatacctgtcctaaaggaatgctaaagggagtacttcagtcaggaagaaaaggacattaatgagtaataaatgatcacctaaaggtaaaaaaaaatcctcactgctaataggatacaaaacaaaacagaatattataacactatagctgtgtggtgtgcaaactactcttatttaaagtaggaatactaaataatatccaatcaaaagtaatagctacaacaacatttcaagacatagcacaataaaatataaatagaaacaacaaaaagttaaaaagttaagggatgarcacgacccgtcctgagccggcagatgtggtggaagccccggagctccggagctcccggaaggactggagcgtgggcggaaaggaggccgcccctagagccggaagcctgcgcaggggacagaggcctccggcgccccccagcaa

SEQ ID NO: 341534 - DNA, 632 bp, Homo sapiens
aaagagaaaagaaacaaataacctactggggagctccaacacgtctggcagcagactttacagtggaaactctactggccaggacagagaagcaataaatatttaaagtactaaaggaaagaaacttttaccttagaatagaatgtacagtgaaaatgttcttcaaaaaaaagaagaaatactgactttttcagacaaacaaaagctgaagtattttatgaataccatacctgtcctaaaggaatgctaaagggagtacttcagtcaggaagaaaaggacattaatgagtaataaatgatcacctaaaggtaaaaaaaaatcctcactgctaataggatacaaaacaaaacagaatattataacactatagctgtgtggtgtgcaaactactcttatttaaagtaggaatactaaataatatccaatcaaaagtaatagctacaacaacatttcaagacatagcacaataaaatataaatagaaacaacaaaaagttaaaaagttaagggatgaacacgacccgtcctgagccggcagatgtggtggaagccccggagctccggagctcccrgaaggactggagcgtgggcggaaaggaggccgcccctagagccggaagcctgcgcagggg

SEQ ID NO: 341535 - DNA, 278 bp, Homo sapiens
tgagctctcctagtgagcaattcctgtccctcttaagggcttacaactctaagggggtccgcgtgagagggtcgtgatggattgaggaagcagagggtacgtgactgggggctgcatgcacaggtaattagatcagaayaaaacaggacagggattttcacagtgcttttctatacaatgtctgtaatctatagataacataaccgagtaggtcaggggtcgatctttaactaccaggcccagggtgtggtgcggggctgtctgcttgtggatttcat

SEQ ID NO: 341536 - DNA, 276 bp, Homo sapiens
tatctgcgtctgtctttgtgtgtccgtgtgtgtgtgcccgggtgtggtgtgtgtgtgtgtgtgtctgcccgcgtgcacccgtgtgtatccgtgtgtgtgtcagggtgggtttgytcgtggtagtggtggggtgtgtctgggtgtccgtcagcccctctttctcaggatgaggctgccggggctctagtgccagggcggggcaaagcagagccttcttgcccctttggccatggcgggtccccgtcagaacaagcgacgatggtgtgagcattgtga

SEQ ID NO: 341537 - DNA, 276 bp, Homo sapiens
tatctgcgtctgtctttgtgtgtccgtgtgtgtgtgcccgggtgtggtgtgtgtgtgtgtgtgtctgcccgcgtgcacccgtgtgtatccgtgtgtgtgtcagggtgggtttgctcgtggtagtggtggggtgtgtctgggtgtccgtcagcccctctttcycaggatgaggctgccggggctctagtgccagggcggggcaaagcagagccttcttgcccctttggccatggcgggtccccgtcagaacaagcgacgatggtgtgagcattgtga

SEQ ID NO: 341538 - DNA, 276 bp, Homo sapiens
tatctgcgtctgtctttgtgtgtccgtgtgtgtgtgcccgggtgtggtgtgtgtgtgtgtgtgtctgcccgcgtgcacccgtgtgtatccgtgtgtgtgtcagggtgggtttgctcgtggtagtggtggggtgtgtctgggtgtccgtcagcccctctttctcrggatgaggctgccggggctctagtgccagggcggggcaaagcagagccttcttgcccctttggccatggcgggtccccgtcagaacaagcgacgatggtgtgagcattgtga

SEQ ID NO: 341539 - DNA, 276 bp, Homo sapiens
tatctgcgtctgtctttgtgtgtccgtgtgtgtgtgcccgggtgtggtgtgtgtgtgtgtgtgtctgcccgcgtgcacccgtgtgtatccgtgtgtgtgtcagggtgggtttgctcgtggtagtggtggggtgtgtctgggtgtccgtcagcccctctttctcaggatgaggctgccggggctctagtgccagggcggggcaaagcagagccttcttgcccctttggccatggcgggtccycgtcagaacaagcgacgatggtgtgagcattgtga

SEQ ID NO: 341540 - DNA, 340 bp, Homo sapiens
aatcacgcttcagttggcctgggtgtgactcctgtgtggatgggactatctgcctcgagctctgttgcagggctcaacgtggggatatgtcatctgtgaaccatgtggatgaaaaacagacaactacctgagtctcggctcattgctctctggggaattcgctcattccttcggaaacggaattggtctgaattgctccgggaygaagtaacccaggctggtgatccagagggccgctgagcgccccgccggccaacggggctgtgggcccagcactcagcctgtactgggcacccaacatattcccggagttctgggtcctgttggttctggaggcata

SEQ ID NO: 341541 - DNA, 487 bp, Homo sapiens
cccgtgaatcacaaatgtccttaatagcaatccttaaatgccattaaggacatttgtgattgatgggaggargatgaaatattaacattaacaggagtttggaagaagttgattccagccctcatggatgactttgagggctcaggatgtcagtggaggaagtccctgcagatgtggtagaaatcacaagacaactagaattagaattagggccttaaggtgagatgaaattgctgtaaactcatgatgaaacttgaacaaatagggagttgcttcttatggacgagcaaagaaaatattttcttgagatggaatataatccaggtggagatgctatcaacattgttgaaatgacaacaaaggatttagaatattccataaacctagttgataaagcagcagcagggtttgagagggtttactccaattttgaaagaagttctactgttgataaaatgctgtcaaacagcatcacatgctacaggga

SEQ ID NO: 341542 - DNA, 487 bp, Homo sapiens
cccgtgaatcacaaatgtccttaatagcaatccttaaatgccattaaggacatttgtgattgatgggaggaggatgaaatattaacattaacaggagtttggaagaagttgattccagccctcatggatgactttgagggctcaggatgtcagtggaggaagtccctgcagatgtggtagaaatcacaagacaactagaattagrattagggccttaaggtgagatgaaattgctgtaaactcatgatgaaacttgaacaaatagggagttgcttcttatggacgagcaaagaaaatattttcttgagatggaatataatccaggtggagatgctatcaacattgttgaaatgacaacaaaggatttagaatattccataaacctagttgataaagcagcagcagggtttgagagggtttactccaattttgaaagaagttctactgttgataaaatgctgtcaaacagcatcacatgctacaggga

SEQ ID NO: 341543 - DNA, 391 bp, Homo sapiens
tcacgtaactacaagccaaagaatgccaaggattgatggcaactgtgagaagctaggaaaagacaaggaaggatcctcccctggagtcttcagagaccatgaccctgatgacaccttactttcaactcctagcctccagaactgtgagagrataaatttctgtacttttaacctgctcagttggtggtaatttgttacagtagcctgaggaaactaataccttgagtgggatggagagtgaagtcattggagggttttaagagaagaatggctcggtctgacatattcttaaagaatcaccctaattgcagaaactagaatagactgaaggcaaggggctacagggaagtaggaagaccagttaggcggctatagcagtaaacctaactgg

SEQ ID NO: 341544 - DNA, 391 bp, Homo sapiens
tcacgtaactacaagccaaagaatgccaaggattgatggcaactgtgagaagctaggaaaagacaaggaaggatcctcccctggagtcttcagagaccatgaccctgatgacaccttactttcaactcctagcctccagaactgtgagagaataaatttctgtacttttaacctgctcagttggtggtaatttgttacagtagcctgaggaaactaataccttgagtgggatggagagtgaagtcattggagggttttaasagaagaatggctcggtctgacatattcttaaagaatcaccctaattgcagaaactagaatagactgaaggcaaggggctacagggaagtaggaagaccagttaggcggctatagcagtaaacctaactgg

SEQ ID NO: 341545 - DNA, 565 bp, Homo sapiens
gctgaaacaagttttacagaagcagagctggcaaatagttaaaawattaattggttacaataacagttacaaaacaaataaacagttccaggtgcaggggcttaaaccatcacaaagagagaaatgaagggggtttgcgtgacattcaccgagtgcgtacccaggagcagctggtgcagcttgcctcaatatcttataaggaagtgcattcctggaactgatttgaggtagtttacaccagttatgcaatgtagggtgggaggtaatagaggattcacgtgaagaaactaaaatggagtctgtccggctctctctctgctaggagagagtcactcaggttaaaacaaggtagggtatcacaggaccatgtacaattcttcaaactccagcttcaactctctttcttattgctctcttaggacagtatatttagatcagagtaaatgaaagtaatgttattaggagataagattaaaattgatcccatttgtaaaaagggaagtagattatttgtgaactgtaatactttttttagtgaagaatcaccttaaaacttggaacctgg

SEQ ID NO: 341546 - DNA, 565 bp, Homo sapiens
gctgaaacaagttttacagaagcagagctggcaaatagttaaaaaattaattggttacaatarcagttacaaaacaaataaacagttccaggtgcaggggcttaaaccatcacaaagagagaaatgaagggggtttgcgtgacattcaccgagtgcgtacccaggagcagctggtgcagcttgcctcaatatcttataaggaagtgcattcctggaactgatttgaggtagtttacaccagttatgcaatgtagggtgggaggtaatagaggattcacgtgaagaaactaaaatggagtctgtccggctctctctctgctaggagagagtcactcaggttaaaacaaggtagggtatcacaggaccatgtacaattcttcaaactccagcttcaactctctttcttattgctctcttaggacagtatatttagatcagagtaaatgaaagtaatgttattaggagataagattaaaattgatcccatttgtaaaaagggaagtagattatttgtgaactgtaatactttttttagtgaagaatcaccttaaaacttggaacctgg

SEQ ID NO: 341547 - DNA, 565 bp, Homo sapiens
gctgaaacaagttttacagaagcagagctggcaaatagttaaaaaattaattggttacaataacagttacaaaacaaataaacagttccaggtgcaggggcttaaacyatcacaaagagagaaatgaagggggtttgcgtgacattcaccgagtgcgtacccaggagcagctggtgcagcttgcctcaatatcttataaggaagtgcattcctggaactgatttgaggtagtttacaccagttatgcaatgtagggtgggaggtaatagaggattcacgtgaagaaactaaaatggagtctgtccggctctctctctgctaggagagagtcactcaggttaaaacaaggtagggtatcacaggaccatgtacaattcttcaaactccagcttcaactctctttcttattgctctcttaggacagtatatttagatcagagtaaatgaaagtaatgttattaggagataagattaaaattgatcccatttgtaaaaagggaagtagattatttgtgaactgtaatactttttttagtgaagaatcaccttaaaacttggaacctgg

SEQ ID NO: 341548 - DNA, 596 bp, Homo sapiens
tgatgtacttagtgtgtaaattttagaacatttctgctgttagtctgttaatactcaattcttttctaaaacacctagcctaaatctccataggttttaatcgaattatattataatttggattgtctggtctgccgagcggccaaataataaagttcttaaaattaattttctattgctgccataataaacttccacaactttgtggctttaaatcaaagacttacraccctatagttctgtagggcaaacctctgactgtggtcttactgggcttaagtcaaggtgttgtcagggctgtattgctttctggaggctctagagagaatccatttccttttccaacttttagatgctgtccctattccttggatcatgggaccatccctccatcttcaaagctagtaatgtgggatgtctgtggccattgttctgtagccatatcaccttctgactgtagctaggaaagattctctgattttatagacacatgcaattagattggctcccaagataatcaaggataatccccctaacttaagggttaatcacatctccaaagtcccttttgccccatgtaaagtaatatggtcaca

SEQ ID NO: 341549 - DNA, 596 bp, Homo sapiens
tgatgtacttagtgtgtaaattttagaacatttctgctgttagtctgttaatactcaattcttttctaaaacacctagcctaaatctccataggttttaatcgaattatattataatttggattgtctggtctgccgagcggccaaataataaagttcttaaaattaattttctattgctgccataataaacttccacaactttgtggctttaaatcaaagacttacaaccctatagttctgtagggcaaacctctgactgtggtcttactgggcttaagtcaaggtgttgtcagggctgtattgctttctggaggctctagagagaatccatttccttttccaacttttagatgctgtccctattccttggatcatgggaccatccctccatcttcaaagctagtaatgtgggatgtctgtggccattgttctgtagccatatcaccttctgactgtagctaggaaagattmtctgattttatagacacatgcaattagattggctcccaagataatcaaggataatccccctaacttaagggttaatcacatctccaaagtcccttttgccccatgtaaagtaatatggtcaca

SEQ ID NO: 341550 - DNA, 451 bp, Homo sapiens
ccaaatccacagtgagatatcatctcaccctgcttagaatgctttttatgaaaaagtcaaaaaataacaaatgctggcaaggatgtgaagaaaggggaatgttcatacactgttggtggaaatgtaaattagagcaattgttatggaawacaatataacttccaaaaacattaaaaatagacttatcacataatccagcaatcccactactgggtatatattcaaagaatattaaatcagtatgtcaaagagatttctggactctcatgtttattacagcactattcacaatagcctagaatcaacctaagtgtccatcaatgaatgaatggagaaagaaaatgtggcatatatgctgtatttggtcattcttgcattgcaaaataaagaaatacctgagattggataatttataagaagagagacataattggctcctggctccatgggc

SEQ ID NO: 341551 - DNA, 451 bp, Homo sapiens
ccaaatccacagtgagatatcatctcaccctgcttagaatgctttttatgaaaaagtcaaaaaataacaaatgctggcaaggatgtgaagaaaggggaatgttcatacactgttggtggaaatgtaaattagagcaattgttatggaatacaatataacttccaaaaacattaaaaatagacttatcacataatccagcaatcccactactgggtatatattcaaagaatattaaatcagtatgtcaaagagatttctggactctcatgttwattacagcactattcacaatagcctagaatcaacctaagtgtccatcaatgaatgaatggagaaagaaaatgtggcatatatgctgtatttggtcattcttgcattgcaaaataaagaaatacctgagattggataatttataagaagagagacataattggctcctggctccatgggc

SEQ ID NO: 341552 - DNA, 192 bp, Homo sapiens
ccaggtactgtgattgctcacccaatttttggtccctttgacagtgcttcttgaatgtagtkagttgtgaaaatttggtgtttttgtgtggtgatgagaatgtaggcttctattctgccctcttactctgtctctgccttaaattttttagattcagggagtatatttgcaggtttattacatggatatatt

SEQ ID NO: 341553 - DNA, 192 bp, Homo sapiens
ccaggtactgtgattgctcacccaatttttggtccctttgacagtgcttcttgaatgtagttagttgtgaaaatttggtgtttttgtgtggtgatgagaatgtaggcttctattctgccctcttaytctgtctctgccttaaattttttagattcagggagtatatttgcaggtttattacatggatatatt

SEQ ID NO: 341554 - DNA, 548 bp, Homo sapiens
tttcagggaagttattctgtgaatatgcctgtaggatttaactggtctttgaattatggatattatttggaaagctggagaggagagtgaaggacactatataggtrggcaaacatcttgaaattttgaaacattgtgtaattattttacacataactggctggacatgaccaacaggtataagaatagaatctgttggttgctaaaactatacatttttagttaatgtccaacatgtaccaatagatgccactgaagatcttctatgaagttcctcctaagagtcataactggtgaacacagttcatccatggggaatacagactataacttactaatggatttaggaaggaatctacctagcatttttgggaaaatgtgaataaatcaacctgatcaatgtggtgggttcctctagaaaatagaaaaatagggttaggctaagtaatgtggagatttgagaagatagatctggggtgattgatagaatattagatataacaaaggcagtctcttcaactttaccaactttttcttgtcatttgtgc

SEQ ID NO: 341555 - DNA, 462 bp, Homo sapiens
tcctgggctttttggggggttggtaggctatttattacggattcaatttttggagctyataattggtctgctcagagactgaatttcttcctggttcagtctcgagagagtatatgtgtccaggaatttattaatctcttctagggtttctagtttgtgtgtatagaggtgatcgtagtagttactggttgttatttttacttctctggggtcagtggtaacattcccttcatcattcctaattgtcgttatctgaatcgtctttcatcgtctttattaatctagctagtgccctatcttagtaattttttcaaaaaaccttgattaagtgatcttttgaacagtttttcatgtctcaatttctttcaattcagctctgattttagttatttcttgtcttctataagctttgtggttgagttctccttgcttctctaattctttcagttgtgatgttaggtt

SEQ ID NO: 341556 - DNA, 462 bp, Homo sapiens
tcctgggctttttggggggttggtaggctatttattacggattcaatttttggagcttataattggtctgctcagagactgaatttcttcctggttcagtctygagagagtatatgtgtccaggaatttattaatctcttctagggtttctagtttgtgtgtatagaggtgatcgtagtagttactggttgttatttttacttctctggggtcagtggtaacattcccttcatcattcctaattgtcgttatctgaatcgtctttcatcgtctttattaatctagctagtgccctatcttagtaattttttcaaaaaaccttgattaagtgatcttttgaacagtttttcatgtctcaatttctttcaattcagctctgattttagttatttcttgtcttctataagctttgtggttgagttctccttgcttctctaattctttcagttgtgatgttaggtt

SEQ ID NO: 341557 - DNA, 548 bp, Homo sapiens
tttcagggaagttattctgtgaatatgcctgtaggatttaactggtctttgaattatggatattatttggaaagctggagaggagagtgaaggacactatataggtgggcaaacatcttgaaattttgaaacattgtgtaattattttacacataactgsctggacatgaccaacaggtataagaatagaatctgttggttgctaaaactatacatttttagttaatgtccaacatgtaccaatagatgccactgaagatcttctatgaagttcctcctaagagtcataactggtgaacacagttcatccatggggaatacagactataacttactaatggatttaggaaggaatctacctagcatttttgggaaaatgtgaataaatcaacctgatcaatgtggtgggttcctctagaaaatagaaaaatagggttaggctaagtaatgtggagatttgagaagatagatctggggtgattgatagaatattagatataacaaaggcagtctcttcaactttaccaactttttcttgtcatttgtgc

SEQ ID NO: 341558 - DNA, 548 bp, Homo sapiens
tttcagggaagttattctgtgaatatgcctgtaggatttaactggtctttgaattatggatattatttggaaagctggagaggagagtgaaggacactatataggtgggcaaacatcttgaaattttgaaacattgtgtaattattttacacataactggctggacatgaccaacaggtataagaatagaatctgttggttgctaaaactatacatttttagttaatgtccaacatgtaccaatagatgccactgaagatcttctatgaagttcctcctaagagtcataactggtgaacacagttcatccatggggaatacagactataacttactaatggatttaggaaggaatctacctagcatttttgggaaaatgtgaataaatcaacctgatcaatgtggtgggytcctctagaaaatagaaaaatagggttaggctaagtaatgtggagatttgagaagatagatctggggtgattgatagaatattagatataacaaaggcagtctcttcaactttaccaactttttcttgtcatttgtgc

SEQ ID NO: 341559 - DNA, 565 bp, Homo sapiens
gttttcagggaagttattctgtgaatatgcctgtaggatttaactggtctttgaattatggatattatttggaaagctggagaggagagtgaaggacactatataggtgggcaaacatcttgaaattttgaaacattgtgtaattattttacacataactggctggacatgaccaacaggtataagaatagaatctgttggttgctaaaactatacatttttagttaatgtccaacatgtaccaatagatgccactgaagatcttctatgaagttcctcctaagagtcataactggtgaacacagttcatccatggggaatacagactataacttactaatggatttaggaaggaatctacctagcatttttgggaaaatgtgaataaatcaacctgatcaatgtggtgggttcctctagaaaatagaaaaatagggttaggctaagtaatgtggagatttgagaagatagatctggggtgattgatagaatattagatataacaaaggcagtctcttcaactttaccaactttttmttgtcatttgtgctggtgtctatcaaat

SEQ ID NO: 341560 - DNA, 570 bp, Homo sapiens
gtctctactgaaaatacaaaaaaaatagctgtgcgtggtggcgggtgcctgtactcccagctactggggaggctgaggcaggagaatggcaagaacccgggaggyggagcttgcagtgagcagacatcgcactactgcactccagcctgggtgacagagcgagactccgtctcaaaataaataaataaataaataaatattacgtaaactgagaaaatgagtataacaagagtagtattgttgtttctctgataaataaactaaatatgttggaaaaatgagaaactcaacagttgctgtcagcttaactgttggcaagacaactagaaacaaatgggaaaaattgtgtaatctaggatttcagattgctttaccccagttgtcttcacagaaagtgaacaagaaatcaatgacaacatatcattggcatagtttccacaagaaactccactctgaatccgtgcaagggtttgaccttgtcatcaaaattctggcaaatttatttacacatgtcttttaaattaaagttaagttttaaggacttacatctaatacttcttatgattcctc

SEQ ID NO: 341561 - DNA, 570 bp, Homo sapiens
gtctctactgaaaatacaaaaaaaatagctgtgcgtggtggcgggtgcctgtactcccagctactggggaggctgaggcaggagaatggcaagaacccgggaggtggagcttgcagtgagcagacatcgcactactgcactccagcctgggtgacagagcgagactccgtctcaaaataaataaataaataaataaatattacgtaaactgagaaaatgagtataacaagagtagtattgttgtttctctgakaaataaactaaatatgttggaaaaatgagaaactcaacagttgctgtcagcttaactgttggcaagacaactagaaacaaatgggaaaaattgtgtaatctaggatttcagattgctttaccccagttgtcttcacagaaagtgaacaagaaatcaatgacaacatatcattggcatagtttccacaagaaactccactctgaatccgtgcaagggtttgaccttgtcatcaaaattctggcaaatttatttacacatgtcttttaaattaaagttaagttttaaggacttacatctaatacttcttatgattcctc

SEQ ID NO: 341562 - DNA, 570 bp, Homo sapiens
gtctctactgaaaatacaaaaaaaatagctgtgcgtggtggcgggtgcctgtactcccagctactggggaggctgaggcaggagaatggcaagaacccgggaggtggagcttgcagtgagcagacatcgcactactgcactccagcctgggtgacagagcgagactccgtctcaaaataaataaataaataaataaatattacgtaaactgagaaaatgagtataacaagagtagtattgttgtttctctgataaataaactaaatatgttggaaaaatgagaaactcaacagttgctgtcagcttaactgttggcaagacaactagaaacaaatgggaaaaattgtgtaatctaggatttcagattgctttaccccagttgtcttcacagaaagtgaacaagaaatcaatgacaacatatcattggcatagtttccacaagaaactccactcygaatccgtgcaagggtttgaccttgtcatcaaaattctggcaaatttatttacacatgtcttttaaattaaagttaagttttaaggacttacatctaatacttcttatgattcctc

SEQ ID NO: 341563 - DNA, 348 bp, Homo sapiens
  misc_feature (1)...(348): n = A,T,C or G
actaccagcacagtcaggattaggttttaaaatacacaatagcaacatacagccaggcatgrgggtgcatgctgtaantcccaactactcggggagcggtgaagaggatcacttgagcccaggagttcaaggttatagtgagctatgatcatgccacagcactctagcctgagtgacagagcaaggtcctgtctcaaaaaaagaccaaaacaaaccaaaaggcaacatgtgaaggtacaaagtgatatatggagaacagtctctctcatgatagaccccagccatctattcatgcctgctttccagaggcaatgcctatcataatgcttcttaaaaatgcctctacag

SEQ ID NO: 341564 - DNA, 348 bp, Homo sapiens
  misc_feature (1)...(348): n = A,T,C or G
actaccagcacagtcaggattaggttttaaaatacacaatagcaacatacagccaggcatgagggtgcatgctgtaantcccaactactcggggagcggtgaagaggatcacttgagcccaggagttcaaggttatagtgagctatgatcaygccacagcactctagcctgagtgacagagcaaggtcctgtctcaaaaaaagaccaaaacaaaccaaaaggcaacatgtgaaggtacaaagtgatatatggagaacagtctctctcatgatagaccccagccatctattcatgcctgctttccagaggcaatgcctatcataatgcttcttaaaaatgcctctacag

SEQ ID NO: 341565 - DNA, 348 bp, Homo sapiens
  misc_feature (1)...(348): n = A,T,C or G
actaccagcacagtcaggattaggttttaaaatacacaatagcaacatacagccaggcatgagggtgcatgctgtaantcccaactactcggggagcggtgaagaggatcacttgagcccaggagttcaaggttatagtgagctatgatcatgccacwgcactctagcctgagtgacagagcaaggtcctgtctcaaaaaaagaccaaaacaaaccaaaaggcaacatgtgaaggtacaaagtgatatatggagaacagtctctctcatgatagaccccagccatctattcatgcctgctttccagaggcaatgcctatcataatgcttcttaaaaatgcctctacag

SEQ ID NO: 341566 - DNA, 348 bp, Homo sapiens
  misc_feature (1)...(348): n = A,T,C or G
actaccagcacagtcaggattaggttttaaaatacacaatagcaacatacagccaggcatgagggtgcatgctgtaantcccaactactcggggagcggtgaagaggatcacttgagcccaggagttcaaggttatagtgagctatgatcatgccacagcactctagcctgagtgacagagcaaggtcctgtctcaaaaaaagaccaaaacaaaccaaaaggcaacatgtgaaggtacaaagtgatatatggagaacrgtctctctcatgatagaccccagccatctattcatgcctgctttccagaggcaatgcctatcataatgcttcttaaaaatgcctctacag

SEQ ID NO: 341567 - DNA, 442 bp, Homo sapiens
attaataaaagtagactattgtaaagcgaattagcaataattttacttatgaataaaaacttatactatttcagatcattttcttattatttcttgaaaaaataagtcctttataagtccagttaaatattacctaatttttagctcaaatttcatggtacacaggactattttcttactttactgatgtctaaaagctaaatttcactggtgatatatcatttgtttaagactaggtaactgataacctaagctgagacccaaaatttgttattttctttatttccagcacaatattttccatcatggtatattacatcttgctaaagaagctatgtttctttagcaagrcaattgaaaagcataaacattggtttactggaaagatttttaatattccatattatttacaactgtttgcttatttccatgtataaaatga

SEQ ID NO: 341568 - DNA, 442 bp, Homo sapiens
attaataaaagtagactattgtaaagcgaattagcaataattttacttatgaataaaaacttatactatttcagatcattttcttattatttcttgaaaaaataagtcctttataagtccagttaaatattacctaatttttagctcaaatttcatggtacacaggactattttcttactttactgatgtctaaaagctaaatttcactggtgatatatcatttgtttaagactaggtaactgataacctaagctgagacccaaaatttgttattttctttatttccagcacaatattttccatcatggtatattacatcttgctaaagaagctatgtttctttagcaagacaattgaaaagcataaacawtggtttactggaaagatttttaatattccatattatttacaactgtttgcttatttccatgtataaaatga

SEQ ID NO: 341569 - DNA, 420 bp, Homo sapiens
gataaagcacagaaaatggcatctcycaatataatcttggacatatttgtcattaaggagcccaatgaaatatgacaaattgcacagcaacttttaaaaattgctaataactctttgtttatgtcagtagtaaaatttaaatactgatccaacctgacacatatgaacataacatacctattctgaaagacaaagactatgtatcgatatttatattatatttaatacaaatcatggaatatagtattatagaattgtgcctatttacctagaaaatattaccccaattttgtttttctaagcttcaagagagatttcttggagaaaatgagattttataagcaatgctagcaaaaaaagacaacttaaaagattatggataaaaaggcgtattttagatacaaaacacagattgagaaa

SEQ ID NO: 341570 - DNA, 478 bp, Homo sapiens
gcttgttgaggtgaaataatttttctaagatacaaacagaaaatatatacgattgaaatagacactaggtgatatttcacatatgcaatatgagctctgtttctttgacaagacagatgaatgaagaattcatgtttgaatgattggcattagtctaaagtattaaataatgaaaktgtccatattctctgcccagtatgatcttttaaaatatcatccacacaaatacaagtgaggtcatattttttacaatgaggcatcaaatttaaaggcagcaaaaaaataatgaatatacctcttaggctaattgtttaccttagtggttttaatgatatggaaagttgaagtttagagtgagaaaagcaccaaaaaagaaaataatcagtctcctgactttcatatctggtagtcttagactgaatgtcagaactgtcacaggtcaaataatggcccagtatgttttcaaataagtgacacg

SEQ ID NO: 341571 - DNA, 478 bp, Homo sapiens
gcttgttgaggtgaaataatttttctaagatacaaacagaaaatatatacgattgaaatagacactaggtgatatttcacatatgcaatatgagctctgtttctttgacaagacagatgaatgaagaattcatgtttgaatgattggcattagtctaaagtattaaataatgaaagtgtccatattctctgcccagtatgatcttttaaaatatcatccacacaaatacaagtgaggtcatattttttacaatgaggcatcaaatttaaagrcagcaaaaaaataatgaatatacctcttaggctaattgtttaccttagtggttttaatgatatggaaagttgaagtttagagtgagaaaagcaccaaaaaagaaaataatcagtctcctgactttcatatctggtagtcttagactgaatgtcagaactgtcacaggtcaaataatggcccagtatgttttcaaataagtgacacg

SEQ ID NO: 341572 - DNA, 478 bp, Homo sapiens
gcttgttgaggtgaaataatttttctaagatacaaacagaaaatatatacgattgaaatagacactaggtgatatttcacatatgcaatatgagctctgtttctttgacaagacagatgaatgaagaattcatgtttgaatgattggcattagtctaaagtattaaataatgaaagtgtccatattctctgcccagtatgatcttttaaaatatcatccacacaaatacaagtgaggtcatattttttacaatgaggcatcaaatttaaaggcagcaaaaaaataatgaatatacctcttaggctaattgtttaccttagtggytttaatgatatggaaagttgaagtttagagtgagaaaagcaccaaaaaagaaaataatcagtctcctgactttcatatctggtagtcttagactgaatgtcagaactgtcacaggtcaaataatggcccagtatgttttcaaataagtgacacg

SEQ ID NO: 341573 - DNA, 478 bp, Homo sapiens
gcttgttgaggtgaaataatttttctaagatacaaacagaaaatatatacgattgaaatagacactaggtgatatttcacatatgcaatatgagctctgtttctttgacaagacagatgaatgaagaattcatgtttgaatgattggcattagtctaaagtattaaataatgaaagtgtccatattctctgcccagtatgatcttttaaaatatcatccacacaaatacaagtgaggtcatattttttacaatgaggcatcaaatttaaaggcagcaaaaaaataatgaatatacctcttaggctaattgtttaccttagtggttttaatgatatggaaagttgaagtttagagtgagaaaagcaccaaaaaagaaaataatcagtctcctgactttcatatctggtagtcttagamtgaatgtcagaactgtcacaggtcaaataatggcccagtatgttttcaaataagtgacacg

SEQ ID NO: 341574 - DNA, 583 bp, Homo sapiens
gatacttgctcatagtgttagaggaataatcccaaagagagaaattattcttcgaatatccaccatgactgaatacttagtaatactgaaacctacttataaaacaaaacagaaaacctccaaaaaaccaaataaacaacaaaaaaaacttaaaaccaaaaaagtactggaagtctcagaagtatttagcagttwttcttgctccttcaaatgaaaagatgctttatcgtatcctctatggagagaattctgacagtatttatcaaagaccttacatttattcaccttttgccctaaaaatttcataacttaaaaatacatacaacaatttataatatagcattttttgtaaagggaaataatcagaaagagcctaagtgttcaacaatagggcacttgttgaattatgatacaatcacacaataaggtcttcatagagcccattaaaatgatgttattgatatttatttattaataggagaaatcatttagaatttttggttaagacctttaactaagcacaaagtctatgaaataatgtgcacaacattccatattttcataaggggaatgacttttaaaa

SEQ ID NO: 341575 - DNA, 583 bp, Homo sapiens
gatacttgctcatagtgttagaggaataatcccaaagagagaaattattcttcgaatatccaccatgactgaatacttagtaatactgaaacctacttataaaacaaaacagaaaacctccaaaaaaccaaataaacaacaaaaaaaacttaaaaccaaaaaagtactggaagtctcagaagtatttagcagttattcttgctccttcaaatgaaaagatgctttatcgtatcctctatggagagaattctgacagtatttatcaaagaccttacatttattcaccttttgccctaaaaatttcataacttaaaaatacatacaacaatttataatatagcattttttgtaaagggaaataatcagaaagagcctaagtgttcaacaatagggcacttgttgaattatgatacaatcacacaataaggtcttcatagagcccattaaaatgatgttattgatatttatttattaataggagaaatcatttagaatttttggttaagacctttaactaagcacaaagtctatgaaataatgtrcacaacattccatattttcataaggggaatgacttttaaaa

SEQ ID NO: 341576 - DNA, 487 bp, Homo sapiens
ttagtaccctgtagtttctcaaccctggctgccctccctactgcctctactagtctccattgtctattatagtcatcttctctccttttcaaaaaaatctgtttctctgactctcctattaggtaaaaaatggaaaacccaaatataattttcattcaatacatatttcatctttatgcgttattttttgagaaagtgaagtccatttagaatgatagcagttcatcaaccaaataattcatcttcacacagtttcaatwacttcagaaattttcttcatctctctctctgtagaaattctcaaactgtggaatggtcatctttatcgtcataaatactgtcatctttatgtccaagagtatccaacatttagctaccaaactactacccaaatctgattaattgatcatgttgattctgtcacattctacttgtcatatcagatttttattaaagaaatcattagcttatctattattgttactgg

SEQ ID NO: 341577 - DNA, 487 bp, Homo sapiens
ttagtaccctgtagtttctcaaccctggctgccctccctactgcctctactagtctccattgtctattatagtcatcttctctccttttcaaaaaaatctgtttctctgactctcctattaggtaaaaaatggaaaacccaaatataattttcattcaatacatatttcatctttatgcgttattttttgagaaagtgaagtccatttagaatgatagcagttcatcaaccaaataattcatcttcacacagtttcaattacttcagaaattttcttcatctctctctctgtagaaattctcaaactgtggaatggtcatctttatcgtcataaatactgtcatctttatgtccaagagtatccaacatttagctaccaaactactacycaaatctgattaattgatcatgttgattctgtcacattctacttgtcatatcagatttttattaaagaaatcattagcttatctattattgttactgg

SEQ ID NO: 341578 - DNA, 487 bp, Homo sapiens
ttagtaccctgtagtttctcaaccctggctgccctccctactgcctctactagtctccattgtctattatagtcatcttctctccttttcaaaaaaatctgtttctctgactctcctattaggtaaaaaatggaaaacccaaatataattttcattcaatacatatttcatctttatgcgttattttttgagaaagtgaagtccatttagaatgatagcagttcatcaaccaaataattcatcttcacacagtttcaattacttcagaaattttcttcatctctctctctgtagaaattctcaaactgtggaatggtcatctttatcgtcataaatactgtcatctttatgtccaagagtatccaacatttagctaccaaactactacccaaatctgatwaattgatcatgttgattctgtcacattctacttgtcatatcagatttttattaaagaaatcattagcttatctattattgttactgg

SEQ ID NO: 341579 - DNA, 544 bp, Homo sapiens
cttctttatggtcttatttgagaataaaacttggttctgtcttagcctgtcattgaataagccagtgatctggggcaaatctaactgcttcatctgtaaactatgaatrataatagagtccctctgcctgtcacacatgggtatagtaaggttccattttaaaaatagctcttattatgttacctgaaaggcattctataatgatgagtggcaaggtggtcttagcaacagtgtggtgaaaattgggaccattttctgtcgctatcatttctatttttgtgataccctctttaaattagtcttaggatgtaattcaaaggagtgatgtaattggaattttcttctttttttttttttttttttttgagacagagtttccctctgtcgcccaggttggagtgcagtggcgcaatctgggcgcaccgcaagctccgcctcctgggttcacgccattctcctgcctcagccttgtgagtagctgagactacaggcgcccgccaccgcacctggctaattttttgtatgtttggttgagacggggttt

SEQ ID NO: 341580 - DNA, 544 bp, Homo sapiens
cttctttatggtcttatttgagaataaaacttggttctgtcttagcctgtcattgaataagccagtgatctggggcaaatctaactgcttcatctgtaaactatgaatgataatagagtccctctgcctgtcacacatgggtatagtaaggttccattttaaaaatrgctcttattatgttacctgaaaggcattctataatgatgagtggcaaggtggtcttagcaacagtgtggtgaaaattgggaccattttctgtcgctatcatttctatttttgtgataccctctttaaattagtcttaggatgtaattcaaaggagtgatgtaattggaattttcttctttttttttttttttttttttgagacagagtttccctctgtcgcccaggttggagtgcagtggcgcaatctgggcgcaccgcaagctccgcctcctgggttcacgccattctcctgcctcagccttgtgagtagctgagactacaggcgcccgccaccgcacctggctaattttttgtatgtttggttgagacggggttt

SEQ ID NO: 341581 - DNA, 537 bp, Homo sapiens
ttgaattttgtcaaatgtgttttctgcatccattggaatgttatttttatctttcattctgttaatgtggtatatcacattattaatttttacacattgaaacatccttgtatcacatagataagttacaattggtcatggtgtatgaccttttcaatgtgcttttgaattcagtttgctagttagtattttattgagaatttttgcatctatattcgttaaggatactggtctgtaattattttttcttgtgttgtcttcgtctagcttttaagtcatggtaacatcggcctcatgaaatgagtttgagagtattctctcttctattttttctgaagagtttaagaagttttggtgttagttcttctttgaatgtttggtagaagttgcccatgaaagcatctgcacctgggcttttctttgttgggaaattwttgattactgattaaatctctttgcttgcttttggtctgttctatttctgtgttgttccattttggtagattgcatctttctaagagttgatccatttatgct

SEQ ID NO: 341582 - DNA, 583 bp, Homo sapiens
gggcaacacagtgagaccttgtccctacaaaaaaaaatcattttttattattcgaatcaagaagagtacctctaaccccttgccgttgctttagggttgatagctctggtctagaactcaagatatgaaactgtgagtcccagtgtagctacttaagtttaaatacaagagctgtcagacatttcctctaaagcaacgaaatctgtagcatccattttgtactttgaaaacttagtttttggccagcctctaggaagaagaagagggcccataactgggcatatgggtagggaggagaaaagaaaccagctggatgcaacagggaaagaccaagggatggagacgccaggcagagccagtcctcatgcttggggcctgggcctaggaaaggaactaggtgaagaagggaggagccccaggctgtggatgtctctgggggaaccttggttcagcaacggccagaggagctcctgaggccaagtggtatctgtcgcctccctacctttgggcgtcttctggtcttcaatrtgctgcaagtcatggctccggaatcaaattgggctcaaattgtgcgagctccaac

SEQ ID NO: 341583 - DNA, 440 bp, Homo sapiens
aagaaacctttcttttgaaagaatttccacttgattttgccagatatccagaggcaccagtccttaaaccaattcaagactttagattctttgattgacccagtcagcttgaacctgggctgcatttccatgtgagagctgctgtttcatgtctaccctgatggtgtagccctttggggttccagcttcttataaagagtctggaccttatttctgtccccagcaactggtggtcaaacctacartgtcttatcaattccaattttaacctggtaatgcccgtcagttctttaatgctttgagattttttttaaatccaaatatttttagttgtttcagtgggagggtgtatctgcctttggttttcagtagtttcctcctggtgaatctaatagcccaccataacgattaacggaaagtccctaggatttgtatcttag

SEQ ID NO: 341584 - DNA, 634 bp, Homo sapiens
acaatggtttcctcattgcctttatcttttcacaggacccctggagatgtcagtgaggtctagatgtgggataactgattctaattrttagaatgacactcttcttcttatattatttgcatttttgcaaagccataatatttttctataattctaatgagttatagtaagttgacaaactaatcatagtaaaatgtcagcttttggatgaaatcttatatatatcccaatgatatgcatgttgcatgaaaactcagtgtcttgcactagtagtgtgccagatggcaccatcttgctgtggggaaaccatggttgtagtattatatttcaaattagaataggttgttcttattttagactgtgaaatagcactgaagctcagagattctactgcaattcagttcacctatgatattaaaatggaaatttataagagatgcttcagaaaacttctgaggttgaagtggaacacttcactatctctatggagttagagggtggttcacactttagccaggacaaggaagtaagtgtgaggacagacttttaaagccacagatatggcaacttaagaacaaaagattcagaggtaaactaagaaaaatggagcaggaacaagtggatgacaagtcct

SEQ ID NO: 341585 - DNA, 396 bp, Homo sapiens
tcacgttgcccaattttcaaacttagatgcaatattgatttttgcatcttgttaatctaaaacttactgccagggaccattttttttttattttcaggagaccttttaagataagaaaattggacttcattttatcttaattcacctgatgaaagtttctcattgtctctctcattctacccctttacracctcccccattttactccttaatagacaaagcttcactttgtctattaagaatcaatacaaaactaaatacagtgtgctgctacccaacaaggactaaatgaagaattatatgaaaagtcttgaactttgagtaaaatcagtaaaaactgcccttttgctacttaacctttaactagtcaaaagctttttttactagaaataagac

SEQ ID NO: 341586 - DNA, 467 bp, Homo sapiens
agccatttgtttcagttcagtcacttccttttataaaagacagcaactcagctcaaaacggctcaatcaaagtagtatttggcttacattttcttacttcaggcatgaatggatcttgctgttcataccatgtcagtccataaacggaatgttattggttctgaatcacataacattatcttctatccatctttgatccaatcactatggctgaaagaatgatttgttctaataaaccatccctagactctgtgatcatccctggaatcaatgccatctggacctcataggctaatagttgatgaggtctggtttctcaaggaaaattggggtacacctaccatgaggaagatgaatgaatgccaggcrgacaaattaacaggtgtctactaaaccatctgacaaataaaaacactagacattagatatttattatcattgctagaggccaggcacagttgctcaca

SEQ ID NO: 341587 - DNA, 621 bp, Homo sapiens
cataacattatcttctatccatctttgatccaatcactatggctgaaagaatgatttgttctaataaaccatccctagactctgtgatcatccctggaatcaatgccatctggacctcataggctaatagttgatgaggtctggtttctcaaggaaaattggggtacacctaccatgaggaagatgaatgaatgccaggcagacaaattaacaggtgtctactaaaccatctgacaaataaaaacactagacattagatatttattatcattgctagaggccaggcacagttgctcacacctgtaatcccagcactttgggaggccgaggtgggcagatcacttcaggtcaggagtttgagaccagcctggccaatatggtgaaaccccatctctactaaaaatacaaaagttagccaggtgtggtagcgcatgcctgtagtcccagctacttgggaggctgaggcaggaaaattgcttgagcctgggaagcagaggttgcagtgagctgagacgtgccmttgcactccagcctgggcatcacagcgaggctccatctcaaacaaaacaaaacaaaacaaaacaaaacaaaacaaaacaaaacaaaaaaacaatcattact

SEQ ID NO: 341588 - DNA, 559 bp, Homo sapiens
cttgttcatttccccatttactaaaggtcacctataaactttgtttcgtttaaatatttattaactttatatgttaaaatcgatctggaaataagaaattctctgagctgtagtgtttccttctcactaccttgtacctttatacttagattggaattcttaataaataaaattatatgaaattttcaacctattataaacgtatatatytgaagacttagagtaagttatggccatcaaataggcaatgagctctggtgaatttctctacattcataaagttttaagttttttaaagagcatgagggtaaattcagcaattttaatatttaaaattggagtttatatatacttatttatacatatggtaagattctcaaatcctaactatgatgtacataaatacagatgtagacatacacacatataggttatgaagttgagccatatgttttgttaaatacctagcaaaatcaaattgagcttaaactatgtaattttgaaaattagtgacattaaattcttggtttaattgttgtctttaaattaccactcaatt

SEQ ID NO: 341589 - DNA, 616 bp, Homo sapiens
ttatctgaagagggtcttatttctccttcacttaggaagcttagtttgactggatatgagattcctggttgaagatttctttctttaagaatgttaaatataagcacccaatctcttctggcttataaggtttcacttgagaggtctgtttttagcctgatggggatcacttcgtaggtgacctgccctttctttctagctgcctttaacattctttctttcctttcattrttgaaaaatctgacaattttgtgtctcagagatactcttcttgtgtagaattttccaggagttctctgtatttcctgaatttgactgttggcctctctagaaaggttggagttttcatggatgatatcctgaaacatattttccaagttgtttgctgcctccccctcccttccagggataccaatgatttgtagacttggcctctttacataattccatacttctcggaggtttccttcattcttttttattctttttcctttatttttgtgtgactgtcttatttcagagaaccattcttcaagttctgagattatttcctcagtttgatttattctgatgttaatacttgcaattgcattgtgaaattcctgtattttgtttt

SEQ ID NO: 341590 - DNA, 616 bp, Homo sapiens
ttatctgaagagggtcttatttctccttcacttaggaagcttagtttgactggatatgagattcctggttgaagatttctttctttaagaatgttaaatataagcacccaatctcttctggcttataaggtttcacttgagaggtctgtttttagcctgatggggatcacttcgtaggtgacctgccctttctttctagctgcctttaacattctttctttcctttcattattgaaaaatctgacaattttgtgtctcagagatactcttcttgtgtagaattttccaggagttctctgtatttcctgaatttgactgttggcctctctagaaaggttggagttttcatggatgatatcctgaaacatattttccaagttgtttgctgcctccccctcccttccagggataccaatgatttgtagacttggcctctttacataattccatacttctcggaggtttccttcattcttttttattctttttcctttatttttgtgtgactgtcttatttcagagaaccattcttcaagttctgagattatttcctcagtttgatttattctgmtgttaatacttgcaattgcattgtgaaattcctgtattttgtttt

SEQ ID NO: 341591 - DNA, 492 bp, Homo sapiens
ttgaagctgacctcttgtttctggtttcagagrggggtatgttagtgaggtatttttgatgttgaagctttgaggtgttatccagcaggtgacacttaggcttataggtcagctggtagactcttgtttggttgtgtggctcccctttgtttcctctcagttgcagccttgttccctcttggtgctctgaaagtgtgggtttctctcccccttgattgctggctatagttcgcaacttggcactcctgggctgcccattgcagcgctggggtgattacagtatttatgttccctttccagcttagaggtagcagaggaagaaattttagcagtagttgtggccaaaggtagtttgcttgactccgggggttccacctcagagatatgcagtcagcagtcactcagtgcagtcagcccaagatggagggtttgtgctgtgggcccaagcaaggagaaacctgtctggtggtgagccatggggtgtgtgtggga

SEQ ID NO: 341592 - DNA, 499 bp, Homo sapiens
gggatggggggtggctggaggcccaggcgtagaggacctgcccagtgaggagatatgggggtggctggaggcccaagactagaggactgcccagtgagtctggccacttttccgtatggctactgtggtttgcttagggcccacyacagtccctagtcacctcagattttccagaaccttgaggtgccaccagtgaagattgcaaaacaggaaagatggccgcctgtccctccctctggaagctttgtcccagggaggtacagacctgttgccagcccaaaggcacttgtaagaagtggctggaggcctcagctgggaagttccaccctgtgaggaggaacaggatgggatccacttaaaaaagcatttggacacattttgttagagcagctgtactgtgctgggggtccacttcagccctcaatcacctcagacactctgaagcccaaagactggaacagctaagttgcccaacagcaaagatggtggcttgctcctc

SEQ ID NO: 341593 - DNA, 555 bp, Homo sapiens
aggaaagatggccgcctgtccctccctctggaagctttgtcccagggaggtacagacctgttgccagcccaaaggcacttgtaagaagtggctggaggcctcagctgggaagttccaccctgtgaggaggaacaggatgggatccacttaaaaaagcatttggacacattttgttagagcagctgtactgtgctgggggtccacttcagccctcratcacctcagacactctgaagcccaaagactggaacagctaagttgcccaacagcaaagatggtggcttgctcctccctctgggagcgccattccagggggaattcagatctctgttggctagagagcttgggtgggggtggctggatgccgcagttgggaggtcccaccgggtgagaaggaatggaattaggcaccggcttaaagcagcagtctggccacaagttttggtagagcagctgtgctgtgcttggggatcccttccaccccaggttggctcagactctccaaagcctgaaggctggaattgctaaggtgcccaaacagcaaagatggtggcc

SEQ ID NO: 341594 - DNA, 578 bp, Homo sapiens
gttctaccttctttgataaatctcaaaagttctttccacagtggctgaactagtttagattcccaccagcaatgtataagcgttctcctttctctgcaactttgccagcatctactggtttttgactttttaataatagcccttctgactggtgtgagatggtatctatctcattgtgatttggatttgcatttatctgatgattaatgatgtcgagcctcttttcatatgtttgttggctacatatatgtcttctttttaaaagtatctgttaatgtcgttactttttaattaggtggtttgctttttgattgttaatttgttcaagttctttattgattctggatattagacctttatcagatgcatagtttgcaaatattttatcccattttgtgggatatttatttactctgttgatagtttccattgctgtgtagaaactccttagttgtattaggtctcatttgtcaatatttatttttgttacaattgggtttgaggacttagtcataaattcttccctamggctgatgtccagaatggtgttcattaggttttattcaaggatttttata

SEQ ID NO: 341595 - DNA, 591 bp, Homo sapiens
ttatatctacacaaaaacctgcacataaatgtttataacagcattattcataactgccaaaacatgagcttaaccaagatgttctttaatagatgtatagataaacaaattatggtatatccatacaatggaatagtattcatctataaaaagtaatccattatcaaaccatgaaaacacatgaagaattttaaataaatattgctaagtgaaagaagcccattggaaaagccttcatactgtgtggctccaactttatgacgttccaaaaatggcaaacatatggaaactataamatgatctgtggtttccaagagtgcagggggaaacaggggagatataaataggtggaacacaggtatatcagtgaaaatgttttgtatgatatggtgtatacatgtaattatatatttgccaaatcctacagaaccatacaatacaaaatgtgaaccctgatgtaaactataaactttaataataatgtatctattggctcatcaattataacaaatgtgccacactgatccaatatattaatagtagaggatatgttggggaaaaaggatcacatggaaactctgttccttctac

SEQ ID NO: 341596 - DNA, 416 bp, Homo sapiens
ttctcagtagtttgcatatttgaagatgttcattatggcctttttcataatagctaaagattgaaaatattctaaattttcaaaactaaacaattgaaataacgaagtattaaaaatagaattgagcatggtacttaagtgattataaaattatgcttatcatacttgaaaacactcactgtcttctggttacagtaatatggcagattaatattaggttgctgcaaaagtaattgtggttcttgccattacttgcagaaaataattacagcaaaagccacaattacttttgcrccaatcaaataaaacctgaaaactatcccctaggtacaactaataatcccagaagaagtacatctttttcaattgtttaggggtacaatcaagtatacaagaaaaaacaatttgtgctccaa

SEQ ID NO: 341597 - DNA, 416 bp, Homo sapiens
ttctcagtagtttgcatatttgaagatgttcattatggcctttttcataatagctaaagattgaaaatattctaaattttcaaaactaaacaattgaaataacgaagtattaaaaatagaattgagcatggtacttaagtgattataaaattatgcttatcatacttgaaaacactcactgtcttctggttacagtaatatggcagattaatattaggttgctgcaaaagtaattgtggttcttgccattacttgcagaaaataattacagcaaaagccacaattacttttgcgccaatcaaataaaacctgaaaactatcccctwggtacaactaataatcccagaagaagtacatctttttcaattgtttaggggtacaatcaagtatacaagaaaaaacaatttgtgctccaa

SEQ ID NO: 341598 - DNA, 416 bp, Homo sapiens
ttctcagtagtttgcatatttgaagatgttcattatggcctttttcataatagctaaagattgaaaatattctaaattttcaaaactaaacaattgaaataacgaagtattaaaaatagaattgagcatggtacttaagtgattataaaattatgcttatcatacttgaaaacactcactgtcttctggttacagtaatatggcagattaatattaggttgctgcaaaagtaattgtggttcttgccattacttgcagaaaataattacagcaaaagccacaattacttttgcgccaatcaaataaaacctgaaaactatcccctargtacaactaataatcccagaagaagtacatctttttcaattgtttaggggtacaatcaagtatacaagaaaaaacaatttgtgctccaa

SEQ ID NO: 341599 - DNA, 550 bp, Homo sapiens
gagtaatgcactatgctaaagagtttacacaaattatttcatttaacatcatgataaaacaataccatagatttttgtatcagtatcaaaatttcgaagtacttatataatctctaatcagtgattgaatcagaatctttcatctacattatctttactcatgcctttattttctacatacatacacacacacacacacacacacacatcttcatctgtaagayttaactaccataaggtacaacagaagtaaacaataaaacactgtaaaagcctgagccaccataagaaataattgtgagtttcttttaaatctggaggccaaaaaagctttcttagagaaaagtagaagcttggacccaaccatgccagtcctgtttacagtggtatatattattttatcactgctttttattttaaaaatatataactttacagaattgaacattatccattagataattataaaaatttttcatgtaattttatctatttattatctcaatttaatcttttcatattaaaatacatagttcaaattactatttaa

SEQ ID NO: 341600 - DNA, 550 bp, Homo sapiens
gagtaatgcactatgctaaagagtttacacaaattatttcatttaacatcatgataaaacaataccatagatttttgtatcagtatcaaaatttcgaagtacttatataatctctaatcagtgattgaatcagaatctttcatctacattatctttactcatgcctttattttctacatacatacacacacacacacacacacacacatcttcatctgtaagatttaactaccataaggtacaacagaagtaaacaataaaacactgtaaaagcctgagccaccataagaaataattgygagtttcttttaaatctggaggccaaaaaagctttcttagagaaaagtagaagcttggacccaaccatgccagtcctgtttacagtggtatatattattttatcactgctttttattttaaaaatatataactttacagaattgaacattatccattagataattataaaaatttttcatgtaattttatctatttattatctcaatttaatcttttcatattaaaatacatagttcaaattactatttaa

SEQ ID NO: 341601 - DNA, 473 bp, Homo sapiens
gatctggtggaggaaatttctaaccagcaaaacatttaagaggtgattggaatgctgttaaaaacattcagttttacatattcacaattgtaacttattttggaattggaacttattttttaaaaggaagtggagcataaaagttcagaaaatttgtagccttgtgatgtgatagaaaagaaaaacccattttctgaggagaaagtcaagccacctgcacaaatctgcgtaagtaatgaggagccaaatgttaaccaccaagacaatgggaaaatgtctccagggcacatcagaggtcttcacagcagcccctcccatcaaaggcccagaggcctaggaggaaaaaatagttttgtggtccagattgagggccttgctgctttgtgyggtctcaggacttggtgcctggatcccagccatggctaaaaaggaccaacatagagctcaggccatggcttcagatggtgcaatcc

SEQ ID NO: 341602 - DNA, 623 bp, Homo sapiens
tggctgttgtctcctttccattacacttgagaacccaggaagataagttaataaccttttcagcttaacttcatttattctaataattgtaaatgatattcagaaatgctattttttctgggtttaattctaaaaatctttcctccataccctaaaaacctrtcttctgtgctttctgagaaatagcaagtgctttaatggggcaaccaccttgactacttattggaagtgatttcctacacagcctggttgctatgaatcagtattcatgtcataaaaaatattagattatttgagggaaaaatatcactatagaaatctttaactaggttactaatcgtatgctattaaagacatgtaccacacattcaggatttaaaacattatcttttgggacatactgacaggcagtcaggaaataaattttcagttagaatgtgaccacccaaatactgtcttattgactgacagttccattatgaatttaagctggggatataagtagtcaatgaactacacatttatcactacctgcagttgtggacaagaggaaaagaacttgttaacatgggtaggtggaggttacagtttccaggagctattgatttagttctgtctgcaac

SEQ ID NO: 341603 - DNA, 596 bp, Homo sapiens
tggtcttagaggtgtttgagtatgagttttctctctgcaacaatttcattatgcagactccaggcagcaagcaccctgcaccagtatcagggcctataatggctggccaaggggttctctggtggctaggactgcaaaagtctacagtgaaaatgtggaccactcaggatttctctcttgcctttcccccacactasacagcctcttctagctcccagctgatcctagccagctggctgcctcacttagttctctagactaactgcattgtttctctgtccttccatgccttagatgtttcttgtcatttccctgctgaatggtccttattagatgctccatttcatctgtgattatctacttgttgttttgtttcctttttgttgactcaactacctctggtcagccatctagaagggctcctcccatcagaatttatgtttctgtaagcagttttaatgattctttgcatggaaattcatgaaaaagaatgtatattattcatgttggaaacacaataaactgttatttatgcaaagacggtatcaagaattaggaaagacattccacattgttactttagaaagaacaaagga

SEQ ID NO: 341604 - DNA, 596 bp, Homo sapiens
tggtcttagaggtgtttgagtatgagttttctctctgcaacaatttcattatgcagactccaggcagcaagcaccctgcaccagtatcagggcctataatggctggccaaggggttctctggtggctaggactgcaaaagtctacagtgaaaatgtggaccactcaggatttctctcttgcctttcccccacactacacagcctcttctagctcccagctgatcctagccagctggctgcctcacttagttctctagactaactkcattgtttctctgtccttccatgccttagatgtttcttgtcatttccctgctgaatggtccttattagatgctccatttcatctgtgattatctacttgttgttttgtttcctttttgttgactcaactacctctggtcagccatctagaagggctcctcccatcagaatttatgtttctgtaagcagttttaatgattctttgcatggaaattcatgaaaaagaatgtatattattcatgttggaaacacaataaactgttatttatgcaaagacggtatcaagaattaggaaagacattccacattgttactttagaaagaacaaagga

SEQ ID NO: 341605 - DNA, 509 bp, Homo sapiens
tactttttcctttaaatgtatctatagagttcgttggataggatactttaatagttttcattctgagtgcatactcagtctagccttcacatgatttcttcagctttaatcagtttcaatggtgtctgagtgcactctgatggagcctggattctcaaaatgacaccatgctgcagctgcttggtcttagaggtgtttgagtatgagttttctctctgcaacaatttcattatgcagactccaggcagcaagcaccctgcaccagtatcagggcctataatggctggccaaggggttctctggtggctaggactgcaaaagtctacagtgaaaatgtggaccactcaggatttctctcttgcctttcccccacactacacagcctcttctagctcccagctgatcctagccagctggctgcctcacttagttctctagactaactgcattgtttctctgtccttccrtgccttagatgtttcttgtcatttccctgctgaatggtcctt

SEQ ID NO: 341606 - DNA, 533 bp, Homo sapiens
gcaaagccacaggagtggacctccccaaggctgtgggagcccacctrttacatcagtgtgccccagatataagacctggagtcaaaggagatcattttggaactttaaggtttaatgactgccctatgggatttggacttgcgtggagcccatagcgattttgttttggccaatttctttcatttgaaataggagttatttaccaatgcctgtacccccattgtttcttggaagtaatttggttttgattttacaggttcataggcagaaggaacttgccttgcctctgatgagactatggacttggacttttgggttactgctaaaatgagttaagactggggaactgttgggaaggagtaattgtgttgtgaaatgtgagaaagactaaatttgggagggatcaggggcagaatggcatggtctggctctgtgtccccacgcaaatctcatcaattgtaatgtgaattgtaaactccatatgttgagggagggacctcgtgggatatgattagatcattggtgtgtttccc

SEQ ID NO: 341607 - DNA, 533 bp, Homo sapiens
gcaaagccacaggagtggacctccccaaggctgtgggagcccacctattacatcagtgtgccccagatataagacctggagtcaaaggagatcattttggaactttaaggtttaatgactgccctatgggatttggacttgcgtggagcccatagcgaytttgttttggccaatttctttcatttgaaataggagttatttaccaatgcctgtacccccattgtttcttggaagtaatttggttttgattttacaggttcataggcagaaggaacttgccttgcctctgatgagactatggacttggacttttgggttactgctaaaatgagttaagactggggaactgttgggaaggagtaattgtgttgtgaaatgtgagaaagactaaatttgggagggatcaggggcagaatggcatggtctggctctgtgtccccacgcaaatctcatcaattgtaatgtgaattgtaaactccatatgttgagggagggacctcgtgggatatgattagatcattggtgtgtttccc

SEQ ID NO: 341608 - DNA, 533 bp, Homo sapiens
gcaaagccacaggagtggacctccccaaggctgtgggagcccacctattacatcagtgtgccccagatataagacctggagtcaaaggagatcattttggaactttaaggtttaatgactgccctatgggatttggacttgcgtggagcccatagcgattttgttttggccaatttctttcatttgaaataggagttatttaccaatgcctgtacccccattgtttcttggaagtaatttggttttgattttacaggttcataggcagaaggaacttgccttgcctckgatgagactatggacttggacttttgggttactgctaaaatgagttaagactggggaactgttgggaaggagtaattgtgttgtgaaatgtgagaaagactaaatttgggagggatcaggggcagaatggcatggtctggctctgtgtccccacgcaaatctcatcaattgtaatgtgaattgtaaactccatatgttgagggagggacctcgtgggatatgattagatcattggtgtgtttccc

SEQ ID NO: 341609 - DNA, 533 bp, Homo sapiens
gcaaagccacaggagtggacctccccaaggctgtgggagcccacctattacatcagtgtgccccagatataagacctggagtcaaaggagatcattttggaactttaaggtttaatgactgccctatgggatttggacttgcgtggagcccatagcgattttgttttggccaatttctttcatttgaaataggagttatttaccaatgcctgtacccccattgtttcttggaagtaatttggttttgattttacaggttcataggcagaaggaacttgccttgcctctgatgagactatggacttggacttttgggttactgctaaaatgagttaagactrgggaactgttgggaaggagtaattgtgttgtgaaatgtgagaaagactaaatttgggagggatcaggggcagaatggcatggtctggctctgtgtccccacgcaaatctcatcaattgtaatgtgaattgtaaactccatatgttgagggagggacctcgtgggatatgattagatcattggtgtgtttccc

SEQ ID NO: 341610 - DNA, 583 bp, Homo sapiens
accctgaatggagacaaacgcctcccccagtctctgccacatctggtactttccgactgcgacgagggagtcgatttacctggagaaaggagtgcctggctgttatggaaaggtatgtgtctcctttttctacgaatgatctcccaaacttagggaagacatcaactctggatagactgggacagttttcatttcaaacaagtaacttggtatcttggttctatctctaaaagtactttagaatatcataaatgctgtattatagaaataaggtsatcttagcattgagaattcataaagctggagttagcatctgtcaatttattttacttataatagtgtccccagtaatttaagaaatgttggaataaatattttttgaattcagatctttgtattatattttggaaaaactctttgaagtcttcttttcatcaaaaataatgaataattgtataggagactactgagatttaactttcctttaataaggagtatggtctaagtaagctttgtcccaaaggttaaaaatacttatttttgactttgttttagtaatttatcctctcattctgtcaccagt

SEQ ID NO: 341611 - DNA, 576 bp, Homo sapiens
gggcaaggaatcagcattaaaaattttagctygagagtatctctttcccccaaatttaagcatctaaaaatgaggtcttagaataaaagtgtgtcttcatgaacaaaaatagcatcacaaccacaatactataacgaaccaaaattatatcatagttttaaatttggtgtcactgctgttaacctgacatgtataaaatctgaattagagacatgcatctctagtaaccaagtggattttattcaaggatgctatacatcctgggagaactagcatggaagagacaaatcagcttgtaaagcgatttctagaacattgcttgaggtttctgtaatttcagtttcttggtactcactgcattttggaattcttcccaggacagtttattagtacatagactttggtttcagtctctttcctttctcctctttacttttaattttttcagtgaaggttaagactaacagttccagaaactaaattctatatttaactgcagtctgggtgtggttcagacaactgcagtgcaacttgcctagtgttttgccagtcatcaaaaccctgacctgcaaagaa

SEQ ID NO: 341612 - DNA, 498 bp, Homo sapiens
cttcttcatatctcatatcaaagagcccatgtgtctgaccaagatggtggttatatttggataggaaattcagcgaatgtttttccagcttctttacattcaactctgatagctttgtagcaagtggctaagtcagtgatgatgaatttattaagtagaatatcattgtaagatgacagatatggcctatgtaaatttgaagaaaatataaatgaaataatgttaagcaaaagaagaaacagtatattattataataacgtaaaaagccataaatatccaaagataaatattgagagaaataaataatttaccttatatatttaatagtctgtacatttttttcttgtcattttttttttttctgatgacatagtggttaaaaacacagactttggagttagaacaactggtgctccaggccctaccctcttactcaccagctatgtgtccttatggaaattgcttrttataaatgactttaataaccatacctatct

SEQ ID NO: 341613 - DNA, 545 bp, Homo sapiens
agccagaagttggttcttttaaagaaaaattgacaaatattaatttttttaagtacacagggaattaaaaggatattatagatgctgcaaatattagaaaaatagaagatactctcaactttctcaaaagcaacagtaaagggatttgtttagaagacaaatccacaagctcgggaagaccaggagaggagccaatgaaatatttgaacccagaaagcagatggagaccttggaagatttagcagagctgaaaaagttgaatctcactgagccagtggtggagaaagccagtgataagcaaatcaatttacagtgcataatcccctgaaaagcatagatatggtagcaacagaaagcattctggaattgggcgtgaagggagggttaccaaagagttgaatgtctgttgggtccccttcctataccgaccggcttggtgatgcccttcctccattcatcagtgcattagagatttcttttctggagagagaaraagtgtgtagtctaggtgtcaggtgaatcccctaagtgagcatttacattct

SEQ ID NO: 341614 - DNA, 606 bp, Homo sapiens
tattatttaataaataaaatttgcttcatagattagctcttgggaaaatggggcccaagaaagagaatgtgataataacaagaggtatccttactggtggagaggttgagaagggagccactggcattgtcacttctctgctgctacttttagtcctgtgggtcgaaaccagaagaatgaatgttgaaatttcaggtacctgatagtaagtagaaaagacatatggaaaaaggcagtggagtcctcttttgagtactagaatttcatgtcctcctcaggcaggctcactcatgattttagtgttaataatgtacatagtttttaatacaggttctgtttctcccatactgcaaggcaaaatgcaatgcaatgaccayttacaatattgctgtgctctgttaaaactagttaatgttccttgcctgtgctaatgtacaaggccactgtattttataagggtgaggaaactctttacttatgacctgtaattctcaagattattatatgtcctagaataaagctgattcataattctactaggtggggcaaagggattacattttcagtctttcttgccacctctttccagcatttaactaaattatg

SEQ ID NO: 341615 - DNA, 594 bp, Homo sapiens
tttggctaagtggatattttctaatgtagtattttaatttttaataattttttactgtatatttcagttatttcattaattgtcgctctaaggctcatcatattttaacttatcaaaatctgcttcacatttatactaatttaattccagtgaaatatagaaacattatccctgtatagctctatttcaatacctctttatgtgatattattgatgtattacatctatgaatgttacaaacataagataacattatgattattactttatataattctatctcttttaaagaagcaaagagaagaaaaggaacaagtatacatttacagtttttgttatttaccatttatctatttaccattacaatttattatttaccagaaattttttatttataatttcttgttctcctcatttgttcctgtgggttcaaatttaacatctagagttaaactcctagatgttgattccttagcttaaaatacatttgctcctctccccccacttttgctgttattggcaaatatattgcatttccctatgttatagacccaacaataygttacatacatattgtttcatatgattgctttt

SEQ ID NO: 341616 - DNA, 593 bp, Homo sapiens
gtttgggtccaaaattaggtggtgttacttacacaactctgtgaatatactaaaagccactaaactatatactttaaataggtaaatttcaggctgggcacagtcgctcacgcctgtaatcccagcactttgggaggcggaggcgggcagatcacgaggtcaggagatcaagaccatcctggctctactaaaartacaaaaaattagtcaggcatggtggcgggtgcctgtagtcccagctacttgggaggctgaggcaggagaatggtgtgaacccaggaggcatagctttcactgagctgagattgcgccactgcactccagcctgggcaacagagcgagaccccatctcaaaaacaaacaaagaaacaaaaaaacccacaaataaataggtaaattttataatatgtgaattatatctcaatgaaactgttacaaaaatgaaaggcaagatgtgtgctttatctctttacttatgaaattttgaaataatgaacaccctccaagggtgactatgattctttttctttttttttttatgggggaaggagagattggccttttaaatttttatgtatttgctttgttgacca

SEQ ID NO: 341617 - DNA, 606 bp, Homo sapiens
atgcctaccatcttaaaatagtgagttttggctcttcctttccaatatttatatttctgactttttttggtcttatttcattaaccaggatgtcaaatttstatactgagtagtaacaatgaaagtgttcattcttgtcttgtgccttgttttaataggaatgcttctaaagttgcattatcaagtatgatatttgctgtaaatttttaataaatatttttgtcatcaaaaggacattcctagatattcctaatagctttttaccatgaatgattacagattttgttgaattattttttgacatcttttaagatgatcaaatattttcttatcctttaatgtggtaaattacattgaaatagttttaaaaataaacattgatgcataacatgcattctaaagtatgcagctcagagaattattacaaagtgtaagcattcatgtagccaccacccatatcaagacaccaaacatattcagcaacccagaaatcacttatatctcttttcattccctattcccatcctcctccataagagaaaccactagctgacttccaacaccattgattcgttttgtctatttttgaactttatataaatgtaa

SEQ ID NO: 341618 - DNA, 606 bp, Homo sapiens
atgcctaccatcttaaaatagtgagttttggctcttcctttccaatatttatatttctgactttttttggtcttatttcattaaccaggatgtcaaatttgtatactgagtagtaacaatgaaagtgttyattcttgtcttgtgccttgttttaataggaatgcttctaaagttgcattatcaagtatgatatttgctgtaaatttttaataaatatttttgtcatcaaaaggacattcctagatattcctaatagctttttaccatgaatgattacagattttgttgaattattttttgacatcttttaagatgatcaaatattttcttatcctttaatgtggtaaattacattgaaatagttttaaaaataaacattgatgcataacatgcattctaaagtatgcagctcagagaattattacaaagtgtaagcattcatgtagccaccacccatatcaagacaccaaacatattcagcaacccagaaatcacttatatctcttttcattccctattcccatcctcctccataagagaaaccactagctgacttccaacaccattgattcgttttgtctatttttgaactttatataaatgtaa

SEQ ID NO: 341619 - DNA, 554 bp, Homo sapiens
tggccaaaataggtaatttttaaagagcagttttaggttaatggaaaagttgagcagaaattttccatatacctcctgacttcccctttatcattatgtaatgccctactttgtctattttgatctttgttggtttaaagtctgttttgccagacagtaggattgcaacccctgcttttttctgtttaccatttgtttggtagatttttctccatctrtttattttgagcctgtgtatgtcattgtatgtgagatggatctcttgaagaccgcatactggtgggtcttggttccttatccagcttgtcacttttacatttaagattaatattgatatgtgtgtatttgatcctgtcatcatcatgttagccggttattttgtcaacttgtttatgtggtcgctttatagtgtcactggtttgtgtacttcagtgtgtttttgtagtggctggtaatggtctttcttgtccatatttagtgccttcttcaggagctcttgttaggcaggtctggtggtaacaaattccctcagcatttgcttgtctaaaaagaat

SEQ ID NO: 341620 - DNA, 614 bp, Homo sapiens
aacatctcaattttaaaaaatgacaaaaacaaaaaattacagagattttacataatatttttcagtcagccattaatgtgcataaagggaacatttaatcaataagctttgttttataaccagtcctacaaactaattagggtacatttgataaataattggatgataaaggattattgccttcatcagagcttgtctacgtaacaactttggttagcaagccagagacattctgcccctttgccttccagactgtcagtgttgataattacttcttgcgtgtgctttgtgccttcctctgacaagtaccaaacagttctttagcatattatcatatcctctatacatccaacactacatctgatgcactaccaatctggaatccatttttactccwctttataatccgttgtcatggaatgagaaacacttggatgaacaatgctaattaagagtgcaatctgttaaccatttttttctgcctaattaaaaccaggagtgtatttgtttttggggttttttatttcactcaaggaaaatcaatagcagtaattgttaagcccaaggaatcttcctagaatagtaaaacctgtgggaataaaagtagctttccc

SEQ ID NO: 341621 - DNA, 312 bp, Homo sapiens
tctgacaacgcaagactctctctctctctctctctctctctctctctmtatatatatatatatatatatatatatatataaaattttagtatttacaagtgtctatgataaaactcaggacctgttaaattgtaacaagttctgaattagcagggcctgaattactgagatttttctcatctgaggagacccttccctgccaaaaccaagaaaataaactacaaaagcatcccctgtcccaaaagtctacattttaaaatacctattctgctctgggaggtggtttagccccctaaataagaaacttgtgca

SEQ ID NO: 341622 - DNA, 465 bp, Homo sapiens
aagcttgttttgtcaccatagaggcagctgccagagtctacacagcagaatttaaaactaaagatatagtaaaatcttacccaacaaataggatatttaaaagaagaaactaaaaaaaaaaaaaattcaagtgaggtttcacatttcaagaaaaagtcagcaaaaaagcatgatttaattgtcagaaagttaggcctcagtctgcacaccatggagaaatgagctcctagttcaataggaggargaaaaggcccaagggaccagtttgattgtaaacaggtcatttttccatacctaagacgatgtggaaagtacatctttggaaagagtgtcaacaatgctacccccatatgaagggtatagtttgaaggctgttctagtcagaagcactgagagaaaataaatggtcttctaaattattgtttcatttggttacatgtgaactcaattccctgaaccaaaggt

SEQ ID NO: 341623 - DNA, 465 bp, Homo sapiens
aagcttgttttgtcaccatagaggcagctgccagagtctacacagcagaatttaaaactaaagatatagtaaaatcttacccaacaaataggatatttaaaagaagaaactaaaaaaaaaaaaaattcaagtgaggtttcacatttcaagaaaaagtcagcaaaaaagcatgatttaattgtcagaaagttaggcctcagtctgcacaccatggagaaatgagctcctagttcaataggaggaagaaaaggcccaagggaccagtttgattgtaaacaggtcatttttccatacctaagacgatgtggaaagtacatctttggaaagagtgtcaasaatgctacccccatatgaagggtatagtttgaaggctgttctagtcagaagcactgagagaaaataaatggtcttctaaattattgtttcatttggttacatgtgaactcaattccctgaaccaaaggt

SEQ ID NO: 341624 - DNA, 465 bp, Homo sapiens
aagcttgttttgtcaccatagaggcagctgccagagtctacacagcagaatttaaaactaaagatatagtaaaatcttacccaacaaataggatatttaaaagaagaaactaaaaaaaaaaaaaattcaagtgaggtttcacatttcaagaaaaagtcagcaaaaaagcatgatttaattgtcagaaagttaggcctcagtctgcacaccatggagaaatgagctcctagttcaataggaggaagaaaaggcccaagggaccagtttgattgtaaacaggtcatttttccatacctaagacgatgtggaaagtacatctttggaaagagtgtcaacaatgctacccccatatgaagggtatagtttgaaggctgttctastcagaagcactgagagaaaataaatggtcttctaaattattgtttcatttggttacatgtgaactcaattccctgaaccaaaggt

SEQ ID NO: 341625 - DNA, 465 bp, Homo sapiens
aagcttgttttgtcaccatagaggcagctgccagagtctacacagcagaatttaaaactaaagatatagtaaaatcttacccaacaaataggatatttaaaagaagaaactaaaaaaaaaaaaaattcaagtgaggtttcacatttcaagaaaaagtcagcaaaaaagcatgatttaattgtcagaaagttaggcctcagtctgcacaccatggagaaatgagctcctagttcaataggaggaagaaaaggcccaagggaccagtttgattgtaaacaggtcatttttccatacctaagacgatgtggaaagtacatctttggaaagagtgtcaacaatgctacccccatatgaagggtatagtttgaaggctgttctagtcagaagcactgagagaaamtaaatggtcttctaaattattgtttcatttggttacatgtgaactcaattccctgaaccaaaggt

SEQ ID NO: 341626 - DNA, 586 bp, Homo sapiens
tgggcatggtaaagctgttgtactttctttccagttttagtgcatgtgttgcagaactgaggacatagctgctgtactttctcgttaaaaattcttcctgaatatataagtgttgatgttcctcattatgaaatcgcttttttagggccagtggttctcataytttaggctttggatccctggatgtctgcagagatttggcagaggtctgcaaataaacatgctaagcttgatgtaaatgaattgatctcacatgtctggacaatgatttttcagcctgttttcagtatgcttttatgatttttaaaaatttcacttatttaaaagcaatacacagttaagaaccactatttgttgttgttgttgttgtttgagacagagtcttgctctgtcacccaggctggagtgcagtggtgcagtcttggctcaccgcagcctctgcctcccggaaacaagtgattctcctgcctcagcctcccgagtaactgggattacaggtgcatgccagtacaaccagctgttatttttatattttgtatttttagcagagaacagggtttgtatttttagcagagaacagggtttc

SEQ ID NO: 341627 - DNA, 584 bp, Homo sapiens
atgcacaattccattattgctgtgaatgtgggggccaagttatttatcgtttaataccatatccctctcattgtttcattgtcaaatgtgaccagctggaggaaaaacacctggaatttctctctgatycctggtctgtactcataagttgtttgctactcactaccctttattcatgccttccccgacagtacagcagcagaagggctgaagagaaattaacttcatcttaggttccacttgccattgagattgcccaccctccaccaaatttattttcctaaaaatggattaaaagtaacaagaagctatttctcctcctttttaataaaaacttactgaggatgagtaattatgtcttcttttcttattagaaccatagatgatgctgggagatatcagatagcgacttaattacccataccttttgtgcacacattcaagtgtacacacagtgacttaattatcagacttacacattatctaccgcatttctttaatcccagcgtggctgttaccacttaacacagaaggcgtactgtatggacattcatggaatgggcattcgtttaaaaggaggtaaa

SEQ ID NO: 341628 - DNA, 584 bp, Homo sapiens
atgcacaattccattattgctgtgaatgtgggggccaagttatttatcgtttaataccatatccctctcattgtttcattgtcaaatgtgaccagctggaggaaaaacacctggaatttctctctgattcctggtctgtactcataagttgtttgctactcactaccctttattcatgccttccccgacagtacagcagcagaagggctgaagagaaattaacttcatcttaggttccacttgccattgagattgcccaccctccaccaaatttattttcctaaaaatggattaaaagtaacaagaagctatttctcctcctttktaataaaaacttactgaggatgagtaattatgtcttcttttcttattagaaccatagatgatgctgggagatatcagatagcgacttaattacccataccttttgtgcacacattcaagtgtacacacagtgacttaattatcagacttacacattatctaccgcatttctttaatcccagcgtggctgttaccacttaacacagaaggcgtactgtatggacattcatggaatgggcattcgtttaaaaggaggtaaa

SEQ ID NO: 341629 - DNA, 572 bp, Homo sapiens
tcactgctcttatttagactttgcatcctaggattagcaaataacataagacaaacatgagcataattagcaaaaatcttttccagtcaaagagtatcccccaggagttagggtccaagtaggagagatgatcttgtactcccttccacatggctgttgggtgtgcagatctgtggtgtgaacagattttaaaattttagttttaacttgcttcatgtctgcagttaaactgttataaaagkttccccagaggtgttgtttcacctcaccctagctatacattaattggttccatggtagagaagtgacacaggtatgtttatgttgccattcacattttcactgttgacagaatgctagtgcatcttgtggctctcccgcatactctttccttactgtaggagaagttcatcacatatatttttggccagattatctacaaaagcagttgtttgtactgattcagtaatagatacaacagcaatgctaacagttgccataatgactatggctgagcctgtaaagaccataagtgtaaatgtgaatcttttgtgtctgacctgggacagggc

SEQ ID NO: 341630 - DNA, 558 bp, Homo sapiens
ccctaaaataagcagtgatcattaattcagccacgagggaagggtttatgatggattattaataataatactgtataattatgggtaaatttattaggtccttataataatccagttgcatagacatgttaactattatcaccatagctgaagaaacaaacatagagaggttattattactatatgtctctctctctctctctctctctctctctctctctctctctctctctatatatatatatatatatatatatatatwtttttttttttttttttgagatggattctcgctctgtcacccaggctgcagtgcagtggtgcagtcttggctgactgcaaccttcacctcccgggctcgagcaattctcctgcctcagcctcccgagtagctggcactacaggcacgtgccaccatacccagctaattttttgtatttttagtagagacggggtttcaccatgttatccaggatgaggatgatctctatgtcctgacctcatgatccgcccacttcggcctccctaagtgctaggataacaggcgagagccactgc

SEQ ID NO: 341631 - DNA, 552 bp, Homo sapiens
tttatttttcctgtcgtaataggattcacatttgaccctgcactgctctctagggttaccatatctcactcttcccttcactgttagtcttgaaacagtcttccaatttcactttatccatttcctggccttctattcattgttcaacatattgaaayagaaattctgccccaccccccaatccagtgaattttttctggcaaagggccctgtgaacttccaaattactaaattccttagtcacttcatcttttaccttgaatcctggcagtaatttataatgttgactattgccttcctaaatttttattctaccataacctctctgatattattctttcctggctcacttctaccttttctgattgctccttctttgtgttctttttagcccttttttttctgtaaacaccttaggtattgttccttaggcttccttcttttctctccttaggactctccctagctgatctcatccattctgattgctgcagttagcactcagatctctctctccagctcaaacttctttgcagaagttccttgtactac

SEQ ID NO: 341632 - DNA, 552 bp, Homo sapiens
tttatttttcctgtcgtaataggattcacatttgaccctgcactgctctctagggttaccatatctcactcttcccttcactgttagtcttgaaacagtcttccaatttcactttatccatttcctggccttctattcattgttcaacatattgaaacagaaattctgccccaccccccaatccagtgaattttttctggcaaagggccctgtraacttccaaattactaaattccttagtcacttcatcttttaccttgaatcctggcagtaatttataatgttgactattgccttcctaaatttttattctaccataacctctctgatattattctttcctggctcacttctaccttttctgattgctccttctttgtgttctttttagcccttttttttctgtaaacaccttaggtattgttccttaggcttccttcttttctctccttaggactctccctagctgatctcatccattctgattgctgcagttagcactcagatctctctctccagctcaaacttctttgcagaagttccttgtactac

SEQ ID NO: 341633 - DNA, 552 bp, Homo sapiens
tttatttttcctgtcgtaataggattcacatttgaccctgcactgctctctagggttaccatatctcactcttcccttcactgttagtcttgaaacagtcttccaatttcactttatccatttcctggccttctattcattgttcaacatattgaaacagaaattctgccccaccccccaatccagtgaattttttctggcaaagggccctgtgaacttccwaattactaaattccttagtcacttcatcttttaccttgaatcctggcagtaatttataatgttgactattgccttcctaaatttttattctaccataacctctctgatattattctttcctggctcacttctaccttttctgattgctccttctttgtgttctttttagcccttttttttctgtaaacaccttaggtattgttccttaggcttccttcttttctctccttaggactctccctagctgatctcatccattctgattgctgcagttagcactcagatctctctctccagctcaaacttctttgcagaagttccttgtactac

SEQ ID NO: 341634 - DNA, 552 bp, Homo sapiens
tttatttttcctgtcgtaataggattcacatttgaccctgcactgctctctagggttaccatatctcactcttcccttcactgttagtcttgaaacagtcttccaatttcactttatccatttcctggccttctattcattgttcaacatattgaaacagaaattctgccccaccccccaatccagtgaattttttctggcaaagggccctgtgaacttccaaattactaaattccttagtcacttcatcttttaccttgaatcctggcagtaatttataatgttgactattgccttcctaaatttttattctaccataacctctctgatattattctttcctggctcacttctaccttttctgattgctccttctttgtgttctttttagcccttttttttctgtaaacaccttaggyattgttccttaggcttccttcttttctctccttaggactctccctagctgatctcatccattctgattgctgcagttagcactcagatctctctctccagctcaaacttctttgcagaagttccttgtactac

SEQ ID NO: 341635 - DNA, 466 bp, Homo sapiens
tgttttatagatgaggatgttatggcccagagaagctaagtaacttattcaaggtcacagctagtaatgctgaagctagaatttgaacaaagatctktctgactccaaatttactacattttattgtattatgtctttataaatcacaaaaatgtgtacaatctctatgtcataaatttaatgtgtagtaaggatttatctatctctgagtcttccataaaccaagttaagtcttattgttaggctctatctgtcctaactctcaggtttaaaaaaaaaaaaagaccacaatagaccagaattgcttgaacccaggaggcagaggttgcagtgagccaagattgcaccgttgcactccagcctgggcaacagagcaagactccatctcaaaaaaaagaaaagaaaatagaacaacaacaacaaaacaaaactacaaaaaggaaaatgggaactttagaaagtttca

SEQ ID NO: 341636 - DNA, 466 bp, Homo sapiens
tgttttatagatgaggatgttatggcccagagaagctaagtaacttattcaaggtcacagctagtaatgctgaagctagaatttgaacaaagatctgtctgactccaaatttactacattttattgtattatgtctttataaatcacaaaaatgtgtacaatctctatgtcataaatttaatgtgtagtaaggatttatctatctctgagtcttccataaaccaagttaagtcttattgttaggctctatctgtcctaaytctcaggtttaaaaaaaaaaaaagaccacaatagaccagaattgcttgaacccaggaggcagaggttgcagtgagccaagattgcaccgttgcactccagcctgggcaacagagcaagactccatctcaaaaaaaagaaaagaaaatagaacaacaacaacaaaacaaaactacaaaaaggaaaatgggaactttagaaagtttca

SEQ ID NO: 341637 - DNA, 466 bp, Homo sapiens
tgttttatagatgaggatgttatggcccagagaagctaagtaacttattcaaggtcacagctagtaatgctgaagctagaatttgaacaaagatctgtctgactccaaatttactacattttattgtattatgtctttataaatcacaaaaatgtgtacaatctctatgtcataaatttaatgtgtagtaaggatttatctatctctgagtcttccataaaccaagttaagtcttattgttaggctctatctgtcctaactctcaggtttaaaaaaaaaaaaagaccacaatagaccagaattgcttgaacccaggaggcagaggttgcagtgagccaagatygcaccgttgcactccagcctgggcaacagagcaagactccatctcaaaaaaaagaaaagaaaatagaacaacaacaacaaaacaaaactacaaaaaggaaaatgggaactttagaaagtttca

SEQ ID NO: 341638 - DNA, 544 bp, Homo sapiens
tgatcaggagcagggaggagacctggatctgtccctaaccagccgtgggatcttgtgcaagttactccttgaggctcagttttcctatctttaaaatggggataatggcagtagtcctctcatgacatgagataatgctacttggcatggcgtgcggcatgtaagcgttcactatggtagtatgygcccctcagctgttttcctacatgtcctgtggcaagccatcgagagcagcatgcagaatgtgtgactgtatttctgagcctttctgagtcaccacccaaggatgtctgctttccttctgaaaaatgcctttgttgtgaaggggcagccaaacaaattgagaagagcgaaaccaaaggcacattcaagggcaagggcaacctcaactggggtttcagcacaactgtgtcatgcccaggtgctggctggtgtttgaggggatgctgaggagctctgacctttcagcttgttctccccgataaggtgctgccccaggctctgaacaactgcagtgtgtgcacgtgtagccttgatgcgttgc

SEQ ID NO: 341639 - DNA, 553 bp, Homo sapiens
ttaaactttagttgcctcttcagggaaatatgagtgggaatggtaacattggaggatgtgaagactaaatgagataatgtaygtgaaatgcgtagtaaaattgcggtagaaacatttaatgttatcatcaatcatcgctatctttatgtctcagtgcaatattctctaactctacagagcacatcttactgattgggctgagatcttcaaaggagcgtctcttaggatatgtttttgtccacaaggtcttctctctaagatggaggggaactttacctaggcaatatgaaagagatagggagagttaaagcaatggaatccactctctttaagaagagttttgatgtaactaattaggtaaggattttcctggttaggcctggatctctaattccaggaaagagattccaagaattaaggaaaacaaataggaaatgttgaggagggtctgaactattcctatcaagaagtccatgtcaacctggatggcattcttaaacagccccagccaaacaagtagtagttcccaatctcctccttgtttcctcccatt

SEQ ID NO: 341640 - DNA, 553 bp, Homo sapiens
ttaaactttagttgcctcttcagggaaatatgagtgggaatggtaacattggaggatgtgaagactaaatgagataatgtacgtgaaatgcstagtaaaattgcggtagaaacatttaatgttatcatcaatcatcgctatctttatgtctcagtgcaatattctctaactctacagagcacatcttactgattgggctgagatcttcaaaggagcgtctcttaggatatgtttttgtccacaaggtcttctctctaagatggaggggaactttacctaggcaatatgaaagagatagggagagttaaagcaatggaatccactctctttaagaagagttttgatgtaactaattaggtaaggattttcctggttaggcctggatctctaattccaggaaagagattccaagaattaaggaaaacaaataggaaatgttgaggagggtctgaactattcctatcaagaagtccatgtcaacctggatggcattcttaaacagccccagccaaacaagtagtagttcccaatctcctccttgtttcctcccatt

SEQ ID NO: 341641 - DNA, 553 bp, Homo sapiens
ttaaactttagttgcctcttcagggaaatatgagtgggaatggtaacattggaggatgtgaagactaaatgagataatgtacgtgaaatgcgtagtaaaattgcggtagaaacatttaatgttatcatcaatcatcgctatctttatgtctcagtgcaatattctctaactctrcagagcacatcttactgattgggctgagatcttcaaaggagcgtctcttaggatatgtttttgtccacaaggtcttctctctaagatggaggggaactttacctaggcaatatgaaagagatagggagagttaaagcaatggaatccactctctttaagaagagttttgatgtaactaattaggtaaggattttcctggttaggcctggatctctaattccaggaaagagattccaagaattaaggaaaacaaataggaaatgttgaggagggtctgaactattcctatcaagaagtccatgtcaacctggatggcattcttaaacagccccagccaaacaagtagtagttcccaatctcctccttgtttcctcccatt

SEQ ID NO: 341642 - DNA, 551 bp, Homo sapiens
tttacacgtgcttcattgtaagttgccttaccattattgtgtgatattttaacagaaccacgtaatggaatcacaggccatcctggagaggtgtcatggttcactggaatgaacatggatgctgcattcagattgacatgggttgaaacccagtgtcttcatcagctcagcctgccatacaatgttgtatggtattcatagaccaggtagcttaaataacaggaatctattttccacagttctgggggctggaagttaktgatcggagtgccagtacatccaggtcctggtgagggctctcttcctggcttgcagattgccaccttcttcaaggtagacagaaaagaagcaagctctctgatgtctcttcttataaaggcatgagggctctactttactgacctcatctaaacccaatcacctcccaaagggcccatctccataatcacattgagggttggggcttcaacacaggaatatgtgggggacacaaacgtccagtctgcaacatccagccttgccactgattagctggggctttgggggaggca

SEQ ID NO: 341643 - DNA, 574 bp, Homo sapiens
ggagtgaggctacttcctgaaatgagcttttcagaataccttgtggatccagaccccagacaatcagatttcaaggacccatagtatttccaaaacactgggggtggggactcatgaggttaccaccctcttcagccaagggagaatttcatagctaccatcactccctttcataaaagaaaggacatcttagtatcccaaaggaaaaaggaacattatctcagaatatagaagagttcttttcaggcaatggcagctggcaacttgaaactattaataatcatggctacattgcacttttttttttttttctggctcctttcagatcaccactcmtctgtggctcactatttgggaaccactgacctaggggttctttcatcctttggccatcaactaagaagctggaggaggaggaggaggaattgtttccctgaaccttaaaaaaggtccaggaagcaaagctgagtccctccgcattccttcaataataaaaaaaaaaggcactgggaaacccttggacagagctgagagcttcatgcttgcagagcagtttgggaagtcaaaggcacac

SEQ ID NO: 341644 - DNA, 574 bp, Homo sapiens
ggagtgaggctacttcctgaaatgagcttttcagaataccttgtggatccagaccccagacaatcagatttcaaggacccatagtatttccaaaacactgggggtggggactcatgaggttaccaccctcttcagccaagggagaatttcatagctaccatcactccctttcataaaagaaaggacatcttagtatcccaaaggaaaaaggaacattatctcagaatatagaagagttcttttcaggcaatggcagctggcaacttgaaactattaataatcatggctacattgcacttttttttttttttctggctcctttcagatcaccactcctctgtggctcactatttgggaaccactgacctaggggttctttcatcctttggccatcaactaagaagctggaggaggaggaggaggaattgtttccctgaaycttaaaaaaggtccaggaagcaaagctgagtccctccgcattccttcaataataaaaaaaaaaggcactgggaaacccttggacagagctgagagcttcatgcttgcagagcagtttgggaagtcaaaggcacac

SEQ ID NO: 341645 - DNA, 630 bp, Homo sapiens
ccaacttctcctggctctcctggtcatgagctatttatttgtcctctgcttctgtgatatcctcccaagtgacagaagcagctagatgcctccaccttctgcttccttattaacatatcagtatcatgaagacaccattgtgcctagttgacctcttcatttcctttgcaactaggtatggtcacaggattaaattctagctaatgatttttttttgagacagagtctcactctgccatccaggctagagtgcagtggcgtgatctcctttcactgcaacctctgtctcccagtttcaagtgattctcatgcctcagcccctcctmgtacctgggattacagacgtgcgccaccacgcctggctaatttttgtatttttagtagagatggggtttcccatgttggccaggctgtctcaaactcaaactcctgacctcaggtgatccacccgccttggcctcccaaagtgctgggatcacaagtgtgagccactgtgcccagcctagctaatgattttaaatggaagttattgggaggaacctttgagaaggaaggacagacagctggggtgagccccttttgcctttttacttgtcattcttcctcatgactgctgcctgcaatacgaat

SEQ ID NO: 341646 - DNA, 539 bp, Homo sapiens
actgcacctaaactttgagacttacgtggtgccagtgcaggggcaccatctggtccttgatgtcagctgtcaacttagacatttaccaacacccccttcattccattcctttatgccctgcaggctgctctcccctgcttctgtgccttgatggaaggttcttactctgctcttctggggtttggggtggggctggctgttgtctcacccagattccaggttccactcttgatgcttgcctgggattcttgccctttcctgaaacacagtcaccagtggtgactcaggcagaggctcagtcaggcttccccamtcattggttttgttttgttggatatgattttttgctgctgtgggatgcaggataatcatggtggtgtatgggaggcaaagacaggaattatcaagggacaaacacagttaacgccttttaaaaacatgacaccagtctcccagtgaccaccttgcagcagcccaaggtggtgtgatctgttgtccaccttctttggaaggtgagccgagcttgagagggctggaga

SEQ ID NO: 341647 - DNA, 539 bp, Homo sapiens
agcataataaacattgtttttaaatatttaaagctaaaacaattttttcctaaatagcacaatgccatacacttaagactgataacagaytgggggaaatatttgcagcttgaatctcatgagtctcatccgtctcatgtgccgagttgaatagcccaatccagtgggccttcttgcttctttaaatctggtgccacacagaggtagatactaaagaaatacagttatgaatcaaagttcagaaaaaacaactgtatttaataaacagtttctaaggggcaaagggatgggtcagagtctgcaaatggaagattacattatccagaaaacaaaaattccttagggaaaaaaaaaatgtttcatccatccatcttccccccatcccacagagtggagcagctgctctcaaccttctgtctttacatctgtcctccaaaacatggtcaagtggtcaagttcttctcttatgattcctgctctctgagtaagttgctgttacataagcctcccatttctctaggctgctaccaatactgcct

SEQ ID NO: 341648 - DNA, 539 bp, Homo sapiens
agcataataaacattgtttttaaatatttaaagctaaaacaattttttcctaaatagcacaatgccatacacttaagactgataacagactgggggaaatatttgcagcttgaatctcatgagtctcatccgtctcatgtgccgagttgaatagcccaatccagtgggccttcttgcttctttaaatctggtgccacacagaggtagatactaaagaaatacagttatgaatcaaagttcagaaaaaacaactgtatttaataaacagtttctaaggggcaaagggatgggtcagagtctgcaaatggaagattacattatccagaaaacaaaaattccttagggaaaaaaaaaatgtttcatccatcyatcttccccccatcccacagagtggagcagctgctctcaaccttctgtctttacatctgtcctccaaaacatggtcaagtggtcaagttcttctcttatgattcctgctctctgagtaagttgctgttacataagcctcccatttctctaggctgctaccaatactgcct

SEQ ID NO: 341649 - DNA, 596 bp, Homo sapiens
gctgtccggcgtgatagtctatggtacccgcaggaccacttgccccacctgcacccggcactgacyagcacttgaccccttgacttggtccaggcctgcggtcattctcctggatgaccatggtctcctcctctgtgctcaagcctcccgcacctcctcccccatctcctgtctcaagacatcatgttgcttcttatttccctgagaaacttggagcaaactcagaacatgcgttattgcccactgacatctcccccagcctcctgctcccgcctcccctcccgttctggagtgagttctctgcatgctggtcagagctggtctctccatgtgcacacaggatccctactgcccctacagatgtttccctcctcgctgaaccatttcctcaggcatgcaaacatgcttccatgcctctcatcttcaaaacaacagcaaaacaagggtcctctcttgcctacacatcccactggcagaggtttctaactcttttggtttagttttttgttatcggtgttgttctgggtggcgggatggggattgcctgggattcctttggcaatctggcgaagctgatgtattcttctcagcacaat

SEQ ID NO: 341650 - DNA, 596 bp, Homo sapiens
gctgtccggcgtgatagtctatggtacccgcaggaccacttgccccacctgcacccggcactgactagcacttgaccccttgacttggtccaggcctgckgtcattctcctggatgaccatggtctcctcctctgtgctcaagcctcccgcacctcctcccccatctcctgtctcaagacatcatgttgcttcttatttccctgagaaacttggagcaaactcagaacatgcgttattgcccactgacatctcccccagcctcctgctcccgcctcccctcccgttctggagtgagttctctgcatgctggtcagagctggtctctccatgtgcacacaggatccctactgcccctacagatgtttccctcctcgctgaaccatttcctcaggcatgcaaacatgcttccatgcctctcatcttcaaaacaacagcaaaacaagggtcctctcttgcctacacatcccactggcagaggtttctaactcttttggtttagttttttgttatcggtgttgttctgggtggcgggatggggattgcctgggattcctttggcaatctggcgaagctgatgtattcttctcagcacaat

SEQ ID NO: 341651 - DNA, 510 bp, Homo sapiens
ccatgtgtgctcttttctaatttatgtttttatcactgtaattttgctctccgaaatgtatctgtgtcccacagattttkatatattgtattttagttcatttagcttcatgtttttaaaatttatctcctgacttattctgtgctgtttagtttctaagtgtacaaagattgttctgctatttttctgtgatttatttctagtgctcttattctattgtagttagacaagtcactcttcatcattccatttcttttaaatttgttgaaaattgtttgatgagctagtataccactccatgttctatgggcagttaaaaaatgtgcattctgctgttactggatggactatttattcatgtgtattagattatattgtttgattatgcttgctagttttctgtctataaattgttgaaagattgaaatctctgtataatgtagatttgtctgtttattctttaatttatatcagtttttactttatattttgcagctctgtttgtcagtg

SEQ ID NO: 341652 - DNA, 614 bp, Homo sapiens
tattagggagagaggcctaccagtgactatttcatgaggggtcaatttacgctttccaatgggagtggatctgattgccattaaagccaaaggtagtacctttggccaaggcaacccaattgattcagttaactttttcaatttcaattttaatgtgccatttgttctttaaacctttcctgaagattgagggtgatagggacaacggtagtgccactgtgtcagtagcaccttatttaactgctttataatttgcccaacaaaaatgaattcctctatcactgaagatttttagagggatcccccataaaggaaaaatattttctaataatttctatgctaccatcacagcatcagctttcctacctgggaaggcctctatccaaccagaaaacatgcaaactattacaagaacatactgataaccccatcatgggtggcaattgaatgaagtccattgtaaatgctcaaatggtccatcaggtggtggaaatacaccacctraagttttgattatcttcccaggattatgagtttgacaagtcaaacattgattacaaatcattttagcaattttgaaacagtcaccccacgagtattttttcataatttga

SEQ ID NO: 341653 - DNA, 474 bp, Homo sapiens
gtctgggcattacttacccttatgttcccttcagtctcacgttcatatgctcttctctcgaccacagtaccatctcaaatgccacctcttccaataggccctcacctcagctggcaggagaagaaaaaggaatcaggaactgctctctgtaagcacgcttttagcgaccttcctagcataaggtttcttcttcgatgtcttggttaaaagcccccagtgcctcctgcagcacctgactcgggtgttctcctgataggcgtcctgttcttttagtgtcttgttcttctgatatcytaaccccaccctctgccctcaaacattatgcagaatctcctaagacctaactggatagacatgcctcctccgctcatgtaaatcaaaggaccctcaggacatctttcatttttttaaaaaagtaattacattaaattgattctatagatttacatcatgagccatcagccaccacttagc

SEQ ID NO: 341654 - DNA, 576 bp, Homo sapiens
tgtttcttctcctcatacaactgtcacactgaagactactgtgaaggaggacctcagcttctaaggcttgctcgcaaaaccactcctccattttaaagtattgttctggagctgaattagatcaaatattttccggctcttctctcttagtacctctattgtgaatgtattcaatttgtcctcagtattcatcactattttctatatttagccaatcatggctttggtgatttctcctttaggctttcatttatttttttcttatattctaccctatgtgtcctctctttctctctatctctctcattcttatctcattattatgtttttttcttttaaaaacacagggttattttttactatacaaaatagtttgaaatatgcactccagggcatttaaaataactttcactcagaatattgaattgtatggatatatcataacaaatacaattttgctaaaagtaaaattagtgcatcaatggatttttaatatacaacacaaaatttctcactgagytttaacttttactaaccatatatagagctggtggcccattttcccacactcttatc

SEQ ID NO: 341655 - DNA, 533 bp, Homo sapiens
  misc_feature (1)...(533): n = A,T,C or G
aacaacagtgatttctgttatctgaaaatgttatatcccntagtcacgtgctactttatttttttcttgggacagtgctccacaaactaggtggaaagtaagaacaaagcaaagggatcatcccctatttccttgtatataccatagcttctagcattgtgctatgtgccatatttgttaaatatacaaaatgttaactttaaccttcgtaagagctcaatagggtaaaaatatttgcaaatttcatcaacgccgttaattgagtgcttgctatgagtcagatgctcacacttgaattcctttgtcagcttcacttctaactagctacatttacttgacaaactacacagctactcaaaacytcagttgcagtatctgtaacatgacagtattagctcatgttgatatgttgatatgaggtttacttaaggcatagtgatttgcctattgtaccaggaacccagaaacttttcatacatattattcattattacctaatttaactttcgttagaaatttctaaatttcattta

SEQ ID NO: 341656 - DNA, 538 bp, Homo sapiens
ttttgtggtccttgccttagtattcatatggtaagaaggaagctgtggcctttctaggagtggmttcctggatgatcctttgactccttcattttgggggagactcctcaactttctgtaactcaacgtcttttttcttgtttctccagagaagaatcctctcttgactgagggtgtaagttgacttgtcaccattttctgactttctcttcatctctatgatttcatgctatgcttttacattcacggttgtgttggattcctcatgctcagagtccctctgtttcaaacttgcaggcaaattagcacgttgctctgtgctgaaataagggacgggcatttgcccagttgaaaaggatcaacgaagcgatctgggacacctatttctaatatacactttcactcatttcccaaattgttaacttcacctgcttccccatttcagcgctcttgcagcccccaatcactaagatttgtttatgcatgtggtgagggagtctctgttataactctcctggcctctagatttcccatactg

SEQ ID NO: 341657 - DNA, 538 bp, Homo sapiens
ttttgtggtccttgccttagtattcatatggtaagaaggaagctgtggcctttctaggagtggcttcctggatgatcctttgactccttcattttgggggagactcctcaactttctgtaactcaacgtcttttttcttgtttctccagagaagaatcctctcttgactgagggtgtaagttgacttgtcaccattttctgactttctcttcatctctatgatttcatgctatgcttttacattcacggttgtgttggattcctcatgctcagagtccctctgtttcaaacttgcaggcaaattagcacgttgctctgtgctgaaataagggacggrcatttgcccagttgaaaaggatcaacgaagcgatctgggacacctatttctaatatacactttcactcatttcccaaattgttaacttcacctgcttccccatttcagcgctcttgcagcccccaatcactaagatttgtttatgcatgtggtgagggagtctctgttataactctcctggcctctagatttcccatactg

SEQ ID NO: 341658 - DNA, 486 bp, Homo sapiens
tgcccaggttaatccacttatatcatttaacaagaaagggaattactattgttgttgttgctgtctttttyaacagattttagaacacattcttagatacatagttcaaggtactatatacttccttacacagttcaagatactgtacttccttctccatagatttataaacagaaaaaaagtgatttaaaaacatgtattctcttctccgaaactattgaacttgtgtaccaccaaaagatatgttgaaatcttaactcctaatactttacactgtgaccttatttagaactagggtcgatgcaggtgtaacaagttaagatgaaattatactggggtagggtgagcccctaatccaatttgacaaagagcctataagaccaccatgtgaggacacagagacacaggagcaactctgggaagatgaaggcagaaattggagtgatgcatctatagtgatgcatctatagcactgatatggtttgg

SEQ ID NO: 341659 - DNA, 486 bp, Homo sapiens
tgcccaggttaatccacttatatcatttaacaagaaagggaattactattgttgttgttgctgtcttttttaacagattttagaacacattcttagatacatagttcaaggtactatatacttccttacacagttcaagatactgtacttccttctccatagatttataaacagaaaaaaagtgatttaaaaacatgtattctcttctccgaaactattgaacttgtgtaccaccaaaagatatgttgaaatcttaactcctaatactttacactgtgaccttatttagaactagggtcgatgcaggtgtaacaagttaagatgaaattatactggggtagggtgagcccctaatccaatttgacaaagagcctataagaccaccatgtgaggacacagagacacaggagcaactctgggaagatgraggcagaaattggagtgatgcatctatagtgatgcatctatagcactgatatggtttgg

SEQ ID NO: 341660 - DNA, 391 bp, Homo sapiens
gatctaggcagccccacaaagaacagtctagagctttctttgctgaatgattggcagsctagggccctctgagagttgcagcctcacaggcaatctgatccattctcattgggaagcctggggctaagaggtaatatttagagtaacacttactgttaaaactacttgaaatacaaagaaaaattgttagtaatgcagagcagccacaactcacaacatctgctgtccctgagaaaccaggacagatggaggtgctctggcaaattttctttgggagctctgggctcacttcaccttactaggactcacagtaatggggaaacaaaaggctcaaatcaacactgatggatgccaataataaaagcagaaaatttaaataagaaattaacaa

SEQ ID NO: 341661 - DNA, 599 bp, Homo sapiens
cttggcattcattgatgtcaacacatcagggttgttgggcacatcattatagctttataaggatacaagtccaagatccctacccaactaatggcgtggatgaggtcagagccatgagttttcctgtggtatttatatagagtataacagttaccatctaaaagttgtctgtcttcctagactgttcctttcctggtctgttgcctagagacaataggcttccattggagcttttttctttttcctgtgcctattggcatttctagtttgcttgcttcttcagctccaagtctggggtatatgaggaaaaaaatgcaaaaaaaaaaaaattatcattatgcttttcctcacgccctaaggtccctggttggtttgtcgtcttctctctacctttcagtcttctgatatttgctttgtttacaatatcaaaggtttktagttgtacttagaaggaggactagagaaaagtatatctactccaccttcctggaagcagaatgcccttgctcaatgatttttactagctagacttaaaactggactaagttgaagtcaacctaacaatagaaaaatgttaagatgatttgtcttctctagtc

SEQ ID NO: 341662 - DNA, 599 bp, Homo sapiens
cttggcattcattgatgtcaacacatcagggttgttgggcacatcattatagctttataaggatacaagtccaagatccctacccaactaatggcgtggatgaggtcagagccatgagttttcctgtggtatttatatagagtataacagttaccatctaaaagttgtctgtcttcctagactgttcctttcctggtctgttgcctagagacaataggcttccattggagcttttttctttttcctgtgcctattggcatttctagtttgcttgcttcttcagctccaagtctggggtatatgaggaaaaaaatgcaaaaaaaaaaaaattatcattatgcttttcctcacgccctaaggtccctggttggtttgtcgtcttctctctacctttcagtcttctgatatttgctttgtttacaatatcaaaggtttgtagttgtacttagaaggaggactagagaaaagtatatctactccaccttcctggaagcagaatgcccttgctcaatgatttttactagctagacttaaaactggactaagttgaagtcamcctaacaatagaaaaatgttaagatgatttgtcttctctagtc

SEQ ID NO: 341663 - DNA, 571 bp, Homo sapiens
taaagatggaaataataaacactgggaactccaaaagaggggtagatggaaaggggacaaggattgaaaattgcctgtcaggtatagtgtttactatttgggtaatggatatactagaagccctctctatcagcacacaatatatccatgtaacaacatgcaaatgtaccccttgaatctaaaaaaaaaacaaattttwaaaaatcttggactttcagtttcctcatctgtaaataaaggcaatatattacctatgccatttgttttttgtgaagattaaatgagctaataatgtaaaggatctaatacagtaccatcttcatggttagcagttattatcatataccttttttgcccattgtcttatccagaaataatgactcagatttataagtcgttctagcagggtcaaggtccaaccatggtcatagaacagattaaaatgaatgaattcctgaagacatctcaggtttgcaagaatggaaaaaaataacaagagaattggagtctaagttgaaatactatatggtgcaaaagagagtattaagcctttgcataatcctttagcact

SEQ ID NO: 341664 - DNA, 571 bp, Homo sapiens
taaagatggaaataataaacactgggaactccaaaagaggggtagatggaaaggggacaaggattgaaaattgcctgtcaggtatagtgtttactatttgggtaatggatatactagaagccctctctatcagcacacaatatatccatgtaacaacatgcaaatgtaccccttgaatctaaaaaaaaaacaaatttttaaaaatcttggactttcagtttcctcatctgtaaataaaggcaatatattacctatgccatttgttttttgtgaagattaaatgagctaataatgtaaaggatctaatayagtaccatcttcatggttagcagttattatcatataccttttttgcccattgtcttatccagaaataatgactcagatttataagtcgttctagcagggtcaaggtccaaccatggtcatagaacagattaaaatgaatgaattcctgaagacatctcaggtttgcaagaatggaaaaaaataacaagagaattggagtctaagttgaaatactatatggtgcaaaagagagtattaagcctttgcataatcctttagcact

SEQ ID NO: 341665 - DNA, 232 bp, Homo sapiens
gctgctcaatgataactgcacattctgataaatgaagcaatggatgaataaacrtaatttctagggtcttttcatctcctaactcttggtagtttattttctcctcttcctcttccaaactatgacctactatatgatcttcattgtcaatgggtctttgggagaaaagacagttctatatttcacatatatgcagatgattcctagtggtgtcaatcagtctaagataatt

SEQ ID NO: 341666 - DNA, 539 bp, Homo sapiens
gtctctctttttaatgtaaaaacaacactttcagtttgttgttcatgaaataaaagactgtaaaatrctaatttacaggcatgatggtaaagatttttataagactttcttcttataaactcagatgagtaatcaggtctgtcacttttgcctgagagaaagacaacagaggccactcttgatgagtagtcaggactggggaggtggttttaagagcctgaggttaagacttctagtctcaacccatggggcactggaagcttaaggaatgaacctagtcatagcccggaggagcaaacttagaatctatccagaaatgagaaccacaaacatgaaagcattggcaggagcaggagtaaaagagcagaaaggaatcaaactgctgagaagtcagtcttgggctattgtttcaaatagggctcatatttttattccacttccagagggcagatgtacgcatgtaggtaagtctagcagatttaaagggaccacggggtatacctcccagcctcttctgtgtcttactgaggtaaaaagca

SEQ ID NO: 341667 - DNA, 633 bp, Homo sapiens
gaggtggttttaagagcctgaggttaagacttctagtctcaacccatggggcactggaagcttaaggaatgaacctagtcatagcccggaggagcaaacttagaatctatccagaaatgagaaccacaaacatgaaagcattggcaggagcaggagtaaaagagcagaaaggaatcaaaytgctgagaagtcagtcttgggctattgtttcaaatagggctcatatttttattccacttccagagggcagatgtacgcatgtaggtaagtctagcagatttaaagggaccacggggtatacctcccagcctcttctgtgtcttactgaggtaaaaagcatcatagatgctgtcagtgccccgttcagatccactttaccagcagatatgtccactctccacctactgagagtattggctgttagcatcctagaatccttgctttctcaaaaaaattgcccttggcctaaaaggagctatcttgcttgataagctgcccactgctcgagtcaggatttgatcaatgattgattgacacagggtacaaaacgccaccccttttccctcaatgtgggacttactctgcgaggcaattcatgctccagagcttcccatgggatcgggatgttgagag

SEQ ID NO: 341668 - DNA, 539 bp, Homo sapiens
gtctctctttttaatgtaaaaacaacactttcagtttgttgttcatgaaataaaagactgtaaaatactaatttacaggcatgatggtaaagatttttataagactttcttcttataaactcagatgagtaatcaggtctgtcacttttgcctgagagaaagacaacagaggccactcttgatgagtagtcaggactggggaggtggttttaagagcctgaggttaagacttctagtctcaacccatggggcactggaagcttaaggaatgaacctagtcatagcccggaggagcaaacttagaatctatccagaaatgagaaccacaaacatgaaagcattggcaggagcaggagtaaaagagcagaaaggaatcaaactgctgagaagtmagtcttgggctattgtttcaaatagggctcatatttttattccacttccagagggcagatgtacgcatgtaggtaagtctagcagatttaaagggaccacggggtatacctcccagcctcttctgtgtcttactgaggtaaaaagca

SEQ ID NO: 341669 - DNA, 620 bp, Homo sapiens
ggtctgtcacttttgcctgagagaaagacaacagaggccactcttgatgagtagtcaggactggggaggtggttttaagagcctgaggttaagacttctagtctcaacccatggggcactggaagcttaaggaatgaacctagtcatagcccggaggagcaaacttagaatctatccagaaatgagaaccacaaacatgaaagcattggcaggagcaggagtaaaagagcagaaaggaatcaaactgctgagaagtcagtcttgggctattgtttcaaayagggctcatatttttattccacttccagagggcagatgtacgcatgtaggtaagtctagcagatttaaagggaccacggggtatacctcccagcctcttctgtgtcttactgaggtaaaaagcatcatagatgctgtcagtgccccgttcagatccactttaccagcagatatgtccactctccacctactgagagtattggctgttagcatcctagaatccttgctttctcaaaaaaattgcccttggcctaaaaggagctatcttgcttgataagctgcccactgctcgagtcaggatttgatcaatgattgattgacacagggtacaaaacgccacc

SEQ ID NO: 341670 - DNA, 633 bp, Homo sapiens
gaggtggttttaagagcctgaggttaagacttctagtctcaacccatggggcactggaagcttaaggaatgaacctagtcatagcccggaggagcaaacttagaatctatccagaaatgagaaccacaaacatgaaagcattggcaggagcaggagtaaaagagcagaaaggaatcaaactgctgagaagtcagtcttgggctattgtttcaaatagggctcatatttttattccacttccagagggcagatgtacgcatgtaggtaagtctagcagatttaaagggaccacggggtatacctcccagcctcttctgtgtcttactgaggtaaaaagcatcatagatgctgtcagtgcccygttcagatccactttaccagcagatatgtccactctccacctactgagagtattggctgttagcatcctagaatccttgctttctcaaaaaaattgcccttggcctaaaaggagctatcttgcttgataagctgcccactgctcgagtcaggatttgatcaatgattgattgacacagggtacaaaacgccaccccttttccctcaatgtgggacttactctgcgaggcaattcatgctccagagcttcccatgggatcgggatgttgagag

SEQ ID NO: 341671 - DNA, 556 bp, Homo sapiens
ggaactagattcgggtttttaaaatccaagcacagaggtgttttcactacattgcatgtttttgtttttccatcaacactaaagcaagtaattttggtttcagaatctaaatgaaagcattggggttgaccccttgggaacctagtattcgaccaagtccttgttttccaaagcatcactggatatttttcacaagcctaattagagttattttattgtggcctaatggcaaagcacagattcctaacagatttctttcttcatgatctaggaacaagttttctgaggccyagttaggttcaaaatgtagttccttctctccagagaaaacaagagcactgaatctaaaaatccagctttctggtttgggaaaaggtgatttctcctatcaggcagtagaataagctgagtagcagagtaaatgtcctagttcctcctttggaaggttgggtgctgccccaatggaaatgtgctataatatgtcattttctgccacaaattgctcctggaggcagaaaggctttgaattcaaagaaaaccatagtcgtggctgatt

SEQ ID NO: 341672 - DNA, 556 bp, Homo sapiens
ggaactagattcgggtttttaaaatccaagcacagaggtgttttcactacattgcatgtttttgtttttccatcaacactaaagcaagtaattttggtttcagaatctaaatgaaagcattggggttgaccccttgggaacctagtattcgaccaagtccttgttttccaaagcatcactggatatttttcacaagcctaattagagttattttattgtggcctaatggcaaagcacagattcctaacagatttctttcttcatgatctaggaacaagttttctgaggcccagttaggttcaaaatgtagttccttctctccagagaaaacaagagcactgaatctaaaaatccagctttctggtttgggaaaaggtgatttctcctatcaggcagtagaataagctgagtagcagagtaaatgtcctagttcctcctttggaaggttgggtgctgccccartggaaatgtgctataatatgtcattttctgccacaaattgctcctggaggcagaaaggctttgaattcaaagaaaaccatagtcgtggctgatt

SEQ ID NO: 341673 - DNA, 422 bp, Homo sapiens
tgctacacaatttcttaggaaagaactttggactgtaaacagataaataaaattygtactgtaaaagaagctgataaatgctatgaaggagaataaaggagtaaaagagggatatagagtattgaggttgggcctgggagtgccattttatattagagtggttagaaaagtcttcattaaaagacattggagaaattagggaaaaaagtatggagaaagcaatgtgtacatgagggaagaggtgttttaagcagagaaaacaggtgaacaggaaatgagaggacagtgtgcttggtcctaggggtcaaggaccagcaaggaggtcagtatgggtcagagggctataaacaatgagagagaggaaggagagcagtcacatcaaaagggaccatgtagtattgctaaggccatatctgttgctc

SEQ ID NO: 341674 - DNA, 626 bp, Homo sapiens
agagaaaacaggtgaacaggaaatgagaggacagtgtgcttggtcctaggggtcaaggaccagcaaggaggtcagtatgggtcagagggctataaacaatgagagagaggaaggagagcagtcacatcaaaagggaccatgtagtattgctaaggccatatctgttgctctgaataatttgggacatattggagggaatcagcagargagggatgtgatctgggtaagtttgaaaaagattattctgggtcctcttaaagaataaatggacagtgacaaataagcaaggaaactagatagtaactattgcaataatccaaacaggagatgaaggtgggtaggatcagggtgataaaaagcgaagaggttggattttgaatgtatttttaaagatagaaacaatattgtttatgaatttgctataggggttgagagaaacaaactgagaatgactctcgaaggtttggaagcctgaataaatagaagtatggatttgccatctaggaaccagtgaaaacgtgaggagtgtagatgaggagtgaaattatgagtttagttattaacataagtttcagatgtcctatgttagtctggggctcaagagaaagatctgtgttcccgatgta

SEQ ID NO: 341675 - DNA, 626 bp, Homo sapiens
agagaaaacaggtgaacaggaaatgagaggacagtgtgcttggtcctaggggtcaaggaccagcaaggaggtcagtatgggtcagagggctataaacaatgagagagaggaaggagagcagtcacatcaaaagggaccatgtagtattgctaaggccatatctgttgctctgaataatttgggacatattggagggaatcagcagaagagggatgtgatctgggtaagtttgaaaaagattattctgggtcctcttaaagaataaatggacagtgacaaataagcaaggaaactagatagtaactatkgcaataatccaaacaggagatgaaggtgggtaggatcagggtgataaaaagcgaagaggttggattttgaatgtatttttaaagatagaaacaatattgtttatgaatttgctataggggttgagagaaacaaactgagaatgactctcgaaggtttggaagcctgaataaatagaagtatggatttgccatctaggaaccagtgaaaacgtgaggagtgtagatgaggagtgaaattatgagtttagttattaacataagtttcagatgtcctatgttagtctggggctcaagagaaagatctgtgttcccgatgta

SEQ ID NO: 341676 - DNA, 592 bp, Homo sapiens
gagcaagactccgtctcaaaaacaaacaaacaaaaaatttgataagaaaagggttaataattttaaattgactaggcacagtggctcatgcttgtaatcccagcactttgggaggccaaggcaggaggatctcttgaggtcaagagtttgagaccagctctggcaacatagtgagaccccacctctacacacacacaaaaaaaatttaaaaattaaattatgttaaataagataaatgtacataaatttataccaataagcaacattatataaactacaggcaatcatccctttgcatgatagtgtgggactgcaaaaaaaaaggctgcaagctaaaaccatgcaaaacagtcataataatcaatggggaaagttacaactgtctgtgatgtttaaatttttgttgaaacattaaaaactttctttttcttgattataaatgtatagtgaaatgggaaaaaagtacaactaatatttaatcagcrtactataaaattttagaaacattgaaaattaaactgctttatttccttgtaaaaaatatatcaagagtagtctgaaaagtttttgcctttttctcatataatttatg

SEQ ID NO: 341677 - DNA, 525 bp, Homo sapiens
aaattatatgattacaattagaaattataactataaagattaaggccaggcacagtggttcatgactgtaatcccagcactttgggagaccgaggtggctggatcacttgaggcygggagttagagatcagcttggccaacatggcaaaatcccatctctactaaaaatttgccaggtgtggtagtgctcacctgtagtcccagctactcgggaggctggggtgggaggattgtttgagcccaggaggtggaggctgccatgaaccgagattgtgccactgcactccagcctgggcaatggagttagaccctatctcaaaaaacaaacaaacaaacaaaaaaacccaaaaactataaaaattaaaacatggaaaagatgcatatagtataatgttaagtgaaaaaagttgagtgcaacattgtacctatacaacaaattctaaagtgttccctggaatgcagtttaatattgttacgtttgctctgttatcacaggacctgcagttcctaaatacactaggcact

SEQ ID NO: 341678 - DNA, 592 bp, Homo sapiens
aagattattgtcccacagtctgactttgtctttcctgatatctatcagcagacagtggcctagtttctaccactaggctatgatgtttcttccctgctaaacataaataatttcatagaatatcaatattacatgaggactcttcatgmccatgatggaataagaaaaaaataagtccattctgtaattatacctgagcagaggtactatgcaaccacaagaataaccaaatatcccatcttcagccaacatgggtgactgctactttttctccaatggcaatgctagctatgctctatttattcaaccttctagaaataaattattaagatatccaatcactgtattggcccagtgttaagagggcacacatacacccacaaaatatagctgtgtcctggaatctttccccaaatcacctaagataagcccagtttctacaatgagctcttcccatctccctcttactaagactccatgcttctatgtagagtgcagtcttccttgctgcagggagtttataaaactaacttcattggttacatgtatttttctaatggtcctggactgatgtattcaacaagtgattgac

SEQ ID NO: 341679 - DNA, 592 bp, Homo sapiens
aagattattgtcccacagtctgactttgtctttcctgatatctatcagcagacagtggcctagtttctaccactaggctatgatgtttcttccctgctaaacataaataatttcatagaatatcaatattacatgaggactcttcatgaccatgatggaataagaaaaaaataagtccattctgtaattatacctgagcagaggtactatgcaaccacaagaataaccaaatatcccatcttcagccaacatgggtgactgctactttttctccaatggcaatgctagctatgctctatttattcamccttctagaaataaattattaagatatccaatcactgtattggcccagtgttaagagggcacacatacacccacaaaatatagctgtgtcctggaatctttccccaaatcacctaagataagcccagtttctacaatgagctcttcccatctccctcttactaagactccatgcttctatgtagagtgcagtcttccttgctgcagggagtttataaaactaacttcattggttacatgtatttttctaatggtcctggactgatgtattcaacaagtgattgac

SEQ ID NO: 341680 - DNA, 559 bp, Homo sapiens
gtaacaataatatcataaaggagtaggctgatggagtttttaaaggatcaaaatgtttgaatactattaaaactgggttagtattaattcaaacttgattgttacaaagttaagatgctaatcgtaatccccagggtaactccagcgctatggactgaatagtgtccccctagatttcacaggctgaaacttgaattcccagtgtgatggtatcttgagatggggcctttgagaggtaactaggtttatatcaggtcatgagggtgggttcctcatgacgggcttggtgtccttttaaaaagagaccacagagcttgcttactctctgtttctcctcttccccacctccccagtccccaacacactgtgagaacacagcaagacagccatcaacaagccaggaagctctcttcctggctcttaacagaaactgaattggctggcaccttgatcttggacttcacagcttccagaactgtgcaaaataaatggctgttgtttaaaccacccrgtctatcatattttattatggcagcccaaaataagacacccagaaaac

SEQ ID NO: 341681 - DNA, 586 bp, Homo sapiens
acccttcacttttgccctccaaacctgtacttctcccagtctttcctcttcctatcaccatccaaccttttgttcaaatcaaaattgtagatataatctttgattcctccctttctcctgccctcttgcatccaatgtatcaagtcttgccagtcacacatctaaaatagatcatttatctgtctatttctctaactcaatggccactgcccaggtcagcctgggctactgaaatagtcttctaaatgatcaatatattttcccaaaaaagcagtcgcttgttgaatattacctccaacaatctactcaaataccagaaaaagtgatctgttgagaacataaacataaatagcataacgttactcctgtgcttaaaacctccagtgacctcccatcgtacatggagtacaactcaagacccttaacctggacccaagaacctacaccacctggccccttagcttcccattcctgcmtcactgctattcctcttctcctgtgtcacctaagttccaaccatactgtcttcaaatacaccctgagggtttttgccgtacatcttcatgcatcttgttccctctgccaa

SEQ ID NO: 341682 - DNA, 581 bp, Homo sapiens
ataatgtttgcattttctcgcctccagaccttcgtacacaccaccacccatggaatggcctctgttggggccacgattgttcatgtggaaaatgcctgcttatccttcaggacttatttcagattttaactcaccctgatcttttcagagttaaatacttctttgtcttactatagcatctcatttataactctattagtgtgtgtgtgtgtgtgtgtgtgtgtgtgtgwgagagagagagagagagacagagagagagagagtcctgctctgtcattcaggctggagtgcagtggcacaatcacggctcagcagcctcaacctcctgggttcaagcggtccttccacctcagcctccctagtagctgggaccacaggtgcatgccgccacatccagctaatttttttttctggtttgttttggttttggttttggttttggtagagatggggtctccctatgttgcctaagctggtctcaaactcctgggctcaagtgatccttctgccttagcctcccaaagtgctgggattacaggccctcacttttttcacgtctttccctcctctcaacacctgca

SEQ ID NO: 341683 - DNA, 589 bp, Homo sapiens
gatatagagaataaaaataaaaataaaaaacaagccaagctaacataagcaaaaatgtaaagaatttattttaataacacaagggtaatttaatgcaagggacctcaggaccaaaatacagcctggtctggggacagattggaaccaagaaatagcaagccatcgacaacatgrgttcctcccaggcacctctcatggcagcttctctctgcagcctgctgcactcttctttctcaccatactagtgctctctgatactccatatacatggtacgttgtcatccctcccaggttcagagactctttctctctgtcccaattccagattcctgaggaggagactttggcccaacttgaatcagggatgcatgcctggtctaaacaaccgaggccagaggagctactttgcataaaatggctgccagaaagacactgtgcactgagcacacacacctaaaagatattgctatattcaacaggacactttcagtcatcttgattatattatgtccccttgattctgatatatcagccattgtaaaaagaaaaaaagaaagaaagaaaaggaaaaaaagcaccaatttactga

SEQ ID NO: 341684 - DNA, 588 bp, Homo sapiens
taatgtttttcatactggccacaccattctaaatatcctccaacattgcacgaggrttccatttttctacgtcctcctcaacactttttttgtttgtttttgttttttgatagtagctgtcctaatggttgtgaggtggaatctcactgtggtttgaatttgtatttccctaatgattagtgatgttgaacatcttttcatttgcttattggccatttgtgtatcttctttggagacccataaaaaagaattaaaacaaggacatgccatagtcaaatttaggttttggaaaggtcacaatgacatcaagttgaaggtgaattatagtgggagtgaccaactgtagcgcaaccagttaggaggcgattgtagtttccgtgttgatgctttgttactttcaaagaaaagccctcatgctggcatttaattctgtccacatactggcctcgttgttctttccaaattcccctctgttatgtcttttcatgaattctatgtccttttcaagctgggtcatatgtcttattagcattcttatctcaaaactttgaggctttttttttttttttggttacagaaaatgtactt

SEQ ID NO: 341685 - DNA, 602 bp, Homo sapiens
tgcctgtgcttttgcagtcttagccataaaatatttgcttaggccaatgacctggagtgtttctcctgtgtttcttcaggtacttttatagttttgggcctaaacttgaagtctttaatccatttggagttgatttatgtttatggtgagagatagggatctagtttcattcttctgcatgtggatattcagttttcccagcaccatttattgaagaagatgacctttccccggtgtatgttcctgactcctttgttgaaaatgagttggccataatacatggatttatttctggcatctcgattctattcaattgggttatgcgtgtgtttttataccaataccatgctgtttttgttactatagtcttgtaatatatttggaagtcaggtattgtgatgcccctagctttattcyttttttctcaggattgctttggctattcaggcactttttggttccataaaaattttaggactgtttttctctttctgtgaagaggaatgctgcattgaatttataaatttttttgggaagtattgccattttaacaatattaatcctttcaacccacgagcatgaaatctcttttcattttctga

SEQ ID NO: 341686 - DNA, 607 bp, Homo sapiens
attttgacaaaatttaaacatgtcagatattcagatcaacctgtacaggagagtacccttagctgggcagagcgcacagctctaggaacctgcgctgctggagagtgatctcaaagccaccgttcggagcctgacmttttcctatttctatcagctttcttctggtgtctcttttctgcctcttcctcttactattctttaacagctcctgaaatctaatccttatttggcactggggtaaaaatagataggcactgatgaagggctgcatcttaggaacgataatttgtcagtcttagaagagccttggcaaaatggtgtgttttgtcctcagatccacagatgcaggaacttgattgggttggggtcccggaattgcttggcctgacggagtcatacaaaccaaatttccaaaagattaatacaaaattaaaagattaatgagggtttaaatatactcatttacaatggaaaatatacatcactaagcaataattaccatgcctttaagtacttatttgttgttatttcccacatgctgtaaaagtcatcgttgtagggaaggacagaaaggatataagcttatgcttaaaaatagtaaaagggc

SEQ ID NO: 341687 - DNA, 564 bp, Homo sapiens
ccccacctggccttgcaaaggaaggggtgcccagctcccacaccactgcatgaaccagcaccacactctgtgttctgatagtgggggctcctccgctactcaagatcaggccacaactgttaactcratgcccctgggcgatgtgctcgaatcctggagaattgggacctggcccttggatttgtcctctggtcccttggggccaaagtaaagctgggatgggggaagtgagctgctggcatgctgccaacacaacgcttagatggggcagtggaggctgtgctgggggtatactcctgtgggagtggccaggcagatggtcttgggagggccagcaggcaaggagaagtttgattcatctgcacctcatcggcgacaatggccgcggggtgtttcttaggcctgtgagtgaggtcgtaccctgttctctactggcccagcagacagcaggagctgcagttgcttagtgcaggatggacgtccagagccttagtggatacgcgtccagagccttaccagatagcctcactctggccccatgttttgccacaagctgcccagcac

SEQ ID NO: 341688 - DNA, 564 bp, Homo sapiens
ccccacctggccttgcaaaggaaggggtgcccagctcccacaccactgcatgaaccagcaccacactctgtgttctgatagtgggggctcctccgctactcaagatcaggccacaactgttaactcaatgcccctgggcgatgtgctcgaatcctggagaattgggacctggcccttggatttgtcctctggtcccttggggccaaagtaaagctgggatgggggaagtgarctgctggcatgctgccaacacaacgcttagatggggcagtggaggctgtgctgggggtatactcctgtgggagtggccaggcagatggtcttgggagggccagcaggcaaggagaagtttgattcatctgcacctcatcggcgacaatggccgcggggtgtttcttaggcctgtgagtgaggtcgtaccctgttctctactggcccagcagacagcaggagctgcagttgcttagtgcaggatggacgtccagagccttagtggatacgcgtccagagccttaccagatagcctcactctggccccatgttttgccacaagctgcccagcac

SEQ ID NO: 341689 - DNA, 564 bp, Homo sapiens
ccccacctggccttgcaaaggaaggggtgcccagctcccacaccactgcatgaaccagcaccacactctgtgttctgatagtgggggctcctccgctactcaagatcaggccacaactgttaactcaatgcccctgggcgatgtgctcgaatcctggagaattgggacctggcccttggatttgtcctctggtcccttggggccaaagtaaagctgggatgggggaagtgagctgctggcatgctgccaacacaacgcttagatggggcagtggaggctgtgctgggggtatactcctgtgggagtgsccaggcagatggtcttgggagggccagcaggcaaggagaagtttgattcatctgcacctcatcggcgacaatggccgcggggtgtttcttaggcctgtgagtgaggtcgtaccctgttctctactggcccagcagacagcaggagctgcagttgcttagtgcaggatggacgtccagagccttagtggatacgcgtccagagccttaccagatagcctcactctggccccatgttttgccacaagctgcccagcac

SEQ ID NO: 341690 - DNA, 564 bp, Homo sapiens
ccccacctggccttgcaaaggaaggggtgcccagctcccacaccactgcatgaaccagcaccacactctgtgttctgatagtgggggctcctccgctactcaagatcaggccacaactgttaactcaatgcccctgggcgatgtgctcgaatcctggagaattgggacctggcccttggatttgtcctctggtcccttggggccaaagtaaagctgggatgggggaagtgagctgctggcatgctgccaacacaacgcttagatggggcagtggaggctgtgctgggggtatactcctgtgggagtggccaggcagatggtcttgggagggccagcaggcaaggagaagtttgattcatctgcacctcatcggcgacartggccgcggggtgtttcttaggcctgtgagtgaggtcgtaccctgttctctactggcccagcagacagcaggagctgcagttgcttagtgcaggatggacgtccagagccttagtggatacgcgtccagagccttaccagatagcctcactctggccccatgttttgccacaagctgcccagcac

SEQ ID NO: 341691 - DNA, 509 bp, Homo sapiens
taaacatctgtaactttgccacccagagataatataatcctttttcatattttatgtattttaaaatctctaaaatatacatagctttgtcaatgttacaatgaagatagctgtacataaatctttgactgaatttctgatggyttctttaacagatgcctaaaactgaaattatttggtgaaagcatattaacatttacttgatatacaagaattttaaaaattggacatttaatttgcatttccctatatttatgacattgaacacttaaaaaatacaattactggtcacttggattacttattttatttaaatgtttactcaagtacatttataatatttttctattggggtcttattatcacttcgtattagtttgcaataagttaaagattaaccagtcttgtaattgttaaatgctgtttgaaaataaaaaggttaatcctcttccacacagatttctcttttatttttaaaattaacatattacataattatatacactata

SEQ ID NO: 341692 - DNA, 589 bp, Homo sapiens
gctgtttctttcctcttcaattctccgcccactctcccctccaacttgactcactctcaactggcttcacttcagaccccctcttttaggaagattctccatccaccccccgggccctcctctggactccatctcaacagtcttgtctctgtttcagatgccatcagatgatgttggtgtttgtgttgctaattgcagcaacaatccattaataattcatggtttcttgatattagtgttgctaagtgggaactcttcagacaacacacctggagagtttctgcatcctctgcttaattagaacggagtgaggggccaaagacagttaaaagagacttggtaggtgccctctgaggacgtcctctccaaagatctttgggggtcaccagggtcctggcctgtgggtcaaacatcagcttraataatggccttgtcctcctgcatcagacacattcttttctctcctccacagtataaactgccaaaactgggagatactcatcagattgctccaacagaagaggaggaaggctctcccgagggctgtccaggagacataaaatttctaccttttcttttctttttgaaa

SEQ ID NO: 341693 - DNA, 592 bp, Homo sapiens
acacctgtaagcccagcatttggggaggccaaggtgggcagtctgcttgagcccaggagtttgagaccagcctgagcaaaagggcaagaccccgtttctacaaaaaaatacaaacattagccaggtgtggtggcatgtgcctacagtcctagctacttaagaggctgagatgggaagatggcttgagcccaggaggttgaggctgcaatgagccacgatcacaccactgcactccagcctgggtgacagagtgagaccctgtctcaaaaacaarcaagcaagcaaacaaaaaagaattattctcactgagtggtggaaattcatttataaatcaggtcttcagcattttccctaaagtgatagacttatttgcttcagattgttcatgaaatgtaataacaaagatctcaacagatcacagaaaaacactagctggatgttaagtaatttttattattatttgggtttggaaatattggggttctttctctgggagctttcccaggttctataggtatcgagtttcctttacgaaattaagacaaaggatcactgcctgaaaccttcataggtccagcttccaaacacaacc

SEQ ID NO: 341694 - DNA, 569 bp, Homo sapiens
ttttaaaatttattttaatgatagatttaaccataaccacaataataatttcactaaatataaatatctaaacattccaaataaaaggcagagattgctaaactcagtttaaaaaaagaaacgaggcccaactatatatactgtctataagcaatccacatcaaatatatagacatatataaaagttttttttttttaaagaaaaaagtaccacgtaaacaaacattcttttcttgtattttttatcctttctgcaatttctgggtttgtttctagtagtaatttgttctctggttgtgaattgcttttttcttattcttcgtatgtctgcagctcacacaaatggagagatgttagagcatcaaccaattagagcagggtatccttggtgatcacagagtacacttagtgaattctctttagagggaaagagtgtcacacttcagcagtagagctaaattatccctgaagtgaaagctactctagacccaccataacaaaacaggccttaagggaatcawattcatctgcaaaaagcccaacactctttaaagcaagacaacaaaatc

SEQ ID NO: 341695 - DNA, 434 bp, Homo sapiens
agagaggagtagaagggaggaggagctcagagaaaggtagccgtttaggccaagctagttaaaactaaaagacctacaagctaccttataagctggtaggctaggtagactagaacagaggtcatttccaattccctgctatttcttaaactcyatgtggcttataataggcaaaataaccctgaaatcaggacagggcttcacaggtgctagcttaagactatcagagactgaatctcttactaaatatgagatttgagacaaactactaaatacttctatttctcagttttctcatctataaaatgaagataaaaatactacatatttccttagttgatgaagggaataaatacgataaaacatgtgaggtgcttagattggtgcttagggttcagcaaacttttttctacaaagggccagatagtaaatgt

SEQ ID NO: 341696 - DNA, 536 bp, Homo sapiens
attttctacaggaagtaagttggcccaggaatcttagtctattagaaagccttggctcatagagatattacctgaagtccttgaagaggaagaagaacatttccattttcacaacttacaagccaggagttaagggatatgaatatacattagaatgatactgttcaatctatacaaacacagaaagtgaggctcagaaaatgaaggacaagccccagtgattgatactgggatgaagtgacagaaactgaactagtttgtaaatatgytgtctgtcacaacagggctctgtagatttacattttacattttatattcttaaccagaatatctcattttacaatcactccaaataagtggaattttaccatacattggtatagtaaatggttttggatagaagatgatgcaaaattaaatctgagcacaaaaacaactgggcaaaaactacccgaaaaaccctgtagattggtgcaaagagggcaaatggtttacatctaaacttggatactttaagcaataggactcatttttat

SEQ ID NO: 341697 - DNA, 536 bp, Homo sapiens
attttctacaggaagtaagttggcccaggaatcttagtctattagaaagccttggctcatagagatattacctgaagtccttgaagaggaagaagaacatttccattttcacaacttacaagccaggagttaagggatatgaatatacattagaatgatactgttcaatctatacaaacacagaaagtgaggctcagaaaatgaaggacaagccccagtgattgatactgggatgaagtgacagaaactgaactagtttgtaaatatgttgtctgtcacaacagggctctgtagatttacattttacattttatattcttaaccagaatatctcattttacaatcactccaaataagtggaattttaccrtacattggtatagtaaatggttttggatagaagatgatgcaaaattaaatctgagcacaaaaacaactgggcaaaaactacccgaaaaaccctgtagattggtgcaaagagggcaaatggtttacatctaaacttggatactttaagcaataggactcatttttat

SEQ ID NO: 341698 - DNA, 583 bp, Homo sapiens
caggagttaagggatatgaatatacattagaatgatactgttcaatctatacaaacacagaaagtgaggctcagaaaatgaaggacaagccccagtgattgatactgggatgaagtgacagaaactgaactagtttgtaaatatgttgtctgtcacaacagggctctgtagatttacattttacattttatattcttaaccagaatatctcattttacaatcactccaaataagtggaattttaccatacattggtrtagtaaatggttttggatagaagatgatgcaaaattaaatctgagcacaaaaacaactgggcaaaaactacccgaaaaaccctgtagattggtgcaaagagggcaaatggtttacatctaaacttggatactttaagcaataggactcatttttatgaggctctgtgagaccatgcaactagtttgtagactttttttaagatctagttattcttgaggatgagtcaattaacaaaacaatcatggttgctgttttcctgcaactaacaatgtagtggacgttacccaatcaattaaagtcctagcacacacaaaaccaatggcac

SEQ ID NO: 341699 - DNA, 605 bp, Homo sapiens
ctgcagtaagttatccagaagatctaactaagataatgatgtaggtgcttgcactaaacaacaggttytcaatgtagataaaacagccttagagtggaggaagatgtcatccaggactttcacagctagagagcaaacaatgcctggcttcaaagctccaaaagacaggctgactctctcactaggggctaatccagctgatgactttaagttgaagccaatctccatttaccattccaaaaatgtagaacccttaaaaattatgctaaatctaccctgcctatgctctataaatggaagaacaatgcctaaatgacagcacatttatttacagcatagtttactaaatattttaagcctactgttgagtcctaccactcaggaacaaagatttattttaaaatattactgcttattctcaatgtatccagtcacctaagagctctgatgaagatgcacaaggaaattaatttggtttcatgcctgctaatgcaatatccattcttcagtccagggatcaaggagtaatttttactttcaagtcttattatttaagaaatttatttcataaggctatagtttccgaaaacagtgattcctctgat

SEQ ID NO: 341700 - DNA, 498 bp, Homo sapiens
ctttaatccatcttgagttaatttttggagatgataaaaggtaggggtccagttttattcttctgcatgtggctagccagctatcccagcaccatttattgaacagggagtcctctatccatcagttatctttgccaactttttcaaagatcagataaatgtaagtgtgaagctttatttctgggttgtctattttattccattggtctatgtttctggttttgtatctgtaccatactgtttagttactgtagcctcatagaatagtttgaagtcaggtaatgtgatgcctctgsgtttattctttttgcttagaattgctttggttatttgagcgcttttgtggttacatatgaattttagaatagtttttctccaattctttgaaaaataatgttggtactttgatagtaataacattgaatctacaagatggctttggggagtatggccattgtaatgatattgattcttgcgatcagtaactatggacttttc

SEQ ID NO: 341701 - DNA, 498 bp, Homo sapiens
ctttaatccatcttgagttaatttttggagatgataaaaggtaggggtccagttttattcttctgcatgtggctagccagctatcccagcaccatttattgaacagggagtcctctatccatcagttatctttgccaactttttcaaagatcagataaatgtaagtgtgaagctttatttctgggttgtctattttattccattggtctatgtttctggttttgtatctgtaccatactgtttagttactgtagcctcatagaatagtttgaagtcaggtaatgtgatgcctctgcstttattctttttgcttagaattgctttggttatttgagcgcttttgtggttacatatgaattttagaatagtttttctccaattctttgaaaaataatgttggtactttgatagtaataacattgaatctacaagatggctttggggagtatggccattgtaatgatattgattcttgcgatcagtaactatggacttttc

SEQ ID NO: 341702 - DNA, 641 bp, Homo sapiens
tgcctaacaataaagacctgatacttaaatttacacttcttggtgttagtcttatgaagaagaagcaataagcctcactacccaaagcaaacagatcgagaaagaaaacaaacaaacaaacaaaacaaaaattagtgttttaaagtgtccatcaatctcatattattaggaaataatacactggagcagaaaatagcaaaatatacacataagttccagggctaagtttgtgatagaaaacatgttcccttccaggtaccataatagataagccyaagagcctgtagcagtgaacacaaagttggagttttaaacgctaagtcatctgcagaccacctctgcttcttgtttgttattttcatctctggaactccgtgggagtgcttgacaactagccctaattatatattctcataattatagggtagatgtctctctccatctaaaatttccattcttcccttttaaaggtcactgtaactgaataaagacaacggattctaattaggacttcatccactaatccatctacctcatttaaaagatgatcaaaatgagaatcaaagaaaggaaagggctcatccatttgtactttagctagtcagagacctcaaggattctaatatgtagtccagtgttcc

SEQ ID NO: 341703 - DNA, 641 bp, Homo sapiens
tgcctaacaataaagacctgatacttaaatttacacttcttggtgttagtcttatgaagaagaagcaataagcctcactacccaaagcaaacagatcgagaaagaaaacaaacaaacaaacaaaacaaaaattagtgttttaaagtgtccatcaatctcatattattaggaaataatacactggagcagaaaatagcaaaatatacacataagttccagggctaagtttgtgatagaaaacatgttcccttccaggtaccataatagataagcctaagagcctgtagcagtgaacacaaagttggagttttaaacgctaagtcatctgcagaccacctctgcttcttgtttgttattttcatctctggaactccgtggragtgcttgacaactagccctaattatatattctcataattatagggtagatgtctctctccatctaaaatttccattcttcccttttaaaggtcactgtaactgaataaagacaacggattctaattaggacttcatccactaatccatctacctcatttaaaagatgatcaaaatgagaatcaaagaaaggaaagggctcatccatttgtactttagctagtcagagacctcaaggattctaatatgtagtccagtgttcc

SEQ ID NO: 341704 - DNA, 562 bp, Homo sapiens
aatactctccgaacacataatattttcccttgatagcaattgatacagttgtgcacaattatttgtgcaattactttgttaacatccatgtcccatgatttacagcaagttgtacagggccgaagatggtatccagcttgttaatttctgtgtcctcaggactaagacagaatctggcaaataggaatcacattataagtattttttaatataagtgaataaagctattgtcctgaattcaaaatcagagcaaaagttgaaagcaattacctytaaaacttcctctatcttccccacctctatcttctaagcaaaatcctccccaaatcccaaatttaaagttaaacaaaatggtctatttccctcctgaataattgaagctaaaagatagaaaagaatctggaaagtactatgcttgttgtcatgcccgtgttccataactatcatttatatgcatttgttagtatctgttaccaggatattggctttaaatacatgattcaatttaaccattattactatattctaagataggtatcactattttatctatgagaaaagt

SEQ ID NO: 341705 - DNA, 434 bp, Homo sapiens
gaataaccatgcatcctacccctcacccttgatgctgccttaaataaggataaatgttctctgagtttgtataaataaatgaaagagaggcagagagagaaaaagatatgggaaagaagagagaaataaaataatatgggaatttaagcaaattcttcggggaaagaaaatctattccagtattgactccttcattgaagtaaccaatcgatatatacaagaagtccaaaaatatttttracatattggaaatattgctggatgttttagatgaactgtttacatataggaaactggtaaaatacaggtgtcctcatacacgtcttcttttatcatcatggttactcttacttaaatttattagcatggatggacacttagtaatgtgctcacatggaagaggctacatgtgtttacacagtatggtgactgct

SEQ ID NO: 341706 - DNA, 434 bp, Homo sapiens
gaataaccatgcatcctacccctcacccttgatgctgccttaaataaggataaatgttctctgagtttgtataaataaatgaaagagaggcagagagagaaaaagatatgggaaagaagagagaaataaaataatatgggaatttaagcaaattcttcggggaaagaaaatctattccagtattgactccttcattgaagtaaccaatcgatatatacaagaagtccaaaaatatttttaacatattggaaatattgctgsatgttttagatgaactgtttacatataggaaactggtaaaatacaggtgtcctcatacacgtcttcttttatcatcatggttactcttacttaaatttattagcatggatggacacttagtaatgtgctcacatggaagaggctacatgtgtttacacagtatggtgactgct

SEQ ID NO: 341707 - DNA, 463 bp, Homo sapiens
aattcttttaaagctcctctaaattttgacatgtaaaaagttccacataatagctattgttattcaaactaaaagtaaatttgccatttactaagataagcacaaaaattagtatyatcatgggaatttatagggaagcagcttttctgccaggaggagattatgccttttttttattagataaacccttgaaaaacaagaaggccactacagttggtcaagaatgtgactatgaatgtgttttggattccctaacctaacagaagctaggaatggactgtgtaatcaaaaataaaaatgtgcacctcggaatgtgaactaatcaaaggaatgttctttctctcatgaacgggcaagagggataggagacggatcaaccctatgccttcatctgttctttatgaaacacatgcttataggtgcaacagaaacaggatagtccagggcaaaacaattatagcca

SEQ ID NO: 341708 - DNA, 463 bp, Homo sapiens
aattcttttaaagctcctctaaattttgacatgtaaaaagttccacataatagctattgttattcaaactaaaagtaaatttgccatttactaagataagcacaaaaattagtatcrtcatgggaatttatagggaagcagcttttctgccaggaggagattatgccttttttttattagataaacccttgaaaaacaagaaggccactacagttggtcaagaatgtgactatgaatgtgttttggattccctaacctaacagaagctaggaatggactgtgtaatcaaaaataaaaatgtgcacctcggaatgtgaactaatcaaaggaatgttctttctctcatgaacgggcaagagggataggagacggatcaaccctatgccttcatctgttctttatgaaacacatgcttataggtgcaacagaaacaggatagtccagggcaaaacaattatagcca

SEQ ID NO: 341709 - DNA, 463 bp, Homo sapiens
aattcttttaaagctcctctaaattttgacatgtaaaaagttccacataatagctattgttattcaaactaaaagtaaatttgccatttactaagataagcacaaaaattagtatcatcatgggaatttatagggaagcagcttttctgccaggaggagattatgccttttttttattagataaacccttgaaaaacaagaaggccactacagttggtcaagaatgtgactatgaatgtgttttggattccctaacctaacagaagctaggaatggactgtgtaatcaaaaataaaaatgtgcacctcggaatgtgaactaatcaaaggaatgttctttctctcatgaackggcaagagggataggagacggatcaaccctatgccttcatctgttctttatgaaacacatgcttataggtgcaacagaaacaggatagtccagggcaaaacaattatagcca

SEQ ID NO: 341710 - DNA, 537 bp, Homo sapiens
tggtccaaaggtcctatagaaagcttacagtgatcttgctggtacctccagatttgccaaaagatgatagcaccactcaatatctgaaacaaaaagataaatcttaatatattgctgatttagtaagkgagcactatgctcatcatgtacagtctctccaagcagagcaggtttctgcccttacataaggttttgggaagaatgacgttcagggattggtggatttctagcaggatcaagcaagttaaagtcaattgaagaaacatcctttctcagatgagactgttgttgattggatgtattttggaagtttctgtgcccaactgaatgattttcaaagtaaggtgctattactgactagtggttttaggaagcttgtccatggaagtgaattgttggttactaaatgtgtgtaaaaccagttctagtggttacttttaccatggttatagaactgtaattaattagttaaacagggataaaatttgtttggtgactacttgttaccagggatacagaatatttaggcttttgtta

SEQ ID NO: 341711 - DNA, 589 bp, Homo sapiens
tatgaggcaagtcttaagctgtagccagtctggtgtgctttgtgtgtctttctgtatggttctgtcataaggaggaataccttaggatagaacatgggcctaggaccccagaagctcagtgctcaagctagcttgacaaactggtcagtagcagactttgctgcaagtctgcttcttgtytcatgtacttgggagcttaatcttgtaactatgtggcagtactttcttttagtctctgccattttacaatggcgacctgggttcagtcctgacttagggaatgagtgctttctggttaatatttgtgtgacttttaccatttgctgattctcttcccctccgtgaacaacttctagcttcctttcttaaatcttcctttctctgagctacttttaatgattctagattttgtaaaaactacttaccacctttttgaaaatacctggtacactcacagttaagtcataaccttagttgaggcttgttggtttcacctgtgaggttacttttagtaaacttcaaaagccagaaatattggctacttgatgtgggtaaagtcgggtaataagagatttaaaagaatttttcg

SEQ ID NO: 341712 - DNA, 554 bp, Homo sapiens
tgacagcagctagagacatacctcttcagaagggggaattgatagtggctggaggcaggcaaatacctagacagatagggatgcctccccggtgaaatcacaccttcaagccaaaaaacagcttgaaggctgaaagtctggactgctggtcctggatgaacccacaacccagagtgagaacttctgttcctgtttacccactcttttctgatttattctttctgaataatgcctttcaaccaatagaatattgccgttttcaatatagcctgactatcccctattctgagcccataaaagccccagactcagccacattggggrgactttcccaccttcaggtagggggacaccccagcataccctctccatggaaaactatttcatcactctctgccttgctcactctccagctgtcagtgcatcctcattcttggatgctggacaaaagctcaggacctactgagtgcaggtatccagaaaggctctctatgtcaggaagccgtgtgctggtaagctgaccaccaaaaggcaatttgtagcattttaccatt

SEQ ID NO: 341713 - DNA, 554 bp, Homo sapiens
tgacagcagctagagacatacctcttcagaagggggaattgatagtggctggaggcaggcaaatacctagacagatagggatgcctccccggtgaaatcacaccttcaagccaaaaaacagcttgaaggctgaaagtctggactgctggtcctggatgaacccacaacccagagtgagaacttctgttcctgtttacccactcttttctgatttattctttctgaataatgcctttcaaccaatagaatattgccgttttcaatatagcctgactatcccctattctgagcccataaaagccccagactcagccacattggggagactttcccaccttcaggtagggggacaccccagcataccctctccatggaaaactatttcatcactctctgycttgctcactctccagctgtcagtgcatcctcattcttggatgctggacaaaagctcaggacctactgagtgcaggtatccagaaaggctctctatgtcaggaagccgtgtgctggtaagctgaccaccaaaaggcaatttgtagcattttaccatt

SEQ ID NO: 341714 - DNA, 567 bp, Homo sapiens
ccatctgattgaacaagccaaaaacacaggcataatactcaatatgatcttgacttttactcctctcacttaaaagcaaacaaagaaatcatcaagtcctgtgtctactgtgcatttctcatatcttttggactctaccatcatcatccaataactggccaatttaatatggtttttatcaagcctcttaactggtctaccctcataaataccctgactgcctgtttattgtccacactgttgccagagtgatttcttccaaaggcaaattgatcacatcacagagctgataaaaggamttgaaaggcctccaattgtcattagtgttaagtgaaaattctttaatgattctacaaggctctttactgtgtggctcttagtctctctgccctagttttgatttacacttttcctagttctgtccactacaaactcaccataccttttttcacaaatgctgcttcctcttcctacaatgcttctctagccccttcctcaattaatttatgctcaactttcagatgttgaatcaagcatcacaatctcagggaggctttcccaatttcc

SEQ ID NO: 341715 - DNA, 584 bp, Homo sapiens
ttttaaccatggtatgccggggttgtttctttcacagtaataacaaattgatacagacactaattagctctgcaaatgtgcttaaaaataatgcttacaaccatttaataagactttatgtatgagacacagtgcagaacactttacattcattatccctttagatcttattcaaaacctctctgagggtttcacagatgrgaaaaattagatgaatagaaatgaaataacttagtcaagtttacacagcttgtttaagtggcagagttggaatttaaacctaagtctatctggctctgaagttgttctttttttgttttaccaggttgactttattcataatctagacttcacatagaaaataatcagctgtgtgaatatgactgagttctctgggtccattttcttcaactacaaactagagggaactaaatatctttttttcttcttaccttctttggttctatgttcctacatacaaaagttatttgagggcagttggagttaaagcatgtatgcagtttgatgataatgatgatgacgatgacaatgacaacatatatcacagagatgaaagcatggac

SEQ ID NO: 341716 - DNA, 576 bp, Homo sapiens
tgcataaccattgtgttcgggagtgtgagtttcttgtcattatcagataggaatattaagcaacgatgtgcctgtagccaaaatactcatggagcaaatgaggaggtcatggagctcatgcatktgaaatttccagtatcatatggctagagttttccagaatcataggtctggaaggggcttaaaggatattgtaggcctttgttgcttttgcttatccaatatccattgcactttctcttgcaaagagcacttcctttttctcttgaggaatctctcatcagtgcatacagtctggtttggcagtttaattgaatgacctaccttttcctagccaagaggcaggggtgtgacccaagaggcaaggtctatcagatgcccgtctcatgaaacttgagttatgagttagaacaataaaaattctgaaaataattgagttctcactcatccaggagatggtgcctggaacctctgtgacttcctgaaacctattccaaatgtgttcttcagcctgtcttcactattatgaatctacgtccctgcatcattcttccagtaaaattctatttggcataa

SEQ ID NO: 341717 - DNA, 599 bp, Homo sapiens
aatgtatgtgtctctaatggagttctttaactttcccatgaaatttttttttttttaatacaaggcgtctatatgtaaggactgtagttagagtgatatacttagcatgacaatatggtaacgtattttgtaattatatagtatctttttgaatatgagcatctactttttatgacagcaattttgaggggatgagtgaacttcttagattgkacagcatcccaagatagttgaactacttcaaaattatactggctatcagagtacatatttacccttttatttttaataatgtgatgcattctagtagtggtcatttttcagctatataaatctggtttcaagtaaggaattagattctatgacagaggctgaactaattattgctaatattatcaggtaagactcaccatatatgaagtcaatatttaaagacgtattcaaaagatctgttctggacttcaattcttcttgaaccacagaaacacaatcaagaaattttctttcactggatcagggtatgagagttgttagattgactgaaggagccagtaataatattttataactaggtagttgactagcagaaaaatgttggt

SEQ ID NO: 341718 - DNA, 610 bp, Homo sapiens
tgatctcacacagaagagattataggaactgggatggaaagaaggctgaatagacgactctggggaactaaccattcattcaattggcaggggaagacaacttcttgaaggaaactcagaaaaatgcagcagacaggtagcagaaaatatccaggagtgaaatcagaaacatcactgtaggaaagtttctagtatctggacaaagtataagaaattgaggcaagcttccaggtattttatcattacaacatcaaaaccacttacctgccaagaacttggagtcaaggctcatatccttagaatcttcacaacttgamctttgcttggataattccggtgaaatggagtttactatcatatcaggtaaacgatttgtgaccacaataaaatatatatacagaaaattaaataaaagttgacttattttatttcagtttttatttgggcttctatatataaagtcagaaacagtaatttattaaatgatatcccatccaaggagaagaaatatagggaatgaagtcctcattcaaagcaaatgtgccacaggggaaaacttccaaattgccgaattctgacttaataaaggtctgagatcgggccatcaata

SEQ ID NO: 341719 - DNA, 592 bp, Homo sapiens
ttcaatatattaatataaattttgggagagacacaatttagtccataacaatctgttttttaaaatagatatataaaaatggttccattattggaacactaatacatatatatgtatgtattacactgaatctcatgagtacatgatttccgtctataatccccagtttccaacatgtcaataatcactcggcatatatttcttgaatgaaagaacagagatacatacaaacgaacatctatcattgactcttagttgtgtatggaatgtaatctaaattcctttatccacacacaaagacctccattgtttggccctacttacttctccaaamgtgcctctatctttgtcctaaagcaggattcttaaactttagtctgcataacaattccatggaaagcatgttgaaaatataagtttccaggtactagctctagggagtcagcttctagcaacccctagacacattaggggtttctgaatgtgaatgtgcaaacattaagaatgtaagaaacaccagtctagacaaatcctcaactcctggttataatagatatctatttatatcttgaaaattgctccacttaactct

SEQ ID NO: 341720 - DNA, 437 bp, Homo sapiens
ttgttctcttacctgaattcccagccctgtcttctgccatttctgggactgcatggagcctgacccagcagtgggcacagaaacatgcaggtgcagaaatactgaggatgaaaagcttactgtagctttcaacagcttgaagatattgaactgaaatctgaaatgcgttaaggtaacaaatttgaaaatgctcatttcattcctatgcccttcacctcccaggtatcttctcattggccttggsgtgttggaagcaagctgattccaggcatacttgcaaaaaaagatccccataataaagtatgtgtgaaaatggttgtagctttggccagcacatgggaagcagatgttttccaagagaattgatggcatcgcaagcccatcacaatctggccacaatctgtctttccagacgcatcagcccccaccccatacat

SEQ ID NO: 341721 - DNA, 437 bp, Homo sapiens
ttgttctcttacctgaattcccagccctgtcttctgccatttctgggactgcatggagcctgacccagcagtgggcacagaaacatgcaggtgcagaaatactgaggatgaaaagcttactgtagctttcaacagcttgaagatattgaactgaaatctgaaatgcgttaaggtaacaaatttgaaaatgctcatttcattcctatgcccttcacctcccaggtatcttctcattggccttggcstgttggaagcaagctgattccaggcatacttgcaaaaaaagatccccataataaagtatgtgtgaaaatggttgtagctttggccagcacatgggaagcagatgttttccaagagaattgatggcatcgcaagcccatcacaatctggccacaatctgtctttccagacgcatcagcccccaccccatacat

SEQ ID NO: 341722 - DNA, 596 bp, Homo sapiens
ttctaatccaaagaataaagtgaatattcatgaactcatactgatataaataaatggtagaataactaaataaatgcaagagaagggaaaactcttccttatgaagagttccaattaataaatgtggaaagaagaaggaaactgaaaatcacacttagaatcccacaataataaacgttacagacagtatctattgatgaatgctaaaatcagtgggaaaatttgtagggacaaacagtatctcctccaagtttattagttattttggtgattttaacatataacatgaattatttactgtctctctaggaagtggcactgaatttaccctctgcccgtgagctgtacatagcaattaactttaacaaatagagtatgaacagggaaaaatagcaattttacagtggggaagtctaggtgcatcatctttatcaagtgatcaaggtttacatcaccattaataggctatgttgatatcatgagtccttcggtaggttacaatgacaaaagccartcatctttgtgatattctttctcaaaacctacaacctgagtctatgcaagagaaaacatcagaccaacccaatctgaagaat

SEQ ID NO: 341723 - DNA, 557 bp, Homo sapiens
gtcacatagcttgctcagtgagtgatggagatttgaactccaacaatctggtttcagagctacctctcttaaatctactctacaggtttcatttcagcctctaatacccattattatggtgctaaaagatatagcccactccatatgtttgctcaaattatatcttcattggaatctcccaccccacttaccttctttgtccataagtcctgtcattctgcacatctttgtgagacgctttcatgacaaaaccttctgcttattctctagctcataataacatgttattagttggaatttcactagtagttttatctctgctgtcatttcawcatatattcagatatcccctttgagagttatgaaagattcaatggttgtatgtctattcccaaaccagattaaagttcttgcaggcctgtgaccatgactgaacctgtactttccaaagtgccttctaaagagctgtaccatcatagtcaatgtcatcttaaccttccattcccacagaaaaagaaaatgtgaagggtaatgacaaacattcacagcttcaaaat

SEQ ID NO: 341724 - DNA, 627 bp, Homo sapiens
ccttaacttcagcaactctcctcccctgctccccttccaccaacccccatctctatttaaacaaacaaacgggcggcaaaactggacctggccrgaggagcctttcaagtgggcgtgtctttcggctggggaaaagggaggagttagactctgggcaacatcactcctccctggtcagctgggagagcaatcaaaactgcagcaagtcagaggctccggccagagagcaggagctgcccagaggcttgtggtcctgaaagctcctctccggggagctaaccagggagaggaggtactgaagagcgactaaactggctgcagcggagagatcagcccgaaggcgtccttgaggagcatacggaactccaaggaaggagtagaataaggagcaggcagagaaaccagacccggtggaatctctaagaggtaacaaccgggtttgacatggatcgctgaaagcgtctcttctaccatctggatggtcagggagacttggcttctctgactgtcctctaagacgcagattcacagagttcactccaggaacggccagtgaccgaggtgagccagtggttggggtggtaagggggctaaagtttctgtgggaagttcccactcacctagagg

SEQ ID NO: 341725 - DNA, 335 bp, Homo sapiens
catctaagtatttattgataccgtctaaaactggacttatgtatatgtgatgacctagcagcgtgacctctaggtttatatatagtggcaaaaaggggataatgtcttttcttcccatcataagtgttacagctgatacccctacaacaaaagacaggttaacaagagaaaaaaaaatgtatttgatcatagctccacatgagacaggagccttcagaatgaagacccaaaggtacagagaaaactatcgaattttgtgctaggttcaatgaagaawggacagcaaaaagggtatgatctaacaggaaaagactgagtaaggaaacccagcaagg

SEQ ID NO: 341726 - DNA, 335 bp, Homo sapiens
catctaagtatttattgataccgtctaaaactggacttatgtatatgtgatgacctagcagcgtgacctctaggtttatatatagtggcaaaaaggggataatgtcttttcttcccatcataagtgttacagctgatacccctacaacaaaagacaggttaacaagagaaaaaaaaatgtatttgatcatagctccacatgagacaggagccttcagaatgaagacccaaaggtacagagaaaactatcgaattttgtgctaggttcaatgaagaaaggacagcaaaaaggrtatgatctaacaggaaaagactgagtaaggaaacccagcaagg

SEQ ID NO: 341727 - DNA, 595 bp, Homo sapiens
caaacttggttttataacaagctcacttgagataacgaatcctctcccacaatagtgacattaatccatttacgaggacagagccctcatgacctagtcacctctcaaaggtttgacctctcagcactgcatggggggttaaggttccaatataccaactttgcgagactcattcaaaccacagcagtgcccttgtgctaattacagaaaggcactcaccctatgtgaatgaattagaaaaaaatggagctcgctcttagaagatgaaagccctagagtttttggatggcaagctcagtagggctggattctaattcccatttgcctactcagctgggtgtctctgggcaatgcatgggctgcacaacgctacacggtggctggctgagtgctgctaccacttcctatccactactarcaagtagtagttaatacctggaacttaaaacgacattataatggaagatcactaatctccaggaaataattacagactctgaaaaaggcagaagtgggactatttcccagcagaactgaaaaaaattatcccatttagctctgcctttgattgtggtgagtgaacttcccccttcca

SEQ ID NO: 341728 - DNA, 595 bp, Homo sapiens
caaacttggttttataacaagctcacttgagataacgaatcctctcccacaatagtgacattaatccatttacgaggacagagccctcatgacctagtcacctctcaaaggtttgacctctcagcactgcatggggggttaaggttccaatataccaactttgcgagactcattcaaaccacagcagtgcccttgtgctaattacagaaaggcactcaccctatgtgaatgaattagaaaaaaatggagctcgctcttagaagatgaaagccctagagtttttggatggcaagctcagtagggctggattctaattcccatttgcctactcagctgggtgtctctgggcaatgcatgggctgcacaacgctacacggtggctggctgagtgctgctaccacttcctatccactactaacaagtagtagttaatacctggracttaaaacgacattataatggaagatcactaatctccaggaaataattacagactctgaaaaaggcagaagtgggactatttcccagcagaactgaaaaaaattatcccatttagctctgcctttgattgtggtgagtgaacttcccccttcca

SEQ ID NO: 341729 - DNA, 582 bp, Homo sapiens
  misc_feature (1)...(582): n = A,T,C or G
aatttgcagctccaatataattcagagacataattatgaactacagttgtagtttctatgaagaaatttttggacatagcaaacaagttggcccatatgagagataatgaatggctttaactatttcagaatttgggtaccatagcatgccattttggggcttagaagataatgctccaaattatggtgttttggcctgctgagtgcttgaatccctgcctttnnncccttagaagctgggatctctctgactttcccctgcctttctgntcttctttcttttccgngtgctgngaattttcctcttctgactagsggagtttctttgcngntgaaatacacttgttttacgattttctccctggtaatctcatcaaataaccaggaaatattaactaccagagaaaaagactgggagtcatcacatccagacaggttttcatttattcttctgagggtaactcaaagggtttacatgggaaagtttatctacaaaatgaaataacttttgtttactgtgattttttactcttccccttcctgccacctcccctagagcacattctccctgaaaatcaatta

SEQ ID NO: 341730 - DNA, 582 bp, Homo sapiens
  misc_feature (1)...(582): n = A,T,C or G
aatttgcagctccaatataattcagagacataattatgaactacagttgtagtttctatgaagaaatttttggacatagcaaacaagttggcccatatgagagataatgaatggctttaactatttcagaatttgggtaccatagcatgccattttggggcttagaagataatgctccaaattatggtgttttggcctgctgagtgcttgaatccctgcctttnnncccttagaagctgggatctctctgactttcccctgcctttctgntcttctttcttttccgngtgctgngaattttcctcttctgactagcggagtttctttgcngntgaaatacacttgttttacgattttctccctggtaatctcatcaaataaccaggaaatattaactaccagagaaaaagactgggagtcatcacatccagacaggttttcatttattcttctgagggtaactcaragggtttacatgggaaagtttatctacaaaatgaaataacttttgtttactgtgattttttactcttccccttcctgccacctcccctagagcacattctccctgaaaatcaatta

SEQ ID NO: 341731 - DNA, 595 bp, Homo sapiens
caaacttggttttataacaagctcacttgagataacgaatcctctcccacaatagtgacattaatccatttacgaggacagagccctcatgacctagtcacctctcaaaggtttgacctctcagcactgcatggggggttaaggttccaatataccaactttgcgagactcattcaaaccacagcagtgcccttgtgctaattacagaaaggcactcaccctatgtgaatgaattagaaaaaaatggagctcgctcttagaagatgaaagccctagagtttttggatggcaagctcagtagggctggattctaattcccatttgcctactcagctgggtgtctctgggcaatgcatgggctgcacaacgctacacggtggctggctgagtgctgctaccacttcctatccactactaacaagtagtagttaatacctggaacttaaaacgacattataatggaagatcactaatctccaggaaataattacagactctgaaaaaggcagaagtgggactatttcccagcagaactgaaaaaaattatcccayttagctctgcctttgattgtggtgagtgaacttcccccttcca

SEQ ID NO: 341732 - DNA, 535 bp, Homo sapiens
gcagacttaatttataccactgcaaaaataataggataaagagattatgaaaaccaaataccatcctcaaggtgcattcagtgttctggaaggaccaaacagagcactacactgagcattctcagattaaagtcaaagctctattaagttcagtttccttgcatgcatggtagctttgggtggtctgctccattaggcctgtgctctagtcatgccatctctcctaagcactcatcaattgagggaggtagaagccagtgagaagaaactaattattaacagtaaaaattgtagctaatccttacagaacacttaccatgtgtcaaatgctattaaaagtgttttcatrtatcattttatcattgcaccaccttatgaggtagtgtattagttgttttcacactgctgataaatacatacctgagactgggcaatttacaaaagaaagagatttaatggacttacagttccacgtgtgtgggaagacctcacaatcatgagggaaggtgaaaggcatgtctcacatggaagcaga

SEQ ID NO: 341733 - DNA, 535 bp, Homo sapiens
gcagacttaatttataccactgcaaaaataataggataaagagattatgaaaaccaaataccatcctcaaggtgcattcagtgttctggaaggaccaaacagagcactacactgagcattctcagattaaagtcaaagctctattaagttcagtttccttgcatgcatggtagctttgggtggtctgctccattaggcctgtgctctagtcatgccatctctcctaagcactcatcaattgagggaggtagaagccagtgagaagaaactaattattaacagtaaaaattgtagctaatccttacagaacacttaccatgtgtcaaatgctattaaaagtgttttcatatatcattttatcattgcaccaccttatgaggtagtgtattagttgttttcacactgctgataaatacatacctgagactgggcaatttacaaaagaaagagatttaatggacttacagttccacrtgtgtgggaagacctcacaatcatgagggaaggtgaaaggcatgtctcacatggaagcaga

SEQ ID NO: 341734 - DNA, 621 bp, Homo sapiens
  misc_feature (1)...(621): n = A,T,C or G
tcatgccagccccccaaattcatatgttgaaactttaacccccaaggtgatggtatcatgaggtggcattttggtgaaatgattaggtcaggagagcagagccctcacgatcaggattagggccttataagagagaccccagagagctagctctcccttcccatcacatgaggacacagtgagaagacaggtatctatgacttaggaagtaggctctcaccagacaccaaatccgccagcaccttgattttggacttctctccagaactgccagaaataaattactgttgtttgtaaatcacccattttatgggattttctctgttgtagcagatgaacatactaaggtaatagctcaacccaccttaaatcctctatcatctaaaaattttgwctgcttttcactcctcctcttctttctttccccatcaataattataccgttgctataagtgtttactttgtaccaggtcccaggtgtagggaggaacctgctggaagcctcttttcttttgggaagagagatcaagttttaaaactcttccacatttcttgtttgtcaagtccatgagatntttcttgatagatctctctctagccttgaaagtctcctgcctccca

SEQ ID NO: 341735 - DNA, 571 bp, Homo sapiens
gtctgactttctaacataatgtgcccagggagctattatgtatcagagatattaattgcagcattgtttttaataatgaaaaagtttattatcaatacattaagtgaccagtggtttagccaaagtaagatatgccatttatctatactaacaaaaatataccacatatactaacatgcttagggggaaatataaaaccattatagaactataggttcaatatgatatacttatttttttaatgtatacacatgcatcaaayaatacatataatttacagatacacatatacacacacacgaactgagaacagtgggtctttatctcaggaaatctcagaactggcatgaaatacattgagatcaggtagttattgagggaaattgtttttttttttacacaagtataatctattcatatgtaacttgtgaatgcgaaattgattttaaaacataattaaaatatgctatctttaaaatcctattccccactcatagccaaatttattttcaggaaaggatctgatagccaccccctacatcaccaatcactggaatatatatataagctg

SEQ ID NO: 341736 - DNA, 620 bp, Homo sapiens
aagaatcaccctggcactgggaaattatccccaattagtattcgtcataggacgggtgctcctgactgtcctcatggccttggatcctaatgtacatttttgcacagttagtgaagaggaaaaaggcttggagcatagtctttccagtcctttgttgacataacataaggtcacccaagtctgacttaatttatgaagcttgaactaccaaattctcctatttaaaaaaaatattttccagagtctttcatttcaagtttttattcacttcttcatcaaaatttccttctggagttcatctatcatctctcttgatgctgcttatagtatgtgatcatatttartcttctctatgaggatagaaatataaagcctgtagatatctgttctccaattttcccatgaaactaagaaattcccacagtggtactattgcttcttgcctgaatccgcccaaaccctcatgtcccccctctgctaccatttccagccttttgttctttcctcttttctacatttctctagacgttcattccataaatccttctccacaatctttcaagagttctggaatctgggttcagccaagtggagtaagatataattcttgttctgaggat

SEQ ID NO: 341737 - DNA, 594 bp, Homo sapiens
cttaatcctgacaaccactttagagctgattatggttacctgaccctcacagagatacgttatttgtccaaggccacatccctgtagtgctgagatttaaactcaagttggtctgactccatgttatatagtttttccactgacattagaataagaaaatggcccaatgtcaccatccaatgtaatttgggattaaaaaaaaaggagaagttattttagtaaattctccattttgcatctatgtaagctctccatsttatagtctagtagagaagaagcaccataaacacaatgtaatttatatttggttctgtgacagtcttagtgcaggaagtgttgctttgtttgtgttattagaataatttcctttctgactccagctaggtgattatgaagcagtttagccttcctcaggcttacagagtggtttttttggcaagggcccacctaacttctagttgggaggagagaatctgcctggaattccgcattactttcaggttgttgtggcattcagaatatttcataacggtttggggcaccacagagcaatgagagctgataccatcaccgccctgtggtggggccccgccc

SEQ ID NO: 341738 - DNA, 594 bp, Homo sapiens
cttaatcctgacaaccactttagagctgattatggttacctgaccctcacagagatacgttatttgtccaaggccacatccctgtagtgctgagatttaaactcaagttggtctgactccatgttatatagtttttccactgacattagaataagaaaatggcccaatgtcaccatccaatgtaatttgggattaaaaaaaaaggagaagttattttagtaaattctccattttgcatctatgtaagctctccatcttatagtytagtagagaagaagcaccataaacacaatgtaatttatatttggttctgtgacagtcttagtgcaggaagtgttgctttgtttgtgttattagaataatttcctttctgactccagctaggtgattatgaagcagtttagccttcctcaggcttacagagtggtttttttggcaagggcccacctaacttctagttgggaggagagaatctgcctggaattccgcattactttcaggttgttgtggcattcagaatatttcataacggtttggggcaccacagagcaatgagagctgataccatcaccgccctgtggtggggccccgccc

SEQ ID NO: 341739 - DNA, 594 bp, Homo sapiens
cttaatcctgacaaccactttagagctgattatggttacctgaccctcacagagatacgttatttgtccaaggccacatccctgtagtgctgagatttaaactcaagttggtctgactccatgttatatagtttttccactgacattagaataagaaaatggcccaatgtcaccatccaatgtaatttgggattaaaaaaaaaggagaagttattttagtaaattctccattttgcatctatgtaagctctccatcttatagtctagtagagaagaagcaccataaacacaatgtaatttatatttggttctgtgacagtcttagtgcaggaagtgttgctttgtttgtgttattagaataatttcctttctgactccagctaggtgattatgaagcagtttagccttcctcargcttacagagtggtttttttggcaagggcccacctaacttctagttgggaggagagaatctgcctggaattccgcattactttcaggttgttgtggcattcagaatatttcataacggtttggggcaccacagagcaatgagagctgataccatcaccgccctgtggtggggccccgccc

SEQ ID NO: 341740 - DNA, 594 bp, Homo sapiens
cttaatcctgacaaccactttagagctgattatggttacctgaccctcacagagatacgttatttgtccaaggccacatccctgtagtgctgagatttaaactcaagttggtctgactccatgttatatagtttttccactgacattagaataagaaaatggcccaatgtcaccatccaatgtaatttgggattaaaaaaaaaggagaagttattttagtaaattctccattttgcatctatgtaagctctccatcttatagtctagtagagaagaagcaccataaacacaatgtaatttatatttggttctgtgacagtcttagtgcaggaagtgttgctttgtttgtgttattagaataatttcctttctgactccagctaggtgattatgaagcagtttagccttcctcaggcttacagagtggtttttttggcaagggcccacctaacttctagttgggaggagagaatctgcctggaattccgcattactttcargttgttgtggcattcagaatatttcataacggtttggggcaccacagagcaatgagagctgataccatcaccgccctgtggtggggccccgccc

SEQ ID NO: 341741 - DNA, 486 bp, Homo sapiens
agtctgatacttggacacacaagttgaaggttcctacctccaacctcccatcctaggtactgccctgcaccatctagaaagtctccttacctctctactcargaccatttgtggtatacagagtcactagtacttccctggatatctcctgtaaatgctcacagtcttgtcaaatcacttctgtggaactctcctttcttgtccttgccctgccctggggacccaccctttttcttccacccactggtgagcttagtggcacagaaggggcatgggaaaaccccagggtggaggatctttccactcctccatctaccccaaaactcatgtaggtggtgatatgctctgcctgctaccactggggcaaggggtgttggaggagcatgaagcccccaatattatgtaggtcactgagaaggcaacacatccatctatctatctttgagatgtgaaccctgaaatctggtcctgatggtggctatccat

SEQ ID NO: 341742 - DNA, 613 bp, Homo sapiens
ggattcccctttcacttggctctcattctctctttcctgccgccatgtaagatgtgcctttgccttccaccatggttgtgaggcctctccagccatgtggaactgtgagtccattaaacctctttttctttataaattacccagtctcaagtatatctttatcagcagcatgaaaacggactaatataccctgactctacaaagaaatacaaaaactagctgggtgggatggcaggtgcctgtagtcccagctacttgagaggctgaggtgggaagattgtctgagcccaagakgttgagcctccagtcaaccctgtcttaaaaataacaacaacaacacaagacatttttcttctgggcaagagctttctggaattgtaaagccacgttaatatagacgataagctgtatgggtgtagaaagatttcaattcgtagtatgccttgtaggaaattgtgatcatattgtatatataattttgtatattatgttattttaatttattttatgccattttctatgttgtgtgtatctactgcaaactctataggtaaaagctatgaagtttcatgttttgaacttacctaaattgaattaatgattctactgagcc

SEQ ID NO: 341743 - DNA, 613 bp, Homo sapiens
ggattcccctttcacttggctctcattctctctttcctgccgccatgtaagatgtgcctttgccttccaccatggttgtgaggcctctccagccatgtggaactgtgagtccattaaacctctttttctttataaattacccagtctcaagtatatctttatcagcagcatgaaaacggactaatataccctgactctacaaagaaatacaaaaactagctgggtgggatggcaggtgcctgtagtcccagctacttgagaggctgaggtgggaagattgtctgagcccaagatgttgagcctccrgtcaaccctgtcttaaaaataacaacaacaacacaagacatttttcttctgggcaagagctttctggaattgtaaagccacgttaatatagacgataagctgtatgggtgtagaaagatttcaattcgtagtatgccttgtaggaaattgtgatcatattgtatatataattttgtatattatgttattttaatttattttatgccattttctatgttgtgtgtatctactgcaaactctataggtaaaagctatgaagtttcatgttttgaacttacctaaattgaattaatgattctactgagcc

SEQ ID NO: 341744 - DNA, 385 bp, Homo sapiens
cacagctctcttagaaactgcccacagggaagagaaaagggagggggtgatggctgggggccagagtggggatggtgaaaggctgacagatggagtgctccctttgagggctctctaaggaccaacmgttgcacagccacacaatgtacagaagtaaatcaaatcgaggaacatgtgcactaaagaagaagaaagaagggagggggaagagggcacacagtagggagggggctgcgagggaggtggagatacccaaaagcctgaagaagagagagtgaagggagttagttagggagaggggaaagaagctcatagatccggaggcctgcatttttctggagccgtctgggagaaaaggggaagatgtggacagggagggcagatc

SEQ ID NO: 341745 - DNA, 584 bp, Homo sapiens
ccatgagtgggaggatatgtttcttattgtaagagcttctagggaccaagatactaccatcccctcatgttgcattgtgagctgtggtagtgaaaaatctttcctaaaattgaatctccagcaagcatattgtgggcaaaatayggctcttctgaacatattctggacaatggggaatcaaatggggatgccatttcaccagctgcttcaggatgagtcaacagaagaactactgataatcattttactttcagtgtctctcctagagcaaccagagaatagattctggacttatacttaactatccattacctgctttaggatggcaatatagtgtagtggaggtagactgcttatatccaaatcccagtaccgtaggatttggatacaagtgctatgatgttgagcaaacaattttctctgtatcccattaattcatttataaaacagagataataataataatacctacctgatatggtttggctgtgtccccatccaaatctcatcttgaattcccacatgttgtggcggggacccggtgggaggtaattgaatcatggtggcaggtctttcccatgctt

SEQ ID NO: 341746 - DNA, 561 bp, Homo sapiens
catatatttttttcaaatatgcatatattaatatgtgtgtctacacacacaaagaaaaacaaaaattagaaacatgtcagctgacatggagaaacaagccttatatacaatattttctttccataatcctcaacagagattattcatatggataactgagaacttactgtatttgtaatcaagtaaacaatatagtcaacatcttcctattatttccaactgaggaaggaaaaggggcaattgtacaattctaggaatagcataattcctcaatttgatttacagtaaaattattttagctcaacgtagatttaggccttttaattgctaaacatgttagagtagttgtctctwgagaataagatcattgcctagaaaactgtcttctaaatagataaactgaaagtaccccagttccttaagatagctgaccagcaagcaaaccacacaaggcatccaaacaccaccttgattttaatgttttgtagtcgatttttgcctcatcttttagcttttactcaatcacttattcactcttttttttccaagagtgtgggcatg

SEQ ID NO: 341747 - DNA, 630 bp, Homo sapiens
tgttccttctgcttaccgatctggctgtgtctccttactgtaatgctgtaatcattcttaaccaggagtgtaactttacatttagtcatttgagtccttccatcagtcactgaactagtggttgctcttggggaccctgaaacacataaattttagagtaagaggaaaatgattgccttaatygtgtaaaatgaactacagaattaactgccttaattgtgtaaaatgaacaacagaattaaaggtaagtttggaaatttggaaatttggaaataataaattattctatcttttttttctctctccttttaaatataacactagggccagtgtcgttattatccttgtggagtaatagaatcaatactgccaattccagaaaacatcaggaatttgctggacgtttgaactctgttaataacagagctgaactatatcaacatcttaaagaggaaaatgggtttgtgttacttattgtcaaaattggttttgtcaattgcctgtatagtaccttaacaatcattgcttatttgtaataatcagcagttttttattactaatattatgaactaatacatgttccccataagcagaaaaaattaacctctttgattcttgcttctaaaaggc

SEQ ID NO: 341748 - DNA, 630 bp, Homo sapiens
tgttccttctgcttaccgatctggctgtgtctccttactgtaatgctgtaatcattcttaaccaggagtgtaactttacatttagtcatttgagtccttccatcagtcactgaactagtggttgctcttggggaccctgaaacacataaattttagagtaagaggaaaatgattgccttaatcgtgtaaaatgaactacagaattaactgccttaattgtgtaaaatgaacaacagaattaaaggtaagtttggaaatttggaaatttggaartaataaattattctatcttttttttctctctccttttaaatataacactagggccagtgtcgttattatccttgtggagtaatagaatcaatactgccaattccagaaaacatcaggaatttgctggacgtttgaactctgttaataacagagctgaactatatcaacatcttaaagaggaaaatgggtttgtgttacttattgtcaaaattggttttgtcaattgcctgtatagtaccttaacaatcattgcttatttgtaataatcagcagttttttattactaatattatgaactaatacatgttccccataagcagaaaaaattaacctctttgattcttgcttctaaaaggc

SEQ ID NO: 341749 - DNA, 630 bp, Homo sapiens
tgttccttctgcttaccgatctggctgtgtctccttactgtaatgctgtaatcattcttaaccaggagtgtaactttacatttagtcatttgagtccttccatcagtcactgaactagtggttgctcttggggaccctgaaacacataaattttagagtaagaggaaaatgattgccttaatcgtgtaaaatgaactacagaattaactgccttaattgtgtaaaatgaacaacagaattaaaggtaagtttggaaatttggaaatttggaaataataaattattctatcttttttttctctctccttttaaatataacactagggccagtgtcgttattatccttgtggagtaatagaatcaatactgccaattccagaaaacatcaggaatttgctggacgtttgaactctgttaataacagagctgaactatatcaacatcttaaagaggaaaatgggtttgtgttayttattgtcaaaattggttttgtcaattgcctgtatagtaccttaacaatcattgcttatttgtaataatcagcagttttttattactaatattatgaactaatacatgttccccataagcagaaaaaattaacctctttgattcttgcttctaaaaggc

SEQ ID NO: 341750 - DNA, 630 bp, Homo sapiens
tgttccttctgcttaccgatctggctgtgtctccttactgtaatgctgtaatcattcttaaccaggagtgtaactttacatttagtcatttgagtccttccatcagtcactgaactagtggttgctcttggggaccctgaaacacataaattttagagtaagaggaaaatgattgccttaatcgtgtaaaatgaactacagaattaactgccttaattgtgtaaaatgaacaacagaattaaaggtaagtttggaaatttggaaatttggaaataataaattattctatcttttttttctctctccttttaaatataacactagggccagtgtcgttattatccttgtggagtaatagaatcaatactgccaattccagaaaacatcaggaatttgctggacgtttgaactctgttaataacagagctgaactatatcaacatcttaaagaggaaaatgggtttgtgttacttattgtcaaaattggttttgtcaattgcctgtatagtaccttaacaatcattgcttatttgtaataatcagcarttttttattactaatattatgaactaatacatgttccccataagcagaaaaaattaacctctttgattcttgcttctaaaaggc

SEQ ID NO: 341751 - DNA, 595 bp, Homo sapiens
atgaaaattcttgtatgtcactataacacttgactattccagacgaacaggaaattccttattcatcggtttgttcaacatactgcatastccaagatgtattataggagtagagggtgtgcctgagagaagtgaaaggaatcaatgatcatgaactttatattactcaatcctagtatgagaactgactgaatgaacaaaattaattatctttaatgtccctaaaatagcaataataaggtgactatttctatagataaccttcagttaatatttttaaattatttaagattttgtaggtaaatgaaaacacttagttttgtggatgtttctgttggtgtttactaacaatgcaaaacaaggtggagaactgaagcagctctctggatgattcatgccctatgaaatagccaatttcttgagtttaagcttaggtatgtgctttcctttctattttgttgttttgtttgaactcaattttcctattgattttgcaaacaggacactcccagacttggtaacatctccacacctagatgaatatcatctttttcccaatgtggaaatgaaaaaactaaggaccaaacaaattggg

SEQ ID NO: 341752 - DNA, 595 bp, Homo sapiens
atgaaaattcttgtatgtcactataacacttgactattccagacgaacaggaaattccttattcatcggtttgttcaacatactgcatagtccaagatgtattataggagtagagggtgtgcctgagagaagtgaaaggaatcaatgatcatgaactttatattactcaatcctagtatgagaactgactgaatsaacaaaattaattatctttaatgtccctaaaatagcaataataaggtgactatttctatagataaccttcagttaatatttttaaattatttaagattttgtaggtaaatgaaaacacttagttttgtggatgtttctgttggtgtttactaacaatgcaaaacaaggtggagaactgaagcagctctctggatgattcatgccctatgaaatagccaatttcttgagtttaagcttaggtatgtgctttcctttctattttgttgttttgtttgaactcaattttcctattgattttgcaaacaggacactcccagacttggtaacatctccacacctagatgaatatcatctttttcccaatgtggaaatgaaaaaactaaggaccaaacaaattggg

SEQ ID NO: 341753 - DNA, 569 bp, Homo sapiens
cacataccgccaggtgaaatctgaaagatcacacattttcttcaaaagagagtagacatttacctcaagagattgtttacattttttgtcactggatcaaattttaaagaagtgactgaagtggccgtttcctggccatccagcaggtggagccrtgcgttgatcagatcagcagcagacagtgaggttttagacaaatgaaggaactacatttcctctatgcttctgacttgcagagccgggaaatatgtaacccaacataaaagtacaacttttcttctaattagtcaatgtatggtatttgattatgtcaagccactgtttctaaccacatgcagagaaataaataaaaaatattctccaggaactttccttgatctctccaaccagaagcaaccccttccccttctgaatgttcctagcacacaggctctcaaagtgtggttcctggaccatcatcagagcgtcagctgggaatatgttagaaatgcaaattatcagatcccatcccagaactactgtagcagaaactctgaggggtgaggcccagcaatacatattttaacaaa

SEQ ID NO: 341754 - DNA, 569 bp, Homo sapiens
cacataccgccaggtgaaatctgaaagatcacacattttcttcaaaagagagtagacatttacctcaagagattgtttacattttttgtcactggatcaaattttaaagaagtgactgaagtggccgtttcctggccatccagcaggtggagccgtgcgttgatcagatcagcagcagacagtgaggttttagacaaatgaaggaactacatttcctctatgcttctgacttgcagagccgggaaatatgtaacccaacataaaagtacaacttttcttctaattagtcaatgtatggtatttgattatgtcaagccactgtttctaaccacatgcagagaaataaataaaaaatattctccaggaactttccttgatctctccaaccagaagcaaccccttccccttctgaatgttcctagcacacaggctctcaaagtgtggttcctggaccatcatcagagcgtcasctgggaatatgttagaaatgcaaattatcagatcccatcccagaactactgtagcagaaactctgaggggtgaggcccagcaatacatattttaacaaa

SEQ ID NO: 341755 - DNA, 618 bp, Homo sapiens
acatccaattggtaatgtttgtaaattaactgggatatatagaactgaaactcactagacaggatgagattaaaaatataaaactgtatcaaatgctactgagcaataaattaagataagaactgaaaagtgtcctttgaattaggcaatttggaggtcactaatgagcttgccaagaacagttttggtgaagtccttggaaatggaagaggatccagagagcaaatgatgggactgacccttcaagaaggagggacacttctttcattaaaatagaaggagcaggaagatgataggtgcagaagtgggaatgttcacaggattgctgtggaaaatatstgagcgctcagtctaatgccttttgttcgcaatgaactaggacaaagcaaagggaacagtaagagaaagtggtagggttaagaaagagagggaaatgtgcaaaataaccaaaaagagtgagaggaaaattcttatttgtaaaatagaaagtgagtagattgacaacttcctcggaaagtaacacttgctatgagaaggtgttaagatgtttttggaataataacgttcatatttctgtattcaaaataaaagaattcacataaagtttaggcatgaagg

SEQ ID NO: 341756 - DNA, 376 bp, Homo sapiens
catcagtggttactcttagttgggttctgccaagaaaacagctaattaagtattccagaaataagcaatttaatataggaattaatgyttacattcatgtgaatgtaatgtgaatgtaacctgcagcagactgcattcagaaagttagaaaaacaaccacaggccagtcacagttgctctggtctgtaatcctagtgctttgagaggctgagacgggaggatcacttgaagctaggagtttgagaccagcttgggcaacatagcaagaccttgttcttaaaaaaaaaaaattaattaaccatgcatagtggtgggtacctgtggtctcaactacttaggaggctgaggcgggagaattccttgaacccaggagttc

SEQ ID NO: 341757 - DNA, 612 bp, Homo sapiens
gtgttgaatatactaatcataaagcattaggaataaaattaaacatttaatctcaaatgatgttatcaaaagaaatatggaaagcacaatttttaaagtatgctcctctcatctagaaaccagtttcctaaaactcttaagtctcatataacccaccataatcttgagagtctcataatttaatttaatattctttgttatttccaaataaaatttcctaaccagataattttgatttttgttttgttttgttttccattatttcagctttggcaatgaaacaactcagtgacaaccctgagaaacacagaaatcagacctgtgagawttgtggaatctaatatagtttcactgcaggagatttcaatgtgtaaatcctaaatgcaagaaaaagggccctaaaggttaacatttacatacttttttttaattttaaaaattccaggttcccatcaaaatttataaattcctgggcagcaccatagtgtacacatggggacaaataaagtaaagccaaaagagcaaaataaacatgaaatatgtacaacttgtgcaattatgaatactttaaaaaatctcctcgggttttttacaaacctgtagtcgaaagtt

SEQ ID NO: 341758 - DNA, 612 bp, Homo sapiens
gtgttgaatatactaatcataaagcattaggaataaaattaaacatttaatctcaaatgatgttatcaaaagaaatatggaaagcacaatttttaaagtatgctcctctcatctagaaaccagtttcctaaaactcttaagtctcatataacccaccataatcttgagagtctcataatttaatttaatattctttgttatttccaaataaaatttcctaaccagataattttgatttttgttttgttttgttttccattatttcagctttggcaatgaaacaactcagtgacaaccctgagaaacacagaaatcagacctgtgagaattgtggaatctaatatagtttcactgcaggagatttcaatrtgtaaatcctaaatgcaagaaaaagggccctaaaggttaacatttacatacttttttttaattttaaaaattccaggttcccatcaaaatttataaattcctgggcagcaccatagtgtacacatggggacaaataaagtaaagccaaaagagcaaaataaacatgaaatatgtacaacttgtgcaattatgaatactttaaaaaatctcctcgggttttttacaaacctgtagtcgaaagtt

SEQ ID NO: 341759 - DNA, 612 bp, Homo sapiens
gtgttgaatatactaatcataaagcattaggaataaaattaaacatttaatctcaaatgatgttatcaaaagaaatatggaaagcacaatttttaaagtatgctcctctcatctagaaaccagtttcctaaaactcttaagtctcatataacccaccataatcttgagagtctcataatttaatttaatattctttgttatttccaaataaaatttcctaaccagataattttgatttttgttttgttttgttttccattatttcagctttggcaatgaaacaactcagtgacaaccctgagaaacacagaaatcagacctgtgagaattgtggaatctaatatagtttcactgcaggagatttcaatgtgtaaatcctaaatgcaagaaaaagggccctaaaggttaacatttacatacttttttttaattttaaaaattccaggttcccatcaaaatttataaattcctgggcagcaccatagtgtacacatggggacaaataaagtaaagccaaaagagcaaaataaacatgaaatatgtacaacttgtgcaattatgaatactttwaaaaatctcctcgggttttttacaaacctgtagtcgaaagtt

SEQ ID NO: 341760 - DNA, 705 bp, Homo sapiens
  misc_feature (1)...(705): n = A,T,C or G
ccttccttggggaaccactctgtcagacacctttccatgtagctggaattcagcagtatttatcttttccctcttcktttttcacttctcaagtcttaaaactgacatctgaggaaattgtgagatatgtaagaaaggaagaaaaaaagaaataaaaccatgatcatatattaactaaaaagcaggaataaaacagcatgcaagtatgtgatttttagcacaaaaaaattaaggaaacaaaaggaaattgagcattattaatatctactccaactgaatatcaggcatgaataagtgtaacatttaggaccactaaactgtaaaattattaccaacaggatatggtaggatcctatttttcaagtcattcanaaccaaaaaagaattatagggtatatgtgggtgagaaagcaggccaaaggtttattagctccatcttctgtatctcatatgatgctgtgaacttcagttaaaaaaaatagatcagaaagattgaaaagtgttcaaattactagtctcctaaaatagaggtgtagagatatcttttgcagtgctaggtaattctttctcttcaattgctactctaagtaattacctacatagaacaaactacatttaagaaaagagattgataattttcatcgattccttaaatttcctttttttccactttgaatttgaaacaaggtaacaagatctataaat

SEQ ID NO: 341761 - DNA, 595 bp, Homo sapiens
gataattgaacataagtacccacaaaaacctgtacattaatattcatagcaacattattcataatagccaaaaagcaaaaacatctcaaatgtctatcaaataaagaatggaaaaacaaaatgtggtatatatatatatatatattcatacaatggagtattattcaaccataaagatgaattaagtattcgtacatgctacagcatcgattaaaacatgagacttgaaaacatgctragtgaaagaacctagccacaaaaggccatatattatatgattccatttacataaaatactcaggccaagtaatttcatagacacagaaagtagattagtggttgccaggcactagagagagaggggagaggggtgcaactactaaagggtgttggctttcttctttgaaaccatgaaaatattctgaaaacaggtgatgataatggcacagctctgtgaatatactatgtatcactgaattaaatgtttgaaaagcacaatatgtacacatgtcaatgggagaagaaggtcttgaagtatgacagtggaaagttgcctgtattagaactttgcacttagttcttttattttaaaaac

SEQ ID NO: 341762 - DNA, 595 bp, Homo sapiens
gataattgaacataagtacccacaaaaacctgtacattaatattcatagcaacattattcataatagccaaaaagcaaaaacatctcaaatgtctatcaaataaagaatggaaaaacaaaatgtggtatatatatatatatatattcatacaatggagtattattcaaccataaagatgaattaagtattcgtacatgctacagcatcgattaaaacatgagacttgaaaacatgctaagtgaaagaacctagccacaaaaggccatatattatatgattccatttayataaaatactcaggccaagtaatttcatagacacagaaagtagattagtggttgccaggcactagagagagaggggagaggggtgcaactactaaagggtgttggctttcttctttgaaaccatgaaaatattctgaaaacaggtgatgataatggcacagctctgtgaatatactatgtatcactgaattaaatgtttgaaaagcacaatatgtacacatgtcaatgggagaagaaggtcttgaagtatgacagtggaaagttgcctgtattagaactttgcacttagttcttttattttaaaaac

SEQ ID NO: 341763 - DNA, 599 bp, Homo sapiens
cacatggcataaagccttgatgtacagcctgtcgaatagcacataaaaatggatatataaatacatttgaaagatgccaggtgctatataaacataagacattattgttgttgttattcatactttatttataaaattatttgggttattttaaattaaaatatgggtttaaattttgctattttgagctttcagttcaagaggattttatacattggcaaaaatcacctacctggcccttacaaggttgctgtgattgtgccacttcgactcacagccagactttattgaatcggttccttcatttggaccttgtttccaaggccctaattttctggctcagttcaggttcaaagatttgtcagacaacaatatctggcaattctagagcagaaaaggcccaaagctaaatagaattgagaaatctcataggatttccatgccagggctttctggaaagggaaaagtttttcaaaaaagaagaagaaggagtaatgcattcttctctcctggagacagattaggacctccttgcttcgtacctctttctgccatgcaccayaacaaatacacacacacacacacacacacacacacac

SEQ ID NO: 341764 - DNA, 479 bp, Homo sapiens
tgaataggttttgctaacagactggataaggtttgagaaacagagaactgtcaaggatgacaccaaggtatttgatttgagtaactggaagaatagaagtaccattaactgagatgaaggagacttcaggagaagctgagatgttaaattcctccaaggagaatttgtgattgtttctgccagggccctasttcaagactatttaaaccaagttcctgatttgacagtttggtacttgatatggtctggctttgtgtccccacccaaatctcatcttgaattataatctgaattgtaatctccatgtgttagaggaaggtcctcatggcaggtgcctggattatgagggcagtcccccatgctgttcttgtgatagtgagtgagttctcatgagatctgatggttttataaaaaattcttcccctttcactctgcacttctctctcctgccaccttgtaaagaaggacgtgtttgcttt

SEQ ID NO: 341765 - DNA, 582 bp, Homo sapiens
gcaaaaaaagtagaaattaacaagaaaacatttataatgaccatatacatgaaaatgtaaatgatcattctgcttagaaaagaaattaacaaaaattacataattgtaaaaattaatgaaagccctgtacatggaggacaagccctaatagcccccaccttcatgctctgtataatctcctcccccytgtgaatgagcagaacccatgacttgcttttaacccctggaatttgtcaaggggaatggaatgcactcccttgataaggttaggttgcatgacaaaggtcatgatatgccattcccctaattaggttttatgttacatcatataacgctctatcttagcctaccagaaagaaacttttcttccttaatggcttgaagaagtaagctgtcctgctgtgagagggtttgtggagactgccatttggcaagaaaaaactgcaggcagcctggagctgacagtagctcctagccattagccaacaagagaacgggaccacagttctacaatcccagggaaacgaattctgccaccaacctgtgggaagaaaggaggaaagggagggaaggaggaagaaa

SEQ ID NO: 341766 - DNA, 232 bp, Homo sapiens
ttacaagcatgagccactgcatctggtctgaattatctttaataattatatgtgaaaagagatacagtactagtwacacatgcatcttgtcttgtacagaaaatgattatcttgctcacaactactgcatgacttaaatttattaagagtaatctctatttctgatacagattaataacaacttttccattctaagatcttctatctcatcagagatatccaaccaccagta

SEQ ID NO: 341767 - DNA, 232 bp, Homo sapiens
ttacaagcatgagccactgcatctggtctgaattatctttaataattatatgtgaaaagagatacagtactagttacacatgcatcytgtcttgtacagaaaatgattatcttgctcacaactactgcatgacttaaatttattaagagtaatctctatttctgatacagattaataacaacttttccattctaagatcttctatctcatcagagatatccaaccaccagta

SEQ ID NO: 341768 - DNA, 528 bp, Homo sapiens
ccatttcaccccgacttcctaggactaaattgaaaggaaaaccttaaatttccacgcctaagtaacaaaaggaccagaggctwctattccctttgaccttttctgttggcagatggcaaattggctgtctgcaatgaatcagaccaactgctggtggagtcttcctttgcaactttgtaacttcactctagcctctgaatggttgctgtccataaccaatcagactgatagcaggtcaattcttcgtttgcatagaagtgtaactttgtaacttcaccctagcaaaaagcaaccaatcagatatttgcacaggagtgtgacctttgtaacttcagcctctggttggctactttctgcaaccaatcagactgattgtgggctaccgctttatttacatgaggtgatcatgaaatagccaatgggaaactgttagggggtatttggatccacgcagattctgtatctgggcccctgagcagctgctcggatcccctcccacactggagtgtactttcattttcaataaat

SEQ ID NO: 341769 - DNA, 565 bp, Homo sapiens
taaacttcaatactaaaggatattcataagtgaatattcatatatttaaataatatagttataaacatgagaacaacagtagctgtaatgggccatatttaagcaattgcacttgtattgctgcatttcagcctaggtgagtgagaccaaactcatagcaagattttaattttacagttaatacctaatcacaagatcccagttatcccacaccaaattgtaaatagttgtatcattttttatatcccaaggataatttggttttacttaagcatcactattgccttgaaatggcattgtcaagtggggaaataaatgtgaatattacatttataaataaatgtgaatattatcatcactagcctcctgacttaattttaattctattttcttttaaaaagacttttttaaaaaagcataaattagaaatatgagaagyagaatggcttcatgcaagataccctggaataagatcccagagatcttattctggcctcaaagctttggataagtcattcagcctttctgggtctcagttttcccatctggaaaatatggggggtta

SEQ ID NO: 341770 - DNA, 266 bp, Homo sapiens
aataattaaaatgacctgatatgacacatactattatgatctccattttacagaggaggaagcagagataatatgattaataawtttatccaagattatacaattagtagaatgtgaactaaaagtcagattcaacacttattcttgggaaaaaagaggtagaacaataaaatattcttattgtcttcaaatcaaagggtcgtctcttaatagaataaataataactatctaaaaacaacaaccaaaaatggcaaataggtatata

SEQ ID NO: 341771 - DNA, 536 bp, Homo sapiens
aacaacaaccaaaaatggcaaataggtatatacaaaaatgctcaacatcactgatcatcagagaaatgcaaatcaaaactacaataagacatcttattccagttaaacggcttttatccaaaagacagaaaataaatgctggcgaggatgtggagaaaatggaaccctcatacactgttggtgygaatgtaaattagtacaaccacagttttgagcttcctcaaaaaactaagaaatagaactaccatatgatccagcaatcccactgctagttgtatacccaaaagaaaggaaattagtatgctaaagagatatctgcacttccatgtttattgcagtgctattcgcagtcaagatttgggagcaacctaagtgtccatcagcagatgaacagataaagaaaatgtggcacatatacataatagagtactattcagccattaaaagaataagattctgtcatttgcaacaacattgatggagttggaggttattatgttaggtgaaataagcgaggcacagaaaaacaaacatca

SEQ ID NO: 341772 - DNA, 601 bp, Homo sapiens
cacttatttgtaggagctaaaattttttttwaaattgaactcatggagatagagagtagactaatggttatcagagcctgggaagtttagcggtggaagagaggagacatggggatgactaatggacacaaaaatgtagttagatagaacgatgacgatctggtatttgatagcacaacacagggagactacggtcaaaaacaatttattggacattttaaaataactaaaagagtataagtagattgtaacacaaagaaaggataaatgctaggtagtgaacaccccatttactctgatgttattcttaagcattgtgtgactgtatcaatatatttcatctgtcccataaatatgtacacctactatgtaccaacaaaaattaaaaataacttaaaaaaaaagaaaatcatggactgggagaaaatattgcaaaacacatatctgataaaaggcttgatccaaaatatacaaagaactctaagtatgtaataagtaaccgttaaacttattcccaaaaaatgggcaaaagatatgaacagatacctcagcaaagaagacactgcatataaacatatgaaaagatgctgaacactatttg

SEQ ID NO: 341773 - DNA, 567 bp, Homo sapiens
gggacttcaactctccaatgatagcactatacagatcattgatgcagaaataatgaaacaaaagccaaatgaccatatacaacatataccgtgatcatactcttaagataaaaaagaaactctggacttaaactgaactcttgaacaaattgacctaatagatatctacagaacattctaaccaactgaagaatatacatttttctcatctgtgcaaaaagcactctctaaaattgaccatatccttggtcataaagaaagtttcaataaactcaaaaaaatcaaaatcatatcaagtatctttttgaaccaaagtgtaataaaattagaaatcaaaacaaacaggaattctcaaaaccacacaagtacatggaaactaaacaacttgcccctgagaaactttggggtaaacaaagaaatttaggcagaaataaaaaaaaattgaaatcaatgaaaatagagacataacataccaaaatctccaaagcagtrtaaagagaaaaatttgtagtgctaaattagtacatcaaaaaataaaaagatctcaaattaaccagctaatattgc

SEQ ID NO: 341774 - DNA, 567 bp, Homo sapiens
gggacttcaactctccaatgatagcactatacagatcattgatgcagaaataatgaaacaaaagccaaatgaccatatacaacatataccgtgatcatactcttaagataaaaaagaaactctggacttaaactgaactcttgaacaaattgacctaatagatatctacagaacattctaaccaactgaagaatatacatttttctcatctgtgcaaaaagcactctctaaaattgaccatatccttggtcataaagaaagtttcaataaactcaaaaaaatcaaaatcatatcaagtatctttttgaaccaaagtgtaataaaattagaaatcaaaacaaacaggaattctcaaaaccacacaagtacatggaaactaaacaacttgcccctgagaaactttggggtaaacaaagaaatttaggcagaaataaaaaaaaattgaaatcaatgaaaatagagacataacataccaaaatctccaaagcagtgtaaagagaaaaatttgtagtgctaaattagtacatcaaaaaataaaaagatytcaaattaaccagctaatattgc

SEQ ID NO: 341775 - DNA, 464 bp, Homo sapiens
ttggttcttaattaaaaacaacaacaaaaaagaccagaagattcaactaaacacaatcagaaatgataaggtgatacaaccgataccacaaaaatacaaaagatcatcttagtctctagacgactatagagtagtcatagactactatgaacacctctatgtgcataaactagaaaacctataggaaatggatacattactgaaaacatacaacctcccaagattaaaccagaaaaaaattgaaattgaatgagtaacaaaaaataatctaccaaccataaaaagcccaggaccagatgcattcatacccatagtctaccacacaaaaagaaaatctggtaccaaactactaaaattattcagaaaatccaggaagagttattcctccttatcacattctatgawatcagtatcatcctcataccaaaatctggccaggacacagcaaccaaaaaggaaaacta

SEQ ID NO: 341776 - DNA, 529 bp, Homo sapiens
gttgggggaatttaatatcataatatataaagtagcaaagagcaccaagtcacagacagattaaaaaagggttaaaagttctatcttagtccattttgcgctgctatgacagaacacctgagattctaatttataatgaacaggaaattactggctcacagttctgcaagctggcaagtctaaagtgtaagktaaggcacttgcagttttggtgtctagagaggctgttcccctcttccgagaaggcaccttgcacatgaattcccacatggcagaaagtagaaaggtaagagagtccagtcctgaaagcccttctctgccctcatgtcctaggcacctcccattaaaacctacttccccacactgttgcattgggtcttaagtttccaacacatgaatttgggggggcacatataagctaaagcaaggccccagtctcttttccttgtttgataattctcttttaaccttccttatttgacaattctcaaatgtatgtatgctcattaataaacaataaccaattgtt

SEQ ID NO: 341777 - DNA, 552 bp, Homo sapiens
tttgtttttctatttttctatgctgaactcctcttatgtcaaatatcacagaattgctttcaatttttctcctgagaagacatggtatttaaaacttatctacaattaggttaaccagaaattaattccttgtttttggtatatttctaaactgtgctcctgttattcttcaacaaactttgctaaaggaatgactacatttctttaacactgcaaataataaagttaactgtgtatttgagcaggttgacagcttcacttcgcaaactcaccgtaaattctgaaaacaaatagtgggctgacaatggttgagatgacaacagaaataatttcaagcagtaatgaaaacagatttaagctagtacacacgacrgtacaagccttttctttttaaatggtatacaagggaaagcaatcaaaagagaaggaggcaacatgcccattaggtatggcacaaagtcttggcccattgcaataagttatttacaaaatcaagttatagtgcttcctttgtccttaccagcaggtgcagctattaagcaggaaacattg

SEQ ID NO: 341778 - DNA, 432 bp, Homo sapiens
tgaagagatgatatagaggttttaagattgattttgtagccgcattctccatcatttactcctctcctacttactgtttacaacaccatgtctaatgcacaacagatatttgataaaaggttgagtgatcgtgtaatagagggttttgacaagagatgcagtggggctgcacatttaaatcactacrtcatttaaactagagtaatagcctttgaaatctttttattctagcataaatatttttgggtgacaaatataaaacataaatgagataatcaataattatcaggcaatgatggtagccttggtgtgtgatctttgtatcttaatattaagatattttccttaagggtggggctggtctaggttgtccatcaccttgtaaggttttcttgcacttctcggactctcagatttcttgttgaggtacct

SEQ ID NO: 341779 - DNA, 461 bp, Homo sapiens
caaatgaactgttatcccccaagaaaggtgtccctttaggttaggattgaggtgagcaataccaaacagtaagagcacttgacttcccatggctgacagactcattacctttgtaaatatcgaggcttagctttgaatcctggaactcttctttgagtttctggagagtgctagtaactaaccaattaccaaaacaataaagacattaaaatgggagaagacaagagtagtgtaaacaaatttccttcattttccaccatcaaacaaagttgtttaaattttctctctcctttatttttacatccttatcccttcaatttatccaaagcacttaaaatatattcttcaaattcaccataataggtgtcctgtgatataccgagattcattactattattattaktaacagggcaagaaaacgagatcctaagcaggattaactccagaagagcaatggcat

SEQ ID NO: 341780 - DNA, 555 bp, Homo sapiens
aaatcagtgaataaatgagcaaatacatatgatttatttcaaattcacttaccgacttggtcatactctcccagaaacaatcaagtttgttaattgtcccctttaaattattgtaccaagagcctaaaacaaaaatctgaaaaacaaagagtagagaatgttctgtatgttataaatcttctaatttaacctaacatgtgtatataaacatacaaacatgtacgtgtacacacatatgtacrttctcatacagggaaatagaaaggggggaatgctacattaaaaatttatattgtttttcaatcaactgaggctgtcctttctttttcatatattctgctttaacccttattttctatattctgtacttggcctggcacaatgccctgagtataataactaaataaatatttgccaaattaaatagtgcttgctgctgaatgtgttgacctaactacagaagttggtatttatttccagcaattttatccccaatttcacctttattcttattttttgaaatatttttgggatcctggaactttgagctgatat

SEQ ID NO: 341781 - DNA, 427 bp, Homo sapiens
gccttacataaaagagtaagtctatagtaagrgttattattatttactcccattattaggtactaccagtgtttctcaataaaacccttaattggtagactttgcttacacgtagggggaaaatcaccaactttgaagtgagagtataaaactcatacaatcaagtaaagactaaacaaaatatatgaaaatgactttgcaagatacctaacattattatcatcaccaccacaataaccatcgctaccaaaagacctgttttcaaattgcattggctgtgtcaccagctagatatgtgatattgaacaaattactaatcttttccgagcctcagtttctactctgcaaactgggaataatatctaccttaaaagttgtctggaaaaatcgatttgattttgtctgtgctaagtgctcattaaatgta

SEQ ID NO: 341782 - DNA, 560 bp, Homo sapiens
atgtcaaggcctgtaccaggcattggacatacagaagtgaagcttgtgtcaaagagaacaagctgagagagctggggcataaaggcaggaatgcccacttatggagttgagtaagtaaataggcatcagaaaggggtacacagaacctatgaagattgcacttgctgttctctctgcctggaaatctctggcctatcrgcacaaatactagcatatttgcccaatcaactcctgctctactctgtgtcatctctcagctccaacatcagaaaatatggtttagggatacctaccatgaattcccttaggccctatgcacacctccattccactatttacctaatcaaattacaattctttttgtacaggtggtacctccctgcacattgaggtcagagattttctttacatcgttagcacttaagaaaaatgtctcacatgtggaggtcaatattttccagtgtgaaagacctttcataatacgtgttatcacatactaatttatttatatttgtgtgtatatgtgaatatgtgtgtgtgaaagtgaagcaaaaacactt

SEQ ID NO: 341783 - DNA, 594 bp, Homo sapiens
tttcagggccaagagaaaaagtagtcagagtgaggggggctgataaaraaaacaaagaaacaaaaaaaaaaccagatgggcgaatcaatctttgaagttctccaaacaacattcagactcttgacctgcttaccccagagcaggggttcttgagggagtggttggaaatggtagggtgccatgatgtttgggggagcactgctgcattaaataggtaagagtctctgatgccagacattctctcatgtacaaaactccctcacaatgaagagtttttccacaatgaagagttattccatccctaaagactttctgatagcaaagtagacaataatatagaaaaaagaaaaaataagttatatgaatctaagagcgaactgcattttacatataaacatacagattttgacatataaaatatatattttgacatatccttaacatagactacattttttaagattgcaatttttaaattgaagcaagattgtatattgtttggtttcgagtttaaccaagagtttttcgccatttcataaaatcacatcacatgaacaatgctacattgcctctcctgggtatatacccaaatga

SEQ ID NO: 341784 - DNA, 574 bp, Homo sapiens
actgctcagctttaatttctaatatattaaatataaatatatataacctacataaataaaagctctttgaaatccttaagaatttttggtatttgggttcttaagaccaaaatatttgaggaccattgatatatagcatataaagtatatatcattcatatgtatctatacccataatatatgtatakatttgtgtacatatatacaatgcatacacacatatctatttacaattttaaaaaaagttatttcaaacatgaaataaaaacagaatatcataatagagaaacaaccagagataaatatgtatatttcttgtatattcaagataaagtaactaaaaaaaattctttttaaaaagtgagagttgaaaaccatgattaaacttctcataataaatagaaaagatgaagtgatggaatacatgaggggtgagataaggaaattagagaataagtccagaggttccaagtatccagtaatgaaaatttcagaaagaaaatgcagaccaagaattcaaagatccatacgtaagattcaaataaccaaaggacacaagtagccagatcaagtg

SEQ ID NO: 341785 - DNA, 574 bp, Homo sapiens
actgctcagctttaatttctaatatattaaatataaatatatataacctacataaataaaagctctttgaaatccttaagaatttttggtatttgggttcttaagaccaaaatatttgaggaccattgatatatagcatataaagtatatatcattcatatgtatctatacccataatatatgtatagatttgtgtacatatatacaatgcatacacacatatctatttacaattttaaaaaaagttatttcaaacatgaaataaaaacagaatatcataatagagaaacaaccagagataaatatgtatatttcttgtatattcaagataaagtaactaaaaaaaattctttttaaaaagtgagagttgaaaaccatgattaaacttctcataataaatagaaaagatgaagtgatggaatacatgaggggtgagataagraaattagagaataagtccagaggttccaagtatccagtaatgaaaatttcagaaagaaaatgcagaccaagaattcaaagatccatacgtaagattcaaataaccaaaggacacaagtagccagatcaagtg

SEQ ID NO: 341786 - DNA, 575 bp, Homo sapiens
ggcacacacagtaatgttcaccaatatttacttgccccacgtttcttagcccctgaaaagttagagagttcccatgcccactctctctgacaagacctgcaaggtcggggtttcccaaaaaccaatgatttgctaaaatgactagcagaactgatggaaattattatactcatggttacagtttattgcagtgaaagagtacagattaaaattaatcaagggaagaggtacataaggcatattcgagagctccacatgcagattttccagcgtcctctcccagtgtatcttgaacaacactgtcttctcccagaaatgatttttgacaatatgtatggggtattgccaaccaggtaagcttacttgagctttggaagacaaaattcarcctacaaagtaggagctttgatttgctcattccaatgactggaagaattccttacaaataataactacttaatcagtatttgctgaatgaatgaattcaagtcaagcataaaattgctgttgaagacaaagatttaagacacaatcctcactatcaaaaagctcacatcatgctggaagaaatgagt

SEQ ID NO: 341787 - DNA, 602 bp, Homo sapiens
tcagctggtggaacacaagttttcactgcatattaccctgtctgctcctcacttccctgctatctgtttaaataacttggtttaacataatcrtcattactttgcatataactttctctcccttgcctccttctctttacatgtgttcaactggctaatccgctgagttaaatctaactcctaacctattctgtgtctttatctaagctcccaattctaacgaatctcactttaaattttcaactgcaaactttgaatgggttccctatcctgcccagtattctccatattcttcagtcagctttttctcctttctctgagatgcgtttttctttgtatttacacctctaacaccctgtattagtttttctatggttatgtaacaaattaccacaaccctagaggcttaaaacaacacatgtttattatctcacagtttttgtagtcaaaaattcaggtatggcctggctgaattctctggtcaggatcttactgaactgatatgagggtgttggccagggctgcggttctcatctgaaactgagggcatctttcaaggtcactggtgttggcagaattcatttccttgcagatgtaggatg

SEQ ID NO: 341788 - DNA, 602 bp, Homo sapiens
tcagctggtggaacacaagttttcactgcatattaccctgtctgctcctcacttccctgctatctgtttaaataacttggtttaacataatcatcattactttgcatataactttctctcccttgcytccttctctttacatgtgttcaactggctaatccgctgagttaaatctaactcctaacctattctgtgtctttatctaagctcccaattctaacgaatctcactttaaattttcaactgcaaactttgaatgggttccctatcctgcccagtattctccatattcttcagtcagctttttctcctttctctgagatgcgtttttctttgtatttacacctctaacaccctgtattagtttttctatggttatgtaacaaattaccacaaccctagaggcttaaaacaacacatgtttattatctcacagtttttgtagtcaaaaattcaggtatggcctggctgaattctctggtcaggatcttactgaactgatatgagggtgttggccagggctgcggttctcatctgaaactgagggcatctttcaaggtcactggtgttggcagaattcatttccttgcagatgtaggatg

SEQ ID NO: 341789 - DNA, 532 bp, Homo sapiens
actaagtaatctctttcagtggtacacacatgtgtgataaagaatgataaatataaaatccagggtagtgtctaactagttgagctggggtagaaagcagggcaatgggatgagtgatgtacagataacttcaatgctatcagccatgtttagctcctaagctttgtggtggattaatgagggattattttctgctttatcacatatatatgttaatcctactcttttacatatagcaagtatagcataataggttaaaaatatataacttatcatcattgagtatagaattgtgctaacctgtccacatttagtttgttatcagcttttacaaccaattaatgaatttwaaaaaaattaaaaaaggaaaaaatcaaagtgaaggcagaagaaccagatgtgagaagacctactcaatcatgcttcacttttccaaaccaaacttccatagaaaaaattttgatattaggtgcaatgccatcacagggcacaaaacaggaagatttatttgtaggattgtaaaatatgagcc

SEQ ID NO: 341790 - DNA, 507 bp, Homo sapiens
ttcagtgccaccagcgcacgctacgtttcagcaccgtcaggctcagaagcggctctgctatctaagccatttttacatgtcccttggcagtgattacggaaccacacatacagtacagtgtaaattaaactaagtgaaaaattaacttcctgaagaaaaaccacatgctgtcctcctccaaaatatgtgttcgccctgaccttttggaggcatcaagacgtcccagccctttaacttcatgaaaatctcttcagatagcttactccgagggcagatttatgtctggaaaattkggagttgcttaccaaaaggatgagagtcatttattttcctgttactggtctgccacatgaatgagataacatcagctaaaatattcagcagaagctattcctggttttttccctttccctctttgagaccagttacctatttaactccatcctgtcaattaaaccagagaaaaaacgcaaagaactaattagggaactgtgtaattttaattag

SEQ ID NO: 341791 - DNA, 544 bp, Homo sapiens
cttcctgaaaataaaaaagggtaaagtaaatgaactccttcatacatatgctttgttttatcatttaagatatgttgataataygatattggttttcaggtctgcattgtccagaaatggagatgacaccagaaaacattcagcctgcattctaaataaatgatatcacaaatgataaaacattggcaagatttcatgcataaagatcagaacacttaaataacattatcatatcaattactctataatcactcaaatggtcagttttcactgtgcttctgtttctacaattgctaaagtgttattgtcagggaaggacaacagaggaactgaggaactcagggaaacatttaaatttagaagcttagaaattatagaatgtttccagaaattttgcattttgactgtcactgaggaggattcaccaagcacattttagcattttctatttttctgtctaactttatatttgtaaagtgacccatcttttaactgaaacaacatttctgttcatcttggtatcttaaaaggctggtggtgaagg

SEQ ID NO: 341792 - DNA, 544 bp, Homo sapiens
cttcctgaaaataaaaaagggtaaagtaaatgaactccttcatacatatgctttgttttatcatttaagatatgttgataatacgatattggttttcaggtctgcattgtccagaaatggagatgacaccagaaaacattcagcmtgcattctaaataaatgatatcacaaatgataaaacattggcaagatttcatgcataaagatcagaacacttaaataacattatcatatcaattactctataatcactcaaatggtcagttttcactgtgcttctgtttctacaattgctaaagtgttattgtcagggaaggacaacagaggaactgaggaactcagggaaacatttaaatttagaagcttagaaattatagaatgtttccagaaattttgcattttgactgtcactgaggaggattcaccaagcacattttagcattttctatttttctgtctaactttatatttgtaaagtgacccatcttttaactgaaacaacatttctgttcatcttggtatcttaaaaggctggtggtgaagg

SEQ ID NO: 341793 - DNA, 581 bp, Homo sapiens
gtgagtgagttctactcattttcaattctacattctcacactaccccctctctcccctgctcttggagatgggtgatcacaaggyaatttcatttccattgatccccattaatgcctcaatttggaaagctgtctttgaggaaggaagcccttattctagctccagccacctataatggagctctcaagaggccacttgcatcgccccacagatccccacccctaccacacatcacatctgtgagcccatttcaggcaggtatgagaggcagtctgaggcctcaggctccagatgctgccccaagaatcttttccattctggtaaccgaatgttttccacagctggggaagggtacaaagataaagagggtgttggggaggggaggaggagagaggaaggggaggccagagagctcagcaaggtgtttgtgtttgtgtatcccgatttgtgaccgcgcagtcttttcaagttccctgaggctgtgaaggtgaaatggggactgaaaaggagtgggttcaagcatatgatcattcaatttcattacctgctcctcctgctggcgctggcaacagagaatcat

SEQ ID NO: 341794 - DNA, 564 bp, Homo sapiens
  misc_feature (1)...(564): n = A,T,C or G
caaaagaaataaacacatactgagatatttgaagtgctgaaggtcttgtgcatgaagtgcccccccagacccccagtgctttatagcaaactttaagtatttatggtgatgggggataaaagcaacataacaaacctgtggatcactcaaatgcttcattagttactaggtcgtctcctttcccactcccactgttatagatttactcaaagaatggaatgaactagtttcctgtcactctcatacttattctcttgaaaagttatgaaaaaggttgggagtaggtaggaaaaggggccaggagagttgcacagtaaattacatgacacgwtaaacaatttgccacgcttaaccttcctattacgtttctcgtttttttctcagagggctaaattttaacttcttagaggaagtgaagtctagagaagacctttcatttaganaaagtaggatgggtttcctgccacctctcctagggttcttcttgtccactgttatttctaccattgcaactccacctcctctatgtctatctcttttccacttttatccagagccaggcac

SEQ ID NO: 341795 - DNA, 562 bp, Homo sapiens
acaggtgggaacctgacagtgactggccccaaggagacagcctccatttttgccacctatcctgccccctatctgtccctgaacaatggcttcctggatcaggtaagtgtgagggggagacctggggacactactttggtcctgttcctcggcaccccagcctattgttcagtctctgggtggagtgtgggttgggtctatcttggcactccccaccatccccaactgcctgtgttgcacaaagccagatgacatggaatatttggatgagagagggcagatggagcacctggcagctgacagggaaccctctgcctctgttgactccaaggttctgggcacygggatgctgattgtggggctcttggccatcctggacagacggaacaagggagtccctgcgggtctggagcctgtggtggtggggatgctgatcctggccctcgggttatccatgggtgccaactgcgggattccactcaaccctgcccgggacctgggcccacgtctcttcacctacgtggctggctggggtcctgaagtcttcaggtgggagacagac

SEQ ID NO: 341796 - DNA, 592 bp, Homo sapiens
catggctgccctcctgacttgacagacagacactaacaccaggggcagtggctcacgcctgtaaccccaacactttgggagagccgggtgggtggattgcttcagtccaggaattctagaccagcctgtgtaacaaagtgagacccccatttctataaaaaaatttaaaaattagctgggtgtggtggtacacacctatagtcccagctactagggaagctgaggtgggaaaattgcttgagtccgggagatccagggtacagtgagccgtgattgggggctgctactccagcctggatgacagtgagaccctgtctggaaagaaaaaaaaaaaaagaaaagaaagaaagaaaaggaagggaggagggagggagggagggaaggagggatagaggggaaggaaggaaaggaaggagagaaaaaaagaaagaaacaagcacctggcttttgagcaaccacaaggaccttgaaggggaccatctgtccgtcccttggaggggaactctctcaaggacccccacagagcctaaagctgataggatggcctcatagctgaatctggagggaaaraaaaatgctgaaataaagttta

SEQ ID NO: 341797 - DNA, 614 bp, Homo sapiens
agatttttttggccaggtgcggtggctcacgcctgtaatcccagcactttgggatgctgaggcaggcagatcatcaggtcaggagttcgagaccagcctgaccaatatggtgaaaccccggctctaccaaaattacaaaaacttagcggggcatggtggtgtgcgcctgtaatcccagctactcaggaggctgagacaggagaatcacttgaacccggaaggcagaagttgcagtgagccgagattgcaccactgtactccagcctgggtgacaaagcaagactctctctcaaaaaaaaaaaaaaaagaaagaaagttgtagatttttttacacaaatcaacatgggcctgaggctggatgtgtaactactgatcagaaagaaataaatgtgtacttctctcttctctgtacagatttgcaaaaaagtgcaaatttactgttgcctggggggatatcagtctactttcaccattttatcacacagatatcaactcccatattatcataatttgctaagtgaaatgagacagacayaaaaggacaaatggtgtgtaattccacttatatgaaatatctagaataggaaaatttatagtgacagaaaatagattag

SEQ ID NO: 341798 - DNA, 487 bp, Homo sapiens
cagccaaggctgtagataagcaaaggggaatctttcaaatttctcatttatgatatttaaaaacacatttaatctgtgtgagcaggtttagaagtactgtaaatcattttgtgtgaattgtaatgataaattatagactgaagaacgccctgagagtaggtatgatgtttcgtatgcctgaatggtcttggactgggacattgcccaagtcccaaagtacattggcttccttataaaagtatttccaactgttttagctaactcttctttctgtcctcaaagttaccaaagaacacagaaattatgcaaaagtgggttctaatacagttttactwttatatagataaggcatataatcccactaaaatttgttatatacaaatgagtcaaagatgacttttgtgaattggcccctaggttgcttacttcttcagtataactgaaatttttatatagcagatggttttaaacatagcccaaacaagca

SEQ ID NO: 341799 - DNA, 624 bp, Homo sapiens
taatgcagactatgaaggattttcttattttcagaaataaataataaaattgaggtgggaagagcatttccttttcttgttataagcttgttcwgaattattattaaaagataaaccgggatccttcatgtgcttgctcttacagtgttgaggaaactatactatacatgaaatctcctgtggttttgtcagccagatttgtctttatttaccttactcaaggacaataaaaggtattggtaacagcacccatgtgcaaatttcacttgtggaactacgtgatgaagccagaaaggaatcagggttttaagaagcacaataaataccacagacaacatagagacctgacgccccctattgttaaaaatgtgtaaatctagaaatatattcaattagactttggacatcaagtactatcattttacttttgactggtgccgttacctattcagagaccttcttggtcttatttttactaacataccagatggactggtccattgcctcccttcattattattgtagccaagtgcatattgtcatgtcaggcatgaggaagggactgatgaggagggctgtggcatacacaaagctactgtggagagccctgctaattgccttgtg

SEQ ID NO: 341800 - DNA, 539 bp, Homo sapiens
ctccttttttttttttttacaagttacccagtctcagatatttgctatagcaaagcaagaatgaactaatatagaagggatattggattttattaaaaagcttttctgcatctatcgaggtgatcatgtagcttttgtttttagttctgtttatgtgatgagtcacatttaatgatttgcatatggagaaccaaacttgcactccaggaataaagcctacttgatcatagttgattagctctttgatgggctgctggttttgattcactagtacttattgaggatatttgtgtctatgttcattagggatatgggcctgaagtttccctgttttgttgtctgtctkccaggttttggtatcagaatgatgttggccataaagaatgagttagggagaagccccttctccttgattttttggaatagttttaggaggattggtaccagctcttcttcatacatgtggtaaaattcagctgtgaatccagctggtccaggacattgtttggtcagtaggttttttctttttattactgatt

SEQ ID NO: 341801 - DNA, 539 bp, Homo sapiens
ctccttttttttttttttacaagttacccagtctcagatatttgctatagcaaagcaagaatgaactaatatagaagggatattggattttattaaaaagcttttctgcatctatcgaggtgatcatgtagcttttgtttttagttctgtttatgtgatgagtcacatttaatgatttgcatatggagaaccaaacttgcactccaggaataaagcctacttgatcatagttgattagctctttgatgggctgctggttttgattcactagtacttattgaggatatttgtgtctatgttcattagggatatgggcctgaagtttccctgttttgttgtctgtctgccaggttttggtatcagaatgatgttggccataaagaatgagttagggagaagccccttctccttgattttttggaatagttttaggaggattggtaccagctcttcttyatacatgtggtaaaattcagctgtgaatccagctggtccaggacattgtttggtcagtaggttttttctttttattactgatt

SEQ ID NO: 341802 - DNA, 584 bp, Homo sapiens
atttgcatatggagaaccaaacttgcactccaggaataaagcctacttgatcatagttgattagctctttgatgggctgctggttttgattcactagtacttattgaggatatttgtgtctatgttcattagggatatgggcctgaagtttccctgttttgttgtctgtctgccaggttttggtatcagaatgatgttggccataaagaatgagttagggagaagccccttctccttgattttttggaatagttttaggaggattggtaccagctcttcttcatacatgtggtaaaattcagctgtgaatccagctggtccaggacattgtttggtcagtaggttttttctttttattactgattcaattttggaactcatcattagtctmttcaggatttaaatttcctactagatcaatcttgggaggttgtatgtgtccacgaatttagccatttcacctaggttttctacttttctagtttgcgtgcatagagatgttcataatagtctctgggggttttttgtatttctgtggggttattagtaatgtcacctttgtcatttctgattgtgtttatttg

SEQ ID NO: 341803 - DNA, 604 bp, Homo sapiens
ttttgttcagtatagctctgattttggttatttttttcttctgctagctttggagctggctggctcttgttttactagttcctctatatataatgttagattattaatttaaaaatcattcaatcttcttgatgtaggcatttagcactataaactttcctcttaacacggctttagctatgtctcagagattctggtatgttgtaccttcrttttcatcagtttcaaagaattttttttacttctgccttaatttcattctttaccctaaagtcattcaggagcacattgtttaatttccttgtaattgtatggttttgagagctcttctcggtgttgatttctatttttattgcattgtcattcaagaatgtggtaggtatgattgtgtgttttttaaaaattcattcataattgctttatggcctcgtgtgtggtcaatcctaagagtatgtgccatgtgcagatgagaagaatgtatattatcttgttaggcatggtattctatagacatctgttagtctgtttcgtcaagtgtcaagttaagttctagaatatctttgttggttttctgcctatattctgctaatatgtctgttattag

SEQ ID NO: 341804 - DNA, 604 bp, Homo sapiens
ttttgttcagtatagctctgattttggttatttttttcttctgctagctttggagctggctggctcttgttttactagttcctctatatataatgttagattattaatttaaaaatcattcaatcttcttgatgtaggcatttagcactataaactttcctcttaacacggctttagctatgtctcagagattctggtatgttgtaccttcattttcatcagtttcaaagaattttttttacttctgccttaatttcattctttaccctaaagtcattcaggagcacattgtttaatttccttgtaattgtatggttttgagagctcttctcggtgttgatttctatttttattgcattgtcattcaagaatgtggtaggtatgattgtgtgttttttaaaaattcattcataattgctttatggcctcgtgtgtggtcaatcctaagagtatgtgccatgtgcagatgagaagaatgtatattatcttgttaggcatggtattctatagayatctgttagtctgtttcgtcaagtgtcaagttaagttctagaatatctttgttggttttctgcctatattctgctaatatgtctgttattag

SEQ ID NO: 341805 - DNA, 596 bp, Homo sapiens
gtattctatagacatctgttagtctgtttcgtcaagtgtcaagttaagttctagaatatctttgttggttttctgcctatattctgctaatatgtctgttattagactaatattattaaactaattaktattattattagactaataatgtctaagatggtcaataggatgccaaagtctcccactattattctgtggctgtctaagcctcttcttaggtctctaagaacctgttttatgaatctgagtgcttcagtttgggtgcatatatgtttagaatagtgaagtgttcttgttgaattgaaccttttatcattatgtaatgccattttttgtcctttttcattgttgttaaagtctgttttgtctgaagtaaaaatagcaatctctgctctgttttgtttttcattagacctttctccatccctttactttgagcttatggataccatttcaggtgagatgggtttcttgaagacagcatacagttgaatcttgcttctatatccaacttgtcactctatgtcttctaattgggatactgtagccagctacattcaaggttaacattgatatgtgaggatttgatctgttat

SEQ ID NO: 341806 - DNA, 596 bp, Homo sapiens
atttcagtctggttaagaaactttcctggggagcaagtgtggtcatttggaggcaagaggacactctggcttttacagcattcccatgttcttgggctggttctttctcatctctgtgggctgatgttcctttaatctttgaggttgctgtcttctggatggaactttttgcttttatatatattttttatgcacatgagagtttgactgtgttataaattgggtttagtcaattggctttatttctgatcctttcaggtggccaaggcttagctcagcactsctcggctgtatgctctaatcttggcagctgggatcaggcctgtgactttgttttctgggcccttgagtttagtatgtgctgcactagaggggccaaggtgttcccagcacactagcaacaacactccaacaggggctgccagcaaaatctctagtgaggtggcggtgggaccctgtgcatgtgtgtgccagcagtgtgctggagatgggtctgtgaatggatgcatgctagcagggtggcagagagaacccacatgtatgcattccagtggggcagtgtggggagactgtgagggagtgcacactggtggagg

SEQ ID NO: 341807 - DNA, 596 bp, Homo sapiens
atttcagtctggttaagaaactttcctggggagcaagtgtggtcatttggaggcaagaggacactctggcttttacagcattcccatgttcttgggctggttctttctcatctctgtgggctgatgttcctttaatctttgaggttgctgtcttctggatggaactttttgcttttatatatattttttatgcacatgagagtttgactgtgttataaattgggtttagtcaattggctttatttctgatcctttcaggtggccaaggcttagctcagcactcctcggctgtatgctctaatcttggcagctgggatcaggcctgtgactttgttttctgggcccttgagtttagtatgtgctgcactagaggggccaaggtgttcccagcacactagcaacaacactccaacaggggctgccagcaaaatctctagtgaggtggcrgtgggaccctgtgcatgtgtgtgccagcagtgtgctggagatgggtctgtgaatggatgcatgctagcagggtggcagagagaacccacatgtatgcattccagtggggcagtgtggggagactgtgagggagtgcacactggtggagg

SEQ ID NO: 341808 - DNA, 521 bp, Homo sapiens
ttaagtaattttgtgtgtgctgagaggcatgagataaagatttctgagaataaggctcagcctccagagggtgaatttgtgctgcacaaaaccataaaacaccctggagaaaggaaaatcaggatgtggagaaatgggtccagcacttggcagagggccattcctgaacaccaccaccaatggcatcgttcagcgtgtacttccacrtgcattctcacatctaaagcctcctcagttctaccagggaggtactaccactgctacagcaaggaaatcaagaatcagagattaaactgcttttcaaagccactttaactttggtggtttggtgagaccgcagaaattttcacttccaaacctgtgttttttgtaataccccaaaatttaaggaatctaggtcctggctaagggttgccataaggactagaacttgagtactggttcacctgtgcttccttggtccccagaggtgatctgcagcatgtgctgcggaatcagtatagtcatggggctaacagcac

SEQ ID NO: 341809 - DNA, 483 bp, Homo sapiens
tcaaggacactttctgttttagaaactaatgtcaggctagactcaaagtttcctcatgaccacgttatgtctctgctgttggtggtattaatattgaatagttcgagaagcactgatggcttaaaaagtcttgttgttataacagaatggaattactttccttttgccaatgattgtttcttttgaggtaggagttgagggagaggtgaagagctaagtgttctcttttgtacagaagcatccaaacatgaagatggctatacagattttatgctttatggcactagcctacccscataactctataggttacacgtaacatagatattagctcattaccttctgaactacttaacctgttgtcagtcacaaagtaaggccacagcataataacgagttaaggatagcctatcccttgagtgaggagaatatttgaaggatatgccatgcataagagaagaaagatcttcatggagaaaaata

SEQ ID NO: 341810 - DNA, 483 bp, Homo sapiens
tcaaggacactttctgttttagaaactaatgtcaggctagactcaaagtttcctcatgaccacgttatgtctctgctgttggtggtattaatattgaatagttcgagaagcactgatggcttaaaaagtcttgttgttataacagaatggaattactttccttttgccaatgattgtttcttttgaggtaggagttgagggagaggtgaagagctaagtgttctcttttgtacagaagcatccaaacatgaagatggctatacagattttatgctttatggcactagcctacccccataactctataggttacrcgtaacatagatattagctcattaccttctgaactacttaacctgttgtcagtcacaaagtaaggccacagcataataacgagttaaggatagcctatcccttgagtgaggagaatatttgaaggatatgccatgcataagagaagaaagatcttcatggagaaaaata

SEQ ID NO: 341811 - DNA, 423 bp, Homo sapiens
aagtaattgagattttcatcacctcaaacatttacttatctttttttgtggtagggacattccaattccacttctctagttattttgaaatatacaataaatgattgttagttatagtcactcaattgtgctaacaaacactagatcatattccttctagctaactgtatttttgtacccacgatgtaacccttctttattcacccctctccactacccttcacagactctgataaccatcattatactatctccttgagttaattttttttttaggtcccacatgcgagtgagaacatgcaatagttatctttctgtgcctggcctatttcacttaatataatgaacagttccatgtatgttgctgcaaatgaaagttcctcaaaaamttaagagaagaactaccatatgatccagcaattt

SEQ ID NO: 341812 - DNA, 542 bp, Homo sapiens
gatgatgtacacccacaatggggagggaagcacactttgctaagtctatagattcaaatgctaatctcttccaaaaacaccttcatagtcacatcctgaaattatgtttaaccacatatctgggcatcctcttatccagtcaagttgatacataaagttaactatcacagctatttactggactatatgctggagacaggggcatatccagacatttcaaggattattggacacagagtccacattcatgttgataggcatctggacacctaaaatgtcatcacaggtcctgtcagaatagggtttacatggtccaggcaataaatagaaacccggctaatttgggctcatagtgcacctgctggrcttaccatcccatgtagcagtcatttctccagttcctaaatgtctaatgaaaattgtcgaatctggcagttggagtagcctctacatagaatccttgacctgcacatgagaccatcatagtggggaaggccaagaggaaacctctgaaactgtcccttatccttggccaggacaaa

SEQ ID NO: 341813 - DNA, 547 bp, Homo sapiens
tatcatggcaacattaacagcagcaaaaaattagtctatcaaatgtccaactaaaggaaaacggttaaagaatggcatatacagtcaatatgcagtatcgtaactactgtatataaaaaatacaaatgggaaaaaagaaaacataccagaataatgagtgattgtaatggggacataggattaaaagtagttttagttttctctgaaatccagatttttctctaagtgtggcatcatgcattcataatttcaaaaaataataaatgtataaataggaagtaaacaagtcattggcatggatctgcctcctgggaagcaaaagagcaggacaggccaagtgcaacatttatgccaacccaggatggctttacctgcacaaaaagtgtagctgagtatctgatcattctytgcagccgcaaattgcttggatgtggtggagggtcctggttcaagcccaaggttaagatcttcttactgaattggaacaaacacatgaatataatgagcactgccagcttcagaaacaagggtgaaaagtataacatct

SEQ ID NO: 341814 - DNA, 339 bp, Homo sapiens
ggaattagctgctactttctttctctgccaagtgatgccaggcaacaatgggaaaccagcacaaggcattgccagggcttacttcaaaagaggaggtggcacaagcaccgtgggtattcacagaaatgagataccaggtcgtgaactccacacaaaggatggagaatgctacatctgcaacccaacatggggcttaattgacaccatttctagtagcytgagtatttacatagggattccagaaacagtgccattatgacctgcagaactactaacaatgactattcagtggtcattaggcaaaattacactcttcctctgttcagaatgttgcacaag

SEQ ID NO: 341815 - DNA, 589 bp, Homo sapiens
tggtttattatttttgatatatgttgaagatttttaaatgatttccatttaaacctaattttacaatttactacctcttacaccgtttagtcagtaaaaattatctggtagctggtacgatgccaaagaataatctcataataatgaatgaaatagagtcttagaccaattgacagtagctttatttaagttttcaattggaaacatttaatttaaactattcttcttcttgatggtgatttcatagtagatttgccaagcaaccacttcaatatggtctttgaaacatatttgatttaggaaaccattgggttaagagaaataaatgattataacataattaaattctagctcaacaatgtttataaaacaaaaattaatgggctgaatttcttgttattttaggtattgtcatatgatattayaagattcataacctaattttattaagtgtaaaatatgtttcacgatattttcatgatctttatttcacagttattgttattaaagtcaacctcactgcatggtcctccataatgtcacaaagcagtttccagcagggttatttttaaactttttaacatatacc

SEQ ID NO: 341816 - DNA, 603 bp, Homo sapiens
gtctttgaaacatatttgatttaggaaaccattgggttaagagaaataaatgattataacataattaaattctagctcaacaatgtttataaaacaaaaattaatgggctgaatttcttgttattttaggtattgtcatatgatattacaagattcataacctaattttattaagtgtaaaatatgtttcacgatattttcatgatctttatttcacagttattgttattaaagtcaacctcactgcatggtcctccataatgtcacaaagcagtttccagcagggttatttttaaactttttaacatataccaaaaaaagtattttaattaatctaaragtaagtgttctcatttataattaggcaaatcaatataaaatgcataattagataagataacactgatactatgcatatacatttcaaataaaacctatataacatttcaagtatatcacttccaatttctgcataaattcacaagatgttcttgattagctcaataccttttatgaatgtacctactatgatagcaaagaaaaactgaacggtaggcagtaataatactcagtttttaaatcagtcacaccaagaaaactggt

SEQ ID NO: 341817 - DNA, 609 bp, Homo sapiens
cctatcaaagactaagcaatatacctagaacaaaaattattgaattaaataactcctacagatctctgctgtatgcataaccacataaaagttaaaattaaactcttgagtactgagaccaaaagcaattttgcatagaattcaggcaatcacccaattgcagattcaagtcattaactcaccatatacttcaagaaaaacccagtgctccaagggctttagtcaagaagccctatgaataagcctttggccatgaggaaattgaagggcaataagtcgtcccaaaatttaaaaaagaaaaatcgaacataagatagggatattattaaacacacacacacacacacacacacacacacacacacacacacacacasagagaaatcaaactcttctttttcaaggatgcctcttcacactaacaacgacagaagtgtacacttaaacatcctttctattaagaggacaaattctaaaaatttgttatcaataaaattacaaactttaagatgtttcttcaactctcagtgctgagtaactcaaatggcaacttgagatttccccccatcccagatgttgagaaggtacataaataatagcaatgcacat

SEQ ID NO: 341818 - DNA, 609 bp, Homo sapiens
cctatcaaagactaagcaatatacctagaacaaaaattattgaattaaataactcctacagatctctgctgtatgcataaccacataaaagttaaaattaaactcttgagtactgagaccaaaagcaattttgcatagaattcaggcaatcacccaattgcagattcaagtcattaactcaccatatacttcaagaaaaacccagtgctccaagggctttagtcaagaagccctatgaataagcctttggccatgaggaaattgaagggcaataagtcgtcccaaaatttaaaaaagaaaaatcgaacataagatagggatattattaaacacacacacacacacacacacacacacacacacacacacacacacagasagaaatcaaactcttctttttcaaggatgcctcttcacactaacaacgacagaagtgtacacttaaacatcctttctattaagaggacaaattctaaaaatttgttatcaataaaattacaaactttaagatgtttcttcaactctcagtgctgagtaactcaaatggcaacttgagatttccccccatcccagatgttgagaaggtacataaataatagcaatgcacat

SEQ ID NO: 341819 - DNA, 610 bp, Homo sapiens
tgattaacattccaaaaattcaaaatgagctttagctttttagccatgtcatccttgagaattaaatattttttatttaatattttttctttaaatgtttttccatgaaaatattgaaaggccttattctcatctgcttttcctttttagatattttttgtgtaataccattgaagacccctgtgcagttctaaaacgtctttaggctaataattccttattctgtaagatattttgggataggaaaatttatttattttaactttagagaaaaaaaaatccaaagatcagaaaggaatgactgaaagacagccrttggcccatttgacaatgtcttctgatattagctcactccgaattccagtgatgttcaacaaatgcagagttgagaactatttttttccttcttatgaacactatatttctatggatactcttggatgttagaagctttgtgggtaattatatcacagtctgctatagaatttgaaagtctgtcaactatgattaagtcaagtctttgtccattcagtatttagacaattgatttcttaaacctaagtgcaggattttcatgtctattaaattttaaaaattaattcagacacat

SEQ ID NO: 341820 - DNA, 592 bp, Homo sapiens
atatacattatatattgtatatttacacacatatataaatatacacacacacacacacacacatatatatatattgctgactagaagactaagactgtgttataatagaaaggtcaagagctttggaatagatttagacatgaatctcagactcgttgccagctgtgtgagagcaggcaaattccttcctctcactgagttctaattttcttatctgtaaagaggtaaagtaataattacttttctatcttgttatagggtttaaagataacataagttaagttttcagaacagtgctgacttgttatacaggctcaagtgtgaaagttgaaattctgtatgttatttctgttttcattcacatcgtcagcgtggtcagtgggtggtgggggaacaagagctgcttytaagtttctaagggactgccaatattggttaaaatcatctctaaattctaaactatccttttgaacaacaaggtggcatttgatggagcctaacagaagacatgagacattacctaaaatttttgtatcatttgtgatttttgagcctttgaaacagaatatcaggaaaaaccaccaatacctgc

SEQ ID NO: 341821 - DNA, 592 bp, Homo sapiens
atatacattatatattgtatatttacacacatatataaatatacacacacacacacacacacatatatatatattgctgactagaagactaagactgtgttataatagaaaggtcaagagctttggaatagatttagacatgaatctcagactcgttgccagctgtgtgagagcaggcaaattccttcctctcactgagttctaattttcttatctgtaaagaggtaaagtaataattacttttctatcttgttatagggtttaaagataacataagttaagttttcagaacagtgctgacttgttatacaggctcaagtgtgaaagttgaaattctgtatgttatttctgttttcattcacatcgtcagcgtggtcagtgggtggtgggggaacaagagctgcttctaagtttctaagggactgccaatattggttaaaatcatctctaaattctaaactatcyttttgaacaacaaggtggcatttgatggagcctaacagaagacatgagacattacctaaaatttttgtatcatttgtgatttttgagcctttgaaacagaatatcaggaaaaaccaccaatacctgc

SEQ ID NO: 341822 - DNA, 591 bp, Homo sapiens
aactaaaggaattctcagcaaacccatttgtaaaacaagccactgctgtttagttcttttttttttttttcttgagctattcgacttcttttcctaaaagttgttttggatacacagcaatagaaaacatattaattaccatgaccttagagttatatatttatcagtaaggagcacatgtatttatgtattatatatttattctgaaaataagatgcaagcttcagaatgaaaagtataagatacatgcttctgaataagacacatgtatcagaataaatacatacttatgagatacatctatatatacttcatatgattttttgaatgtatatatttgcagaacacwtttttccccagaaagaaaaggaaaacaatgataatttttataatggcttaacacaatttcatgccatcatataaagtcaacataaatgcatttagaaaaggaaccctaacaaaagagtaatgaaatgatctaccctaatcatatttatacttctttgtaccccaactacatttaacacatctaggcttgaagtgggtgctcatttcattcttattagattaaattgaattgaatccaatagc

SEQ ID NO: 341823 - DNA, 511 bp, Homo sapiens
aaatagaaacaatgccatcactacctgacattttataaccttgttatctctataccacactactaccatttatttatcttattgatttaaagtgcaaattaatgatatgttttctatttaacaaagctatgacaattarcactgaccctggggtaacataaattagcctagaagggtactaaaaacatcctgtgtcccattattagtgatgatgaatgttaaactatttccaagtttgctgacattaaccaggttaaacatggctcagatagggactctgtgtcccatgttctttccagataatatggcactggcataataagaagtgtatggaatagaaatggtttcaaaaccttatacagccacatagctctatactccctgactgtttacatttgacttctgtgaacctgaaattctcatctgaaaaccaggataaaaatctgacttacaattcctcataatcaggttttaaggaatgtcagtaatccacatacagggttgagaaaat

SEQ ID NO: 341824 - DNA, 583 bp, Homo sapiens
gtctaacacaaaagcaaatggaacgctctacaagaaattataaaaagtgtttctctttgctctgatttttagatacggataaagtttatcaagtgaattttagagcaagacaggtataaatcctggactctraaaaaacggaatttgagatgaagttttcaattgcaagttagtcatggtaataattaggtcatctaacaaagaaataaaaagattacccaggacaaaacaagagtgtataaattgaactttactttttcaaagatacatatttttaaaaattctaatgttaaaagatcaagtttaatcaattcagatcagtttttaatgatatggaggagccatattaaagaaaataaatgtgcttgctaagattataatacagtttgatagtagaaggacagtcaaaatgttgtatgctggataacctgtatttgatttctttgtgggtgaagaagttctagaaacagcatggattttggtttttaagtaaagttgataaaagatgtaatctattttgtatcagaaaaaataaaaatgaaagcaacccagttaccactttccccatacctttctaccagca

SEQ ID NO: 341825 - DNA, 550 bp, Homo sapiens
ctgcatgttttcacttacaagtgggagctaaacatcaagaactcattgacacaaagaagcgaactatagacaccaggacgcactttagggtggagagtggaggaggatgatgtttgaaaaactacctattgagtactgtgctcgttacctgggtgacaaaataatctgtacaccaaacccccatgacacacaatttacctgtataacaaacctgcacamgtactcctgaacctaaaaattaaaaataaataaattaataaataattaaaataaattaaaataaaataaaacaagtgcagtgtgtgcggactatgataaatgaataaagtctccagtatatcccagtctactttggttggtgtctgctcatccatatactcagaggcttcatgactgatttctagcagcttctgatcttagccatatttatgtgttatgtgtttacaaggcaattcatatgataatgttagtgactacttcaaatgctatgcttttaaagccagaagatccattttagagtcacaagaaacttaaatttacatcatagaat

SEQ ID NO: 341826 - DNA, 542 bp, Homo sapiens
agttcaaccaacctcattttccatgtgaatatctgcacttctgaatagatgataggaatgtgaagaagaatgggttgatcttggccttggaattatatggcttaggtgtaaattattcttaattttcaatcattatgttttacattcctagctgaaatttggctgagctatcagattgttcaaaggccagttcatgccacagcccaaggaaccgctactgggagaaggtggaaacccgtaacccacgcccaagtccatccatagggttttccccatgaaggtcaccacaacatacttaacattgttacagacaaattgctgccattaccaagccaaacaattctgtctttatgtttttaaatagctttggtaactctttagaaactttacagctggacaggmactgcatcttgatggagctacgtttatagaattttgttctatgcccctttttcatttgtttcctgatttagacaatagccccaatttccagctgcacatcagttactcacaagcctggtctgagtctgtgattcagccaa

SEQ ID NO: 341827 - DNA, 539 bp, Homo sapiens
tggaaacgctgacagactcttaactatcgagtttctagtgggttcctgtttaatatactgtatttcttccccttgaagatattaatttactttttgaaatgttcattgctaagattaagcataggtttttgaaatgtgttcataggcaatttatgcatgagtagaaatgtactcttctccagatgtacagaatactaatttgaaaatgatttataggccacaccgtactgtacattccattcccttctgaaaagttaagacaaggctttcctttgacataacaccgggatcccctatatattgtaaatacagtgtactagccagagttatttaaattcttgagacgtcaactctaggatgggtcagaatagaaagagtaagctgccaggaccaagggtatcagcggtaattaaaaaatgggaggattcaggaagaggaagattgacataaacacacattcaaatagaagcttctcatcttaagggagtattttcatgttttggccaaattagatcrcttagaattttagagtgttagaa

SEQ ID NO: 341828 - DNA, 621 bp, Homo sapiens
gatgctaataataattgaaaatgttcaccccaaaaaggaaatttctacttctctttaaaaatggaaagacttggtaacacttaacttgcatcttcccttagaaacaacttgctggggctgagtagcgcagccccctttagaacagaagtgagtcccctgcttgccaatgtccactcttcctgtttcacactttcatgtcaccatcctggttcctgatgtagtcatgtttgtgaatctcatccagagaatatcttgtccaggaatccaagcctgtctgtggcaggactgggatgaaagtaaggtcaaatcttacacattttcctcactgcactatcagcacattatactctctttggctaattcctttttgcaggaaaaatgatcytagtgaaaaataagttgaaagatctaataatcacagtcattggcaattatgacttcagtgactcttctgagatctaatggaactcttgatcatcccaaaaggtatagtgttttaatgcttgcaaaaaatgtttgcatcaaaatatgggctctcaaactttggttccacttaaaaatcacctgcagagtgtttaaaaattatggccaggcatggtggctcatgcctgtaatcccagc

SEQ ID NO: 341829 - DNA, 610 bp, Homo sapiens
atctggggatgaactacttcttgggtgctttgtagaaacaggaggtatatgcagtaaaatgggggtgaaagacgtttggcacatgttaaagggtaaagcaccttctttttaattgtacagatccttgtattttacagcacattaaactttaaaaggaaaggtagcaaaattgagcatctgtttttttctcatataaattcaactcctaataaatactaagcagagtttccttagacccagttgtgcgcagataagcagttccatacacacacaactaattgcagcactctctaaagctcactcgactgtcttttttatttctctgccagtgaaaccagcttttagcaattgggttttgggaaagatgacatcccaaaaaagaaccatagccaaaataaacagggttaagatggagaatactactaaaattattactgtttattccatactacagtactttccattgtaaagagcatgctgcacctaaattygtcacagtaacatgattttcatgctggaaatgaacctgtgcatgtctcccaatttcctgactatggaggagtaaaatatatgttgctgcttatcagttttttaaatgaattacctttcc

SEQ ID NO: 341830 - DNA, 646 bp, Homo sapiens
taaaaaagtaaaatttttgaggaatgaaaaataaccaaataaatgatatttcttattctttaaaattaaagtgatagactctatggataaatgaaaacatatctaaattagaactacagacttccctgtttctctgttactagggcagaggaaaaagtaattttcttcgcacacacaaaaaagataacataatagcaataatatcatatttatgtaaaacaaggatcrcttatgttttcattctcttagttccccaaatgacaaataattactatctcccaaatcataggtcctggaatcaaaccattttgcttaaaaaaaaaaaaaaagggacagacgctccttgacttatatgattcaacttacaacctttttttttactttataatggtccagaaagacacgcattcagtagaaactggatttttttgaattctgatcttttgctgggctagctatatgtggtacagggcagcaccagccagccacagcctccagtcagccacatgatcacaagggcactgatggtctatagtgtactgtgttgccagatgattttgtccaactgcaggcaaatgtaagtgtcctgagcacatttaaggtaggttaggctaagctaggatattcagtaggtttggtgcagtaa

SEQ ID NO: 341831 - DNA, 575 bp, Homo sapiens
tgaattctgatcttttgctgggctagctatatgtggtacagggcagcaccagccagccacagcctccagtcagccacatgatcacaagggcactgatggtctatagtgtactgtgttgccagatgatttkgtccaactgcaggcaaatgtaagtgtcctgagcacatttaaggtaggttaggctaagctaggatattcagtaggtttggtgcagtaaatgcattttttatttatgctttcaacttataaagggcttattggaacataaacccatcttaagtggagaagcatctgtactatccagcacataaaacttggaaaggatgcccccaccatgatatttcaaaaagcaactctttctcataagtaaactttctcttcgagtgttgcaatagaagtaactaaaaatgacgtggtttttaattaatatttgctaaacatgagtaaatgaatacataaatgaataaggggagacataaaaccagatagggtatcaatgtgaagtctgtaagagaaaaaatctattctctaatttttaagtaagtttttaacacctcacatgatctgccatgtgt

SEQ ID NO: 341832 - DNA, 575 bp, Homo sapiens
tgaattctgatcttttgctgggctagctatatgtggtacagggcagcaccagccagccacagcctccagtcagccacatgatcacaagggcactgatggtctatagtgtactgtgttgccagatgattttgtccaactgcaggcaaatgtaagtgtcctgagcacatttaaggtaggttaggctaagctaggatattcagtaggtttggtgcagtaaatgcattttttatttatgctttcaacttataaagggcttattggaacataaacccatcttaagtggagaagcatctgtactatccagcacataaaacttggaaaggatgcccccaccatgatatttcaaaaagcaactctttctcataagtaaactttctcttcgagtgttgcaatagaagtaactaaaaatgacgtggtttttaattaatatttgctaaacatgagtaaatgaatacataaatgaataaggggagamataaaaccagatagggtatcaatgtgaagtctgtaagagaaaaaatctattctctaatttttaagtaagtttttaacacctcacatgatctgccatgtgt

SEQ ID NO: 341833 - DNA, 584 bp, Homo sapiens
ctctcaactgtgacctttcacttgacctatgatctcataaattctgaaatctcatacatgtaatcgagaaacaaataaacaaaacatctggatgaagctcttcctgaattaagtctgagtagatgaaacatagaaccaaaggcttcagtaagtaatgtaatatccactaggataatatgtaaatagtagaaaataaattttttgggattgactaagatacggcaaattatcaaaagactcagcattagcttctatgaaaatatttctttggtcacattaaaaataacaatatactaagttagtctggttaaaaatgaaayatcttcaatgtaatactgaaatgtaaaatcttatcctcaagcatgagagtcagaactcttgtctgaataagtaccaaaggatttcactcagataaagattgtgtaactcactatagtattcaatataaaattgttattttaagagctaactgaccacccttagtcactcattctccactacagttttattatttttatagaacttgtccccgtatgaaataatcttcctttattgatgtgctgtccctccctactagaatgcat

SEQ ID NO: 341834 - DNA, 584 bp, Homo sapiens
ctctcaactgtgacctttcacttgacctatgatctcataaattctgaaatctcatacatgtaatcgagaaacaaataaacaaaacatctggatgaagctcttcctgaattaagtctgagtagatgaaacatagaaccaaaggcttcagtaagtaatgtaatatccactaggataatatgtaaatagtagaaaataaattttttgggattgactaagatacggcaaattatcaaaagactcagcattagcttctatgaaaatatttctttggtcacattaaaaataacaatatactaagttagtctggttaaaaatgaaacatcttcaatgtaatactgaaatgtawaatcttatcctcaagcatgagagtcagaactcttgtctgaataagtaccaaaggatttcactcagataaagattgtgtaactcactatagtattcaatataaaattgttattttaagagctaactgaccacccttagtcactcattctccactacagttttattatttttatagaacttgtccccgtatgaaataatcttcctttattgatgtgctgtccctccctactagaatgcat

SEQ ID NO: 341835 - DNA, 542 bp, Homo sapiens
ttgctacctgaaatgaccacagcaattttactcttaggcataggcaagctaaaatttacaagcccttcagattaatgtaaggaagactcaaacaggaaccataaaaccaaaccaaaaaaaccccacgaacaaaccattgaataaaattattactaaataaaacaatttggaggcaatatcttccaaaggtttagctaaaatatcccctggactctcttataaaagtttgcataaggcataaagctgattcagataaacaaatctgattagaaagtccactttctcttaagatctcttatagaattcaactaaggaaatttcagtttgaatattaaattaaaagtgagttttcactttcaaaatggtggtagaaaaaccactatgaatatatacatccactatttagtcagttaacaaaagattataaactaacttacacaaaatatgtattatgattaatcctataaaatgctaataccaataaacytagaatgtctcatacttatttaaatcttacctgaatgtatcacatcttcatcata

SEQ ID NO: 341836 - DNA, 581 bp, Homo sapiens
gaatctatgctggtcagtggggataataatagtatctcccacagtgggtcattggggatgttctgagttaatcattggaaagctcctggcatatagtcagtacccagtaaagacggcattttttgtttttgtttgcttatttttagtcgcatatagagtgaagaacctagaaagacttttctgtcaggagaatgatagacttatgtttcagaaatggtaatcagtaaacacaatttctcatcttasatgtatttatctttttagtgtctctttcacctattggactgcaaacctcatggggctacgtctcacctcttgtgttcaccattattacacagtttacctcattactgtgtgcttggcacacagtaggtacttactaatatttctagaccaatgagtaaaaggggtggagtaacaagatagggtggacctaggatccttgagatgaggtgctgagacaaagccgaccagctggaaggaccacagatcagcctgggccaccccacttcctcaaggactggggctccctggaatccctgcccacaggccgtgcttccgtttgtgagatgcagttttgc

SEQ ID NO: 341837 - DNA, 581 bp, Homo sapiens
gaatctatgctggtcagtggggataataatagtatctcccacagtgggtcattggggatgttctgagttaatcattggaaagctcctggcatatagtcagtacccagtaaagacggcattttttgtttttgtttgcttatttttagtcgcatatagagtgaagaacctagaaagacttttctgtcaggagaatgatagacttatgtttcagaaatggtaatcagtaaacacaatttctcatcttagatgtatttatctttttagtgtctctytcacctattggactgcaaacctcatggggctacgtctcacctcttgtgttcaccattattacacagtttacctcattactgtgtgcttggcacacagtaggtacttactaatatttctagaccaatgagtaaaaggggtggagtaacaagatagggtggacctaggatccttgagatgaggtgctgagacaaagccgaccagctggaaggaccacagatcagcctgggccaccccacttcctcaaggactggggctccctggaatccctgcccacaggccgtgcttccgtttgtgagatgcagttttgc

SEQ ID NO: 341838 - DNA, 526 bp, Homo sapiens
cgggtgtggtggcgtgtgcctgtaaactcagctactcgggaggctgagcaaaggagtggtgtgaccctgggaggcagaagttgcagtgagctgagattgtgccactgcactgcagcatgggtgacagagcgagactctgtctcaaaaaaagaaaagaaaagaaaatgttgtacctgataaaacttgaataattatggaagaaggaaatattggattttggtggacactgggtaacccttgatatattccccttgtatttaatgcagctctttgtgtgtttataacataaatgtacctagatgataaatgttgrttgttttgctttttaaaaaaggagacctgagcctgccatactgagtctatggacagttccacagcaatgaatcaatgcagctgtagaggaatggaagaaaacaaggaaaggtaaaaataatcaaataacctaaataattaaaaattttaaaattcctgtatgcaacaattaaatgaaatggagggcttcctttaagcctacataagtcagtag

SEQ ID NO: 341839 - DNA, 551 bp, Homo sapiens
ttctcaatgaggtgggtgtgcaggcagttgctccttccccttattctggtaaggagctggtggtgcttacacagtagmcatggtgttcccttccgcactgggaaatttgagctttgctgtaacacctcctatggctaactagccttgtgcaaagtatatctcagaatgtgggattagagatgaactttgtcaaggacactgttgggaaatggggtcttggaccttctctggaagctctggggtgtgattgaatgtttgcctcttggttggggggagggtgggtagatttcacttgattcttttaagccttgggtctcctgacagtctgacattgtctagtctctgtgagtgtgggagtctatttaagggtccagggacctgatcttgtctccttctcccacattcattcatttctagcagattgccccctccatctgtagagttttcctggtctgcacccatttggtatctttcttcttggcaatttagtttctgtcttctgaatctccacagataagagctctgaacctggagccccactgaacgtcctg

SEQ ID NO: 341840 - DNA, 606 bp, Homo sapiens
ggtatctttcttcttggcaatttagtttctgtcttctgaatctccacagataagagctctgaacctggagccccactgaacgtcctgaaatctacacgaggcacttgaagcacagttatttttccagaggtttccccttacattgtattttccatgaggcctgtgccccagaaaagtggactctgaacttctggtaggaaagtggaggttcttgccccgttacatctcaattccctacaaactgggggctgccctttgtgccccctcccagaamacacttttcagtgggcaatacaggtcagccttgacttggtcaattaggggaaagagaggcaggctgtgaggttagggactgttggcctgtggtgagacctttaggctgtggatgcaattcatgaacatttgagttcaagttttcagaagacttctcagggcctttgcacacgctgttccctcaacctagcatcacttcttccatgccaggcactttcttgccatttttctcagatgtctcccctgtacagatggtttttctgaccactctgtccaaagcagcccctcccccattagtttctatcacactctttcttgtattttattcataga

SEQ ID NO: 341841 - DNA, 606 bp, Homo sapiens
ggtatctttcttcttggcaatttagtttctgtcttctgaatctccacagataagagctctgaacctggagccccactgaacgtcctgaaatctacacgaggcacttgaagcacagttatttttccagaggtttccccttacattgtattttccatgaggcctgtgccccagaaaagtggactctgaacttctggtaggaaagtggaggttcttgccccgttacatctcaattccctacaaactgggggctgccctttgtgccccctcccagaaaacacttttcagtgggcaatacaggtcagccttgacttggtcaattaggggaaagagaggcaggctgtgaggttagggactgttggcctgtggtgagacctttaggctgtggatgcaattcatgaacatttgagttcaagttttcagaagacttctcagggcctttgcacacgctgttccctcaacctagcatcacttcttccatgccaggcactttcttgccattttkctcagatgtctcccctgtacagatggtttttctgaccactctgtccaaagcagcccctcccccattagtttctatcacactctttcttgtattttattcataga

SEQ ID NO: 341842 - DNA, 521 bp, Homo sapiens
agtcagggtggcttgattttacagatcaagctaaggagataaaaaccactcactggtaaaaaacggtaaattccattttgtgattagaatcacaacacatatgtagcccaggtgtggaagaagaaagaatgagctctgcctcaaaaacagcctggccagggatggtggctcccacctgtaatcccagcattttgggaggccaaggcagcaggaatgctcgagaccaggaattcaagaccagcctggactccatctcatagaccccatctstatgaaaaataagaataattagctgggtgtggtgcatacgcctgtagtcccagctgctgaggaggatctcttgagcccaggaggttgaggatgcagtgattgcaccactgcactccagccctgggaactcgagcaaagctctgtctacccctcccccgcccccaacccccactcaaaaaaaaaaaaaaaaaaaacttagctgatctaaaagcaatatttaacttgcttttaggattctctccttctcattt

SEQ ID NO: 341843 - DNA, 616 bp, Homo sapiens
gtcatccagaataaacacttcccacatccctggaagtgaccaacacaccctcattgcttctgtgttagacacccccaactggcctgaaaagatgggcaccatagggctgaaayagccaagtgggttcagctttgcatgtggtacatcttggagacaggcaagatccaaatacagtggtccttacagatgtgagcacaagcctagatttggcagacagaagcacagggaaaaggtctctgatacaggccaaggtggcaatggggtaggtggggagatgaggaaggaagaaagaggcaatgaaacagcagcttcaaaggatgaatccaaaggacccaagaattgaacagatgggatgagtcaaaccccagggcctggagagcagaagtgacacttataaaacagaagactggagctggggtctcaaaacacatatccatttcaagatggaaattgattccctgcccctaatacagatggaaggtatttaagaaggaggaaggtgagtcctggtcaccagccgcttccaattttcacttctcttccctccatgacaaaaaacttttggtattaggttagtgccacagaggcctaagttgggagtctctaatcttcccct

SEQ ID NO: 341844 - DNA, 647 bp, Homo sapiens
aaatttaatataacctacttgggcataccacctcagaatgtaaaggaaaaaacatggaattcaaggccaaaggaggcagagagacttataaaatttaattttgacttaatggcaagacattttcttcctgtataacattaaatgacaaaggaatagaaaaatacgatttttagtaattttgttgaaaacccagtaattgtttcttagttatttcaaacaagttatttcagttgactagtaaccagtcaactgagcagtaacaggaacttccctgtggaagacagaaatatctttttcaatggaaaatatggaataagtttttctacacagcctggatccaattactarcaagtccaaagtgttggattctggttgcaaaaaatttatgtccaaatgacattttcccaaaatgcaactgaacttcaaacgtctcaggagtcaatacaagctgtgaattaaattttaattaaatgttgaagaattaaaaagaaagtaatgactaagagacaggcataggtatgtgggccaaatatttggtattattaaaaaaacagcaagatactttaaagttttacacggagagatcctccttcacaaaccccatattaaattagagatacaaatgtttgtttgcagctgacgggaaa

SEQ ID NO: 341845 - DNA, 282 bp, Homo sapiens
acagtttcacatgagattcagagacacagatccaaaccatatcagtcagtcatcattcctgccgcatcttgtaatttcttctattgtcctggattcgggggagtgtggraagtttttaagttatactgtgttttgttacaggtttaatgagaaaaatatgaaaagattacccatccataccgttgctagtaccttgagacaattaaggcatatggtaatggaaaaatatgaactcttcagcgagggtggtggaaactccttttccaagagggaaaagggaaa

SEQ ID NO: 341846 - DNA, 604 bp, Homo sapiens
aatgatctccaaagcactgtaagcagaggccacaaggtttcacaggcactaaacagccacctttataaacaagtttctcagtgcccatgaactggaggcacagacagcacacaggggctaaatgaattcctaactataatttaagctttgccattttctgagawgcaggggatttaagacatagaatgtgggttttataaatgcttaacagttaccagaacaaacaaaatctgcctgttgggtttcagaggagagtcttatggataaaggggattgagttttgaccgaaaaatgagaatctaagtaccactttcagtatgacctgtgtctttggaagttgccagtttaaactgggccttgtcacaaacatttatggacttcgttaccttaagaacatgggcacacccactctggattccaagccaccaatgttttaagtggcacttttttgggaaggcttatcaaatataaaccaatatatatgcaattataaatatatatataataccaatatataccaattttttaaactggctgctaaacttctggctctttttgaggcagtctttacaggaatgagacctgtttctatttctagtccatc

SEQ ID NO: 341847 - DNA, 351 bp, Homo sapiens
atgagttctctttgttgaggctcactcattctcctgccttccctaccagattgtgtgcaccttttggggagctgtgagagatctctctcccctgcctcttgggcctttttatagctgggccaggcttctggaatcagatgtgagggatgtagaacctcctcttagacagccytcttcctattctgcagaactgaggtaggccagtgctcaagtagatgttccggtctctaaaatcttctaacaatggaaacctaagtcctctgcttcctgccaggagacttgacattccctgtctctaccccagcaggctccagcctcttcccccacatattgacccaggggtggtacctg

SEQ ID NO: 341848 - DNA, 523 bp, Homo sapiens
ctggggcaggacgtgatggtttgccttsccagcaatatcccaggttatgctggtgctcgggcccaggaacccaactttgagaacagttggtctcatgggtcatgctcctcttggtcctatgcttattccttctcatggtttgctattttgtcttttctttctttgtttccttgtgttgctttttctgcctcccttaccagaagaggcagtctctgaaggggagaccatctccgccttgttttcattgcatctgggtgcccagcacacagtaggtgctttataaatacttgaaggggtgaaggtggaaaggctggcagcaagcaaaacttctccctatctctacatacgtgcctttcttcattcagccacttccatttcccatgggaaatcctggcagtaggaacaggcagaacttgggttagcttctcatgccctcctcaaaatcttgtgagttctgttactgcagagcaaacaaggcttaatgccacaaggggtaatgttatggagcaggtgagtaagtaaa

SEQ ID NO: 341849 - DNA, 614 bp, Homo sapiens
gtgcatattggtaccccagcaacacacaagatgggcagggagcttctgggaagtcaagaagccttacggcatacaaatgtctcttaagaacacctcactaggctgggttttgcttctttgatttatagattgtttcctccygggaaaatgtgtctcttctactacaggatccccacgagcactggagtcttagtaaattcttattattggcatttaggcattaccagtaagttatctcatctaaactttatattaccctaaaaagcatgatgctatatttattttgcagatgagaaaactggaactgagaacagttaaattgcccaaagcccacagccaggattccaacgctggcttcatcccacaattgctgtccctgcacactccacctctgagctgtgaaaaaggaggaggtcatctggcttgtggaggggcttatttgaactgtatttgattgaaaactgcatgggctactaaaattgttttcttgggcacagttgtcagaaatgcgtttctgtggaacccagctgtaggcaggggggacattcttgtgtgggatgacagggcatttctcagtcaccccaaagtcccagttctccctttggggttgctac

SEQ ID NO: 341850 - DNA, 644 bp, Homo sapiens
gtcactcaataagtgcaggctttgaggatgcagtaatagcaaagcactgcacacagtgggaaccaaaacagcaattaagccagcggtcacttcccccaaacgctggccatttgaattccttctccataataacttgccatatgccgctatggcctgaactgtcatttacttaatattttcaatggactttttaaasagcgaaaggattattaagaggaaacttcatattacttccatgaagggaagactggtatcatctgacacaaactggaaaaatacacactattaaaacataacaatgtaatgaatttctagttagctattattgcctgataaaggctcggagcctgaggctggccttttctttcacaggcaagattagcaagtgatgaaattgtgttaaagacattccacggggaagctaagccttcccgctgtgagatttattattgcatgccagatctgaatacctccaaactcactctctttccaccaggcattcttcgggaaacctaaacacagagaactgaagttctctgacaccaccacctgcttctttcttttagctgcttacacatgaaagcaggcaattcatgtatttgtccttccgttttctgctttattctaaccttgtcccaccctaa

SEQ ID NO: 341851 - DNA, 492 bp, Homo sapiens
gaggccagcctggccaacatggtgaaacccaatctctactaaaaataccaaaattagctgggcatagtggcgcattgcctgtaatcccagctactcgggaggcagaggttgcagtgaacctagatcgtgccactgcactccagcctgggagacagagtgagattctgtctcaaaaaaaaaaaaaaaaaaagtgatatcttgcccaagccaaacagctagttactgtatcagaaagaactcttttcacactgaaaatcatttttctatgggacctgttaaactcgtgtctggtccagcaagcaggtggaccagctaaatctacctgaccctcctacacaggtgtcctactgcactgaargtagctgagatggatgaaagagtttcaccctgaaaaaaaaaaatcatggatattaaagacttccccagatgtagtgtagggttggaggtctgtttaatgtaagggttggatagtttcctgacttaacagcaaat

SEQ ID NO: 341852 - DNA, 638 bp, Homo sapiens
cgacttttgccattacacatagaacctaagtttctgctctgagaataaaggctaaatgctgattaatccattctgtaagacttggccaaaatgtgtttttaaccattattagcatgtagtttcttttagccccattttaatctcttgtgggttayaaccccacttgggatgcagtgaagaaaaaagcaacatggttcagagaactggacctttcttttgacagtttaaaattctacaactattactgaccttttacaactattacaactaccttttcagtcagtggtccccaaccttcttggcaccagggactagtttcatggaagacagtttttccacggactgggcggggcagaagttgatggttttggaatgattcaagcctcttacatttattgtaatgctattattactacattattattattattacattattattatattattattacattgtaatatataatgaaataattatacaattcaccataatctagaatcagtgggagccttgcaactggatggtctcatctgggggtgatgggagacagtgacagatcatcaggcattagatttctataaggagtgcacaacctagatccctcttaagcagagtttgcagtagagtccatgct

SEQ ID NO: 341853 - DNA, 630 bp, Homo sapiens
  misc_feature (1)...(630): n = A,T,C or G
gcaaaacctgtttcatcccactcacagtagctaattgtggatgacatggatattattccagaccaggggtactcagcatttccccacactttaactatgtayagttaacttcaccctcatatgagatagtgttttgaagaaacacttcttggataattntanaatggtaagatagcctggactattagaaagtgcactgtaagagtcaaaacctagattctatatacggctttgatgcttaagtagntgtatgaatttaggcctgttatcttcccgttcttcatttttctcatgtatgaaatgagaaggttggactagataattgatgtgttttgttatttagcaaccattatttagaacctaccatatgccttcatattttgagagtagatattatagagatagaagagactatgatccctacttcaagtattgcaacatctggtgggggagacagacataaaccaacaacagtaattcattgtgatgatctctaatgactttccagttatgaatcaaaatgaattttttctttttccttattaatacatgtgtagcacacacacacacacacacacacaccctttcatacatgagccaattgattgcagagaagtacaagcagagaca

SEQ ID NO: 341854 - DNA, 658 bp, Homo sapiens
tgataaatgaaacctaggaaaaaaattcatgttctctaccacctggtataaccattttggaacttcaaaaaatatcccttgtagtattttccctatgctttaaaaaatctaactgtgttttatctgtagcctttgttctggatacaaaacaacaatactgacaagtgcctatgctrtatctagggtgatcatgtagtgtttgcaataatataggacaattttatcagtaaaaggggagctaaaaataattataaatgtttttgaaatgtttatataattaccataaattagctatattgtattgacgtgcctaaaaatagagctttcaatgattagtgatgttcagaattttttcatatacctgttgctcatttgtatgtcttcttttgagaaatgtctattcaggttgtttgtccattttttaattgctttctttttgctattgagttctttatatattttggatgtaaatatattttcaaaactaaaagtcattctaaaatttaaagtagcatatatatatatatataaaaacacatacatatgtggggaaaagaactttatattaattatctgaagtgaatcacttaactgaatgactatttgaatatgttcacaaactttactaattttgttagtttcatctatttttaatacc

SEQ ID NO: 341855 - DNA, 501 bp, Homo sapiens
agattcatgacctatggaaactatgagataacataggagataatgaatgtttattgttttaaatcactaaatgtgtggtagtttgctatgcagcaatacgtaactaatgtttggcatggaaaaagcacrtacaagaataataattttaaaaattattaaaaacacacaaagttcaaattcttagtatgccatttaagattattccactaggttcattttcctaagtcctaagctttaaacctactggaatgggcagatcacttgagtccagaagttcaagaccaatctggccaacatggtgaaaccccgtctctacaacagatagaaaaattagccgggtgtggtggcatgcacctgtagtcccagctactagagaggctgaggtgggaggatcacctgagcctgagaaggtcgaggctgcagtgagctgtgactgtgccactgcactccagcctgggtgacacagtgagaccctgcctcaaaacaaaaccaaacaaaaac

SEQ ID NO: 341856 - DNA, 501 bp, Homo sapiens
agattcatgacctatggaaactatgagataacataggagataatgaatgtttattgttttaaatcactaaatgtgtggtagtttgctatgcagcaatacgtaactaatgtttggcatggaaaaagcacatacaagaataataattttaaaaattattaaaaacacacaaagttcaaattcttagtatgccatttaagattattccactaggttcattttcctaagtcctaagctttaaacctactggaatgggcagatcwcttgagtccagaagttcaagaccaatctggccaacatggtgaaaccccgtctctacaacagatagaaaaattagccgggtgtggtggcatgcacctgtagtcccagctactagagaggctgaggtgggaggatcacctgagcctgagaaggtcgaggctgcagtgagctgtgactgtgccactgcactccagcctgggtgacacagtgagaccctgcctcaaaacaaaaccaaacaaaaac

SEQ ID NO: 341857 - DNA, 588 bp, Homo sapiens
tgcttttctcttgctaattttaaaattctttcctttacttttgctttggatattctgaatatgatatgctgtagtgaagtctttttgcaatgtgtttgcctagggatcaataggcctcctgtatatgaatgtctaactctcttggtagacttgggaagttttcattgattattcccttaaatagtttttcyaaacttttcctctctcttcctccttgtgaatattggtaattcataagttcaatcactttatgtagttccagacgtctcaaatactttgttcgttctttattattattttttccttatttttgtctcactggtttatttcaaaaacagtgtctctaaggtttgagattcttctgctcagtctagtttattattgaagatttcaaatgtattttgtatttcttccaataaatttttcacttccagaatttctgcttcttttttttttaaagatatttctctccttggataattttttattcatatactgagttgattttatgatttctttgtatttgttttcatgtttttgttgaatctcattaagcttctttaaaatcaatattttgaattctttatc

SEQ ID NO: 341858 - DNA, 588 bp, Homo sapiens
tgcttttctcttgctaattttaaaattctttcctttacttttgctttggatattctgaatatgatatgctgtagtgaagtctttttgcaatgtgtttgcctagggatcaataggcctcctgtatatgaatgtctaactctcttggtagacttgggaagttttcattgattattcccttaaatagtttttctaaacttttcctctctcttcctccttgtgaatattggtaattcataagttcaatcactttatgtagttccagacrtctcaaatactttgttcgttctttattattattttttccttatttttgtctcactggtttatttcaaaaacagtgtctctaaggtttgagattcttctgctcagtctagtttattattgaagatttcaaatgtattttgtatttcttccaataaatttttcacttccagaatttctgcttcttttttttttaaagatatttctctccttggataattttttattcatatactgagttgattttatgatttctttgtatttgttttcatgtttttgttgaatctcattaagcttctttaaaatcaatattttgaattctttatc

SEQ ID NO: 341859 - DNA, 552 bp, Homo sapiens
  misc_feature (1)...(552): n = A,T,C or G
gagtctggctacagctaactctggcccctgagtcactgctggcagccactrgggcagctagagcctctaatctacactcagttttccggaccctccttcctagagagaaatcactggtagggggatgcttatatttgctgaactcacatggatgaggagggagactttagcttattcagggagtccaggtgtatccagtgcagcagtttaaaaatttccaaacactctgctatttagcaagtagaactactagtcattacactgatgctttgcatgaaattgctgacaccttggaaactgcttaatgatacataaaattctattttttctgtgtggaatgccactgggcaagtgggtattacttagagatgtataaatattgtgcatgttagcatgaagagtcacttacaagtcagtaatctttctaaactgtagaagaacaaagagaaaaaatcacagagaaatgaataatttcataggatcttattccattatttcttaaccttggaagggcaaaacttttctattaacangtaaccttttattttattt

SEQ ID NO: 341860 - DNA, 590 bp, Homo sapiens
ttattatcaaggtgaccaaaaacattctggaagaagaggggtgatattctttacctatgtattttataaacactcccaaaaaggttcttagagaaaaatatgacttgagagcataagatttaaatttatgacgttacttcaattgcgaaagtttgttcagatggcctaatcaggrgattaatgaaccatcttgactgtgatgtggattaccatgaccttcctcttgttttggagttggacacgtggtgctacccaactaaacgaaaataaggaatatttttaaacgcactgtgccatgtcacttcctgcatggtggaacccattcacagacaagacagatacaatgaggactgttaggaaaatagaggaatgaaaggcacatattgttcccctgagtctatggcagccactgaataatggcgttttcttatgggtaagaacaggtttgctttcagagcagttctctgtattttccttggatccaggacttgtcagcaaggacacagaaaaacccaaggataagtctcaatcagcaataactcaacactcataggaaggatggttttcaaagacaattaggaagctgtttg

SEQ ID NO: 341861 - DNA, 653 bp, Homo sapiens
gtcatgggggtttgttgcacagattatttcatcactcaggtattacgcccagtacccattagttatttttcctgatcctctccctcctcccaccctctaccctccagtaggtctcagtgtgtgttgttcccctctatgtgtccatgtaagtgagaacatatggtaggtattttatttttcatgccaagtttgagtctgaatggctttatgaattggaggaaaagcagcaaatggtgctacttttttcagcttcttgaggactggtctgaactcataccttgccttatactgtaagagttggcacataggaagcacctcatagatgctgggtaagtgaaattgggtaaagcaaatgagataaaacaatagatacgcaattacttggagacatattggtgaagggaaaatttctagggtatccttaactacatcatggaaagggtgastgtattaaacaaaggagcttgactgttatataactcctactgagcctccacagaagtctagtcacacaaccggaactcgaaatctctgagggaagaaaaactaagaatgtctcagatactttgcaaaaaaagacatagagattttaaacgtttatgtatactaaaaatatttaatgaagttttatttttagttaggactaatatcat

SEQ ID NO: 341862 - DNA, 621 bp, Homo sapiens
tttttctttctttttttgytatgaagtgagtttcttgatcagaagcaatgctgtgtggaataccacaacagtagataaagcattctgtaagtccatgggtgacagttttggcagaagcattgtgtgcaagaaagaaacatctatatctagagtgcttattccagtaaagacaaaattctgccccttctgtgatgggaataaatggtccactgtaatcaatttgtcacaaggtagctggatgatcacccctgggaattgtgccatattagtctttgttgctggcagaaggggtactcagtagtgggccatagtcaaattggcctttgggagtagaagtccatgttgctgagcctatgcataaactccctccctgccaccatggccactttgttcatgagctcactgggcaatgacagaggtggctgggaaaagaggctgactggtatctgtagaatggtcattctatccctgtgattattaaaatcctactctgttgaggctaccctttggtgaacattcacatgggacagaaatatcttcattttttgtccattcagagatgtgtatccatctacctctttctcatatttctttgtcaccaattttcagccatgttccttc

SEQ ID NO: 341863 - DNA, 556 bp, Homo sapiens
gtcaactggttgcaggtaactccccatgaggccagaaatgctggctgggagagagaagtcagtgtagcatgagtggggttcctggcatttgggccatttcttcatgtctcttaccttcaaggcccgctgggtcctattatgtataaaccacttccatttgacgatagagtgttgctgtgcatgactaactttatggcgtggtgggtcagataaccccaaattcatgatgtgcaactcargtcgcatggtaacttgatggctcacagtcaaatattcagtttctactaaggccaagtagcagggcaatacctgtatctcaaaaggagaatagttatctgcaaatgatggcagggtcttatcctaaaattctaaggactgcacttgattcacttgtggggcctgccaaaggcttcaaacagcatccctatctgccactgatcctttaaacaccactggatttggtgaatcatatggcccaagtgccaaacagcctgtacagcagcctgaatctgctgcagaacccttctttttttctggtccccactaaaaactagca

SEQ ID NO: 341864 - DNA, 627 bp, Homo sapiens
gtgtaccctcaaattctacccacggggagaatttctctctactactgtgcttcaggggtggcccagagaagggttgtagtattgcaactgtctactttcaggtggtacctgcatattgtggagaactatctgtaaaccaggcccaagtcttctttttctctgtcaactggttgcaggtaactccccatgaggccagaaatgctggctgggagagagaagtcagtgtagcatgagtggggttcctggcatttgggccatttcttcatgtctcttaccttcaaggcccgctgggtcctattatgtataaaccacttccatttgacgatagagtgttgctgtgcatgactaactttatggcgtggtgggtcagataaccccaaattcatgatgtgcaactcaggtcgcatggtaacttgatggctcacagtcaaatattcagtttctactaaggccaagtagcagggcaatacctgtatctcaaaaggagaatagttayctgcaaatgatggcagggtcttatcctaaaattctaaggactgcacttgattcacttgtggggcctgccaaaggcttcaaacagcatccctatctgccactgatcctttaaacaccactggatttggtgaa

SEQ ID NO: 341865 - DNA, 556 bp, Homo sapiens
gtcaactggttgcaggtaactccccatgaggccagaaatgctggctgggagagagaagtcagtgtagcatgagtggggttcctggcatttgggccatttcttcatgtctcttaccttcaaggcccgctgggtcctattatgtataaaccacttccatttgacgatagagtgttgctgtgcatgactaactttatggcgtggtgggtcagataaccccaaattcatgatgtgcaactcaggtcgcatggtaacttgatggctcacagtcaaatattcagtttctactaaggccaagtagcagggcaatacctgtatctcaaaaggagaatagttatctgcaaatgatggcaggktcttatcctaaaattctaaggactgcacttgattcacttgtggggcctgccaaaggcttcaaacagcatccctatctgccactgatcctttaaacaccactggatttggtgaatcatatggcccaagtgccaaacagcctgtacagcagcctgaatctgctgcagaacccttctttttttctggtccccactaaaaactagca

SEQ ID NO: 341866 - DNA, 559 bp, Homo sapiens
caaattatcataaaggtgtttttttaatgtctttgtaacttcagtgatttccctgatgtttcacatcataaatacaatgacaaagatgtagttttacytcacagtgtcaatatgtagattaattttttacattttaaaggggatactacaattctttctcaaatatacctaattctaaaataaaaatgagccaagtgcagttatgcatgcctgtaatctcagctacttgggagactgaggagggagaatgtcttgagcccaggagtttgaggccagcctgggcaacgtggtgagacccatctctaaaaaagaaaaaggaaggaaaagaggaaaagaaaaaaagaaaaagaaaaatggtttcctacaaggtgatgtagtgatgtaatcttatattcttccacgctacttgattaactatacaacatattttattttcttctaagagattaatcatacatattcacctttgcttctgtatttaaaagccaggggtcaggaatttcaaaggaaacactttgttacaattccagaacaggagaaaacataacggcagagacca

SEQ ID NO: 341867 - DNA, 590 bp, Homo sapiens
acaggaaaggaatgtagagaagcaggtagaagctttgtgtgaggcatttatgtgataagttgtcccaaggcaagagtgcataatacggcctgcctgtggcagggtgaaaaacaggaaactgtcaacacctgattcctcctcttgtctacgccagagaaaagccctgacatgtggggcttgggactagttgctcactgctccccatcctccctgttccaccttggagcttggccctaacacaggggttggcagtgggayggaactggctggctctgtcatctggactccatagcatcatttcacttccggccgcatcaccctccttgtggaatatggccttgaggttgcacgttggtaatccctcctgcttaatgacagtgtgccatgggtaaagctcatttctcctttcctgcaggtaagagaatcacagtaattatgttggatgaatgtgcatacagtggcctagcagtttgactgaattggaaaatcagcaagagttagcaatcttgaggaagaaacaaaaggctgaagaatatgaataggagggagaggtttgaaaggaattttaaatgtgaggctctggcaaaaag

SEQ ID NO: 341868 - DNA, 578 bp, Homo sapiens
acgaggtggctcacacctgtaatcccagcactttgggaggtcaaagcgggcggatcacgaggtcaggagttcgagaccagcctggccaacatggtgaaaccctgtctctactaagaatacaaaaattagctgggcgtagtggcaggcacctgtaatctacttgggaggctgaggcaggagaatcgcttgaacctgggaggcagaggtggcagtgagccaagatcatgccattgcactccagcctgggcaacaggagcaagattccatctcaaaaaaaaaaaaaaaamaaaaaaaaacaaataaaaagttgccaagattattttaatatagagtcagattgagaattagggtagcgttttcatactttaatgtttaagcaaatcacctgggagcttactaaatgcagattctgatccagtatgtaagggatgaggcatttttaaaaagctctcaagtgatgtaatgctgctggtgcacagatcatacttggagtagcaagacgctggatgatttctaagcacccttccagcatggtgattcgatgagtctactttagcttttgctttcaacagaatggc

SEQ ID NO: 341869 - DNA, 563 bp, Homo sapiens
cattgcagtaattgttgtgttattgctaaaaaaaaaaagatgtggataagtgtggkttttttttccattgaaaaatagtttgttaaatctaaaaatttggcaacttctgatgaaatggtaacaattctggctgaaatcaagtagatttggccaagtctcagctctgtcactttttagttaggtgacctcttctaagtctctgtttcctcacctgttaagtagaaataacagtagtgcctacctcataggttatcatgaagattattgagatggcgcttagcacagagcacagtatagaataatgctccagtgttagcttaaaaaaaaaataaagagccaaaggaaacactagtcatcatttctggccctcagttttctcatctctcagatgaggcatttggcctcagaaacgtctacataccctctaactgtgacatcctatattttaccccatgattctaattctacttctagtctattcaaatccacaacttttcataggctcaggctgaataaattatgatccatccatataatgaaccaccatccagccatgggatgac

SEQ ID NO: 341870 - DNA, 440 bp, Homo sapiens
gagttaagataggatgtttccttaaattcaccttgaatctcttcacctaagcctgtacacaactttgggacttttcaggacattcaaagcccctgtgtaaggccccacataataactcctcacaagacagctcttatcttcctgcttataactccttaagaactgccagcattgcctgcataccccctgctcctagtccttgttttacatatagtggcaaagtcaaaaaagaaaaaaagagagatatgtataattgtttatacagttgtaattgtctcaagcaaatggasaggatttatttcttttccacctggactaattcttcccaaacttctccatattctgactttttgatactttcaaatataaatatattgctatgtttactctttaagcatttgttccttgaagagacgttttcaagcacctattaggtgcca

SEQ ID NO: 341871 - DNA, 603 bp, Homo sapiens
tgttgcagttcacagtgtctggtacacatgaggcattccataaatatttgttgaatgagttagtcaatcaatgaatgattgaatgaataaatttatagtagaataaacatgcacagcaaagcaggatataygccaaaaattatctgaataaattaggaagtacataccttctcataaaaatccagcaggtgagtaactcttatggtggcacaggaattccaagaacttcctctgaagaaagtcacttctagctgggtggctttgcataattcacttagcttttttgtgtctccagttctcttaactgcaaaaggaggacaataataactaccttgcaggattattgtgacaattaaaaaagataatgtgtatgaagttcataggccagctgtcttccacagtggatggtcattattatcaattcgccaaagcttcttttatagaatttccttaaatagaaaggtgcctttcataagttcaaagtgaaggccatttggcctgctaatacatgagaaaaataattagttattcatgaaatgtatggtaagtatgaagcaaataagttttttagattattgttttgaactacctagaccacaaagc

SEQ ID NO: 341872 - DNA, 603 bp, Homo sapiens
tgttgcagttcacagtgtctggtacacatgaggcattccataaatatttgttgaatgagttagtcaatcaatgaatgattgaatgaataaatttatagtagaataaacatgcacagcaaagcaggatatacgccaaaaattatctgaataaattaggaagtacataccttctcataaaaatccagcaggtgagtaactcttatggtggcacaggaattccaagaacttcctctgaagaaagtcacttctagctgggtggctttgcataattcacttagcttttttgtgtctccagttctcttaactgcaaaaggaggacaataataactaccttgcaggattattgtgacaattaaaaaagataatgtgtatgaagttcataggccagctgtcttccacagtggatggtcattattatcaattcgccaaagcttcttttatagaatttccttaaatagaaaggtgcctttcrtaagttcaaagtgaaggccatttggcctgctaatacatgagaaaaataattagttattcatgaaatgtatggtaagtatgaagcaaataagttttttagattattgttttgaactacctagaccacaaagc

SEQ ID NO: 341873 - DNA, 610 bp, Homo sapiens
aaagttaacgtcattcttagtcatcattctttgctctaagaacagtatcttgcacctagtaagtgtttgaaaaatatttattgatacatctggcagagcagctgttgagaaaacttttattctgtcaacctgataatctctagagaagtatgattatttttgtctaattcattttttcctttatacagcaagtatgtattaaacaatcttagtgtaaaaaaaagtttgtgtgtgaagttagaagtgtagtccagatttagttccacccttggcctgacctccaaggaaagctgtatataaaagttcaagtcaggctaggtgcagtggttcatacctgtaatcccagcactttgggaggctgaggcaggaggatcacttgagtccagaagtttgagaccatcctgggcaatgtagtgagaccctgtctctacaaattttttttttttttaaattargtaggcatggtggcatgcacctatattctttgctactttggaggttgtggcgggaagattgcttgaccccacgagttcgaggctgcagtgagctatgaaaatgccactgcaatccaggaatgagaccctatcttgaaaaaaaattatcaagtcat

SEQ ID NO: 341874 - DNA, 557 bp, Homo sapiens
tgcagtggcttgatagcgcagaatgaaagcaatctacaagtgcaagtctgtttcttttggcaacggaaggagttgctaatggattcatcattttctgttaagcatgaatgtcaaacaaaaaaacatttagggctctattcaactgaatttccggctcgacgcttgccagccatggaagccctgtgacttggaacctgcgcagcccaagcctgattcttgtttccagagttccgtggggccagtgccacggaacttggaattctgccgagggctcctcctcctctcttcacctccccmtctccccttttctctccaatcgcatgaagccgccagtcgtgcttcctaagtgaatgccgtctatggagcagagctggttgccaactcttacaccagctgactccacctcgggatcacataggaagtccaccaacaccactcaagaagggatggcagagtgaggacttcttgtatccagagattctggggcctttatgccttggaattcattgcggtcgagtgggcatcacacacttcctattttggcgtcgtaaatatgc

SEQ ID NO: 341875 - DNA, 613 bp, Homo sapiens
tacatatgatgtgtttaagtaaattgctttaggaaatatgagaatgagtaaaagcaacacttctaactttgtatataatacartgatagaataggtttaactaaatgagtaaatgtaactatgtgcctaaaaatttacacatttaggtttttcttttctttctttattgattggggaaatgtccagacacatagaaccatttattgtggggctacagatctctgctagcagagacttggagactcaagggctaccactgattaggaaatgagctacacaattgagaaatacttgttgatgctaaaggtcaccttgaaagttgatgagattatgtgagtgcaatagaatcttggactgaacaaactgctactctccatcagcaaggagacaccgtgatgcagtatcaggaagaaatcaggaatttaatgactttgcgtatttactttggtccacagtagttatgggcatccagcgagaaagttgataaatcagataatttcaagacgagaacaaataattttgtgtagccctgaaggaacaccagtgtgccttggaatttaaaatagaattgacaaatggaatctaattaaactaaagagcttctacacagcaa

SEQ ID NO: 341876 - DNA, 613 bp, Homo sapiens
tacatatgatgtgtttaagtaaattgctttaggaaatatgagaatgagtaaaagcaacacttctaactttgtatataatacagtgatagaataggtttaactaaatgagtaaatgtaactatgtgcctaaaaatttacacatttaggtttttcttttctttctttattgattggggaaatgtccagacacatagaaccatttattgtggggctacagatctctgctagcagagacttggagactcaagggctaccactgattaggaaatgagctacacaattgagaaatacttgttgatgctaaaggtcaccttgaaagttgatgagattatgtgagtgcaatagaatcttggactgaacaaactgctactctccatcagcaaggagacaccgtgatgcagtatcaggaagaaatcaggaatttaatgactttgcgtatttactttggtccacagtagttatgggcatccagcgagaaagttgataaatcagataattkcaagacgagaacaaataattttgtgtagccctgaaggaacaccagtgtgccttggaatttaaaatagaattgacaaatggaatctaattaaactaaagagcttctacacagcaa

SEQ ID NO: 341877 - DNA, 557 bp, Homo sapiens
actgttttttgacttttttgattacggccattcttgcagtagtaaggtggtatcacattgtggttttgatttgcatttccctgatcataaatgatgttgagcattttttcatatgtttgttggccatttgtatatcttcttttgagaattgcctattcatgtcctttgcccactttttgatgggattgtttgttttttttcttactgatttgtttgatttccttgtagattctggatattagtcctttgtcaggtgtatagattgtgaagattttctcccactctgtgggttgtctggttactctgttgactgttccttttgccgtgcaaaagctctttagtttacttaagtcccagctatttaacttttttatattgcatttgcttttgggttyttggccatgaaatccatacctaagccaatgcctagaaggatttttccaatgttttcttctagaatttttataatttcaggtcttagatttaagtccttaatctatcttgagtcgatttttgtataaggtgagagatgagagtccagtttcattctcctacat

SEQ ID NO: 341878 - DNA, 530 bp, Homo sapiens
taataaactgtgaaaaatctctatttcttttgtggataaaataaactaaaatattgagtgttagttgcaagaggagaatcaagacatatttctctgtgtgatctattggggataaattggtttctggaagatacaataaatccagactggcctctgaattccaggacgaacatgaacacatttcttagaaatctcatctccacaatttcatcagaaaatgacttttgcttcacctgccagccagaaaattataggtttcaaaacactcttatttctgcaataatttacaacaactatgttaagttaccctaacttgtacttacttagtcaaatgatagttaagttaaaattgtatttatcccaagcaaaactgaaatagaatttcaatggaaatataattaatatggagtaaagacttgtccagttattttatagaatmatttcttagaagtagaattactgagttgaagatttgcacagtctttaaggcttttaacctgttttgaccatttttctcatggaggccgtac

SEQ ID NO: 341879 - DNA, 548 bp, Homo sapiens
tgtagcatctttgaatttcaatttggatgtctgattgttctttgaaaggatttttgtagtttgattttgctgaatcttgtgcttggaccctgcaagtgttttaagcagttccagtaggtttatgatagagttgattgggtttcctacatggagtttttccactctctatatggtgtataaataaaggcagttttcctaatcccattccatctgggtgccttttatttcttttaattgccttattgcactggctagaacttccagtacaatgttgaatacaagggatctaaacaggcatttttgtcttgttcttgatttcatggggaaagcattcagactttgccagtaagaatgatgccaactactggyttttcagtagatgcctcttacagattgcaaggatcttccttgatgattagtttggttagaagtttatttatttatattttaatcaggaatgaatgctgaattttgccaaatgctttttaacatctagtgagattatcttatgactttgcattttaagtttgttaatatgaagtaaataa

SEQ ID NO: 341880 - DNA, 588 bp, Homo sapiens
atgtgttcaacataactagccattattgaaatgctgattaaaactacaatgaaataccacattaaracaactcacattaccaagaatagaagaaacagagcagctagaacacttatacaacgcctgtgggaacagcaattgaaagagccactttagaaaaatgtcccaaaatttcttacaatgttaaacatgcacttaccacgtgaacaagcaattccactttttagtatttattcaaatgcaataaaaacttatgttcacgcaaaaacctgtacatgaatggttgtgtggatatttctttataaccaccccaaactggaaacaaaccaaatgctcttcaactggtaaatgtttaaaaaaaagttcatgcatttatttattcattcaatttatttatttatttattcattttatttatttattcattttatttatttatttattcaattacctcccactgcaggtaattgccccccatgggggcaggcctttcccatgctgttctcatgatagtgaataagtctcacgagatctcatgagatcacgagtagatggcaactactcaggaataaaaatgatgtactagat

SEQ ID NO: 341881 - DNA, 588 bp, Homo sapiens
atgtgttcaacataactagccattattgaaatgctgattaaaactacaatgaaataccacattaagacaactcacattaccaagaatagaagaaacagagcagctagaacacttatacaaygcctgtgggaacagcaattgaaagagccactttagaaaaatgtcccaaaatttcttacaatgttaaacatgcacttaccacgtgaacaagcaattccactttttagtatttattcaaatgcaataaaaacttatgttcacgcaaaaacctgtacatgaatggttgtgtggatatttctttataaccaccccaaactggaaacaaaccaaatgctcttcaactggtaaatgtttaaaaaaaagttcatgcatttatttattcattcaatttatttatttatttattcattttatttatttattcattttatttatttatttattcaattacctcccactgcaggtaattgccccccatgggggcaggcctttcccatgctgttctcatgatagtgaataagtctcacgagatctcatgagatcacgagtagatggcaactactcaggaataaaaatgatgtactagat

SEQ ID NO: 341882 - DNA, 588 bp, Homo sapiens
atgtgttcaacataactagccattattgaaatgctgattaaaactacaatgaaataccacattaagacaactcacattaccaagaatagaagaaacagagcagctagaacacttatacaacgcctgtgggaacagcaattgaaagagccactttagaaaaatgtcccaaaatttcttacaatgttaaacatgcacttaccacgtgaacaagcaattccactttttagtatttattcaaatgcaataaaaacttatgttcacgcaaaaacctgtacatgaatggttgtgtggatatttctttataaccaccccaaactggaaacaaaccaaatgctcttcaactggtaaatgtttaaaaaaaagttcatgcatttatttattcattcaatttatttatttatttattcattttatttatttattcattttatttatttatttattcaattacctcccactgsaggtaattgccccccatgggggcaggcctttcccatgctgttctcatgatagtgaataagtctcacgagatctcatgagatcacgagtagatggcaactactcaggaataaaaatgatgtactagat

SEQ ID NO: 341883 - DNA, 588 bp, Homo sapiens
atgtgttcaacataactagccattattgaaatgctgattaaaactacaatgaaataccacattaagacaactcacattaccaagaatagaagaaacagagcagctagaacacttatacaacgcctgtgggaacagcaattgaaagagccactttagaaaaatgtcccaaaatttcttacaatgttaaacatgcacttaccacgtgaacaagcaattccactttttagtatttattcaaatgcaataaaaacttatgttcacgcaaaaacctgtacatgaatggttgtgtggatatttctttataaccaccccaaactggaaacaaaccaaatgctcttcaactggtaaatgtttaaaaaaaagttcatgcatttatttattcattcaatttatttatttatttattcattttatttatttattcattttatttatttatttattcaattacctcccactgcaggtaattgccccccatgggggyaggcctttcccatgctgttctcatgatagtgaataagtctcacgagatctcatgagatcacgagtagatggcaactactcaggaataaaaatgatgtactagat

SEQ ID NO: 341884 - DNA, 364 bp, Homo sapiens
tatttatttatttattcattttatttatttattcattttatttatttatttattcaattacctcccactgcaggtaattgccccccatgggggcaggcctttcccatgctgttctcatgatagtgaataagtctcacgagatctcatgagatcacgagtagatggcaactactcaggaataaaaatgatgtactagatatttcatatgtgtttttgtttattgtctgyctctgccacacacactagaatgcaacttacaaggcggtaggtattgatttgtgcattcactatcataggctattttatctagaatagtgcctggcatcatgtgtttggcactaaatgataatgtgtttaaaaacaa

SEQ ID NO: 341885 - DNA, 552 bp, Homo sapiens
tctgaaaataattactatgaatgttgcaaacatccatttyttaataactgaacttgattaccctaaaagtttgtgaagaaagggtcatttgtaattttttcttcttaatatattcatttacaaaagcagtaagaaattgatataacatgtcaaaagccattagatatagctaaggcttgtccagctctatctgtaaccaaatccagactcatggaatattatgaagccataaaaaagaatgagttcgtgtcctttgcagggacatggatgaagctggaagccatcattctcagcaaactaacacaggaacagaaaatcaaacaccacatgttctcactcataagtgggagttgaacaatgagaacacatggacacagggaggggaacatcacacactgggccctgtcagggagttggggggcaacatgagggagagcattaggtcaaatacctaatgcatgtggttcttaaaacctaggtgacggtttgataggtgcagcaaaccaccatggcacatgtatacctatgtaacaaacccgcatgttctacaca

SEQ ID NO: 341886 - DNA, 552 bp, Homo sapiens
tctgaaaataattactatgaatgttgcaaacatccattttttaataactgaacttgattaccctaaaagtttgtraagaaagggtcatttgtaattttttcttcttaatatattcatttacaaaagcagtaagaaattgatataacatgtcaaaagccattagatatagctaaggcttgtccagctctatctgtaaccaaatccagactcatggaatattatgaagccataaaaaagaatgagttcgtgtcctttgcagggacatggatgaagctggaagccatcattctcagcaaactaacacaggaacagaaaatcaaacaccacatgttctcactcataagtgggagttgaacaatgagaacacatggacacagggaggggaacatcacacactgggccctgtcagggagttggggggcaacatgagggagagcattaggtcaaatacctaatgcatgtggttcttaaaacctaggtgacggtttgataggtgcagcaaaccaccatggcacatgtatacctatgtaacaaacccgcatgttctacaca

SEQ ID NO: 341887 - DNA, 552 bp, Homo sapiens
tctgaaaataattactatgaatgttgcaaacatccattttttaataactgaacttgattaccctaaaagtttgtgaagaaagggtcatttgtaattttttcttcttaatatattcatttacaaaagcagtaagaaattgatataacatgtcaaaagccattagatatagctaaggctygtccagctctatctgtaaccaaatccagactcatggaatattatgaagccataaaaaagaatgagttcgtgtcctttgcagggacatggatgaagctggaagccatcattctcagcaaactaacacaggaacagaaaatcaaacaccacatgttctcactcataagtgggagttgaacaatgagaacacatggacacagggaggggaacatcacacactgggccctgtcagggagttggggggcaacatgagggagagcattaggtcaaatacctaatgcatgtggttcttaaaacctaggtgacggtttgataggtgcagcaaaccaccatggcacatgtatacctatgtaacaaacccgcatgttctacaca

SEQ ID NO: 341888 - DNA, 478 bp, Homo sapiens
cagatttctggcactttctggcaaatctaagggatctactaccacatttcttcagagtaacaaccatggagcttttagatgggtgccttcatttcctgaggcagacacaacaaacttaacggccagaaacaatacaggttgattctctcacagtacaggaagccggaagtttccccggcagagtcgcactccctctgaaggctctaggggaggatcctcccttgcctgtgctgcctccaggtcttcctgcctcttctggtggcagcttcactctcatctccacctctgtcttcacaggcctccttccctgtgtcycatatcttccgctcctttattttataaggacaccactatttggatttagggcccaccctaaatcaaggatggtatgatctcaagatccttaactcaattacacctgcaaaaatcctagttccaaaataaggctcacaggtgccaggagttggatgttagatgt

SEQ ID NO: 341889 - DNA, 612 bp, Homo sapiens
tgttgatttgctgcatattttgggtaagggacccattatggttacacagggaggcagtgccccccaccatcctcttcgcattctgctgctgaacagatgcttcctacacggctggtaatgtgggccctcctgtttcaaggtccccaattcagaagtctcattttcccagagtgtgctgtcatgggaccatgttcttccctttgctcttggagaatagacaaagccactcagcccagccacagcctgagtcttgccctacctccctctccagcctcaactcattccaggctccagttcagyatctgtctctagccacactgattttccttgagtttcctgtgtttgctgttgtctctcctgccagcaacatatcggggtgaggccatagcttctttacttatgtcatttttttgtatgtttcttatttgcttcaattcaaacatcttgtctcaaatggaatgcagaaggagagatgagattcctgctgtcttctattaaagaaaacattatgcataattgcaaaaatatagtacaatgctgctatcctcagagtaattttcttttgaaaaatatattttttcataaaaatattttatgtatattcacctttaa

SEQ ID NO: 341890 - DNA, 612 bp, Homo sapiens
tgttgatttgctgcatattttgggtaagggacccattatggttacacagggaggcagtgccccccaccatcctcttcgcattctgctgctgaacagatgcttcctacacggctggtaatgtgggccctcctgtttcaaggtccccaattcagaagtctcattttcccagagtgtgctgtcatgggaccatgttcttccctttgctcttggagaatagacaaagccactcagcccagccacagcctgagtcttgccctacctccctctccagcctcaactcattccaggctccagttcagtatctgtctctagccacactgattttccttgagtttyctgtgtttgctgttgtctctcctgccagcaacatatcggggtgaggccatagcttctttacttatgtcatttttttgtatgtttcttatttgcttcaattcaaacatcttgtctcaaatggaatgcagaaggagagatgagattcctgctgtcttctattaaagaaaacattatgcataattgcaaaaatatagtacaatgctgctatcctcagagtaattttcttttgaaaaatatattttttcataaaaatattttatgtatattcacctttaa

SEQ ID NO: 341891 - DNA, 529 bp, Homo sapiens
tgagattcctgctgtcttctattaaagaaaacattatgcataattgcaaaaatatagtacaatgctgctatcctcagagtaattttcttttgaaaaatatattttttcataaaaatattttatgtatattcacctttaattggtttttgttatttttaaatgaaatattttaaatatctcaatgtttartattgtattaatattatatattaacatcacaataataaattacattattgcaataatgtattaaatatagatgcatctgaggcatagaaacaaaacatctttggggtcctcagtaatttctagagtgtaagtcaccagtgagaatacctgaaatggacaaaacatgacagatcctatgaagctcagatgtgggtgtagctctttccatctctagcctcattcacctctgcctcctgcccccgtgaatgtcattctccaacaaagtatttgaaaaggtatttttctttgaaaaaagtacacagatggatagttagcaaaggaagagatgctcaacgtcgtt

SEQ ID NO: 341892 - DNA, 529 bp, Homo sapiens
tgagattcctgctgtcttctattaaagaaaacattatgcataattgcaaaaatatagtacaatgctgctatcctcagagtaattttcttttgaaaaatatattttttcataaaaatattttatgtatattcacctttaattggtttttgttatttttaaatgaaatattttaaatatctcaatgtttaatattgtattaatattatatattaacatcacaataataaattacattattgcaataatgtattaaatatagatgcatctgaggcatagaaacaaaacatctttggrgtcctcagtaatttctagagtgtaagtcaccagtgagaatacctgaaatggacaaaacatgacagatcctatgaagctcagatgtgggtgtagctctttccatctctagcctcattcacctctgcctcctgcccccgtgaatgtcattctccaacaaagtatttgaaaaggtatttttctttgaaaaaagtacacagatggatagttagcaaaggaagagatgctcaacgtcgtt

SEQ ID NO: 341893 - DNA, 553 bp, Homo sapiens
tctttaaaccttctgatttatactgagaaaaataatgaaaccctcggcatcccagcaatggcttgggtaaaagaaaatggctcctgaagaactcttttttgaggtcttttgttgaaacttcagtcatttggcctgatgcaatgcaccgaaacagccatcttcaccagcttctcctcgtgaacatggcwggaggaagtactgggaagcccctgggtagagggcactgtgagttatgaaacaaacattgtttacaatgaataaaagtccttgtggaggctggtggtttatctgtggcatcttacaatgtacaccgcatacacttaaatggagtgagggaaccgtaacgtaacattcaatttccctctagttaaaaaatcacttgcaataaattctttctataggctgtctctgactttatattcccagtacaacattttatgcaaaaagctcagcaaagaggttgcgctcttgagcactcttttgcatggttcacatttgaagttttctccgaagtattattacatccctgtaactagcagcccctggtgagtag

SEQ ID NO: 341894 - DNA, 556 bp, Homo sapiens
aacacatagtctggagatttaaaaaatataatagactatctgcccataaaaaatatagctgatttctctactgcctaaaatcaacaataaagcatatccaaaatgtcccaagactctaaaaagagttatatttttgtgaaaggaaacaggcagtagatatatagacgatgatataattttaggtagtgataactgctataaaaataaaactggatgatataatagaagataattagggaattagggctagcttagataaggctctaaggaaaattcatgcacttcatttattaaacacagatatagtccaattttctccttcttgtatcagattcattatatattctcagtagttttctaggaatttggctattacctgaatttttttctttaaaaataatattgtttatattatamatttcttattttaaatgtgcataggatctttaatgatgccctatcttcattgtcaatatttgcaatttattcattctcttactttccttcatcagtcttcctagattcaaatcaatttcattagtcttctcaatgaaat

SEQ ID NO: 341895 - DNA, 614 bp, Homo sapiens
gggccctatgctcacacagacccccatggaaacccacccacagtctgcactcccccgttcccagctgcacagacagatcaacatgcagaaacagatgcacacaatgatgccaaactcaggttccaaccacgtatcaagaaagatgagaaattctgaaatagtatcctgaatctgctatgcatgggtttttcaaaagaaataatacttttttttcacaattattgaaatcttttatttgctttaagactttagaagctttgagaggtgaggaagaaagattcttggaggtatattatctttgaaaaatcaattgtgctgttacctctattccctycaaagggagagaaagtgcccatcttcttatcccaaaccccccaaaggaagaggatccgacagggcgggctatttgtaggcattaagatgcaacccctatgactgggggagatggtggcctgagtatgattttccagggcagtgaaagggagatgtgcctataaaagcttagctctggggagcagccctgggctttcagattttcccaagaccagagacacaggtatgttttatctctaagcaaggcaagtgatacaatctacaaagacattggcacaaaa

SEQ ID NO: 341896 - DNA, 614 bp, Homo sapiens
gggccctatgctcacacagacccccatggaaacccacccacagtctgcactcccccgttcccagctgcacagacagatcaacatgcagaaacagatgcacacaatgatgccaaactcaggttccaaccacgtatcaagaaagatgagaaattctgaaatagtatcctgaatctgctatgcatgggtttttcaaaagaaataatacttttttttcacaattattgaaatcttttatttgctttaagactttagaagctttgagaggtgaggaagaaagattcttggaggtatattatctttgaaaaatcaattgtgctgttacctctattccctccaaagggagagaaagtgcccatcttcttatcccaaaccccccaaaggaagaggatccracagggcgggctatttgtaggcattaagatgcaacccctatgactgggggagatggtggcctgagtatgattttccagggcagtgaaagggagatgtgcctataaaagcttagctctggggagcagccctgggctttcagattttcccaagaccagagacacaggtatgttttatctctaagcaaggcaagtgatacaatctacaaagacattggcacaaaa

SEQ ID NO: 341897 - DNA, 614 bp, Homo sapiens
gggccctatgctcacacagacccccatggaaacccacccacagtctgcactcccccgttcccagctgcacagacagatcaacatgcagaaacagatgcacacaatgatgccaaactcaggttccaaccacgtatcaagaaagatgagaaattctgaaatagtatcctgaatctgctatgcatgggtttttcaaaagaaataatacttttttttcacaattattgaaatcttttatttgctttaagactttagaagctttgagaggtgaggaagaaagattcttggaggtatattatctttgaaaaatcaattgtgctgttacctctattccctccaaagggagagaaagtgcccatcttcttatcccaaaccccccaaaggaagaggatccgacagggcgggctatttgtaggcattaagatgcaayccctatgactgggggagatggtggcctgagtatgattttccagggcagtgaaagggagatgtgcctataaaagcttagctctggggagcagccctgggctttcagattttcccaagaccagagacacaggtatgttttatctctaagcaaggcaagtgatacaatctacaaagacattggcacaaaa

SEQ ID NO: 341898 - DNA, 591 bp, Homo sapiens
aaatcatagttctattaatttgaaattgatgtaaagttggaggaagaatcaggtctaggaatacgtgtgtgtgtgttcactttttcttataaatgcctccagaaagatacagctcagcaggacatccaagstgattgcttatgtaaaaattctaatccaacttgtattaggccattcttgcattgctataaagaaatacccaagattgggtaatttataaagaaaagaggtttaattgtctcacacttctgcaggctgtacaggaagcatagctctggcattagcatctgcagaggcctcaggacgcttgcaatcatggcagaaggtgaagtgggagcagggttttacatggtgaaagcaggagcaagagagagttggcagggggaggtgccatacgcttttaaatgagcagatctcctgagaactcactatcatgaaaacagcaccaagccatgtgggatccacacccatgacccaaaaacctcccaccaggccccacctctagcactgaggattacaattcaacatgagatctgggtggggacgaacatccaaaatatctcacaattattatatactgggtcaagtaca

SEQ ID NO: 341899 - DNA, 609 bp, Homo sapiens
gtcactttcatttttgcataatgcctgagatttctcccctcattgaacagatgcctctgtcttcatattagagcattgaaaacatagatgtgtatgtcacaaaaacccttgtcccaaccagtctycaccatgtggccctggtcagtcattaaacatctttaacacctattttcccatcaataaaattatagtaataactacccggtagggtgagaagattaaataaggagacatatgaaaattcttagcggaaggcctggtaattggtcgtgtttaatatatgcgagttgtgtctggaagtttttgtcttatcctcacattccacagaaaacacttgttggggcaagtgcagtggcactcgcctataataccaaggttttgggaggctgaggcaagaggattgcttgaggccaggagttcgagaccagcctgggcaacatagggagatgctgtctctacaaaaaataagaaaataaagaaaattagctgggtgttgcagctgcacctgaaattctagctatttaggggctgaggcagaattgcctgagcccccagctgtctgaggctgcagtgagcttatcctgctgctgcactccagcctaagtgaca

SEQ ID NO: 341900 - DNA, 537 bp, Homo sapiens
tctattctctttcttgcatcagrtaggattagtttggcttcctattaatagacagatttaaaacaaagagtggtttaaataagataaaagtgtatttggttctaatatggtagaagtctggatggatgctgcacaggtccggtatgacagcctaaaggacatcagggatcaggctgcttcagacattctccctccctaacactaggcagagctctgccttcccttggtccacaacagtggctggaagtaaccatcacacctgtttcaggttagctagaggagaaagaagaaagaagacagaaaggggagatgtcaaaggcttttaagaaaagttccttgcagctctcatatttggttcccctgaaatacatagttggaattcttttggagacacagtgggcagatttgcatgaggaccaaggagcatccaggagtgaagaaataaaaaatgtaatccctttcctttggagttcttggaggaagtcagacaccatgagggataggacaatctatagagagggtgtggtaggcagaata

SEQ ID NO: 341901 - DNA, 537 bp, Homo sapiens
tctattctctttcttgcatcaggtaggattagtttggcttcctattaatagacagatttaaaacaaagagtggtttaaataagataaaagtgtatttggttctaatatggtagaagtctggatggatgctgcacaggtccggtatgacagcctaaaggacatcagggatcaggctgcttcagacattctccctccctaacactaggcagagctctgccttcccttggtccacaacagtggctggaagtaaccatcacacctgtttcaggttagctagaggagaaagragaaagaagacagaaaggggagatgtcaaaggcttttaagaaaagttccttgcagctctcatatttggttcccctgaaatacatagttggaattcttttggagacacagtgggcagatttgcatgaggaccaaggagcatccaggagtgaagaaataaaaaatgtaatccctttcctttggagttcttggaggaagtcagacaccatgagggataggacaatctatagagagggtgtggtaggcagaata

SEQ ID NO: 341902 - DNA, 556 bp, Homo sapiens
ttgctctgtcgcccaggctggagtgcaatggcacgatctccgctcactgcaacctccacttcccgggttcaagcagttatcctgtctcagcctcccaagtagctgggattacagacgcccaccaccatgtccagctaagtttttgtatttttagtagagacagggtttcactatgttggctaggctggtcttgaactcctgacctcgtgatccgcccgcctcggccacccagtttttaaactgaagaacattttcagctgtgcatggagggaactgtgagtgcagaaggctaatgtgagagatggtcacataaggtggcctcatgttccttctccactcccgctgcttmacttgaccagcctaaaaaaaaaaaaaaaaaaaaagcagtacttatgttaatgtacagtttctggctttaaagatggaggaggagggccagaggccaatgaatgtgggtgacctctagacgctagaaaaggcaaggaattggattctgccctaaaatccacaagttaaactgcatccctgccagctccttgattttagcccagtgaga

SEQ ID NO: 341903 - DNA, 605 bp, Homo sapiens
caggccctgtcctcaaggggcttatagtctcaatgaggaggctgacagtaaatcaggagaaagaaagaataatacaatttctggaagtatcaagtgtgaccatttttaaaataaatcaatcaaggtgaggggacaaaggatatctgggagaagtgtgttgttttagccaaagcatcaaggaaagtccctctgagaagtaatatttaaatagagatctgaatgaaataatgagagagtcatgcggagatcaggggaaacagcattccaggcagagggcacagtgaatgcaaagggctggaggtgtgaatgagttcagtgcattcaaagaacagcaggcaggccagattcactggaatataaggccaggaaggccaccaggaccagaaatacaggaccctgaagactggtttacattttactcaaagtacaaaggaagttttagcrtaggggaatcgaatgatgtggctaccttagaaatgtcattgggggttagaggggctatgtccagcagatagtcacatagcaaaactccatacagatgattggaatcggatccatcacgtgcaacaatgtcataattttttaaaaaaaaaaacagtttgatt

SEQ ID NO: 341904 - DNA, 605 bp, Homo sapiens
caggccctgtcctcaaggggcttatagtctcaatgaggaggctgacagtaaatcaggagaaagaaagaataatacaatttctggaagtatcaagtgtgaccatttttaaaataaatcaatcaaggtgaggggacaaaggatatctgggagaagtgtgttgttttagccaaagcatcaaggaaagtccctctgagaagtaatatttaaatagagatctgaatgaaataatgagagagtcatgcggagatcaggggaaacagcattccaggcagagggcacagtgaatgcaaagggctggaggtgtgaatgagttcagtgcattcaaagaacagcaggcaggccagattcactggaatataaggccaggaaggccaccaggaccagaaatacaggaccctgaagactggtttacattttactcaaagtacaaaggaagttttagcataggggaatcgaatgatgtggctaccttagaaatgtcattgggggttagaggggctatgtccagcagatagtcacatagcaaaactccatacagatgattggaatcggatccatcacgtgcaacaatgtcataatttttwaaaaaaaaaaacagtttgatt

SEQ ID NO: 341905 - DNA, 568 bp, Homo sapiens
tctgtccacacagtacttcctcctagggacaaagatgtgtgggacttccaggcccactggttttggtagaaatacacttgcacatcgtgatgctattcagccagaattgttacttatccactcaccttgtaggaatttatttagaaatacaaatgtgacattcatttgctgtgcatcactgctcataaatatgtgtgccagtggtcagtgtagatctttggtaaaggacctaatagkaaatattgtaggtttgcagaccgtgtggtctttgatgcaaatgctaagctttgctgctgcatggcagtcatagattatatgtaaacgcgtgagtgtgtctgtgttccgaggaaaactgaattaacaaaaataggtagcaggcaagattcagcctaggcactgtaatttactgagctctgaagtaggctgatgactaaactctgaagctgtctagatcattcctcagggagcaaattctaacccacattccttgtgccagagcatggttttaatcctgcttgtctcttgggaaggctaaaaaaatctattaagcagatgctgcattaaaaag

SEQ ID NO: 341906 - DNA, 442 bp, Homo sapiens
tcttttactcactttcatttcgtatcatatactgccaccatttttggcttagacacaatcacgaacctctgaatctccctgaatgtaatcatggagcagtggtctacacaactcatctcagacgatgtatttgaagattgaaaccaaattcacatttatctgagtacagccgtaaagtgagtagcattaggataaacatcatgtcttccagcattcacctggaggtgtagacagtgaaacccaaggagtacatttgttagttcccaaagaagagtttttatgattatctgaaagaaatctttgattggcacagaaaataagcyttaaacaagggctgactggaagacagggaatggggaattcaatagtgattaacacaatccaaatatttcctgtgacaatatttctggggtctagggagatgccatttcagttctcaagg

SEQ ID NO: 341907 - DNA, 508 bp, Homo sapiens
tttccttaggatatatttttagaagtgaaatatgaatgcatagtggaaatatattttaagacttctgacaaaattgctaattgtcttctatgatgtgtctatttgtttttacactcaccccatgcgtgtgtctgtgtggtttaaatggtgtaagatgttaaaagtacttagagtatattaagttgatttctgatcaccgaagactctctttttgtctataggtgacagactaataatattaatccattagttcacgtttcaattacagataaaatgagatcctggtgttagcttttaggcagatacacacaaacacaccacacacacacacacacacacacacacacacacacacacacacacacasagagatcagctttgaagaagactgaattctctccctgcacaaatgaagcctcaattgttccaccctatgctgcaatagcactaactcctctcaggtaacatggccatactcttctgttctccctggtaagatcaataccaa

SEQ ID NO: 341908 - DNA, 583 bp, Homo sapiens
aagccttctcaggattaataataaggccaaatagaagggaattaaaattagaaagaaatagcaaaatccaaggttaatgcttcgatgtcaaaatgaccaccagaagaaatgacacaatgcatctgttatcaaagtggtaaactccttctgaatttccaaaccacatttccacccaggctgcactgcctgtgctttgacatatctctgactgtgatgaccatcatctcttgtaagggattttgcagccaactctctcattatagtgtcatcttgartatggagaagaagggaaaacaagccggtcctcctgactgtagttctgaatattgacacagaagtcgatagatcaggaattcccctgctccaggagggggatctctgagggcaaactccaaagtttgatgaatgtgatgttcagcccctgcagaaccttgcttgttagtgttgcctctgcagtgtcatttactgtctgtcttttccctcgccctgaccttgaaacttctgcacggccactgaatttgcatgtgtgcatcacctggtctccatggcaactgcagaaaatcagagcagagacaaaggattc

SEQ ID NO: 341909 - DNA, 583 bp, Homo sapiens
aagccttctcaggattaataataaggccaaatagaagggaattaaaattagaaagaaatagcaaaatccaaggttaatgcttcgatgtcaaaatgaccaccagaagaaatgacacaatgcatctgttatcaaagtggtaaactccttctgaatttccaaaccacatttccacccaggctgcactgcctgtgctttgacatatctctgactgtgatgaccatcatctcttgtaagggattttgcagccaactctctcattatagtgtcatcttgaatatggagaagaagggaaaacaagccggtcctcctgactgtagttctgaatattgacacagaagtcgatagatcaggaattcccctgctccaggagggggatctctgagggcaaactccaaagtttgatgaatrtgatgttcagcccctgcagaaccttgcttgttagtgttgcctctgcagtgtcatttactgtctgtcttttccctcgccctgaccttgaaacttctgcacggccactgaatttgcatgtgtgcatcacctggtctccatggcaactgcagaaaatcagagcagagacaaaggattc

SEQ ID NO: 341910 - DNA, 583 bp, Homo sapiens
aagccttctcaggattaataataaggccaaatagaagggaattaaaattagaaagaaatagcaaaatccaaggttaatgcttcgatgtcaaaatgaccaccagaagaaatgacacaatgcatctgttatcaaagtggtaaactccttctgaatttccaaaccacatttccacccaggctgcactgcctgtgctttgacatatctctgactgtgatgaccatcatctcttgtaagggattttgcagccaactctctcattatagtgtcatcttgaatatggagaagaagggaaaacaagccggtcctcctgactgtagttctgaatattgacacagaagtcgatagatcaggaattcccctgctccaggagggggatctctgagggcaaactccaaagtttgatgaatgtgatgttcagcccctgcagaaccttgcttgttagtgttgcctctgcagtgtcatttactgtctgtcttttccctcgccctgaycttgaaacttctgcacggccactgaatttgcatgtgtgcatcacctggtctccatggcaactgcagaaaatcagagcagagacaaaggattc

SEQ ID NO: 341911 - DNA, 531 bp, Homo sapiens
gttctggttgccacagagaaatgagcaaatatcttcttagcaggcacatcatgaagacctagaaggagttccaaaccgcaacctcaaatgtgttattaactgagacggtayttacacaatttataaagtattttaatatttttcttttatgtgcttctcataaattatttttttaaaaaaaactttgaaatgtacaaagtgtctcatgcctctaatcccagcaaccttaggaggctgaggtgggaggatcgcttgagcccaggagtttgagaccagcctgggcaacatactgagacttcgtctctaaaaaaaaaaaacaaaattagccaggtgtggtggcatgagcctgtggctcccagctaattgggaggctgaagtgagaggatcacctgagcctgggaggtggaggctgcagcctgggtcacaccactgcactgcagcctgagtgacagagcaacactctatttcaaaataaataatttttttttaaaaagtcaaaaataaaaaacacttcctcatctacaaattctt

SEQ ID NO: 341912 - DNA, 531 bp, Homo sapiens
gttctggttgccacagagaaatgagcaaatatcttcttagcaggcacatcatgaagacctagaaggagttccaaaccgcaacctcaaatgtgttattaactgagacggtatttacacaatttataaagtattttaatatttttcttttatgtgcttctcataaattatttttttwaaaaaaactttgaaatgtacaaagtgtctcatgcctctaatcccagcaaccttaggaggctgaggtgggaggatcgcttgagcccaggagtttgagaccagcctgggcaacatactgagacttcgtctctaaaaaaaaaaaacaaaattagccaggtgtggtggcatgagcctgtggctcccagctaattgggaggctgaagtgagaggatcacctgagcctgggaggtggaggctgcagcctgggtcacaccactgcactgcagcctgagtgacagagcaacactctatttcaaaataaataatttttttttaaaaagtcaaaaataaaaaacacttcctcatctacaaattctt

SEQ ID NO: 341913 - DNA, 476 bp, Homo sapiens
ggtttagaagttagagaatagagatttgacccatgagtcacaaactgagagacatgttatcttctttatccaattagctctcttcaagatgaactttagtttcttaataaattagagttccactactactttttttyttaagtgcaatcttagcaaagtcatttaatacttgagtacgtcacactacagtgttacatggggaaaaagaaacttgattttttttctgattcttttatgcaaataagctgggtctcaatgtaagatgatttttttaaaatgccctttttaaacatagcatgcttggcattcattatcatgaacattaatatttttgtacctttaaattcttacattcaagaattaactatgttatcctgagacggttgactctgacttactataagagaagttattatgttgtcttttctaaatcatgtaattattaatgtctcctaaacttccatagtctttttgca

SEQ ID NO: 341914 - DNA, 534 bp, Homo sapiens
aatagactatagtttccaaggagcagcaaggcaaacaaaaaactgtgtgtgtgtgtgtgtgtgtgtgtgtgtgtgtgtgtgtgtgtttatgagtatctgtgtttatgtttttctgtttaaaagtatatatatgtgagtgtgtggtgtctgagatagaaatataaaaaatagaaatttagtaagaaacataaatgaaaaatagagggaagatatttaacaaattatagaggctgaattttattgagaactttgaacgaagactacagaagaatttttgagggagcagctatgagtaggaaagattttggatgcttaaatcataagttactctcrtcaattcatcagtttcttttttttttttaattatactttaagttctagggtacgtgtgcacaacgtgcaggtttgttacatatgtatacatgtgccatgttggtgtgctgcacccattaaatcctcatttacattaggtatatctcctaacgctatccctcccctctacccccatcccacgacaggccctggtgtgtgatg

SEQ ID NO: 341915 - DNA, 534 bp, Homo sapiens
aatagactatagtttccaaggagcagcaaggcaaacaaaaaactgtgtgtgtgtgtgtgtgtgtgtgtgtgtgtgtgtgtgtgtgtttatgagtatctgtgtttatgtttttctgtttaaaagtatatatatgtgagtgtgtggtgtctgagatagaaatataaaaaatagaaatttagtaagaaacataaatgaaaaatagagggaagatatttaacaaattatagaggctgaattttattgagaactttgaacgaagactacagaagaatttttgagggagcagctatgagtaggaaagattttggatgcttaaatcataagttactctcatcarttcatcagtttcttttttttttttaattatactttaagttctagggtacgtgtgcacaacgtgcaggtttgttacatatgtatacatgtgccatgttggtgtgctgcacccattaaatcctcatttacattaggtatatctcctaacgctatccctcccctctacccccatcccacgacaggccctggtgtgtgatg

SEQ ID NO: 341916 - DNA, 597 bp, Homo sapiens
tcttattaataacacaaataggaagttcttcagactgaaagcatgtgatctcaaacaataaattcacacagtaaaacaaaaacaatcataaagttaattatataattataaaatacattatttatgcacatattctttccattcttttygtaagttaaaagtactcttttaggaattattgcattaaggcccaggactgctcacttgggatatgtggtctaggcttagatcatcttgtcctctccttttagctttttaagcctaccttttaattgttcgttaaatgtttcgaccacactgtggctggggtgtgatatgaaacatggagagcccatgatatgtcccatgattacgtccactgcctgtgccacagatatggaaccattgtcaatcacaatctgttcaaggaagccaaacaggaaaacaaatgagatattttagggcctcaataatgtagctagggttagtggaaagtatagggactaagccaaaccaggagaaagtgtcaactccagttaagatccagcagaaccctctggattggataagggacccagaataatccatctgccaagaacatcttatgggcccagaagg

SEQ ID NO: 341917 - DNA, 597 bp, Homo sapiens
tcttattaataacacaaataggaagttcttcagactgaaagcatgtgatctcaaacaataaattcacacagtaaaacaaaaacaatcataaagttaattatataattataaaatacattatttatgcacatattctttccattctttttgtaagttaaaagtactcttttaggaattattgcattaaggcccaggactgctcacttgggatrtgtggtctaggcttagatcatcttgtcctctccttttagctttttaagcctaccttttaattgttcgttaaatgtttcgaccacactgtggctggggtgtgatatgaaacatggagagcccatgatatgtcccatgattacgtccactgcctgtgccacagatatggaaccattgtcaatcacaatctgttcaaggaagccaaacaggaaaacaaatgagatattttagggcctcaataatgtagctagggttagtggaaagtatagggactaagccaaaccaggagaaagtgtcaactccagttaagatccagcagaaccctctggattggataagggacccagaataatccatctgccaagaacatcttatgggcccagaagg

SEQ ID NO: 341918 - DNA, 597 bp, Homo sapiens
tcttattaataacacaaataggaagttcttcagactgaaagcatgtgatctcaaacaataaattcacacagtaaaacaaaaacaatcataaagttaattatataattataaaatacattatttatgcacatattctttccattctttttgtaagttaaaagtactcttttaggaattattgcattaaggcccaggactgctcacttgggatatgtggtctaggcttagatcatcttgtcctctccttttagctttttaagcctaccttttaattgttcgttaaatgtttcgaccacactgtggctggggtgtgatatgaaacatggagagcccatgatatgtcccatgattacgtccactgcctgtgccacagatatggaaccattgtcaatcacaatctgttcaaggaagccaaacaggaaaacaaatgagatattttagggcctcaataatgtagctagggttagtggaaagtatagggactaagccaaaccaggagaaagtgtcaactccagtyaagatccagcagaaccctctggattggataagggacccagaataatccatctgccaagaacatcttatgggcccagaagg

SEQ ID NO: 341919 - DNA, 615 bp, Homo sapiens
tggtttggctctgtgtcctcacgcaaatctcatgtagaattataatccccatatctcaagggaggtgcctggtggggcttaactggatcatgggagcagatttccctattgctgttctcatgataggagggacttttcatgagatctgatggtttaaaagtgtatggcatttcccttcactctcactccctctcctgctctgccatggtaaagatgttcttgcttcccctttgtctcctgccatgattgtaagtttcctgaggcctctcagtcrtgcttctggtacagcctatagaattgtgaatcaaacctcttttcttcatgaattactcagtctcaggtagtactttatggcagtgtgagaataaagtaatacaaccagtaactccctttgttttctttttttattactttaaattttcataggtatatagtaggtgtaaatattttagggatacataagatattttgatacaggtatacaatatgtaataatcacattagggtaaatggggtatctatgacctcaagcatttatccctttttttgttacaaacaatccaattataattttaactattttaaaatgtacaataaattattgactgtagtcac

SEQ ID NO: 341920 - DNA, 589 bp, Homo sapiens
aacccatgcttgtctctcccacaatctcatttttccatgttatgaaaattgcaacgaaatttatctaatattcctgcaattgcttgctttatttcagttttcaaataaaagtatcactatcaatatttggtgaaaggttgttttgctttgtttctcatatgccttttaaaattgccttctcttatatattaggtattgctctgtaaatggtgcctttttctgattgtgawttttgagacctggttagtgttcttgttctaagtttgatagttgaaggttctctgctgaacatcatttcaccaatgatgagtgctttatttcaaaagctctagtaagaagagtaactttcttatcgaaatctgagctgaaaatagcttaaataaggaacagatatagagtgtctccgttaatgataatcttattaattattctttctggctgcaatgtttggattttaatatatcagtcttggatcttaagctgtcttctgtttaagtactgagtgctcattaaagcataacttatatagtaaatttaccataatgaataagaaaatgtatatttttattttaccctagttaaatggtgg

SEQ ID NO: 341921 - DNA, 589 bp, Homo sapiens
aacccatgcttgtctctcccacaatctcatttttccatgttatgaaaattgcaacgaaatttatctaatattcctgcaattgcttgctttatttcagttttcaaataaaagtatcactatcaatatttggtgaaaggttgttttgctttgtttctcatatgccttttaaaattgccttctcttatatattaggtattgctctgtaaatggtgcctttttctgattgtgaattttgagacctggttagtsttcttgttctaagtttgatagttgaaggttctctgctgaacatcatttcaccaatgatgagtgctttatttcaaaagctctagtaagaagagtaactttcttatcgaaatctgagctgaaaatagcttaaataaggaacagatatagagtgtctccgttaatgataatcttattaattattctttctggctgcaatgtttggattttaatatatcagtcttggatcttaagctgtcttctgtttaagtactgagtgctcattaaagcataacttatatagtaaatttaccataatgaataagaaaatgtatatttttattttaccctagttaaatggtgg

SEQ ID NO: 341922 - DNA, 589 bp, Homo sapiens
aacccatgcttgtctctcccacaatctcatttttccatgttatgaaaattgcaacgaaatttatctaatattcctgcaattgcttgctttatttcagttttcaaataaaagtatcactatcaatatttggtgaaaggttgttttgctttgtttctcatatgccttttaaaattgccttctcttatatattaggtattgctctgtaaatggtgcctttttctgattgtgaattttgagacctggttagtgttcttgttctaagtttgatagttgaaggttctctgctgaacatcatttcaccaatgatgagtgctttatttcaaaagctctagtaagaagagtaactttcttatcgaaatctgagctgaaaatagcttaaataaggaacagatatagagtgtctcygttaatgataatcttattaattattctttctggctgcaatgtttggattttaatatatcagtcttggatcttaagctgtcttctgtttaagtactgagtgctcattaaagcataacttatatagtaaatttaccataatgaataagaaaatgtatatttttattttaccctagttaaatggtgg

SEQ ID NO: 341923 - DNA, 589 bp, Homo sapiens
aacccatgcttgtctctcccacaatctcatttttccatgttatgaaaattgcaacgaaatttatctaatattcctgcaattgcttgctttatttcagttttcaaataaaagtatcactatcaatatttggtgaaaggttgttttgctttgtttctcatatgccttttaaaattgccttctcttatatattaggtattgctctgtaaatggtgcctttttctgattgtgaattttgagacctggttagtgttcttgttctaagtttgatagttgaaggttctctgctgaacatcatttcaccaatgatgagtgctttatttcaaaagctctagtaagaagagtaactttcttatcgaaatctgagctgaaaatagcttaaataaggaacagatatagagtgtctccgttaatgataatcttattaattattctttctggstgcaatgtttggattttaatatatcagtcttggatcttaagctgtcttctgtttaagtactgagtgctcattaaagcataacttatatagtaaatttaccataatgaataagaaaatgtatatttttattttaccctagttaaatggtgg

SEQ ID NO: 341924 - DNA, 566 bp, Homo sapiens
attttcagaaagtgaaagtttctgggtcttagttgttggttgaggtatttgcatggtgacccaaatctctctatatgcttggctgagatgttttgaaggtaacattgaatacatactcaaacctttttatctttatgaattgttctacatgactcaaaatatcttgcacagctatcaactcctgcaatagaaacttacatataaactatttatatttataaataactattctgaaaaaatggaagcatttataagacctataataatcataaaaactacaaaaagctcamaaatgcatgcaaattttaaaagcaaagacaatcactagaaaaataattacaaagaatttgaaaatattgtagctaaataattctccataaacataaagacaatcaccctgacacataccacttcatccccccatacacatacacacagtaaagcagttgcctctatgaggcaagaatacaaagcaaaattacaacagcttatgtaacaaatctcatggcaaaaaggaggaaatctagtataaatgaaaagagctccaaaaacaggtaaatgatata

SEQ ID NO: 341925 - DNA, 583 bp, Homo sapiens
aaaacagaaatgtcatcaaatttttcagcatacatgtttgcctgaatttactgctcagataagatagtatttatctctgatatttattttaaagttataaaactagaaacccaaaatagaattatctttatttaacactttcatatgtagtattaatttaatattatttgtttaataaaaatatgtgtacaaactgagtgatcagcaaagtaactatgtatttaaatttagagttcttacagagatgaacaactgatcatcactggctataaaagtgattagcagggaaatgacttgaaaggatgactagatttgtctaatgtctcaattttcataggtaatctgggtataattgttaactgtaaaarataaataaattaggtaaatgtaaataacttggagatttgtaagtaaacttttcatgtaatttgaaattatatgtatttttaaggtaaattaagtgataaattttcattaatgtctgaatcatttccatataagatgtataagtattaaaaactaaaacaaattgttgaaaataaatgttttccttggcttttaacattttatagaaatactaaat

SEQ ID NO: 341926 - DNA, 583 bp, Homo sapiens
aaaacagaaatgtcatcaaatttttcagcatacatgtttgcctgaatttactgctcagataagatagtatttatctctgatatttattttaaagttataaaactagaaacccaaaatagaattatctttatttaacactttcatatgtagtattaatttaatattatttgtttaataaaaatatgtgtacaaactgagtgatcagcaaagtaactatgtatttaaatttagagttcttacagagatgaacaactgatcatcactggctataaaagtgattagcagggaaatgacttgaaaggatgactagatttgtctaatgtctcaattttcataggtaatctgggtataattgttaactgtaaaagataaataaattaggtaaatgtaaataacttggagatttrtaagtaaacttttcatgtaatttgaaattatatgtatttttaaggtaaattaagtgataaattttcattaatgtctgaatcatttccatataagatgtataagtattaaaaactaaaacaaattgttgaaaataaatgttttccttggcttttaacattttatagaaatactaaat

SEQ ID NO: 341927 - DNA, 583 bp, Homo sapiens
aaaacagaaatgtcatcaaatttttcagcatacatgtttgcctgaatttactgctcagataagatagtatttatctctgatatttattttaaagttataaaactagaaacccaaaatagaattatctttatttaacactttcatatgtagtattaatttaatattatttgtttaataaaaatatgtgtacaaactgagtgatcagcaaagtaactatgtatttaaatttagagttcttacagagatgaacaactgatcatcactggctataaaagtgattagcagggaaatgacttgaaaggatgactagatttgtctaatgtctcaattttcataggtaatctgggtataattgttaactgtaaaagataaataaattaggtaaatgtaaataacttggagatttgtaagtaaacttttcatgtaatttgaaattatatgtatttttaaggtaaattaagtgataaattttcattaatgtctgaatcatttccatataagatrtataagtattaaaaactaaaacaaattgttgaaaataaatgttttccttggcttttaacattttatagaaatactaaat

SEQ ID NO: 341928 - DNA, 583 bp, Homo sapiens
aaaacagaaatgtcatcaaatttttcagcatacatgtttgcctgaatttactgctcagataagatagtatttatctctgatatttattttaaagttataaaactagaaacccaaaatagaattatctttatttaacactttcatatgtagtattaatttaatattatttgtttaataaaaatatgtgtacaaactgagtgatcagcaaagtaactatgtatttaaatttagagttcttacagagatgaacaactgatcatcactggctataaaagtgattagcagggaaatgacttgaaaggatgactagatttgtctaatgtctcaattttcataggtaatctgggtataattgttaactgtaaaagataaataaattaggtaaatgtaaataacttggagatttgtaagtaaacttttcatgtaatttgaaattatatgtatttttaaggtaaattaagtgataaattttcattaatgtctgaatcatttccatataagatgtataagtattaaaaactaaaacaarttgttgaaaataaatgttttccttggcttttaacattttatagaaatactaaat

SEQ ID NO: 341929 - DNA, 610 bp, Homo sapiens
ccagggttaatgtcacccccaacgacttagagcttctatcagaaaggcagtaaaaaagttagagataactagacatgtctgctaccaatagtctaatgaaaagctccttttttttttttttttttcaaaattgctctcaggtttgtcaagactgatgaaaaaktttcacaactttgaaatatattttttatttaccttttttttttttgagatggagtttcactctgtcacccaggctggaatgcagtgatgcaatctctgctcattacagcctccgcctccagggttcaagcaattcttctgcctcaggctcataagtagctggaattacaggcacctgccaccaggcctggctaatttatttgttttagtagagatgtggtttcaccatgttagccaagctgatctcaaactcctggcctcaagcatctgcccaccttggcctcccaaagtgctgggattaaaggtgtgagccaccaggccaggccacatgttaaaagtattttaactattgtttatagatatattttaatgaataattagagacacatgtcaatcagtgttggttgttagtgagttaataacttttcaatactgtgcacactctaac

SEQ ID NO: 341930 - DNA, 610 bp, Homo sapiens
ccagggttaatgtcacccccaacgacttagagcttctatcagaaaggcagtaaaaaagttagagataactagacatgtctgctaccaatagtctaatgaaaagctccttttttttttttttttttcaaaattgctctcaggtttgtcaagactgatgaaaaatyttcacaactttgaaatatattttttatttaccttttttttttttgagatggagtttcactctgtcacccaggctggaatgcagtgatgcaatctctgctcattacagcctccgcctccagggttcaagcaattcttctgcctcaggctcataagtagctggaattacaggcacctgccaccaggcctggctaatttatttgttttagtagagatgtggtttcaccatgttagccaagctgatctcaaactcctggcctcaagcatctgcccaccttggcctcccaaagtgctgggattaaaggtgtgagccaccaggccaggccacatgttaaaagtattttaactattgtttatagatatattttaatgaataattagagacacatgtcaatcagtgttggttgttagtgagttaataacttttcaatactgtgcacactctaac

SEQ ID NO: 341931 - DNA, 610 bp, Homo sapiens
ccagggttaatgtcacccccaacgacttagagcttctatcagaaaggcagtaaaaaagttagagataactagacatgtctgctaccaatagtctaatgaaaagctccttttttttttttttttttcaaaattgctctcaggtttgtcaagactgatgaaaaattttcacaactttgaaatatattttttatttaccttttttttttttgagatggagtttcactctgtcacccaggctggaatgcagtgatgcaatctctgctcattacagcctccgcctccagggttcaagcaattcttctgcctcaggctcataagtagctggaattacaggcacctgccaccrggcctggctaatttatttgttttagtagagatgtggtttcaccatgttagccaagctgatctcaaactcctggcctcaagcatctgcccaccttggcctcccaaagtgctgggattaaaggtgtgagccaccaggccaggccacatgttaaaagtattttaactattgtttatagatatattttaatgaataattagagacacatgtcaatcagtgttggttgttagtgagttaataacttttcaatactgtgcacactctaac

SEQ ID NO: 341932 - DNA, 610 bp, Homo sapiens
ccagggttaatgtcacccccaacgacttagagcttctatcagaaaggcagtaaaaaagttagagataactagacatgtctgctaccaatagtctaatgaaaagctccttttttttttttttttttcaaaattgctctcaggtttgtcaagactgatgaaaaattttcacaactttgaaatatattttttatttaccttttttttttttgagatggagtttcactctgtcacccaggctggaatgcagtgatgcaatctctgctcattacagcctccgcctccagggttcaagcaattcttctgcctcaggctcataagtagctggaattacaggcacctgccaccaggcctggctaatttatttgttttagtagagatgtggtttcaccatgttagccaagctgrtctcaaactcctggcctcaagcatctgcccaccttggcctcccaaagtgctgggattaaaggtgtgagccaccaggccaggccacatgttaaaagtattttaactattgtttatagatatattttaatgaataattagagacacatgtcaatcagtgttggttgttagtgagttaataacttttcaatactgtgcacactctaac

SEQ ID NO: 341933 - DNA, 538 bp, Homo sapiens
tatatatctcctctgcagtggaatgarcacaaaattggttacccttttgtaccttggtcttgttattatttgaaataagatgccatttccatcttgagagaccagattattatttatttacagggtctagatactggaaagggagtttgtagtcactataatattcttacctttacaaggcttaaaggtaattttctttttgtgtttaactcaaaattttacaataccaacagcaaaactaattaaaataatgtaatcagtttgagggaatggagaataatcacatagcagaaataatcccaaataatttttgaaccaaataatttttgttctaaaatgccactgcttatattagtatcctcattttatttatttttaatttcagaaatctttatcaatttaatgcattcacgtagatcaaactatattaaatacttctggaaatttacaataatcatagttttaaaatatcctgcagtgtcatgtctagctctcataactgctaccaagaaatattgacttttaacaattttaagtt

SEQ ID NO: 341934 - DNA, 572 bp, Homo sapiens
tttgtatgatttttttaccccatgaaagtattctttttaagctaccaagtttgttgagtcttctaaaatattaatgtgtcataaaagcattacttttacagtaacatttttgcatttcaaattcaaactcatatgacccttggcaaagtggaatacagcttactattgtagatyatttagaatgagttggttttctatacattttgcagtgaaattaagggcattgagtagttatgaaacagttggtaacttaagagaggatggattattattcatagcatttcattttgtttatatttaaatttatacttactggcataattaaaatttttaaaatagtattttgtaatattttctttctcttattaatataacattgtttttttctgtctttttctgtctttttttgtttttgagatggagtttcaatttgtcacccaggctgcagtgtctgtcattaactatgtatctacatgtcaatatagccttcatattgacttcaccaaagctaaattaaaccatttattgggttatttcaaataattttttcttctgttacttccctttgagtt

SEQ ID NO: 341935 - DNA, 572 bp, Homo sapiens
tttgtatgatttttttaccccatgaaagtattctttttaagctaccaagtttgttgagtcttctaaaatattaatgtgtcataaaagcattacttttacagtaacatttttgcatttcaaattcaaactcatatgacccttggcaaagtggaatacagcttactattgtagatcatttagaatgagttggttttctatacattttgcagtgaaattaagrgcattgagtagttatgaaacagttggtaacttaagagaggatggattattattcatagcatttcattttgtttatatttaaatttatacttactggcataattaaaatttttaaaatagtattttgtaatattttctttctcttattaatataacattgtttttttctgtctttttctgtctttttttgtttttgagatggagtttcaatttgtcacccaggctgcagtgtctgtcattaactatgtatctacatgtcaatatagccttcatattgacttcaccaaagctaaattaaaccatttattgggttatttcaaataattttttcttctgttacttccctttgagtt

SEQ ID NO: 341936 - DNA, 467 bp, Homo sapiens
atgttatatttaatgagatgatgttctactgttaacaacattgaaccaagtaaatattttctaatgatatttcatatgtttaaggccttcaaaattgccttatggcattgtaaacaagcaagctactgcttctcagccawcagaattcccagtcactagaaggacaatatgtgaaggtcaggaggacccaaacatttttgctcaaaactcaaaacagttaggctgttttagaaaactttgactgtaagatatctaataatgaaaccactcagcattccaaagcccacagaaagtttcagaggccttctgaggctattttattaaaccatttaatgaaagtcttgtaaattgcaaagctgggtgtttactattgttccatttatttatttctgcctggaaagtgccccaaatttagtgccttaaaacaaaaaatatcatttctcatggttcagtgtattgactgagct

SEQ ID NO: 341937 - DNA, 548 bp, Homo sapiens
atctcaccacatgactgtaagctattgtattgtactatgagttattagacactaatatgttatctagataaaattaaaacatttctagaaatacacaatctaccaagactaaattacatagagctagaaagtcagaatagactttcaattcaagaagaatgaatcggtaatccaaaatctcctgacaaacaaaagccctggatctgatggctttgctgatgaattcaaatatttaaacaagaactaacaccaatctttctctacttttccaaaaatttgaagaggaggtaacactccctaactcattctatgaagtcatcagtaccttgatcccaaagctggataaagaaggtacattagaagaaaactagagaccaatatcttatagacatccacacaaaaatccycaacaaaataccagccaactagaattatacaccatggccaactaaaatgtattcctgtaatacagggatggttcaacttataaaaatcgatcattgcaatacaccacattaatagaaggaatacataaaaccttcaactga

SEQ ID NO: 341938 - DNA, 490 bp, Homo sapiens
tgccccaacgacccagtgatctacagattcaatgtaattcctaacaaaatcccaatttttttttgtagaaatagaaaaaactatcctaaaatgtacatactatcttatagaatacctaattttcaaaagaatcttgaaaagaaaaaaaaaacctggaggactccacttctgattttaaaacttactctaaagctacagtaatcgaaacastgtagtattggtataaagacagaaatatagagcaatggaatagcctagagattccagaaacaaacatttacatatatggtcaaatgattttaaacaagagtgcaaagattattaaattgagaaaaacagtcttttcaactaatggtgctaggaaaactggatatccacatataaaagaataaaattggaccattacctaacattgcaaacagaaatgaactcaaagtggatccataacataaatgtaagaaccaaaactgtaaaagttgtagaagaaaac

SEQ ID NO: 341939 - DNA, 490 bp, Homo sapiens
tgccccaacgacccagtgatctacagattcaatgtaattcctaacaaaatcccaatttttttttgtagaaatagaaaaaactatcctaaaatgtacatactatcttatagaatacctaattttcaaaagaatcttgaaaagaaaaaaaaaacctggaggactccacttctgattttaaaacttactctaaagctacagtaatcgaaacactgtagtattggyataaagacagaaatatagagcaatggaatagcctagagattccagaaacaaacatttacatatatggtcaaatgattttaaacaagagtgcaaagattattaaattgagaaaaacagtcttttcaactaatggtgctaggaaaactggatatccacatataaaagaataaaattggaccattacctaacattgcaaacagaaatgaactcaaagtggatccataacataaatgtaagaaccaaaactgtaaaagttgtagaagaaaac

SEQ ID NO: 341940 - DNA, 490 bp, Homo sapiens
tgccccaacgacccagtgatctacagattcaatgtaattcctaacaaaatcccaatttttttttgtagaaatagaaaaaactatcctaaaatgtacatactatcttatagaatacctaattttcaaaagaatcttgaaaagaaaaaaaaaacctggaggactccacttctgattttaaaacttactctaaagctacagtaatcgaaacactgtagtattggtataaagacagaaatatagagcaatggaatagcctagagattccagaaacaaacatttacatatatggtcaaatgattttaaacaagrgtgcaaagattattaaattgagaaaaacagtcttttcaactaatggtgctaggaaaactggatatccacatataaaagaataaaattggaccattacctaacattgcaaacagaaatgaactcaaagtggatccataacataaatgtaagaaccaaaactgtaaaagttgtagaagaaaac

SEQ ID NO: 341941 - DNA, 460 bp, Homo sapiens
tttgtagaaattaataattctagtactagaaagggaaaattatgagatattcttgacgcatcttgtatcagaaagtcaggaagtcagtcattccttggtatccacaggggatggttccaggagtcccagcagacaccaaaattcataaatgctcaagtcctttgtgtaaaatagtctagtatttgtatattcagattctgccctatatgctaaagcatctctagattacttacaatacctaataaaatgtaaattctgtgtaaatagttgttaactgtattgtttttatttatgttatttttatcataattatttaagtttttttggaaaaaaatttttaycctttgttggttgaatccacagatgcagaactcatagacatcgagggccatctgtatttgttatcagtgataaaagttgagctttcaaccaaacattagaattttggaaaacatgcacc

SEQ ID NO: 341942 - DNA, 556 bp, Homo sapiens
cggtaagatttaaattagaaactaggggtgaagaaaatcccagaagaaataatctaaaagaaagtacagcaacaggccagcatccttgaagaaaacgttcttattaaatgaatgatatttatataacagaaaggtcaatgagaattgttagattctgttcttagattgatagctataagatatttttagctctgtttcttagtttatgtattatatttgtcttatattatatttttgttgttgataatgatggtttatttttgtaatgggtagaatagcagaatagttagaacattttctgaagccattatgcccgagtttttaatttcacatctaaataagttcctgaaactcttgtatcttatgarcaagatagtagataataaaatgcatccacatgacaggattgcttggaaaactctgtggatgaaaaggtcttcaaatagaccttacacattataaataccatataagtgtttactattatgtgtcgatatcagcaatgaatttattagattatgtgaactaacatacaagtatcagcacttatttcaca

SEQ ID NO: 341943 - DNA, 488 bp, Homo sapiens
tgatggtgtattgttctaagatggagggagtttaaaaagtgttctacttctggaacaaatttgaaaatagatataacagagtttgatgatgttttgtagaaagggtgtaggagaaaaaaaaaccagtccatatgtttctaagtttttgttgtgagaaagtcaatcctggaaacttcttatttggtaaacactgggataagcatgtttgaagaaaacaagaagtttgcttttggatattttgggtgtgagaagcctatgaaacattaaagttgagatggaaagtagtgagtctgaaatatgagtctggatatagtagaaatatcatgactctaaatttgagagtcatcagaataaaaatggcattgaaggtcatggagctgaragagatagcctacagagtgaattaaaataagaaagataagggagcagagagccctgagccctgggccatccaatgactgggtggtcagaaaaataacaacattcca

SEQ ID NO: 341944 - DNA, 619 bp, Homo sapiens
cctgcacattgtgcacatgtaccctataacttaaagtataataataataataaaaagaaaacttttcttcagagtatactacaggaagacaatattaccatgtttaacactaattgcatgttacaaaataaacaatccgttatagtaaagctgaagcagagattgactttgatttttagtgagcattcacatgggatacaaatatacctcaytgtcaccagtttcccaattatcttccttccatctctctatctggaagaaacctatgcactatgaaacaatgcagatttgctccttttgccatctctgtttcctggaaaaattaattaccaggtgaacattttaaagttctttccattgagatgcttttctttaaccgctgtcttttaatgtgatgcaggaaaagagctgcaataggaccatgcatgtacaatacttaaataattttcttcttcagtcactggttacagggaaattaatatgaagccgtaagtctggactgagagaaaaaaaaggcaacttagccacattaggggccatgacacatggattcatttgcttgtacaacttacttgtgcattcacatcctgcttgaggccaatttttgtatacattgctt

SEQ ID NO: 341945 - DNA, 619 bp, Homo sapiens
cctgcacattgtgcacatgtaccctataacttaaagtataataataataataaaaagaaaacttttcttcagagtatactacaggaagacaatattaccatgtttaacactaattgcatgttacaaaataaacaatccgttatagtaaagctgaagcagagattgactttgatttttagtgagcattcacatgggatacaaatatacctcattgtcaccagtttcccaattatcttccttccatctctctatctggaagaaacctatgcactatgaaacaatgcagatttgctccttttgccatctctgtttcctggaaaaattaattaccaggtgaacattttaaagttctttccattgagatgcttttctttaacygctgtcttttaatgtgatgcaggaaaagagctgcaataggaccatgcatgtacaatacttaaataattttcttcttcagtcactggttacagggaaattaatatgaagccgtaagtctggactgagagaaaaaaaaggcaacttagccacattaggggccatgacacatggattcatttgcttgtacaacttacttgtgcattcacatcctgcttgaggccaatttttgtatacattgctt

SEQ ID NO: 341946 - DNA, 545 bp, Homo sapiens
tcctttttaccctgcccctcgcacagcgcctgacgtgaattaggcacacaacagacatagttcttgaactgtccccctgaagataaagaacattaggggaactttagctcaccccagtacctagctttggaataattctttgagacacagccttattcttgactaacttgtagacatatcaaattgtcacagaaactggattactacatcaaaaactacattcaatatttagtatataatttgatgttcaaaacrcagtgaattatgtataacaggctctggttaagaaggcagattgaagtatatactctctctatatatttttattatgtatattaacattttcacttgctacatatagaaaatgaaaaatatgaaatatatataaaaatgaaaaaatatataatttcaaaagcctccaatgaaaatgtttgatcctgaaagggacatcctcagctacatagaaaattcacattacagaagtctgacctgagggctccagtgggtggagctgaaatttaactttcctgtcattatctagctta

SEQ ID NO: 341947 - DNA, 567 bp, Homo sapiens
  misc_feature (1)...(567): n = A,T,C or G
tggggcaaactaaaagtaaaattaaaagtaaatatgcctcttatctcagctttattaaaattcttttaaaaagagggggagttaaagtatctacaaaaaatctaatcaagctatttcaaataatagaacaattttgcccatggtttccagaacaaggaactttagatctaaaagattggaaaagaattggtaaggaactaaaacaagcaggtaggaagggtaatgtcattccacttacagtatggaatgattgggccattattaaagcagctctagatccatttcaaacagaagaagatagtgtttcagtttctgatgcccttggaagctgtataatagatgtaaatgaaacnccaaggaaaaaatcccagaaagaaacggaaggtttacattgcgaatatgtagcagagccggtaatggctcagtcacgcaaaatgttgactataatcaattacaggaggtgatatatcctgaaacgttaaaattggaaggaaaaggtccagaattagtggggccatcagagtctaaaccacgaggcacaagtcmtcttccagcaggtcaggtgcc

SEQ ID NO: 341948 - DNA, 564 bp, Homo sapiens
cgataaaaatgctaaaagatatgaaagagggagtaaaacagtatggacccaactccccttatatgaggacattattagattccattgctcatggacataractcattccttatgattgggagattctggcaaaatcgtctctctcaccctctcaatttttacaatttaagacttggtggattgatggggtacaagaacaggtccgaagaaatagggctgccaatcctccagttaacatagatgcagatcaactattaggaataggtcaaaattggagtactattagtcaacaagcattaatgcaaaatgaggccattgagcaagttagagctatctgccttagagcctgggaaaaaatccaagacccaggaagtacctgcccctcatttaatacagtaagacaaggttcaaaagagccctatcctgattttgtggcaaggctccaagatgttgctcaaaagtcaattgccgatgaaaaagcccgtaaggtcatagtggagttaatggcatatgaaaacgccaatcctgagtgtcaatcagccattaagccattaaaaggaaagg

SEQ ID NO: 341949 - DNA, 524 bp, Homo sapiens
attgggagattctggcaaaatcgtctctctcaccctctcaatttttacaatttaagacttggtggattgatggggtacaagaacaggtccgaagaaatagggctgccaatcctccagttaacatagatgcagatcaactattaggaataggtcaaaattggagtactattagtcaacaagcattaatgcaaaatgaggccattgagcaagttagagctatctgccttagagcctgggaaaaaatccaagacccaggaagtacctgcccctcatttaatacagtaagacaaggttcaaaagagccctatcctgattttgtggcaaggctccaagatgttgctcaaaagtcaattgccgatgaaaaagcccrtaaggtcatagtggagttaatggcatatgaaaacgccaatcctgagtgtcaatcagccattaagccattaaaaggaaaggttcctgcaggatcagatgtaatctcagaatatgtaaaagcctgtgatggaatcggaggagctatgcataaagct

SEQ ID NO: 341950 - DNA, 524 bp, Homo sapiens
attgggagattctggcaaaatcgtctctctcaccctctcaatttttacaatttaagacttggtggattgatggggtacaagaacaggtccgaagaaatagggctgccaatcctccagttaacatagatgcagatcaactattaggaataggtcaaaattggagtactattagtcaacaagcattaatgcaaaatgaggccattgagcaagttagagctatctgccttagagcctgggaaaaaatccaagacccaggaagtacctgcccctcatttaatacagtaagacaaggttcaaaagagccctatcctgattttgtggcaaggctccaagatgttgctcaaaagtcaattgccgatgaaaaagcccgtaaggtcatagtggagttratggcatatgaaaacgccaatcctgagtgtcaatcagccattaagccattaaaaggaaaggttcctgcaggatcagatgtaatctcagaatatgtaaaagcctgtgatggaatcggaggagctatgcataaagct

SEQ ID NO: 341951 - DNA, 483 bp, Homo sapiens
attcaattggttattagctcttcagttccttggagtgccagtccaggagacaggattgctcaattattactcctgccatatattaagggtggaaatagtgaaataaaaagaataggagggcttgkaagcactgatccaacaggaaaggctgcatattgggcaagtcaggtctcagagaacagacctgtgtgtaaggccattattcaaggaaaacagtttgaagggttggtagacactggagcagatgtctctatcattgctttaaatcagtggccaaaaaattggcctaaacaaaaggctgttacaggacttgtcggcataggcacagcctcagaagtgtatcaaagtatggagattttacattgcttagggccagataatcaagaaagtactgttcagccaatgattacttaaattcctcttaatctgtggggtcgagatttattacaacaagggggtgcggaaatcaccatgcccgctcca

SEQ ID NO: 341952 - DNA, 483 bp, Homo sapiens
attcaattggttattagctcttcagttccttggagtgccagtccaggagacaggattgctcaattattactcctgccatatattaagggtggaaatagtgaaataaaaagaataggagggcttggaagcactgatccaacaggaaaggctgcatattgggcaagtcaggtctcagagaacagacctgtgtgtaaggccattattcaaggaaaacagtttgaagggttggtagacactggagcagatgtctctatcattgctttaaatcagtggccaaaaaattggcctaaacaaaaggctgttacaggacttgtcggcataggcacagcctcagaagtgtatcaaagtayggagattttacattgcttagggccagataatcaagaaagtactgttcagccaatgattacttaaattcctcttaatctgtggggtcgagatttattacaacaagggggtgcggaaatcaccatgcccgctcca

SEQ ID NO: 341953 - DNA, 483 bp, Homo sapiens
attcaattggttattagctcttcagttccttggagtgccagtccaggagacaggattgctcaattattactcctgccatatattaagggtggaaatagtgaaataaaaagaataggagggcttggaagcactgatccaacaggaaaggctgcatattgggcaagtcaggtctcagagaacagacctgtgtgtaaggccattattcaaggaaaacagtttgaagggttggtagacactggagcagatgtctctatcattgctttaaatcagtggccaaaaaattggcctaaacaaaaggctgttacaggacttgtcggcataggcacagcctcagaagtgtatcaaagtatkgagattttacattgcttagggccagataatcaagaaagtactgttcagccaatgattacttaaattcctcttaatctgtggggtcgagatttattacaacaagggggtgcggaaatcaccatgcccgctcca

SEQ ID NO: 341954 - DNA, 483 bp, Homo sapiens
attcaattggttattagctcttcagttccttggagtgccagtccaggagacaggattgctcaattattactcctgccatatattaagggtggaaatagtgaaataaaaagaataggagggcttggaagcactgatccaacaggaaaggctgcatattgggcaagtcaggtctcagagaacagacctgtgtgtaaggccattattcaaggaaaacagtttgaagggttggtagacactggagcagatgtctctatcattgctttaaatcagtggccaaaaaattggcctaaacaaaaggctgttacaggacttgtcggcataggcacagcctcagaagtgtatcaaagtatggagattttacattgcttagggccagataatcaagaaagtactgttcagccaatgattacttmaattcctcttaatctgtggggtcgagatttattacaacaagggggtgcggaaatcaccatgcccgctcca

SEQ ID NO: 341955 - DNA, 566 bp, Homo sapiens
aaaactggaggctttacatttattagcaaatgaacagttagaaaagggtcatattgagccttcrtcctcgccttggaattctcctgtgtttgtaattcagaagaaatcaggcaaatggcgtatgttaactaacttaagggccgtaaacgccgtaattcaacccatggggcctctccaacccgggttgccctctccggccatgatcccaaaagattggcctttaattataattgatctaaaggattgcttttttaccatccctctggcagagcaggattgtgaaaaatttgcctttactataccagccataaataataaagaaccagccaccaggtttcagtggaaagtgttacctcagggaatgcttaatagtccaactatttgtcagacttttgtaggtcgagctcttcaaccagttagagaaaagttttcagactgttatattattcattatattgatgatattttatgtgctgcagaaacgaaagataaattaattgactgttatacatttctgcaagcagaggttgccaatgctggactggcaatagcatctgataagatcc

SEQ ID NO: 341956 - DNA, 566 bp, Homo sapiens
aaaactggaggctttacatttattagcaaatgaacagttagaaaagggtcatattgagccttcatcctcrccttggaattctcctgtgtttgtaattcagaagaaatcaggcaaatggcgtatgttaactaacttaagggccgtaaacgccgtaattcaacccatggggcctctccaacccgggttgccctctccggccatgatcccaaaagattggcctttaattataattgatctaaaggattgcttttttaccatccctctggcagagcaggattgtgaaaaatttgcctttactataccagccataaataataaagaaccagccaccaggtttcagtggaaagtgttacctcagggaatgcttaatagtccaactatttgtcagacttttgtaggtcgagctcttcaaccagttagagaaaagttttcagactgttatattattcattatattgatgatattttatgtgctgcagaaacgaaagataaattaattgactgttatacatttctgcaagcagaggttgccaatgctggactggcaatagcatctgataagatcc

SEQ ID NO: 341957 - DNA, 566 bp, Homo sapiens
aaaactggaggctttacatttattagcaaatgaacagttagaaaagggtcatattgagccttcatcctcgccttggaattctcctgtgtttgtaattcagaagaaatcaggcaaatggcgtatgttaactracttaagggccgtaaacgccgtaattcaacccatggggcctctccaacccgggttgccctctccggccatgatcccaaaagattggcctttaattataattgatctaaaggattgcttttttaccatccctctggcagagcaggattgtgaaaaatttgcctttactataccagccataaataataaagaaccagccaccaggtttcagtggaaagtgttacctcagggaatgcttaatagtccaactatttgtcagacttttgtaggtcgagctcttcaaccagttagagaaaagttttcagactgttatattattcattatattgatgatattttatgtgctgcagaaacgaaagataaattaattgactgttatacatttctgcaagcagaggttgccaatgctggactggcaatagcatctgataagatcc

SEQ ID NO: 341958 - DNA, 566 bp, Homo sapiens
aaaactggaggctttacatttattagcaaatgaacagttagaaaagggtcatattgagccttcatcctcgccttggaattctcctgtgtttgtaattcagaagaaatcaggcaaatggcgtatgttaactaacttaagggcygtaaacgccgtaattcaacccatggggcctctccaacccgggttgccctctccggccatgatcccaaaagattggcctttaattataattgatctaaaggattgcttttttaccatccctctggcagagcaggattgtgaaaaatttgcctttactataccagccataaataataaagaaccagccaccaggtttcagtggaaagtgttacctcagggaatgcttaatagtccaactatttgtcagacttttgtaggtcgagctcttcaaccagttagagaaaagttttcagactgttatattattcattatattgatgatattttatgtgctgcagaaacgaaagataaattaattgactgttatacatttctgcaagcagaggttgccaatgctggactggcaatagcatctgataagatcc

SEQ ID NO: 341959 - DNA, 589 bp, Homo sapiens
tccaactatttgtcagacttttgtaggtcgagctcttcaaccagttagagaaaagttttcagactgttatattattcattrtattgatgatattttatgtgctgcagaaacgaaagataaattaattgactgttatacatttctgcaagcagaggttgccaatgctggactggcaatagcatctgataagatccaaacctctactccttttcattatttagggatgcagatagaaaatagaaaaattaagccacaaaaaatagaaataagaaaagacacattaaaaacactaaatgattttcaaaaattactaggagatattaattggatttggccaactctaggcattcctacttatgccatgtcaaatttgttctctatcttaagaggagactcagacttaaatagtaaaagaatgttaaccccagaggcaacaaaagaaattaaattagtggaagaaaaaattcagtcagcgcaaataaatagaatagatcccttagccccactccaacttttgatttttgccactgcacattctccaacaggcatcattattcaaaatactgatcttgtggagtggtcattcctt

SEQ ID NO: 341960 - DNA, 560 bp, Homo sapiens
ccacaaaaaatagaaataagaaaagacacattaaaaacactaaatgattttcaaaaattactaggagwtattaattggatttggccaactctaggcattcctacttatgccatgtcaaatttgttctctatcttaagaggagactcagacttaaatagtaaaagaatgttaaccccagaggcaacaaaagaaattaaattagtggaagaaaaaattcagtcagcgcaaataaatagaatagatcccttagccccactccaacttttgatttttgccactgcacattctccaacaggcatcattattcaaaatactgatcttgtggagtggtcattccttcctcacagtacagttaagacttttacattgtacttggatcaaatagctacattaatcggtcagacaagattacgaataataaaattatgtggaaatgacccagacaaaatagttgtccctttaaccaaggaacaagttagacaagcctttatcaattctggtgcatggcagattggtcttgctaattttgtgggaattattgataatcattacccaaaaac

SEQ ID NO: 341961 - DNA, 589 bp, Homo sapiens
tccaactatttgtcagacttttgtaggtcgagctcttcaaccagttagagaaaagttttcagactgttatattattcattatattgatgatattttatgtgctgcagaaacgaaagataaattaattgactgttatacatttctgcaagcagaggttgccaatgctggactggcaatagcatctgataagatccaaacctctactccttttcattatttagggatgcagatagaaaatagaaaaattaagccacaaaaaatagaaataagaaaagacacattaaaaacactaaatgattttcaaaaattactaggagatattaattggattyggccaactctaggcattcctacttatgccatgtcaaatttgttctctatcttaagaggagactcagacttaaatagtaaaagaatgttaaccccagaggcaacaaaagaaattaaattagtggaagaaaaaattcagtcagcgcaaataaatagaatagatcccttagccccactccaacttttgatttttgccactgcacattctccaacaggcatcattattcaaaatactgatcttgtggagtggtcattcctt

SEQ ID NO: 341962 - DNA, 560 bp, Homo sapiens
ccacaaaaaatagaaataagaaaagacacattaaaaacactaaatgattttcaaaaattactaggagatattaattggatttggccaactctaggcattcctacttatgccatgtcaaatttgttctctatcttaagaggagactcagacttaaatagtaaaagaatgttaaccccagaggcaacaaaagaaattaaattagtggaagaaaaaattcagtcagcgcaaataaatagaatagatcccttagccccactccaacttttgatttttgccactgcacattctccaacaggcatcattattcaaaatactgatcttgtggagtggtcattccttcctcacagtacagttaagacttttacaytgtacttggatcaaatagctacattaatcggtcagacaagattacgaataataaaattatgtggaaatgacccagacaaaatagttgtccctttaaccaaggaacaagttagacaagcctttatcaattctggtgcatggcagattggtcttgctaattttgtgggaattattgataatcattacccaaaaac

SEQ ID NO: 341963 - DNA, 517 bp, Homo sapiens
gcagagttggttgcagtcattacagtgttacaagattttgaccaacctatcaatattatatcagattctgcatatgtagtacaggctacaagggatgttgagacagctctaattaaatatagcatggatgatcagttaaaccagctattcaatttattacaacaaactgtaagaaaaagaaatttcccattttatattactcatattcgagcacacactaatttaccagggcctttgactaaagcaaatgaasaagctgacttactggtatcatctgcactcataaaagcacaagaacttcatgctttgactcatgtaaatgcagcaggattaaaaaacaaatttgatgtcacatggaaacaggcaaaagatattgtacaacattgcacccagtgtcaagtcttacacctgcccactcaagaggcaggagttaatcccagaggtctgtgtcctaatgcattatggcaaatgcatgtcacgcatgtaccttcatttggaagattatcatatgttcatg

SEQ ID NO: 341964 - DNA, 517 bp, Homo sapiens
gcagagttggttgcagtcattacagtgttacaagattttgaccaacctatcaatattatatcagattctgcatatgtagtacaggctacaagggatgttgagacagctctaattaaatatagcatggatgatcagttaaaccagctattcaatttattacaacaaactgtaagaaaaagaaatttcccattttatattactcatattcgagcacacactaatttaccagggcctttgactaaagcaaatgaagaagctgacttactggtatcatctgcactcataaaagcacaagaacttcatgctttgactcatgtaaatgcagcaggattaaaaaacaaatttgatgtcacatggaaacaggcaaaagatattgtacaacattgcacccagtgtcaartcttacacctgcccactcaagaggcaggagttaatcccagaggtctgtgtcctaatgcattatggcaaatgcatgtcacgcatgtaccttcatttggaagattatcatatgttcatg

SEQ ID NO: 341965 - DNA, 517 bp, Homo sapiens
gcagagttggttgcagtcattacagtgttacaagattttgaccaacctatcaatattatatcagattctgcatatgtagtacaggctacaagggatgttgagacagctctaattaaatatagcatggatgatcagttaaaccagctattcaatttattacaacaaactgtaagaaaaagaaatttcccattttatattactcatattcgagcacacactaatttaccagggcctttgactaaagcaaatgaagaagctgacttactggtatcatctgcactcataaaagcacaagaacttcatgctttgactcatgtaaatgcagcaggattaaaaaacaaatttgatgtcacatggaaacaggcaaaagatattgtacaacattgcacccagtgtcaagtcttacacctgcccactcaagaggcaggagttaatcccagaggtctgtgtcctaatgcattatggcaaatgsatgtcacgcatgtaccttcatttggaagattatcatatgttcatg

SEQ ID NO: 341966 - DNA, 441 bp, Homo sapiens
attataaatttcatattaatccttgtgtgcctgttttgtcwgttgttagtctgcaggtgtacccaacagctccgaagaggcagcgaccatcgagaacgggccatgatgacgacggtggttttgtcgaaaagaaaagggggaaatgtggggaaaagcaagagagatcagattgttactgtgtctgtgtagaaagaagtagacataggagactccattttgttatgtactaagaaaaattcttctgccttgagattctgtgaccttacccccaaccccgtgctctctgaaacatgtgctgtgtcaactcagagttaaatggattaagggcggtgcaagatgtgctttgttaaacagatgcttgaaggcagcatgctccttaagagtcatcaccactccctaatctcaagtaccagggacacaaaaactgccggaggccgcagg

SEQ ID NO: 341967 - DNA, 441 bp, Homo sapiens
attataaatttcatattaatccttgtgtgcctgttttgtcagttgttagtctgcaggtgtacccaacagctccgaagaggcagcgaccatcgagaacgggccatgatgacgayggtggttttgtcgaaaagaaaagggggaaatgtggggaaaagcaagagagatcagattgttactgtgtctgtgtagaaagaagtagacataggagactccattttgttatgtactaagaaaaattcttctgccttgagattctgtgaccttacccccaaccccgtgctctctgaaacatgtgctgtgtcaactcagagttaaatggattaagggcggtgcaagatgtgctttgttaaacagatgcttgaaggcagcatgctccttaagagtcatcaccactccctaatctcaagtaccagggacacaaaaactgccggaggccgcagg

SEQ ID NO: 341968 - DNA, 441 bp, Homo sapiens
attataaatttcatattaatccttgtgtgcctgttttgtcagttgttagtctgcaggtgtacccaacagctccgaagaggcagcgaccatcgagaacgggccatgatgacgacggtggttttgtcgaaaagaaaagggggaaatgtggggaaaagcaagagagatcagattgttactgtgtctgtgtagaaagaagtagacataggagactccattttgttatgtactaagaaaaattcttctgccttgagattctgtraccttacccccaaccccgtgctctctgaaacatgtgctgtgtcaactcagagttaaatggattaagggcggtgcaagatgtgctttgttaaacagatgcttgaaggcagcatgctccttaagagtcatcaccactccctaatctcaagtaccagggacacaaaaactgccggaggccgcagg

SEQ ID NO: 341969 - DNA, 539 bp, Homo sapiens
atatttttagtaccctaacccagcatctgcagaatacattctttgcaagtgcacatcgtatattcgctgagtttggccacattctgtgccacaagtctcaaaaacattaaaaaaaactgaagtcatataaaagatgtcctccaaccaaaacagaattgaattagaaatcaattacaatgagatttttaagaaaataccaaatatttagaaatcaaacacacgtctaagcaaccctttgctcaaagaagaaattcatgaagaaattaaagttttcactggatgataatgaaaatacaacatgccaaaatttgaaataagcagctaacacagtggttttaggaaaagtaatacctttaagtgctaattttaaaggaagaaatgtgtaaaattcacccatagaagcaagaaacaaaagagagaaaacacaataataaatrtaagagcagaaatcaataaaagaggaaacaagcaatgcaaaaaattaaggaaatcaaaagctagttctttaaaaagataatcaacatttataaactaacaac

SEQ ID NO: 341970 - DNA, 610 bp, Homo sapiens
gtatagccagctggtgggctggagaggtacagtggctactagtccccaggacacggtgtacttcaaaagtggctctagtccatggtggccccttgctgcagcagcttggctcacagagggtgggtgggaggtagcaggtgtacacattgtgccccttatctggagcagtgcagctgtatgaattcctggtagcactccacactgggctcagggcttgtgaggactgtgaaattctcttgaaataactcttttcagtagctataggggctggtggggttcttctgcttatgttttccctgcaagaggaagtccctcctgagcctgggccaatccaggaagaggatgtggaaggatggggtgccagaggcagggtgcttttatgcttccctcctgagcttctgatgaccacgagctcctctccactacttttctgcactcctgcactctccctttgatactccagtagaatcttagctstctattgcttggtcctttcttttggaggagatgtgcaccaggggcctctagtcagccatcttgctgacatttgcttctgctatatttttccctttgtactctaataagtagaaaacaaaatgagaaagcaaca

SEQ ID NO: 341971 - DNA, 570 bp, Homo sapiens
aagtacgtactagctgtatatgctattctgcattagatgtaaaaaacttcaaattctaacacagctaatatttattgaatgaattaaatgtgccaggtactattttaagcattcagcatatattttcttattcattttttacagcatctaggaggtaggtgatattatccccattttacggatgagagaacacaactaacccaaaattatacagctagaaagtgaaggagttgggatttgaactcaggacatgtatatctagaatctgtgcttttagtttcactacgctactcaagaatatatgcaacttttattaagcatttcatatttacaaagctttttagagtaaaaactagatgtagttcaacagaactagatgaaaagtacaactacatgtttggaagcacattttctcaagcacttcccatggtatactgtaacaccactgcaatttaaaaacttactcttttcccttgacctytcttgttccaattaagcttgtctcctctgtagtgtggaaaacaacagaatattctcgataataaccattaatacacatggctctgcttt

SEQ ID NO: 341972 - DNA, 600 bp, Homo sapiens
tttatacatgccattttgttttcaaaccttggaaccccaggtttggaaataagagcataaaagagttttggcgattcttagaaaggttttagagktgttccgggattaatagacattatagtattcatttaataatcattcatgtttctgaattctaaatcattttggatttcacctgataggacaaatcattttagaattatttgacaggacagtttttgcaacaaattgtcttgtcatgcaaagcttgaaggatcaaacggtctactggaaagaagtatgactagtaaaaccacttgacaatttatatatttttttctctttcacttcatcttttaaaagcatctgtgtaaacaaagcatataaaacttcaggatgatttagagttaataatacactatgttttccctcaacatgattaaactcataatttgcagaagttcaaatatgaaacatacatagcagtgagacctactagtgagacaggtgagggctagaattgggaggaattagtttataataaccccattgtagggctgcagtggaaatcatctggtctacagggaattatcaaagcccaggaaaagaggctcacacctg

SEQ ID NO: 341973 - DNA, 505 bp, Homo sapiens
ccaggagtaggagaccagcctggctaacatgatgaaacccctttctctactgtaaatgcaaaaaattagccaggtatggtggtgcacgcccacaatcccaactacttgggaggctgaggcatgagaatttcttgagcctgagwggcagagattgcagtgagctgagattacaccactgcactccagcctgggtgagagagcaaaactctgtctcaaaaaacaaaacaacacaaaacaaaagcaaaccaaacaatattataggagtacttgaaaaaaatgaagtaaaaggaggaaatttgctgaaaatttccagaattaaagatactttgactaggaagcagagcactacttcttacaggtttcattgctttatcatatttagccaagtaaaagatagaaatattaaatcaaaaaagatcttatctacttccttttctcaatacagaacattcaacattcaaacgttttcagcagtttcatatttcctacttcttcttttcccaag

SEQ ID NO: 341974 - DNA, 487 bp, Homo sapiens
tgttgttccatatgaattttaaaacagcttttttctaattctatgaagaattgcattggtagtttgataaaaataaaattgaatccataaatgtttctccatttgtttgtgtcatctctcatttctttcagcagtttttttgtaattctccttgtagagatttttcacctccctgagtagctgtattcctaggtattttattctctttgtggctattctgaatgggattgcattcttggtttgactctcaacttggacatgttggtgtatagaaacactcctgatttttgtaaaattattttgcatcctgaaactttactgaagctgtttatcagttctaggagcctttgggcagagactatggtgttttctaggtatagaakcaattgaatctgtgaagaaaaatagtttgacttctcttccaatttgaataccttttatatgtttctctttcctgattgctctgcttagcacttccagtactatg

SEQ ID NO: 341975 - DNA, 600 bp, Homo sapiens
cagatgaattttagcaataaaagctgattctggggatgatgtataaagtaacgcctgtcaaagtcatattaaatttttaaaaccttgttaactttgtggtaaactacctcctcgttatcaaaacagaaggcactttttctcagaaggttggccataaatacatcctaagtcaaactgggaataagccatgtgattatctggggtaagcattccagggagaagtacaaggacacagaggcaggtgtgtgtatatggcttgcttgaaaaacagcaaggaagccagtgtggctggaatggagtagamaaggggaaaaataacaatagatgaagtcagacaagagtggaagaagaaaatgaaagttcatgtagggctttttaggttagtgcaagaactttttctatgagtgagacaggaagctcttggaggtttagcttatgttttaacaggatcatggttgctgccactgaaatgggaaaagtactcttgtcccgctcgaagggcatgtgacaaggaatggctcgcttcttcagggccccactgctcaaacctctaggggagcatacagacaggcaggttgtggggctccgaccccacggcag

SEQ ID NO: 341976 - DNA, 599 bp, Homo sapiens
gttcttactgcgatgtctgcctctatagtgaatggccattaggtccagagtgatcccaatttatgtccaggtcctataggtttcaagcttatggaatccatctaagacatgaagaaggtaaactttgtaggcctagataggtaggggcactgggracatcagataactcccatcctaagttaaacatggtttgaatgtcctgacagaagcaagagcagggactctagcaaaacttacttctagaaatagagagagggaatggattaggtctcagtgtctgatttccactagacctttcttaccctgacttttctgcttgtcttaacaacaataatgaacatttattgggtgtctgctatgccaggaatttatctgagtactgataaactatgagaaagacctggttacattccaattaggatatcaaactcttgtattaggaagaaaatattgggagaaaggaagatgaaagaggctttatatgaaggagcatgatatgggagaaacttccacataaattacttaaattgtgatgactactatctgaatgaatgatttaaatttaaaatacaattaattatatttttcttgagttttct

SEQ ID NO: 341977 - DNA, 599 bp, Homo sapiens
gttcttactgcgatgtctgcctctatagtgaatggccattaggtccagagtgatcccaatttatgtccaggtcctataggtttcaagcttatggaatccatctaagacatgaagaaggtaaactttgtaggcctagataggtaggggcactgggaacatcagataactcccatcctaagttaaacatggtttgaatgtcctgacagaagcaagagcagggactctagcaaaacttacttctagaaatagagagagggaatggattaggtctcagtgtctgatttccactagacctttcttaccctgacttttctgcttgtcttaacaacaatawtgaacatttattgggtgtctgctatgccaggaatttatctgagtactgataaactatgagaaagacctggttacattccaattaggatatcaaactcttgtattaggaagaaaatattgggagaaaggaagatgaaagaggctttatatgaaggagcatgatatgggagaaacttccacataaattacttaaattgtgatgactactatctgaatgaatgatttaaatttaaaatacaattaattatatttttcttgagttttct

SEQ ID NO: 341978 - DNA, 599 bp, Homo sapiens
gttcttactgcgatgtctgcctctatagtgaatggccattaggtccagagtgatcccaatttatgtccaggtcctataggtttcaagcttatggaatccatctaagacatgaagaaggtaaactttgtaggcctagataggtaggggcactgggaacatcagataactcccatcctaagttaaacatggtttgaatgtcctgacagaagcaagagcagggactctagcaaaacttacttctagaaatagagagagggaatggattaggtctcagtgtctgatttccactagacctttcttaccctgacttttctgcttgtcttaacaacaataatgaacatttattgrgtgtctgctatgccaggaatttatctgagtactgataaactatgagaaagacctggttacattccaattaggatatcaaactcttgtattaggaagaaaatattgggagaaaggaagatgaaagaggctttatatgaaggagcatgatatgggagaaacttccacataaattacttaaattgtgatgactactatctgaatgaatgatttaaatttaaaatacaattaattatatttttcttgagttttct

SEQ ID NO: 341979 - DNA, 599 bp, Homo sapiens
gttcttactgcgatgtctgcctctatagtgaatggccattaggtccagagtgatcccaatttatgtccaggtcctataggtttcaagcttatggaatccatctaagacatgaagaaggtaaactttgtaggcctagataggtaggggcactgggaacatcagataactcccatcctaagttaaacatggtttgaatgtcctgacagaagcaagagcagggactctagcaaaacttacttctagaaatagagagagggaatggattaggtctcagtgtctgatttccactagacctttcttaccctgacttttctgcttgtcttaacaacaataatgaacatttattgggtgtctgctatgccaggaatttatctgagtactgataaactatgagaaagacctggttacattccaattaggatatcaaactcttgtattaggaagaaaatattgggagaaaggaagatgaaagaggctttatatgaaggagcatgatatgggagaaacttccacataaattacttaaattgtgatgwctactatctgaatgaatgatttaaatttaaaatacaattaattatatttttcttgagttttct

SEQ ID NO: 341980 - DNA, 431 bp, Homo sapiens
tgtctcctgcctgtccctgggcaatggaatgtctcggtataaaacccgattgtatgctccatctactgagatagggaaaaaccgccttacggctggaggtgggacctgcgggcagcaatactgctttgtaaagcattgagatgtttatgtgtatgcatatctaaaagcacagcacttaatcctttacattgtctatgatgcaaagacctttgttcacgtgtttgtctgctgaccctctccccacaattgtcttgtgaccctgacacatccccctcttygagaaacacccacagatgatcaataaatactaagggaactcagaggctggcgggatcctccatatgctgaacgctggttccccgggtccccttatttctttctctatactttgtctctgtgtctttttcttttccaaatctctcgtcccacct

SEQ ID NO: 341981 - DNA, 431 bp, Homo sapiens
tgtctcctgcctgtccctgggcaatggaatgtctcggtataaaacccgattgtatgctccatctactgagatagggaaaaaccgccttacggctggaggtgggacctgcgggcagcaatactgctttgtaaagcattgagatgtttatgtgtatgcatatctaaaagcacagcacttaatcctttacattgtctatgatgcaaagacctttgttcacgtgtttgtctgctgaccctctccccacaattgtcttgtgaccctgacacatccccctcttcgagaaacacccacagatgatcaataaatwctaagggaactcagaggctggcgggatcctccatatgctgaacgctggttccccgggtccccttatttctttctctatactttgtctctgtgtctttttcttttccaaatctctcgtcccacct

SEQ ID NO: 341982 - DNA, 431 bp, Homo sapiens
tgtctcctgcctgtccctgggcaatggaatgtctcggtataaaacccgattgtatgctccatctactgagatagggaaaaaccgccttacggctggaggtgggacctgcgggcagcaatactgctttgtaaagcattgagatgtttatgtgtatgcatatctaaaagcacagcacttaatcctttacattgtctatgatgcaaagacctttgttcacgtgtttgtctgctgaccctctccccacaattgtcttgtgaccctgacacatccccctcttcgagaaacacccacagatgatcaataaatactaagggaactcagaggctggcgggatcctccatatgctgaacgctggttccccrggtccccttatttctttctctatactttgtctctgtgtctttttcttttccaaatctctcgtcccacct

SEQ ID NO: 341983 - DNA, 431 bp, Homo sapiens
tgtctcctgcctgtccctgggcaatggaatgtctcggtataaaacccgattgtatgctccatctactgagatagggaaaaaccgccttacggctggaggtgggacctgcgggcagcaatactgctttgtaaagcattgagatgtttatgtgtatgcatatctaaaagcacagcacttaatcctttacattgtctatgatgcaaagacctttgttcacgtgtttgtctgctgaccctctccccacaattgtcttgtgaccctgacacatccccctcttcgagaaacacccacagatgatcaataaatactaagggaactcagaggctggcgggatcctccatatgctgaacgctggttccccgggtccccttwtttctttctctatactttgtctctgtgtctttttcttttccaaatctctcgtcccacct

SEQ ID NO: 341984 - DNA, 621 bp, Homo sapiens
tctctagcaaggctgggaaaaatttcatggacaatatcctcaactttgtttttcaagcttgttctctttccctgtctttcagggatgccaatgggtcatagatttggctctttacatagtcccatatttctcagaagtttggttcattttttaaaattcttttttcattaactttgtctgattgagttgattcaaagaactggtattccagctcagagattctttcttaagcttggcctatcctgctagyaatacgtccaatagtattatgaagtttttgtagtgagtttttcagcactatcagatcagtttggttctttcttaaaatggctatttcatctttcagttcttgaataattttactggattccttagattccttagactgggttcaactttctcctgaatctcagtgatctgcattgctatccagattctgaattctatgtcagtcatttcagctctttcagtctggttaagaaccattgctgggaatctagtgcagtcatttgtaggtaagaagacaccctgtcttttagagttattggagtccttgcaatggctttttctcatctgtgtgacatgatgtttctttcatctttgaagttgctgttctttgga

SEQ ID NO: 341985 - DNA, 590 bp, Homo sapiens
ttgtggcattgcatttatatcctacttttcttcactgtttttgtaaagtgcaatgcctccaagagatctctaattataaatgttttcaaggctctagttttggccttttctctaacatcagagactgcaatttggcagcycatgggttatatctggcttgcagacactttagctgatacatgtaattttttttaaaaagttagctgccaattaataataaaatttggacattttacctataatccctgacctagtgtctggggtggcaataaggattaagcccaatgatgcaggtaaagtacttagtgctgcatcttcatttataagcattcaaaaatgacaatttaatgatattttgtggttttcaaagctcttcttgtatattatttgataacatttaattagccccctacagaccagctttttggttgttttcagtttttttaaattacagtttcaaaactgtgtcagattttttggaaaacaatgctagaattagtatcctggtacacatatctttgcatatgttaatatgcatatgtattcagtgtctacatatccattgaatgtattgtcctttgtgatcagtg

SEQ ID NO: 341986 - DNA, 569 bp, Homo sapiens
  misc_feature (1)...(569): n = A,T,C or G
aagatacaaaacattttcgccatttccaaaatatttctcatgtatctttagtccatcccttccttcatcctcatttgcgggcaatcactgatctgttctttgtcaccagagaaaacttagcattttatattagtagcagtattttttgtagtatgtagtattctttgtgcccatcctgtacttcaaatagtagaatgattctgagatttgtcaatgntgtgtttcctttttgctaatgagtcgtattccttgtgtggataattgattgatttaactgttaattgaccttcagttgtttccagtttttttggcaattttgaatacatatttgcaaataaggccactrtgaacatttatgcataagtcttctgtggatatgttttcatttctcttagataaatacagttggaatgaacaggtaatatggtgggcacatgtttgaattttgaaaaaaaatctgccagaaatataccagtgtagtttacattattttacattcccactagtaatgtatgagagttttaatttctccacattcttgccaggatttattattggtctttttaatt

SEQ ID NO: 341987 - DNA, 557 bp, Homo sapiens
cccctcaatggtgattgggggtgggattgggacaaacaagctttccatgcataaaagagcacatgtgtatgctcgccacagtggcactcctgtggctttcactgaactaataggcaactccagttttttattgtgtccaggaaggtcccacatgatgtgacccctgcctatctcttccacttcaacccactccttcctcccctgctttgccatgttctgctctactggcctgttttttctgtttcttgaatgctacaaggtttctcctttctcaagtggtgttgctgggtgggactgtggaacgctgtgcccagatggtctcagggctggctcttccttgtcatcccttcctcaggcctcagttcacctgtcctccctggccagcctctctgaagtaggcctgtccctctctttccacagttttattttcctctcatcactttattcctgagattctgttgttcattttattatattttctccttctgttactcttgatgaaagcctgatgaaaacagtgaamctatctgtccttttcactgtatttgacacatagt

SEQ ID NO: 341988 - DNA, 571 bp, Homo sapiens
ctagcagtgtcccaggactcaattgggttgtaattaaatataataaaaaatgtctgacgctcaacttcagtgaaaggaattagtgctttccttttaatggctaaataatggaatcagattaattccctacagtcaaaactggatttagtaagatctgaaaggttataacaagggacactaccaccatagatgaaaacatctctgtcctccaaatattaaagttagttaatagtatgttcaatgatcttttaaaatctccttgacaagatgaaaattcaagcacacaagagtttaaatctgttataacctcaccaaagtgatattagcaatatcttacaataaaaaattatgtaaatgttcttttaatttttgtcaaaayatattagaaatattagaaatatattacttttttcttattagaaaataaatataatctttgaatataatgtttaaaaatgtttagtcatattgacgtgacatatatatatatatatatatatatatatatatatatataacaatttagataatttacagtgacaagtaagacctaaattacaggaaccagaaa

SEQ ID NO: 341989 - DNA, 443 bp, Homo sapiens
ctacatgcctatttttataccagtaccattctgttttggtaactataaccttgtagtatagtttgaagtcagatagtataacacctccagatttgttctttttgcttggtattgctttggctatttgggctctttgttggttccatatgaattttagggttgttttttctagttctgtgaggaattatgatggtattttgatgggaattgcattgaatctgtagattgcttttggcagtatttataatattgrttctactcatccatgagcatgggttgcgtttccatttgtttgtgtcctctatgatttctttcagcagtgttttgtagttttcctcgtagaggtctttcacctccttggttaagtatatcctaagactcttattttattttatttttacaactgttgtaaaggggattgagttcttgatttgattctcagc

SEQ ID NO: 341990 - DNA, 568 bp, Homo sapiens
atcacagcttcagatcaatcagcataatttcccttcactctatttcatgagacaaaagtagtgaatattgttatcctaaaggactcttttcaaatgaaccatatttatatcagtcgggaattttaaacacatgtgagaatraaatgctagacgtatagggaaagatctagttctttattccttttcttatatctagtgattgtttctgtcatcacaattattgtaaaggcatctggaatttagagtttaaagaaactcagtctgccaaaaaataaaattcaaagataattttcctcattctcttcccacccaaaatgaatacttggatcatcaaatggtagggagagtcctttctaactctcctcatactgcagccttgctcatagaagaaactttcaacactcctcccacctattcaaactcactctttctcagtggaacaggaacacttaatctgattggtaagagcctaacattcactgggccacctcttaccagtgggtgctgtcactgtgctccaaatgacctcaagtccctcctgcccttgggatagtgaactccttattga

SEQ ID NO: 341991 - DNA, 568 bp, Homo sapiens
atcacagcttcagatcaatcagcataatttcccttcactctatttcatgagacaaaagtagtgaatattgttatcctaaaggactcttttcaaatgaaccatatttatatcagtcgggaattttaaacacatgtgagaataaaatgctagacgtatagggaaagatctagttctttattccttttcttatatctagtgattgtttctgtcatcacaattattgtaaaggcatctggaatttagagtttaaagaaactcagtctgccaaaaaataaaattcaargataattttcctcattctcttcccacccaaaatgaatacttggatcatcaaatggtagggagagtcctttctaactctcctcatactgcagccttgctcatagaagaaactttcaacactcctcccacctattcaaactcactctttctcagtggaacaggaacacttaatctgattggtaagagcctaacattcactgggccacctcttaccagtgggtgctgtcactgtgctccaaatgacctcaagtccctcctgcccttgggatagtgaactccttattga

SEQ ID NO: 341992 - DNA, 568 bp, Homo sapiens
atcacagcttcagatcaatcagcataatttcccttcactctatttcatgagacaaaagtagtgaatattgttatcctaaaggactcttttcaaatgaaccatatttatatcagtcgggaattttaaacacatgtgagaataaaatgctagacgtatagggaaagatctagttctttattccttttcttatatctagtgattgtttctgtcatcacaattattgtaaaggcatctggaatttagagtttaaagaaactcagtctgccaaaaaataaaattcaaagataattttcctcattctcttcccacccaaaatgaatacttggatcatcaaatggtagggagagtcctttctaactctcctcatactgcagccttgctcatagargaaactttcaacactcctcccacctattcaaactcactctttctcagtggaacaggaacacttaatctgattggtaagagcctaacattcactgggccacctcttaccagtgggtgctgtcactgtgctccaaatgacctcaagtccctcctgcccttgggatagtgaactccttattga

SEQ ID NO: 341993 - DNA, 469 bp, Homo sapiens
ttttctttctgtgaatctctatttaacatgtgtcatttgctaatttgtgtatagtcacacatgtaatcccagcactttgggaggccgaggtggaaggatcacttgagaccagtcaggacaacaaagcaagaccccatctgtaaaaaaataaaaataaaaaaattatccaggtgtggtggcatgtatttgtagtcctggctacttgggaggctgaggtgagaggattccttgatccaggaggccaaagctgcagtgagccatgatcatgccactgcattccagcctgggtgacagagtaagaacctrtccaaaaaaaagaagaagaagaaagaagaaaggacacctatagacaaatatgattcaatgaaaagcaaagtgattatatcacaacttaaagcaaaaggaaggtgaaaaagctaatgccagcaaaagatggtttgataactttagaaataagtttcactttaaa

SEQ ID NO: 341994 - DNA, 630 bp, Homo sapiens
cagctcagcattgcatcatgcaatgcaaatgacaagacatgcttctttatcagcagagatgtatgttaatataactgtcacattaaatatttgctgctgttggctcagttaatggctgtcataaaaatgtggcaatatctggcattttaagtgtgtgtggtgcctaatgtagagtttgctattgtaaataagccacacatttagaactaattacatgcaasctatgatagcaggtttattttttttacaaagatctgagctgtgatcagcacttgtaatcacaaagcaaggaaaaaataaggaatgacagcaacaccttcatgttgaaagcaaagtcttgtcctgaagtgctgtgaagtattaaatgtttttcaatagaaagtgatgatgattagtcagaaacagatataattatgaaatagccaggatctggcttttctactgtgtttacatccacacacattttttaaaaactttatctaatctagtaaacactcaaatggtatcattttgaatatatatatacaggaattatatatatatatatatacacatgcaggaccataccttagtaaatggtcacgaaattgacttgcagagtgatcagtgagaacaattatcaataaattt

SEQ ID NO: 341995 - DNA, 630 bp, Homo sapiens
cagctcagcattgcatcatgcaatgcaaatgacaagacatgcttctttatcagcagagatgtatgttaatataactgtcacattaaatatttgctgctgttggctcagttaatggctgtcataaaaatgtggcaatatctggcattttaagtgtgtgtggtgcctaatgtagagtttgctattgtaaataagccacacatttagaactaattacatgcaacctatgatagcaggtttattttttttacaaagatctgagctgtgatcagcacttgtaatcacaaagcaaggaaaaaataaggaatgacagcaacaccttcatgttgaaagcaaagtcttgtcctgaagtgctgtgaagtattaaaygtttttcaatagaaagtgatgatgattagtcagaaacagatataattatgaaatagccaggatctggcttttctactgtgtttacatccacacacattttttaaaaactttatctaatctagtaaacactcaaatggtatcattttgaatatatatatacaggaattatatatatatatatatacacatgcaggaccataccttagtaaatggtcacgaaattgacttgcagagtgatcagtgagaacaattatcaataaattt

SEQ ID NO: 341996 - DNA, 494 bp, Homo sapiens
gaatgaaactgaatcctcatctctcaccttatacaaaaatcaactcaagatggattatggactcaaatctaagacctaaaactataaaaattctattctagaagataacactggaaacccttttctagacattggcttaggcaaggatttcatgacaaagaayccaaaaacaaatgcaataagacaaagataaatagctgagacctaattaaactaaagagcttttgcatggcgaaaggaacagtcagcagagtaatcaggaaacccacagagtgggagaagatcttcacaatctatacgtcttacaaaggactaatatccagaatctacaaggaacaccaacaaatcagcaagaaaaaaaatcccatcaaaaagtaggctaagaaaatgaatagacaattctcaaagatatacaaatggccaagaaatatatgaaaaaatgttcaacatcactaatgatcagggaaatgaaaatcaaaaccacgatgtgatac

SEQ ID NO: 341997 - DNA, 577 bp, Homo sapiens
aagttgattcattccatatttacattctttctggtacctggaaatgaaccaaatgcaaaagtatgccaaaaagtagttgagtcatttagaaaactcatcttcccccaggcaaaaggacaaactgccttgagaaagccctgctttgataatataaaacacctttcagcctaatgagatctgtccttataaccttttacccaggcctcaaggaggccagcctcaaggaggccagcctcaagaaatkgttaattttctttatcacacaatctaccctgcaaactccctaccaacctaagagagtcagtactacccaaattcaaaaattcctcctctgatatttgaatagatgggggcacttaacacaaatacatccagcagcaaagaagcaccaaattacgtacaccacaaagttgccttcagtcctcccggcctgatctgctaatgctatttgccatttcactttgaagagctgggcaaaataaaagcaaggtgttgctctcacgaggagagggcagctgattcatccctcacagggctgccagatgcatttcccattcagcttgtcattaacagcttc

SEQ ID NO: 341998 - DNA, 607 bp, Homo sapiens
accttttacccaggcctcaaggaggccagcctcaaggaggccagcctcaagaaatggttaattttctttatcacacaatctaccctgcaaactccctaccaacctaagagagtcagtactacccaaattcaaaaattcctcctctgatatttgaatagatgggggcacttaacacaaatacatccagcagcaaagaagcaccaaattacgtacaycacaaagttgccttcagtcctcccggcctgatctgctaatgctatttgccatttcactttgaagagctgggcaaaataaaagcaaggtgttgctctcacgaggagagggcagctgattcatccctcacagggctgccagatgcatttcccattcagcttgtcattaacagcttcatttcatttcatctgtgataaaaaacaatttagaagcatggaaatgacattacagtcaggttgtcctgaaacatcacggcagtgagaaagctattacacaattgaatctttctttatgaaaatccatggttttgcctgagttcacagagccatggaaatcatggcttttgacttgtacaggtgacaaaatttctcccagaacaaagcagcccttcata

SEQ ID NO: 341999 - DNA, 555 bp, Homo sapiens
ttatctgtttataaacacaatttttatatagttgaagtcacaaaatagatacaatttttaccctgttctttttatgttttcacattctacttagtaattatcattttaagtaattataattatcaagagctgaataatattctaccacaacttagggtgccaatgacaactcataggcctttacctttaaccgtctctcctcatagtctcaactgtgtactgggctgttctacctggattcctcatagaagactcacactcaagatatattatgactaagtccattgttatcccattaacttctccttaaacctgatcatcctcctatgatcctgattacaagtaatatggcaccacmaccctgcaagttttcttaacctctctctctttcccattcccttacttttaaatccaagtcaacaattctcatcaacattaccttttaaaatattttgaatctctttccttgttttaacctctttgatattacctttgttcctcaattctaacttgagtattggcatagcttcctgttattccccacttcgttcactt

SEQ ID NO: 342000 - DNA, 548 bp, Homo sapiens
gaaccaaattcagggaacccacatggaagtgaaggcagttttaggacataaaaggaacagcagagaccaaagcaattctctgaattgaaaagcaagcgactgacacactttcactcaaaagctgcaggctgagagcttcccaggctgagtttaggactatagtttggaactacaattggctctgaggcaccacttaaagtgccccaaggtgtcaagctgtctccaaactacatataaatgtgctgttccttctgccgagagctcactgacattttatctgcctgacaaagccacycttaaagcattgcctcctgtagaaagtcatccatgaatccaaaggcaatattaagtctaggtgacattctgggatcaacagaatgtgaagtatgtttgcatttggtagggagcatccagttcatctttgaaccacagaaaatcattagaaatgcgtatatatatggaggaagccctttttcatgccacttacaaatggaattcgctttccccactgtgatttttgatgtggtatgtagacaaacgctaaaaga

SEQ ID NO: 342001 - DNA, 594 bp, Homo sapiens
attgtaaactgggattttctcagacacttctagttcttccatccctggtcgacaaagacataaacttgggaatattggcaggattttaagcctttaaggttattatgaaattagagttccaagtcttagaaatgttcaaakaagagatttttttccccttgatatttctaatttcttctaagtattgaaatatatcatctatgtaataattttaggttatagaatttcagagctggaaggaacccttagagacaattcagtctggctatgcatttctacaggagaaaactgagactgagggaggcatacacacacttgctcaaggtttatgcacaagcctgtggtagagctgggaccacagttcattttgtcttacagaaagacccaagatttgaacaggtacagcctcactttcctacttataaacctctataaagtccctgaaaccttgatgaattcttttcactaaaaatatgagattttgatggtcagataacataggagtgaatgattacaatcacaatcttgctttttccttctgagaatttcagtgatgtggcagtttataggtaacaggcattgaggatgctcatt

SEQ ID NO: 342002 - DNA, 582 bp, Homo sapiens
gcagcaaaatgcctgcctttggttacttaggctgggaccagcacctttccacatccacaccacggaatttcagaggctgggagtgctgtaggtagagcaaccacccggctccctgagtggggagaacctgctgtcttgggggaatgcgcctcctgaaaaaagccatttccacggacggaggtcatggtgcttagagacgagcctccacccaggccagaaaaatgccagccctctgtggggtagggcggaggtgggagcaagagcacggggctttgaggtcggacacatctgcctttggatcctggtttctccatttaaaagctgggtaatgctcacttgtaaaaacgtaaacatataaataatgcctgctttacaatgctgtggtaagaattatatgagattacatagggagcrtctatgtggatcttttttcctcctagtcacgcaaaaaagatgatagtaggttacatagaattgctacgtggatcaaaagagaaaatgtataataaggaccttgggattgataaaatacaccataagtggtaattaaaataatgtttaaacatattaaattcagcatat

SEQ ID NO: 342003 - DNA, 572 bp, Homo sapiens
ttatatcctgttttgccctcacccattcttacatcagggaactaaagtctttgactatcctgcaaagatatttcaactccatttaaggataatgtacatatcactctgtaattattctttccccaacaaaaacaagtctgtctggcagaaatagccatgaactacggcttgccaacagtctttcagactgtgaacattaaaaattgtttccttaaacccatagcttttgcccttgaggaacacagtgaggcagaaccaacacaatgaggacttactgctcacctgaatatattctgggaggactggaaggacctaccaggtcaggtgagtttctccctttctgagcgggggtaggctgtacgtagtgcctaaatatactttttagattggccttccttatagatcataggctactccagggcaataaggstgtccaatttgttcattattgtatcctcagcaactagcacagtgctgagcacaaagtaggtgctcagtttgctaaatgaataacaaaggaatcagctggtgtcctatcttacgcacctcttgttttctcctcttttttgcag

SEQ ID NO: 342004 - DNA, 551 bp, Homo sapiens
atgattgaaaacagctccaaattcttttcaagtgctgccacagagatgtcactgtaaaggtcccctgatgcagctgttaaaaaaagttgtatttttttttctattcttataattggtaggaacctcactgtgccaacacagagctggtggatgactctgtattttctctgaaatggaagttatactaaagacacaggcttccamttttgttgtcaaatttctttcttttttcttttttttttttttaagttgagatggtgtctcactcggtcgtccaggctggagtgcagtggcacgatcttggctcactgcaacttctgccgcccagttcaagcgattctgctgcctcagcctcccaagtacctgggattacaggcggcaccaccatgtccagctaatttttgtatttttggtagagacggggttttgccattttggccaggctgttcttgaattcttgacctcaggtgatcctcccgccttggcctcccaaagtgctgggattacaggtgtgagccaccatgaccagccaagtttcatttttatgacct

SEQ ID NO: 342005 - DNA, 551 bp, Homo sapiens
atgattgaaaacagctccaaattcttttcaagtgctgccacagagatgtcactgtaaaggtcccctgatgcagctgttaaaaaaagttgtatttttttttctattcttataattggtaggaacctcactgtgccaacacagagctggtggatgactctgtattttctctgaaatggaagttatactaaagacacaggcttccaattttgttgtcaaatttctttcttttttcttttttttttttttaagttgagatggtgtctcactcggtcgtccaggctggagtgcagtggcacgatcttggctcactgcaacttctgccgcccagttcaagcgattctgctgcctcagcctcccaagtacctgggattacaggcggcaccaccatgtccagctaatttttgtatttttggtagagacggggtttygccattttggccaggctgttcttgaattcttgacctcaggtgatcctcccgccttggcctcccaaagtgctgggattacaggtgtgagccaccatgaccagccaagtttcatttttatgacct

SEQ ID NO: 342006 - DNA, 594 bp, Homo sapiens
aggttaaaaaatgtgtgacaatattcctgttggtgatgagaaggtgattaatgtctaaaaatggaacacactccaggtcccacaagatctactggaaggtcarcctaaactctcttacttgaacttcctttacagcatgaagaattctttctgggctgctacagaagctcttggtctttggggtcatattttcctgggttaaaaatatcacctctgctattttgaggctgtgtgagcctggacagtttgtcaaatattttaagcctcacctttcttatctggaacatggcaaaaatagtacctatcatatgattctgttaacataaactaggtggcatatgtaaaatactaacaaatgctgacaaatgatgcaatttacctctcgagtcttttcctacataagggtaagggctatactttataagcacacttcaacaggtaagtgttttggtccccagagaatgaggcaaatggcttatggagcatctttattccctcaaggacagagtatgaaaatgtagaataaatgatcaatgtcatgagaggggaatgtgaaaataagatcgattgagaatataatgcattaatgtactt

SEQ ID NO: 342007 - DNA, 595 bp, Homo sapiens
taattttctgtggctgcataagaaattaccacagagttattgacttaaaacaacacacatttagcatctcatattttgtgtaggtcaagattctatcatgtgtacctgggatctctgcctaggggaatgtctgagtcaagaatgctgagctgcattttcatctggagttcgggctcctattccaaactcactagttggcagaatttaattcgttgtgtttttttcttgcgggatattcagagagttgcttccagctccttaaggactgccttcaggtcctagcacatgactctctcataacatggcatctttcttcttcaaggatagcaagagtctctctagtccaccaagacagtcttatgtaatagtaagtaawcatggagtgactatcccatcatatttgctgtgtaacataacctaatcaagagggtgtctgctatcacatcatatttacaggttctgctcatactcaaggggaaaagattagtcagggaatgtataccagtgcacagaaatcttggtgggcatcttagaattctgactgtcacaagcagtgagacggaactgtagtgagcgaggtacaatataaagtcag

SEQ ID NO: 342008 - DNA, 620 bp, Homo sapiens
ttaataaaactttatcatttaaagttgctgtatgctaggcagaatttatttgatttaataagttacaaaaattatttttaaataatcacaaaattgggctcaacagagacccttgcatttttcctaaacacattttctgtttaaattctgagatttattaagaacatttgtttataaattgtaagaggctctctctctctctttctctctctctctgtaccttctytccttcccataaacctgcttctcttcctcactgaggttaaatgcctcattttactctataactgcatatggcagtaaaataatttgaatttgctcttcttctaagaatattttaatataaatgtaaaacacaacattttcctttttgtttctctgaatttgcattttgagcatggtcagttaaagggagaagttagagtctgtcaatcctaatattttctggcatattttatgagttgctaataaaacatgtagaatgtactagttggagtcttaaacaatacaaggtaaacaacagttaccttgtattgtttccctggccatactctacaggtaattcaaataactcaaaaaaatgagaaacccaaagaaaagtaatcacatcaagattaaac

SEQ ID NO: 342009 - DNA, 620 bp, Homo sapiens
ttaataaaactttatcatttaaagttgctgtatgctaggcagaatttatttgatttaataagttacaaaaattatttttaaataatcacaaaattgggctcaacagagacccttgcatttttcctaaacacattttctgtttaaattctgagatttattaagaacatttgtttataaattgtaagaggctctctctctctctttctctctctctctgtaccttctctccttcccataaacctgcttctcttcctcactgaggttaaatgcctcattttactctataactgcatatggcagtaaaataatttgaatttgctcttcttctaagaatattttaatataaatgtaaaacacaacattttcctttttgtttctctgaatttgcattttgagcatggtcagttaaagggasaagttagagtctgtcaatcctaatattttctggcatattttatgagttgctaataaaacatgtagaatgtactagttggagtcttaaacaatacaaggtaaacaacagttaccttgtattgtttccctggccatactctacaggtaattcaaataactcaaaaaaatgagaaacccaaagaaaagtaatcacatcaagattaaac

SEQ ID NO: 342010 - DNA, 582 bp, Homo sapiens
tgagtacactcttcactatttgggtgatgggtacattaaaagcccagaactcaccactacacaatatatgcatgtaagaaatctgtacttctacccactaatattaaaaagtggtgccagtaaagactgtataatgggaaagcccacgactgaaggtaagagagcttgcttgtacacaaatattgcaacttttaaaatatatatatagacgtggagaccyaggttggaaaagaatgattaaaaatgaaattattactatgttcagctagtgatattatagataatatttatttttaaaacaaattattctagtcataatattgttttacaaacacaaagagattttaaaatgtttttacttaagaaaacccatctttatagacaacaaggcactcctgctttgtttttatttagattcattaatcctttgtttttatttaattttttgtgggtacatcataagtgtatatatttaaggggtacatgaaatgttttgatataggcattgaatatgaaacaagcacataatggagaatggggtaactatctcctcaaacatttatcctttgagttgcaaacatt

SEQ ID NO: 342011 - DNA, 536 bp, Homo sapiens
tgctgcactcatctggatgaaagaaggcactctgaatttttgagctgtcagggttcttatactgattctttctcatctctgtgggcttatctacctttactctttgaggttactgacctttggatttttttaaattctatttgatgactttgagggtttgattatactataaagtgaattcagctgactgctttgtttctggaagattttagggggctaatgctcagctcctaactcctggactatgtgctttaactctgggggacttatattaggtcctgaatttgttctctggctccttgaggttagaaatccacttcactgaggggagcaaggtgccccakactgctggtcactacactctgatgggtggtgtcagccaaaccattttagagtgcagtgacagcaggatccatcttctttagcatgtgccagcagccatggtagcagcagctgtggtggagtgctagtaggtgggagttacctatctccctgtgggcattctccacagtggcagaggcaatgctgctggtggg

SEQ ID NO: 342012 - DNA, 565 bp, Homo sapiens
atacagaaccatcatccaaggctccagttgcacaacggtttggagttgatggcctgaaggtgagaagggacaaaccaggttattagacaacatgtataaaaatgaaacaagggggtaaagacagcttaaaagtcctgaggctgccaacatgccctgataactggtggctatagttattgctgctaagatttgggtgcatggggcttggctttggycagcttctttggtcttgttttcccaaacaaggaaacctccaggttatgggcaccctacttactcctatcacctggcaggatttgcaggataactgcccagaactagaatattgatccagatttttacactacccataccttttgtttcttctgagctgtagctggaaatcagtggttggttcacagaaataagcacggttagtttaaaatgtaggtaaaaacttaaaaacaactaacaaaactagatttaatgacaagtgtatggtaagttttgaaacataatttttctctcttcagtcctcatttttattaaaaacaaatcatgataggactgatttctttgcaaaata

SEQ ID NO: 342013 - DNA, 458 bp, Homo sapiens
tgattccaacaatgaatttatcataaaatgaaaactacagaaatactttcactatatagaggcaggctctcagggacaaacaaaacagaagaaaaaagtaacatacctcactaataytgggatataaagtacacaaaggaaaaattagttaaaaatctctgctgcctctgaggctgagaggcaaaaattgtacttggaaaagatattgatttattatggcctttacatacataaaacacatcaaatttttagccgtgagcaatactagtttcatcatttatgcccgcatttatttttcatcattgattacatcctaggtatagaagtggcctttgctccttgttggctatcagaagaaaaaaaaacatctcttgggaaatttatgaatggtaaggagtaaagtacctttttcttattttcagccttgtagtgtgtgccctgaatatcttagacacaat

SEQ ID NO: 342014 - DNA, 617 bp, Homo sapiens
atgtttgtaatcttctccccaattcctatgctgaaacccaaatgcccagtaaaactctgtttggagataaggcctttacagaagtaactaaagttaaacgaagtcataggataacactgtaatgcartaagattggtatccttatgggaagaaacattggagagcttgctcactcactccacaggcacaggaacagaggaaagtccacgtgaaccaacagagaggagacagacgtctgaagttcaagcagggagccttccccagacaccaagcctgttggcatcttgatcttgaactttcagtcttcggaactgtgagaaaatacatttgttttttaagccacccagtttatggtgttttgttatggccatctgagcagactgaaacagtgctattttaattaaatactttattgaggtaaaatttgtgtgtaacagaacacacagatcctaaatgtgtggttccaagagttctgacatcacccaagcaacaagtgtaatatcatgtaaccaccactcaaagcaagacataaaaccttttcagcactgccacaaaagattttcctgagctttccatcagaaaaaaagttcatgtacttatgcaagtagaatcatgta

SEQ ID NO: 342015 - DNA, 540 bp, Homo sapiens
atgtttctgataattgaatatagacttcttttgtagcagggcttcagatcttagaatctttgagattctggaaatcactttatgttttacagcactgctgccagttttctgaaccacttatgatatgactctgaattacagcctaactctttgtcatctactctctgagttgctgaggaatgttctttgtattttttatttccaccactgcctttttgttcctagaaagacctatcttgctctgctatctccagccttggaagtttgaatataatgcatttggtgaagatctgaagtgccttggagagacttatctcaactctatttcctgccctgagccttcagaatactgtcccatttattaagcgamagctgagggaaaatagttggtatatgaatgtgggcttgatctgtggttggggcttctcaggattccagtttatcatatcattcaacatgccattgtcaaaagtttgttaacatttttttctagtttctctttatccttgtatagggtagacgctttctttttttcattga

SEQ ID NO: 342016 - DNA, 638 bp, Homo sapiens
  misc_feature (1)...(638): n = A,T,C or G
nnnnnnnnnnnnnnnnnnnnctctatgggtttgcctattttggacattttctataaatagaatcacacgacatgtggtcttttgtatctagcttcttccactttgcataatatttttaaggttcatttatttttagcatgtatcagtgtttcatttctttttatgamtgaataatattccattgtatggctataccacaatttcttcattaactcatcaattcatagacacttggtgcttttctactttttggctcttatgaataatgttcttatgaacacacgcaggtttttgtgcaggcgtttgttttccattctcttgggtacatatgtaagaggggaattgttgggtcaaatgtcagctctgtttttaactttttaaataactcttaaaacagaaatactgggggatatacaggcataagattaatcacacatattttatttgtattattgctaaatgataagtcccaacttacccctccacttctgtaatcaaggaatttagtgacacacttgattagcagcagggacactgaggaaggaattgggcttcagtcatgagtagcatgaactagtacagatagggaaagcctcatcgttactaactctgtccccacacactttgtgaagataatg

SEQ ID NO: 342017 - DNA, 544 bp, Homo sapiens
aaattctcaagattataaaattttcttgaaaattaaaacttaaagagtttattactgtgtttggcccaaaaaacargcttgcaatatatcaattctcttcttgataaaaacagggttgggggtcactaaagccacattttaatatatttaggatatattaacaagagtctgagctgtttattaatcagtgtggtttattataatttttaggggtttctatcatttacctttattaatatctcatccctccctagagttttatctacccaattaatagccagctggtataataacttttagtcattttctagtcatgctgtgtatttagattatagtatgattgacagaggcccttagcatattggttgtttcagatgcagtcatcagcatggacgaaagatagtccatactgattgttttgatctctaaaataataaataatgtaacaagtaatataataagtaagaaagctgattgttttgttctctaacatattaagtaaaacttttagaaagagaatttaactgttgtataccaacactag

SEQ ID NO: 342018 - DNA, 589 bp, Homo sapiens
ttgcaatttcccataagaaatggtatcatactcagaattttctaacttttaaaactaatgaaaacttaaagaataataaggaaggatcacattacacaattttgttctctttcatctttttggcttgatctctctcattcttcatcccatgaaatgattgttctttcactacaccttcctaaccatctgtccctaaaaaatataaaaatccacctccttaggtgcttcttctgcatgtgttagttgcagcaattaaacttactttcataaaaggaactctacaaataccttcaaaggcagacaaagtrcttgctcaacaattcctaatgcagttaacatgtgttaaatatagacaagattttatggaatttcaaatgtccgaaattaacttaaagaagtagttacaaaatctatgtaaactgcatagattacaggtagactacttgaaaaaaaaaattaaaggtggtaatatacctaagtcaacatcaggtccaaataatatcttgcgtttctccaaatttttaataacccataatctccattttatagaaattggtccagatgagagaagttaatggtaaatatgaaa

SEQ ID NO: 342019 - DNA, 589 bp, Homo sapiens
ttgcaatttcccataagaaatggtatcatactcagaattttctaacttttaaaactaatgaaaacttaaagaataataaggaaggatcacattacacaattttgttctctttcatctttttggcttgatctctctcattcttcatcccatgaaatgattgttctttcactacaccttcctaaccatctgtccctaaaaaatataaaaatccacctccttaggtgcttcttctgcatgtgttagttgcagcaattaaacttactttcataaaaggaactctacaaataccttcaaaggcagacaaagtgcttgctcaacaattcctaatgcagttaamatgtgttaaatatagacaagattttatggaatttcaaatgtccgaaattaacttaaagaagtagttacaaaatctatgtaaactgcatagattacaggtagactacttgaaaaaaaaaattaaaggtggtaatatacctaagtcaacatcaggtccaaataatatcttgcgtttctccaaatttttaataacccataatctccattttatagaaattggtccagatgagagaagttaatggtaaatatgaaa

SEQ ID NO: 342020 - DNA, 638 bp, Homo sapiens
  misc_feature (1)...(638): n = A,T,C or G
nnnnnnnnnnnnnnnnnnnnctctatgggtttgcctattttggacattttctataaatagaatcacacgacatgtggtcttttgtatctagcttcttccactttgcataatatttttaaggttcatttatttttagcatgtatcagtgtttcatttctttttatgactgaataatattccattgtatggctataccacaatttcttcattaactcatcaattcatagacacttggtgcttttctactttttggctcttatgaataatgttcttatgaacacaygcaggtttttgtgcaggcgtttgttttccattctcttgggtacatatgtaagaggggaattgttgggtcaaatgtcagctctgtttttaactttttaaataactcttaaaacagaaatactgggggatatacaggcataagattaatcacacatattttatttgtattattgctaaatgataagtcccaacttacccctccacttctgtaatcaaggaatttagtgacacacttgattagcagcagggacactgaggaaggaattgggcttcagtcatgagtagcatgaactagtacagatagggaaagcctcatcgttactaactctgtccccacacactttgtgaagataatg

SEQ ID NO: 342021 - DNA, 581 bp, Homo sapiens
tagggcttttcccttagttaccaagagaagtgtctattgggtttaatttctcaacataatattgacaacattgacatatcctgagattatgttgagacatgatccaggtatgaggatttattataattagtcaagcaaaaaataagttaatctactattctgtacaagtgactagaaaacagtaggctaaggagaaatgtgattgaatgatgaaaattaaaaaatgtgtcatggaatcatggccatggtacatcggtgattgtatcttaacccaaagtaacaaatcctatgtatggatttcccgatgctgctacattcaataagaatatcagaataaagatctgacttctttaacagatggacagtctctctcatacacacacacacacacacacacacacacacacacacatctacacagtaaagaaaacaattatttaaatacttcagtccrgagctaactggactaaactgaagaagatatttgatgaaaaaggatgaaattttttttcctgtattatccatattcactttcaagcagttgtcactgaaagtagtaagaagcaagctaacaaataagt

SEQ ID NO: 342022 - DNA, 581 bp, Homo sapiens
tagggcttttcccttagttaccaagagaagtgtctattgggtttaatttctcaacataatattgacaacattgacatatcctgagattatgttgagacatgatccaggtatgaggatttattataattagtcaagcaaaaaataagttaatctactattctgtacaagtgactagaaaacagtaggctaaggagaaatgtgattgaatgatgaaaattaaaaaatgtgtcatggaatcatggccatggtacatcggtgattgtatcttaacccaaagtaacaaatcctatgtatggatttcccgatgctgctacattcaataagaatatcagaataaagatctgacttctttaacagatggacagtctctctcatacacacacacacacacacacacacacacacacacacatctacacagtaaagaaaacaattatttaaatacttcagtccagagctaactggactaaactgaagaagatatttgatgaaaaaggawgaaattttttttcctgtattatccatattcactttcaagcagttgtcactgaaagtagtaagaagcaagctaacaaataagt

SEQ ID NO: 342023 - DNA, 487 bp, Homo sapiens
tctagttatctgctccaaaataaggtgatggaacaggcacaggataacagttgtatatattcccatccccagaagaagaaaatgaaaggaaaaaaggagggcccaggcaatttcaaaaatcaactsggcaaattccatcaggtgtgagagctgaaataatcctctctggcccgtgaatctgccctctaggccagagggtctgtcctccagtcctctgtatgtgtgttaggtgactaaaaccagggtgttggctggtttggttccttctggaggctctgaggggagaagctatttctttgcccttttcagcttctagcagctgcctgcaatcctttgctcacggccccttgaatttctccaaactcttgcctccactgtcacctctcttactaattctgatctcttgcctccctctttcaagaattcttgtgattacattgggcccacctagataatccagaataatcttcccatttcaaaatcttta

SEQ ID NO: 342024 - DNA, 487 bp, Homo sapiens
tctagttatctgctccaaaataaggtgatggaacaggcacaggataacagttgtatatattcccatccccagaagaagaaaatgaaaggaaaaaaggagggcccaggcaatttcaaaaatcaactcggcaaattccatcaggtgtgagagctgaaataatcctctctggcccgtgaatctgccctctaggccagagggtctgtcctccagtcctctgtatgtgtgttaggkgactaaaaccagggtgttggctggtttggttccttctggaggctctgaggggagaagctatttctttgcccttttcagcttctagcagctgcctgcaatcctttgctcacggccccttgaatttctccaaactcttgcctccactgtcacctctcttactaattctgatctcttgcctccctctttcaagaattcttgtgattacattgggcccacctagataatccagaataatcttcccatttcaaaatcttta

SEQ ID NO: 342025 - DNA, 563 bp, Homo sapiens
agaagagaagatatcactcactacaattggagaagggatcaagagaggttttatttactccttggtagcctctctagagccttgataactgtattcttcctaaaagccttaataacccaatcactctttttggcatygatgctactgatcatcaatgttttacttgctaacaattcactagtagcaaaccaagctccaaagtctgcagtccagtagtaatgacagtcataaaggaaatactggccttgaggtgctgtagacgctgtaaaagccagaattgtctagtctcaacacttttttaatgctgccattaacagtgcagccttggacacaagctctgctcctggctcagaaaatgacactatcatagctaccaaagcttagtcttataatagacagattgtgctagtggggaattctctcgtctacaatctcctgtgtttccgtagggcaggaatgaaatttatcctttcactgtggagcaaattcatggatcaaagggtttgctgagtaaatggagagagtaaacatgggcagtgtttatctgccttccgggtgaaagc

SEQ ID NO: 342026 - DNA, 387 bp, Homo sapiens
acaactcacattagcttttgagccaacctgcagcaatcacaagtttacacatgttttcttgtcaataaagaagttttccattcattgacccatttgggctccctttgtccactcaagaaacaatgttctaatctgagactaattgcaaggaagcacatacctcatgctaaacccagtggctaaaaagccaatagtcactcaatctaacactatttatcatttgagatggcctaggaaacatttcttcaattccactcaaaatgataactgctttgtcattagtcttcaggcaatgttctgtcccaagctaacytcttccagaaggatttaaagcctgacatcttttctttccacgttcaccctctcatcttttgcctgcaccttagt

SEQ ID NO: 342027 - DNA, 638 bp, Homo sapiens
  misc_feature (1)...(638): n = A,T,C or G
nnnnnnnnnnnnnnnnnnnnctctatgggtttgcctattttggacattttctataaatagaatcacacgacatgtggtcttttgtatctagcttcttccactttgcataatatttttaaggttcatttatttttagcatgtatcagtgtttcatttctttttatgactgaataatattccattgtatggctataccacaatttcttcattaactcatcaattcatagacacttggtgcttttctactttttggctcttatgaataatgttcttatgaacacacgcaggtttttgtgcaggcgtttgttttccattctcttgggtacatatgtaagaggggaattgttgggtcaaatgtcagctctgtttttaactttttaaataactcttraaacagaaatactgggggatatacaggcataagattaatcacacatattttatttgtattattgctaaatgataagtcccaacttacccctccacttctgtaatcaaggaatttagtgacacacttgattagcagcagggacactgaggaaggaattgggcttcagtcatgagtagcatgaactagtacagatagggaaagcctcatcgttactaactctgtccccacacactttgtgaagataatg

SEQ ID NO: 342028 - DNA, 584 bp, Homo sapiens
taaggcaaggaactcttgcaatctccaaactctcctttctctaatattccagcctttactatattatttactgttttctacttcatattaaatacatcactttaccttctctactgctagaccatgaggttccaacaggcagggtcactgttttacccattttacattctcacattgcccatggtaagaatttaataaacatttatttattgaaatgaattataatccattctcatttcattataacacagctatcatttgcttggcatttattacacatcaggtatttgttaagtgatgaattcatctagcaggatggtaaarctgaaattctgacaaggttcttggttaaatgaatgtagagttaaaaagttagttaccatataactttttttggaattaaggggttaagttaccatataaagcttggctgacacatgttctgtgagtcaatgtgtccttgcccactttgaaagtaaaacagtcaagaggtacctatcatgtcaccttcccaaggaaaggagaaagtttagtacatgacccctggagttgggaggcagagtgtcttggaaagagaaccgggt

SEQ ID NO: 342029 - DNA, 600 bp, Homo sapiens
ctttcccttctctccaatataatgcaaatttggatggtccaaagaatagtagacttatagtcagaagacatagatttgggtttcaatttagtttctacttacatttgtttttctagttctatgaacttggacaattcaatctagcctgttttggtgtctaagatggagataatcatgcctcctttgcagctgcctacctctcaagactttcaagagagtataaagaagtgctttgtaaatgtatgggtatgtttactctgactcacattctacgaacgtgtattaataggatttcttttttcctccattcccttgactggttccattctttattcatgytctcattggcaacaagggatttgaggaaaataaaacacacctcgactccaaaaatttggattgccatggctgctatcctcacttaccctatgacacatacattccacaatattgggaatcaaaatttctcttttcctgatttctgaaactcaatactgagataaacattatgctgcactaaaatgaaggtaaatcttccaacatggagcagtagcaagtccccaggtttcagagatggcacagaattattgtaggtctggc

SEQ ID NO: 342030 - DNA, 600 bp, Homo sapiens
ctttcccttctctccaatataatgcaaatttggatggtccaaagaatagtagacttatagtcagaagacatagatttgggtttcaatttagtttctacttacatttgtttttctagttctatgaacttggacaattcaatctagcctgttttggtgtctaagatggagataatcatgcctcctttgcagctgcctacctctcaagactttcaagagagtataaagaagtgctttgtaaatgtatgggtatgtttactctgactcacattctacgaacgtgtattaataggatttcttttttcctccattcccttgactggttccattctttattcatgttctcattggcaacaagggatttgaggaaaataaaacacacctcgactccaaaaatttggattgccatggctgctatcctcacttaccctatgacacatacattccacaatattgggaatcaaaatttcycttttcctgatttctgaaactcaatactgagataaacattatgctgcactaaaatgaaggtaaatcttccaacatggagcagtagcaagtccccaggtttcagagatggcacagaattattgtaggtctggc

SEQ ID NO: 342031 - DNA, 627 bp, Homo sapiens
tccacaaaacaaccaaaaaccaaataccaaaatggcaggagtatgtccttactcatcactaataacatgacatgtaaatggactaatctgtttaattaaaagacatagactggctgaatggatgaaaaaaacaagactcattgatctgttgccaagaaacacacwaaacctataaagacacacataggctgaaaataaagatatcaaaaaagatattccatgccaatggaagtcaaaatagagcagaagttgctctatttatatcagaaaaaatagatttcaagaccaaatctataagaaaaaacagagaaagtaatctataatgataaaggggtcaattcagcaagataatataataattttaaatatatataagcccaacggtggagcacccagatatataaagcaaaccttatcagaggtaaagagagagataggccctgatacaataatagctggaaacttcaacactccactttcagcattggagtgatcttccagatagaaaatcaacaaagaagcatcagacttaatctgcactatagactaaatatatctaataaatatttatagaagattttattcaatggctgcagaatacacattcttctcctcagcacatgaatt

SEQ ID NO: 342032 - DNA, 613 bp, Homo sapiens
aagttttcatgttaaggaatgcatatacaacattggaattaaaagactaatgcatatgtgacaactctttatgtcttataacaccacaatagcagatcctcaacaccatggccaattcactgggccaatggttgaggaaataatacaggggcagactgaattttggcmaattttttctcataacccaaacacaactggccaagttcatgaagacattaaaatacaacttcatacaagtcacttaccctttctgatttttcattttatctgataaatgagaataataataactaacttacagatggatacattttagttcatcatgtactaaagcatccatgagacatgatcatgatcagaggattaaatgagattctattcaaatctgtttgcactctggtaccacgtagtagctgtatgatacatgttaactctcttttctgccatgaaactcaccccgttggttaatccttctcctcaaaataacctccaatggtcattggacattaattacatgttaccattttgttttggtaataaatgggtcaaggctctgacaatatagatgttatgttatgcataaatacacagctgacatcctgactttgaaggc

SEQ ID NO: 342033 - DNA, 566 bp, Homo sapiens
aacaccacaatagcagatcctcaacaccatggccaattcactgggccaatggttgaggaaataatacaggggcagactgaattttggccaattttttctcataacmcaaacacaactggccaagttcatgaagacattaaaatacaacttcatacaagtcacttaccctttctgatttttcattttatctgataaatgagaataataataactaacttacagatggatacattttagttcatcatgtactaaagcatccatgagacatgatcatgatcagaggattaaatgagattctattcaaatctgtttgcactctggtaccacgtagtagctgtatgatacatgttaactctcttttctgccatgaaactcaccccgttggttaatccttctcctcaaaataacctccaatggtcattggacattaattacatgttaccattttgttttggtaataaatgggtcaaggctctgacaatatagatgttatgttatgcataaatacacagctgacatcctgactttgaaggctagaccaacaccaccctcccaaggtcactacc

SEQ ID NO: 342034 - DNA, 613 bp, Homo sapiens
aagttttcatgttaaggaatgcatatacaacattggaattaaaagactaatgcatatgtgacaactctttatgtcttataacaccacaatagcagatcctcaacaccatggccaattcactgggccaatggttgaggaaataatacaggggcagactgaattttggccaattttttctcataacccaaacacaactggccaagttcatgaagacattaaaatacaacttcatacaagtcacttaccctttctgatttttcattttatctgataaatgagaataataataactaacttacagatggatacattttagttcatcatgtactaaagcatccatgagacatgatcatgatcagwggattaaatgagattctattcaaatctgtttgcactctggtaccacgtagtagctgtatgatacatgttaactctcttttctgccatgaaactcaccccgttggttaatccttctcctcaaaataacctccaatggtcattggacattaattacatgttaccattttgttttggtaataaatgggtcaaggctctgacaatatagatgttatgttatgcataaatacacagctgacatcctgactttgaaggc

SEQ ID NO: 342035 - DNA, 613 bp, Homo sapiens
aagttttcatgttaaggaatgcatatacaacattggaattaaaagactaatgcatatgtgacaactctttatgtcttataacaccacaatagcagatcctcaacaccatggccaattcactgggccaatggttgaggaaataatacaggggcagactgaattttggccaattttttctcataacccaaacacaactggccaagttcatgaagacattaaaatacaacttcatacaagtcacttaccctttctgatttttcattttatctgataaatgagaataataataactaacttacagatggatacattttagttcatcatgtactaaagcatccatgagacatgatcatgatcagaggattaaatgagattctattcaaatctgtttgcactctggtaccacgtagtagctgtatgatacatgttaactctcttttctgccatgaaactcaccccgttggttaatccttctcctcaaaataacctccaatggtcattggacattaattacatgttaccattttgttttggtaataaatgggtcaagsctctgacaatatagatgttatgttatgcataaatacacagctgacatcctgactttgaaggc

SEQ ID NO: 342036 - DNA, 659 bp, Homo sapiens
ggaacacatgcaacaagaatacccatagaaaactttcactctttattgattcggctctaaatctccatctaagtcttatgttgctgatccgagcttaactatggacaaaactcaaaggcctctacttggtacaaggtcagtrctggaagctgtgtcccctatattctggggtatttgttttgttttgttttttggcctaaggcaaacagaaggcagctatgtgcatctgccactggtagctttcctcctacttcattaccttacagcttcatgggaaaggggagaaagtgtagaaaccaaatagttccaaggtaagaggattgtgatcacatcttattctatttggaatcactttcatccaaaaaaagagccacaacaacaaagagtgacccatttttaaaaatgatggctccattttgtgaccttgagactacattttgtccttgtctcataagagagttctgtcttcctggggacaaagtatgtgcatattagaggagagagaggaagagcagagggttttaaatgccttatagagaataaggactttttatttggaaaatggaagcacaaataggcaagagatgattgaaatgagcaaaggtgaaccaacatttttagttttgacacagtctatgcagattttctggttaccagtg

SEQ ID NO: 342037 - DNA, 589 bp, Homo sapiens
ttaatatctattttatattattttagcactcctccatttaacttttaattttctcctttgagaaatgtctcataaaacagaggaaaccttttcttaaaataaaccatctttggattcttcctctttctggtgatgtcaatgtgacttaacacctctgagcctcacctataaaatggggataattttgacttctctcagaattggtrgtattaaattacataacaatatattaagtccttggaagggagctcaataaatatttactcaagttgtgatagatagagttatgggtcattttcgaaagcatctgctaggcagcctggggccaatggattgcttatcactgtctgtagtctaagcttcttgtcaagatgttcacggaagtggcatggcttgtcaaggtggcacagcaaaattggaatagatgagaactttaacctgtttctcttgccccatgctcactgcacttgctgttccttctatcacatcttgctatcatttgttaaagatgatggttttaaaatatcattacttctcattttaattaatatggcatcctatgggagatgttctaaataatttaatacat

SEQ ID NO: 342038 - DNA, 589 bp, Homo sapiens
ttaatatctattttatattattttagcactcctccatttaacttttaattttctcctttgagaaatgtctcataaaacagaggaaaccttttcttaaaataaaccatctttggattcttcctctttctggtgatgtcaatgtgacttaacacctctgagcctcacctataaaatggggataattttgacttctctcagaattggtagtattaaattacataacaatatattaagtccttggaagggagctcaataaatatttactcaarttgtgatagatagagttatgggtcattttcgaaagcatctgctaggcagcctggggccaatggattgcttatcactgtctgtagtctaagcttcttgtcaagatgttcacggaagtggcatggcttgtcaaggtggcacagcaaaattggaatagatgagaactttaacctgtttctcttgccccatgctcactgcacttgctgttccttctatcacatcttgctatcatttgttaaagatgatggttttaaaatatcattacttctcattttaattaatatggcatcctatgggagatgttctaaataatttaatacat

SEQ ID NO: 342039 - DNA, 529 bp, Homo sapiens
aaaacactatttcagctgggatttaggagacttggaatctactatatattctgacaaagattatatggttttytgcctcctggtttctgcatccttgtaagctcagtcttacatcaaacttattatggcctagattcttttacattttttttgcagacaaaggaaatatgaaaatgtgagagtgcagttctccatccttcacaattggcccaattttgccaaagatcaagtcaaaatggaaggaaattttccagcaatttcctcttatctgactctttaaacctgataaaggctgcatttcattagccaggttatttctggcagtgtttaaaaagggcttttggcagtgagtgtattgaagaaggtggcatacaagggaaggtgcagaggccaggcacagtggctcacgcctataatcccagcactttgggaggccgaggtgggagaatcatttgaagtcaggagtttgagaccagcctggccaacatgatgaaaccccatctctgccaaaaaatacaaaaattagcca

SEQ ID NO: 342040 - DNA, 581 bp, Homo sapiens
acaagggaaggtgcagaggccaggcacagtggctcacgcctataatcccagcactttgggaggccgaggtgggagaatcatttgaagtcaggagtttgagaccagcctggccaacatgatgaaaccccatctctgccaaaaaatacaaaaattagccaggagtggtggcgcatgcctgtagtctcatttactccaggaggctgagccaagagaatcacttgaacctgggaggtggaaatcacagtgagccgagatcctgccactgtgctccagcctgcaagactccgtctcaaaaaaaaggaagatactgsatggaggatggcaggagtccctgtttttcggtcatgccagattgttaatttgtttccacccactctgttgactgtaggcaggagaagggccatttttatgcgagataatccctttgcaaatgagcaggccatatttttatgtggcattgggttgaaggatgggactagggtgaggagaatgaggcacttgtcttgagtacaaacttttagggagctccaaaaatctctgagttaaaataaaaaccatttaaaaaattatttaaaaaatag

SEQ ID NO: 342041 - DNA, 210 bp, Homo sapiens
gtgagttaatgttagacgatgtgctaactgatatagaactttagaagagcaaagacaaatataggctgtcatattgagaagaccttctggataatatggaacttggaaaaattggaggcagacagggarccttaccaggccccagaaagtgcatgaaaaaaggatggaagataaaaatgaccacagccttgggagtgtaatgatatcccc

SEQ ID NO: 342042 - DNA, 567 bp, Homo sapiens
ggggccttccagtactcttataactctactttccggggaagtcatcaccacacagtgccacctcaaacttgtatcttccatttgcttcagagaactatttggttggcagtgagctgggcctggactttaaggaattmagctgggtatagcatgcttgatgatgtttgtaattagtatcaagaagctgcttcatatgaaataagtgaggctactcctcagcagacaggtgctacatttttggtaataaaggcaatttgcagggctacaattacttttttagtctgaagtaagacttttgtagcctgcataatgttgactcttcttttcccccttgagaggtggtcccatagatcacctcattcagtatattcttcaatgagaataaactaaaaatgaaacttcctaaaatccgaatctgaggtattcagacagaaattagaaacagtaatgagatgcaggcatctagttaacactttttaaggcaattttaaaaatttctccatgggaaagtcaatgattctttaaagcagggacatgaattctgatgtgtaaactaagacctaagta

SEQ ID NO: 342043 - DNA, 567 bp, Homo sapiens
ggggccttccagtactcttataactctactttccggggaagtcatcaccacacagtgccacctcaaacttgtatcttccatttgcttcagagaactatttggttggcagtgagctgggcctggactttaaggaattaagctgggtatagcatgcttgatgatgtttgtaattagtatcaagaagctgcttcatatgaaataagtgaggctactcctcagcagacaggtgctayatttttggtaataaaggcaatttgcagggctacaattacttttttagtctgaagtaagacttttgtagcctgcataatgttgactcttcttttcccccttgagaggtggtcccatagatcacctcattcagtatattcttcaatgagaataaactaaaaatgaaacttcctaaaatccgaatctgaggtattcagacagaaattagaaacagtaatgagatgcaggcatctagttaacactttttaaggcaattttaaaaatttctccatgggaaagtcaatgattctttaaagcagggacatgaattctgatgtgtaaactaagacctaagta

SEQ ID NO: 342044 - DNA, 615 bp, Homo sapiens
agctgggcctggactttaaggaattaagctgggtatagcatgcttgatgatgtttgtaattagtatcaagaagctgcttcatatgaaataagtgaggctactcctcagcagacaggtgctacatttttggtaataaaggcaatttgcagggctacaattacttttttagtctgaagtaagacttttgtagcctgcataatgttgactcttcttttcccccttgagaggtggtcccatagatcacctcattcagtatattcttcaatgagaataaactaaaaatgaaacttcctaaaatccgaatctgaggtattcagacagaaattagaaacagtaatgagatgcaggcatctagttaacactttttaaggcaattttaaaaatttctccatgggaaagtcaatgattctttaaagcagggacaygaattctgatgtgtaaactaagacctaagtaggtgttagcttcagtgtgtcaagtgtagaaaggccatgaatgaagtccaaatggaaaggttcatgtagtgatctttcagaatacctcctatttggggccagaagacacaggagtggtgatgaaaagcttgacatgagtggggcaaatatggagtagagg

SEQ ID NO: 342045 - DNA, 496 bp, Homo sapiens
aatgaagtccaaatggaaaggttcatgtagtgatctttcagaatacctcctatttggggccagaagacacaggagtggtgatgaaaagcttgacatgagtggggcaaatatggagtagagggaaggaaagcagaaagtgacttgctgttggctctgcagctatatggaatctagatatcacttgggacctytccttcactggagagttgtaaaaacatggctctccttgacatgtccgtgaattactatttgcaattccttatggcatcttccactctgatcccgtgtttgtgacatgttcaatgtaggcattgctcaaatctagcttgttattcaaccctgccctcttcccaacctcatggtttcttagagaaaataagcttatatttgagttctgtgggatcacagaggaagagagctcatttcattctacccaactcacaactctctgctgagtgcttgacccatccagtcccaattcatcctacctaccatc

SEQ ID NO: 342046 - DNA, 496 bp, Homo sapiens
aatgaagtccaaatggaaaggttcatgtagtgatctttcagaatacctcctatttggggccagaagacacaggagtggtgatgaaaagcttgacatgagtggggcaaatatggagtagagggaaggaaagcagaaagtgacttgctgttggctctgcagctatatggaatctagatatcacttgggacctctccttcactggagagttgtaaaaacatggctctccttgacatgtccrtgaattactatttgcaattccttatggcatcttccactctgatcccgtgtttgtgacatgttcaatgtaggcattgctcaaatctagcttgttattcaaccctgccctcttcccaacctcatggtttcttagagaaaataagcttatatttgagttctgtgggatcacagaggaagagagctcatttcattctacccaactcacaactctctgctgagtgcttgacccatccagtcccaattcatcctacctaccatc

SEQ ID NO: 342047 - DNA, 496 bp, Homo sapiens
aatgaagtccaaatggaaaggttcatgtagtgatctttcagaatacctcctatttggggccagaagacacaggagtggtgatgaaaagcttgacatgagtggggcaaatatggagtagagggaaggaaagcagaaagtgacttgctgttggctctgcagctatatggaatctagatatcacttgggacctctccttcactggagagttgtaaaaacatggctctccttgacatgtccgtgaattactatttgcaattccttatggcatcttccactctgatccygtgtttgtgacatgttcaatgtaggcattgctcaaatctagcttgttattcaaccctgccctcttcccaacctcatggtttcttagagaaaataagcttatatttgagttctgtgggatcacagaggaagagagctcatttcattctacccaactcacaactctctgctgagtgcttgacccatccagtcccaattcatcctacctaccatc

SEQ ID NO: 342048 - DNA, 496 bp, Homo sapiens
aatgaagtccaaatggaaaggttcatgtagtgatctttcagaatacctcctatttggggccagaagacacaggagtggtgatgaaaagcttgacatgagtggggcaaatatggagtagagggaaggaaagcagaaagtgacttgctgttggctctgcagctatatggaatctagatatcacttgggacctctccttcactggagagttgtaaaaacatggctctccttgacatgtccgtgaattactatttgcaattccttatggcatcttccactctgatcccgtgtttgtgacatgttcaatgtaggcattgctcaaatctagcttgttaytcaaccctgccctcttcccaacctcatggtttcttagagaaaataagcttatatttgagttctgtgggatcacagaggaagagagctcatttcattctacccaactcacaactctctgctgagtgcttgacccatccagtcccaattcatcctacctaccatc

SEQ ID NO: 342049 - DNA, 562 bp, Homo sapiens
gttttttaggatcagtaggtgttcgtgaggagaaaagcagaggaacaacatctccaagtggcaggaacagtggtttcatcctttacatgcattgcttccacttggtccataactcaactcttctctcttgcaaagattctctcaatcactcattctggagggaagatctgttccggtttttcttttcattcaaagatgcttgccttataagtctggtctctttagaacaccttagtccactgttaaataattttcaaccattaggcacatgtttgaaagtacttgtggcagggtgctgtgtgagacccttttaaatcttcttccaatcacatgactttgacttaaagggactgatcatctttcctttggtaccacagataccctggggaagaaatgcttataaactctcaaataattttaaatacttytaaacttttgcttacatactaagtgtgtaaggtacctgaagacatcttcattgcttctggatcaagctttatctgcagtttaacattacttctagattgctcagattactatttaagccaatttgagttgcatt

SEQ ID NO: 342050 - DNA, 527 bp, Homo sapiens
tgatgctcctgatgcctactcttctcaatgaactgcagctcaactgatggaaaacccttgggtacagtgagtaccttggttcttatgcaaagtgctaatatctcacaaaaccttaacagcttctatttcccatrgattatgtttcccttaagatttttgaagttatcatgccaatctcagggagacattttagattaaaatgggacatgtgacttggaatggttcaattaaagtcatctatggctattttcagaagcgagctaaatattaactgatactaatgcctaccattattcatcttttatgtcagaatcagactgaatacacaagggcatttgctattgatgaatggttttcccaaagaattttacaaaagaagagcataggttgtttctatacatatcacacagatggtgtattttctcttaaaataaagtggttgtcccctccaggctccgaatgcagtggcactgatcaatttctccactgttgatggagaggagcattcacttacagcagcagacaga

SEQ ID NO: 342051 - DNA, 448 bp, Homo sapiens
ttgcctcctgattcctctttctatatatctaaatctatattgatatctatgtctatatataaaatcacagcaaatagctatatgaagagccacgttagagtatatttaatttaggcaaagctaaaccctcaaaaaagattaaaattacaccaagattacttcacccccaaagctgrtatttttcttatgttttatatttttctttcaggatgaataaaaaagttgtgttttggagatatctccactgtttaggaagaaccagaaactaaatttattgcatacagaaaagtctgtatgttatagctaaatcacccaattttccatagagaagagaaatgtacgcattcatgaattggattaaagcatgtgcccagaatgtgatgcattttaatttattgtcttaagtaagatctttttatcttaaaatggttagtagattcttgttact

SEQ ID NO: 342052 - DNA, 662 bp, Homo sapiens
atagtgtaagttctcaagcttaattaacccaagtgttaattatcatgatgatgaaaaacatgtagacgtgtattatcctggcatggggcagcgttgcacagctgtggtttggtgatgtgacctatagagtcagaatgcttgaactgcaatcccctgctctaccacttgaagaaggtgtgaccacagatgagtttattaccctctctgaatttcatttctttcatctgtaaaatatgaattgtaatgtatctacttcagagtgttgytgtgaagagtaatcaaagaaggcatgaaaaatgcttagcatgatacctggcacatagtaaatccttaataactgttgttagctaaaagttatcattttcattattttaaagtgtgctgaatttatgcaacactaaagggtcccagagggcattttattacattgagtcttaaaaacaatgtacttcatttcattttgaaaaccaggcattaatcctttatgccattttttgttggtcttttagactccatgggatggtatccgagtggcttggaaaataatatttagttgtgttcacccacctttaaaagacatctcttttggtgaattccaggtacagcatgccacaccctaatctcctgaataaaaagctcagacattacctaggtttttcaag

SEQ ID NO: 342053 - DNA, 601 bp, Homo sapiens
tcacctactttctgtctccactgccacaactctggtctatgcctctagcttttgttcacctggaattagtgcaataaatacccggrctacttatatctaattttccccccactcttgacaattcattctgaatgctgctgccagttagctttcagaaatacaaagttgatcacacactcccatctcagcttgaagctcttcaaaggattgcagtggggtggagtggcgggttagaaggatgttgtttccaggaattcaagataagagaggtaggaacctagtgggttatgagtatgtagacgagagattattccagaaaactggacaaggttgatctggaagggccatatcagcatgaaggggtctggcctgaacattattgagaggggcatagggagttattaaatgtatctcaacaatgtgcataatatgtcgcttttatatgaaattttagaaacgtatgtgcagggagagagaagaggtctaaaagaaagcacagaataggaaagaatacttatttcttagtggctttggaataatttataatttctcctagtgtcttttaatattgctctcattttctacatgattttataccctc

SEQ ID NO: 342054 - DNA, 564 bp, Homo sapiens
cttagtggctttggaataatttataatttctcctagtgtcttttaatattgctctcattttctacatgattttataccctccaatttttaaacattgaagttatttttgttctgtaagcaaactaaaacaaaagcaaaagtcctgagctcttttttttttttttttttaccactccacaaggcaaattaaaatactgagttaattgggcccctctgctcttgtctcttattgtagctaaatctctggcccaatgaactgttttctaataggcttcccactgtctctggtttccaaatttcttgcctgaagaagtctttttgagtctcttactggcrgaaccatagcccctgctagctgagccgagccagctgtgagtatcattgaccgaatggtaagccgattgtaattacagtgtttttgttactctttgagaggaaagggacaagagccatcatttacaatcctggtcagagttttcagatctcccaacctcagaagtgatcattggagttgtaaacagagccaatctactgtgaaaattgctggaagggaattaataaagc

SEQ ID NO: 342055 - DNA, 503 bp, Homo sapiens
gttgaagaatgtcaaagatgacctccctgtctgctcagagcaatgcttgttatcttctcataattaattaattcctttggtggattactttccatgtaatggacattggaaagtccattacatggacattgctataaatttaccacaacctgtttcttccttrtggttgatagaataaggcctcccaaagatgtccaagaggatcacattctaattcctaggccctatgaataggtgaccttacatggtcaaaggatatttgcagaggtgattaagttaatgatcttgagatgggaagattatcagagattatctggtgggctgaatgtaatcacaagggtctttggaaagcaggaggctcaaagtaagaacagatgtgatgacagaggtcacagaaagagaagagattgaaggtgctacactgctggctttaaagatgaagtaatgagtcatgagccaataaatgtaggcagcctcttgaagctgggtaaggaaagaaaatg

SEQ ID NO: 342056 - DNA, 503 bp, Homo sapiens
gttgaagaatgtcaaagatgacctccctgtctgctcagagcaatgcttgttatcttctcataattaattaattcctttggtggattactttccatgtaatggacattggaaagtccattacatggacattgctataaatttaccacaacctgtttcttccttatggttgatagaataaggcctcccaaagatgtccaagakgatcacattctaattcctaggccctatgaataggtgaccttacatggtcaaaggatatttgcagaggtgattaagttaatgatcttgagatgggaagattatcagagattatctggtgggctgaatgtaatcacaagggtctttggaaagcaggaggctcaaagtaagaacagatgtgatgacagaggtcacagaaagagaagagattgaaggtgctacactgctggctttaaagatgaagtaatgagtcatgagccaataaatgtaggcagcctcttgaagctgggtaaggaaagaaaatg

SEQ ID NO: 342057 - DNA, 625 bp, Homo sapiens
attacatggacattgctataaatttaccacaacctgtttcttccttatggttgatagaataaggcctcccaaagatgtccaagaggatcacattctaattcctaggccctatgaataggtgaccttacatggtcaaaggatatttgcagaggtgattaagttaatgatcttgagatgggaagattatcagagattatctggtgggctgaatgtaatcacwagggtctttggaaagcaggaggctcaaagtaagaacagatgtgatgacagaggtcacagaaagagaagagattgaaggtgctacactgctggctttaaagatgaagtaatgagtcatgagccaataaatgtaggcagcctcttgaagctgggtaaggaaagaaaatggattgtcagctagagcctccagaagtaattcagcccagccaacactttggttgtaagacttctgagctgcagaacccaaagataatagcattgtgctagctgctaaatttgtggtaatttattatagcaacactggtatactaatacattcttcttcctactaatacattcttctaatatagttagactacattttccaacttgctttgcagctagatgtgaccatatgactgagttg

SEQ ID NO: 342058 - DNA, 576 bp, Homo sapiens
caagaggatcacattctaattcctaggccctatgaataggtgaccttacatggtcaaaggatatttgcagaggtgattaagttaatgatcttgagatgggaagattatcagagattatctggtgggctgaatgtaatcacaagggtctttggaaagcaggaggctcaaagtaagaacagatgtgatgacagaggtcacagaaagagaagagattgaaggtgctacactgctggctttaaagatgaagtaatgagtcatgagccaataaatgtaggcagcctcttgaagctgggtaaggaaagaaaatggattgtcagctagagcctccagaagtaattcagcccagccaacactttggttgtaagacttctgagctgcagaacccaaagataatagcattgtgctagctgctaaatttgtggtaatttattatagcaacactggtatactaatacattcttcttcctactaatacattcttctaatrtagttagactacattttccaacttgctttgcagctagatgtgaccatatgactgagttgtggtcaatggaacttggaagaagtgaaatg

SEQ ID NO: 342059 - DNA, 450 bp, Homo sapiens
agaggcaaattagataaaatgatgataataatatgcttttctggattgggctatatttattgttgccctggaggagaagccaaaagaatgccaagcttttcttctgtatgccacaaagcatgattagcttgactcttacctttagacaaataaaactgaatgcagatctatatagacaaaaaatactagcataaatgttattgttaggaagcttgattgtattagtctgttttcacattgctgtaaagaaatacccaagactgggtcatttataaaggaagaaggattaattgactcatagttctgaatcatagtagaaggagaagcagacaccttcttcacaagtcagcaggaaagagaagagtgaaggaggactttcaaacacctataaaccatcagatctcctgagaactctctcactwtgtcaagaacagcatgggagaaatcacc

SEQ ID NO: 342060 - DNA, 552 bp, Homo sapiens
ggtgaggcctccaaaagtttccaatcatggtgaaaggtgaagtgggagcaggtgtgtcactcacagaacgggagtaaaagagaggggaggaggtgccagcatcttttaaacaatcagctcttgtatgaactaatcgagtgagcactcactcatacccatgaggcaggcagcaagccattcatgaggatccaccctcatgacctaaacacctcccactagtccccacctccaacactggggaccacattccaacatgagattcggaggagacaaatatccaaaccattacatctactgatttaagtagaactctcatataaaaataccttcacagatatatctagaacaatatttgagcaaatatctgggtaccatggcctagccaaattgatacataaagttaaccatctccaagtgcttctgagagattcacccagaagactgctggtatttaggggsctctgaaccccttccttttttttttctctccatagcataggggtctggagtcttgcatctgactctaccaccttaacagaagagcccaagttt

SEQ ID NO: 342061 - DNA, 555 bp, Homo sapiens
aaatgctaaggccttagctcatcacacagggtccatgatacatggccctaggatatccccacagttatatctcctactctaacatattcttytcattaatcttgaggaacatttgacattctttcaacaaatatttattgaccaaaacaaaatccttgaccttagtgagttatattccatctacatagatatgaacatgcagttccatctctttgacatgactgagggctcttttcccttttccttcaatggtcaacttctgcaacaattccctctggcagagttcattaccgccacctcatttatcaggatacttagccctgtgttcttatagctctctcttaatggaaccattaaaatgatcattatatactgttccatgcttgctggttttctcatctgtctccagcaccttactctatgtgtgtatggagagtagagaaaatattttacttaagtcgctgccccatcacttggcatagggactgaaacatcatgggtcctcgataaatactttttgagcccacgaatgaaataagaccagaaacagcaatc

SEQ ID NO: 342062 - DNA, 555 bp, Homo sapiens
aaatgctaaggccttagctcatcacacagggtccatgatacatggccctaggatatccccacagttatatctcctactctaacatattcttttcattaatcttgaggaacatttgacattctttcaacaaatatttattgamcaaaacaaaatccttgaccttagtgagttatattccatctacatagatatgaacatgcagttccatctctttgacatgactgagggctcttttcccttttccttcaatggtcaacttctgcaacaattccctctggcagagttcattaccgccacctcatttatcaggatacttagccctgtgttcttatagctctctcttaatggaaccattaaaatgatcattatatactgttccatgcttgctggttttctcatctgtctccagcaccttactctatgtgtgtatggagagtagagaaaatattttacttaagtcgctgccccatcacttggcatagggactgaaacatcatgggtcctcgataaatactttttgagcccacgaatgaaataagaccagaaacagcaatc

SEQ ID NO: 342063 - DNA, 555 bp, Homo sapiens
aaatgctaaggccttagctcatcacacagggtccatgatacatggccctaggatatccccacagttatatctcctactctaacatattcttttcattaatcttgaggaacatttgacattctttcaacaaatatttattgaccaaaacaaaatccttgaccttagtgagttatattccatctacatagatatgaacatgcagttycatctctttgacatgactgagggctcttttcccttttccttcaatggtcaacttctgcaacaattccctctggcagagttcattaccgccacctcatttatcaggatacttagccctgtgttcttatagctctctcttaatggaaccattaaaatgatcattatatactgttccatgcttgctggttttctcatctgtctccagcaccttactctatgtgtgtatggagagtagagaaaatattttacttaagtcgctgccccatcacttggcatagggactgaaacatcatgggtcctcgataaatactttttgagcccacgaatgaaataagaccagaaacagcaatc

SEQ ID NO: 342064 - DNA, 555 bp, Homo sapiens
gggactgaaacatcatgggtcctcgataaatactttttgagcccacgaatgaaataagaccagaaacagcaatcctgagttttgtttagttcatgtttcatcaataaaacctaatttcatattttaaaaggcgaagtaagtcatttcctcccactgtttggcaaaaatgacatttcccaggcccatttgagaaggttactgaaaaagcgtaggagaggttttaaaatgtttttaaaaaccatattccacacaaaaggcatctctaaagaagwttaaataagcatctacctaagaacatctgacaatggtatatttatgtgggagtatccagggttcccaaggattccagccaagaaaaataacagcttatgtccttgtctcaattttgtcattttaataaaaagttttgcttttaaattcattctgtagcatgttgcataaacagcagagtgagcagatgtgctctccttttagccaactgatttatacagagtctgattcattgaaaaaattcatacggggctttcttcactttatggaaaggcttacctacca

SEQ ID NO: 342065 - DNA, 528 bp, Homo sapiens
aaagtctacactcttgttttactcaagattcttcagcttgacaatggtagaaatccatctaaaactggtttaatttggctaaagggattgaaaagtctatggcatcagtcttcaggcatgattagttccagatgttcagacartgttgccagaaatctgtacatcttcttgacacagcaaagaaaacaatcaacaaagtgaaaaggcaacttaagaagtgggagaaaatattttaaagccatgtatttgattaagggctaatctccataatagataaggaacttctacagctcactagtaaaaatactaatgacccattttaaaaatggactaaggacttgaacagacatttctattcgtatgccaaaaaagacatacaaatggccaacagatgtatgaaaaaaaaatgttcaacatcactaatcatcagggaaatgcaaaccaaatccacaatgagatattacctcatacctgacatgatggcaattatcaaaaaataagaccacaagcattggcaaggatgtgaag

SEQ ID NO: 342066 - DNA, 600 bp, Homo sapiens
tcactcatggaaagacacatactgcatgattctacctatatgaggtatctaaactagtcaagtttgcagaatcaaagagtagaatggtgattgctgggggctgagcagaagsggaaatggggcattactaatcaactgacataaaatttcagtcaagcaagataaatgagcactagagatctgctatgtgacattgtacctttaggcaacaataatgtattgtacacttaagaatgtgttaagaggatagatctcattttaaatgtccttaacacaatgaaaagaaatctgtgtttacttatctaagtgtcctgtttttctcgtggttgattttattcacagatgggttttcctaatgtggtggcaagaattaccatcaggagctcccagcttgcattctactggcttggggacccttatggaataagagtacttctgtcctctggggttctttatgattctagaaagagttttaaataaggccttgtattggtttcccaatgctgctgtaacaaattacgacaaacttaatggcttaaaatagactaagtttattataactctggaagtcagaaaaattcaaaatgggtcagcagagct

SEQ ID NO: 342067 - DNA, 600 bp, Homo sapiens
tcactcatggaaagacacatactgcatgattctacctatatgaggtatctaaactagtcaagtttgcagaatcaaagagtagaatggtgattgctgggggctgagcagaagcggaaatggggcattactaatcaactgacataaaatttcagtcaagcaagataaatgagcactagagatctgctatgtgacattgtacctttaggcaacaataatgtattgtacacttaagaatgtgttaagaggatagatctcattttaaatgtycttaacacaatgaaaagaaatctgtgtttacttatctaagtgtcctgtttttctcgtggttgattttattcacagatgggttttcctaatgtggtggcaagaattaccatcaggagctcccagcttgcattctactggcttggggacccttatggaataagagtacttctgtcctctggggttctttatgattctagaaagagttttaaataaggccttgtattggtttcccaatgctgctgtaacaaattacgacaaacttaatggcttaaaatagactaagtttattataactctggaagtcagaaaaattcaaaatgggtcagcagagct

SEQ ID NO: 342068 - DNA, 600 bp, Homo sapiens
tcactcatggaaagacacatactgcatgattctacctatatgaggtatctaaactagtcaagtttgcagaatcaaagagtagaatggtgattgctgggggctgagcagaagcggaaatggggcattactaatcaactgacataaaatttcagtcaagcaagataaatgagcactagagatctgctatgtgacattgtacctttaggcaacaataatgtattgtacacttaagaatgtgttaagaggatagatctcattttaaatgtccttaacacaatgaaaagaaatctgtgtttacttatctaagtgtcctgtttttctcgtggttgattttattcacagatgggttttcctaatgtggtggcaagaattaccatcaggagctcccagcttgcattctactggcttggggacccttatggaataagagtacttctgtcctctggggttctttatgattctagaaagagttttaaataaggccttgtattggtttcccaatgctgctgtaacaaattacsacaaacttaatggcttaaaatagactaagtttattataactctggaagtcagaaaaattcaaaatgggtcagcagagct

SEQ ID NO: 342069 - DNA, 606 bp, Homo sapiens
taaattgtagtttaacacttcagagctgtttgactttggatgagttaccaaatttctcctagcctcagatactttgtttttaaaaacagggataaaaatatctataaagcatggctatcatgttgactacaaaaaatcaagtatataaaatttctagaaaatgagtggcccttagctgctatgcaataaatgaaaggttctttctcctttccatttcttttctgtgataatctgtatttaaaaccccacaaggtgaacttatcaaatccaattctcaagagctctgttaaactgagatcaggatgattttccatctggcatgtaacatgaccatttggagatgctcacttctaatggacagatttgagaaaccacaattaaaatgagagaagctcattcttcatatatctacctggcgagaagggatcaaaggcaatgactggcaccagtcgctgctagagaatttaggagaagagagagtgagaggcaaatgaccttaggaagctgggagaaagactccacggtactctccatgcaggcttctctgggagcagatmacatacttctatgatctttttaaagtcccttccaatcctaccaggtcat

SEQ ID NO: 342070 - DNA, 551 bp, Homo sapiens
tttcacaaataagataatccattccaggctgcttcttccaaaataatctttgtcttcactaatgggagcttattttcccaatggtcaattgtattattcaagtaaaagtacttgtaaagcaaaaatctctgaaaagttttgtaagcatagttatatccttgttcagatgcaggaaagttaaatttccacatattcactttgaaattctccatatacatagagctgagaggtgtgtcataggttaataattctcctgcctgaattctatgtgtagatttttagttaacagcaccttaagcgcttttttttttttttttwaaaaagagcctttaagttcggttgccatgaatcatgtataagccattggaggagaaaattaattcttttgtttgtttctttattttaaaataaataccaggctatggcacccgtttgtgatcagaattgagaagaagcactcttcctgccagcttgtgggaatgctgtgtcccccaaggccaacagtatatgctgccaatgagtgaaaagaactaagactcaagtctgcacag

SEQ ID NO: 342071 - DNA, 520 bp, Homo sapiens
ttgagtttgacttcctgcctcctgacctaatggtaattttaaatctcacatcacttggccagttcactggaatgtctgaatatttactacaagcatttaattgccccaaacaatgaattaactatcaaaatgccgagtctggcagacacagcctattttttgtaaatgacattttcaccaccattgctttaaaaggctcagcagctgacatcccttgggcgcaactggcctgttgtttygaaaactatcagctcctctcaagattctacataatctacagctcattcatacttccctctaaagaaatagttactttagtttttgatagttcttcctatcttacaaaacctattgatgtatgtcatttcattctatcatcacatcctttaaaattagttctgcatcatcatctatggagatggcacctccaaggactgtgtattgtatcacaagtatgcatcattgctctgcaacaccaggaaccacagatttacatggagtcttgtgttgagatggcaat

SEQ ID NO: 342072 - DNA, 417 bp, Homo sapiens
tctttagcaaatggtcgattggccaaacccttaatattctctcctgaacacacctttttattctgtacatggccgtgctgagaattttccaaatcttttctttctgcttcccttttaattataaattccttctttaaactatttttcttttttattcattttactgtaagcagccaaaagaagtcatgtggcactttgaatgcttcaatgcttagatatttcttctgtcaggtaccrtagttcattgttctgggagtcagatgcgctaccactgggccacaagatcacatagttcattatccttaagttctgtcttccacaaagtcctaaaacacggacataaattccaccaatttctttgcaactgtataacaaggaaggtctttgctccattttccaataccttgttccttactt

SEQ ID NO: 342073 - DNA, 417 bp, Homo sapiens
tctttagcaaatggtcgattggccaaacccttaatattctctcctgaacacacctttttattctgtacatggccgtgctgagaattttccaaatcttttctttctgcttcccttttaattataaattccttctttaaactatttttcttttttattcattttactgtaagcagccaaaagaagtcatgtggcactttgaatgcttcaatgcttagatatttcttctgtcaggtaccgtagttcattgttctgggagtcagatgygctaccactgggccacaagatcacatagttcattatccttaagttctgtcttccacaaagtcctaaaacacggacataaattccaccaatttctttgcaactgtataacaaggaaggtctttgctccattttccaataccttgttccttactt

SEQ ID NO: 342074 - DNA, 517 bp, Homo sapiens
ccactcatttaagatttaattcaagtgtcacttttttttataaattcttcyataggttctccagcagaattatttctaccccattctgtgtttcctcacaattatggattatgattatttctttgtgttctgaaagtaatctgaccctttcattcacttatcccttgaagtcagggattgtattcttcatgtatatgtattcatttccaaaataatgcctgatacatactggaaacaccacaaatatttatttttaaataaatgttattttatatagaaatccactgaatcaacaatttccattaaattgacattatttattcttacatttaggtataatctggtttaactaatttttctttttctttcttttttttttgtttttgtttgaggcaaagtctcaatctgtggcccaggctggagtgcagtggtgcaatcttggctcactacaacctccacctccagggttcaagcgattctcctccctctgcctcccgagtagctgggacaacagggg

SEQ ID NO: 342075 - DNA, 517 bp, Homo sapiens
ccactcatttaagatttaattcaagtgtcacttttttttataaattcttccataggttctccagcagaattatttctaccccattctgtgtttcctcacaattatggattatgattatttctttgtgttctgaaagtaatctgaccctttcattcacttatcccttgaagtcagggattgtattcttcatgtatatgtattcatttccaaaataatgcctgatacatactggaaacaccacaaatatttatttttaaataaatgttattttatatagaaatccactgaatcaacaatttccattaaattgacattatttattcttacatttaggtataatctggtttaactaatttttctttttctttcttttttttttgtttttgtttgaggcaaagtctcaatctgtggcccaggctggagtrcagtggtgcaatcttggctcactacaacctccacctccagggttcaagcgattctcctccctctgcctcccgagtagctgggacaacagggg

SEQ ID NO: 342076 - DNA, 588 bp, Homo sapiens
gtgttacaccaaatttcatgctgaacttctaatacccaatacctaataatgtgactatgtttataaatagggtctttaaagaggtaactaagttaaaatgaagtcagtartgtaggcccttatcgaatatgatttatgtccttgtaagaagaggaattttgtacagatattgacacagattctaacttgaccaaacttcagtcaggctccctaaccttctcctaggcccatctgtgcacctccttgtaaaatctgctttatccaaaaactcatttagtaagaacccctctcccccagtagctgatcaaccgtgacatctgatcaagttcctcatcctccactatcccacaggtaataaatcaccttgttctgtttttagcaagaatcctgtgaagttggtttagctgaaatcttcctcacccctgatgtttccttttagtaattttccatccattgacccccaccctgctccttggctataaattcccacttgcccatgctgtgtttggaattaagtccaatctttctcccaggctgcaaaatctcattgtggtgttacctatacctattgcaatggtcctgaataaa

SEQ ID NO: 342077 - DNA, 588 bp, Homo sapiens
gtgttacaccaaatttcatgctgaacttctaatacccaatacctaataatgtgactatgtttataaatagggtctttaaagaggtaactaagttaaaatgaagtcagtaakgtaggcccttatcgaatatgatttatgtccttgtaagaagaggaattttgtacagatattgacacagattctaacttgaccaaacttcagtcaggctccctaaccttctcctaggcccatctgtgcacctccttgtaaaatctgctttatccaaaaactcatttagtaagaacccctctcccccagtagctgatcaaccgtgacatctgatcaagttcctcatcctccactatcccacaggtaataaatcaccttgttctgtttttagcaagaatcctgtgaagttggtttagctgaaatcttcctcacccctgatgtttccttttagtaattttccatccattgacccccaccctgctccttggctataaattcccacttgcccatgctgtgtttggaattaagtccaatctttctcccaggctgcaaaatctcattgtggtgttacctatacctattgcaatggtcctgaataaa

SEQ ID NO: 342078 - DNA, 588 bp, Homo sapiens
gtgttacaccaaatttcatgctgaacttctaatacccaatacctaataatgtgactatgtttataaatagggtctttaaagaggtaactaagttaaaatgaagtcagtaatgtaggcccttatcgaatatgatttatgtccttgtaagaagaggaattttgtacagatattgacacagattctaacttgaccaaacttcagtcaggctccctaaccttctcctaggcccatctgtgcacctccttgtaaaatctgctttatccaaaaactcatttagtaagaacccctctcccycagtagctgatcaaccgtgacatctgatcaagttcctcatcctccactatcccacaggtaataaatcaccttgttctgtttttagcaagaatcctgtgaagttggtttagctgaaatcttcctcacccctgatgtttccttttagtaattttccatccattgacccccaccctgctccttggctataaattcccacttgcccatgctgtgtttggaattaagtccaatctttctcccaggctgcaaaatctcattgtggtgttacctatacctattgcaatggtcctgaataaa

SEQ ID NO: 342079 - DNA, 504 bp, Homo sapiens
tggaacatccatggtaaggcacctgcttaggttatttctggttttatttctcagggggtcttggaggcaacattctcccttgctgaacttagtacggtgtaacgtttatacgaagtgggtaatcgtagatgaaaccaagctgttacatttgcttaccgaagacatcgtagagcataaaccaaattagaacatagtattcacctgcctaatcataggcatcgcatcaatagcttggctgactttcttaaaaacatgttgatggtaggaaaagagaactgagtagatgttataaatagttaagtacaaatctatcactacttcttgcaaaaatgctctggctgccatactgataatgaatagatagctcgttctttccaaactgagtgcagtagagtgytgcagtgctcagttgggtaggacagttgttggataatcggaattatacatatctccatggttaccctcaaataatattacctctaaataaaatctctatacttgctt

SEQ ID NO: 342080 - DNA, 570 bp, Homo sapiens
ctgttataatcaagacttatgtcttgattacatctttgcacacttgtgtgataattcccatggagtaaattcttggaagtaagaatacaaagttggcasccactttactattttaatatatacaataattttaagctatcttctaaatagtttatactaatttatacactcaccacaaaaattaaaaaaacatgagttcttatatatctacactgtcactaataatattagaatgtattatttagcatttttaaaaataaaattagtttttatttgcacttacaagtgaaagcatcttttctcccaacattttatttacaacatacaacaaagtttgaattcattttacagcaaacactaatgcacaccatcttgattctaccattaacattttactatagtaacaatataactatccttctatctgtacctttacccatccatttaattcatcttttaaaatgcattttaaaggaatttacaggaatccatacactttacccaaattgcagttgaccattgaaaacacaggtttgaaatgtttgaaatgtgcaggttgacttatatgtg

SEQ ID NO: 342081 - DNA, 570 bp, Homo sapiens
aaaactcagatgaaccacttagcctagagataacaaaaaaattaagaaaaagttatgtcatgagcrtataacatataacaaaatataaaaagttatttatcaaaactgacacaagcaaacacacaccatacatggtgcaatttgaagttcagaaaaatataaacaaatgtaaaggcagtattaaactacacaaaattaactgtagtacatacttgactcagctgagtgaccagaggccttgtgggtgtatctgggcaaggggttaggggggttgaacccctgtgcagcagccctacagggaaacacccaacaaaaattattttttaaaaaggctcatccaggaaatgcatataagggctggtcacctggcgttttgagtcctctcacaggtcatagacctctggagagagaaactgaaacacttaagagggtgaaaatgactcaatggtaacacactgtggagtcttgagtgcaagcagcacacatcaccacacaaaaacgctaggccacagctcagttattttaagaaaaaaaatgagaaaataataatctaagaatgaggagaaaaca

SEQ ID NO: 342082 - DNA, 570 bp, Homo sapiens
aaaactcagatgaaccacttagcctagagataacaaaaaaattaagaaaaagttatgtcatgagcatataacatataacaaaatataaaaagttatttatcaaaactgacacaagcaaacacacaccatacatggtgcaatttgaagttcagaaaaatataaacaaatgtaaaggcagtattaaactacacaaaattaactgtagtacatacttgactcagctgagtgaccagaggccttgtgggtgtatctgggcaaggggttaggggggttgaacccctgtgcagcagccctacagggaaacacccaacaaaaattattttttaaaaaggctcatccaggaaatgcatataagggctggtcacctggcgttttgagtcctctcacaggtcrtagacctctggagagagaaactgaaacacttaagagggtgaaaatgactcaatggtaacacactgtggagtcttgagtgcaagcagcacacatcaccacacaaaaacgctaggccacagctcagttattttaagaaaaaaaatgagaaaataataatctaagaatgaggagaaaaca

SEQ ID NO: 342083 - DNA, 555 bp, Homo sapiens
ctctacgactattttataatagactatgttagacaccaaaactctacctggaccctaacttgcacaaccaggaaatagaatgatgaagctgtgtatcccccaaagccatcttctctaatgcccacctcagctgtgatcatcaaggaaagagagctagtgtagtggaagctatggatgcaccattcagatcctcttcaggactgaagaatttatttccccaarctgtggggagtgttcctggctaagagccctcagccttcagtcttgtatgggaattttccactgctgaagagaagttctttacccaaaagcaaatcccctttcctggagacagcctgcatccaattactggtcattgcaggtatataaagtcccaacctccttggccaaactcaaaactataaaggatcaactcagcttcagaccttcttctgctttgctgaggcctttgctgagactgtatcacatcctgatgtctccctttactctctgctgaattcggttctcttttctgcctccacgcttaatgattcccagtgcacaccctaataaact

SEQ ID NO: 342084 - DNA, 555 bp, Homo sapiens
ctctacgactattttataatagactatgttagacaccaaaactctacctggaccctaacttgcacaaccaggaaatagaatgatgaagctgtgtatcccccaaagccatcttctctaatgcccacctcagctgtgatcatcaaggaaagagagctagtgtagtggaagctatggatgcaccattcagatcctcttcaggactgaagaatttatttccccaaactgtggggagtgttcctggctaagagccctcagccttcagtcttgtatgggaattttccactgctgaagagaagttctttacccaaaagcaaatcccctttcctggagacagcctgcatccaattactggtcattgcaggtatataaagtcccaacctccttggccaaactcaaaactataaaggatcaactcagcttcagaccttcttctgctttgctgaggcctttgctgagactgtatcacatcctgatgtctccctttacyctctgctgaattcggttctcttttctgcctccacgcttaatgattcccagtgcacaccctaataaact

SEQ ID NO: 342085 - DNA, 562 bp, Homo sapiens
gagcttcctgtggctgctgtaacaaagtaccatgaacaaggttgtttattgtcttgtaggtctgtaatatagaagtctgaaatcaaggtgtcagcagcaccatgctctcttgaaatctttagaagaggatccttccttgcctcttcctagcttctggtggtccgcaggcaawctttggtgttccttggtttgtatatgcatcgctctagtcctccatcttcacacgaagttcttcttgtgcctctgtgtcttcacatggcatcctttttataaggatgtcagtcatattggatagcaccctactccagcataataccatcttaacttaattacatctgcgatgacctgtctccaaatcaggtcacattctgaggaacccagggtttggacttcaacatatgttttttggaggaagcagtttgatctctaacgccatgttaaaatcaatggactgtagatcctggtaatgttaagcagtttatcaaccttggcattattgacctgttgcactgaataattctttgcactgaattatgttttgtactggaaaattcaggaggtc

SEQ ID NO: 342086 - DNA, 621 bp, Homo sapiens
ttacctccttttcaatacccatcactgcatcccctctccccacacaaaagtctgttaactggtttccctaactccagttctgcatgttcctcgtccatcatctatgctacagataaaatgacctttcaaaaatatacatctgatcaccaccccttcccaccccggtggaagatgctgtcaatggggcaaaaccacagctattttcaactcttttttcttaatgctactaactaaagaatgtagttgkgttctcacaactcccttgcacctagtaacaactatagtgctcattttgggccacaagctataagaaattctgttgagtggcttctgagaaagttttactttttaaataaaagaatccatgtgctaaaccttcctaacacgagccagtgctagttctgaaagagatagctaagcgtattattcttttgctctgaaacactctaatggaaatagcatgattgcatttctccctgggattgcaatccgtttgcaagtgccctttccttccactatgatctctcattgtttccaattattgccttttaacacacacatttccccctaccatagctaattttttttctcagtaggtgtaccatttacccacatagttgg

SEQ ID NO: 342087 - DNA, 621 bp, Homo sapiens
ttacctccttttcaatacccatcactgcatcccctctccccacacaaaagtctgttaactggtttccctaactccagttctgcatgttcctcgtccatcatctatgctacagataaaatgacctttcaaaaatatacatctgatcaccaccccttcccaccccggtggaagatgctgtcaatggggcaaaaccacagctattttcaactcttttttcttaatgctactaactaaagaatgtagttgtgttctcacaactcccttgcacctagtaacaactatagtgctcattttgggccacaagctataagaaattctgttgagtggcttctgagaaagttttactttttaaataaaagaatccatgtgctaaaccttcctaacacgagccagtgctagttctgaaagagatagctaagygtattattcttttgctctgaaacactctaatggaaatagcatgattgcatttctccctgggattgcaatccgtttgcaagtgccctttccttccactatgatctctcattgtttccaattattgccttttaacacacacatttccccctaccatagctaattttttttctcagtaggtgtaccatttacccacatagttgg

SEQ ID NO: 342088 - DNA, 620 bp, Homo sapiens
tgagttaagataagcaccctttctttctttctttctttttttttttttctcctaagcatgattggggatagataggaatgagagatgaagaaagcaatgaagaaagagcaaattgatcatttactttaaaaagttctgaccactggcttgatgagaagcatctttaattttaaatattttgcatctacttaactgcctaattgcatggttaaatgagctgtaggagaaagatcgcagctaaaacctttgatcaatttcagccagttctagaacactgatggtaacaccaggctgtgtttctcctctggtaattttgaacttcttcagagagccctgtttattaagcaaggcagactttctgcttgggcagcattttccaattacagagccttccctgcagtatctagagatggaatcagggaccacaaacgtgttccgggcaatgccgggcagcccaaagtcagcaagtccratgctcagcctcaccttctcagtgtgctgcagcctagtgttgtttccgagtgcattttgacatgtgttctgtgtggtgaataggtgggagcaggctgtctgcaataattggccagccgggattgcctgggtgaagctcctggaactcg

SEQ ID NO: 342089 - DNA, 620 bp, Homo sapiens
tgagttaagataagcaccctttctttctttctttctttttttttttttctcctaagcatgattggggatagataggaatgagagatgaagaaagcaatgaagaaagagcaaattgatcatttactttaaaaagttctgaccactggcttgatgagaagcatctttaattttaaatattttgcatctacttaactgcctaattgcatggttaaatgagctgtaggagaaagatcgcagctaaaacctttgatcaatttcagccagttctagaacactgatggtaacaccaggctgtgtttctcctctggtaattttgaacttcttcagagagccctgtttattaagcaaggcagactttctgcttgggcagcattttccaattacagagccttccctgcagtatctagagatggaatcagggaccacaaacgtgttccgggcaatgccgggcagcccaaagtcagcaagtccaatgctcagcctcaccttctcagtgtgctgcagcctagtgttgtttccgagtgcattttgacatgtgttctgtgtggtgaataggtgggagcaggctgtctgcaataattkgccagccgggattgcctgggtgaagctcctggaactcg

SEQ ID NO: 342090 - DNA, 620 bp, Homo sapiens
tgagttaagataagcaccctttctttctttctttctttttttttttttctcctaagcatgattggggatagataggaatgagagatgaagaaagcaatgaagaaagagcaaattgatcatttactttaaaaagttctgaccactggcttgatgagaagcatctttaattttaaatattttgcatctacttaactgcctaattgcatggttaaatgagctgtaggagaaagatcgcagctaaaacctttgatcaatttcagccagttctagaacactgatggtaacaccaggctgtgtttctcctctggtaattttgaacttcttcagagagccctgtttattaagcaaggcagactttctgcttgggcagcattttccaattacagagccttccctgcagtatctagagatggaatcagggaccacaaacgtgttccgggcaatgccgggcagcccaaagtcagcaagtccaatgctcagcctcaccttctcagtgtgctgcagcctagtgttgtttccgagtgcattttgacatgtgttctgtgtggtgaataggtgggagcaggctgtctgcaataattggcyagccgggattgcctgggtgaagctcctggaactcg

SEQ ID NO: 342091 - DNA, 572 bp, Homo sapiens
tgtttaattaaaaggagtggcttaactttagattagatcattgtaatcttgggaatctagccggattttaacacaatgttatttttatttgtggatagatatttctaaggagctcctgatatctttatagcctctccagaacccattctaattctaaaaacattaaattcactcttagaataccgaagctgaaggtaattcttagagataatctattcttgtgcstttattctacagatgtggaaactgaggcctaaggatttaaaaaaatcatcaaagatcacacaaaagattgtcaaaggtcaaatacaacttatccctattttcccaggactttctcagtttgaaaactgaggcagggcatggtggcacatgcctataatcccagcactttgggagactgaggcaggaggttcccttgagccgtggagttcaagaccagcctggacaatacagtaagacattgtcttcacaaaaaattaaaaaattggctgggtgtggcagtgcacacctatggtcccagctacttaggagactgaggcagggggatcacgtgagcctgggaggtcaaa

SEQ ID NO: 342092 - DNA, 572 bp, Homo sapiens
tgtttaattaaaaggagtggcttaactttagattagatcattgtaatcttgggaatctagccggattttaacacaatgttatttttatttgtggatagatatttctaaggagctcctgatatctttatagcctctccagaacccattctaattctaaaaacattaaattcactcttagaataccgaagctgaaggtaattcttagagataatctattcttgtgcctttattctacagatgtggaaactgaggcctaaggatttaaaaaaatcatcaaagatcacacaaaagattgtcaaaggtcaaatacaacttatccctattttcccaggactttctcagtttgaaaactgaggcagggcatggtggcacatgcctataatcccagcactttgggagactgaggcaggaggwtcccttgagccgtggagttcaagaccagcctggacaatacagtaagacattgtcttcacaaaaaattaaaaaattggctgggtgtggcagtgcacacctatggtcccagctacttaggagactgaggcagggggatcacgtgagcctgggaggtcaaa

SEQ ID NO: 342093 - DNA, 525 bp, Homo sapiens
ctgatggttaatgctgaaagcattcaactgcagctgtaattactgacaagcaaactatgaaccagaattaggattattagtaattacttcctatgaatcagggcatgatgggttcatgggtttctgtcaactgttttgcttgaggcagacggatatctagagtgtcaaacttaaaaaagttcagcacaaaggaatagattagggaagaaattgcctcaatgagctacatgaaaatgtaaaattaggtctgtctaaagacagttggttgctaactttgcttcttatcatgaaggttatgctgagtaaaccagaaactcagggtcataaaactttgttaggatcaactttagagttaatttatttyagtcattttacttaggaaactgaagcccagactaggcaagaaagttgcccatggttacacagctggtcagtgataacactgagacaaagtggtagtcattctaggttgcaggtgcaggccttatctaaaatggtttatccaattgtaatttgttgactgta

SEQ ID NO: 342094 - DNA, 613 bp, Homo sapiens
gaaatgccaggttctcctattgaaaacacttcaggaaagatttctagatctcgaaaactgaccacaaacctgagtggtgtttagaaataggaaacttgtgttgaactgcatggagctttgggctttcaaaatgccagtcactttgtacttctgtctttttcatctcaaatgaaagggtttcatcaaaccattgttcatgtcttgccatgytgataatgtgaacaggttcacagagaagtacttgaggcaagacttgttctcaggaacatgacttgccattgcccacaagaacaaatataacacaataaattagacaaatggaaactaaattaaatgatggcaagggaaaatatagacatgtcaggcaggtaagatcaggggataaaattaagcgaagatataaaagtgatatgatttagaggaaataatgctgagctgaaaatagagctgtgaggttctgatggccaaggatttacctatttgtataaattaatttgattacaacattcatgttgtctatgagaagaggaaaaaatgcatactaatttcttagaagaaatgatgtttcttcctggaactttataccagagctgttcaatagaaatacaatttg

SEQ ID NO: 342095 - DNA, 613 bp, Homo sapiens
gaaatgccaggttctcctattgaaaacacttcaggaaagatttctagatctcgaaaactgaccacaaacctgagtggtgtttagaaataggaaacttgtgttgaactgcatggagctttgggctttcaaaatgccagtcactttgtacttctgtctttttcatctcaaatgaaagggtttcatcaaaccattgttcatgtcttgccatgctgataatgtgaacaggttcacagagaagyacttgaggcaagacttgttctcaggaacatgacttgccattgcccacaagaacaaatataacacaataaattagacaaatggaaactaaattaaatgatggcaagggaaaatatagacatgtcaggcaggtaagatcaggggataaaattaagcgaagatataaaagtgatatgatttagaggaaataatgctgagctgaaaatagagctgtgaggttctgatggccaaggatttacctatttgtataaattaatttgattacaacattcatgttgtctatgagaagaggaaaaaatgcatactaatttcttagaagaaatgatgtttcttcctggaactttataccagagctgttcaatagaaatacaatttg

SEQ ID NO: 342096 - DNA, 613 bp, Homo sapiens
gaaatgccaggttctcctattgaaaacacttcaggaaagatttctagatctcgaaaactgaccacaaacctgagtggtgtttagaaataggaaacttgtgttgaactgcatggagctttgggctttcaaaatgccagtcactttgtacttctgtctttttcatctcaaatgaaagggtttcatcaaaccattgttcatgtcttgccatgctgataatgtgaacaggttcacagagaagtacttgaggcaagacttgttctcaggaacatgacttgccattgcccacaagaacaaatataacacaataaattagacaaatggaaactaaattaaatgatggcaagggaaaatatagacatgtcaggcaggtaagatcaggggataaaattaagcgaagatataaaagtgatatgatttagaggaaataatgctgagctgaaaatagagctgtgaggttctgatggccaaggatttayctatttgtataaattaatttgattacaacattcatgttgtctatgagaagaggaaaaaatgcatactaatttcttagaagaaatgatgtttcttcctggaactttataccagagctgttcaatagaaatacaatttg

SEQ ID NO: 342097 - DNA, 548 bp, Homo sapiens
atttctgttaagtaattagttttgaaatgttgcccagactggtattattatatgctcttcaaagggggattggaaaggctgtgattgttcttgtttattactccaggaaaactaaagcatcatcaacaggatgtttgtggtggcactggctgtgtcaagatctggaccacactaagccacaaaaaaaaaaatcttaacccaggctttgtggcgtgttcctaataggctcttttcaatacagcaagagtactcattttctagcattctctggaaatgcaaagagattccagagcagagaccttgccctyaaaaagctcaatttagagaaataagcaaggatgatgaacagtatctatataaaataataagccactggatcacagctttgttttacagtttcccacactgggtgcattaattatttttccccctcatcgtaggtagtcactttttgaccaacaaaaacattcagaattaattaatgttgctacgtgctttctatgtgtcaaggactatgcaagatgctttaaaatgtttatatgttattt

SEQ ID NO: 342098 - DNA, 595 bp, Homo sapiens
gggatattaaacgtctttagacgagaattaacagaaaaagaacttctaaaattagagaactctacatctgtatggcaggaggaaggagaagagataactagccagagctatgtgtgatgatgcaattctgtggttaatttctactttcctagtcccagccctttccttaggctcatccctctattaaagtcccctttcttctacccattaaaaaatgttaaacctaaatgccaccttctccatgaagcatctcctggtcactgcagccagaggggatcgctcttctctaagaatcactctgtttttattttatttctcacagagacttagaaaagactaagctcytataacaacaacaacaaaaaagactcagaaatattgtgacaggaacaagatgaaagtttatggctttctgtgtaagattcctgaaatgaggaatccagattgggaaagcagctctgctcaatccagtcatatggagacccagattccctccatcttgtggctctgccatcttctggggcattgtcttccacacggttgaagctgggccacaaatatatccataaaaacttcaggtaagaggaaatagcat

SEQ ID NO: 342099 - DNA, 556 bp, Homo sapiens
acagttcttttggataactggttgttctccactccaaattcttatggtacttctaaagggccttttgatagagttccttgcataggtgttttattttctcaactcattgtgaactcyggaagtgcaggggtcactgaaactcacaggattggacttctgtaccatggcagctcagtgctccacactgagttcaatttgttgaaatgaatggatgaatgttcagtttttcatagaaagaccatgggtcctttgtctgctctttctctttgtagtatctacctcaattataattagttagaaatttatctttttaatatctctttctcttatctctttctcttatgtacattgtatccctttatgacactacaataaatacagaaccaggtttgatgtgtattctcacataggaagtacacacacaaaaaaattattaaataatgaaggcgtatatctgtcaaaagttagtgctggatcattaagaaacacctgaaatgagagtaggtattgaggactgtaatggagacaggaaggttggctacaaaatgcattccct

SEQ ID NO: 342100 - DNA, 618 bp, Homo sapiens
tagggagatggaactatgtggtaagggaaataagaatagaatagaaactagatatcactgtttcactgctagttagttagttagttttcatttatcttagacaagtcttttgaactcctggtttactcatctgtaaaacagaggtaataatggcactcttgaacatttacaatacaataaagaacaatactacatgaaaacatgataattcaaaatagaaaatgctaagaaacatacaatagatatagagagtttgggagcttcagaacggtgtctacttccagttggctctcttgccatacattgcaatatataactatttatgtcctcatcattttcagtcataagtgatggcagaatcttgaaggaatgagccygtaaggcactttaatgtagtaataggaaagtcatgtcacagtatgccaatcatggctcaggcagcaggaggcctggagaaatatgtcttattcctcccaaaggccagtgttaagggatatcagagagaaaacataaagttgctcaggaccactatcaccatgtgactctgcaggaaagcagaaactgttcataggtttgcaggctgctctccagctatgagggtgcttgtctcaatgggaa

SEQ ID NO: 342101 - DNA, 519 bp, Homo sapiens
caggcaactcttaattaaatgccattttctttgtgcattattgagctagagcagagtgcagactctccttacattgtctgtggcttactggagaatagctctgctctygctttgtcacaagtgggttcttttggagctatttaaatgctttggtgtcatgcagcttctcctgtctcaactaaaactgtctccctcaatgtgtctttcagagagtaaaacactgtttccttagccttttgttctccattttgacaaaacacattctgtaggttcttgccttttttaacaatttttttcctccaaaaattgatgttttagttctcttcaggagtgctaatctccatatgagaaccacactggataaaactccttttttccctatggggttatatcagtattcagactaaatcttctgaaggacttttctaccagttatgaagagttctgataacttgtgcctgcttattacttagatttcttgggaatttttttattacaaatattttttttcatttaaaa

SEQ ID NO: 342102 - DNA, 563 bp, Homo sapiens
aacacattctgtaggttcttgccttttttaacaatttttttcctccaaaaattgatgttttagttctcttcaggagtgctaatctccatatgagaaccacactggataaaactccttttttccctatggggttatatcagtattcagactaaatcttctgaaggacttttctaccagttatgaagagttctgataacttgtgcctgcttattacttagatttcttgggaatttttttattacaaatattttttttcatttaaaactgagccaaattttgaaaaatattatcacttatttttttttttwaaacagcagacaaaacataaaattaaatgaaagattgttcaaactttttattccttggaagcccaaaggaaagagatgataaaatcacaagaaaaatacttaggtgagccaataaatattcccagtagaaatctcagaaatcctacaggtaaaacaactttttccagttattgagttatttctcagcagttgtgtatttattgatttgtttgccattaaacctacagaccaagtgataaatgtgcttcctctgtt

SEQ ID NO: 342103 - DNA, 501 bp, Homo sapiens
atgtctcccttggaatcaagaatagtgaaaaggcattctccttttgctttagctgtaatattctccccacgtgacacacgacagaaatccgggctcagtaagattaaagaactcatgcttacatcacgtaagaaacaaagatggcattgaactcaagtctgtctggttctgaagctaatcatagtaaccattatgctatctatatagaaactgctaaatgccatttttcaaattacaatcaggcagttgggctaagactgaggcttcagaaaacagtacarttcctgtgtgctgtgctaacacttctgtttaggaacgtctcattgaaaagtttctgaaaatgaactccgttcagcaaacgcaccagtttaatggctacccgtgtgtgctaggtgctagctgacatcagcatataaagcattttatgaagtctttattgacctgtaaatgttgctcccactactaatggaatagtacttatgcaccattggactgcggaaa

SEQ ID NO: 342104 - DNA, 600 bp, Homo sapiens
acaattcctgtgtgctgtgctaacacttctgtttaggaacgtctcattgaaaagtttctgaaaatgaactccgttcagcaaacgcaccagtttaatggctacccgtgtgtgctaggtgctagctgacatcagcatataaagcattttatgaagtctttattgacctgtaaatgttgctcccactactaatggaatagtacttatgcaccattggactgyggaaacctctaccactaggactcactctgaatgttaacccgggctagctgccatcagataaatgaagaactgtggctggttaatcttcccaggaccacaacacagacacagtggagtcctggtgaacagactcactctctttttcaagaagcagacatccctccttagcatctgaaattactagatgattttacattgcatcacacaaaaaacaggacattctggaaatgtgctttctcaacatttggcccttcaaacctaggggaagaaaaaaaaaaaacctggcaaaattatttggaaggatgaaagatgtaaatgctgttatgagcatctctccaatggtaaataaccaagcttttattgggcgaatgtaattagaga

SEQ ID NO: 342105 - DNA, 580 bp, Homo sapiens
attcattgtctacttttctaaaggaaggtatgtagagatctctgtatagcactaagagagagacttttggccagacacagaaagacaaatacgaggtaatctcacttctatctggaatctaaaaaactcaaacttacagaagcagagggtagaatggcggttaccaggggccagattggrgacagaggaggaattgtggtgatgaaaaaaaaaagagagagaacatctgcaacaaaaggagatgcatgtagatgttcaaggcatgtttttaaaccatgcttacttgctttttatggtatgtaaaactagggtaaagcttgtctctcgatgccctaagtatggtaatataaaagagtgactggatgtgacaatggacctgaccttaggttaatcaccagttgcctcaacaaggacttagctacaagcttcagagtaacccacttaccaccactttaataacaagaaagcttataaactcctgacccaatctcctcaggtcagaaaatctcaatttctacataggactggaaacaatacagatagtacttgtatttgttaggaaaaaaagaaagaaaaaatc

SEQ ID NO: 342106 - DNA, 580 bp, Homo sapiens
attcattgtctacttttctaaaggaaggtatgtagagatctctgtatagcactaagagagagacttttggccagacacagaaagacaaatacgaggtaatctcacttctatctggaatctaaaaaactcaaacttacagaagcagagggtagaatggcggttaccaggggccagattggggrcagaggaggaattgtggtgatgaaaaaaaaaagagagagaacatctgcaacaaaaggagatgcatgtagatgttcaaggcatgtttttaaaccatgcttacttgctttttatggtatgtaaaactagggtaaagcttgtctctcgatgccctaagtatggtaatataaaagagtgactggatgtgacaatggacctgaccttaggttaatcaccagttgcctcaacaaggacttagctacaagcttcagagtaacccacttaccaccactttaataacaagaaagcttataaactcctgacccaatctcctcaggtcagaaaatctcaatttctacataggactggaaacaatacagatagtacttgtatttgttaggaaaaaaagaaagaaaaaatc

SEQ ID NO: 342107 - DNA, 580 bp, Homo sapiens
attcattgtctacttttctaaaggaaggtatgtagagatctctgtatagcactaagagagagacttttggccagacacagaaagacaaatacgaggtaatctcacttctatctggaatctaaaaaactcaaacttacagaagcagagggtagaatggcggttaccaggggccagattggggacagaggaggaattgtggtgatgaaaaaaaaaagagagagaacatctgcaacaaaaggagatgcatgtagatgttcaaggcrtgtttttaaaccatgcttacttgctttttatggtatgtaaaactagggtaaagcttgtctctcgatgccctaagtatggtaatataaaagagtgactggatgtgacaatggacctgaccttaggttaatcaccagttgcctcaacaaggacttagctacaagcttcagagtaacccacttaccaccactttaataacaagaaagcttataaactcctgacccaatctcctcaggtcagaaaatctcaatttctacataggactggaaacaatacagatagtacttgtatttgttaggaaaaaaagaaagaaaaaatc

SEQ ID NO: 342108 - DNA, 595 bp, Homo sapiens
atacatcttcctgtatcaaaattcctactgtcagcctcttacagctttgtattttcttattctgttttaatacacatacaagcttcattcataaggaaaactatgtcacaggcaaattgcactgacataccaacctgcatcaatggtcaggaaatcggtagattcctcctacttttgctcacacttccattttcagtatttaaagattgattatttaaaatccctcattactaacttttaccaaataccccaaacatgagactaggaaatcaaaggaatctcatgatcaaaatcatcactgtgttcagttcatgatgcctatggagttctactggtgtcagtgacctagcacggtgctagatataagagtaagtttcaataaatatttcttgagcacaaaccatgatcagataaatgacgaattcagtctatcaagaccagagcacattctcaatcatctcctttctgaattaaaaagcactcatcttgcattcacctgaggaaatcattgaagaaacggttcctacagctcagcacrgaaggctgtggccatccaggacagagtactcacagacaagaggctcaacttagaatc

SEQ ID NO: 342109 - DNA, 233 bp, Homo sapiens
tccaaatggccaccatagataaaccgatacacagtgtgtttacgttattaaaatattctgggaatggataggcaattaggaggggaaaaatatcctcaaaagaaactttcttaggktaatgataatgatataaatgttgagaagcatcaagaaactggagaactttggaatctaaaggggcagatgttctcagctgcaactgatttgtggctatgtgaaaatatggcagagac

SEQ ID NO: 342110 - DNA, 631 bp, Homo sapiens
aaattatctccctttcaaaacaccaaattatctttctttcaaaacagtctgagtattaattgtgaagcataacagcacatagtcatttcctagactaataatcaggaaaatacacaactctgacattcaactggtgaagaactaaagtgataaccagggaacatttattcacactcagtccggaaatgatcatttttgtcttggtacagggaaaattttcaattttcaggtcactaaacaatttaattctttattagagataaaaaattaaacacacaaatcatcactacatgaragaaaatgcatatatactcatatatattgcacgctggttgtctcaggattcttgtttaatgagacttatccctttttaaatgagaaatcccaggctgatattgaaaatgaataagatgatggctagagtaatgttttagatagccagtcttttatgactttattattgtccttttgcaagagttttattacaaatgaaatactttaggaattataaaaaaaaggtgtctgtaattattgatgcaggctgtattcattcactcatttactcaataaacttattgcctgccgtgccctatggtggcatcaggagggttgccagggtcaactagatgca

SEQ ID NO: 342111 - DNA, 631 bp, Homo sapiens
aaattatctccctttcaaaacaccaaattatctttctttcaaaacagtctgagtattaattgtgaagcataacagcacatagtcatttcctagactaataatcaggaaaatacacaactctgacattcaactggtgaagaactaaagtgataaccagggaacatttattcacactcagtccggaaatgatcatttttgtcttggtacagggaaaattttcaattttcaggtcactaaacaatttaattctttattagagataaaaaattaaacacacaaatcatcactacatgaaagaaaatgcatatatactcatayatattgcacgctggttgtctcaggattcttgtttaatgagacttatccctttttaaatgagaaatcccaggctgatattgaaaatgaataagatgatggctagagtaatgttttagatagccagtcttttatgactttattattgtccttttgcaagagttttattacaaatgaaatactttaggaattataaaaaaaaggtgtctgtaattattgatgcaggctgtattcattcactcatttactcaataaacttattgcctgccgtgccctatggtggcatcaggagggttgccagggtcaactagatgca

SEQ ID NO: 342112 - DNA, 631 bp, Homo sapiens
aaattatctccctttcaaaacaccaaattatctttctttcaaaacagtctgagtattaattgtgaagcataacagcacatagtcatttcctagactaataatcaggaaaatacacaactctgacattcaactggtgaagaactaaagtgataaccagggaacatttattcacactcagtccggaaatgatcatttttgtcttggtacagggaaaattttcaattttcaggtcactaaacaatttaattctttattagagataaaaaattaaacacacaaatcatcactacatgaaagaaaatgcatatatactcatatatattgcacgctggttgtctcaggattcttgtttaatgagacttatccctttttaaatgagaaatcccaggctgataytgaaaatgaataagatgatggctagagtaatgttttagatagccagtcttttatgactttattattgtccttttgcaagagttttattacaaatgaaatactttaggaattataaaaaaaaggtgtctgtaattattgatgcaggctgtattcattcactcatttactcaataaacttattgcctgccgtgccctatggtggcatcaggagggttgccagggtcaactagatgca

SEQ ID NO: 342113 - DNA, 631 bp, Homo sapiens
aaattatctccctttcaaaacaccaaattatctttctttcaaaacagtctgagtattaattgtgaagcataacagcacatagtcatttcctagactaataatcaggaaaatacacaactctgacattcaactggtgaagaactaaagtgataaccagggaacatttattcacactcagtccggaaatgatcatttttgtcttggtacagggaaaattttcaattttcaggtcactaaacaatttaattctttattagagataaaaaattaaacacacaaatcatcactacatgaaagaaaatgcatatatactcatatatattgcacgctggttgtctcaggattcttgtttaatgagacttatccctttttaaatgagaaatcccaggctgatattgaaaatgaataagatgatggctagagtaatgttttagatagccagtcttttatgactttattaktgtccttttgcaagagttttattacaaatgaaatactttaggaattataaaaaaaaggtgtctgtaattattgatgcaggctgtattcattcactcatttactcaataaacttattgcctgccgtgccctatggtggcatcaggagggttgccagggtcaactagatgca

SEQ ID NO: 342114 - DNA, 576 bp, Homo sapiens
ccagccagaattttttattattatctccttggagtgtttgactttaatttccattgcttaggaaatgttttcttggccatgatgagtaactaaagtttaaaacttyggtttgaaggtgtcatcagatatcacatttgtttttaatctcatggagtgagagtgtctggttcccttccagtgcaacacaactgactggatctggctagcacttaactcatcagctgatttgtgtaaagacccttaagctcttgattttaagcagtggcagggcccaggaggagccactgttggacagtgcttagggcatcaattggccatatgctagccctgttaaatatccataggagtttacaacctctctatctccggtatcatgataaccactttcccatagatatgtgagcctgactcctcatgcctggagatagaattgcattgatgattttcatagggtcaagtttgcatgacctctcagcattacccagcctaacctcctattggaggtctaaatcctatttcttcttttggtggccctataagtctttctgctgccctttttgctgtgttctgctactt

SEQ ID NO: 342115 - DNA, 552 bp, Homo sapiens
ttataatcagtgactctcagatggttaatacagaatgtgtataggatattcagtcttctcagaaaatatgaaagggagttgagatgttctgggtcacttgtatttccaccttccactacagttcattatgagataattagttaaatatcaatttatcttgaattattatcttcttccagcaactagcctacttttctgaacctcttcccwgcaacacacctcaatacaattgtctgttcttgccatctccatccactccctatattaattgtccaataacagttctcagtacttatctcaatggacttaatagcagcatgtggcatactttattgctctcttcttcttgaaacactctcttcttcattcagccaattctcagtcttcttgcctggtttctcttcatctccctaacctgcaaacataagtgcgtccacacagtccttgaactttctttccttcccactcatcagtcacttctttagaaatcttatctagtctcctagctttaaataccaactatacacagaaggcttccaaattattagcttt

SEQ ID NO: 342116 - DNA, 552 bp, Homo sapiens
ttataatcagtgactctcagatggttaatacagaatgtgtataggatattcagtcttctcagaaaatatgaaagggagttgagatgttctgggtcacttgtatttccaccttccactacagttcattatgagataattagttaaatatcaatttatcttgaattattatcttcttccagcaactagcctacttttctgaacctcttccctgcaacacacctcaatrcaattgtctgttcttgccatctccatccactccctatattaattgtccaataacagttctcagtacttatctcaatggacttaatagcagcatgtggcatactttattgctctcttcttcttgaaacactctcttcttcattcagccaattctcagtcttcttgcctggtttctcttcatctccctaacctgcaaacataagtgcgtccacacagtccttgaactttctttccttcccactcatcagtcacttctttagaaatcttatctagtctcctagctttaaataccaactatacacagaaggcttccaaattattagcttt

SEQ ID NO: 342117 - DNA, 552 bp, Homo sapiens
ttataatcagtgactctcagatggttaatacagaatgtgtataggatattcagtcttctcagaaaatatgaaagggagttgagatgttctgggtcacttgtatttccaccttccactacagttcattatgagataattagttaaatatcaatttatcttgaattattatcttcttccagcaactagcctacttttctgaacctcttccctgcaacacacctcaatacaattgtctgttcttgccatctccatccactccctatattaattgtccaataacagttctcagtacttatctcaatggacttaatagcagcatgtggcatactttattgctctcttcttcttgaaacactctcttcttcattcagccaattctcagtcttcttgsctggtttctcttcatctccctaacctgcaaacataagtgcgtccacacagtccttgaactttctttccttcccactcatcagtcacttctttagaaatcttatctagtctcctagctttaaataccaactatacacagaaggcttccaaattattagcttt

SEQ ID NO: 342118 - DNA, 608 bp, Homo sapiens
aatagcattcataatttccttctttcttgacttggacagtgggtctacaactaaaatctgaagactaggaggctgtgatctggcaattaccttgagaaaagctgaaacaattagcataagcaaagaaaaagagatgcaacagagaaaatattgagcatatttctagaggagcttaaatttcctgcatttctctttcctcaatatgattaacatgaaattctataggctactctttgataatgtgattcacttcagtgattacaattaaaaactgtagtgttttatgtattttgaaagacacctctattcctctgcccaccagcagggttatacaatgttttatccgtttatttccaacagaagccasatgtttaccatgctggtaatgttctgcaaatatgtcttgctgcttcaaaatgttatcatgcagtattattatagttcctattgtagaaccatcctcctatggctcattttaagttttgtctcttctgaattctctatagggagttttgttttaaaacgaatcttcccagttaacaaggactgggttaaagtgagaaatgtaatgaccgttctattgtaaggtaaaacagtcttacaaatat

SEQ ID NO: 342119 - DNA, 608 bp, Homo sapiens
aatagcattcataatttccttctttcttgacttggacagtgggtctacaactaaaatctgaagactaggaggctgtgatctggcaattaccttgagaaaagctgaaacaattagcataagcaaagaaaaagagatgcaacagagaaaatattgagcatatttctagaggagcttaaatttcctgcatttctctttcctcaatatgattaacatgaaattctataggctactctttgataatgtgattcacttcagtgattacaattaaaaactgtagtgttttatgtattttgaaagacacctctattcctctgcccaccagcagggttatacaatgttttatccgtttatttccaacagaagccagatgtttaccatgctggtaatgttctgcaratatgtcttgctgcttcaaaatgttatcatgcagtattattatagttcctattgtagaaccatcctcctatggctcattttaagttttgtctcttctgaattctctatagggagttttgttttaaaacgaatcttcccagttaacaaggactgggttaaagtgagaaatgtaatgaccgttctattgtaaggtaaaacagtcttacaaatat

SEQ ID NO: 342120 - DNA, 521 bp, Homo sapiens
agcctccaatgaaagcgatgagtgattctcatttgccattttttttttccctttcaggaatgatcctgaraaagcaaaacacaccaacagcaggtagcaaataaaataaaaactgcttagcttgatgccaagtaaattctattttctttgcattctggtcaacataaaatgcaatattaatggataaattaaaaagcttgtatgacttcagagaggatcactggagtactagtcataaatggctagaggttttaaaagagtaaggatttgaagcttgcaagatcagccagatatagcagaaaggtcatgggtatttggatgagacatgtagtactttcagccatatatcattagttcaaaagtttcttatgagctccagaccctcgttatgagtaattgtcccacagatagtacacattcaacatatcctaagtggaactcatgtttccctttaacctttgtctccccttcctcccactctttctcttcctactgtggtggttgtgggagtaagaacactg

SEQ ID NO: 342121 - DNA, 387 bp, Homo sapiens
cctgcagaaacaatgcctgcagatagaacatacgtttttcaaccatgaagataagagccacatgctttagatgatagagcaggaagctaggaagaacctaacctttgacggcttccttgagtggacacagattcttggacagtctatacccagacttttgtaatgtaagaaaactaaaacttatttggttgagccattgcagtggatttctattacatgaaaccaaatgcaatttgctatggttcgaatattggtctgcttcaaaactcttgttaaaatgcaatccccaatrttggcagtattgagagttatgtttgttaagaggtgattgggtcatgaaggctcagccttcatgaatgaattaattaattcatgaattcatgtcat

SEQ ID NO: 342122 - DNA, 565 bp, Homo sapiens
gtagtgtccctacctgtttgatttaccattttatccttggtgtccagcaaaatgcctgctatatagtagccattcagtgtaactttcttcaaggaaataatagacatgaattcaactcctgcctacattattaactggagaacctgtrcaccttgtttcttatttctgtaagaagactaaataaaatagtttttaagatttgtttcagttctaaaatcctgattttagagtgcctgtgttctatacccagcaagccaacatcccagatttctgcatctatcctgtgatttgggattagtaaatgtatccactggtaacttagaaagtgaaacgttttgatgtggcttctgatatatcatttttcctctaggctaccagtgtcctcttctctaaagtgagggattttgactgcagcgcccctacagcccctcatagcttaaaaattctgcattccattgtaggggaggctaaaaatcgcactaccttagttcttatgtgagatctttggctgtgtctaggaactagattgatgcaacacagactgaccagagaaaagcatacaggc

SEQ ID NO: 342123 - DNA, 550 bp, Homo sapiens
tgtgagatctttggctgtgtctaggaactagattgatgcaacacagactgaccagagaaaagcatacaggctttatcaatttcacatgtacatggggatctttacaagagagcaacatctgaaggaatagccaaagcaagatgcttttatactttgtatacaaatagtgatacattcatgaagaaatgacaggacaaagggatctctaggctaggagcagtaaattctaagggtatcactaggagatatattgggggtgtaaagctagtggaagataagggttacttcagggagtttattcaggcccacagcagcaacaatatcctctctggtgatcagaggttattttttcaccctggtatggggaaaggcacccctcccaaaggaattcttatggcttgctgtaggaaatggcagatcagatagctttttctgcaagtacactttctccaatattttctgcatgaaataatcaatatacaaagcagkcatattttgggatggcatgtgtattaatctgttctcatgctgctaataaagatatgcccga

SEQ ID NO: 342124 - DNA, 592 bp, Homo sapiens
gcagtggttcttacttgtttcttctaagagatgaagagattcaccccctaattaggctattctacccatgtttcctagaatctatctatccattatctatctatctatctatctatctatctatctatctatctatctatatatctatgtatctatcttctatctaccatctatatagatacgtaacttttcttttcatatggaactttcattttcttcactggtgatagatatatgtgtggactctataaaagattacatgtattagactctttgcttattggatgttgaaaagacaccagaagtaataacagtagttaatttcacaggaggaaaacatactttctttaaataaagtaataacagtagttaatttcacaggaggaaaacatactttctttaaatagtgaaagagycttttcatttaaaatatttgtttagtgaaagaaacagctctatcagttaaaacaatgtcttctgtgagagaatcattcagcaacatttcctgctccagacaatcgcgctggtatatacacagcaaatcatttcaatttaccaactgttctgaaattatctgaccaagcagaaagca

SEQ ID NO: 342125 - DNA, 686 bp, Homo sapiens
gttacaaagagtctctccagtcaagctcctctgaactctcttttcagttaggcctagactattggacttaaacatctrtctttgcattatccaattttagcaaaaatcctcttaagtcagtttagagagatccctgcatgtagatatcccatcaccttaatatctgatcaaattccttatcctcacagttcttgaggtgatatctgatcaccctggcctggcttcagcaagaatcctcttaagtcggtttagccagtatcctccacaaccctaatgtttcctctatccatccactgatacctcactctacaccttggctataaatccccacttttccttatcatagtttgaattgaactcatttctatactgagggctttttttgtgtgtcctctatcacaatgctttccaaataaaatccgttcttaccactttactgtcaggtctgttttttcatcaacaggggacattttggataataccttatatggttttattcaaaggcgtaccctacatttagtcaacaaatggagcctaaaccttttaattacctcggggtgatttttcagctcctatgagacactccctgactgatcatctttctctgtcctctagattttgattgggatactaaatcctattgaactgggctcaatgaccctttcagttttaggaaggagaaacta

SEQ ID NO: 342126 - DNA, 509 bp, Homo sapiens
ccccatggtgggccttgtgtaacataagtacacagaggcatttaggaagagaaacaagaaaaacagagcrtataaacagatacagaaataggcctctgaggaacagaaagagaagtctcagtttctgaatttccagagaggcccgactacgtttagtttcctgcctttggatattgtaacaacccctacttctgtgtttttcttgaactagtttgagtgagcttctgttctttacaataaaattgattcaagtaaaaaggtacaacttttggatgccatttacttatatattagcattttgttggggaaaaattcctcacacatacttattatccttatatgaattttctagcttctctactcctgaagagaagggagtttaatgtgggttaagagaggtatttggccaatctatattaatcaatctatcaatctatctatctatccacttactctaacaatatcaaaatactacatatgtgtgcacacatgcacacacacacacatgt

SEQ ID NO: 342127 - DNA, 509 bp, Homo sapiens
ccccatggtgggccttgtgtaacataagtacacagaggcatttaggaagagaaacaagaaaaacagagcatataaacagatacagaaataggcctctgaggaacagaaagagaagtctcagtttctgaatttccagagaggcccgactacgtttagtttcctgcctttggatattgtaacaacccctacttctgtgtttttcttgaactagtttgagtgagcttctgttctttacaataaaattgattcaagtaaaaaggtacaacttttggatgccatttacttatatattagcattttgttggggaaaaattcctcacacatacttattatccttatatgaattttctagcttctctactcctgaagagaagggagtttaaygtgggttaagagaggtatttggccaatctatattaatcaatctatcaatctatctatctatccacttactctaacaatatcaaaatactacatatgtgtgcacacatgcacacacacacacatgt

SEQ ID NO: 342128 - DNA, 495 bp, Homo sapiens
atgatttgcttaattcttttgccttaatgcaaatggttcagwacagagctttgatacataatctacacctttgtttatgtgtccatataaaactatggaaatctagtattaagcaagtcacatttctcatacttaatgtgttttaaataaaacaatttttacttttcccaaagtttcttggtcttttctaactatatcatcattttattaaaaataattgaatgaactatgataatgaagcaggcttgtgaaatatctctcctgccttgagttgttcacttgcttgcatgactttaacctgttttgaaggcatattaacaataattaataacctcaaaggaaaaggtgaataataagtagcaaatttaaacagatggcattatagctaaaatgtgtgcagtaggaaacagaagggcctggtactcaagagaagataattttgaaacattttctttctcttggtatattgtataactgaaacactctctcatgata

SEQ ID NO: 342129 - DNA, 572 bp, Homo sapiens
tgccatgtgaatgaattatagactttttcagagagacttttaaatgactaggtgacgatttcttcgctgtgccatttgtaagtgtcacagtgatgaagaaagcagctttttaattttttttctgcataagaaattaagatatacttttgggaagggtgtggatcatgtttcaaggagcagggtccaattactaaatttcaagaaggaaaatgtttaattgagatgaagccttgatatattttgacggagatggcattttrgaggcagttgactttgttgattaacatgttttaaaatgttttggcacttggctggaagtaggatcttttaagtctggagttctaggcaagaaaataaacatgaatgaattcagagatgaacatgagtttaccgtaagaatacttaactaagcaccagcctgactaatggggtgaaatcccatctctactaaaaatacaaaatgagctgggcgtgctgtctcatgtctgtaatcccagctactggggaggctgaggcaggagaattgcttgaacctgggaggtggaggttgcaatgagctgagatcgtaccaa

SEQ ID NO: 342130 - DNA, 542 bp, Homo sapiens
gtgtctcacagatctcgggtacttttttccacttttcatcctttttatgtctttttatttcaacttgaataatttttattgaataatttcagacttattcattatttttttctgttgtgtatacttggctgttaagacctaaaataaattatttatttctgatattgtagttttcatttctagcatctctatttgttttttytttatagctttcatttttgggctgatatgcctcatctgctcatggatttattaatcttttatcagagttattttataatcttttttgttaattctgagatctggggcatctgtggctatggttccaactactattcttttgagtatgggtcatatttccttacatcatcataagtctcacagtttttgattgtctgctcatcatgtgtgtaaacaatagtatatattgaagtaaatgataattccctccggaaaagaccacacctccttctatcaggtcaatagtgcgtgagactgagttgatttaatcttcagttgagctgtctgggcttgttgcagtt

SEQ ID NO: 342131 - DNA, 542 bp, Homo sapiens
gtgtctcacagatctcgggtacttttttccacttttcatcctttttatgtctttttatttcaacttgaataatttttattgaataatttcagacttattcattatttttttctgttgtgtatacttggctgttaagacctaaaataaattatttatttctgatattgtagttttcatttctagcatctctatttgttttttttttatagctttcatttttgggctgatatgcctcatctgctcatggatttattaatcttttatcagagttattttataatcttttttgttaattctgagatctggggcatctgtggctatggttccaactactattcttttgagtatgggtcatatttccttacatcatcataagtctcacagtttttgattgtctgctcatcatgtgtgtaaacaatagtatatattgaagtaaatgataattccctccggaaaagaccacacytccttctatcaggtcaatagtgcgtgagactgagttgatttaatcttcagttgagctgtctgggcttgttgcagtt

SEQ ID NO: 342132 - DNA, 620 bp, Homo sapiens
cattcctttggtttctaagatcagtattttatttatttgatagaatcattcattttaatataatcactttttaataaacagtttaggtgaacagtgcatgcgtgttcacattccagtttcaataaattatgtgtatttgctctcctacccacatttttacacagcttctcagaaatctcttagctcagtcagtcataattcccttcttaatgaataatagaattgctttyctcccacagatcattatagaagatgagtagtctacgatgctggaaatttttatatattctatatgcttgaaatgagtatcactagttgtctagcacaggattgttcaatagagcattctgctattatggccatgttctatatatgagctgtccagttcaatagccattggtgacatatggctattgagcatttgaaatgtggctagtgcaatagagggactgaaatttaatttaatttagtaagtttaaatttaaatacccatgtgtgaccactgagtaccaatatgaacagtgtagctctagagagttatctgcctagaaaattttctggagaatatcttgtagttgtaggaacatgttagcaagctgtcattcttcaagcataatagc

SEQ ID NO: 342133 - DNA, 577 bp, Homo sapiens
aaaatacacaagcatattaaaaattatgaatgaaaagaaaggatgttctaacagtcacaaatattaacaaagcaaaaactgactattcaggagacacataaaacatattgracaatacacagaacataatacaagtaataaaataaaaaatcttttgactctttcctattatatgcatttagtaataatacacaaatgaagaaacttagaatatcatacagagaagccatctgagatttctttaaatgcagaataaatgatgtaggatcagtgtgggaattaaaaatagttttgtggagttcagtagaacatatgtttgtctcattgaatttttatttctgactgatcaactgattaatagccccatgaatttttagattccacacaactgaacatgtaaatcacattttacctttttttcccaaagaataacagtgtgttttcaagaagttaacacagattctcagttggccacattaacagttcacacactttccccatgtgacagattgcatccttcagatgtcagctgatgaatacaacatgcaccttattaagggacaattggaggttagta

SEQ ID NO: 342134 - DNA, 637 bp, Homo sapiens
gagggtgagaagaagtcatcatctatyactatatcaggaaaaataacctgacaataaagcttagaatgccaattagatagtgagtataaataattaaaccatacactgaaaaacaagacaggtacttactaaatgtcttcttctccatatgctttaagtgtctgttccttttcttggtagattataacgaaagctactgagcagtctttgtgtaagtagagattgtggttggtcataagtgagtcagtcaagagcaaaaactcacaactattttcttaaatgctaaattcagtgtgatttatatcagaatattttaaataaatataaaaattagtgcatgttagacaataaaataatctaaacttcaagtgtactaaaagtgtatatctcttaaggtcatttgcatataatatgaatcatataggaacatagtatattcaatagtgcagaaaatgtgtcatccagcttctttgagagactctataatgtaatggaaagccagcgttggtttagagctcacgtgctctgtaaacacattcagttgaaatgcctccgtgcttctgctgttgaagaatatatttttctctagtaagcattagtcccttcaagaaagcaaccaactaaccactgaaagtcc

SEQ ID NO: 342135 - DNA, 538 bp, Homo sapiens
tgggattacgggtatgagccactgctcctggctaaatataaattcttaagagagctaaactattactttttttgtactggaggctgaagcatattttaagcaaggttattttaagattttaaacagcaattgagtacttttattactccatgaatatatagcttrtgtagtcaactatgtagatgaaaacattgttttacctttgttgctgatatgctgcaatattgttcaacaatgtaatgcttttacatttgtatctgcaattcatgtgaatgtttattttttccagaataattctctgcaacaatcaagaccaattgcattaagacaaaaagtttacaaaatgacaagatcattacataatttacaactctgttgatagagtacctatacaagtaacactaagtatgtataatgagcacactgtacatacttcaaaatttgccatttaattgtattctatggtagctcatttgattaatatgggcaacattagtgtaaactggcaaagcaactactacatgtgtaaacaatgcca

SEQ ID NO: 342136 - DNA, 538 bp, Homo sapiens
tgggattacgggtatgagccactgctcctggctaaatataaattcttaagagagctaaactattactttttttgtactggaggctgaagcatattttaagcaaggttattttaagattttaaacagcaattgagtacttttattactccatgaatatatagcttgtgtagtcaactatgtagatgaaaacattgttttacctttgttgctgatatgytgcaatattgttcaacaatgtaatgcttttacatttgtatctgcaattcatgtgaatgtttattttttccagaataattctctgcaacaatcaagaccaattgcattaagacaaaaagtttacaaaatgacaagatcattacataatttacaactctgttgatagagtacctatacaagtaacactaagtatgtataatgagcacactgtacatacttcaaaatttgccatttaattgtattctatggtagctcatttgattaatatgggcaacattagtgtaaactggcaaagcaactactacatgtgtaaacaatgcca

SEQ ID NO: 342137 - DNA, 538 bp, Homo sapiens
tgggattacgggtatgagccactgctcctggctaaatataaattcttaagagagctaaactattactttttttgtactggaggctgaagcatattttaagcaaggttattttaagattttaaacagcaattgagtacttttattactccatgaatatatagcttgtgtagtcaactatgtagatgaaaacattgttttacctttgttgctgatatgctgcaatattgttcaacaatgtaatgcttttacatttgtatctgcaattcatgtgaatgtttattttttccagaataattctctgcaacaatcaagaccaattgcattaagacaaaaagtttacaaaatgacaagatcattacataatttacaactctgttgatagagtacctatacaagtaacactaagtatgtataatgagcacactgtacatacttcaaaatttgccatttaattgtattctatggtagctcatttgattaatatgggcaacattagtgtaaaytggcaaagcaactactacatgtgtaaacaatgcca

SEQ ID NO: 342138 - DNA, 500 bp, Homo sapiens
aacaaatctaaatttaaataaaaacaagtctaaatttttactgtgacttagttactgctgtcagatagccttcagaacctagactcatgcctattaaggcccaactgtgacttgggcaagacttttctactccactgggggaagtcaaaaacctatcttgggcttcaggcagttgcaggagatggagaaacagactattgactttattgacactggattgtcttttggaccaaagaaggtctcatctttatctggagtagataaccaagtatggagccttggatcccaaagttcgtctaggrcactgagatatattttagtctcatcagaggtatagggttgtatttagagtgatcatgtcatttgttattcaaaccaagactaccgagaatggaagtggcactgttgatagatattggaaaataggtgaaaaccaggacccttgcatagggatgcatagcgatggatctcctgaataggtaccataaatagggatctct

SEQ ID NO: 342139 - DNA, 559 bp, Homo sapiens
  misc_feature (1)...(559): n = A,T,C or G
gctcaagaagagagaacaagttcacccttcctctgccttttgttcaactgggaccctcaacagactgggtgatgcccgtcctctctggtgagagccatctttttcactcattctactgatacacccagaaataataattttctagctatctgagcctcccttagttcagtcaaattgacacataaaattaaccagtataggttaccactgaggtatataattgttagaactccagagaaatcacaaaattaaactgaatccctgttgcccatggcatgtataaaacatttgccactttacctaatttcrtttttccaccaggaagtgaacactgtgagactagaaggcacttacatattagaagatgtaaagattccaggtgaccacaatgtggatattctaaatgcaagaaatataattgctaatttaatcatttgagtttgaatatttttattacaatggtcagcctgggtgngatatatttagaaggtgatccatgtggcctttgctttctagtctatagtttctgagatttgtgtanacaatgtatattacctca

SEQ ID NO: 342140 - DNA, 557 bp, Homo sapiens
tcttgatttcttgacattatctatcctcgtttttattctgactcccaaggtttattatttgttttgataatcttttttttttttacttttacaaataacacgttgatattaaattctttatataagattaaatattctacatctcatatttcaagcactcatcaagaaaacttttccactgagaaaccattatgctacttgaaaatctgaaattataatttctttgttttttatcagtcttgttttycttaccattattagatcaatatcatctttttgtgtcttaaacatgtggttcacagccatgccacttctcataccacattccatgtattcctaaccctgtttcttccttcacatttctaaaacaccatccaaaacaaacacttctttctccttcttcttcttcttcttttaaaaacatgttttctcttttccctgggggcagatactgtctctcacatggtgggtctaaaatgttttgagaacagatactataagagaaataatcttcaagacacaaaactgtggggggcacagaatttattactagaatg

SEQ ID NO: 342141 - DNA, 592 bp, Homo sapiens
ctaatcttaaactatattctgctggcagaaacataaaattatatccagtaagctcagatgctttggataatggaaaaactcagttctatggtgctgccagaaaataatatgctcttagaaattctgcaagttgagtagagagatcagaatctgacaaagtgatgttacagattgttcagaacagaaaaattccagatccaaagaattttttttttctttgagacatggattgaggtccaagagcagcataatggtaccaaatggataaaaacaacaataaagtcatttctcatgcataatgcacaggcattctctattggagttgatatcaccatctggtgtctaattattcccacctcacaccacacggttgtatgcatttaacggaatgactgtacattatgataactcagtacacaggctctttgctgttaattataaggtgctagttgttgttgttttaaagatcatggaaatcccccaaaatttgatattcrttgcttaaaatgaatattttgtaagatgacactaggaaaagagaactatagttagctttatttttctaaaagatctatgttcctttaagtttagt

SEQ ID NO: 342142 - DNA, 480 bp, Homo sapiens
gaccatgttaaatgtggttgcttacatacatatcagcaaggttggatggagtttgattgatgattgaaacttttttgttgttattgtcctgaaagaacctagttatgtaaatggcattgcttatagcatgatgtttgaataaggcttaatgtaattccatatatttaagaaacataagcataatttctgtgatccactccagaaatggaagcataacatatttctaaatatttactgaaaattttgtttaaacaaaaatatatgaggaattgtgattagtatcagtaaaagttttaattaatgatattgaaaagtaattttaatataatactatagacataaaataacaaatttctaatattgggacactaataacactagcattctgctaggttgagcaaagtgaattaattcawacaagggtcttcccaatagtttctaagaaaaaaaatggataaagttttctcaattttaatattt

SEQ ID NO: 342143 - DNA, 264 bp, Homo sapiens
actattgcctatgggcatttctattttcatgaataaatgaacaaagcaacacccgataaaccctggaagttatcaatgtaacctgggaagtgtgtttgtgtgtgtatatgtgtgtgtgtgtgtgtgtgtgtgtgwgagagagagagagagagagagaggttaaatagtttgaataaaatcctaatatatcattattgtctttcttgccaaaaatatataaaaggtataaaagtcagtcttggttgttttggtcaatatgttttt

SEQ ID NO: 342144 - DNA, 503 bp, Homo sapiens
tactagtaaaattagttttaaatttatattataaaattattatgccaatatttcatggtgtaatgccaaaaaaaaaaaaaagacaggctgacattcatgattcatgtagtctactctctggccctatctaggattcactagagtataaaatgaagccacgtatatactaatcctagccaagtgtcatgaacgctgggccaaaatttcttctttgtgctttccccttcacgaccactacatactattgcctatgggcatttctattttcatgaataaatgaacaaagcaacacccgataaaccctggaagttatcaatgtaacctgggaagtgtgtttgtgtgtgtatatgtgtgtgtgtgtgtgtgtgtgtgtgagagagagagagagagagagagaggttaaatagtttgaataaaakcctaatatatcattattgtctttcttgccaaaaatatataaaaggtataaaagtcagtcttggttgttttggtcaatatgtttt

SEQ ID NO: 342145 - DNA, 541 bp, Homo sapiens
atttttgttttgttttgttttttatcagtggcaaatgtgtaggcaggagcatccatagccygggctgttctctggtggttccactgatcgaaacaactgagacaagtcaatgtgaggattataaatcaattgggagtgtattagaattaataaagaattggaattatagagtctaaacctgaaatatgtaactgattcattgctttttttttttttttttttttttggtcacgagaatcgccaggactggttctcttaacatatgtaaagaaacttgaatatgacagacttttattgccaacttaacagccattttcaaactccttctttgtcacacaagtcttatttgccaaagaacactaattctgttcagaatttggtacttgtgtgcttcagtaaaaatgaatcctttcataatccaggaatgaaaatatgcttagtttacaccagtcatggaaattgttttttctccaggctaattaatggtttagtaagggcaaccatttctcaccaaggagacccggtggaattggtgaacctt

SEQ ID NO: 342146 - DNA, 541 bp, Homo sapiens
atttttgttttgttttgttttttatcagtggcaaatgtgtaggcaggagcatccatagcctgggctgttctctggtggttccactgatcgaaacaactgagacaagtcaatgtgaggattataaatcaattgggagtgtattagaattaataaagamttggaattatagagtctaaacctgaaatatgtaactgattcattgctttttttttttttttttttttttggtcacgagaatcgccaggactggttctcttaacatatgtaaagaaacttgaatatgacagacttttattgccaacttaacagccattttcaaactccttctttgtcacacaagtcttatttgccaaagaacactaattctgttcagaatttggtacttgtgtgcttcagtaaaaatgaatcctttcataatccaggaatgaaaatatgcttagtttacaccagtcatggaaattgttttttctccaggctaattaatggtttagtaagggcaaccatttctcaccaaggagacccggtggaattggtgaacctt

SEQ ID NO: 342147 - DNA, 541 bp, Homo sapiens
atttttgttttgttttgttttttatcagtggcaaatgtgtaggcaggagcatccatagcctgggctgttctctggtggttccactgatcgaaacaactgagacaagtcaatgtgaggattataaatcaattgggagtgtattagaattaataaagaattggaattatagagtctaaacctgaaatatgtaactgattcattgctttttttttttttttttttttttggtcacgagaatcgccaggactggttctcttaacatatgtaaagaaacttgaatatgacagacttttattgccaacttaacagccattttcaaactccttctttgtcacacaagtcttatttgccaaaraacactaattctgttcagaatttggtacttgtgtgcttcagtaaaaatgaatcctttcataatccaggaatgaaaatatgcttagtttacaccagtcatggaaattgttttttctccaggctaattaatggtttagtaagggcaaccatttctcaccaaggagacccggtggaattggtgaacctt

SEQ ID NO: 342148 - DNA, 541 bp, Homo sapiens
atttttgttttgttttgttttttatcagtggcaaatgtgtaggcaggagcatccatagcctgggctgttctctggtggttccactgatcgaaacaactgagacaagtcaatgtgaggattataaatcaattgggagtgtattagaattaataaagaattggaattatagagtctaaacctgaaatatgtaactgattcattgctttttttttttttttttttttttggtcacgagaatcgccaggactggttctcttaacatatgtaaagaaacttgaatatgacagacttttattgccaacttaacagccattttcaaactccttctttgtcacacaagtcttatttgccaaagaacactaattctgttcaraatttggtacttgtgtgcttcagtaaaaatgaatcctttcataatccaggaatgaaaatatgcttagtttacaccagtcatggaaattgttttttctccaggctaattaatggtttagtaagggcaaccatttctcaccaaggagacccggtggaattggtgaacctt

SEQ ID NO: 342149 - DNA, 546 bp, Homo sapiens
agctgcaagttgaggaacatcaaggattaccagcaaccaccagaagccggggagaggcagggaaggattcttccctagagggagcatagccctgtcagtgacttgatttcagtcttttagcccctaaaacagtcagagaataatttttacttttttaaagacaccaagtttgtagtactttatcatggaagccccagaaaactaatacaccaaggcactcctctggtaatggtagggtgagcaatggacagaatttgtgtgcttgatgatgytagtgagtaagggataaaacaacaatacctctgttctttttattagaaaacatttttttcctcttgttttagacaatgctagtaaatttatttgtgatttattgctgagacatcccaaagcaacatgcaacgtttggggtattgcaaatatttaggggaaaagaatacttggaatggcctagagttccctatgctagtcaaacaggtggaggctccagtgtagagatttggagtattaacttaaatgtgacctcatgtgttctcacagtctgct

SEQ ID NO: 342150 - DNA, 546 bp, Homo sapiens
agctgcaagttgaggaacatcaaggattaccagcaaccaccagaagccggggagaggcagggaaggattcttccctagagggagcatagccctgtcagtgacttgatttcagtcttttagcccctaaaacagtcagagaataatttttacttttttaaagacaccaagtttgtagtactttatcatggaagccccagaaaactaatacaccaaggcactcctctggtaatggtagggtgagcaatggacagaatttgtgtgcttgatgatgttagtgagtaarggataaaacaacaatacctctgttctttttattagaaaacatttttttcctcttgttttagacaatgctagtaaatttatttgtgatttattgctgagacatcccaaagcaacatgcaacgtttggggtattgcaaatatttaggggaaaagaatacttggaatggcctagagttccctatgctagtcaaacaggtggaggctccagtgtagagatttggagtattaacttaaatgtgacctcatgtgttctcacagtctgct

SEQ ID NO: 342151 - DNA, 598 bp, Homo sapiens
aaatataatcacttgattgtgttaaaatcaaatctccataagtacccattattttgaaattaatttagagaaatctgacttcatatgttcctcacagcccagctgggaatagctcttcgaaaaactagagagatattgctggtagagctggactacttcttcaaagtagccttcagccttcaaaaaaaaaaaccaaaataaaaaataactcaacttctgtctctttttttcatrtgactctgataactgtcgtcttttaaaacaactttattcaaattttggcatgtcttaattttgttcttcctatgtatgttgattcctgacaatctggctgtcttccctggttcaataatcccaataaactttgtctccattcctgtgaatgtataattgattttttgctttgcacatttttttcctcttatgtttatagtttctcatttcatttgtgagtactcgctgacaattcgggattccacagctactagacatatttctcagttctaagtaaagggtaattagatccacctggaacctttggtctttagacccttcatcttggctattttcttctgccctttctggctccatatggcac

SEQ ID NO: 342152 - DNA, 548 bp, Homo sapiens
tcctccagaccatagactggtagatccactgacagcttgcactgtgcacctgggaaagccacagaccctcaacaccagcctgtgaaagaagctgagagggggctgtgctctgcaaagccacaggggcagagctgcacaaggccatgggagtctgcctcttgcatcagcatgaccttgatgtgagacatggaatgaaaggagatcattttggaactttagaatttaatgactgccctattaaaatttggacttgcatgggcccttttgttctggccattttctccaatttagaattgatgtgtttactcaatgcctgtaccccacattgtatctaggaagtaactaacttgcttttaattttacaggttcataggcaggtgggacttgccttgtctcagatgagactttgcacttagacatttgggttaatgctggattgagttacgactctgggggactgttgaaggrgcatgattttgttttgaaatatgagggcatgagatttgggaggggccagtagtagaatgatataattatatagtttggct

SEQ ID NO: 342153 - DNA, 652 bp, Homo sapiens
caaactctttttattccatttactatattttgagttacgttattagtgattattctaggaaatacaattaacattgtaacttaaataatctcattcagaraaatgccaatttatttctaatactatataaaaattctgctctaatagagcactgtttacttcctcctttctgttatcatagtcatcctaataattcattcttatttataatccaatcaacaaacttttgtaattattgctttatattcttgtcttttatgtcacataggaggagaaaagaattaccataaaaatattttaatgctgttggttatatttacctgtatagttgcttttattgtgtagttagttgtatttctttgtacatgttaaagttcttgtttaatgtccttttgttttggcctgaaagattgccttttgtattttgtggaaggctggtgctagtaacatattctctcatttaaaaaaaatatgaactgttttaatttatcctttatatttgaaggatagtgttccttcatatagaattcttgtataaagtttttcaattcagcactttaaatatgtcaccctcttgccttctagcctcagagtttctgatggaaagttagctatcaacctttttgaagattccttatatatcatgagtcat

SEQ ID NO: 342154 - DNA, 609 bp, Homo sapiens
ataccttttaaccattttgtaatctacctgtatgaatacataaacctaatacctattttgtagccaatatttattgcaatgctattatgtgtccagagccattctaaacattatcagtgcaacagtaaacaaaacagaaaaagcatttacagtttgttatagtaagagaagccaaaagagttaagaaaaaaaactatgtgttattttatatattaatattaaaaggaaaacagacagataacggggatagaaagttgtgatagcagatgggacttccaaattgtgtgttcagagaagattgcaaacttcatatcacatttgagtgagttttgaaaaaggagaagaaaaacgtatattcatatctgggacaacagagtaccagactgagagaaaaacaagtacaaatgtcctaagatataagtaccaaacaattaaaaatgtcttaacgtacgcckgggtatttgacgaattagcaaaacgccattttaggtggaatgaggtataatgattagtagaagttgtggttagggaagagttaaaggaaaacattaaaactgaagatgtgtattattgcataaatccataagattgtatactcatgcaatggaa

SEQ ID NO: 342155 - DNA, 548 bp, Homo sapiens
ttattttttgtaaacccaaatcacatttcaaaaataaagtatttggttgctatggattgaaatgcattatcccacccaaaattcgtatattcaagcaccaatgtgattgcctttggaggagaagcttttagaagggggattaaggttacatgaggtcctaagagtggggtctgcatcccataggattaggggctttgtaagcagagaaagagattctttctctttgcactcacatgcaccaaggaatgcccatgtgcaacccaatgcgagagctatcactagatattgatcttgctggcaccttgatcttagatgcccaatttccaggactgtgagaaaaataaaaattctgttatttaagactcccarttcataatattttgttatggcagcctgagctgactacgacattgttctttaggggaaaaaaaaaaagcatttcaaaaaaattcttgccatcatgggaaatcaaatagaaatcaaagaagaaactcactttctacatattttttccatcttttcttttccctgtaacctatttaactaca

SEQ ID NO: 342156 - DNA, 564 bp, Homo sapiens
cccgcctcggcctcccaaagtgctgggattataggtgtgagccactgtgcctggctgaaataggatcacttttacacagtcgggaatataaattagttcaaccattgtggaagacagtgtagcaattcctcaaggatctagaaccagaaatatcatgtgatccagcaattccattactgggtatatacccaaaggaatgtaaattattccatcataaagcatttctttaaagaattattatagtaggttaaacatggctttaccaatatgatcctgaagacaaagcacaatcaaagcaatagctaccaagaagcaaaagtggtctagtcaaagcaaatgtgaaccagttaagatcaaaggccatggcagtagttttgggggratgctcaaggtatttcttctgttgactttgtggagggccaaagaacaataacatctttttattacgagagtgttttcagaaagttagtcaaagttttagcagaaaaatgcctaggaaatcttcaccagtatttcctcaccaagagaatgctcctgcttgctcacttctctcatcaaacacgg

SEQ ID NO: 342157 - DNA, 611 bp, Homo sapiens
gattggtcttaatggctataattactagttttgtgatgtagtaaactaaatgaataatgaagaggaaaagaaaatgtaatgtatttaacaattgctttctgacagaatactttaattctggtcacagactcaatattttcctctgggggaaacaagcaaggaaacaaacaacagtttcacagttttccatacttagaattgacagacttcctagttctaagtgtggatatgttgtgaaggcacattattaytattttcttttaccctgccactggaggaaattctaataaccgtctagaaccgcttaaacacaataagatgtttataagaatttttaagagaaagagagagaaggagggagaaagtatcctttatcctatagcaatttaagtttgcctgagaacgaagtcaacatgcagagagggagagacaaaaaatacagaaagactgaatataaatgagaatttttttttcctggttcaagcaagaactgaaactctgtgtttttgagtttcaagaactattaaattcttgttttgtctcaagctaattgtttgacttgagttttcttcaactctcatcattgcaaatattctcacgttcatttctgt

SEQ ID NO: 342158 - DNA, 611 bp, Homo sapiens
gattggtcttaatggctataattactagttttgtgatgtagtaaactaaatgaataatgaagaggaaaagaaaatgtaatgtatttaacaattgctttctgacagaatactttaattctggtcacagactcaatattttcctctgggggaaacaagcaaggaaacaaacaacagtttcacagttttccatacttagaattgacagacttcctagttctaagtgtggatatgttgtgaaggcacattattattattttcttttaccctgccactggaggaaattctaataaccgtctagaaccgcttaaacacaataagatgtttataagaatttttaagagaaagagagagaaggagggagaaagtatcctttatcctatagcaatttaagtttgcctgagaacgaagtcaacatgcagagagggagagacaaaaaatacagaaagactgaatataaatgakaatttttttttcctggttcaagcaagaactgaaactctgtgtttttgagtttcaagaactattaaattcttgttttgtctcaagctaattgtttgacttgagttttcttcaactctcatcattgcaaatattctcacgttcatttctgt

SEQ ID NO: 342159 - DNA, 625 bp, Homo sapiens
gtcactgaactctttatcccccaagtgcacagattctctcttggcacagtactgctgctgcaggacaatgtgggaggggtgacatccaaggttcaagactgcctgtcttagcctctttagtgcatttttcagtgatatgaagtaaaaaccaggtgctgcgattgctcacctggtttttggttctcgtgttggtgtttttttgtatgtagttatttgttaaaatttgctgtttctgtgtgtaggatgaatggtatagttcagccatcttgctctacccttagaactatatcttgatgttttagaaatatgtcttgattacataagtgggtaacagtggcaagtttgaaacacagctggatattcaatcatgaacaagatattcaatcatgaacaaagtattcaatcatccattcattygctcaaaaatactcattgaggaatacctgctccatttcaggcatcatgctggataactgtgaacaagaaacaaggcagatccctatggtcactgactgtagcaaagttacattctggtgagaaacagaaataaatatttttttctatccttgaagatattcaaaattcctttgaaatggaaaattctggctttcatgacaagaaagag

SEQ ID NO: 342160 - DNA, 564 bp, Homo sapiens
tcagtgtcattttgatgtctttctgagaagctggcagcagcacaacagatgtaaaacaagacagaactggcagaacccatgggtgaatagttacactggaaaacactgtccaacatgaataagtcagaactaatttaatgatagcactatgatgtacatgttcgtgtgaggctaggaagagcagaaaaataaaatatgcatacacatatacacgtatcaaacacatttagtgagcatttagtagtaaatcataggatgtttaaactttaaaataacttaagatcaacaayccagtacgagaaaactgagtattaatcatcacgataggggtagagatggacatgatcttgttctcctcactcagaaaagtttccattccagtatgtagtatattgacaggataaatgcatgattttcatcagccacaaaagtttaactatctgctcttttaaaatgatcattttcccccttttgattaagatagccatagttttaatgtttgatatcaagaactgttttgatttggacgtgataagtgttcattgatatatttccagtctggta

SEQ ID NO: 342161 - DNA, 611 bp, Homo sapiens
cttttgtgaaattgaatattaaagggaaatgaagtatgactgtagagagcacaaaaatakccagaagttttgtaggaagggatttgcatctttttaatggagggaaaaagggtagagagatcctagtttaatttggcataagaccagacatttaaaaatcaagtcagtaagcataaaatcaaattaaaaataaaattagatgcaccaattatttcagttaagactatttttgttgtaataatagaagacaaattgaataaaataaattggaaaagaaaaattgaaatgtccacaaagcatattcaaaaatagtttagtttgtacagatattcaaattacatcaatgaaatattattttatgatccataaattgttaaaagaataaaatataatagtgttggcaagtgaagccttaaattagttcttttataaatgtcaagtggtagtaatctgatacaagtaaacaattttataataggtataagaattttatataatatgaccttgacccaaatactgtatatctaaaaatatattgttagaatatgtataatactttttaaatctagacattaataaaattttacttataaaatccaaactgggaaaat

SEQ ID NO: 342162 - DNA, 570 bp, Homo sapiens
tatacttagaattgtatatgtaaaacatataggctgtgttttattgacattgtcgggggatcagaaacagacactccaaaatatggcactttgacaggctgaactgaagaagcttcaaggtctctcaaaccttctctacacacctaacatcctccatccctctgaaagagcaggatgaaattgaatttttttatctgcctaagatccagaaccaccaaagagaacattgttttttctcctctctgtaagaccaagaatgcaaacacaccttaacaaaccgtttcacaagataacctctgtgtctcccactcatycaaattccaaagaaaactatttagaagttaatctctgttttctgggccattcattctccctagtaatcacttattgttcctcagcagaattcatcttctattccctgacataacctgtcttcccaggatggtatattagcttctgaacccccttgggaagcatgtcatcactctgcggttcttcccctgtacatgttaatacaatttgtatgccttttctgcaattaacctaccttttccaagttgacttttcagc

SEQ ID NO: 342163 - DNA, 614 bp, Homo sapiens
ttctacctgtggataaatagtaccatgtaaaaactaacattttattaagaaatacctgaagaattatgacacgttatactttattttagccaacatagacatagaacttataagatatagtttccaattattttgaaatttatctttattttaagaacatatgagacaaagtttctaattatcttgaaagtttaatgagtgcctattaaacagacattactgttacttattaagaaataaaatttgaagttgcaatgaatattagaactattagaaaagtctaatattatggtaaaattcatgctagaaagataaacgtttctgattttcacacatgctcacaaatatttgtattagtttccttaagtcttcactattttctttccttatataaaacttagaactttcagttatgcataaaatagtttcctgtttcaaaaaataatggttagctttttagagaataataaaacaagtgcttaataactgaaattgattctttgatcggaaagtactttaatttkccctatgtgagtctaactctacaatgacagattttatgtgtattgagagctgcccttcttatgacagttaaaaattcaggttagaaaatg

SEQ ID NO: 342164 - DNA, 559 bp, Homo sapiens
acttagtgttcgagtgaagcaaataatttattttttctaatatattaacaaattattattttttcttaaaaaaaagacatgctcaacatgaggaagctgaagtatacactcatatcacactttgaaagccattactattaggtagacaagtcacataataaggccaaaaagggttttggttttttctgggcattattaagacaagttttctcaaatttattaactgtataatctcagtctatttacatttacatgtggaagtatcccacatgataataatttgaagtgtgcccagtttattaaaactgaggctttgctacacacacacacacacacacacacacacgcatgcacataaatgtgaatggcacaaatggcaacaagacamctgcatcccctcactatctagagcacttgctatgacccatttgtattaccacatcttgctttacttttggacttctcctgctaaatttttcgaagtacagtgagaactgatgctttaagctaaatgtccctagctaaatttcaggttcaatcttggacttttattcatttt

SEQ ID NO: 342165 - DNA, 442 bp, Homo sapiens
aattggttcacatgatttgggagtctagaagtttcaaaatttgttgtcagcattctagaaaccctggcgagctgccartatagcttcagtctgagtccagaaacctgaaaaccaggagaatcaatagtgtcagttccagttccagttcaagtctgagtccataggcagaaaaagaccaatgttctagtttgaaaacagtcaaagagcagattttcccttactcagcccttttgttccatccagacctccaaccgattggatgaagcccactccattggggagggcagtcgactttactcagtccacctattcaaatgttaatctcatccaaaaacacccttatagacacacccaaaataatgtttagccaaatatctgggcatcccgtggcccagtcatgttgacataaaaattaatcatcacgtcaattttttcataatta

SEQ ID NO: 342166 - DNA, 663 bp, Homo sapiens
ctttcattggatctaccattctggggtctggtgggtctagtggccctcttctcacagctccacttggcagtgacccagtgggagctcaatgtgggggctccaaccccacatttcctctccacacagccctagcaraggctatacattagagttctgcctctgcagcaaacttctgcctggacttcaggcatttccatatatcctctgaaatctaggcagagcttcccaaacttcaattcttgatattggtgcacctgcaggctcaacaccatgtggaaactgccaaggtttggggcttgcaccctgcaaagccatggcttggtctatatcttggtcacttttagccatggctgggacatagggcaccaagtcctgagactgcacaaagcagcaaggcccataggccaagcccacaaaaccatttttccctccgagacctccaggcctgtgatgggaggggctgctctgaagacctctgacatgacctggagatattttccacattgtcttggcaattaacatttgacttctccttacttatgcaaatttttgcagccggcttgaatttctcctcagaaaatgagattttcttttctatcacatcatcaggctgcaaattttctgaaattgtatgctcttatttccttttaaacttaagtttca

SEQ ID NO: 342167 - DNA, 576 bp, Homo sapiens
attatgttttccattgataaacaaagcatttcatgtaaccttttaagggtggtttgcactggtgacttccttcagaaaagtatggaaaggggagaatatgtggctttatagtggagaaacgtgacacacactacctcagccaggtgatcaaagttaatactatgatatgtcatgttgatagtacatgcccttgrtatgatgtcatgagattggcatttatttacttttataatctcgcctctaaaataaatgcattacctcagtataatcataaggaaaacatcagtcaagcacaaattgaggaatattctaacaaaaccgatgagatcttctcaaaactgtcaaggcttttacaatcaaggttgtcactgaacccatttaaactgtgctactatacatcttgctgtatctataccagcaattctatagaaattaatcacaattctgttttgccttctgctcaataaagaggattcatttcttcctcttacctccactgaaaccaaggagcgggaatggcacaaagcccaggaacagaatctaatactcttgcttcctttcagttctcctacttct

SEQ ID NO: 342168 - DNA, 377 bp, Homo sapiens
tatgtagtttttttgtatgtgattataattgtgattrtatcacaattattgtaatcacaatttgattataatacaccttggtgtgaattactttgtgttttttttttatttggtgtcctttcgattccttgtttcacaatgtctgttttcttcttcagacttgggacattttaagccattatttctttgaataagctttctggtcctttccctcttttcctttgcaaactccctatatatagagagaacatagtatacttacatatatcctcttgatggtgtcccacaattctcttcctttgttcacttttctttgtgttcctctgactgaattattgcaagtaccctgtctttggattttttgtgttatttttaat

SEQ ID NO: 342169 - DNA, 377 bp, Homo sapiens
tatgtagtttttttgtatgtgattataattgtgattgtatcacaattattgtaatcacaatttgattataatacaccttggtgtgaattactttgtgttttttttttatttggtgtcctttcgattccttgtttcacaatgtctgttttcttcttcagacttgggacattttaagccattatttctttgaataagctttctggtcctttccctcttttcctttgcaaactccctatatakagagagaacatagtatacttacatatatcctcttgatggtgtcccacaattctcttcctttgttcacttttctttgtgttcctctgactgaattattgcaagtaccctgtctttggattttttgtgttatttttaat

SEQ ID NO: 342170 - DNA, 481 bp, Homo sapiens
ttaccctatgttttcttctaagagtgttacggttttaggtcttatatgtacattgttaacttaytttgagtttctcttagagtatggtagaagatacaggaccagtttgattttttggcatgtgaatatccagttttccaagcctatctcttgttatagagactctattttttgccattacatattattgacattcttgttgataatcagttgacgtgtgaatttatttgtgggcgtcatatcctgtttcatagctatttacatctagtctttatgacagtacctagtacttttaactactgaagctttgtaataggttttgaaatcaggagaagaaacaaagcctcatcttcgttcttccttctcaagattgatttgactattcagtcttttgtggtcccatataaattttagaatttttttatttctgtaaaaaaatattattgggattttgtttgggatagcattgaatttatggatc

SEQ ID NO: 342171 - DNA, 481 bp, Homo sapiens
ttaccctatgttttcttctaagagtgttacggttttaggtcttatatgtacattgttaacttactttgagtttctcttagagtatggtagaagatacaggaccagtttgattttttggcatgtgaatatccagttttccaagcctatctcttgttatagagactctattttttgccattacatattattgacattcttgttgataatcagttgacgtgtgaatttatttgtgggcgtcatatcctgttycatagctatttacatctagtctttatgacagtacctagtacttttaactactgaagctttgtaataggttttgaaatcaggagaagaaacaaagcctcatcttcgttcttccttctcaagattgatttgactattcagtcttttgtggtcccatataaattttagaatttttttatttctgtaaaaaaatattattgggattttgtttgggatagcattgaatttatggatc

SEQ ID NO: 342172 - DNA, 572 bp, Homo sapiens
tgtggtgccaactgatccatcaagttcaggtctgtaaaatatctcaagcactgatcttaggaggagtttagggagggtcagaacttccagcctccagctgcatggctcctaaaccataatttctaatcttgtggctaatttgttagtcccataaaggcagtctattccccaggcaaaaaggaggttcattttgggaaaggactgctatcatctttcttttaaactataaactatgaactaagttcttcccaaagttagctcagcctatgctcaggaaggaacaaggacagcttaaaggttagaagcaagatggagtcagttaggatagatctctttcactgtgtcagtcataattttgcaaaggtagtttcaatatcttatggtcaagattaaaattttatagattgtttataaaattttgaaaaacaaatttaattggctttatgctgtctttattggggcttattgtatagaaaattaagtctcctctcaaagaatgaagayttttgcctttttttttttaaatcctcgagttatgactttggtcaaatgaataacttattttataatga

SEQ ID NO: 342173 - DNA, 574 bp, Homo sapiens
ctcctggctattatcccgaagtgtgttttccaacttggttccattctccctgtctctttcagatactgcaatcaattgtaggttcagtctttctatgtagtcccatatttctcttaggctttgtttgttacttttaattcatttttctctaatcttgtctgcctgccttatttcagcaagatggtcttcaaactctgatattctttcttctccttgatcgattcagctgctgatacttgtgtgtgcttcaagatgttctagtgctgtttttcagctccatcaagtcaattatgttcctctctacattggttattctagttagcagctccygtaaccttttatcaaggttcttagcttctttgcattgggttagaacatctttttttagctcagcagagtttgttattacccaccttctgaagcctacttctatcaatttgtccatctcatcctccttccagtttttgctggagaggtgttgtgatcatttggatgagaagaggcactctggccttttgggttttcagtgttttttgttgttgttgttgttgattctttctcatcttcatgagtt

SEQ ID NO: 342174 - DNA, 578 bp, Homo sapiens
ctttcaacactttaaatatttcattacactttctattgccttccaggtttctaatgaaaatacaactgtttctcttattgaagttcttccatacataatgagttggttctctcctgctgctttcagtattctcttttggtttttgtttggtatttatgccaatttgatggtgtttctcactatggatctctgagcttatcttaaagtttcctgagcttcttgaatatgcagatttatatctatcaaatttgggaagttttaacccattatattttaagaaatattctctttcccctttctctgtcttttctttttctggaattsctaaaatgtatatgatattccactggatggtattccacagttctcttaagctcttttaacttttcttcactttcttttctctttcttctcctcagactaaataatttcaatgggcctatattcaaagttgcttatttttttcttctgactactgaaatctgctgttgaattcctctaataattttgaaaattttaatcattttacttttattctccagaatttctgtttggttaatttttataatttaaatgtg

SEQ ID NO: 342175 - DNA, 427 bp, Homo sapiens
agtgataggaatagtgttcctatcactatcagcattttggtcaatgccattcaacaattctctaggaagttcccaactttcccaccacatcatcctgtcttcttctgagcccttgaaaatgctctgacctctgcctgttacccagttccaaagctgcttccacattttcaagtatccttatggtagtgcctcattcccggtagcaatttcctgtattagtccattctcacactgctacaaagaaacacctgcgactgggtaattcataaaagaaaggtttaattgactcataattccacatgattagggagacctcaggatacttacaatcatggcaggagggaaagcctgcaccttcytcacaaggtggcagaaaagacagagagcaagagaggaactaccaaacacttataaagccattggatct

SEQ ID NO: 342176 - DNA, 617 bp, Homo sapiens
aattaaattaatatttactaattactattagtaaatagtaaatagcacagagtaaactgatggtccttggcttgaactgtttagaaagctatggaaaataaatgtatttaattctcctgattaaccactcttgagaagcaaggagtttagtgactatatatgtgagaccttcaaccatatgtggagacccaaggaatataataaagttggtttgtttctcttaagtttgctggacaaagtgctgaaaggaaatgaactcagggattctaactcccagctccagaagcacatactgagcttcaaatcttctaagattgccccaagtgagagtcttacatcctgtacagaaagagctaaaattrtggaaaatcagacacagctctgattatgagagtggctgacctgcaacaaaaggtgcacacatagcctcaccagctgtctactgttaaagtgagggcatttattgtaataaaatgagatgctgcaacttggaatgggaacatgtgagagaaccctgaagaagctggggacactaagcttgtaaacttcaacgagcctttttcccaaaggaaacagcttccccattcccagtggtggcaacattccttccctgactc

SEQ ID NO: 342177 - DNA, 572 bp, Homo sapiens
ctactcatcaaacacttctatatatttggctctgagttgtatagaatttgatttgtggttgttctcacaatgaggtgctttcccccagagagcatctgggagcaatgcaccacttaacacttgaagaagattgactgacaatcaggcttcgattctttacaaatattgtatttgtttgaaaatagctagatagcaagaattagtagcacactcatttttttccattttcagattgtagaatgttattaaatattagaggaaatttggagattaattatttatacctcttcattttgtagatgagagaactgaggcacagagactgaaaattatgtcccttagacacacagttatttagaagtatagccaagaattgaatcaaatttaatagcttttcttttgcataattttactttccttcttttttgaacagcagattttattttgggaaggtgacatagcaagtagaaaatctcaacagactatgtattctatttgagtactgacctcagaatgtgggcagaatcacaccattttacagayagatatttgccaaatctcattccatggac

SEQ ID NO: 342178 - DNA, 576 bp, Homo sapiens
tctcattccatggactggctctactggcctttcaataacttatttgttccattctagaatttatttaacatttgaattattaaaagtattctgaaccaatatatattatgtgagtttaccattgctggaatgcaagtcagtacaaaatggcttacttaaatgtttttgtcaacagtgtgtttctcctgattaattgcccaggctaaataaggagactrctgagctgctgagtggtctttatttatgtggatgaggcaactggcaactgcatacatgccttcttctcccagtaatctaggacatcaagtgagaagagaaggccccagattgtgatttgtggattgccaacaaaatcattttatcgttttattttttggaggaaagggagctacagaagcatttcactttgttgtgttagctttgtatctaaaatatatatttgaaatcagatgtatacaaatttgattattacacatttgcactagaaatcatagaagtggaaagaaatagctagactgctaattttcaaaactatttctccagtagccctgttcttacatagaatgataatatgca

SEQ ID NO: 342179 - DNA, 558 bp, Homo sapiens
ttcccaaccagtttcagctgctattctcagttcaagtcagctgtatttctagtgaacgttttttttttttctatgtgttcttaggttaatcaaatgccctgctgtttccttttgctttattctgcacaattcttgatatcatgctgttcttaccatgttggtatcaatcatgctcatatgcttgtattttgggatcgtggtaatatcttgttacctactttgttgcaagtgttrcgcatgagttttcaatttgatatctagctgttatgtttatttctgagaatttagagattcaaaacctgtgctgctattgtcatcatgttcccaaatcctttcctgtaattatcattttgtgtttaaggaaattgacgcacagagagattaaatgacttgctcagtgttacagagcaattatcaaggccaggattcaagccctaaaaatttaactagagatataagtttaacttctactctgctgcctcatcaacaaagtacatctttataattgcctaggaggaggactctttttcatctttcttgtgcctatgagttcataga

SEQ ID NO: 342180 - DNA, 599 bp, Homo sapiens
gcagcactaactacttatactgtttggggagcatctaagagcatcttgaagaggtcccagagaggagacattctctcttagagctaacgcctttgttcttttgtgaactcactatgctttatttctctgtcagctttaaacgcatgtgttgatcagcaaaaggatacccattacaaagctaattactattattggcctatatgtatcattcaggtcatcttcccagtctctctgcttcttagtagttggggcaagtagccaataattgagaaaaatatttcactttcaattgggtccactctggaactgggtacacagcaattcctgggaatgtgaaatgctgagtttggaacctggagtgggtgctttatatatgtatgcagtagtggcaggaggtcttgcttcaagtgyttatcttctctctccaattgtaacataggtctcttatgggtagaaaccatgagtgtgttttattgttttataaccactgctagcagcctagtgccagaaacatatcaatacatactcatttattgatagcttataaatattcaagtatctaatattaaaaatgcatttttctcttatattaaaaatga

SEQ ID NO: 342181 - DNA, 609 bp, Homo sapiens
tcatagctaagtgtacctgttatgttccaggcactactgtgatatactttattatctcatttaattatccaaacaacctcacaaactagttattcttagtttactaatgtggaaactgaaactcaaagaagtcaagtgacagaatagatgttttagtctagctttttctaactccagaccagtggttagagctgaaatatcattgtgctcagagataagccagtgctcccatgaagcttaagtcagcctaaattgtccttcaattcaagtgcaaagatttagtcgtggtgaattcagtaaatctttgacttttttccagctttcttagtgttgctggtgtggagtgagaagcctcaagtgactcctcagtggaaatagggtttgctgagatatgaggagttagagaatataataagcctctaccattgtagctctagctcaaagcaactacagtacttctcccaatctttctgtctgaatacacaactctgaagtgtgtagttatgaccatgaatacacagayacagagcatagggtgtatatagtgaggagagatgtggctgaccatgtagacaggcagcatatcatgaaaggctttcttttccattc

SEQ ID NO: 342182 - DNA, 419 bp, Homo sapiens
attatctttgctgattttgatgtttaatagggcagactctttgagtgcagtgtgtcttggttagcacattttatatatttatataaatatgacacatataaatatggtatacttgtttatatatatttagatatataaataattatgtataatatattatatcaatatgaatgctaaaactacacatagtgtctctartctaggctaatcttgacattttgtacacaaagatgtatttttctttgaatgacaggactttatgttaatgaaacaataacttgagatgcctaaaactcacttttggcattttgtcactaaattttactactgttattccacctagatgtatccaatcccaagtggtattacttgagggagaggtaagaaactctaagagttcatcatggtcccatgaatct

SEQ ID NO: 342183 - DNA, 574 bp, Homo sapiens
ttatcaataataatgttgattgtaaatggactagactctcagtaaaaattcataatgtggctgaatgtatataaaaaatcaagatccaatgatctattgccttcaataaacacagttaatctgtaaaaacacacatagactgaaaataaagggatgaagaaaggtatttcatgccattggaaaccacaaatgagcaggaatagctatacttgtatcagacaaaatagatttcaagagaaaaactgtaagaagagacayagaaggacactatataatgaaaagggggtcaataaagcacaattatataacaattataaatatgtatgcacacaacacttgagcacacagatacctaaagtgaatattattagagagggagatatactctgtattagtccatttttaccctgctgataaagacgtacctgagactgggggaaaaaaaagaaggtttaatttggcttacagttccacatggctggggaggtttcataatcatggtgaagggctgacgcgggcaccacttcttacatggcagcagcaaaagagaatgaggaagaaacaaaagtggaaa

SEQ ID NO: 342184 - DNA, 497 bp, Homo sapiens
gtatttcatttaatgatttgatggttcaggcttcaggccagtatggtaggtgtccctgggtagaaagtggctgtgctaaagccggtgggtaagtgcaataccccatggtgggcagaggttctagccttgacagaagtggctggaaaaactctcagtgagtcacagtgaggtcttattaggggcaaaggttggagtcawctcagtttccctgccaagtaaagaggaaagttacctactggtcagatacactcctgtcctagtgctccagctattcagatcagacagttacctcttttcatctacatgaatgttgatgtttcaagtagagaggaattgtgactctgtctctcattcaagcctgaacttggaggatgttcctcctgaagggatgccgtcaccctgatgtgttccagaaaagctgtctatagttgcacccatgccaggctttcatgggagaagccccaaatgtgcttgcagtgttggacaaggtgggaagg

SEQ ID NO: 342185 - DNA, 551 bp, Homo sapiens
ggtctatccttcacatgagcttctcagtggttagtttgtattttgcatgacattgtgtattgcagyttaattcttggggtttttgtcattatactttttgtttgttctcttttatatatgtgttgcttggggatgagcctgaacatgtgttgattcatacacagaatttagaaaacatttatttctgtctccttcaagatactcccaacactcttcagatcacagggcctttcttttccaggttgcactaggtaaaagcacaggttctctctcaggattttaggtgtctacatagtctttctaatgccactgaacctgtgcagcctcttctctgggactttcctcagggaaaggcaagggagaataaatagaaaaaaataaaaataaaacagtgcatggattcttcaaacactctctgccttacagggttttcttttatcagtccactgactagaaggaaatggtttctatcagaggttttggtttctgtactcaaagtgaagttcttggatagggttcacaatttggtcaaagccaggagataaacaagg

SEQ ID NO: 342186 - DNA, 654 bp, Homo sapiens
ccttcattcagctatcttgctctgcccctcatcctcaaaatatctattttaatactattaacaacactacatgagtacacactgtgttacaactcaatattagccaagataaaggggcagagagaacttaaaatatgcatagaagctatatcttcgtcatggattaccttggtatatatgcttatgttagatatcttatgcccaacatagagtatatgtccatatatacagataatctatgagwatgaattggagaaaatttgagatttcaacagaaaattggcgttagatgactcaaagtttcctagcttagagtaaaaggaaagggataaagaatgaatgatccaagaggagcaggattttaacatgaaataaatagaaagaggcaagaccaaaataaaataaaacgaactcattgagataggcctagaaatagtgagagaaaagactagccctgtgtttgctgaaatttaggcatagttagcaattatggggcatttgctacacactggactactgacattaggtaagcttaaaatgtagtcttaatttcagaataacaaaaaatacataatattttaacttaatttattgttcacaaagtttcacaaatatgtctatagccagttcaatgataattaatttggccaataa

SEQ ID NO: 342187 - DNA, 654 bp, Homo sapiens
ccttcattcagctatcttgctctgcccctcatcctcaaaatatctattttaatactattaacaacactacatgagtacacactgtgttacaactcaatattagccaagataaaggggcagagagaacttaaaatatgcatagaagctatatcttcgtcatggattaccttggtatatatgcttatgttagatatcttatgcccaacatagagtatatgtccatatatacagataatctatgagaatgaattggagaaaatttgagatttcaacagaaaattggcgttagatgactcaaagtttcctagcttagagtaaaaggaaagggataaagaatgaatgatccaagaggagcaggattttaacatgaaataaatagaaagaggcaagaccaaaataaaataaaacgaactcattgagataggcctagaaatagtgagagaaaagactagccctgtgtttgctgaaatttaggcatagttagcaattatggggcatttgctacacacwggactactgacattaggtaagcttaaaatgtagtcttaatttcagaataacaaaaaatacataatattttaacttaatttattgttcacaaagtttcacaaatatgtctatagccagttcaatgataattaatttggccaataa

SEQ ID NO: 342188 - DNA, 596 bp, Homo sapiens
ttcaatgacattcaataataattattccctagtacttttcatctgtatttttttaatgtgagttccaattttattaattggtaaaactgtgacatagcaattggctttcccaagatcgcaaagtgagctggagcctgaagtcagaataactgccttgtatatttaggcaattgtattacaatacaatgccttcatgtcaaacactactcctatttgaagcagagagaaatcagcagaagggggcaaaaactaaggctttacgtattctaatgtgcaaaatatggaagcctcctattttcaaaacatctayttttttctctgattctgtgaccctgcaaagtgcaaagcacggttttagctactgtgggatgatagagatgagcaagacttattttcttctttcaagcaacctactttctagttggaggaattaaaacaatgatagacatgtaattaatacaaggaaaaatgagggcagaattacaaggaatcacattagatttggtggcactaggaaaggaaccatgtaagaagtgcatctgataaaggttttaaagaatggatgaaatgtccaggtagaaaggaggaagaaagga

SEQ ID NO: 342189 - DNA, 596 bp, Homo sapiens
ttcaatgacattcaataataattattccctagtacttttcatctgtatttttttaatgtgagttccaattttattaattggtaaaactgtgacatagcaattggctttcccaagatcgcaaagtgagctggagcctgaagtcagaataactgccttgtatatttaggcaattgtattacaatacaatgccttcatgtcaaacactactcctatttgaagcagagagaaatcagcagaagggggcaaaaactaaggctttacgtattctaatgtgcaaaatatggaagcctcctattttcaaaacatctacttttttctctgattctgtgaccctgcaaagtgcaaagcacggttttagctactgtgggatgatagagatgagcaagacttattttcttctttcaagcawcctactttctagttggaggaattaaaacaatgatagacatgtaattaatacaaggaaaaatgagggcagaattacaaggaatcacattagatttggtggcactaggaaaggaaccatgtaagaagtgcatctgataaaggttttaaagaatggatgaaatgtccaggtagaaaggaggaagaaagga

SEQ ID NO: 342190 - DNA, 320 bp, Homo sapiens
tactacattttttcctatatatacatatctatgatgaaggataatttataaattaggcacagtaagagattaacaataactaataacraaatagtacaattaagacaatatactgtgataaaagtggcttctgtttctctctctcaaaatatcttaccatttttggactgtagttgactgtgggtaactggaagcacagaaaacaaagccatggagaagggggattactgtacattcttttcatgaaaattaactccaatatagcagcattcttacacagtgaatatgcttttccattgaaagtagctgccaattaaata

SEQ ID NO: 342191 - DNA, 589 bp, Homo sapiens
acctactaaggccagatttttcaatcaacagagattgattacatttttatgttgtatctgctaggtatgttctatcccatgcataaccatgaagccattgacttatatctccagggccctttatgccagtgatgctggagtcctttactrtaacagtagcaactctctatctatcttccccagaagaatccagaacttttatgatttgatcatgattacgatttaagataccacactcatggtatctttcccacaaatatttggagtcaaataaccttttcagaaccttctcaaagtataaatatactttttaagaaaaatatgttcacacacaattttgcttatagttttatgcatgctcaatatttctcatagattttatatgcttcttcctagttcttcttcttcttctgaacccctctgtttttttctttcagcctacacacaatttttttcttccatcacccctttctcttcaaatgttttcttatgtagattgactcaatttatcttagtcttagactttcctgcctctatctccttcttaattttgtctttctgcccaccctctaactgtgcattgacaaat

SEQ ID NO: 342192 - DNA, 589 bp, Homo sapiens
acctactaaggccagatttttcaatcaacagagattgattacatttttatgttgtatctgctaggtatgttctatcccatgcataaccatgaagccattgacttatatctccagggccctttatgccagtgatgctggagtcctttactataacagtagcaactctctatctatcttccccagaagaatccagaacttttatgatttgatcatgattaygatttaagataccacactcatggtatctttcccacaaatatttggagtcaaataaccttttcagaaccttctcaaagtataaatatactttttaagaaaaatatgttcacacacaattttgcttatagttttatgcatgctcaatatttctcatagattttatatgcttcttcctagttcttcttcttcttctgaacccctctgtttttttctttcagcctacacacaatttttttcttccatcacccctttctcttcaaatgttttcttatgtagattgactcaatttatcttagtcttagactttcctgcctctatctccttcttaattttgtctttctgcccaccctctaactgtgcattgacaaat

SEQ ID NO: 342193 - DNA, 586 bp, Homo sapiens
aaacaccggtgccatctatggaacaggaattacatgccaggctcggtgctagacattttacagattatcaactcaaccctaacattaaccctgtggagtaggtgataagattatgcccatggctaggtacagtggctcatgcctgtaattccagcactttagaaggccaaggcaggaggatcgcttgagctcaagaataacctgggcaacaggaaaaaattccatttctacaaaaaatacaaaaattagctgggtgtagtggcatgcgcctgcagtcctgggtactcagaaggctgagttgggaggatcccttgagcctgagaggcagagtttggagtgagctgagattgcaccactgcactccagtcttggtgatggagtgagaccttgtgaaaaaaaawaataataataataagattatgccctttttacagaagagaaaactgaggatttaacaggttggttccctgagttcactcaaaaagtttatttacagctggaattcaaactcagatctgtctggctggaaagctttggaaccacacagattattctgcgataacttggtaggaaaatcttacttaaa

SEQ ID NO: 342194 - DNA, 561 bp, Homo sapiens
ccccacaacaaatgtaggaggaagagattcaaaggaaaaggcttagggaatcctacatcttagggatgaacagagaaataagcgctgatgcgaatgcaggagacagctggggagcaaagaagagactagggagagagagacaggctggcttcataaagacaaggaaaaaatgatggctctgggaggatggagtgggctagcaaygtcaaataccactgagatgccaagaaggctgagacttgaaaaaaagtcaagagttgaagcaattagtggttcactgatggtctaattagatcagtttgagtggggttttcgttgcagctaaaaaagagagggtaaggaaagcagtgagtgtaaccaacccttcaaggaattggaaggcaaagaacaaagagaaaaagttaataacctaaggctggggaagaagaaattggaggttaaataacataaagcaaaaaattggaatattctaacatttttaaagtggaaggtttggttaagaaacaggaagttttaaaaacagagagaagagatgactgcagagcccaaagaagagaagat

SEQ ID NO: 342195 - DNA, 561 bp, Homo sapiens
ccccacaacaaatgtaggaggaagagattcaaaggaaaaggcttagggaatcctacatcttagggatgaacagagaaataagcgctgatgcgaatgcaggagacagctggggagcaaagaagagactagggagagagagacaggctggcttcataaagacaaggaaaaaatgatggctctgggaggatggagtgggctagcaatgtcaaataccactgagatgccaagaaggctgagacttgaaaaaaagtcaagagttgaagcaattagtggttcactgatggtctaattagatcagtttgagtggggttttcgttgcagctaaaaaagagagggtaaggaaagcagtgagtgtaaccaacmcttcaaggaattggaaggcaaagaacaaagagaaaaagttaataacctaaggctggggaagaagaaattggaggttaaataacataaagcaaaaaattggaatattctaacatttttaaagtggaaggtttggttaagaaacaggaagttttaaaaacagagagaagagatgactgcagagcccaaagaagagaagat

SEQ ID NO: 342196 - DNA, 515 bp, Homo sapiens
cacctggctaatttttgcatttttagtagagacagggtttcaccatgttgaccaagctggtcttgaactcctgacctcaagtgatccacctgccttggcctcccaaagtgctgggattacaagcgtgagccactgcacccagccatcaaattccagtcttttaaggataaagaatacacttgatcattttggaaagtaggcagaattttaagatggcacccaagattcctgtgtaattcccaagactgtggctataatggattttacattgtcattaggttgtttatgtggcacagttgaaattaagaaaaggagattatcttggctagacttgacctatttagatgacttgggctcttyctggagagagagatttgaaatgcaagacagattccatgtgaagtctctatttttggctttggagatggaggggaccacatgggcaaggtccactcaggagctgtgagtgccccttggctggcagcaaggaaacagagattttagtccaataacca

SEQ ID NO: 342197 - DNA, 538 bp, Homo sapiens
ccactgtgccctgcccctacccaacattctgatggtaaacacttaggtaatcactaagaagttctggactttctctagtcctttattccaaatcctcaccagaatcacccttaatgctctgaccatggcaatgcaggcctttatctaggttgctccttcaaattcttccaggctctacccattacccctacccaggtccaaagatgctttcacattttcaggtatttgctatagcaatagcccccttttggcaccagtttttggtcttagtctattttctgttactggaacagaataccatagactggataatttataaagaaaaagggtattyatctcctgattagggaggctgggtagtccaagagcatggcacctgcatctggtaaaagcctttttgctgtgtcttaatactgcagagggtatcacatggcaagagggcaagagcaagagagccagggagagctcacttttataacaaagccactcctgagatgacaaactcacacccatggtagtgacattaatttatggatgg

SEQ ID NO: 342198 - DNA, 370 bp, Homo sapiens
acataggccttgcacatagtatatgttcagaaaattatgtttgaattttatctgaattgcagagtttcagactaggtttgggattttctgcacacatatacaaggacaacagattgccaaaaaaaagccaagaaattaatgtatgagacagggccctccattccrtggctatacagtagccctatctcacttttgcctcctgatgtctaaaaccttttcaaaagatgatggtgaaagataaatattgaaatacaattcccctaggtgatcgtactagatatttatgttttggcttcacaacatctattgccccttctgtaggagacaacttcaactttcatttggggatccacttctccccaattttagc

SEQ ID NO: 342199 - DNA, 523 bp, Homo sapiens
gaatatttaatttaactttcccctgggaagctcttgggaagaagaaagaaagcatggctcttattctttcaagagaagcgtacaagaaatgrataaataaaacagttaattttccaactgtattcccttgctacatctatttgtacaaagcttcatgacttctttcctcatggagaggatgcagctacaatgcttattttatatattttactctgtgggtaagatgtgtcaatgaacagcaagtgaacagatctgccacacacagtagcagaggttgcacaatccataaccctgaggtaccattcatggtaacttatgatggacatgactccctttggcttgtgagtgcactcgtttatgcacttctgaggttagtcaagtaatatgaagtgtctgcaaaaaagcttttgacattattttcaccaagtagatattcatggaaattcataaaatccaagagtaaatgaacatgtcaatgactataagcaactctcttgaaagaaaatatgtaaggtcattgttg

SEQ ID NO: 342200 - DNA, 523 bp, Homo sapiens
gaatatttaatttaactttcccctgggaagctcttgggaagaagaaagaaagcatggctcttattctttcaagagaagcgtacaagaaatgaataaataaaacagttaattttccaactgtattcccttgctacatctatttgtacaaagcttcatgacttctttcctcatggagaggatgcagctacaatgcttattttatatattttactctgtgggtaagatgtgtcaatgaacagcaagtgaacagatctgccacacacagtagcagaggttgcacamtccataaccctgaggtaccattcatggtaacttatgatggacatgactccctttggcttgtgagtgcactcgtttatgcacttctgaggttagtcaagtaatatgaagtgtctgcaaaaaagcttttgacattattttcaccaagtagatattcatggaaattcataaaatccaagagtaaatgaacatgtcaatgactataagcaactctcttgaaagaaaatatgtaaggtcattgttg

SEQ ID NO: 342201 - DNA, 523 bp, Homo sapiens
gaatatttaatttaactttcccctgggaagctcttgggaagaagaaagaaagcatggctcttattctttcaagagaagcgtacaagaaatgaataaataaaacagttaattttccaactgtattcccttgctacatctatttgtacaaagcttcatgacttctttcctcatggagaggatgcagctacaatgcttattttatatattttactctgtgggtaagatgtgtcaatgaacagcaagtgaacagatctgccacacacagtagcagaggttgcacaatccataaccctgaggtaccattcatggtaacttatgatggacatgactccctttggcttgtgagtgcactcgtttatgcacttctgaggttagtcaagtaatatgaagtgtctgcaaaaaagcttttgacattattttcaccaagtagatattcatggaaattcataaaatccaagagtaaatgaacatrtcaatgactataagcaactctcttgaaagaaaatatgtaaggtcattgttg

SEQ ID NO: 342202 - DNA, 604 bp, Homo sapiens
ttgttagggaccagagaactcagctaagccatgcctagattcttgatgcacagaaactgtgagataatgactatgggttagtttaagtcactaatttggagagagtaatttattaaacagtaataaataactagtacagcaatgttcctacacatatacatctatagaacttaggaaatccacaataaaataaccaactcaacaatggaagttacrgttttgaagaatgaccatccatcaagatggggcaagcaaccagaagaaaatttttacaattatccatttttgaaacttgaaatttatgtacttccttgtttgatgatgcattagcatgaagtgcttaccataataaaaggttttccatcatgatgtagaatattttttaaaatcattggaggcagcagaggaagtagactttcacattcagtgatgacttaggactgtcctttgtattcaatcataaagctttttacccataataaactcattagcatagaacagcgatattctctactaagttgtgtttccagaatgtgtgtgatttatttctcatttatactatgcatctttgtctctttctaatttcttttcattgggtatttgg

SEQ ID NO: 342203 - DNA, 596 bp, Homo sapiens
gcactctgttaaaagcccatgaagaatggaatcccgacaaaaatctcttgagtaaacttagaataagatccatccccagtcaagcctgaagatgagactgcagcccagccagcaccttgattaggccttgttagggaccagagaactcagctaagccatgcctagattcttgatgcacagaaactgtgagataatgactatgggttagtttaagtcactaatttggagagagtaatttattaaacagtaataaataactagtacagcaatgttcctacacatatacatctatagaacttaggaaatccacaataaaataaccaactcaacaatggaagttacagttttgaagaatgaccatccatcaagatggggcaagcaaccagaagaaaatttttacaattatccatttttgaaacttgaaatttatgtacttccttgtttgatgatgcattagcatgaagtgcttaccataataaaaggttttccatcatgatgtagaatattttttaaawtcattggaggcagcagaggaagtagactttcacattcagtgatgacttaggactgtcctttgtattcaatcataaagcttt

SEQ ID NO: 342204 - DNA, 604 bp, Homo sapiens
ttgttagggaccagagaactcagctaagccatgcctagattcttgatgcacagaaactgtgagataatgactatgggttagtttaagtcactaatttggagagagtaatttattaaacagtaataaataactagtacagcaatgttcctacacatatacatctatagaacttaggaaatccacaataaaataaccaactcaacaatggaagttacagttttgaagaatgaccatccatcaagatggggcaagcaaccagaagaaaatttttacaattatccatttttgaaacttgaaatttatgtacttccttgtttgatgatgcattagcatgaagtgcttaccataataaaaggttttccatcatgatgtagaatattttttaaaatcattggaggcagcagaggaagtagactttcacattcagtgatgacttaggactgtcctttgtattcaatcataaagctttttacccataataaastcattagcatagaacagcgatattctctactaagttgtgtttccagaatgtgtgtgatttatttctcatttatactatgcatctttgtctctttctaatttcttttcattgggtatttgg

SEQ ID NO: 342205 - DNA, 604 bp, Homo sapiens
ttgttagggaccagagaactcagctaagccatgcctagattcttgatgcacagaaactgtgagataatgactatgggttagtttaagtcactaatttggagagagtaatttattaaacagtaataaataactagtacagcaatgttcctacacatatacatctatagaacttaggaaatccacaataaaataaccaactcaacaatggaagttacagttttgaagaatgaccatccatcaagatggggcaagcaaccagaagaaaatttttacaattatccatttttgaaacttgaaatttatgtacttccttgtttgatgatgcattagcatgaagtgcttaccataataaaaggttttccatcatgatgtagaatattttttaaaatcattggaggcagcagaggaagtagactttcacattcagtgatgacttaggactgtcctttgtattcaatcataaagctttttacccataataaactcattagcatagaacagygatattctctactaagttgtgtttccagaatgtgtgtgatttatttctcatttatactatgcatctttgtctctttctaatttcttttcattgggtatttgg

SEQ ID NO: 342206 - DNA, 406 bp, Homo sapiens
ctgctcttcctcctcttcctcagccttcccaatgtaaagacgatgaggttaaaggcttttatgatgatccacacccacttaaggaatagtaaatatattttctcttcctgatgattttcttaataacattttctcttcttyagattacttaatataaaaatacagtatataatacatatacaaaatgtgtgttaatcaactatttatgttattagtaaagcttccagtcaatagtaggctattagtagtcaagtttagagaatcaaaagtcactcagattttgtattgttcgagaggtcagtacccctaatccccacattgttccagggtcaactgtggtggtaagaattataaagagaaaaaacagctaatagcatagattaacattaatatctctgggtaccat

SEQ ID NO: 342207 - DNA, 406 bp, Homo sapiens
ctgctcttcctcctcttcctcagccttcccaatgtaaagacgatgaggttaaaggcttttatgatgatccacacccacttaaggaatagtaaatatattttctcttcctgatgattttcttaataacattttctcttcttcagattacttaatataaaaatacagtatataatacatatacaaaatgtgtgttaatcaactatttakgttattagtaaagcttccagtcaatagtaggctattagtagtcaagtttagagaatcaaaagtcactcagattttgtattgttcgagaggtcagtacccctaatccccacattgttccagggtcaactgtggtggtaagaattataaagagaaaaaacagctaatagcatagattaacattaatatctctgggtaccat

SEQ ID NO: 342208 - DNA, 618 bp, Homo sapiens
tattcttcactttttttctgtcctatgtatttattcaagaagtatttattgagcattcgttaagtaccagactccaggtcagatgttaaagatccctgaagaggtaaaacagacagatacagattcttcctcctggactttctgtctgttggagggcacagaaataagagaaaattaaaagactaaaaagtgtcataggggagaggtaggccctgcttcaagattatatgacagacaaagcagctttggaawagtaaaacttaggaaagggctgttaggcttgggaagccttctgtttaggaggaacttcaggccctggattgccgagtggtgctgagagggagaaaagtgggtcagggtgatggtaggggtgagaacacgccaggctcactgagttaactctggcctctaggtttacaggtgagaagtcaattatgactaatcaccctgcttgatttttcaggccagctcaatccagcggacaggaagggcagattcagcccaaatgcttggactagtaataatttggcatgtggctggagtgtcctgcacaccctaactctgattcttcccctgggatggattaggaatccccatgagagaagaagggatgctgcc

SEQ ID NO: 342209 - DNA, 469 bp, Homo sapiens
agtgaatacttggagttgtgtcctggagccagctccgtactggcttacaaatgcacattgtgaaatattcaggattttcacaagccagttgttaaataaatggttggtagctcaagagtagccacagtgggtgtgtttatacaccacataaatcagaaaactctacaaatcagggctttttttccccctctgaaagccagtttaccagcacactactgaatgtatgtgaaaatatttgacatagtatcaaacatacataggatgtactctaaaatgcgtattttgatttttccattgaaattcaacagtcagtgttaaaagagctacacttttcactattttgcttctgatatctggttagggttaccagaaagtgctctttgaagtgggccatgactctatccgtaccattttatttatttaaagaaataaacrgagggtgacattaagcaaatatgataaaacatta

SEQ ID NO: 342210 - DNA, 523 bp, Homo sapiens
ggtcacagtctcagattaagatgtaggagcytccttgcagcctcaggatgccgaattatatcatagatcattttgcccctttattttgaattgtgcatgattcctacatttcaggggattgcctccttacacgcacaaacatcacacacacatcatagaaagcaacagctggacctgaaagttatccagcacagagattgcaaacaggaaagactgggactgtggaagtgttttgcatgccctgcacaacgttttacttgtttatatgctatttttctaaaataaatttaaatgcttctaggtagatttgcactctccagttgctcacagtttttaccacttcatattggcttagtttggtttccccaaagccgattcaaaacaaggtcttgtatacaggaacttaatttgggagagtacctaaggaggtagtgagggggaagggagagtgacacaggaggacagaaatgccaataaagggcatgccaataatgggctgaatcatgtgtgccccaaatctatt

SEQ ID NO: 342211 - DNA, 523 bp, Homo sapiens
ggtcacagtctcagattaagatgtaggagcttccttgcagcctcaggatgccgaattatatcatagatcattttgcccctttattttgaattgtgcatgattcctacatttcaggggattgcctccttacacgcacaaacatcacacacacatcatagaaagcaacagctggacctgaaagttatccagcacagagattgcaaacaggaaagactgggactgtggaagtgttttgcatgccctgcacaacgttttacttgtttatatgctatttttctaaaataaatttaaatgcttctaggtagatttgcactctccagttgctcacagtttttaccacttcatattggcttagtttggtttccccaaagccgattcaaaacaaggtcttgtatacaggaacttaatttgggagagkacctaaggaggtagtgagggggaagggagagtgacacaggaggacagaaatgccaataaagggcatgccaataatgggctgaatcatgtgtgccccaaatctatt

SEQ ID NO: 342212 - DNA, 562 bp, Homo sapiens
ttaaaagatatcatttgggactctcacagctaaagagatatgaagccagccgggtgaagtggctcacacttgtaatcccagcgctttgggaggccaaggtgggcggatcacctgaggtcaggagttccagaccagcctggtcaacatggtaaaaccctrtctctactaaaaacaaaaaattagctgggcgtggtatcaggcacctgtaatcccagctactcgggaggctgaggcaggagaatcgcttgaaaccgggagatggaggtcgcagtgagccgagctcacaccactgtacttcagcctgggcaacaagagcaaaactccatcgcaaaacaaaaaacaaacaaacaaaaaacccgacacccacgaagtcaaagtctggtttcaaagcttcaaaggacaggctgactctcttgttaggggccgatgcagctggtgactttaagttgaaaccagcgcttatctaacattctgaaaatcctaggcctctcaagaattatgctaaatctactctgcctgtgctctagaaatgaaacaacaaagcctagatgatagcacctct

SEQ ID NO: 342213 - DNA, 589 bp, Homo sapiens
tggctcagttcacctccctgtggtcacacatccttcagcaggcttgcccacacccttttcccttagtggctagatatagttctaagaggacgagtagaaggccccttgaggcctaggcttgtaactagcacactgtctkttctgtgtattctagtgactaaagcaagccataaagtagactctacctccacatgggaggagctgccgtccaactgtgaattattatggccacctttttcaacctgctaagtgttcaataaatctcactgtatgttgctgatattattattattgtctaaatttgtttattttctattacttgctataggcattattatccttgctactagactttttaaaagtttaggtcaggggctgagtgtggtggctcatgcctgtaatcccagcactttgggaagctgaggcaaatggatcacttgaggccaggagtttgcgaccagcctggggaagatggcaaaacccagtctctacaaaaaatacaaaaaacagccaggcatggtgatgcatgcctgtagttccagctgctgaggtggctgagggaaggagagtcactggagcctaggaggta

SEQ ID NO: 342214 - DNA, 589 bp, Homo sapiens
tggctcagttcacctccctgtggtcacacatccttcagcaggcttgcccacacccttttcccttagtggctagatatagttctaagaggacgagtagaaggccccttgaggcctaggcttgtaactagcacactgtctgttctgtgtattctagtgactaaagcaagccataaagtagactctacctccacatgggaggagctgccgtccaactgtgaattattatggccacctttttcaayctgctaagtgttcaataaatctcactgtatgttgctgatattattattattgtctaaatttgtttattttctattacttgctataggcattattatccttgctactagactttttaaaagtttaggtcaggggctgagtgtggtggctcatgcctgtaatcccagcactttgggaagctgaggcaaatggatcacttgaggccaggagtttgcgaccagcctggggaagatggcaaaacccagtctctacaaaaaatacaaaaaacagccaggcatggtgatgcatgcctgtagttccagctgctgaggtggctgagggaaggagagtcactggagcctaggaggta

SEQ ID NO: 342215 - DNA, 575 bp, Homo sapiens
  misc_feature (1)...(575): n = A,T,C or G
aggagtntaatatgttcccccttatcttacagatgaggaaaatcaagtctagcaatagctcactaatgtgttcaaatattgtgaaagaaccctgtttaaaacaaaatcttgtttctcccaggggtgtagtgaggcamccttagtccgttctctgcaaagtggtggctgttcttctaataaaatcacatttcagtttcttcccctttatccaaggcctttaagcagggctttccagtttttcaaggtttccatattgttgagtgctttttgattaacattttacgcaccagatcatatgcaaataatatcagttactcaggcagtaactcagaaagtaaatacagtaaatatgaggaaagaaaaccgtcacacctactcatgactctagtcacttgagaatatgtgtggatgagaattanaggatatttcagctgaaaaatgaaaggatttattgctctcaggctgtcatattacatttatgagagtggattttatgtttctcaagatatcttgctcatgaggacngagcaattataatccaagcatagctcctctgattatcttgggaaatatat

SEQ ID NO: 342216 - DNA, 589 bp, Homo sapiens
tggctcagttcacctccctgtggtcacacatccttcagcaggcttgcccacacccttttcccttagtggctagatatagttctaagaggacgagtagaaggccccttgaggcctaggcttgtaactagcacactgtctgttctgtgtattctagtgactaaagcaagccataaagtagactctacctccacatgggaggagctgccgtccaactgtgaattattatggccacctttttcaacctgctaagtgttcaataaatctcactgtatgttgctgatattattattattgtctaaatttgtttattttctattacttgctatagrcattattatccttgctactagactttttaaaagtttaggtcaggggctgagtgtggtggctcatgcctgtaatcccagcactttgggaagctgaggcaaatggatcacttgaggccaggagtttgcgaccagcctggggaagatggcaaaacccagtctctacaaaaaatacaaaaaacagccaggcatggtgatgcatgcctgtagttccagctgctgaggtggctgagggaaggagagtcactggagcctaggaggta

SEQ ID NO: 342217 - DNA, 589 bp, Homo sapiens
tggctcagttcacctccctgtggtcacacatccttcagcaggcttgcccacacccttttcccttagtggctagatatagttctaagaggacgagtagaaggccccttgaggcctaggcttgtaactagcacactgtctgttctgtgtattctagtgactaaagcaagccataaagtagactctacctccacatgggaggagctgccgtccaactgtgaattattatggccacctttttcaacctgctaagtgttcaataaatctcactgtatgttgctgatattattattattgtctaaatttgtttattttctattacttgctataggcattattatccttgctactagactttttaaaagtttaggtcaggggctgagtgtggtggctcatgcctgtaatcccagcactttgggaagctgaggcaaatggatcacttgaggccaggagtttgcgaccagcctggggaagatggcaaaacccagtctctacaaaaaatacaaaaaayagccaggcatggtgatgcatgcctgtagttccagctgctgaggtggctgagggaaggagagtcactggagcctaggaggta

SEQ ID NO: 342218 - DNA, 649 bp, Homo sapiens
tttctgctgaaattatctatgctttctgtctccctttacactatgcaacattatggtccctttggaacaaaaatctcaagctttgcaagtttggagatttgaaatgtttagagtagaatgtaaagagtgcagatacaattgcttatgtttgtaaaaatatcagaactatttgtttaacaaagtaggccgtttccaccccttccatgcataatccattaagttatgattccagaattaggattttgagaagcttgatggttaggttcacatccccataatgacatatttcccaaggctctggaaagaaaggggtataattagattactatcaccaagtatcttgttttaaatttagaacttttgagaccgrtgacttttgaaataagaatgatagtcaatatcctgaaggaactggtaggctggaaaactgttttctagctatgagaatgagaaagagaaagagagagagagagactatcttccctctaatatcctttttcttttcttaagaaatgcagtcatattcagaggcaaatatttctaacaccaatctgcaggatatacttcacagaaaagttattttatactagaataaagatgaaacagttttgaaatatgaactataatttgatatatggcttaatacgat

SEQ ID NO: 342219 - DNA, 603 bp, Homo sapiens
acttaattgttgacgctcattagattctattcttgtataattcacaagtgttaattgtggtaaaaatgactaatgtttcacaagatttctggttctgttctcctgccagaaacatgctgtttgagttctgccctttgttagggactgaatgtttatgcctcctcaatactttcgttgaaatcctatcccttaaggtgatggtattaggaggtgtggtctttggaaggtaattaggattagataaggtcaacaaaatggatcctttgtgaatggaattagtgcccttataagattgcttagagtgtctgcttccctggttcctctctttgccatgtgagaatacagtgagaagatagcctactgtgaaccagaaagtgggccctcgccacacactgaattggctagtgactaggtcttygacttcccaacctctagagctgtgagaaataatgtttgttgtttaagccacccagcttatgatattttgctatagcagcccaagctaagacaccccataacttactttaagtaatgataagtaagcagaactcatccactacttctgggtagaagaattacagagctagcacatgattctccatg

SEQ ID NO: 342220 - DNA, 603 bp, Homo sapiens
acttaattgttgacgctcattagattctattcttgtataattcacaagtgttaattgtggtaaaaatgactaatgtttcacaagatttctggttctgttctcctgccagaaacatgctgtttgagttctgccctttgttagggactgaatgtttatgcctcctcaatactttcgttgaaatcctatcccttaaggtgatggtattaggaggtgtggtctttggaaggtaattaggattagataaggtcaacaaaatggatcctttgtgaatggaattagtgcccttataagattgcttagagtgtctgcttccctggttcctctctttgccatgtgagaatacagtgagaagatagcctactgtgaaccagaaagtgggccctcgccacacactgaattggctagtgactaggtctttgayttcccaacctctagagctgtgagaaataatgtttgttgtttaagccacccagcttatgatattttgctatagcagcccaagctaagacaccccataacttactttaagtaatgataagtaagcagaactcatccactacttctgggtagaagaattacagagctagcacatgattctccatg

SEQ ID NO: 342221 - DNA, 640 bp, Homo sapiens
acctatggaggtgttatatttgttcaacataacattttcaaaattggacattttttataaaatttcaggttagcaacttttcttaaagaccatgtctaacaataygggacccatgtttctgcatgataatagtcagcttaagctgaataatggcagtagcctttaaacagtgtactttgaagtttttaattgcctcttctgtctcatgtctgtttcttcatttgtatcataggacaggactcaccagcatttgaatttgtgatgtctgatttatataacgttgatttaccatgtagatgacaaggaactattgtcctgtgccaagaaatttttaaggctcatagagtcatttcatttcagagctctctgacgctaataagacaaaactctcactttatagtgtactaactggtaggaagagttcattattgtttttagaggtactattatttaacattctggttttagtgacactttggagaaattttctgggatttttaaattacttgtcaatcacttatctcagtgaatgaatttgattctgtgggatttaccaaatttaaaattggtaaaagtgtaatagtgatcagctacttgtcttttaagtagttttttatatctgaccatagactccaccaaa

SEQ ID NO: 342222 - DNA, 640 bp, Homo sapiens
acctatggaggtgttatatttgttcaacataacattttcaaaattggacattttttataaaatttcaggttagcaacttttcttaaagaccatgtctaacaatacgggacccatgtttctgcatgataatagtcagcttaagctgaataatggcagtagcctttaaacagtgtactttgaagtttttaattgcctcttctgtctcatgtctgtttcttcatttgtatcataggacaggactcaccagcatttgaatttgtgatgtctgatttatataacgttgatttaccrtgtagatgacaaggaactattgtcctgtgccaagaaatttttaaggctcatagagtcatttcatttcagagctctctgacgctaataagacaaaactctcactttatagtgtactaactggtaggaagagttcattattgtttttagaggtactattatttaacattctggttttagtgacactttggagaaattttctgggatttttaaattacttgtcaatcacttatctcagtgaatgaatttgattctgtgggatttaccaaatttaaaattggtaaaagtgtaatagtgatcagctacttgtcttttaagtagttttttatatctgaccatagactccaccaaa

SEQ ID NO: 342223 - DNA, 640 bp, Homo sapiens
acctatggaggtgttatatttgttcaacataacattttcaaaattggacattttttataaaatttcaggttagcaacttttcttaaagaccatgtctaacaatacgggacccatgtttctgcatgataatagtcagcttaagctgaataatggcagtagcctttaaacagtgtactttgaagtttttaattgcctcttctgtctcatgtctgtttcttcatttgtatcataggacaggactcaccagcatttgaatttgtgatgtctgatttatataacgttgatttaccatgtagatgacaaggaactattgtcctgtgccaagaaatttttaaggctcatagagtcatttcatttcagagctctctgacgctaataagacaaaactctcactttatagtgtactaactggtaggaagagttcattattgttkttagaggtactattatttaacattctggttttagtgacactttggagaaattttctgggatttttaaattacttgtcaatcacttatctcagtgaatgaatttgattctgtgggatttaccaaatttaaaattggtaaaagtgtaatagtgatcagctacttgtcttttaagtagttttttatatctgaccatagactccaccaaa

SEQ ID NO: 342224 - DNA, 509 bp, Homo sapiens
aaggagtaagtcactgaaaagaaaaayaaaaaatggggcatttcatagattttaaagcagtatattgatagcataatattataaacatcttgataataaatttaaaaaatatagtaagatgaacattttctggaaataaacacatttctgctaaaattgaacaaagaatagaaaatctgaataattatatatctaatacagaaattatatttgtttaaaaaatgcattggttacctctgaaaaaattaagagaaatatcagtaatcttctgcaaaatattctagttataaaaaaagaggaaacagtttccaaaccattatatgaaaccagtatataattgatagcaaaattttacaagttataaaaagaaataaatattttcatgatgagataaaaactttttaaagtaacatattaactaccatcaagttaccaaaaggataatgtatctcaaatgaggtgtttctcttttcaaaatgacactttgttttaatagaaaaaaaagtcta

SEQ ID NO: 342225 - DNA, 570 bp, Homo sapiens
aaaacatttgtaattaatgtgatggataaaaagtgacattcataatatattgattaaaaagaacactaatgttacaataactgagaaaaaggtataaaaacattgtgagaaaattgatagaagtaaatgtctagtatttaagacaaatttttaacttcaatgaaaatcagaacacttgaatacaatcttcatattttaagtcagcagatatttttgaaaatcagaacaattaaaaaccaatgttgtcttataaattagcagcactttgaaaataatggtgtattaatttcctagggctcccataacaacgtatcacaagctggatggcttaaaactgcgtaaatttattttctcatttaacatggtggctcacgcctgtaatcccaacactttgggaggtcgaggcrggagagtcacttgggacaaagagtttgagaccagtctgggcaacattgaaagactgtctttacaaaaaaataaatttagctggctgtggtggcgcatgactgtagtcctagctactcgggaggctgaagtggaaggatctcttgagctggggagtttgaggtt

SEQ ID NO: 342226 - DNA, 570 bp, Homo sapiens
aaaacatttgtaattaatgtgatggataaaaagtgacattcataatatattgattaaaaagaacactaatgttacaataactgagaaaaaggtataaaaacattgtgagaaaattgatagaagtaaatgtctagtatttaagacaaatttttaacttcaatgaaaatcagaacacttgaatacaatcttcatattttaagtcagcagatatttttgaaaatcagaacaattaaaaaccaatgttgtcttataaattagcagcactttgaaaataatggtgtattaatttcctagggctcccataacaacgtatcacaagctggatggcttaaaactgcgtaaatttattttctcatttaacatggtggctcacgcctgtaatcccaacactttgggaggtcgaggcaggagagtcacttgggacaaagagtttgagaccagtctgggcaacattgaaagactgtctttacaaaaaaataaatttagctggstgtggtggcgcatgactgtagtcctagctactcgggaggctgaagtggaaggatctcttgagctggggagtttgaggtt

SEQ ID NO: 342227 - DNA, 527 bp, Homo sapiens
ggtggctctcactaagaattcataggctttttctatgaacactgaattatccatgattgagaatcccctgcaattcaaacatggaaaaggtctgaatagggaaggtggagaacagtatggaaagggtcagatcactgagtgggaacaataccttgctgcttgtttcttgggggaacgtagccacagagagaggcactagtaccagaacaggaggcaccagaagggcaaggaaagtaatgacagtattacagagaccaaaggcacagacagagaaactcaaaaggaggaaacaggctcattagaaatgtatcatactgtccagaatgtgcaactgcagaagagatagactgtaaaaggagaagagcaagagaacaaaagtacasaggtagtttatcttgagtcacccccaaaactacaggaccctgttgatatggtttggctctgtgtccccacctaaatctcatctcaaattgtaatcccgacatgttgagagagggacctagtaggaggtgactgaatcatggggg

SEQ ID NO: 342228 - DNA, 527 bp, Homo sapiens
ggtggctctcactaagaattcataggctttttctatgaacactgaattatccatgattgagaatcccctgcaattcaaacatggaaaaggtctgaatagggaaggtggagaacagtatggaaagggtcagatcactgagtgggaacaataccttgctgcttgtttcttgggggaacgtagccacagagagaggcactagtaccagaacaggaggcaccagaagggcaaggaaagtaatgacagtattacagagaccaaaggcacagacagagaaactcaaaaggaggaaacaggctcattagaaatgtatcatactgtccagaatgtgcaactgcagaagagatagactgtaaaaggagaagagcaagagaacaaaagtacagaggtagtttatcttgagtcacccccaaaactacaggaccctgttgatatggtttggctctgtgtccccaccyaaatctcatctcaaattgtaatcccgacatgttgagagagggacctagtaggaggtgactgaatcatggggg

SEQ ID NO: 342229 - DNA, 572 bp, Homo sapiens
aattcaacagatcttattgtgtgcatttcatgtactaacctcaccccgatttcatttttttctaccctcatttgttcttccttctaatttcctctaattaaaaaaaaaatgttgaacactctcattcttcttgggagcaaggtagacaataaatagaatagattaatttatagatatatttattaaattctaggtggatcccagcatcctatttgcagggctcctgrtgtggaggaagagggtgagggttagcagtccagaaaatgtcaattccacgtccattgaagttgtgttcattgatactgtttctgttgtcaccctccccctaactcaccacccttgttgctgtggctttttcattgttagcttaccatgtaacttgcatttttggagtagattttgctgacctttggtaacctggagatgactgtgtttctttctgaagtgaaatagtcatgggttttgatgagaggcccttttcatctcataagcatttgcccataaaagaattaggaaaaacaaaaatcaatgctactctcctcctttttcatataacattaaaatgctatcaa

SEQ ID NO: 342230 - DNA, 393 bp, Homo sapiens
tattgggtggaaaggaagaaaggggaaaaacagggactctcgctaggccagtgttcctgctagagtgcttcccgcccaaagcttggatcccgggttccacccaggaagaggagaaaccaggctcctccctgctgcaaatgtcattaacttcccgaggctccacctcagtgggaaggctggttrgagtttctccagggacaccctcccacctggctgtctctttcccgcctgcacagaagtacatctaactgcccttcgaataagggtaaggatgaagacctatcttaactgcttcctgccgacagagggcactgttttggggaaaccacagtcagagcttccccagaggcctaccaacaggttcccagcagaagggaccattgtcagaggctc

SEQ ID NO: 342231 - DNA, 594 bp, Homo sapiens
ctttctagataaatacgtatttatcagtttttaactgcttactaccatttccgtttccattgtattgtaaggtttgggggctctgaacagttttgtacacatattctgcatgaggaataatgtagaattgtagcatcctatgaaagaagcctgtgaagaaataaagcaaagtactcctcagtgacagaacttctttactctgaccttgaggaactgatctgagaaccaaatttcaatcatattcttttttagaaaatattactccaaacttattcctgtacaaatgaatcccaaacaaaagttaccagttttaaattaataagacaatgttatgmagctatattttctatagcccataaatgcatggcaattggaagaatgggctctttaattaaaaagatgacaatgatgataatcagtattattatcattatgagaaatactgctactaccatttaaaatactaagcctgagttaacagactgtgaacttagtgaaattagtattgaaatgacatgttgtgaattttactcaaatatatgaacttaatgccttcattacacaatctttgttgatgttattaacaaataatat

SEQ ID NO: 342232 - DNA, 617 bp, Homo sapiens
taccatgtgcatggtgttttgctcatgaaattgacgaataagagaaaatagttcgagtaggctagttatggccctgcgtcatattgctttactgggtttagtataataaaatagagcagatttcaccgtaaatatagagcctyttccatgattgtaatcagttgcctcaatattgattatatttagtttctcatgtcaaagatgtgtatatatgcatcctgagtgatgtagtaacttgatttctaaaatcctgaaatttaatagccatagcctgtgaaataaaatttatatctaccaatgttgggcatatggtgaatatagcgaaattagtcatttattcactatcaatgtatatgcaaaatcacattacaattttctctatgacatctaatgaatgaccttaatattctaaggcatttcattgtgtgcataacattgactttctattttatatatttttatatattcaaacaatataagtagtttgaatgcagataatgattttcactggggaagggaattttcaaatatgaataagtgctttaaaggaatgaaattaaaatctttgaaatcaatgcatcaaggaatgaaattaaaatattgatttgccttagatt

SEQ ID NO: 342233 - DNA, 574 bp, Homo sapiens
ttaattgttaatttgtatttattaaaaaataaatttatgataataaggagtacaaagcaggcaatctttgtagctagcaatttagcttttacattaatttaaatttattaggaaggaaatatatgaaaattaagttatagaaacaagcaggaaataaaaatcatacatgattgcccaccaagagaatactactcttaacatttcagcacttgtcttacagtagcctttctacatttctaataacacatgtacacatatacacaccacacacagagaaaataatgttctcaggacacaagctgaagaaggcaaaatctctagcttttattgttttgctgcctcaggtattcacattttattgggctttcattctcccttgagagtgtaaaaatgttagattttggtctctgtcattctgggaccttagaaaatataacagactgtttttgaactattctttaggcactccatgmcactacatccatcaatcctagatcatcacatggttgttgaggagattttggggggaagtttgttctagatcttatttcatggactcccctaaaaaagaaag

SEQ ID NO: 342234 - DNA, 635 bp, Homo sapiens
gttccaccaccattagaaagtaaagttctaccactaattccgaaagaaaagtctggttccagaaagaatgtaaacgttgcatgtatctaccaaaagttgagaattccatgtgcttgataagagcaaaattaaactgtgtcatgtatcaatctctaataagaaaaaagtaataataatactcaaagggatgaggtcctagttctgacacttaatagctgtatgatcttgaacacacgacttagtcctttgcttttctcattttataaggatgttatatgagtacttatatgttttatgagaaataagacatggcatgcacaatgcttagcacagtgttggcttagtcaaatttgtctttactgaggttaacagacaaaaattatatagtgtttaaagaacttcacttttaagcatgtttagttgtgcatttgtgacaagtcctagtgsgatcctgatttacaggttcataattagcttccctaaataggtcactattaatctacaaagggggaaaataaacactgtaggtaaacataacacactatatatatgtatatccttacacaggttaaaagaaaaaccaagtagtactcaactgtaatttcaaattccaaagaatccttcccttctcttga

SEQ ID NO: 342235 - DNA, 618 bp, Homo sapiens
tactatttaaactcagtactctaatagcttgttctcccatagtttgaagaaggctgatattcagctgattgcaccagtctagctagagtccattctgattagttggtggccacatttctcctgtacacattttgtattattatatcgctccttatttaaagggcatgatacacttaaatatatgttgttttctggagtatttcataacatagtttcctcctctgaaactgaaatatttgccattttttcatctttgggtacctcgggttataatttgaatgggtgcattcttctccttgttcagcttttgaagaaagatagcatmacattggagagtgctgattctggacacagactgcccagttctgtgaccaattctgtgacttttaagttttaagacctaggccagttcactgaagctctccgtgtttctttcatcacatatgtgatagagataacattagcccacctttcatatattaggttggtacaaaagtaattggcgaaaaccacagttacttttgcaccaacctaatagctgttgcaaggattaaatgagttaatatgttaaacattcaaagtagtgcttggcacgtaatgtcttagcccctctgtgca

SEQ ID NO: 342236 - DNA, 592 bp, Homo sapiens
attacataagtacatattatcaatacagatattttaattatcccagtggtatgtacaaacatcaacaaatatactcttaactgacataatcagaaatcccaatccaacaattgtatattttaattcaaattaaaatagattacttaacagatcaattcttatttatttattactatattagagatgggatctcagtatgttacccatgctggtcttgtattcttgatctcaaaagatcttcccaacttagtttcccaaagtgctggtgttataggcataagccatgatgcccggcccttctaggactaatcttgatcattaaaaatctgtgaatatactggcattggacctctagatataatttattttattttttatatttaattttaaaatgtagtggggtttgaaaagataatttcacattattgacattatttattaaagattggagttaaattctactcaggatgcttcttttgttatatattgacattctatagacaacagkgtctccaaatctgcatatcatttatatggcattctttagtctgacatagttagatgaaattcttcaaaacttatttatacttag

SEQ ID NO: 342237 - DNA, 631 bp, Homo sapiens
aaaattaaataaaatttgataaataattcattaacaagatgagaaatatgatatataaatagaaaaaaataaccaaatagaatttgtggagataaggaatatgataactaagctgaaaaaattcaacagaaagcttgaacagcgaacttgaccaaccaaaagaaagaatcagtgagctcaaagacagagtgattcaatcagaggtgaaaaataatgaaagaataaaaggaatgaagaaagtctagggttgttatgagacacagaatgaaataaccttggcataatagaagtaactgaaggagaagagaaaggaaaargtgtacaaagcatacttcaaaaaatagtggctgaaaatgtcctacatctagggagacaaaacaacatttaggtacaagaagttcagtgttcatcagtgaaatacaatccaaatacaccaagacacatcagacttaaatcttgaaaacttaaagccaaaaaactgaaagaaacaagatataataattgtattacatttaaaggagtcccaacacagctgtgagatttatttgcagaatcccttaaggacagaagagagtaggaggatatattcaaagtgctgaaagaaaaacaaaaacttgtcagccaattatac

SEQ ID NO: 342238 - DNA, 581 bp, Homo sapiens
tatgtgtggggtgaggcctgataatctatatttctataaaattcccaggtgatgccaatgttgctggttggggattcacattttgagaatcacagatttagacaactcttcaagtagactgagacatctctataagtagacctaaacatatatatatattctcaaattaaactgctggaatcagagctaaaggcttcaacagatgcctggattcagagttataagactgattcatcttactgaaaactgcatgctggctacctgtagctaaaacaaaaaatagcagaaagtggtggtttagaaggaaggcaggtttacattgctttggggattatttcattttcaaacatgcattttcaaatgaagaaaactagaatcagtgaaattaaggcactttcacaaagttgacttatgaaaatccaagtaacacatttgggacaggagataaattaactgatgtattttgtctttccaaatgtaggattttgcartgaattaaataagtgtttgaactttccatgcaggaggactatcctgaattttatcagaaaatttttgggaatttgaaattaaggttgtct

SEQ ID NO: 342239 - DNA, 504 bp, Homo sapiens
tcaaaattttagaataataaagagcattacaagagaagcatggaaggaagagtgtgccagacaaaaaagacagcttggggagtaaatggaggagttaataaaagaaggcaactgcagcctaggtagctccaggagaatggcaagccatacaacattagaggaaggccagaaccaagcaataccatttttttaactatgcaaatattttgagaatgggagtccaccgaaagcttgtaagcagtgatttgaacractgattcatactccatttgctgaatacagacaggagacaagcaaggatggaaacagggagatcatttagattgatactgacactcccaaccagaaaaggtgatacttggaactatagcaagacaatgttaaaggaggctgtagaagatggctcagatatgattacattactgaagatgagaagagggaatagatgtgggtcactctcaagattctgactgcagtgattaggtagattgtggtgaaacttat

SEQ ID NO: 342240 - DNA, 580 bp, Homo sapiens
acttctttgaacctttagctttttcctaatttaactcaaaacaatcatttaactctaggcaaaagtttacatttccatgccttcttataaccttttactaaaaaaacacattttactgttcttacacaccttgcatgtaaatctatttctagtagtttcaattaacttctagcaatttggtaaaacttggtaagttgccttaattgtgtgataagtgcagccaagatttgactccagcataattaagggtgtggttagttccatatgtccccagaccctaccaatgatgtagctgacaagtaaaatagctctcaaaacccaaaaagcagtttgtaacctcaaaacaattagcaaactttgcatctgacctgcattttacgaatagtctttagggctgtttttatttcttaaagattaaagtcatgtgaaatgaaaggtaccacagcttttagctttaaaamatgttagatccaagcacttttctttaggccagattaattagagttatttttacagacatcacatatagtacacacagacaggcagaagaaaacccagttgctgggtagggccttttaag

SEQ ID NO: 342241 - DNA, 566 bp, Homo sapiens
tttatgcaactcctctggttcttctttccagaagcttaatcaaggtaacaaatttatctgcagggggccatatgtatattatggttcacacagtgcatgcctgggctaggaacatgaaactcagtaacagatgtccccaatatcacaactttctgactttgtatctctgttcccaagaaggctggcggtcatgtttcttttagtgtgagytgcaagggctcccacatttctacaagtcggatatccatctgtcagactgaattgaaccagatttccatgatgtggaaaaaaatgctcaggagaggtatagataaagccatcaaattatgttccacctgtgactagagccaagcagaacctgccaattttatcccatggcagatctattgacagctctcatcacttggatttgactgctttgttctgccctcctaaatttcactccgagctggattttcttcaggactgcatgagctcaaacatcaggtgaatccaaaggatgggaaatttgctaaaagaaatttgagcctatttcacatgcataattcccatttgtaacagtttca

SEQ ID NO: 342242 - DNA, 539 bp, Homo sapiens
gtcttctcaaaaaccagatattggcagtaagccaagatcgcaccactgccctccagcctgaacgacagagtaagattctgtctcaggaaaaaaaraaaaaaatcaaatattggcactacaacatgaatgtacttaatactaatgaattgtacacttacaaatgataaatgttatgttgtatgtattttactacaataaaaaaatcaaataaataaagtggttcaaatgctgaggacatttagtggtctttagtggttcccactactacaagctcttcatcattgcaaataagatatttcagatagagctccagctcaattaagccacgacatatgcttttctaaagcttacagatttaagaattttatttatatttgctgaaagggctctcttttcttttgtttctctctctctttttttttttttttttgaaacaaagtttctctctcttgttgcccaagctggagtgcaatggcatgatctcagctcactgcaacctccgcttcccaggttcaagcaattctcctgcctcagcctcc

SEQ ID NO: 342243 - DNA, 540 bp, Homo sapiens
tgcttcctgtgaagcctacagaactgtgaagtcaattgaaactctttcctttataattacccagtctcagtattccttagagcagtgtgagaacagactactacactgtgtgcccagagtacttaaaagaacagagagagggagagattatttataatgcaagagtggtgtcaagaaaaggttagactggttaaaagtattaaaaaaattcagaggacataggaactacttaggcttcatagtaaggcaacatttggcgtagaaggcagatctgacaagtcatcaaaagctgaccatgagtcccacagatgaagttaaaggatcattaacatcatcaacaaacatttactggatatctgtaataggcatagtgcaaagtgattgtacaaaatggggggtagcaaaatgatataaracataatcctattactcaagatgaacaatctaatcaatagcacacatcagtacaaaaataaatagcaattcatgacaacaagttgtaacgctaaatacatgattcttgacaataaatattacata

SEQ ID NO: 342244 - DNA, 599 bp, Homo sapiens
aaatccattaataaatcttaattttaaaggataaatgttgcaaagatttattttgctctgcattatagtaaattaattgatatattatcctatgtattcagttaactgagttagtacaaaattggccctagaagaaaaggaattggtaaaatacatactcaggccaataccttttcttcctgtactcaggtttttggaaaaatacctttttattaatattgatatatagctgttttataaaaaggaacaaaagtatatcagtccaaattatttttcttcctctgtcctttctttatcagtagtcaaatatgtttaatttgaattttcatgtttcttggcataagatgtgatttactctgaatgattaaactgacaggtttccaaacctggcatgtagggttaagcatttaacctgaaaacagaaacattttctaacaatatttaattaccaaaattttcatatgatttaactttatgcacatttcaaaacctaagaggaacaacaaaggagaaaaacacatcctgccccttgagagtgtttcagtatctgttawgtgagcggtcagctaataccggatgctcactgtaagcttatgcag

SEQ ID NO: 342245 - DNA, 520 bp, Homo sapiens
atgaaataatctgtacaaaaaaaccccatgacacaagtacacctatataacaatcatgcatatatactcctgaacctaaaaatgggtaaaaaaaaaataaaaagaaacagctccaaatacagtcatgctgcagagtgtcctgttgtctatgggaaattatacctgcatgaagttcacataatagatacatcaaatcaatctgttaattgtttgatcagtctaggacrtagccatatatggcactttaaattttgattagttttttctatcttttcatactatgaatttgagaaggtgaaatgattgaggtggagtggagaagaggtcaaaattaaaagaagtcaaagagggcgaagctaaaagactgaagcatttctcaaatttaatatgtttcttttccaaatcagggagtcttagagttccttttgtataaattggattttattgtcatgtataatctgatggttttgttgcctacccctttccttgtacaactgtcaatttaatcattatctcatta

SEQ ID NO: 342246 - DNA, 535 bp, Homo sapiens
ttgattgatttatgttgaatcaactttgtatccctcagataaatctcatttggtcatgataaatgatatgtttaatgtgttgttaaatttggtttggtaatattttgttgaaaatttttgcatcagtgttcatcagagatattggcctatagtgttcttttttgatgygtctttgcctggctttggcctcatagaacaagtcgggaaatatttcctcctcctctttttcagaatagtttgagtagaattggtatttggtaaaattcagcactgaaaccaacagattccaggcttttctctaataggataatttgtactattgctttgacctcattacttgttattggtctattcagattttggatttcttcatagtttaatcttagctagttgtacatgtgtaagaatttattcatttattctaggttttttaatttactggcatatatttacttacagtagtctgtaataatcctttgaatttctgcagtatcagttgtaataccttctttttcatctctatcgtattttgttg

SEQ ID NO: 342247 - DNA, 579 bp, Homo sapiens
cattccattctcacgaataggaagaatcattattgtgaaaatggctatactacccaaaggaatttacagatttaatgctattcctagcaaactaccaatgacattattcaaaggactataaaaactattctaaaacgcatatgaaatcaaagcaacctatagccaaacagccaaagcaaccctaaccaaaaagaaactcgacttcaaactattgtacaaggcaacggtaaccaaaacagcatggtattggtacaaaaatatacatagaccaatagaacagaatagagggcccagaaataatgccatacacgtgcaatcatctgagcttagacaaagttgacaaaaacaagcaacgtggaaaagactctttttcaataaatggtgctgagataactggctaaccatatgtagaagattaaaactggaacccctccttatactatatacaaaatcaacccaagctggattaaagacttaaatgtaaaacccaaaactttaaaaaccctggaagaaaatggagacaatactattctgcacagaggaatgggcaaaaawtttatgacaaagataccaaaagca

SEQ ID NO: 342248 - DNA, 423 bp, Homo sapiens
aaaccacaatttaagagttgaagcttacaagagcactcctgacagttgactaatttgagtgttccatcttgagagagttttgctaaagaaaaaagagtgagratttcccaaattaaaatgatagtaaagtaaatagaggttttaaataatgtgaaattttacttctggttgagtaatttttccagcatatcattcaacagtggctttgacagagaagagcagtactcaagaatacaattccactaaaacagaaattcctaagccaaactttttatttcattaaaattaatgtgttttctcaccactccctgaaacagaccctcttaccagtatacaaggttgagagtaattcctctttgaactccagttcttgttaacatggatgctgctgcgactctgtatctcagagcctgcatctccttc

SEQ ID NO: 342249 - DNA, 565 bp, Homo sapiens
ttgttcacttcttatcatgaattacaataaggcatgtatattagtaaagaaggagaggaggacaggcaaagaaagagcagcagaggagacagattatacccaggctgtatatattatcactctgaagtcagtagggaaggctgctaaatgctcttacaactgtaatagcctatctcatgttaattctagcccgaagcttcctggcacttcttgttcagagataatggggacaaacctactctttttttttttttcttggttgaacagcagatttcttttttcccaaggatgtcaaataaattaagcagtctttgcaaacagcaacacaaaagccctttgctttgtaraaattcccagtaataacatgcaagagttattacccttgatacttagtgtattttttaatggctggcaataatcattttgattgaatattggcttataataggcttgtaaaggaatttaagcacccttaactgctttcaactttagcttcatgtgcctagggaaaatccctgaaacaatagatcttgaagtcattaacatggaaatattttataaaaat

SEQ ID NO: 342250 - DNA, 527 bp, Homo sapiens
ataaaaggcagaattttgctctctcatacctatcattcctctgatgggttgacctcataaaaatgaatatgcaaaaaggaaactgtactttgaagtgatttattaattgagcttgtgtgagacatagttgtttaaagctgttttaaaaaattcagatttcatcttgctttgttcaattttcatgctggtagaaatgtttaaagctgaaaggttttcatttgtgtttctgctgacttgcacatttcacacaataggccttgttatcaagggtctgatcgtgrtcaatgcaatttgcagtgttagctaattttctaaactagtagtgaatttaaaattaattacagaccagttttggttcattagtgtccatgttttatgcctgtttgtttgtttttaattgagtacaggggacaaagacaaaagtgctgctttctctcatatgcagaaataaagtggtacaatctttaactgaaacaatgaacatagtagcagcaaagacaatagagtcatatgatttggcaatggga

SEQ ID NO: 342251 - DNA, 425 bp, Homo sapiens
ccactgccacccttggccacagggagtactgccagactaccaaccatgttcccttaagggccaagatctcttaagtcagcttgtggtgaacgttgcctggcctgggactcacctctggcccatggtaaatccagaaattgccatcaaagagtcatatcctggaaytgtgagcccaaagagtctgcttagtgctctacccccttgtgactgtttggtacattaaaccagtaagtctcagagggtcactcaatgcctttcagtaatagctgggtggttattcagggtccaagggcttttcagtaagcaagtgatgaatgctggtagaactaagtccttttcttcaagtctatgggtttccttcttgcccagggtgtgtctagaaatgttatcttggagctagggcctggaatgggggctttatcact

SEQ ID NO: 342252 - DNA, 579 bp, Homo sapiens
aaggtgattctcctctggctaaggctgattaaaggcttcctctgtgggtaagcatcagctgagtttggttcagcttttctttctgctctaacaggactgaactgagttcagtgccttacagttgctgtgttcttcctcacctaatgcccagagatgatctcagcacactgctgctgcatggagtgggggagtgatggttttggcgattcargactgctttttctatctctttagtgcctctttcagcaaaatgaagttaaaaccaggtactggccaggtgcagtggctcatgcttgtaatcctagcactttgggaggctgaggcaggcagatcatgaggtcaggagttcgagaccagcctggccaatatggtgaaaccctgtctcttctaaaaatacaaaaattagccaggcatgatggtgtgcacctgtagtcccagctacttgggaggctgaggcagaagaattgcttgaacccgggaggaggaggttgcagtgagctgagatcatgccactgcactctagcctgggcaacagcgctagactctgtctcaaaaaaacacacaaacaaacaaaaacaa

SEQ ID NO: 342253 - DNA, 579 bp, Homo sapiens
aaggtgattctcctctggctaaggctgattaaaggcttcctctgtgggtaagcatcagctgagtttggttcagcttttctttctgctctaacaggactgaactgagttcagtgccttacagttgctgtgttcttcctcacctaatgcccagagatgatctcagcacactgctgctgcatggagtgggggagtgatggttttggcgattcaagactgctttttctatctctttagtgcctctttcagcaaaatgaagttaaaaccaggtactggccaggtgcagtggytcatgcttgtaatcctagcactttgggaggctgaggcaggcagatcatgaggtcaggagttcgagaccagcctggccaatatggtgaaaccctgtctcttctaaaaatacaaaaattagccaggcatgatggtgtgcacctgtagtcccagctacttgggaggctgaggcagaagaattgcttgaacccgggaggaggaggttgcagtgagctgagatcatgccactgcactctagcctgggcaacagcgctagactctgtctcaaaaaaacacacaaacaaacaaaaacaa

SEQ ID NO: 342254 - DNA, 476 bp, Homo sapiens
tttagaaagtttattttgccaaggttgaggatgtgtgcctgtgacacagcctcagggggtcctgatgacatgtgcccaaggtggtcagggtacagcttggttttatacattttagggagacatgagacactratcaatacacataagatgtacattggtcctgtgaagaaaggatagacaatttgatgcagggagggggcttccaggtcacaggtagttgggagataaatggttgtattcttgtgagtttctgatcagcctttccaaaagaggcaatcagatatgcatctatctcagtgagcagatggatgactttgaatagaatgggaggcaagtttgccctaagcggttcccagcatgactttttcctttagcttagtgattttgaggcccccaaatttattttcctttcacaatcctcaatgttatacatggagtcagaaaagtagggactaaagatatgatgctccatggtt

SEQ ID NO: 342255 - DNA, 476 bp, Homo sapiens
tttagaaagtttattttgccaaggttgaggatgtgtgcctgtgacacagcctcagggggtcctgatgacatgtgcccaaggtggtcagggtacagcttggttttatacattttagggagacatgagacactgatcaatayacataagatgtacattggtcctgtgaagaaaggatagacaatttgatgcagggagggggcttccaggtcacaggtagttgggagataaatggttgtattcttgtgagtttctgatcagcctttccaaaagaggcaatcagatatgcatctatctcagtgagcagatggatgactttgaatagaatgggaggcaagtttgccctaagcggttcccagcatgactttttcctttagcttagtgattttgaggcccccaaatttattttcctttcacaatcctcaatgttatacatggagtcagaaaagtagggactaaagatatgatgctccatggtt

SEQ ID NO: 342256 - DNA, 432 bp, Homo sapiens
tcagactaaataaaaatttaagatgctataaagacatggattaaaaataaaaaatggatgaactgtactaatccacacaagttggactttagtataaggaacatttccagaaatagggacatttcagaaatagacattttattctcataaaaaggtcaattcactgagaagacacaatgatcctaaatgtgttggcacctaaatacagcttgagagtacatgaagcaaaagttgttaaaattaagtggagaaattgataaatctagaaacatagatgaaaatttgtatcattccttctcaataattactaggttaaaaacagcaaatatagataatatctagattatatttagattggttaataamttcagccaacttgacctaattgatatttataaaatactgtgttcaataattgcggaatacacattc

SEQ ID NO: 342257 - DNA, 537 bp, Homo sapiens
gtgtgtataatgcaaatattacatttgtggcttggggattttaaaatttgttctgcaaaactccatcagctagttattgtaatttaaaattctgctttaatctaaaatcttctataccaaggaggttaatcaccattagccaatctacccaacagagttgagtgttgttacataagctgtctaaatagtgtcagcaaatctgaacatgaattttagtctcaaaagtgatgaatttggctcatgaaaaggctgaacttgtacttcaggttgtttactagtgcgggttggtcaycaaagcaaacaattcgagccgtgagggagaacagctccatcctactttactagtgatcttcttaggctctgtttttatttattttaattgctgtgacagttttttaaaatgtgtgtatgtgtgagtgtatgtgtgtgtgtaaatttggagggaggcacacaagtccattttttaccttttagcagagttcaacataaataaaatgaagataaattctttttatattattatgaaatgagacttat

SEQ ID NO: 342258 - DNA, 614 bp, Homo sapiens
cagtgatccccacaatatcccattgaatggttcctgcaaagcaaaacagagcaaaagtggaagatgacagtggactaacataaaccaagaagtagctccaatagcagctgctgtgctggatgtagcatcccttcgagtcagcacttgatatgaggctggagatttggttaatgaattcttttaaatccccttcagaaaagagaatcaagaacaggttgaattcacctgggtcagataacacagtgtacactcaaagttttgctccaggagcatataaaccctcctgctctgttacaaaactgtccaaagaagtccttgatcatcgtgacattctgtagaacatcatcctggtccaatactttgatgacaaaatgttaactggacctagtgaacaggaatgaactggcaaataatctgagtgttccttatgacacatgcaccagagagaaggaggtaattcctacaaagattcagaggtcagaggtccaacaatctagggaayactgggacatcctgccaagtcaagagccagttattgcattttgtaccttctactactaagagaggtaagcactaggtagtattatctggattctgaagtcagcatgtacaac

SEQ ID NO: 342259 - DNA, 598 bp, Homo sapiens
atatttggctggcttctgactgagaaaatacaaacattcagcaaaccaaacagcacttttgagcttccygggcttttgcattttaatcactgttctcgattttactcacaatctcttctctttcaacattaaaaataaatcctttcttgaacttttgccctctgaagttttgatctggaagggagtttttggggtttttttttttttttcgttttgcttcttcacagtctttcaaaataattataatacgcacaggcagtctctgtactgatactaggcaggcttggaataaatgccactcctgggccctctctagtgtccatcgcctctcctaagcacatctgcacaaggccagtgtacttcgaccctgtgctgaatagaggtatttcattttcccttatcttctctctaaaaataatcctaactaaaagacccagaagaaatatgcccaaatgagggtcaagcacaaacatgttggcaatggactagatcagaagtcagtgggaagatttcagcagaaaatctctcctagcagcaggaaaaatatgtgatttttaaaattaagatgggaaaagatgaaaatggtcaacgatttcgt

SEQ ID NO: 342260 - DNA, 583 bp, Homo sapiens
cccagttgtgaacacccagagcaggaagaaggtcccagagctttccagggcctccttctctggctcatgtgttctctggaaatcctcagccaaacccaggctcaagatgcccctctctggggaatggacagagaaagggcagggactgtgcttgccaaggcttccattgtgccttagcaccaagaatgggcacaaggcaatgggggagatggaataagagagggcacaagaaggagggaggtggggaaaaaatgaatttgttatcagcagggactctggcagacaccttggccccacacttgagaaagtattaaatcccaacattgagacctggatttcagtgctttgacattcaccctgagggaggaacccagcaaagctatgattgccaacagcacccctcaagggctmttcctccaaatttctatgagaccttgaaccctcaaaccaccttccccagtctcggtctcctcatctgtaaaaaggactctgcctttactgtgacgctgagggaatgtggggcacctgcatgggtgactggcccagcacatcctcagaaaggtggccacagggtgccacggct

SEQ ID NO: 342261 - DNA, 572 bp, Homo sapiens
atgggcatttttaaattactttcctagtgattctaatatgtagccaggattgagaaccactgcaatagttctaactatggactcacaggaaatgcaagggatggatgatcatgttaaatgacaccatggggatgcaatcggcaaaagtagagagatgatagggaaacccattgactaaaagggatgtaagagacacagcaattgcaatagatgaatctaatttagatcctgattagaacgacctgaaaatattctaaggcaatcggaaaaatttgaaactgactagacacttgatgatattaagaaattatacttcattttttaaggtgtaataaggacactgtggttgtttaaaatggagggttctggcaccaggcatggtggctcatgcctgtactcccaggacttgggaggctgaggcaggcaaatcatttggggccaggaattcagaaccagcctggccaacatggtgaagcctatttctactaaaaatataaaaattagctgggagtggtggtgtgtgcctgtaatcccagctactygggtggctgaggcacaagaatcgcttgaat

SEQ ID NO: 342262 - DNA, 585 bp, Homo sapiens
gggctgtcaactcttagataacctcagtgccagcatggtgggaggtgtgaggaaaccacactagtctccgacctccccagagcttgcaggatgggggcgggaggaggggacacacatcaaagcccagaggttggccatcacccttctgctcgcattaccatccttcttcagaaaacagcgggtgtgggaaaagtaaaaggctgacctttccctcacccctaacccactttgaatgtctttcataatygctatgctttccccccgcccggcttttgaggcttcagcttcaactgctgtctcaaaaaaagtccgttttctcatcttgggctactggtttcaccatctgtttgctcttcagatgtgtgtgggtggcaagaggagatttttcccacgcgtcttcaaactgaaagggctgaccttgctgtgaggagccttctgagtcacccaggagtctctgcatcctcagccctcacccggcagagtggcagggaggggcggggcacctctttgtgccacagagcctgtgaacactgaactgggcccggattacctggaatcaagcgtggggcttggaaaccctccagc

SEQ ID NO: 342263 - DNA, 585 bp, Homo sapiens
gggctgtcaactcttagataacctcagtgccagcatggtgggaggtgtgaggaaaccacactagtctccgacctccccagagcttgcaggatgggggcgggaggaggggacacacatcaaagcccagaggttggccatcacccttctgctcgcattaccatccttcttcagaaaacagcgggtgtgggaaaagtaaaaggctgacctttccctcacccctaacccactttgaatgtctttcataattgctatgctttccccccgcccggcttttgaggcttcagcttcaactgctgtctcaaaaaaagtccgttttctcatcttgggctactggtttcaccatctgtttgctcttcagatgtgtgtgggtggcaagaggagatttttcccacgcgtcttcaaactgaaagggctgaccttgctgtgaggagccttctgagtcacccaggagtctctgcatcctcagccctcacccggcagagtggcagggaggggcggggcacctctttgtgccacagagyctgtgaacactgaactgggcccggattacctggaatcaagcgtggggcttggaaaccctccagc

SEQ ID NO: 342264 - DNA, 333 bp, Homo sapiens
ggacttggcctggagtccctgacccattctcaagccctcaaaaccagccagaccagggttatgacaaagagaaactttgggaaatgtgtgactggacttaggtcacaagggtagctggaggaaytgccgggcccagctctcagattctcggatagcctgtctggtgctctctccctcacccctggccaaactgggaccttttgtcagatgctctgttcacccatggaagaacctggggcctgactgcaggcagctggttccatgaacaagggacgaagagctgtccaaggtgagctatctgttgttggggaagaaaaggaccacagagaacag

SEQ ID NO: 342265 - DNA, 594 bp, Homo sapiens
gtcaagccagtgggacttctctcgtgctctttttattgacctggaatgccaggggattggaacccgccagggttttctgaagcaccttctctggagccctgatttcatgggctgttagtacatgttccgtgaaaagagatgctgtgtcgggttaattgggatatcctggaacttcttagggactttagtttttccctatagttcttcaaggggaatatagagtatgcaggtgtgctgtgtttaaccaatttatttgaccrggaaaatttctatttatacagcagcctgtggggctagaagggttcctgagagcatactttgggaaacagtaagataatttttaaggtttcttccaactttcaagtgtatggttctgtgaatatactaaaaaccacttaacattatactttaaaagaatgaattttctggtttgtgaattatatctcagtaaatctcattataagaatttttaatggttctttaatcttcaaaactgcctgggattatttctgctttttacaatgtgggcttcaattcctcattaaaaacaaacaaaaaactgtatagcaccttgaccatttcacattgtttaca

SEQ ID NO: 342266 - DNA, 536 bp, Homo sapiens
tgtggccacttagtgctataaatttcccttttaaaatttccttagctgtgtcccasagattctggtatgttgtatctttgttctcattagtttcaaacatgttcttgatttctgccatattttcattatttacccaaatatcattcaggagcaagttgtttgatttccatgtaacatggttttgagtgatttcttttaatcttctatttttattgtcctgtggtccaagagtatatttgatatgattttggttcttttgcgtatgctggggattgttttatgtttgatttcatggttgattttagagtatgtgccatgtggcaatgagaagaatgtatattctgttttggggtggaaagttgtgtagagatctatcagatctatttggttgaatgttgagttcaggtcctgaatgtctttagttttctgcctcactgatctaatactgtcagtggagtgttgaagtctcccactattaatgtgtgggagtttaagtctttttgtttgtctctaagaacttgctttaaaacctgcct

SEQ ID NO: 342267 - DNA, 536 bp, Homo sapiens
tgtggccacttagtgctataaatttcccttttaaaatttccttagctgtgtcccacagattctggtatgttgtatctttgttctcattagtttcaaacatgttcttgatttctgccatattttcattatttacccaaatatcattcaggagcaagttgtttgatttccatgtaacatggttttgagygatttcttttaatcttctatttttattgtcctgtggtccaagagtatatttgatatgattttggttcttttgcgtatgctggggattgttttatgtttgatttcatggttgattttagagtatgtgccatgtggcaatgagaagaatgtatattctgttttggggtggaaagttgtgtagagatctatcagatctatttggttgaatgttgagttcaggtcctgaatgtctttagttttctgcctcactgatctaatactgtcagtggagtgttgaagtctcccactattaatgtgtgggagtttaagtctttttgtttgtctctaagaacttgctttaaaacctgcct

SEQ ID NO: 342268 - DNA, 562 bp, Homo sapiens
aagagaaagaaataaaaggcatccagaaaggaagaagtcaaattatcgatgtttgcagatgatatgatcttatatttggaaaaacctaaacaactccattaaaaaacctattagaactcataaacaaatacagtaaacttgcatgatataaaatcaacatacaaaagtcagtagcatttctatatgccaacagtgaacaatctgaaaaagaaattaaaaagtaatcccatttacaatggccacagatacaactaaatacctaggaattaaagaaagtaaaagttctctataatgaaaaactataaaatgctaatgatagaaattgaagaggacccaccaaaatatggaataatattccatattcacagatggaagaattaatatggttaaaatgtccatactayccaaagcaatccacaggtttcaatgcaattcccattgcgatgtcaattacattcttcacagtaatagaataaacaatcctaaaatttatttggaaccacaaaagacccagaatagccaaagctatcctgaacaaaaagaacaaaactgcaggaatcac

SEQ ID NO: 342269 - DNA, 603 bp, Homo sapiens
actgctgcaaaaaatattgcagagactctccaggacaatggtctgggcaaaaatttcttgagtaatacccyacaagcacaggaaaccaaagtaaaaatggacaaatgagatcacatcaggtaaaaaaagcttctgcacagcaaaggaaacaatcaacaaagtgaagagacaactcatggaatgggataaaatacttgtaaactatccatttgacaagtagttaataaccagaatacataagaagttcaaacaactctatagaaaaaaatcaaatcatctgatttaaaaatggggaagagatttgaataggcatttctcaaaagaagaaatacagatggcaaactggcccacaaaaaggtgcttgacatcagtcatcatcagagaaatgcaaatcaaaactacactaatatatcatcttatatggcttatatgcaaaagacaggcaataacaaattctggcaaggatgtgaagtaaagggaacccttgcacactgttggtgagaatgtaaattagtggaaccactatggagaacagtttggaagttcctcaaaaaactaaaaatagagctaccaatgatccagcaatcccactgctgagtatac

SEQ ID NO: 342270 - DNA, 603 bp, Homo sapiens
actgctgcaaaaaatattgcagagactctccaggacaatggtctgggcaaaaatttcttgagtaataccctacaagcacaggaaaccaaagtaaaaatggacaaatgagatcacatcaggtaaaaaaagcttctgcacagcaaaggaaacaatcaacaaagtgaagagacaactcatggaatgggataaaatacttgtaaactatccatttgacaagtagttaataaccagaatacrtaagaagttcaaacaactctatagaaaaaaatcaaatcatctgatttaaaaatggggaagagatttgaataggcatttctcaaaagaagaaatacagatggcaaactggcccacaaaaaggtgcttgacatcagtcatcatcagagaaatgcaaatcaaaactacactaatatatcatcttatatggcttatatgcaaaagacaggcaataacaaattctggcaaggatgtgaagtaaagggaacccttgcacactgttggtgagaatgtaaattagtggaaccactatggagaacagtttggaagttcctcaaaaaactaaaaatagagctaccaatgatccagcaatcccactgctgagtatac

SEQ ID NO: 342271 - DNA, 315 bp, Homo sapiens
tggtcgagacctaaagtttattttgctgtatgactcctttttcttttcttttcttttttttttttttttttggcgtwttacttgcttccaacagggaaagcaagatttcctgttttcatgatgatggtaggtaggtaactcctttatggagtttgagctcgctccaagcagggaaaatgtgttctaggtttttctattcctgcttctagggtagtagaaagacatcttcagcctgagacccacgcttaggtaagtagctgaatgggggttttgtcttggctaaagtatacaaccagctggtgttaatttctcttt

SEQ ID NO: 342272 - DNA, 614 bp, Homo sapiens
ttgctttttctcccaaaattaatcttgatttggctcatctgtgcagatttgtttgagaaactgaactgttgttttcataggtaaatgagagactgagttttcttagctctgaagagaaaggtcattttgctccttccasccaaaaagcacccctaggtgactggggtctcgtgggagtgtctctgggggttgaccaaccacaatgtgcagtggtcccacagggaaatccccaacaaaaattagttttttaaaaaggtctcgtccaggaaatgcatataaggtctgatcacccagtgtttgagccgtctcagaggtcataggcctctgaagagagaacatgagacacataagatggtggaaatgactcactgtggacacactatggagtcctgcccacaagcagaacacattgatccgccacacaaaaacactaggccaaagctcagtacctccttttaagaaaaaaatgtggaaaacaaataatctaagaataaggagaatgacaccctttcaaggactctgcaggttttatggcacatctacttgctagagtttatgtaaaatggaagtaaaatggtctttgcacacatttatattaaggaaaaagagcctta

SEQ ID NO: 342273 - DNA, 447 bp, Homo sapiens
agtcaccaaaacagcatggtactgttataaaaataggcacataggtcaatggaacagaatagagaacccagaaataaacccaaatacttacagccaactgatcttcaacaaagcaaacaaaatcataaagtggggaaagggcatccttttccacaaatggtgctgggataattggctagccacgtgtaggagaccaaaactggatcctcatctctcaccttatacaaaaaatcaactcaagataaattaaggacttaaacctaagacctgaaactataaaaattctagaagataacattggaaaaagctttctggacattggcttaggtaaggatttcatgaccaagaacccaaaagcaaatgcaataaaaacaaagataaatagctgggacctaattaaactaaacagyttttgcatggcaaaaggaacagtcagcagagtaaaca

SEQ ID NO: 342274 - DNA, 554 bp, Homo sapiens
agtatgttcagttctttgttctccattttaaagtttaacttcctcattctcctcatctccttgaccctagtttcagtaaacaactttttcaccagttctaatcagttcacayctgtttccctggtcacctgctccatgctgagtcaccactggttacctactctaacctgagtcacccctgtcacctgctctgacctgagtcacctttagtcacctgttccataactgtccttcccaccaaaactgctcaccccgccattctgtttcatacccctgctctctttaaaatagccaatcagaattagcttagactgtgtggtccaaccctagccaataggggaatgacacagcagtaggggttacttgtatcagagataaaaacccctccccctcccttgttcaggtgtgctctcgccattgttccatctgagagatgcactcttctatagaagtaaaattgccttgctgagaaaattcgtgtttgagtgctatttcttttgcagcaccaaaaatttatttctagcaaatttgggggcccatctgggattctcatt

SEQ ID NO: 342275 - DNA, 554 bp, Homo sapiens
agtatgttcagttctttgttctccattttaaagtttaacttcctcattctcctcatctccttgaccctagtttcagtaaacaactttttcaccagttctaatcagttcacacctgttyccctggtcacctgctccatgctgagtcaccactggttacctactctaacctgagtcacccctgtcacctgctctgacctgagtcacctttagtcacctgttccataactgtccttcccaccaaaactgctcaccccgccattctgtttcatacccctgctctctttaaaatagccaatcagaattagcttagactgtgtggtccaaccctagccaataggggaatgacacagcagtaggggttacttgtatcagagataaaaacccctccccctcccttgttcaggtgtgctctcgccattgttccatctgagagatgcactcttctatagaagtaaaattgccttgctgagaaaattcgtgtttgagtgctatttcttttgcagcaccaaaaatttatttctagcaaatttgggggcccatctgggattctcatt

SEQ ID NO: 342276 - DNA, 575 bp, Homo sapiens
atttttaccatagaaacaataaatacagcaagtgtcttccattttcagtgtgggatagaatccttactgaaattaggagcattgggagcctctgagactaataagtctacagaacatctggaagaggggcaaataaaatgtttcttgcaggatttttagggagaaacaaatgggacttggggagtaggaggtaggtgactgcaagtgctttgtttcacatgaaagataaaacatgattaggccaggaggttcccaaggaaccctgaataatacaaaccaaagcctattaggcatcacgtacttcatgtgtgaggggttgtttgccagtccagggcctatttgcctctgatccgttctttgttgctctactactgtgctcaaggaagaggggattgaccctcgcaggctgtgtttctcaggttcttttatcacctgtctgggttgggccaatgggatgcaggggtrggaggttagaggccagggggcaggaataaacaagggaatcttccccactagccctacctttctgccttgggcagtgtttctggcagcagctctgtctccattgtatgcct

SEQ ID NO: 342277 - DNA, 519 bp, Homo sapiens
gtcgtcaagctcttttggtgaatatgggggacctccaatgtttggaggtgattgagagttacaggctcctcagcccttcctcttacccaggtggcatgtcacaacgcaagcaagcctcagatcgagttctaccataccatcaatcatttatgggtaagtaggtccccagagaatcaaaccacctggacctaagcagggcaaactctctgttctcagggttttgaggtactttgtaaagcacaattaatagtgttctaaggacagatttgcttcccatctaattaaattagacaacagaattcacccatgagtgggggacttggacctttcagtgtcctagacctgtaatagccttattcttgaaccccatttgtgcaagaacagatttctaaccaattagatatcttgaacatcatttattttaccaataraaattatttctaacatcctttatgttaattaacagaccagatagtacagactcagacagggatatcagatggcaggcctggaatgtca

SEQ ID NO: 342278 - DNA, 506 bp, Homo sapiens
caagctctctgtaccaaacattcaatagcaatggcaataagcatctcagaaattcmtttctaatttttaaaattatagcaactgttacaaattatgagcatcagatgcaataagtgtccaagatgaaaaataataaacttgtacactgcctatgatgcttagatttgcaaagtagaaagcaaaaagtattctgatgtacaaaataataggtaataaagcctttttaaaaaatctggtgtaaaatttgattccaatagccttcttggcaaagagatttcctgttgctatttaaatgtaaatgagtcatgaaggttgtgtcagaaatatttaactcaaaaccagatccaatacagcaaaagaagcagagaatgaagcccaaccaaccatttccgcaataaaatgtttgagtttccagattttgataactttatatatctagaaacagagggaagtgataaatgggtacaattaagatactctacatgccatttattaaatattgtgtg

SEQ ID NO: 342279 - DNA, 565 bp, Homo sapiens
gccccacctacagacaccaattccatcaatgtggggtgagtcccaggggtccgtattcttaaaagctctccaggcaattctaaggtgaagctaaggataaaaacactggcctagaggttatgctgtgacaacctatagagaaagtctacacagtggttctccatgtgggctccctgaactagcagcatcagcttcacctgggaacttgttagaaattcaaattattgggccccactcaaatctactctatcagaaactctgggggtggggcccagtcatctgttttaacacagcttccaggtgattctgttactgcaaatatttgagaacttctggtctagatggtacctttctagaaaaatgagaatattccagggccagaattcctggtactgggaagatgaacaaytatgccaatagaaaatggtactattacagaatatctcagaattaaacaatagtgataaagctgctcccccatttacaaagataaggcattaggcattaaggtttcatcaccaggacatgtgcttagaatagctttttttttttttttttttgagat

SEQ ID NO: 342280 - DNA, 563 bp, Homo sapiens
gtatatgcttagcatgccagtaagtagcaagagataagaatagactggataaaactggagctgtttttagagcaatgaaagcagaaatgcaaacttgcataaccagagtccttggcttggaacaacaagcaagggagatacagaaagctaaggaaaccatcccttactggtcaaggtgcatgaagacatgaacagtgattttttttcaaagccagtaaacaggaacatattaatactcccaatcataattccggcctggcttctgacatactcttctctacaaggtacattgtggtgaaccatggagtagacccttctttcaaaatgagccaaaaatatgctataaagggaaatgccatctaataaagcattcaatctggtcktactgaccccatcaaataagactctttggagaaaaataaaaacagtaatcacagagcacaattaattctcattttaagaaaaaggaagtgtctttaggagatgaggaaatggtgagtaataggccagtggagatggagaaattgaggacttggaaccaaggcttatttctagaaacccaa

SEQ ID NO: 342281 - DNA, 631 bp, Homo sapiens
  misc_feature (1)...(631): n = A,T,C or G
agaccatcttccccagttagttactatagccctagtgtctaggcaaggcaattcagcaaaatgtgttgattgaatagctttgggttgcgacctctatcttctcttttcagatgcttagtcaacatgatatagcttcagttttcttcacagtaggtctcttgctggggtttcctaagcccagacttgaaaccaaatatcccatctagcgctacttcagtgacctggcagtaattgtgatccagatttatgttttcatttttactatgtaatgtggttgagtgagatgcaagtaactcttggactttgttaggatgaccaccacagaccccaaacccccatgtggaggagtctagtaaactggactggtacatgtggagttccctagttctcttaggtcatttggacctggaccaaagaagattctgtgactttattgtatttaatctccccagtactcaagacttggattttacagctcttcagtcagctgcacagaaagaagacagaagagagctaggcatggtggtgcattcctgtagtctcagctactggggaggctgaggcaggagsatcgcttgagcctggccaacatagtgagacccccatctcttanaaagaaagaaggcagaag

SEQ ID NO: 342282 - DNA, 510 bp, Homo sapiens
ctctttagacctgcctgcattgcaagatatagcttatgttttccgagtgactttctctttcctttcttcctcaaatacacaggcacgctaacttggtgtgccatcttctaaaaatgttaaaatgcrttaaaatagattttgggactgttataacaccagtcaaggtaactaggggtgtcttaagtatttcaaaactacctttggggtcagtactgctttcagtgcttagttaacagattatcgtattctggagttagaggcaaactagtgatgtcatctagtcttttccccacagaaaggcgtagaaaagcgtattctctaatttgattgaagcattcccaattaaaaaagcaatcacacctcaaatcttttatacctgacctcgttttagatataacatggcaatctttctaaatgggattttctagcttgcacatgtgtggatatgtgtgctaatggtggcagtggttgtcatttagtgatatcctcattacagcattaaagaataag

SEQ ID NO: 342283 - DNA, 553 bp, Homo sapiens
tgatttctattttctcttcggtgcttctctggattttccaaatgctattctaacaaaatttttttctctttgttaaaggcaatttggaaacattttaggcaatagacwttgagtctttcagtctcatggataaagctatccctggacatctgggagatgagaaaaacaggcaacctctgcctatggcctgtggacttacttcattcaacaccctgatgtgcgttccctgcttcccgagcagccttctgggtagggcttggctttccacgtggttctgctaagagggacagaagcaggtggtcatctgggcatgggcatttctatctctttggcagctgcagttttcactggaaatgaataagttaatagtttgttttcaggtcacaggagcctggtcagcacaagtgcgtccctgaaagacaggcacagtggtgacggtgctgagacaggagtctgaggcccaatgcctgagagccagaccccgaaccaaggagagcttctgtccacaccctaattaaatctctaaattgacacttcccatcattaagtaaca

SEQ ID NO: 342284 - DNA, 553 bp, Homo sapiens
tgatttctattttctcttcggtgcttctctggattttccaaatgctattctaacaaaatttttttctctttgttaaaggcaatttggaaacattttaggcaatagacattgagtctttcagtctcatggataaagctatccctggacatctgggagatgagaaaaacaggcaacctctgcctatggcctgtggacttacttcattcaacaccctgatgtgcgttccctgcttcccgagcagccttctgggtagggcttggctttccacrtggttctgctaagagggacagaagcaggtggtcatctgggcatgggcatttctatctctttggcagctgcagttttcactggaaatgaataagttaatagtttgttttcaggtcacaggagcctggtcagcacaagtgcgtccctgaaagacaggcacagtggtgacggtgctgagacaggagtctgaggcccaatgcctgagagccagaccccgaaccaaggagagcttctgtccacaccctaattaaatctctaaattgacacttcccatcattaagtaaca

SEQ ID NO: 342285 - DNA, 581 bp, Homo sapiens
tagtgccttggagctagcagggatcttgtatttctcggctccaaacccatttattgacagacaaagaggttgaactcagagaggttaagtaagccacacagctcacttttttgagagccacacagcaaggtacatgcaggtactagaattggtgattcctgaattctgagcctgaaagctttcatttttcaataatgattctcaaactgtggcccatsctggcactggttcatgaactattttttacctgtctaaaacgagatcaataaagaaattgagaatatgtttactaacttttacagcaagttgacactgctgagacatctgagcatagggtctgtggcgtgtctcaccaaaccaggtataggtcatttggggtgcttgctccctggtaaatttggtgtggcccaagctgcgttggaagtaaggccatgaacagatctatgatgaactggaaataaagcctagtactggccaggcggggtggctcacacatgtaatcccagcactctgtgaggccgatgcaggtggaccacctgaggtcaggagttcgagactagcctggccaacatggcaaaacc

SEQ ID NO: 342286 - DNA, 642 bp, Homo sapiens
gaaatttgtttcttactttagctgaagtggtcaatgacaccactttagtcctagaagtcatcaggtcagctcaatttactggccagggttgttatggatagataggtgcaaaccaatatgaggtctgtgcaattgcttttgtaactgtattaatgtcccaggtcaaatggagccatcaatacagaaacttaaaaagaaagccacatggcttctaagatagactgtaatggtttrtgacttttatttctgttggttaaatcttggaccctgggaagcacagttaagctcaacacagaaggtcaacagccactgatttgaatcctattggtagtagccttaactaaatgcttgtgtaagaccaattagatacactaattcccagcctctgtcagattaatcacagtcaccaacagagtggcatcctcaggggaaaatttgccagaagccaagatagtttagaaaagaataaacctctatttctcttttacttttctacatagattgcgagtgaggtattgctcctcctttttcaggattatcttttcaagaataaaacatgaacagccttggaagattgtaccactctccagaggaaagaataggtttgcttatgcttactctctagtataataaagataattg

SEQ ID NO: 342287 - DNA, 642 bp, Homo sapiens
gaaatttgtttcttactttagctgaagtggtcaatgacaccactttagtcctagaagtcatcaggtcagctcaatttactggccagggttgttatggatagataggtgcaaaccaatatgaggtctgtgcaattgcttttgtaactgtattaatgtcccaggtcaaatggagccatcaatacagaaacttaaaaagaaagccacatggcttctaagatagactgtaatggtttgtgacttttatttctgttggttaaaycttggaccctgggaagcacagttaagctcaacacagaaggtcaacagccactgatttgaatcctattggtagtagccttaactaaatgcttgtgtaagaccaattagatacactaattcccagcctctgtcagattaatcacagtcaccaacagagtggcatcctcaggggaaaatttgccagaagccaagatagtttagaaaagaataaacctctatttctcttttacttttctacatagattgcgagtgaggtattgctcctcctttttcaggattatcttttcaagaataaaacatgaacagccttggaagattgtaccactctccagaggaaagaataggtttgcttatgcttactctctagtataataaagataattg

SEQ ID NO: 342288 - DNA, 642 bp, Homo sapiens
gaaatttgtttcttactttagctgaagtggtcaatgacaccactttagtcctagaagtcatcaggtcagctcaatttactggccagggttgttatggatagataggtgcaaaccaatatgaggtctgtgcaattgcttttgtaactgtattaatgtcccaggtcaaatggagccatcaatacagaaacttaaaaagaaagccacatggcttctaagatagactgtaatggtttgtgacttttatttctgttggttaaatcttggaccctgggaagcacagttaagctcaacacagaaggtcaacagccactgatttgaatcctattggtagtagccttaactaaatgcttgtrtaagaccaattagatacactaattcccagcctctgtcagattaatcacagtcaccaacagagtggcatcctcaggggaaaatttgccagaagccaagatagtttagaaaagaataaacctctatttctcttttacttttctacatagattgcgagtgaggtattgctcctcctttttcaggattatcttttcaagaataaaacatgaacagccttggaagattgtaccactctccagaggaaagaataggtttgcttatgcttactctctagtataataaagataattg

SEQ ID NO: 342289 - DNA, 531 bp, Homo sapiens
atgtagggtaatatattagacacttcacagttcttgactgcaggagagaaaacactccaaaaaaaaaaaaaacttttatcatactacagggtgtaattcacttttgtatctaatttagaaattttatttcagcattttttcattagttttatcatcctagtttttaaaatccatttcaatcctctgtttttctgttagttatcatcttaatgattaaagtaaaaatgtgatgtgctcacaatgcgtagaattttgtctgtaacaatttaaggattttgcctttataatagcataatctcactaacaatgggctctatgactcctccctcttttctatctcttccagcatactttatgaaattgaattaatgaatakgaaattttatacttttatactttgctctgcttttttcatgtcctgcatgtttccaacaagatttgacaagttttgaaccaaagaatacatttatatacatataaaataacaagcacatgaaaagaaaaagaaatccagaaagtgtatatagttat

SEQ ID NO: 342290 - DNA, 641 bp, Homo sapiens
ctccaaatggataaatgactgactaatatatgagtgaatgatttagctatrtgtataagtagctggaattagagatttaatcactctttattaaccattgttttcatatacccaattttttttatttttgcatttttttgaagtagagctaaccaactctgaaatatattgtttgtataataaaatattgttttaaatataactaatattttccaggagatcatagattataattggatatgtgttacatcagagcatatcaaagaataatatgctttttaaaatatagaaatatacatatgcagatgcaccttgacttatgattgggttacatccctataagcccattgcaagttaaaaatatcataaatcaaaaatgtatttaataccccaataaacccaccagaagcaaaaaaaaatcataagttaaaccatcataagttggactatcatcaggaatacaggattgtctgtatttctttctaaatattagaatacatacaccatgtgtatatgtatcatatatacatattatatatatgtgtatatatatatataatgcaaagaaagaaaagcgtgcaggattttattcttcctttatctactaaaagcccatagacattccacttatatatcacaag

SEQ ID NO: 342291 - DNA, 583 bp, Homo sapiens
acttttccccattcggtattatgttggctgtgggtctgtcacagatggcttttattacattaaggtaataattccacttatatgaaaactcttttttaaaaaaatcaaactcatagaaacasagagtagaatgaggttgtcagtggctgaggggttaggtaattggggagatgttgttaaagggtacaaactttcagttataacatgaaagtacaaactttcagttgtaagttctgagggtctaccgtacagcatggtgactgtagttaataatattatattctatacttgaaatttgttaaggtaaaagagtagatcttcagtgttttcaccaaaggaaacaaaacataactatgagaagtgatggatgcatggtcatcatttcacaatgtataggtacataaaattatcacattgtaaactttaaatatatgcaatttaatttatcagttatacttcaatgaaggtaaaaaaattaaaatttttaattacaaaaacactgagtaactagaagaagcaataaagactggaaatcaaaaatagagaaaattaataaagcctaatgtaagtttgaaaaaataaa

SEQ ID NO: 342292 - DNA, 583 bp, Homo sapiens
acttttccccattcggtattatgttggctgtgggtctgtcacagatggcttttattacattaaggtaataattccacttatatgaaaactcttttttaaaaaaatcaaactcatagaaacagagagtagaatgaggttgtcagtggctgaggggttaggtaattggggagatgttgttaaagggtacaaactttcagttataacatgaaagtacaaactttcagttgtaagttctgagggtctaccgtacagcatggtgactgtagttaataatattatattctatacttgaaatttgttaaggtaaaagagtagatcttcagtgttttcaccaaaggaaacaaaacataactatgagaagtgatggatgcrtggtcatcatttcacaatgtataggtacataaaattatcacattgtaaactttaaatatatgcaatttaatttatcagttatacttcaatgaaggtaaaaaaattaaaatttttaattacaaaaacactgagtaactagaagaagcaataaagactggaaatcaaaaatagagaaaattaataaagcctaatgtaagtttgaaaaaataaa

SEQ ID NO: 342293 - DNA, 451 bp, Homo sapiens
aatgtataggtacataaaattatcacattgtaaactttaaatatatgcaatttaatttatcagttatacttcaatgaaggtaaaaaaattaaaatttttaattacaaaaacactgagtaactagaagaagcaataaagactggaaatcaaaaatagagaaaattaataaagcctaatgtaagtttgaaaaaataaaatcaattgatcaaaaaaaggaaaagaaaagtagattcctaacattaagaatgagtgtgttcctacatatatcacagataccaaactataacaagaaaatactataaatgccaataaatttaacaacttagaaatattggacaaatttcttgaaaaatgctaattagcaaaactkatacaaaatgaaataaaaaatatcggttgccctaataattttcaaaaaagtttctatttgttatcagaaaccttcccacaa

SEQ ID NO: 342294 - DNA, 434 bp, Homo sapiens
ttgtttacttcggctgtcaatcaggagacacaggaacaacgtaagccatagtctacaagcaagaaatgattgttctctgccttcttctgctccaaagtaaaggttcacattgtcctactggtttkcaaaagacacaagtttcgaagtctgactgacttttatttgtattccaactctgccactcaaaaactatatgatcttaggcatgttgaggagcttctctgagcttatttcctcatctacaaaataattccgaaaatgtttactgtaggattgttatcaagataaaatgatgccatttgtgtcaaaggttgtagcacataccaaatagccaatgaaagtgacttttctttcatttttgaactaaaattcatcattataacattttttcaatttaaattatgtaatgaacaaaataatagttttcaaactaa

SEQ ID NO: 342295 - DNA, 605 bp, Homo sapiens
aacaatagaatagcattttgaaactgctaaaagaaaacctgcccacctgccatccaagaagtccatatccagtgaaggtatttttcaaatatgaaggtaagaaaacaatctctttacaccaaaaacaaaacaaaacacacagygcaaaacaaccttctgattcctctgatttaattcaatacaagcaatcagcactaaaagaaacactaaatttctttacgctgaagcaaagtaatctcagatggaaacaaaaaactgcagaaagaaatgaaagcacaaaaaaagataaatataaaataatacctaatatttaaaacaataacatgtaggctttatgtaacatgtataagaataatatatatgaaaataccgtaaggagtggaatatttagagttagactttagtaagcattttgaattctttgggaaatggtaaaattaaagtaagaacaaaatctaaaaatatcaataaaattgaaagatgttcagtggcctcattcaactcaaatcgcttttgttttcctttctgagtcaatattttaaaaatatttagataagcctaattttgtggccatttcagaaatcagttagatgaactattagaat

SEQ ID NO: 342296 - DNA, 603 bp, Homo sapiens
ttataataaagaggactgggtcttttatcctaaatgtagcaaggaataaaatttatttctgaaagaggtagtgcttctgcctttttgtcccctaagtcttatatatcttgctggaggataaacaaggactgaatcccaaggggagtataaagcaccaagagaaagcaaaatgcaacttatggcaatattttccttatgcctggtccaatttatgagggacgcgtttggaaaatgctctgaaaagccagagtccctacagagatacattaggatttcaaacattagacaaattaactgtcagctgaatgcaatttttgttgggatgcagctgtatgccatcaacaaccaacattttctgtagccggtaaatgagtgtttaagacctgatgtggggcaggtcacagtggctcacgcytataatcccaagcactttgggtggccaaggcgggtggatcacctgaggtcaggagttcaagccagcgtggccaacacagcaaaaccccatctctaccgaagaatacaaaaattagccaggcatggtggtgcacgcctgtaatcccagctactcaggaggctgaggcaggagaattgcttgaacctggg

SEQ ID NO: 342297 - DNA, 604 bp, Homo sapiens
aagtccagttgaggcagggtgtaactctgggtggaaatgattctataagagcttttgaattttctttctatctccagtgtagtttagctttattaatgaaggaatattcattcaagttgcaggaagtataacttaagaaacaagtgataaattcagttcaggtatgagacacctagaggaaattgggtggcagttggaagtgaaggagtgtgcatgaaatttcagaagagaagattaagctcaacattctggttagaaaatcatcagtgtatacatggtaattgaggtcatggatgaaaataacttattttccccatggtagctttttaccagtaagtcattaatatgtacctttcttttaagacrttaatatttttattggaaacataattatccatagaaaaatataattaatgtttaaaatgcagaaaacagcagtgggaaatatatggagaaccagatttttatctctttaaaaataagattctatcataaagacagttgtattctcagccaatctttaaagatagacatctgcaagtatgacattgattaaatatattttcataaactaatccaccataatgatatttataaacctgtt

SEQ ID NO: 342298 - DNA, 604 bp, Homo sapiens
aagtccagttgaggcagggtgtaactctgggtggaaatgattctataagagcttttgaattttctttctatctccagtgtagtttagctttattaatgaaggaatattcattcaagttgcaggaagtataacttaagaaacaagtgataaattcagttcaggtatgagacacctagaggaaattgggtggcagttggaagtgaaggagtgtgcatgaaatttcagaagagaagattaagctcaacattctggttagaaaatcatcagtgtatacatggtaattgaggtcatggatgaaaataacttattttccccatggtagctttttaccagtaagtcattaatatgtacctttcttttaagacgttaatatttttattggaaacataattatccatagaaaaatataattaatgtttaaaatgcagaaaacagcagtgggaaatatatggagaaccagatttttatmtctttaaaaataagattctatcataaagacagttgtattctcagccaatctttaaagatagacatctgcaagtatgacattgattaaatatattttcataaactaatccaccataatgatatttataaacctgtt

SEQ ID NO: 342299 - DNA, 535 bp, Homo sapiens
tattaataatttcacaataatgcaactgctggaggtgtacccttttcactttttcactttccatatctacccctgtgagaactttgttactaaagatttgaaggcaactatttattcaggagattgctaagctgttcctaagagcaggtagagcaggctgttggaaagctttctttcatgtcccgtggtatgagtgccaccataaacagacctacattagtcagtttycatgctgctataaagacatacccgagactgggtaatttattaagaaaaagaggtttaatggaatcacagtgccacatggctggggaggcctcacaatcatggctgaaggcaaaaggcatgtcttacatggtggcagacaaaggagaatgagagccaagtgaaagggaaaaccccttataaaaccatcagatctcatgagacatattcactaccatgggaacagtatgaggtaacccacccccatgattcaattatctcccactgggtccctcccacaacatgtgagaattatgggagctacaattca

SEQ ID NO: 342300 - DNA, 535 bp, Homo sapiens
tattaataatttcacaataatgcaactgctggaggtgtacccttttcactttttcactttccatatctacccctgtgagaactttgttactaaagatttgaaggcaactatttattcaggagattgctaagctgttcctaagagcaggtagagcaggctgttggaaagctttctttcatgtcccgtggtatgagtgccaccataaacagacctacattagtcagttttcatgctgctataaagacatacccgagactgggtaatttattaagaaaaagaggtttaatggaatcacagtgccacatggctggggaggcctcacaatcatggckgaaggcaaaaggcatgtcttacatggtggcagacaaaggagaatgagagccaagtgaaagggaaaaccccttataaaaccatcagatctcatgagacatattcactaccatgggaacagtatgaggtaacccacccccatgattcaattatctcccactgggtccctcccacaacatgtgagaattatgggagctacaattca

SEQ ID NO: 342301 - DNA, 601 bp, Homo sapiens
atttattttacctatagaattttattttttcacacaataaattactggtagatgcccccaccsttaaaactaaattgtctgcatgaatatcagaaggacgtttaaaaaatctgattattaagtttattagaatactaaggttaaatctttccaaatttttccccaaaagcatttttcctctcctatatggcatttccatttttcacttgattttgatctgcacagatatagtatagaaacatgtataattccatggcaaaagttatactgaatcatttagcgagttttatttaccatacctcaatcaattaataattgtgaatcacaaggcatcagagagtttttctcttgagttcaggatctttgcaacatttgtacttggatatctcaaagtcaactcaaacccagtattataggaactaaacatgtagtatcaatccttaaacttgaccctatcaaaagataggcagttccatctattctgttctagaagcctgtaaactgagagttctttctgacctaacattctccttcaacccccaaatgtaatttatacaccaagtcatcagattggccttagcagtatctgctaccactcttt

SEQ ID NO: 342302 - DNA, 600 bp, Homo sapiens
ttcacttcttcctttctaaatactagaggaaagaagaaaacccggcagtctctgtagtcatgaaaacttgctagagttggcatataatgctttttcatcttgtaactggaggttcactaattcctggttagggaaatggcaaatgcagactttcagctctgattccctcttacgccatttaatgacgtccctgctgtgtttagttatgtaaatactgttattataaagtcaatygtggctgtgttttcataaatgcaaacacaatgtctttatcacagcaaacatctttagagtgtttcagttttttctttgttggtattactgttatttatgtaaaacagaaaaattatatggggccctaggggaagacagagagaatcttttaaaatatcaagttcactgtaattatttagtacttccaggccaaagaaaaagtaagtcaataagttcagaattgctttcagataaagatctattagacacagggaagtttcattgaggtcatttatttctcctataacacttattgctctaaatttcccccctacttctttatattttgccaattattattatagaaaacttgtagctgtcttattt

SEQ ID NO: 342303 - DNA, 553 bp, Homo sapiens
gaccttcacagtccatgaggtggcttcatagaattttgaaatcccctcccctaaaatcatctggttccaggtttattcaaagaaccggattctacaaagcaccacgaaggataactttttctctttccatcactgcctttggttttactgtttaacagctttcttctgcgtttaagagcaacctttcaggtctagacatgtcagaaatcaaaacaacattatttttaggtaaaagattaaaaaaaggttcagtcctattacaatcaaaactgttatctcccatctcattttaaggtgctctccctctctccagcaaggcctgggccacagagctttaccccagttccagcaatgagaatggatccgataaaatctcttttcctcaccttcctttccctgcttgctcaactgctgccagtttctggaggcaggaagggagggaagaggaaaaagtttaggtaattacttaactagttccggtgcaatgtggctactcaatgccctctggttgacatrtgcccaaatactaatgaagcgggaaaaattcccttat

SEQ ID NO: 342304 - DNA, 541 bp, Homo sapiens
tttacagtgataaacatctacattaaaaaaaaaatctcagattaaaaacctaaatttacccttcagggaactagaaaaagaagaacaaactaagccctaaactaagtttttactagagttaataaaaggaaagaaataataagattagagatggaataaataaaatagaaaatattttaaaacaacttaatgaaattaagagtttgttttttgaaaagataaaawtgataagataaacaaaatcctttaaaaactcttctaaaaaatagaagaagaaacagtactaaactaattttatgaggtcagcattatcctgatattaaaaccaaagacaccataagaaaagaaaactacaggccaatatccctgatgaacatacatgcaaaaatccagaacaaaatactgcaaaatgaagtcagtagcacattgaaaacaccatgatcaactgggatttattgttgggatgcgaggatagctcaacctatgcaaatcaataaatgtatacattacattaacagaatgtagaataaaagttatatca

SEQ ID NO: 342305 - DNA, 605 bp, Homo sapiens
tctctcttggtgtgctgagctgcctggagctgggcagggggtgatacaagcccctccactgggacagtactgggtcagacctgaagctggcatggcactgagtctcatccaaggcccacagtaaccattatctggctaccacctatgtttgctcaaggttctagggctctacataagcaggtggaaaagccagccaggcttgtgtccttccctttagggtggtgagatccccccaaccccaggcaggtccagagaggccaactgggagccatggcctggagttataaaccttaggaatctatttaatgctctattctactgcagctgagctggcacacaaaccacaagacaaagttcttccactcttcccttccctttccataagcagagcagtctctccctgtggccaccaccaccccaggaccatggtgaatattgcytaactactgccgatgttcactcaaggcccaagggctcttcagtcagcttgtggtgaatgctgccagacctgggaccctcccttcagggcagtgccctcccctctggccaaaggcagattcagaaatgtcatccaagagccaagacctgaaatcagggatgccaag

SEQ ID NO: 342306 - DNA, 605 bp, Homo sapiens
tctctcttggtgtgctgagctgcctggagctgggcagggggtgatacaagcccctccactgggacagtactgggtcagacctgaagctggcatggcactgagtctcatccaaggcccacagtaaccattatctggctaccacctatgtttgctcaaggttctagggctctacataagcaggtggaaaagccagccaggcttgtgtccttccctttagggtggtgagatccccccaaccccaggcaggtccagagaggccaactgggagccatggcctggagttataaaccttaggaatctatttaatgctctattctactgcagctgagctggcacacaaaccacaagacaaagttcttccactcttcccttccctttccataagcagagcagtctctccctgtggccaccaccaccccaggaccatggtgaatattgcctaactactgccgaygttcactcaaggcccaagggctcttcagtcagcttgtggtgaatgctgccagacctgggaccctcccttcagggcagtgccctcccctctggccaaaggcagattcagaaatgtcatccaagagccaagacctgaaatcagggatgccaag

SEQ ID NO: 342307 - DNA, 525 bp, Homo sapiens
cactggagctcccatatttataaaacaattactactagacctaagaaattagagaaagcaacacagtaatagtgaggaacttcaatactccactgacagcactagacaagcatcaagacagaragtaaacaaaaaaaaacagtggatttaaaccataccctggaacaaatggacttaacagatatttacagaacattctacccaacaaccacagattgtacattctactcatcagtgcatggaactttctccaagatacaccctatgataggccacaaaacaagtctcaataaatttaagaaaactgaaattatatcaagtcctttctcagactacagtggaaagaaattggaaattaactccaaaaggaaccttcaaaaccatgcaaatacatggaaattaaataacctgctcctggctggccacagtggctcatgcctataatcccagcactttgggaggcctaggtggatggatcacctgaggtctggagttcaagaccagtctggccaacatgccaaaacc

SEQ ID NO: 342308 - DNA, 617 bp, Homo sapiens
cttttcactatattctatttgcactctcatttctctgttttcacaatgcttgatcacatctttagccattttcccacctagatcttttctgttctctccatttttctgactgctgcccatctttcaatactgaacaaatcagcttcttagtgcatatctgtgatatgcaaaacactgttaggtgcttcaagagttagtcttctaagagctttatgttttattagaacatgacacaagtaggcaaayaactataatgcaagataaagtgaaaaagattctataagaaaggtttactcaaaatactgagggttcaaaatgtgtattataacattaattaggaagaattagaaaatagtgcatgtagagagaattatatgaaatgcacctcaaggaaagcatttgcctttgacagctggaaacacgcactgtagaaaggcattatttggggttgaaagtatgaacaaagctctatcagcagagcatctttaagcctcaatgaaaagcccactgtggctaggaggtatagtacataaataggaaagcaataggagatgagtctgtaatttcaagttgtcatggtagaaggccctgaatcccaggttgaggaatttttactc

SEQ ID NO: 342309 - DNA, 620 bp, Homo sapiens
gtttgctgcacagcaatggataagtgatacagagagatacattaatgttcagagaaaagaagggcaactttgaagaggagaaaagagctggatgattcttgaggctttgctgaagagctggatgattcttgaggctttgctgactcttaacgtattgctcctaggcccagtctggaaagaaaataacacgatctggattccacatctggaaaaagactgaagaagtccccaaagaggtgaaaaaaggmagctttcttttttcccttttgtacttattatatataaactaaactgggttaaaggtcttccacatatgtaatgtagaatgacaggacaggtattaaaatatgagctaaagaaatatctacgtatagtggccacacataattggctgttggaaaattatgttaaacaatcacaatacatgctgcaaatccatattgatggtctgttttctggaagattttgactggatgggggagatcagaggtggctcttgtcatcaaggagcatgccatcttcttggagagcagagaggcacaaagattcagcatctattctgcaggtaattctccaccagttcttatgtgtcaggtcctgaatttgctcctgaaaagatg

SEQ ID NO: 342310 - DNA, 577 bp, Homo sapiens
accagtaggtggtcaaaaccacaataatgcataaatgaaggcagggaattgggtatccaatgtgagcaactgaaaaggtgccatgtattagctatttgccattatggttctgcaagtgctcagatgactcataaaatgaccagaacaaaagtttgttcttttgtttttactttgagaagataaagaatcacgaattagtattcaaggttacctaatactaacccttgtctaccacgtgaccttgcattacagggagctgttgttgggacaggacaagagtccacatcccctgcccagtgcctggttctgggtcatgtcaccgaagcgcatcagcccatctgtcagccaaaccccactagccttgtgccttctcttctaaatccccgyggaggaaaacaacttctgccttctacagtacgaacagcgagggtctgctgggaaccaatacaacttcgcgtcccagtgcagcaatgttgccaggtaacaaatgtagaaacatactccaaaaactgtatgtgacaatatacaacctccgctctgcagctgataaccgagggagtgttaaaacaccgcgttc

SEQ ID NO: 342311 - DNA, 490 bp, Homo sapiens
gcctatttaatgagatagtagtagtattaaaggtgagcaaacgtatgtgagggttaaaccgcactggcttttatttcacccaaacttacaccttcatttttcctttgcaatacatctaggaaaaatgctaattagagctgttcattggaccatcttgttctttctaaccttgaactccaggtttgttccttctgaaaagtttgctgttcaagtgctctgaaargtggatcttttaattttatgggattttacaatatttccactgaatgtttccttttttcagcggtcttgtgaattgcctttaccattctttcttttaatgccctttaattgactctgagagaatcctgctccctacaggcattttcactgggatctttggagtgtcattgtcattgaacactttatattgaagcttccccgtgcctgctctactagaacagatttgaaaataccaagtttagtacatgttattaccctatgtttctga

SEQ ID NO: 342312 - DNA, 490 bp, Homo sapiens
gcctatttaatgagatagtagtagtattaaaggtgagcaaacgtatgtgagggttaaaccgcactggcttttatttcacccaaacttacaccttcatttttcctttgcaatacatctaggaaaaatgctaattagagctgttcattggaccatcttgttctttctaaccttgaactccaggtttgttccttctgaaaagtttgctgttcaagtgctctgaaaagtggatcttttaattttatgggattttacaatatttccactgaatgtttccttttttcagcggtcttgtgaattrcctttaccattctttcttttaatgccctttaattgactctgagagaatcctgctccctacaggcattttcactgggatctttggagtgtcattgtcattgaacactttatattgaagcttccccgtgcctgctctactagaacagatttgaaaataccaagtttagtacatgttattaccctatgtttctga

SEQ ID NO: 342313 - DNA, 559 bp, Homo sapiens
gatgaaactctcctaaccagaggcttgcaggaacccaatcttgtatttgctaatttagtgttcacagtgactttgtagaacctaaggactgtgaatagcaagaatgactgtaattaaatgaataactctttaattgctaatatgataagtgctacacattaatagcactccgtaccacaacagcatctatagaggaacttatcctgaccttagaggttaggaraggcttccctgaggaagtggggtttcccctgtgatgtgaaagagatgtagggattagctgagttgagagtaggaggtagggaatttcagacagagggaacagcatgggtaaaagccctgatgtaggaaagagtgtgattcattggaggaataagagaaggcccccatgagaagatgattgtgtgtggggtggggaggggagggtacaggggagagtggtaaaaaagagaataaagctgtagacatggacagaagacagttcatagaggactctgtgggccaggttaaaaatctaaactttattaaaatagccatgaaaaaatactgatgggttttc

SEQ ID NO: 342314 - DNA, 599 bp, Homo sapiens
tatgaataatataaaacatcacttgtcattgacgaactaatgctgtatttttgtgatgcacacacaagttgtatagtgastacctataaagtagctactattattatcttattttatagctcaggaaatgagagtcagagaaattcaatgatttgcctgacttacccttggtctcacacccagtaaatcctgcagctggcattcaaactcaggtttcctctagctaggtagtgaaaggtaggatttggataaatagtgtaggaagtacttctgagctgtgagactaaacagaattatttccactagagatatttccaggcatagctaaaagagagagtcaaaagtgtgcttggagaacgaggagcccaacataacaggactggcatggataagacttcaaggtggcccgttagtttcatggaaggtcaacgtttccccatccttaggaattcctgcttccaagaattgattagtgataagcagacaatagaacttgacccaaatccatttcacatgcgtttcccactgaaactgcctttccaaaaattatgacagtgaaagaaatctgacctaactgactccatctttcttttaacctt

SEQ ID NO: 342315 - DNA, 599 bp, Homo sapiens
tatgaataatataaaacatcacttgtcattgacgaactaatgctgtatttttgtgatgcacacacaagttgtatagtgactacctataaagtagctactattattatctyattttatagctcaggaaatgagagtcagagaaattcaatgatttgcctgacttacccttggtctcacacccagtaaatcctgcagctggcattcaaactcaggtttcctctagctaggtagtgaaaggtaggatttggataaatagtgtaggaagtacttctgagctgtgagactaaacagaattatttccactagagatatttccaggcatagctaaaagagagagtcaaaagtgtgcttggagaacgaggagcccaacataacaggactggcatggataagacttcaaggtggcccgttagtttcatggaaggtcaacgtttccccatccttaggaattcctgcttccaagaattgattagtgataagcagacaatagaacttgacccaaatccatttcacatgcgtttcccactgaaactgcctttccaaaaattatgacagtgaaagaaatctgacctaactgactccatctttcttttaacctt

SEQ ID NO: 342316 - DNA, 599 bp, Homo sapiens
tatgaataatataaaacatcacttgtcattgacgaactaatgctgtatttttgtgatgcacacacaagttgtatagtgactacctataaagtagctactattattatcttattttatagctcaggaaatgagagtcagagaaattcaatgatttgcctgacttacccttggtctcacacccagtaaatcctgcagctggcattcaaactcaggtttcctctagctaggtagtgaaaggtaggatttggataaatagtgtaggaagtacttctgagctgtgagactaaacagaattatttccactagagatatttccaggcatagctaaaagagagagtcaaaagtgtgcttggagaacgaggagcccaacataacaggactggcatggataagacttcaaggtggcccgttagtttcatggaaggtcaacgtttccccatccttaggaattcctgcttccaagaattgattagtgataagcagacaatagaacttgacccaaatccatttcacatgcstttcccactgaaactgcctttccaaaaattatgacagtgaaagaaatctgacctaactgactccatctttcttttaacctt

SEQ ID NO: 342317 - DNA, 561 bp, Homo sapiens
aatttagtttgtagtttaactttgaaacaaagagtataacagcccctccccaaaacaaactacctccttacttggggagcagaccacctttgtaaaactgacaaattagccacagaattagaaagtgtggtcaggaatcatgcagccagagaccataagattcctaacctcaccaattgctcctgcagataacattgctgttgtaaaacctaagatcagtgtccaagacagttttcagaccttgcattatgacagaccagccgctgccacccagactggcaatctggctcaactagttctgcaatcccacccaggaacagaagasagcaagaagaacctgctccaaccccctatgatttcatccctgacctaattaattggcgtttcccatttcctagctccccacctgccaaactctctgaaaactcctagcctccacattttcaggaaggctgagctgagtaataataaaactctagtctcccctttagccggctctgtgggtattaaactctttctccactgcagttcctctgtcttgataaatcagctcaatttggg

SEQ ID NO: 342318 - DNA, 619 bp, Homo sapiens
aatctccattcattaagcactgtgctgtagcaaaacaaaacaaaatgaaacgaacaaaagaaaccccagaatacaatataacatggcaagacaaaacaataacaactaacttaatgcagatatacttasagcaagaccatcctgctttacagaaattctgagttgtggagtatttaacaagaaatatagctttatagcaaaagtctccagctaaatatggggcagtcgagtgtagccaaatgcaagcctaagatttctttactaggcaagagcaatttgtcattaccaaagcaagagaagaggggtagcattgagtagaaaaagtggtcatttgtgatgggatcatctggtgtgggtttcgctgctgtgtggctttggggtctctttgtctcccagggcctgtgttttcatctataaaatgaggaaatttcactaaaaatcataaattcctcttaagctctatgtcctgccttatagaaatcagtgcttctcaagtgcctaaaacttcttcaaagtgggctttttatgatttgaacctctttaagatggggaagtatcttctccaagcattacctttcggcttggaaaaccctatcttggtccaatttaaattatgata

SEQ ID NO: 342319 - DNA, 619 bp, Homo sapiens
aatctccattcattaagcactgtgctgtagcaaaacaaaacaaaatgaaacgaacaaaagaaaccccagaatacaatataacatggcaagacaaaacaataacaactaacttaatgcagatatacttagagcaagaccatcctgctttacagaaattctgagttgtgkagtatttaacaagaaatatagctttatagcaaaagtctccagctaaatatggggcagtcgagtgtagccaaatgcaagcctaagatttctttactaggcaagagcaatttgtcattaccaaagcaagagaagaggggtagcattgagtagaaaaagtggtcatttgtgatgggatcatctggtgtgggtttcgctgctgtgtggctttggggtctctttgtctcccagggcctgtgttttcatctataaaatgaggaaatttcactaaaaatcataaattcctcttaagctctatgtcctgccttatagaaatcagtgcttctcaagtgcctaaaacttcttcaaagtgggctttttatgatttgaacctctttaagatggggaagtatcttctccaagcattacctttcggcttggaaaaccctatcttggtccaatttaaattatgata

SEQ ID NO: 342320 - DNA, 619 bp, Homo sapiens
aatctccattcattaagcactgtgctgtagcaaaacaaaacaaaatgaaacgaacaaaagaaaccccagaatacaatataacatggcaagacaaaacaataacaactaacttaatgcagatatacttagagcaagaccatcctgctttacagaaattctgagttgtggagtatttaacaagaaatatagctttatagcaaaagtctccagctaaatatggggcagtcgagtgtagccaaatgcaagcctaagatttctttactaggcaagagcaatttgtcattaccaaagcaagagaagaggggtagcattgagtagaaaaagtggtcatttgtgatgggatcatctgrtgtgggtttcgctgctgtgtggctttggggtctctttgtctcccagggcctgtgttttcatctataaaatgaggaaatttcactaaaaatcataaattcctcttaagctctatgtcctgccttatagaaatcagtgcttctcaagtgcctaaaacttcttcaaagtgggctttttatgatttgaacctctttaagatggggaagtatcttctccaagcattacctttcggcttggaaaaccctatcttggtccaatttaaattatgata

SEQ ID NO: 342321 - DNA, 610 bp, Homo sapiens
cctttctgttcttcataatgctttagtctgaattcattaaatctataattttttaaagacattcattctcatttctgatattagctagcattaataattaatacatggggcctatcagatactctacataattgcttattctatcagcctttgagctaaattagaaaaaaaaagatgtttcaagtgagaagtggtaagttaaaggaagctaactgagggmcaagttagaatggtttataaaagaactatactaaagctgaaatgaaaaaaaactaagtttgaggattttactccactatttactatctggatgactgaagataattaatttctctcagtctatttcctcatctataaaatataactaaataataaatacacaaagataaataaataataacaatatgctcatcctcaaattcttagtgcccagcacacagtaagtgttcaaataatgcctgctgaatgtctgatcttcaccattttattggtaaatagaaaataagtatggggcaagcatttagtgttgtcagcatcaatgaaaataataaatacaaaaacacctcatgaaccataaagcactgtacaaatgcaagggcttttaaaaacc

SEQ ID NO: 342322 - DNA, 563 bp, Homo sapiens
tttcaagtgagaagtggtaagttaaaggaagctaactgagggacaagttagaatggtttataaaagaactatactaaagctgaaatgaaaaaaaactaagtttgaggattttactccactatttactatctggatgactgaagataattaatttctctcagtctatttcctcatctataaaatataactaaataataaatacacaaagataaataaataataacaatatgctcatcctcaaattcttagtgcccagcacacagtaagtgttcaaataatgcctgctgaatgtctgatcttcaccattttattggtaaatagaaaataagtatggggcaagcatttagtgttgtcagcatcaatgaaaataataaatacaaaaacacctcatgaaccataaagcactgtacaaatgcaagggcttttaaaaacccaaaggaacatgatggctttcccacatagaagatataaaatcctaacccactctctcttttcccttctgttacaatacaatggyagcaacagcaatttcagcattgggttgtgaaacaagttacaggagc

SEQ ID NO: 342323 - DNA, 600 bp, Homo sapiens
attaatttctctcagtctatttcctcatctataaaatataactaaataataaatacacaaagataaataaataataacaatatgctcatcctcaaattcttagtgcccagcacacagtaagtgttcaaataatgcctgctgaatgtctgatcttcaccattttattggtaaatagaaaataagtatggggcaagcatttagtgttgtcagcatcaatgaaaataataaatacaaaaacacctcatgaaccataaagcactgtacaaatgcaagggcttttaaaaacccaaaggaacatgatggctttcccacatagaagatataaaatcctaacccactctctcttttcccttctgttacaatacaatggcagcaacagcaatttcagcattgggttgtgaaacaagttacaggagctaggcttcatgccccaaagcacaaacaggtggagatayaggagcatcttcctgactcggcaaaggaaagttttaagagcaataagcgagaagacaaagcttttcagaattgcgctgtgtttcagagcttccctctgccatctctgggccctgggaaaggcagtgtcaggaaagcacaggggaa

SEQ ID NO: 342324 - DNA, 395 bp, Homo sapiens
acacaagtttacctaggtaacaaacctgcacatcctgcagatctacccctgaacttaaaataaaagtaaaaaaaaaaaggcctataaacgtatacgaaagctcaaacttctaataaaaaaatcaaacaacaaaatatacaatttttcaactattaaggtgaaaactgtttggcaacattttaaaaatgataatttttagtggtagcacattcaagaagcatggtcagaaaaatagaataaacttttatactcttaccactagacagggggtatgggttggtgtgatcatcctgaagggaataaactatcaatcaaaggtcttaccagtattcrtgacctttgacccaataatttgactttcagaaattcaagagagatatatataaacaataatg

SEQ ID NO: 342325 - DNA, 548 bp, Homo sapiens
gttaatggaacaaagatttatttattgttcatactgtcttttcaatgcaggtagtcaggggtctctgcttaccattattactcaggaaccaaagccaatggaggatgatactgtcatctcaacaaatgtcttcaggactagccatgggaggggaagagagcaaggggaattgggtgccaagtcttcaatacttctacactggagtgctacacataatttctgcttggattagcygcagaaagtcaaatgactatgcctaacttcaggaaggagtatgtctggaagaagaggagaaagaataatctcagcacatactgacactgttcctattttatacctgagaacactttcagcttagaggaaaagggaaaagtagttggttcaacatcacatacacacagtagtaaagggaaagccacaattccagtattccactggctctaaaattagtgcttccagtctctttgatcactgcctgtagaggctggtgacattcttgctggagcctgttgggagttgaattgtgctcaccaaaaagatatgttgag

SEQ ID NO: 342326 - DNA, 594 bp, Homo sapiens
taactccagaaactaggaagagacaaagacagatacttccctgagtcttgacagggagcaggggctcccaacaccttgatttttgacttctaaattgtgagagagtaactttctcttgtttaaagccacccagtttgtggtactttttttatgtcatccctaggaaatgaatatagagcttatcctgtaattctgtgtgttggatcttaattttcacattgtttatttagccacatgtcccttctaacaagcttgggctcttctcaggagctatctccttcaggaagccttccatgagagggccctgtgccatgtcttactcttgaggtctggtactctcagatcagacagtatctgatgctgactaggcattcaggaaatgtttgttgaatgaatacaatggcgttggtttctattctttttctctaatcttctcaccagagtttagatgtttcarctttgtaacaggatgggacatctatttcagacttggagagactctgaagagtttgtcagaggacagacagttcattagttggttctcattttgaaatgcttgaactcagggaacacatctcagcttcatacacagag

SEQ ID NO: 342327 - DNA, 571 bp, Homo sapiens
ttgtactatgtacatgttaattggatgctgaataatcagttttactatcttcattatgtaagtaatgcataaatccaattttgtttaagagtttcagataatatgtactatgcaggagaaaaatagaaagtctttcttcaacatccttctcccacctgcctcagccatcctgttccaggtgtagccacagccggtagatgagtatggatccttaattctccttgctgtacacacacaagtacgtatatgaatgtacataaacaaataactttttccataaatgagaacacactgtaagttttttcctgtgaccttttttccacttgacatgttgaggaagtcttttcattttaatttgatacaatgcctctatttcattctttgtaaggtttatttaccatatttgaattaacatggcaaataaatgtstaaacgtctaaaatgtacctgagattttgtttttactcaggtgtagtgaggccatagatcaggagacaactgccattgaaaagagagtgtgttacgtacagttcccaagaggaaggggcacgccacaccatgccacactgtt

SEQ ID NO: 342328 - DNA, 515 bp, Homo sapiens
cctgctagcacttggaaggagagcctgctcagtgtgtttactggagttgtacgcatgctcacttgaggcgttcttcccttaccagccgaatgtcctaggagatcatataccagttaaactccaccattttgcctcttagtgtgcatgtgtgagcccattcacccaactcctgagatcttatctggaagttactgatcaccagtttcaggttttccctatctattgggagactgcctttgcctagyagcagctgttattattttagagagagagttaacaaccacctgaccatcacttgatggtcacctgacattcctggttttggcaggggctctcttgccctgtttatgtccaactagctacctacagtaacaaaaccacacagggccaacgggggagttaccagggtcagtcaggaggcagtaggagtggggaaaaacataggcaagatagttttcatggtaaggaaagggtaaggtgaagtaggcaagctaagcaggtttaggattgaatag

SEQ ID NO: 342329 - DNA, 515 bp, Homo sapiens
cctgctagcacttggaaggagagcctgctcagtgtgtttactggagttgtacgcatgctcacttgaggcgttcttcccttaccagccgaatgtcctaggagatcatataccagttaaactccaccattttgcctcttagtgtgcatgtgtgagcccattcacccaactcctgagatcttatctggaagttactgatcaccagtttcaggttttccctatctattgggagactgcctttgcctagtagcagctgttattattttagagagagagttaacaaccacctgaccatcacttgatggtcacctgacattcctggttttggcaggggctctcttgccctgtttatgtccaactagctacctacagtaacaaaaccacacagggccaacgggggagttaccagggtcagtyaggaggcagtaggagtggggaaaaacataggcaagatagttttcatggtaaggaaagggtaaggtgaagtaggcaagctaagcaggtttaggattgaatag

SEQ ID NO: 342330 - DNA, 515 bp, Homo sapiens
cctgctagcacttggaaggagagcctgctcagtgtgtttactggagttgtacgcatgctcacttgaggcgttcttcccttaccagccgaatgtcctaggagatcatataccagttaaactccaccattttgcctcttagtgtgcatgtgtgagcccattcacccaactcctgagatcttatctggaagttactgatcaccagtttcaggttttccctatctattgggagactgcctttgcctagtagcagctgttattattttagagagagagttaacaaccacctgaccatcacttgatggtcacctgacattcctggttttggcaggggctctcttgccctgtttatgtccaactagctacctacagtaacaaaaccacacagggccaacgggggagttaccagggtcagtcaggaggcagtaggagtggggaaaaacataggcaagatagttttcatggtaaggaaagggtaaggtgaagtaggcaagctaagcargtttaggattgaatag

SEQ ID NO: 342331 - DNA, 594 bp, Homo sapiens
acaacctaagctggcatggatgattttcccttcaaccatctctcttggtcctgcttggatcatagccacaaggctaaagggggagcagttgtcttgtagctgcaaaggcagaaagtctcatgttaggggtgatggagcagaaagttccaagctgacctgagaaactggggcagtggtgacttgcctatccctgggtgtctcgtatggccttgttacacttgtaatagctactagttattgagtacctatgactgccaaaatagtttacgtacatacgctctaaacactgcaaaaagctttgttggatgcattttactctttccactttagagatgagtaaactggaaatcaaataagtttaaataagctgcctgggtataagcagtggccaagaggtagaaatgggctccaacgcagatgcacctggctcaaagtgcagccaggacactgcagaactgttcacagctgtccycaagtgcagaatgacttatttcagggtgggatccaggtctagtgtcttatatgtatcacatacgcatcacatatgcagccgcctccttctcttcttcaggctgggaagagggatgaagagag

SEQ ID NO: 342332 - DNA, 564 bp, Homo sapiens
tttacactactgtactgtatttgttaatcccaggagtttatatcatctgtttacaagatgaattgtctgtctgaaatggtggacagccacagctgcaaacctcaatctattgtacatttcaagcaattmaacattttctcataatgtcatgacttttctctgcctcttgcatctgtttccagtatcactagtggccttttgtgtgaatcccattgtgttattcaaggcttatggtttgcactaaacacgatgaaagatatgggataaccaagggagatcattttttactgcgatatgaaatgtactggagagagagactgctcacattgagatgatctgcatcacatggctcaccactatagcaacaggagtggctacaaaattatgacagtagtagagtgtgtactacagttaactttatgccttgtaatttaatactgcatctttgcatctttaatatgtttatatttctttcaactgaaaatggcactacacatgatctgtgtttgtgcgaatacgttttgataaattttaagttttataatagatttgtgcatattttat

SEQ ID NO: 342333 - DNA, 564 bp, Homo sapiens
tttacactactgtactgtatttgttaatcccaggagtttatatcatctgtttacaagatgaattgtctgtctgaaatggtggacagccacagctgcaaacctcaatctattgtacatttcaagcaattaaacattttctcataatgtcatgacttttctctgcctcttgcatctgtttccagtatcactagtggccttttgtgtgaatcccattgtgttattcaaggcttatggtttgcactaaacacgatgaaagrtatgggataaccaagggagatcattttttactgcgatatgaaatgtactggagagagagactgctcacattgagatgatctgcatcacatggctcaccactatagcaacaggagtggctacaaaattatgacagtagtagagtgtgtactacagttaactttatgccttgtaatttaatactgcatctttgcatctttaatatgtttatatttctttcaactgaaaatggcactacacatgatctgtgtttgtgcgaatacgttttgataaattttaagttttataatagatttgtgcatattttat

SEQ ID NO: 342334 - DNA, 590 bp, Homo sapiens
tatggtgagttgtataatcatttcattaaatattacaatataacaataataaaaataaagtgcacaataaatgtaatgcacttgaagcatcctgaaaccatccccctccccaggtctgtggaaaaattgtctttcacgaaactggtccctgctsccgaaatatctggggactgcggttctacaacatctatggagtttctgttacaaagtgcaacatgtttgctttaaagaatttggaagaagataagaaaaaaaaattgtctataatgccactaaccaagaacagacacaattattttatgtattgttaatagtctattttttgtatataatttggtaccatttaaaaaatattttttctaaatttaactagctcttgatttgagagggttttttcttttgttattattgctgctctcttatttctccactcagtgccttttaggggttgagggagaatgacagactattgacatgaaccgccactgcaatcagacttggctacatggactatgctcatctttttgaacacttcatccactaaatgtagaacaaggtgatgggaatataaaatggtgcagccactgtag

SEQ ID NO: 342335 - DNA, 590 bp, Homo sapiens
tatggtgagttgtataatcatttcattaaatattacaatataacaataataaaaataaagtgcacaataaatgtaatgcacttgaagcatcctgaaaccatccccctccccaggtctgtggaaaaattgtctttcacgaaactggtccctgctgccgaaatatctggggactgcggttctacaacatctatggagtttctgttacaaagtgcaacatgtttgctttaaagaatttggaagaagataagaaaaaaaaattgtctataatgccactaaccaagaacagacacaattattttatgtattgttaatagtctattttttgtatataatttggtaccatttaaaaaatattttttctaaatttaamtagctcttgatttgagagggttttttcttttgttattattgctgctctcttatttctccactcagtgccttttaggggttgagggagaatgacagactattgacatgaaccgccactgcaatcagacttggctacatggactatgctcatctttttgaacacttcatccactaaatgtagaacaaggtgatgggaatataaaatggtgcagccactgtag

SEQ ID NO: 342336 - DNA, 549 bp, Homo sapiens
actttggggtcactgaccttcattgcatgatatctaaagtatcaaaacttgtttactatatcttgttgatttttcagtggttttaggcaggatatatctttttgctattattctatcttggtcagaaaaagatccatctttctttatttctcctggaggatattttatattctatctaaaatattatcaattttatctaacttttcatttttacacccatcaagttgtagttaatatttagtaaaratttttgttaaacttactccgtaaccataaattcattgccttttttctcaatgatactaaatatgaataatgttttatgaatattccatacatatttgaggaaaatatatgtttttatatacagtgatagatggatctatgataaccatgtgagaaatttctttgttaatcaatctagccttgacaataatattccaaattttataaccaatcctgtttaaaaacatatgtagcttaaagaaattttcaagctggatagttagtaaaactaggtctttcttgagatatccattgcataatgcc

SEQ ID NO: 342337 - DNA, 636 bp, Homo sapiens
tgccttttggtagtaccttcccacacttactctggacttggacatgaaacttgctttggcaaatgggacagaatcaaacttcctgcaaacaaaggcttaaaaataatgcttctacagttctgtttatttatttatttttacaatccttgccatcactgtgaggaaatgcttttactagcttgctggaacaatgtgagaaacataaggagaatgagtgatctctgcctaagaatcctagactcctcagccccatccaaccctctaattgacctcagatatgtgaaggagcccagctgagatcagccaaagcttgcccagatcagcagaaggagtcagctagtaggcagttgttattttaagtaacagtaataaaaagaatgcttaacattgggggtagtttgttatgtagcaatagttaactgatacactattcttttttctgaattaagcacacccctcaatyatagttagagaagctagaaaactccatagtcaaattcttcttctcgtcaaagagtatccagaaaagttcatcacatggaaggaagaaagaagaaagaatagaatattttatagcccattgttggcaatcctaaagagatagtcataggtaagtcagggctcatataagtatca

SEQ ID NO: 342338 - DNA, 570 bp, Homo sapiens
aatttaaataacattttaattatatatccatatggatatataatttaaataacattttaattatatatccatatgcatatataatttaaataacactttaattgttatctgtaacatttaacttctgttatcagaacaaattcagcttcccttataagagacctggcagacattctaatatctccacatttccttaagaaaatagagttagggaaaacatatttggcaaattgtttttcttataaacatttgtaaaatgtttatctgaaaaaaaacctaaaaaccattgacsaatttatactatgccaagatgaataacatggaaatccttactttcaaagtcaaattgagttggtgtgatgtcaattttatagcaaaataaatttgtctttaaaaatgctatattttctagtttgaattcctgtgagccaatttgaaaaatccacatattgacaatattatatgactttcaaaaactcatattaactatgatgaaatgtttaagagaggaagaatatactatcatgtgctgcataatgttttggtcaaaggcaggccacatatacaatg

SEQ ID NO: 342339 - DNA, 569 bp, Homo sapiens
gaatttttatagtttgaggtcttacacttaaatctttaatctatcttgagttagtttttgtgtgtggtgaaaagtataagcatccaggttcattcttctgtatgtggttagccagctatcccatttgcatttattgaatagggattcctttccccatttcttatttttattaactggcccaagatcagatggctataggtgtgccactttatttctaggttctctattctattccattagtctatgtgtctgttttgtgccatgctgtttgattactgtagccttatagtattgtttgaagtcaggcaatgtgatgcctccgacttcattctttttgcttakgattgctttggctatttttgagctcctttttggtaaaatatcaattttaaaatagctttttctaactgtgaaaaatcatgttggtagattgataagaatagcattgaatctgtagatttctttgggcactatggccatttttatatcagttctttcaatacacgaggatgaaatgttattacatttgtttatgtaatctatgattcctttcagcaatgtttcatagg

SEQ ID NO: 342340 - DNA, 603 bp, Homo sapiens
ctgggcatgatggatcacacctgtaatccccgcactttgagatactgagacaggcagatcacctgaggtcaggagtctgagacaagcctggccaacatggtgaaaccccatctctactaaaaatrcaaacattagctgagcgtgatggcaggtgcctgtaatcccactactcgggagactgaggcaggagaatagcttaaacccaggaggcagaggttggagtgagccaagatcgtgccactgcactccagcctgggcgagagagcaagactccatctcaaaaaaaaaaaaaaaaaaaaaaaaaaaaaagtgttctttggtattttttgttgttgttgctttgtaaatgggattgtgttcgtgatttcgctctcaacatgaacattattggtgtataaaaatgccgcctttttttgtgtattgactttgtatcctcaaacttcactgaagttgtttatcatttccaggagccttttggcagaatttttagggttttctagctatagaattatatcatctgtgaatagaaacagtttgacattttcttttcctgttttgttgccttttatttctttctcttgcctgattgctctggctagaact

SEQ ID NO: 342341 - DNA, 571 bp, Homo sapiens
aaggctagccatagccatgttgcctgagaatcactttagagttgaactggtttagttaaatgagataatgaataaatagggcttacctggcccctggtgtgtactcagtaagcattagctggtatcattgggggtgtcaagacaagaatctagacttcatgactccaagtataatatcctttctatagcataaggcccatttccactcattctttcgttattctgattttccagatgctaactcaactaatgacaataaaaaaactaagacacaaaaataaaggcaagaaccayggatgcaaagaggaggttttctttccagagatgtctgcagacacttcagtaaaatgcagtgtgaaaacatccaagcttcaattccttattaactaagagtctcccagaagggatagatatcttagctatcttagaaatctctttagtttttttctatctatttgtttttattactagaaaaatgttgtatttactgggaataaataagtctttggagactttacaaacgaagaggacttaataaataaagacagacttgatggatcaaaaaaaccca

SEQ ID NO: 342342 - DNA, 508 bp, Homo sapiens
atcatgtatgggttattctacataaattttatctgatattaaygaaaagaaaactacccaacacttatctactaaaaactaaagacaatatgtcagggactattctgaactttttagaggtagtatctgatgtatttctcatagaagttctgtgaggcagacattattgttcagtgtgcatatgaagaaatcaaggcacatggagattaagtcactggcttaggagcacatgacaaatacatggtggagtcaggatttgaatgggaggctatctgaacctcagagtccatgttccttacctgtcacaggagtggcagaaaatgatggttattggcaaagtatcaatttgtgggaagaaaatcacatttaacaaataagcagcattttctattataaattttttccccaggtgtttaaacatctgaatgtaaaagaattcaagtattggtagagtgttgggggaggtacttgtcataagcagcaacaccatgactaagaaggtgacatt

SEQ ID NO: 342343 - DNA, 552 bp, Homo sapiens
taacatgagatctaccctcttaacaaatttttaaggtatattatagtayttatgtttttaatcaacaaatgtatattttacacatattgtgttctatgcctgttttgggggttctggggacagttaagaataacttggatactttttaagcttatattctaataagtagaaacagattattaaatgagtgtgcactaatcaattataatgtaaactaatcaataatgaggcttcatcaagattgaggtaactaccccaaggaatttgctagacaatagtttattatcccaacttgcttcgataaaaatatcctatatcaccatttatttggacttcatatgaaaatagaatggcctttatgaggcttcattatttattattttacatttttattgattcattaatttatcaataataatagtgaaagtgctattaaaaatcattccaagaaaaaaaatcatcccgacttgactttttatttcttcctaagaaacatgccttctaattgtaacttgtgtatttctaaagtccattctatttccatattaagtc

SEQ ID NO: 342344 - DNA, 589 bp, Homo sapiens
cataattaaaaagaggttgaaaataaacatactggcattgcagacatgcaatgcgttattattgttgttccctcttcttgaatatgtttctcccaagcatgaaagcacctcacaacctatatagcattgcacaatatacattaggtgattgattagtggctgccacaattaagatggcttgtgaatacatgcaacgtcaagacacattattgaatgaaagggttcagaaaacagagtttacacaatctgtatgttgttgcataaggtctaatttggttggtttgatgcagtaataggtgggaaaaagtaygtatccctctaaagcaagctgcagtctgtggtgggatggagcctggatgagatcataaaggcccattgcaaaaataaacaaacaaaatctccaactttgtactactaatacagtaggaactcagaaaagaaccagaagtagagggcagaagggaggagaaaagtcatgcagtgggttctgaagacggcgaattaggttgctactaggggttgtctgcatcaaagacaccaaagaaagtagtttcattagagtcctcagtaaccaaataaaagactgaga

SEQ ID NO: 342345 - DNA, 363 bp, Homo sapiens
agttcatgaaatcctttgagctcatctctagacctcaggttaaaaacccacgacctacaaatcttctaaaagcaagtgttggtgtgtattcacrtttagcatctatcagataaaaacatctaatgcagatgtttttatctgtattaaaatgaagataaatacttcatttatcctgaatggcacaaagggttttataatatctagttaatggacagaaacctcaagctggcttgatctaaggggagaagcacattagaaatgcatcagttgatgtgaatggccttgtggatctcaacagaaaaaaacagaatggtgaatgcaaaccgtttcggtttaataccatcatgtacgttttggtcccat

SEQ ID NO: 342346 - DNA, 439 bp, Homo sapiens
attttagaccaatagctgtgccttatttttatcataatgataatcttagttaacatttctcagaactcattataggacaaacagtattaatgttgtgaaattaatgtttaaaactggtaaatgtctgaaaatattgagtctattaatcatttccacaatctttgggtrtaggtattattaccatttttattgtagagacagggaaactgaggaccagacaaaagttacacagctaagaagtctcagaattgagatttgaacttgggcagtggatcttcaaatcttataatttttaaccactacactgttttaatgactacgtctagattcctatattatatctgagaaatgggaatattgagaatgagttttatttagagaaaacatagctactcttggattctgaaaaatgaagtaatgtacctgcttttagtttatg

SEQ ID NO: 342347 - DNA, 595 bp, Homo sapiens
ttctttctgccagatttttttttttgattagttggaatctaagcttatcatgctttattctctcttactggttctttttccagagccatcagttagaattctcttatctctatggtctcctgagttgctaatttctcatctctgaagtytctgtagatccaaagtgtttggccattaagtaatatatactagcttcaggaggttttctccttggttagactcatattctgcacgcaaattgatgctaagggcagctgcttgattcatctcatcaaacataaattcagcatccaaatgtccttttgccctagtttctctacataaataattcttcttatgtcttaattgaaaattaaagtgggttttcatgattggttctcatttttgaatgtcaaggttattaaacatgctattgagttcaaatctatttttcctcattagtgtaccaatgagaggccgatttagtgcttccttaaacaatctatttattgattttgaaataatattataatattctggaaattttaagccagattttgaaaatgtaattatataaatacatccaaaatgtgtgtgtgtgtgcgtgctgtgtgta

SEQ ID NO: 342348 - DNA, 564 bp, Homo sapiens
gtggtatctgaaccaagactacttcctccctccacctttctaccccctctattcagagagatggaaacttcactcttgactgctgcaaccaaaaayatagggctccctttcttcacagtcctcatccagagggttttcttcctgaaaggagcaagacttcagcatttctcatcctaccttcaggtgccttctgctgaggctaagtcccagatgattttgaacaattagggaatccctttttctaccctatctccactaatggaatggaggctctatcttggacacagcagcactgagaatatggaagccctgctagccgtttccctggctcctgaggcagtggttccatattaggagaggcaagctgaaaagaccttacttaggcttttgcacgcccccccggcatcccttccttactgccattattcacattactcagctcctaagtggaagtgtcactcagaaagaaacttgtcattgtccccactctcatctccagagctctgactcagatatttttgccaggaatgagaaacaagccttaaaatagggtagttcccaatc

SEQ ID NO: 342349 - DNA, 564 bp, Homo sapiens
gtggtatctgaaccaagactacttcctccctccacctttctaccccctctattcagagagatggaaacttcactcttgactgctgcaaccaaaaacatagggctccctttcttcacagtcctcatccagagggttttcttcctgaaaggagcaagacttcagcatttctcatcctaccttcaggtgccttctgctgaggctaagtcccagatgattttgaacaattagggaatccctttttctaccctatctccactaatggaatggaggctctatcttggacacagcagcactgagaatatggaagccctgctagccgtttccctggctcctgaggcagtggttccatattaggagaggcaagctgaraagaccttacttaggcttttgcacgcccccccggcatcccttccttactgccattattcacattactcagctcctaagtggaagtgtcactcagaaagaaacttgtcattgtccccactctcatctccagagctctgactcagatatttttgccaggaatgagaaacaagccttaaaatagggtagttcccaatc

SEQ ID NO: 342350 - DNA, 504 bp, Homo sapiens
ttccctggctcctgaggcagtggttccatattaggagaggcaagctgaaaagaccttacttaggcttttgcacgccccccyggcatcccttccttactgccattattcacattactcagctcctaagtggaagtgtcactcagaaagaaacttgtcattgtccccactctcatctccagagctctgactcagatatttttgccaggaatgagaaacaagccttaaaatagggtagttcccaatctcttcccagaggaactgactttgtttgaaacagattgtggaaaagtttaaaagtagggacactctcaggaatagtagagttagggtaataggcaagtaagaagacatatgtggatataattaatgtacagacaacaccgtagaccagctagtttgcaggagagaactgcagaagaagacagcttggagaaaccctcctggcaacagaaaacaaaaataaaaaacattgaacatagaaactacatgaagaagccacaattt

SEQ ID NO: 342351 - DNA, 564 bp, Homo sapiens
gtggtatctgaaccaagactacttcctccctccacctttctaccccctctattcagagagatggaaacttcactcttgactgctgcaaccaaaaacatagggctccctttcttcacagtcctcatccagagggttttcttcctgaaaggagcaagacttcagcatttctcatcctaccttcaggtgccttctgctgaggctaagtcccagatgattttgaacaattagggaatccctttttctaccctatctccactaatggaatggaggctctatcttggacacagcagcactgagaatatggaagccctgctagccgtttccctggctcctgaggcagtggttccatattaggagaggcaagctgaaaagaccttacttaggcttttgcacgcccccccggcatcccttycttactgccattattcacattactcagctcctaagtggaagtgtcactcagaaagaaacttgtcattgtccccactctcatctccagagctctgactcagatatttttgccaggaatgagaaacaagccttaaaatagggtagttcccaatc

SEQ ID NO: 342352 - DNA, 564 bp, Homo sapiens
gtggtatctgaaccaagactacttcctccctccacctttctaccccctctattcagagagatggaaacttcactcttgactgctgcaaccaaaaacatagggctccctttcttcacagtcctcatccagagggttttcttcctgaaaggagcaagacttcagcatttctcatcctaccttcaggtgccttctgctgaggctaagtcccagatgattttgaacaattagggaatccctttttctaccctatctccactaatggaatggaggctctatcttggacacagcagcactgagaatatggaagccctgctagccgtttccctggctcctgaggcagtggttccatattaggagaggcaagctgaaaagaccttacttaggcttttgcacgcccccccggcatcccttccttactgccatyattcacattactcagctcctaagtggaagtgtcactcagaaagaaacttgtcattgtccccactctcatctccagagctctgactcagatatttttgccaggaatgagaaacaagccttaaaatagggtagttcccaatc

SEQ ID NO: 342353 - DNA, 504 bp, Homo sapiens
ttccctggctcctgaggcagtggttccatattaggagaggcaagctgaaaagaccttacttaggcttttgcacgcccccccggcatcccttccttactgccattattcacattactcagctcctaagtggaagtgtcactcagaaagaaacttgtcattgtccccactctcatctccagagcyctgactcagatatttttgccaggaatgagaaacaagccttaaaatagggtagttcccaatctcttcccagaggaactgactttgtttgaaacagattgtggaaaagtttaaaagtagggacactctcaggaatagtagagttagggtaataggcaagtaagaagacatatgtggatataattaatgtacagacaacaccgtagaccagctagtttgcaggagagaactgcagaagaagacagcttggagaaaccctcctggcaacagaaaacaaaaataaaaaacattgaacatagaaactacatgaagaagccacaattt

SEQ ID NO: 342354 - DNA, 555 bp, Homo sapiens
ttaatggagtttaataactgtgtgtgtatagggaacatgggaagagagccttataagtcccagtgtggccatggcataccctaaactgctccccgctagattttactaaactaaagtaatccagccagtcactaaagaaataaacaagcggccgggtacagtggctcactcctgtaatcccagcactttaggaggctgaggcgggcggatcatgaggtcargagatcgagaccatcctggctaacacggtgaaaccccatctctactaaaaatacaaaaaattagccaggcatggtggcgggcacctgtagtcccagctactggggaggctgaggcaggagaatggcgtgaacccgggaggcagagcttgcagtgagccgagatggagccactgcactccagcctgggtgacagagcaagactctgtctcaaaaaaaaaaaaaaaaaagaaagaaagaaacaagcaaataacaataacaagctctggtttgggaagaagcaatatccagagttggttgctatattatctggaatgttcagttttccacaaaaact

SEQ ID NO: 342355 - DNA, 555 bp, Homo sapiens
ttaatggagtttaataactgtgtgtgtatagggaacatgggaagagagccttataagtcccagtgtggccatggcataccctaaactgctccccgctagattttactaaactaaagtaatccagccagtcactaaagaaataaacaagcggccgggtacagtggctcactcctgtaatcccagcactttaggaggctgaggcgggcggatcatgaggtcaagagatcgagaccatcctggctaacacggtgaaaccccatctctactaaaaatacaaaaaattagccaggcatggtggcgggcacctgtagtcccagctactggggaggctgaggcaggagaatggcgtgaacccgsgaggcagagcttgcagtgagccgagatggagccactgcactccagcctgggtgacagagcaagactctgtctcaaaaaaaaaaaaaaaaaagaaagaaagaaacaagcaaataacaataacaagctctggtttgggaagaagcaatatccagagttggttgctatattatctggaatgttcagttttccacaaaaact

SEQ ID NO: 342356 - DNA, 555 bp, Homo sapiens
ttaatggagtttaataactgtgtgtgtatagggaacatgggaagagagccttataagtcccagtgtggccatggcataccctaaactgctccccgctagattttactaaactaaagtaatccagccagtcactaaagaaataaacaagcggccgggtacagtggctcactcctgtaatcccagcactttaggaggctgaggcgggcggatcatgaggtcaagagatcgagaccatcctggctaacacggtgaaaccccatctctactaaaaatacaaaaaattagccaggcatggtggcgggcacctgtagtcccagctactggggaggctgaggcaggagaatggcgtgaacccgggaggcagagcttgcagtgagccgagatggagccactgcactccagcctgggtgacagagcaagactctgtctcaaaaaaaaaaaaaaaaaagaaagaaagaaacaagcaaataacaataacaarctctggtttgggaagaagcaatatccagagttggttgctatattatctggaatgttcagttttccacaaaaact

SEQ ID NO: 342357 - DNA, 600 bp, Homo sapiens
atgtcaggcaactatcaggtgaggatcaggcagttgttaactgtctctctaaaataataattggtcacagccagtaccagggaaaggcagtctcttaatagatagaaaacatccgaaactggtgatcagcagcttcccaataaaatctcaggagttgggtgagcagcttcccattaagatctcaggagttgatctcaagcatgcacatgcggacagcccaccccaagggaagaatgaggggaraagtaacacaagaccccagaagtatgccgagacataaaaccccaagtcaaaaggtcaaaccacacacttgatctctcaagtcaccctcttggccctattcccagtgtactttccttcttttcatttctgctctaaagctttttaataaactttcgctcctgctctaaaacttgccttggtctctccttctgccttatgcccctcagtcaagttctttcttctaaggaggtaagagttgaggttgctgcagaccgatatggattccctgccataacgtattgaatacttcaacctagaagaataaaacatacagtcaaccctccatatctgtgggttctgcattagcagattcaacta

SEQ ID NO: 342358 - DNA, 600 bp, Homo sapiens
atgtcaggcaactatcaggtgaggatcaggcagttgttaactgtctctctaaaataataattggtcacagccagtaccagggaaaggcagtctcttaatagatagaaaacatccgaaactggtgatcagcagcttcccaataaaatctcaggagttgggtgagcagcttcccattaagatctcaggagttgatctcaagcatgcacatgcggacagcccaccccaagggaagaatgaggggaaaagtaacacaagaccccagaagtatgccgagacataaaaccccaagtcaaaaggtcaaaccacacacttgatctctcaagtcaccctcttggccctattcccagtgtactttccttcttttcatttctgctctaaagctttttaataaactttcgctcctgctctaaaacttgccttggtctctccttctgccttatgcccctcagtcaagttctttcttctaaggaggtaagagttgaggttgctgcagaccgatatggattccctgccataacgtattgaatacttcaacctagaagaataaaayatacagtcaaccctccatatctgtgggttctgcattagcagattcaacta

SEQ ID NO: 342359 - DNA, 581 bp, Homo sapiens
tatatgtcaatgaagctgccaaaattgcctaatgcagtaaatacttacagacattatctttataagcaaaggcccttcagggtcttcaataatttttaagaaygcaaaggggttctgcaggcaaaatgtttgagaactgctgacctagtgaaccctgtaagacttggcctgagttctgtataacacttgatcatctcaagtatttaaactggcattgttagaaacatgaagcaatggcaattaatacaaataatttccaaaagtagaggttaagtctattacttctgcgtatttcagggaatactgacaatactgttcaatggagttgaaagtcataggttctggaatggatctgccattaacacgctttctgattaaacaatgacttttcttctctgaatttcatcttcctcttaaacaataagaaaactgcactcaaagccctctaatatctttttcagttgtcaagtactaaagaaattattgttttaaattgacatggacttggaaaattaatatctccacattttcccttaatctgcacgtaacacgcaaagatctaataatattaacttttttgt

SEQ ID NO: 342360 - DNA, 581 bp, Homo sapiens
tatatgtcaatgaagctgccaaaattgcctaatgcagtaaatacttacagacattatctttataagcaaaggcccttcagggtcttcaataatttttaagaatgcaaaggggttctgcaggcaaaatgtttgagaactgctgacctagtgaaccctgtaagacttggcctgagttctgtataacacttgatcatctcaagtatttaaactggcattgttagaaacatgaagcaatggcaattaatacaaataatttccaaaagtagaggttaagtctattacttctgcgtatttcagggaatactgacaatactgttcaatggagttgaaagtcataggttctggaatggatctgccattaacacrctttctgattaaacaatgacttttcttctctgaatttcatcttcctcttaaacaataagaaaactgcactcaaagccctctaatatctttttcagttgtcaagtactaaagaaattattgttttaaattgacatggacttggaaaattaatatctccacattttcccttaatctgcacgtaacacgcaaagatctaataatattaacttttttgt

SEQ ID NO: 342361 - DNA, 581 bp, Homo sapiens
tatatgtcaatgaagctgccaaaattgcctaatgcagtaaatacttacagacattatctttataagcaaaggcccttcagggtcttcaataatttttaagaatgcaaaggggttctgcaggcaaaatgtttgagaactgctgacctagtgaaccctgtaagacttggcctgagttctgtataacacttgatcatctcaagtatttaaactggcattgttagaaacatgaagcaatggcaattaatacaaataatttccaaaagtagaggttaagtctattacttctgcgtatttcagggaatactgacaatactgttcaatggagttgaaagtcataggttctggaatggatctgccattaacacgctttctgattaaacaatgacttttcttctctgaatttcatyttcctcttaaacaataagaaaactgcactcaaagccctctaatatctttttcagttgtcaagtactaaagaaattattgttttaaattgacatggacttggaaaattaatatctccacattttcccttaatctgcacgtaacacgcaaagatctaataatattaacttttttgt

SEQ ID NO: 342362 - DNA, 581 bp, Homo sapiens
tatatgtcaatgaagctgccaaaattgcctaatgcagtaaatacttacagacattatctttataagcaaaggcccttcagggtcttcaataatttttaagaatgcaaaggggttctgcaggcaaaatgtttgagaactgctgacctagtgaaccctgtaagacttggcctgagttctgtataacacttgatcatctcaagtatttaaactggcattgttagaaacatgaagcaatggcaattaatacaaataatttccaaaagtagaggttaagtctattacttctgcgtatttcagggaatactgacaatactgttcaatggagttgaaagtcataggttctggaatggatctgccattaacacgctttctgattaaacaatgacttttcttctctgaatttcatcttcctcttaaacaataagaaaactgcactcaaagccctctaatatctttttcagttgtcaagtactaaagaaattattgttttaaattgacatggacttsgaaaattaatatctccacattttcccttaatctgcacgtaacacgcaaagatctaataatattaacttttttgt

SEQ ID NO: 342363 - DNA, 596 bp, Homo sapiens
gactagacttgattttcctgaaattaagttttattctttctctaccacctacaatacagttatctttggtgctaaaaattaaatttttatacattatgtatatttgaaatcatagctactagagactctgccatcaaggacttacatgttaagttattgcacrtgagataaagatgattaactgaaggttttgggttaaatctataatttagcaaactgatttgatttttatttattcttatgttataggttgaattgtgtctcccaaaagatgttgaagtcctaactcccaggacgtgggaatgtgaccttatttggaaatgaagtctttgcaaatgatcaaattaggttggggccattagggtcggccctaattcaatatgactgctcttatacaaaggggaaatttggacacagagacagggttacagagaggcggccatgtaaacacacagtgagtacacaatctacaaatgaaagaatgcccaggcccccaggagagagcagcatggaacagattcacccttaaagctctcagaaggaaccaaccttgctgacaccttgtgttaagacctctagcctctagaactgtgaga

SEQ ID NO: 342364 - DNA, 596 bp, Homo sapiens
gactagacttgattttcctgaaattaagttttattctttctctaccacctacaatacagttatctttggtgctaaaaattaaatttttatacattatgtatatttgaaatcatagctactagagactctgccatcaaggacttacatgttaagttattgcacgtgagataaagatgattaactgaaggttttgggttaaatctataatttagcaaactgatttgatttttatttattcttatgttataggttgaattgtgtctcccaaaagatgttgaagtcctaactcccaggacgtgggaatgtgaccttatttggaaatgaagtctttgcaaatgatcaaattaggttggggccattagggtcggccctaattcaatatgactgctcttatacaaaggggaaatttggacacagagacagggttacagagaggcggccatgtaaacacacagtgagtacacaatctacaaatgaaagaatgcccaggcccccaggagagagcagcatggaacagattcacccttaragctctcagaaggaaccaaccttgctgacaccttgtgttaagacctctagcctctagaactgtgaga

SEQ ID NO: 342365 - DNA, 576 bp, Homo sapiens
cctctacttggtcttcccttctcaacctcactctcagtctctgggggaagactttagagatcctgcccttttcccaatatatctcagattatcatgttattcatgctcatagtgctctgtgtatttccttcatagtatttatcaggtatttatagttctgtccgaaagttttcgaggacattttattgtaggtacaatacaccaagagtaacatgttaaataagaaacatgctaaggtgggtacagtggctcamaggtgtaatcacagcattttgggaggctgaggtgggtagatcacttgagaccaggagttccagaccagcctgaccaacatggtgaaattctgtctctactaaaaatataaaacttagcctggctactcaggaggttggggcaggagaatcgcttgaacccagaaggcagaagttgcagtgagctgagattgtgccactgcactccagcgtgggtgacagagtgagactgtgtctcaaaacaaacaaacaaacaaacaaacaaacaaacaaacatgctagtagttaatcactgttaatgtatattagcccacattcactctgt

SEQ ID NO: 342366 - DNA, 540 bp, Homo sapiens
gccattgctttcgactgagtttctgcactaggcgccaagagatcagaccaaacaaaaagggaatcacgtatgctaaatgacatacaatcaaactgaaaatttaaggaaactgacacatccccaaacaaaccactttttcctgaaaacagattccagtctacttgagtcagcatattaaggaagtccctctgctttaamccttatcaaaaaagtaacctaaagtaacctgatgttaaccaaacagctattcccctattcttctgtttccttgtttccacccatcaaatttccatgttctgttattgtccagtgggaactctcattctcttttgtagaatggaggctactccaaaattcatatatcatgaataaaagtcaattaaatatataactaaatttgctgtaattttggcttttcacaatagggaaggaaaaaatgaactatgtttaacagattatttgatacctactgttacatgaggcccagtaacaaacactaaatgaggatgcatagaatagatgaagaaaattttccttcgt

SEQ ID NO: 342367 - DNA, 445 bp, Homo sapiens
gacttgtgggaaaaaaacaacctgagatagtccaagagaaatatagtatgttccctgagggtaacggatgtggagttcacgcctcccctgcacatgtggagtgacacatcttattaatgtttacaccattgtaagtagtgttcttggtcatagctaacaatcstgacagaattgattgagtacaaagaaatttttgtagctggctttcatttgttatcatgcagagaagaaacaactgaggactgaaaagcagtgggaaacagtaccctcacattttgatgtgttctagtatcacctttattgcgggcagaagagagggaattgagaaaaatgaggaactgtaggcgggcaagtggaaaattgcagagttccagtacaaagtggagattggaaagaattctagcaaaagagaaaatgcaacatttccccacccccaagttactaa

SEQ ID NO: 342368 - DNA, 621 bp, Homo sapiens
ttgttatctatccaagagtttgtatttttcatgcaaaatagcaatttagttattatgcttaagtggccctatatataaaataaacatactctcaagagcaaaatatttgacaggaattctggtcacaagatagaatgttcactatgggtcagagaatttacatacagaataattttccaggtttacaataacccatagaggttaataattttatcctatttagaaataaagctcaataaagaaaggtaaccaatttaaaacaagcaaaaactaaaaagcagtaaaataaccatttaaaaatatatagagctaaaaacagctttcattgaattttctataagccatcatgaggttcaagggagtaacactgttccttgcccaggttctaaaacctttgagaaataagaaaaaagagtcaaaatgatctatatggattaaactattgttagagaagctggtctgtatctgcaggcaaatgacgtcctgctcaatgataaaaaatacgtgatacttacaagcagcatacccacatgaaaaaagaaaggaaagaagggaccaggatatgcatrcctactttcttatttcaaggtcaccattcagatagatattgttcctccatct

SEQ ID NO: 342369 - DNA, 607 bp, Homo sapiens
tccaagaactctctcttggatctggaacaggacccctttccagtaacatcttgaatccccattggaactagctttatcattctactgattcctcttttaatgagttttaaaatctttaacaagtactcacattatatctatataagaactatgtgtttcaattttttgaaaattatacattgtcattaactttctgagtatcagtttcctcatttataaagtaggaatggtaataacttccttagattctctgagattattaaatgagaaaagtcactgatccagttgtaggtgttacacaacacaatgttcccagaccaaactaagggtcaggctgcttattctcatggcccaatagcaagatgcaagatgaatggggaggaagagagtttttatttctgtagccggttacagggagaaggcctggaaaatattgccagactaaaaattataaagtcttccagagcttatataccttctgatatggtttggctgtgtccccacycaaatctcaacttgcgttgtaattcccacaatttccatgtgttgtgggagaaacctggtgggaggtgattgaattatgggggcgggtcattcctgtgctgtt

SEQ ID NO: 342370 - DNA, 619 bp, Homo sapiens
gatagggataaccatgcagtaaagacttccaagataaaacatctgaccaatctgagccaaatagcagagtctggggacaccctgctgaacagtccttatctaagcttgctatattcagttgaattattgtactttgtgttgcacagacaaaaatcctctactttccaatcacagatgagctcatttgcatatatacataacaccaaaaaatatatatatatataatataaactgtgaacagtactgtgtcaaagaagttcagatggcttttagagcatggaacacagttgtctgacctttttagcagcttaggctagtttccccagtgaaaagcaatgtcagctgtaattgatacaatgaacaggagttcattaggtgaagctggttctgccataccaatgacttccaaacctaagtaagaaatgttgtctttgctcctggatttcagatctacttggtgaattccctgccagactttcctttcagtacattaaactcctaagtccaaartgacccttcagaaatgaaatgtaactcccaccttgctctccctttatcgtcatacctcctttcatcacttacagagacaggtcccaaactttgccccacattgcagtca

SEQ ID NO: 342371 - DNA, 661 bp, Homo sapiens
atgcaacctaaggtaggcagagaagagaggaaagcaaaagcttaagctccaaatctgaaaggttagcccctcatccatagtcattttttattatcaatgagttgaaaatgttctctctccagagagagaataatgttcctagtgggggagtttccttatttccttccagtgatttcatgtttacaacagcattcactgttagctacacatatgtagctaaacacatatgtgtccaactgcttgctcctggctacagaactattctgaactatacacacattccctcaaaaatatttgtatttatgcttggggcatgtgattgacatctgcagaaacctaaacgttaagattttaaactcagtaaaactgtttctacatttataaatattagtataaacacgaatcactctgataattaatttaaaaaataatggaaataatttggatagatgtatttctgtgtttaaggacctgttcagtggggcaatgtctacatgaataaaatgaattaacaagtatcctcttctatacaaacatgccaaaaagctgataaaacttccatttagttccagaattacagaaagaaagagaaagagaaagggtaaaattctgttacygaaacaccaggggtttggtataggtcctggggctcaccgcacag

SEQ ID NO: 342372 - DNA, 556 bp, Homo sapiens
ttatgttggggtatgaaagaataaggttaatatctcttgcagaaaaaaaataaaataaatatctctctctctacaaaaatacatcctattggttctgcttctctggagarctcaaatacagtctccgttttgtacatgttttactaagacgctaaagctaaaaatgtcagcaaggacatccgaccagtgagtggcacacccaagatgtgcacagatctcttagactccacaggctggagtctctatgcttcttcccagcacagatctaattgcaagtgactacaaagtccttgtaactcttcttcttccacttaaagctaaggagactgaggagagttggggttacccagacaagaatgactttaggaacagtaatgactttaggtttttatgattgttaagttttgagataatctttggatgttcactttactaacatctccaggattttatataggaccagtcagctattcaaaggggaagtcacacagatcaccatcccacaagaataactcttgacctttcaaaaaagctttactcctccaaaagttctaag

SEQ ID NO: 342373 - DNA, 589 bp, Homo sapiens
tcaatcaagacatttcaaccaatttgaagtcttgaacgatgttttccatcaaataaactaaagtccaccatgaaagaataaaggcaggcaaatcatgtaggccatggggagctgcatatctcaggatgtgagtctcagagaaagtgaaaagggacctgagacatgaaggaaaagaagtgaatcagggatggggcacaagggagaaagcccctgacacagagaatgtgcagtgtatgggggtgaggacagacctggagataaaagagagcatcacatatttaaagaaccaaaggcaggtttatggcggatagtgtattttgtggtggcaatgggagggggtgctgccaaagaggcaactggttacttaactaggggctggatcaasacggaccttgtaagacctattgtgggtggatttgacctaaggcagttgaagagcctttgcaaatgatctgagtcttctgatacataaacttaatattaagatggcaacacttccaaaacttgtgttgatcaacttgtgtagatcaacttgtgttgatctacagattcaacacgatctctgtcagactcctaagctggctgagga

SEQ ID NO: 342374 - DNA, 501 bp, Homo sapiens
  misc_feature (1)...(501): n = A,T,C or G
tccctatattggtggtcaatatgtcccattctgcatccctatggccagcctgacccctcattcaacaagttcacactactcaactccacttttcaaccaggcaaaacaaatgttcttccctcatccccaagttctcagagcaaaggaaatgctgaaagattgcaaactcttttttgtagttattttggaagggagcactttcctaccatctcttaactcctctgatttttacttaagaaaaatcataatgctcttttgtcctgtcagctcctaagcatctacygcctccttgtaagaggtcttttctgaataacaatgcagggaacattatttgccatttgcaccaagatcctgctctttgtggttacacattctgaagtgccatcatctctaaggcaattagagccgttaagacttccagctgcagaggaaaagaaatcaaagcattctccagagcaccttcgaacggcgtctcccaaagcccgcgcagagcaggngcag

SEQ ID NO: 342375 - DNA, 499 bp, Homo sapiens
tcactgcaacctccgcctcctgggttcaagcgattctcctgcctcactctcctgagtagctggaattacagaagcatgccaccacgcccagctaatttttgtatttttagtagagacgaggtttcaccatattgtccaggctggtctcgaactcttgaccttaggtgatctgcctgcctcagcctaccaaagtgctgtgattacargcatgagccaccatgcccggccatatccaactgtttttctgcacaaagaatgagtttcaactattttggtttacttctgctttgtttcctgttcgtttaaagtacctattgttttatgcctccttgtttttatatttcttttcctttccccctatgaaaaactctacctacccaatttacagttttctcattgaaattccaggctatcataaggcctcctctgccaccacagtatggaggaagaatttccttcactgctattctcatccctttactgtctgaactaatgtggt

SEQ ID NO: 342376 - DNA, 499 bp, Homo sapiens
tcactgcaacctccgcctcctgggttcaagcgattctcctgcctcactctcctgagtagctggaattacagaagcatgccaccacgcccagctaatttttgtatttttagtagagacgaggtttcaccatattgtccaggctggtctcgaactcttgaccttaggtgatctgcctgcctcagcctaccaaagtgctgtgattacaagcrtgagccaccatgcccggccatatccaactgtttttctgcacaaagaatgagtttcaactattttggtttacttctgctttgtttcctgttcgtttaaagtacctattgttttatgcctccttgtttttatatttcttttcctttccccctatgaaaaactctacctacccaatttacagttttctcattgaaattccaggctatcataaggcctcctctgccaccacagtatggaggaagaatttccttcactgctattctcatccctttactgtctgaactaatgtggt

SEQ ID NO: 342377 - DNA, 595 bp, Homo sapiens
aaatcaatgaggaagtatgtcgattcagagaaaacagacaaaaaaatactagtgaagatgatgacgtccatgaggctattaacagggccagaggtctcagatctcaatcagaggaacctgcttctgcctttagtgctgatgaccttatgagtatagatttagcagaacagatggctaatgactctgatgttaacatctcagcagcaaccaacaaagaggctgaggaagaggtggaagaggaggaagaggacagaattcagcatcagaggagggtctcaaagaggaagagcaggccctggtctggagacttctactcatagcaggaactcaaagaccatggtgccagcatctagaaatatgtctattacagaagcctttaaatctacaagacagcagccttcccaaaatgtcactaaaaattattcagaggtgattgaggtagatgaatcagatatggaagaagacatttttcctrccacttcacagacacatcaaaagtggtccagcacatcatccagcaaaaacatgtcccagagccaagtattgaaaggggttgattttgaatcagatgaggatgacgatgatgatccttttt

SEQ ID NO: 342378 - DNA, 566 bp, Homo sapiens
caatatctaaatccgtttctcccttgtcagagttttgatgctgtgattactttggtccatttcttgtttatgtaatgttgccttagtttcaatcctagggactgatcaatcattcataattcaatcactcaaataaattcagtctcaaaaattcaatcactcccaataaaaataacacactgaggctatgtgtgactcagtacaaacttaaatatttcttcagccctacagtgaaaaaacaaataacgacccacattttggatgcattattcccaccgtttatacactgatactgccttgctacctggtagaaaaaagaaattacttcatttgtcacccattcctgacatagaagaatatcattttgtgtagggtttaaacttgactaaatakttcaaagaaacctcccactaatattttccaacatgatgatcacattgccttaaggggaaccttattaataaaaaccacaaatattgggaatgagaaagtaaacagcaaaactaaaacaatgcatgcgttcagggaagcggttgtctaatgaaaagggtgcctgagagaactgt

SEQ ID NO: 342379 - DNA, 580 bp, Homo sapiens
ccactctgcttgtgtatgtatgaatgtgtatatatgtgaccctttctttagagatgaggctgaaaggcatttcctgccctgggagatcccctctggccccctcctgaatattttgcaatagtccatcactgacacttggggaagatgctgtaatctcataggaccctaacgggcatctggttaaacaaaytgctttcccctattttgcagatgaggatactgaagactagataagctcaaagtcatatgctaggttgctgggaagagccatgactagaacttaggtgtctggcctgctaagtgactctttccctcacacttgattacccccatctcttcctcctctctgggatcttagtccctccctcgctccctattctgtattgcttctgtgtaccttcacatgttgattgaaccctttgcctattgtgtttgacccaaaagcccttttcttaactggttacgttccctcccttcacaccatgtggacataaagtgagaatgactttttggcatcctaggagagactttctctttggacctgctaggttaattttcagtgtgaattcccttctttttc

SEQ ID NO: 342380 - DNA, 584 bp, Homo sapiens
tcatgtattttattttagcatcgatgttcataagtgacattggtttaaaactttcctttcttgcactttgtgcaagaaggaaaatgcatttggaaatttccttctttttctatattctgtgacggtttggatgagataggtatgatttgttccttgactatttggtaagtctcgtctgtgaaactatcatattttgaaaattcaatttaatttctttaatgattgttggtttctttggggtttctatttcttcagtcaattttgatcattcacttttttctgcctaaaaaattagatactacatttaaacctttaaaatgttggtatatggttcatggtattctctttaaacattctttacggtgtctgtagttataccctatttttcattatttrtatcatatatttgtgaattctctattttttcttttttgtcttaacaaagatttgtctgtatatttagacaaacttacataggtttgtctgtagtctttacaaataggcagcttttgttgatcatatatctgtttcttttaaaatgtatatatttgtttaatttctatatttatttttattaatccctc

SEQ ID NO: 342381 - DNA, 584 bp, Homo sapiens
tcatgtattttattttagcatcgatgttcataagtgacattggtttaaaactttcctttcttgcactttgtgcaagaaggaaaatgcatttggaaatttccttctttttctatattctgtgacggtttggatgagataggtatgatttgttccttgactatttggtaagtctcgtctgtgaaactatcatattttgaaaattcaatttaatttctttaatgattgttggtttctttggggtttctatttcttcagtcaattttgatcattcacttttttctgcctaaaaaattagatactacatttaaacctttaaaatgttggtatatggttcatggtattctctttaaacattctttacggtgtctgtagttataccctatttttcattatttgtatcatrtatttgtgaattctctattttttcttttttgtcttaacaaagatttgtctgtatatttagacaaacttacataggtttgtctgtagtctttacaaataggcagcttttgttgatcatatatctgtttcttttaaaatgtatatatttgtttaatttctatatttatttttattaatccctc

SEQ ID NO: 342382 - DNA, 556 bp, Homo sapiens
cacttcagccatgactaaaaggggccaaggtacagctcaggccatgacttcagagggggaaagccccaacccttggcagcttccatgtggtgttgagcctgtgggtacacagtagtcaagaattgaggtttgggaacctccrtctaggtttcagaggatgaatggaaatgtccagatatccaggcagaagtttgctgcaggggcagggctctcatggagaatttctgccagggcagtgcggaagggaaatatgtggtctgagccctcacatggagtccctactggggcatacctagtggagctgtgagaagagggccactgttctccagaccccagaatggtagatccaccaacaacttgcactgtgtgcctggaaaaaccacagacactcaacatcagcccatgaaagcagccaggagggagcctgtactctgcaaagccacaggggtagagttgctaaagaccatgggatcccacctctttcatcagtgtgacccagatgtgagacagagtgaaaggagatcattttggagctttaggatttgaccgccctgct

SEQ ID NO: 342383 - DNA, 632 bp, Homo sapiens
aactaggtgcgaggagaggtgagaaattttcagagaaagatagcaacacgtgcacaggtcctgagaaagaaggagtcatggtatcacatcacaaaactgtccctatgttttgatgtgattgacaagcatctgcacactttcttcagactaaatcaggtcacttaactatttatgtaaataaagttttattgaaacacagccacaccctttcatttgcatgttttccatggctgcttcatccactaatgaggccacactgggtagttgtaagagagactgtgtagctaacaaagactaaaatatttgccatctggtccattgccaatctctattataagactcttaatcaggtatgcaaaacattggccagttgaggaaaatttcatcaaggatcttgtgactaaatggataacttcwttccaaaagtattataatttttagaaataaaatcgtaaggaggttcccaaaatataaattagattaaaatctatcctacctaaagtaaagacaggggttccagccctctctacgtgaatattgaaccaatcaaacaaggcaaaacacatatttcagaaaacactgctgtagactataaaattaagaaagtatcctacatttccaaagcaaccata

SEQ ID NO: 342384 - DNA, 555 bp, Homo sapiens
ctactgttcagtgtggcaatcagcaagtcatcttcgcacattgtaaatatattactgtagaatcccacacattccaaaaattcaaagatacaagttaatgaaaacccagggactttgaggatattaagtgtacacagatactataatttcagtgggtaaattttataaatacagccatctaacttttttccatgaaatacttatkaaatccactgttctattttttctgtttgataataattatttgagaaagatgaaaggtaaatgctgaaagaatgttttagagtttccatttaccatacctcatatgatgatgaattaataataacaacagaaaatattttatttgtatatgcatgtgtgtttattcattgcttattccagcgacacatgtatcctacacagaagacaaattgacaaaagaggaacagttgctattatcatacctaccccaagtgggtcactcatctatgttcctcttctattttccagaatttcatatagggctcattttgttagaagaaggccacacttctagtttgctaaagcctacat

SEQ ID NO: 342385 - DNA, 555 bp, Homo sapiens
ctactgttcagtgtggcaatcagcaagtcatcttcgcacattgtaaatatattactgtagaatcccacacattccaaaaattcaaagatacaagttaatgaaaacccagggactttgaggatattaagtgtacacagatactataatttcagtgggtaaattttataaatacagccatctaacttttttccatgaaatacttatgaaatccactgttctattttttctgtttgataataattatttgagaaagatgaaaggtaaatgctgaaagaatgttttagagtttccatttaccatacctcatatgatgatgaattaataataacaacagaaaatattttatttktatatgcatgtgtgtttattcattgcttattccagcgacacatgtatcctacacagaagacaaattgacaaaagaggaacagttgctattatcatacctaccccaagtgggtcactcatctatgttcctcttctattttccagaatttcatatagggctcattttgttagaagaaggccacacttctagtttgctaaagcctacat

SEQ ID NO: 342386 - DNA, 555 bp, Homo sapiens
ctactgttcagtgtggcaatcagcaagtcatcttcgcacattgtaaatatattactgtagaatcccacacattccaaaaattcaaagatacaagttaatgaaaacccagggactttgaggatattaagtgtacacagatactataatttcagtgggtaaattttataaatacagccatctaacttttttccatgaaatacttatgaaatccactgttctattttttctgtttgataataattatttgagaaagatgaaaggtaaatgctgaaagaatgttttagagtttccatttaccatacctcatatgatgatgaattaataataacaacagaaaatattttatttgtatatgcatgtgtgtttattcattgcttattccagckacacatgtatcctacacagaagacaaattgacaaaagaggaacagttgctattatcatacctaccccaagtgggtcactcatctatgttcctcttctattttccagaatttcatatagggctcattttgttagaagaaggccacacttctagtttgctaaagcctacat

SEQ ID NO: 342387 - DNA, 619 bp, Homo sapiens
ctccatctgtataatgataaggtaggctgaattgctcttcatgataccttrattagaaatagaaaattataaattctgcatgcgcttgaatctatatgtattcatgaggacacaggctttgtctcttttgttcatacatgtttacccagtcaccagtgcttgacacacagcagctattcaatgcaatatttgttaaataaatgaatgtttgcaaatatttagcttcttaagaacaggactctatggcttatccatgcaaaaagctgcacaactgaagttgtaagcaagcatgtctcaggagaatctagcaacggcaaaggtcaacgcttagtcatgcataaaactggaagggtagcgtggtttcactcctgcggtgttcactagcaaggatgatctaaagccccttaacccagcaggaatccaagtggaaagtattgaggtctctggggaaaaaaaaaatccacacctattatgctttctattcattttctacttgataacatcttctatttgtaccttgtgaaaatgtcaaacccactttaatgtactcatggtcgctattggatttaactccaacttcaggtttttcttgcaacttggctgtgaaggtggtcttcct

SEQ ID NO: 342388 - DNA, 619 bp, Homo sapiens
ctccatctgtataatgataaggtaggctgaattgctcttcatgataccttgattagaaatagaaaattataaattctgcatgcgcttgaatctatatgtattcatgaggacacaggctttgtctcttttgttcatacatgtttacccagtcaccagtgcttgacacacagcagctattcaatgcaatatttgttaaataaatgaatgtttgcaaatatttagcttcttaagaacaggactctatggcttatccatgcaaaaagctgcacaactgaagttgtaagcaagcatgtctcaggagaatctagcaacggcaaaggtcaacgcttagtcatgcataaarctggaagggtagcgtggtttcactcctgcggtgttcactagcaaggatgatctaaagccccttaacccagcaggaatccaagtggaaagtattgaggtctctggggaaaaaaaaaatccacacctattatgctttctattcattttctacttgataacatcttctatttgtaccttgtgaaaatgtcaaacccactttaatgtactcatggtcgctattggatttaactccaacttcaggtttttcttgcaacttggctgtgaaggtggtcttcct

SEQ ID NO: 342389 - DNA, 612 bp, Homo sapiens
atcccttcttctctcatggggattcctaatccatcccaggggaagaatcagagttagggtgtgcaggacactccagccacatgccaaattattactagtccaagcatttgggctgaatctgcccttcctgtccgctggattgagctggcctgaaaaaycaagcagggtgattagtcataattgacttctcacctgtaaacctagaggccagagttaactcagtgagcctggcgtgttctcacccctaccatcaccctgacccacttttctccctctcagcaccactcggcaatccagggcctgaagttcctcctaaacagaaggcttcccaagcctaacagccctttcctaagttttactattccaaagctgctttgtctgtcatataatcttgaagcagggcctacctctcccctatgacactttttagtcttttaattttctcttatttctgtgccctccaacagacagaaagtccaggaggaagaatctgtatctgtctgttttacctcttcagggatctttaacatctgacctggagtctggtacttaacgaatgctcaataaatacttcttgaataaatacataggacagaaaaaaagtgaagaata

SEQ ID NO: 342390 - DNA, 546 bp, Homo sapiens
catggtatttacatacaaccttcacatatacttctttatactttacattatctttagattacttataatgcctaatacaatgtaaatgctatatagttatgctgtatttttatctgtcttattttttactgttgtattgttagtttttcttgtttttttccaaaatacttttgatctgcaattggttgaatctgtgcatgtggaggccacagatacagaacctgtggattcagagggctgacagtattcacacttgatgtgagatttatttcaaattcagttacgttattttcagctatgtatacattgtgatagatactaggaagacaaaataataaagacaagcatgagcattcacagcagctaattgtccaatggagaaactaataaatcattcatatacatattkttcaagtagtatttattcagtggccatttacttggccttgtagctgtaatggtaagtaagttaggtatggctcctgccttcagggagcattgtttagttgggaggatagacagctgacccaggtgattgccactaaa

SEQ ID NO: 342391 - DNA, 592 bp, Homo sapiens
tttctgttccaggattccatccaggataccacatagcatttagtcatcatgcctccttaggctcctcttggctgtcatggtttcttgtactttcttgcttttgatgatattgacaattttgaggagtactggtcaagtattttgaagaatgtccctcaaytgggatttgtctgatatttttctcatgattacactgaggttacaggttttgagaaggaaacccagagaggtgaagtgttgtgttcattacctcacatagagatcatgtggaagagaactcagggaggagaaacttcccaaaatagggggcattttagggcttatctgctccaattctctttgctcagtagccgtgtactccagttacgctatgcaacatgaaaatttacataaacatgaattactataaaaaacaggagggagactattgaggtgtaagcaagcagatgtaaaaaatccttaaggatgaatacttgtagcactatttttgtaaccctatcagagccagaatctaggtgatccaacttacagcaatattaaggtttacaaaaaatttccaacaaccaaagcataatttcaaaataactctaaa

SEQ ID NO: 342392 - DNA, 496 bp, Homo sapiens
tgtatattatgcattcaaaataagttttatattcttaaatttttgtagcctgtggtttgctgcctggctcagtttcttctactttgtgaagattgccaatttctcctacccccttttcctcaaactgaggtggagaattactggattgataccctggcttctgtggctgtccgtgtttatttccttcagtcacagcatgttctgcatcaacatctgcactgtgtattgtaacaattctttccctatccactcctccaactccactaagaaaacatacttgtctgagatcaatgtggtcggtctggcttttttctttaacctggggattgtgactcctctgatcatgttcatcctgacagccaccctgctgatcctctctctcaagagacacaccctacacatgggaagcaatgccacagggtccaacgaccccagcatggaggctcacatrggggccatcaaagctatcagctactttctcatcctctacattttc

SEQ ID NO: 342393 - DNA, 649 bp, Homo sapiens
tagtgaacaagcctgggtactaaagttaaatattacagaggcagataaaataagtctgagaaaaattcatgcatttaattctatctattttgcccacatagttatgctgatatttcattcacttggattcaccaacttaaaatttgtaactataatggagaatcttttttctgtatttgaaaaaagtgcactgagcaaattaatagtataaatatgatttcaaggataactaagagaatatttatttctatgtatggttaatcaacatgcccccttccatactccatgtgccctttgactaattatctccaaytcatctttcaggtcacaattcaagtataaataataaattagaagtacatattactataaaaaattgacatgtgaattatgaatcaatctcctcaatttgttaaggaatcttctaccaagtactcttttcttgaataaacttttacccatattacagttaccatatctttgtaacaacattaagggagcattgattttactatattaaatagacagttttctatttcaaatagacttggctgaattattttgattagctcaattaaaaaatacaagattctaataagagactttattacttactaaaggcattgtgagctattattaaaataaatac

SEQ ID NO: 342394 - DNA, 649 bp, Homo sapiens
tagtgaacaagcctgggtactaaagttaaatattacagaggcagataaaataagtctgagaaaaattcatgcatttaattctatctattttgcccacatagttatgctgatatttcattcacttggattcaccaacttaaaatttgtaactataatggagaatcttttttctgtatttgaaaaaagtgcactgagcaaattaatagtataaatatgatttcaaggataactaagagaatatttatttctatgtatggttaatcaacatgcccccttccatactccatgtgccctttgactaattatctccaattcatctttcaggtcacaattcaagtataaataataaattagaagtacatattactataaaaaattgacatgtgaattatgaatcaatctcctcaatttgttaargaatcttctaccaagtactcttttcttgaataaacttttacccatattacagttaccatatctttgtaacaacattaagggagcattgattttactatattaaatagacagttttctatttcaaatagacttggctgaattattttgattagctcaattaaaaaatacaagattctaataagagactttattacttactaaaggcattgtgagctattattaaaataaatac

SEQ ID NO: 342395 - DNA, 596 bp, Homo sapiens
tgccttcaaggatgaagttcaagtgtttcagagatgaaacaatggacgaagaaacagaacagggctgtggctcttggwcaaacttgttaatcaccatccagacaaggtctatctagacaaggtctagaaaccagatgtgtcaaacagtgaataaataatttttccttagtgaatgactgcagagaccacagcgaggtgcagaaaatttgggacccattcttaaggaataagtttaactttagatgaactaagacagacacatcaaaatatagtctatgtctgccagagtgtcactgtgcatcacagacccactcccaagtaaaggagggaggaaatcactctgactcagcagaatggtgtatttcaccatctctaggagatgtgttacctgagtataagataaggcaccagatttttttaattgtgttctttcacagatagccacagtggcaataatttagttgatttgatcaagatagactgccaaactggaaaattctggtaaaacatgatctacttgatgtaaagtgatgtggtttgtttagacttattgaactggaaaatgccaaatttctttttccttggcaccacatgag

SEQ ID NO: 342396 - DNA, 475 bp, Homo sapiens
tgtgctcattcaacagacagccccaatgagagtgttaaaatatgaggaaacagcattttttcattttttaaagataaaaataaatataaacatgttataatatttgtctttcatctcaattgatcattatatgcaccccactttcaagatactggcttaaagctactgcacatttgcctgcaaaagcaggtcattgaggtaaaaatggtaaaggtacacaggacctttactgtcttttatccaactttcagatgtgaggcaccaatgtgatagcttggtgccttcaaggatgaagttcaagtgtttcagagatgaaacaatggacgaagaaacagaacagggctgtggctcttggtcaaacttgttaatcaccatccagacaaggtctatctagacaaggtctagaaaccagatgtgtcaaacastgaataaataatttttccttagtgaatgactgcagagaccacagcgaggt

SEQ ID NO: 342397 - DNA, 476 bp, Homo sapiens
ttatagcatattaaacaaaacacatagttcttgcaccttgctctttttcacttaacaatttatcttggaccccaacctcattctgtttaatggctgaaaagtgttctctcatatggatgttccataatttacttaaccagcccctgacttgcatatgtaccattctttctatagatttaattcctagaagtgggattgttggatcaaaggataatgcattttaattttggatagataccacagtgttgcccrccttagagactgaaccaatttaccagcattccctgaatacgtctgtccaccaaaaaaaaaaaagaaaaaaaaaatagtatgagaggacaatggtctcctaatcagtctctttgttcatttgactttatatccttgtggatttgctttaaaaacagaaaagtaaatgtaacagaatgtgatacaattagcataatattatcattcaggtctcaaaatgctacacc

SEQ ID NO: 342398 - DNA, 541 bp, Homo sapiens
gggtataccattttacattttttacctgcagtatatgagtgatccagtttctccacatctttaccagcatttgatgttgtcagtgatgtgtagtgagtgatatctcattgtggttttaatttgcattttcctaatggctaatgaaatgatgttgaatatcttttcatgtgcttatttggcatctgaatatcctcttatgtgaaaggtctcttcaagtctttttgttcattttctaattagactttttttttctgctgaattttggaaattctttatataatctaggtactagtaagatacgtggttttcaaatattttctcctggtctgtagcttgtcttttaatcctctttgcaaggtcttttacagatcagaagtttttaaatttgatgaaattcagkttatcagattttccatttatgaatcatgcttttggtattaaatatgaggtcttttccagtttagatcctgaagattttctcctattattttcctaaaaatatttcttctaatattttctacttttatattttatatttttg

SEQ ID NO: 342399 - DNA, 461 bp, Homo sapiens
gagcatcagaaactcagaggcatgatgtgtaaaggcttaaaacagaagcaatgaggtaggagaagacatgaagtggagaaaagttacaaaaggaagcaaaataaggaagataasagaatggctgagtcacagtaattgtacagtcactagatagataaacaaacctgaggtgatgtccagatgaccagagctcttgtcatactgtgagagcttcagaactattattataccatgttctagttctctgtgagaccgggccacctacaagagtcttcttgtagctccatagttttccatgtgtttttctaacaatttctgtctcctcaagtaacctaagtatgctctgtaccttgccaagtaaaagagcctaagtaacacggtatctttgtcaagtccacaccctaaactgttggagtgcctgcatattgcatgggagtaagcacgcatacagtgagccagca

SEQ ID NO: 342400 - DNA, 575 bp, Homo sapiens
aaaatctgctctagtgcctgcctagagaacacagcaggggattttctgtcttaagtagctaggcacgccatgcatctgaaatgagaagcatgccctaaaatgttcacagcatattgcagttgaatgttttctatcttcttcagaagataagctggagtagttttgttttgttttctccgattaaaaaaaaaaaagtacaacaaaacatgatggggaggggagacaagtcaaacaaacaattccacatgtttcttgtgcatgagccactttcagacagggcaatatgtgtgcaaggctttactctgccatctcacaatgcaagaagatgactctgtaaaagtccctggagtgaggtgataaggatgaggcaaagacggagaawaaaacctgaaacaaagtcgtaatttggggtcagaaagtgtgcccacaccagtccagaaaagcagagaattcttgccctcttttttttatccccaaagttctatttctttatgaagtcattaagaaccacaacctatccaaaatgaagaacagaaaatccagtctcagcatttatttttaaataacacatctag

SEQ ID NO: 342401 - DNA, 606 bp, Homo sapiens
gtctgacccctgcagatgagtctgmctggtagactcatctcccccacattctccagtgtggtcaggccaacctgactacccaccatcccctgagtgtttccttttctttcctgcctccaagggtttgctcgtgctgttctctcctcctgaaacacatcctcccccttcaagccggatcttttttaggtatcttcaagctccatcccaaaatgcatgtcctccatgaaaagacatttttcaaaagatatacaagtggccaaaaaaatataaaaaaatgcttaacatcactaatcatcagagaaatgcaaattgaaactataatgagatgtcatcttacaccagtcagaacggctattgctaaaaagtcaaaaaccaacagatgatggtagggatgcagaaaaaggggaccacttacacagtgttggtgggaatgtaaatcagtacaacctctatggaaaccagtatggagatttctcaaagaactaaaaatagaactaccctttgatccagcaatctcactactgagtatctactcagaggaaaataaattgttgtatcaaaaagacacctgcacgcgtatgtttattgcagcactattcacaacaa

SEQ ID NO: 342402 - DNA, 576 bp, Homo sapiens
actgcatccagcctgggcaacagagtgagaccctgtctctaaataagtacatacatacatacatacatacatacatacatacatacatacataaacaaattagacacaaaagactttagactatgatcccattacacaaagttcaaaaacaggcaaaactgaattggagtgataaaagccagatggcagttgctttgtagtaggtggtgggtaatggctatttactacgaagttgcacagggaactttctggggagatggaaatgttctactccttgatcttggcaggggttacagcagtataaacagaggtaaaaattcatcaagccatacacctaagatttactcatttcattgtactgtaatcataattcaayaggatactatgaatatacaattatatataaatccttatagatatgtaaatgtttatatgtttgtacgtgtatgtgtgtgtgttgcttccagaactacgcacaaaaaaaaccattaggaagtatccaaatgccaagttttcacaaaacaattaacgaagtctatcccctgggtgtgatcatgctctaaaaggaagaaaaat

SEQ ID NO: 342403 - DNA, 581 bp, Homo sapiens
gtaatggttcatctttcattcctgattttagtcacttgaacattctctcttctttttctggtcatctaaccaaaggtttgtcaattttgttgatcttttcaaagaaacaactttgattttcgttaattttctctattgtttttctatactttatttcatttatttttactgtaatctttattatttctttgcttctgcttgctttcacttcaacttgcttttctttttgtagtttcttaaggtatagagttagggtttggatttacaatctttctcctctttcatgggcatttatagctctaaatttccctctgagcactgctttgctgcagttgtcgcataagtttggtgtgatgtgcgtgcatttccgtttatttcaaaatgtcttctaatttcccttgtgattctgctttgaccatttgwccatttcggggggagtgtattgtttaatttccacatttgttaattctctaaattttcttctgttagtggtttctgattttattccattctgttcagaaagcatgttttatgtgattttaatcctttaaagtttatcaagatttgttttaagccttaat

SEQ ID NO: 342404 - DNA, 589 bp, Homo sapiens
cacacacccaggaacatctttcaagcagcagaagggaatgtttccagttaagtgattttagcagatttctccagcctggtttaggggatgatcccaacgacccagggctaaaccatctcagaatctgcaatgcctttcgccaycagagcatctggctctgctgattcaatcatccggaggagagacataatgtgaagaccagcacagccatcatacaacaacatacgccaaggatgctgaatgaacatttggcataaagtcaatcacagaaactgcttggtgtggaagagatggagggagggaggaaaaggagagaaaggaaattaatatgggaagagtcaagctcactgctaatgggtgacattttctcccctaggaacttttaaataaagcccttaagagtttcccaaatgagcagaccgactaacccattatgttaacagaaaattagaaattacaaagacgtttatctccatttggctaatgtggggttgcatgcgctgcttgttgctgcttataaactccaggccccacagttagctttgacatttcaaccatgttttctcaggctcatgggcacagaaggatt

SEQ ID NO: 342405 - DNA, 589 bp, Homo sapiens
cacacacccaggaacatctttcaagcagcagaagggaatgtttccagttaagtgattttagcagatttctccagcctggtttaggggatgatcccaacgacccagggctaaaccatctcagaatctgcaatgcctttcgccatcmgagcatctggctctgctgattcaatcatccggaggagagacataatgtgaagaccagcacagccatcatacaacaacatacgccaaggatgctgaatgaacatttggcataaagtcaatcacagaaactgcttggtgtggaagagatggagggagggaggaaaaggagagaaaggaaattaatatgggaagagtcaagctcactgctaatgggtgacattttctcccctaggaacttttaaataaagcccttaagagtttcccaaatgagcagaccgactaacccattatgttaacagaaaattagaaattacaaagacgtttatctccatttggctaatgtggggttgcatgcgctgcttgttgctgcttataaactccaggccccacagttagctttgacatttcaaccatgttttctcaggctcatgggcacagaaggatt

SEQ ID NO: 342406 - DNA, 589 bp, Homo sapiens
cacacacccaggaacatctttcaagcagcagaagggaatgtttccagttaagtgattttagcagatttctccagcctggtttaggggatgatcccaacgacccagggctaaaccatctcagaatctgcaatgcctttcgccatcagagcatctggctctgctgattcaatcatccggaggagagacataatgtgaagaccagcacagccatcatacaacaacatacgccaaggatgctgaatgaacatttggcataaagtcaatcacagaaactgcttggtgtggaagagatggagggagggaggaaaaggagagaaaggaaattaatatgggaagagtcaagctcactgctaatgggtgacattttctcccctaggaacttttaaataaagcccttaagagtttcccaaatgagcagaccgactaacccattatgttaacagaaaattagaaattacaaagacrtttatctccatttggctaatgtggggttgcatgcgctgcttgttgctgcttataaactccaggccccacagttagctttgacatttcaaccatgttttctcaggctcatgggcacagaaggatt

SEQ ID NO: 342407 - DNA, 556 bp, Homo sapiens
atttgttgtgcatctaaccctctgctaggagcttcacagagattacttacattgaatcctttcagttgcccatgtcgtccctatgttagagaatagtgtttactcagcctcacagagccaagcaacttgcctgaaatctcacagctggtaagaaacaactgagacttaactcaggactgactgactaaaaccagtagttttccaactgtataatggtccacaagctaaatctaggtcaggaatagagagcacataactcccaaatattcagcatttgagtcaggaacaatggagaagagggagggtctaatttaagactcaaacctgagatcaatatacggaaatcacaagccaaagaggaaaaagtaaaggacaggtcttcyatggttgtgacaacaaatccctacattgaactggaagaacctgaagctgcaaaagaaaagcaatcagtcaaaatgagagtgggtgggagtaaaagtaggtcccaaatatggccgtattttgagcacttgtgcttcagatgccgtactgagcgcttggcctgtattatcttgtg

SEQ ID NO: 342408 - DNA, 214 bp, Homo sapiens
ggtcctatttcctcttcttataaggacactagtcatattgtattagggtccaccctaatgacctcattttaacttgattttctccaaacagaccctgtctttaaatgtagtcacattctgaggtactggcagttagggactttggggagacaattcaaccacaacaattgggagttctgcttggatgartatgtccaggtagttgactgtcatt

SEQ ID NO: 342409 - DNA, 587 bp, Homo sapiens
ttaatgttctggaagggttaaagaagaatcacttatatcaagcccttaacattccagacatggtttaaagccaagaaaagtgaaatcacttatcaaaggtctcacaacttttgagmaagactcaaattctgttttctttagtccaaatcctgtgctctggtacaggtattaggaagtctccttaatagtcagtacatccttgggtttcccaattgacatatatagacagagatatcttggcgtaagaattctgagggcacttcacttatctcataatgacacgatccatcatggaggtaagcaagcacaaagacccaatgactcaaaacaccgtacaatttttgtgcttttaaaattttataataattttaaagacattcaggaaaattacaagaataatacaaagaattctcatatactttttacccagatcttccaaatgttaacattttactacgtttgtttcatttttctctctgttctgaactctttaagagcaagttacaaacacgatgtccatttatcgttaaatacctcaatgtgtaattcctaaaacaaagaatgttctcttacatgaccacagtaca

SEQ ID NO: 342410 - DNA, 598 bp, Homo sapiens
taaagaatgaggaaactagaatattcatacattgtggtaagcagaataatgtccaccacccaccaaaagatgtccatgccgtaatctccagaacctgtggatatattaccttacgaggccaaaggaactttgctgacaagattaagttaaggacattgatactgagatggtgagattagattggattagcygggtgggcccaatgtaatcacaagggtccttaaaacagggaggcagaagagtcagagtcagggaaggaaatgtgaccgaggaagcagaggtcagagcaatatggagccacagaccacagaattctagaagctggcaaaggcaagaaggcagattcttccctccagaaggaacacacccctgccagcctgttgagatagcctggcgggacctgtgtccgacttctgacctccagaactataagataataaattggcagagtttgaagccaccacgtgtgtggtagtttgttacagcagcagtaggaaactaatacatatgcccactctcatcagccatttttaaaggaccgtttcggggatgtttattcaccagcacttccactctgcaggctgtgactggaggaagc

SEQ ID NO: 342411 - DNA, 572 bp, Homo sapiens
gtggtacccagctcacaggggtgatgtgaagattgagataatgaatgtatagcacttagcagactacctagcactcagtcaaataaatgacagccattactggtaaagagaggaaaacactggcccaaatgcacatagctggttcatggaaaatctggaactaaaatgggatctcttgacttctggttcaaagctagtagtgaatcaaggtgaaatttaatagcacacaagacagttatatccaaaatatcacagaaaacatcagtcttttttcccaaattgctacctggagcttcatggatcccatttcacagagccrtataattttaacatcaccagaccttctttaaagaagtcaagacaggcctgtcattttactccgctgactatgaccagatgcattcaagaaagacacaattgacctaacaaacacaagttgagacccttgggaagatacggccactggtctcagcagccaagtatttgctaagaactctctgtgaatccaaaattgtgtggaatatgaaaatagaaaatacattctctgcattgaaaggccttactcttgttgg

SEQ ID NO: 342412 - DNA, 591 bp, Homo sapiens
ccaccatttaataagcactaagcactttacttatattgtctaatttaatatttataccaacttcatgaacagttctggcattcccatcatgtagataagaaaactgagactcatarggagcaagtaaattgcccaaggtcacaaaactagtaagtagcagagcaaaggttggaactcaaaagctaggttcttaatccattgtactatcagagaaatttgttcctctctaatggtatggattacatattgtctttgatagttgcagtagtcaccatttatccatggggaatatattgcaagacccccagtggatgcctgaaactacggataggacaaaaccctgtatatactatgcattttttcccctgtacatacatacatatgataaagtttaatttataaattaggcacagtacaagatttaccataataactaataataaaatagaacaattagggacaataaaggctacttgaacacacaagcactgtgatactgccatagtcgatctgaccactgagatggccactaagtgactagtggatgtgtggcagctacggcatggatattctgggcaaagggaggattca

SEQ ID NO: 342413 - DNA, 464 bp, Homo sapiens
tgatggtgactactttggagaagagaaggcttggcacggagctgacaggtggtgttcatctggccctacagctgagccagtgatasaactgagagtaaaaccttcatatcttcaaaaatccctgggatagcctggcaaagagtgagagattttgtaccctgtgactctattaaaattttgaatggtatcagattctaagagatctttattcagaggattatctcaacatgtgatggtttcatttattctcaggatatccctaatgggtaaactatggataaaagacagtacttttcccctccaaggaggaaacagggaagagaaattgcaagaaaactatcatggtcccaagtgggagtgtgaatggcagagtcatgaaggtctttttttttttttttttttttaactgctgacactccatgtcaccacaagccaaaaattcttaattctggaaaaaaaaacag

SEQ ID NO: 342414 - DNA, 464 bp, Homo sapiens
tgatggtgactactttggagaagagaaggcttggcacggagctgacaggtggtgttcatctggccctacagctgagccagtgatagaactgagagtaaaaccttcatatcttcaaaaatccctgggatagcctggcaaagagtgagagattttgtaccctgtgactctattaaaattttgaatggtatcagattctaagagatctttattcagaggattatctcaacatgtgatggtttcatttattctcrggatatccctaatgggtaaactatggataaaagacagtacttttcccctccaaggaggaaacagggaagagaaattgcaagaaaactatcatggtcccaagtgggagtgtgaatggcagagtcatgaaggtctttttttttttttttttttttaactgctgacactccatgtcaccacaagccaaaaattcttaattctggaaaaaaaaacag

SEQ ID NO: 342415 - DNA, 597 bp, Homo sapiens
tcttttcctcaccttggttactaatcctttacctagttggtaggtgcttcattcaccctggagatctttgactaaaaggcaggcattcaggaccaagcataatccatctcttgcataaaacatgrgacgctttggaggatgcctggtgttcaaaatggtaatatttctacccctttgtcaaaagtaacatcatattccatatcactgccccccctccacctgtcagaaggggattagaaagggtgttgttccagaaaataaaagtttcaaaaccaacaaacccaggtcagatacctataaaaccttataagacaagaacaaattgcaattaaagaagacgcccaacaaagaagaaatgaaatgaaatattgatagctgtttaagggagttcacattctatctgtgtaagtgggaaatgctcaacctcctgagactcctcctatctctaaaattctaccactctgtgcctttatgataattctagattattttttaattttcatttttttattatacgtaagttctgggatacatatgcagaacgtgcaggtttgttacataggtgtacacgtgccacggtgttttgctgcacccatt

SEQ ID NO: 342416 - DNA, 597 bp, Homo sapiens
tcttttcctcaccttggttactaatcctttacctagttggtaggtgcttcattcaccctggagatctttgactaaaaggcaggcattcaggaccaagcataatccatctcttgcataaaacatgggacgctttggaggatgcctggtgttcaaaatggtaatatttctacccctttgtcaaaagtaacatcatattccatatcactgccccccctccacctgtcagaaggggattagaaagggtgttgttccagaaaataaaagtttcaaaaccaacaaacccaggtcagatacctataaaaccttataagacaagaacaaattgcaattaaagaagacgcccaacaaagaagaaatgaaatgaaatattgatagctgtttaagggagttcacattctatctgtgtaagtgggaaatgctcaacctcctgagactcctcctatctctaaaattctaccactctgtgcctttatgataattctagattattttttaattttcatttttttattatacgtaagttctgggatacatatgcagaacgtgcaggtttgttacataggtrtacacgtgccacggtgttttgctgcacccatt

SEQ ID NO: 342417 - DNA, 571 bp, Homo sapiens
ctactgggaggtgtctcctagtcaggatgcacaggggtcagcgacccacttgcggaggcagtctgtcccttagcagagctcgagtgttctgctgggagatccactgctctcttcagagccagcaggcaggaatgtttaagtctgctgaagctktgctcacagccgccccttgccccaggtgttctgtcccagggagatggtagttttatctataagcccctgactggggctgctgcctttctttcagagatgccctttccagagaggaggaatctagagaggcagtgtggctacagtggttttgccaaggtgtgttgggctctgcccagttcaaacttccaggcagctttgtttacactgtgaaggaaaactgcctactcaagcctcagtaatggtggatgcccctccccacacccagcttgagcatcccaggtcaacttcagactgctcttctggcagggacaatttcaagccagtggatcttagcttgctaggctccatggggatgggatctgctgagctagaccacttggctccctgacttcagcactctttccagaggagtgaatgg

SEQ ID NO: 342418 - DNA, 571 bp, Homo sapiens
ctactgggaggtgtctcctagtcaggatgcacaggggtcagcgacccacttgcggaggcagtctgtcccttagcagagctcgagtgttctgctgggagatccactgctctcttcagagccagcaggcaggaatgtttaagtctgctgaagctgtgctcacagccgccccttgccccaggtgttctgtcccagggagatggtagttttatctataagcccctgactggggctgctgcctttctttcagagatgccctttccagagaggaggaatctagagaggcagtgtggctacagtggttttgccaaggtgtgttgggctctgcccagttcaaacttccaggcagctttgtttacactgtgaaggaaaactgcctactcaagcctcagtaatggtggatgcccctccccacacccagcttgagcatcccaggtcaacttcagactgctcttctggcagggacaatttcaagccagtggatcttagcttgctaggctccatggggatgggatctgctgagctagrccacttggctccctgacttcagcactctttccagaggagtgaatgg

SEQ ID NO: 342419 - DNA, 509 bp, Homo sapiens
tgaataagttcagtaaaatgaaacaattgcacaccctgccattaccatttcccaggaatgstgtgtctgctctaaggtggggaataagggatagagccaacactggcttcttcctttctggcaaggaaagtgtatcaagtggtcacaaaacctcaaagatcctacatgttgcacttctctcttttgaggaaactgttacaagaagatgcttactcagaggtttggcatgctttttccactagaccaggtcgaattagccacacctggttgaactggtgttctatatgctgggaaataacctctagggttacttgacttgagaactgtgcccaacagaaatgctccatattgaacagtgaccaacaattccaaccagttctcctttcttggggaagtggaatgcaagatatacatagagaattgtcaatcaactcagtaagggagtagaagtaaactgagagaaaaaatctgaaccatgaaggcagctgacttaagggttattcttgggt

SEQ ID NO: 342420 - DNA, 525 bp, Homo sapiens
tgtcttcaacacagtaaccaagctgaaacttggttcttggtgtgcacagttacaatagcaagcctagtacctactagtagatatataaaggcatcaaagtagattttgccttctattcaccactgcaagaccaaatacataatagctaataatggacagcagatagatgattggcacccgaagaacaattgcagaaatgattaagaaacctaagtagacattgcatgagtagactcatgtctatcccatcccacatgatcagtccaatttaatcaccctattcaatcctctgggggctcagctggtccaaggaggggcacgggtctttggcccaaacaractgaagagaaggaactatattatgtagttggctaggagatttttcttctctctcacattggatgtgaaaagcatgacgcttcaatttacataaagtctccaggagaaccagcaaaggatgaagctgatgcagaagatcacagagcagagagacgaaagttattgggttcctgtgacattgttgag

SEQ ID NO: 342421 - DNA, 527 bp, Homo sapiens
tcacaaaaacaaaactacttgtttttcatgtatatttaccttttctatcagagatactaccactgaacagatggctttccttgatggatggtttcattagcagtgtctgaatacttatcttctgtttgccatgtgtttctcttcctgtgtttgcgttttgcattcattcattcattcactatgtagttggctaggacacttattgagtgtccattatggaccaagtcttttcctaggttccagsaaacagaatcccaaaatctctgatcaagaaattatgtgttgcctccataaataaaattataaacaagatttatttctatttgtatcacccttcattctaaatacccacgtgcttacgatgtccttacctagcagtcttccaataagaattattgacagaacagatccactgtcgtgccgaatttcatcccccacaaaaatcaaaaactaaatcttgctgtgttcttacttagaaataggaagaaatatgtctccttacaatgaggcattcgctaatgcagcca

SEQ ID NO: 342422 - DNA, 588 bp, Homo sapiens
tgttctcattcttcaatgataattacttgagttaccaccttttaccattgctatgaagaaaaggatattttatgagaaggaaatgagttcatttctaagctctasgtaggtgaaatcccttatatttgttcatcccatagaagttattactaagattgatgatcttaatatatagactgtaaggaagatccagttttcaccctgaaagccttgctgctttaccaccttaatagatacatgattttcttcataccgtctcaggcaagaaaagaaactacaaactacatgttagagtttttaattgtgcctgatctatctacattttacaggacttcattctcaaaatacatgcttataacacttattttttcctttcatacttagtattcatcaaagggaattgcactttactctcccagagctaaaaaagatgatctaattaaaaatattaaagaatgagccattaaagagttgtctgaaaaaatgtaatgtatggagttcatgcatgcactcattcaataagcaggctttgagctgctataaccctcaggcggcatgtcctagagataatgagatcttagtattaaa

SEQ ID NO: 342423 - DNA, 597 bp, Homo sapiens
atgagttcatttctaagctctacgtaggtgaaatcccttatatttgttcatcccatagaagttattactaagattgatgatcttaatatatagactgtaaggaagatccagttttcaccctgaaagccttgctgctttaccaccttaatagatacatgattttcttcataccgtctcaggcaagaaaagaaactacaaactacatgttagagtttttaattgtgcctgatctatctacattttacaggacttcattctcaaaatacatgcttataacacttattttttcctttcatacttagtattcatcaaagggaattgcactttactctcccagagctaaaaaagatgatctaattaaaaatattaaagaatgagccattaaagagttgtctgaaaaaatgtaatgtatggagttcatgcatgcactcattcaataagcaggctttgagctgctataaccctcaggsggcatgtcctagagataatgagatcttagtattaaacacctctgtaacagaaatattatcatacaacaatgtagcaatatggctagacatttggaaattaaaaaaataattccagacctatcaaatt

SEQ ID NO: 342424 - DNA, 611 bp, Homo sapiens
ccccacttctactttagggaatttctcatctctctccctcttctgcctccccttcctcaataacaatcacaaaaggcaactagaaaaattattttcaagcagcttctactttaagtttgagaaatgcccttgacttgaagaacacaaaagatctggctaccttcagaaaaaaagaggccaagatttgtgaatatcacatatacagtgattctcattcttgctgtctgattcttttctttctcattctttctgtcactctgattctttcacatcagccaaaataaaacaaactaatctcttaataatttattttgtcaaagcagggatgtctatctaggtaaggcttacctgataacaacttcatgatacacagatggtatcatgtaccaagaccgtcaccctgtgatatgctcataaccaggatctgtctcataatcagcayagcaacctagccacaacacagaaaaatcttcaaaggattcaataagctgcagagcagaaagagttcaagttgtttctagagatccagtcacttcttccatcactacccatgctgtttcttcctcctcacagccttgtttttgaaattttagccaattttgaaattttaa

SEQ ID NO: 342425 - DNA, 426 bp, Homo sapiens
aattataaaaggagtttttaaccataaagtcctctccaaggtataaaaaacacattatggaatgatgaattttcatactcaactgaagatatattctgagatgttttcttctctatggttgaagctttacacataacaaaagcaattagaataaaagaaaatattaagcttttctgacaacatcaggaacattaataataaatgtagatttcagttcagactattctcttcaaaataatggtttcagttatttgagactatttgctacttgaacacagccyatatttactgcacagcaatgatccataattaagctttaactttccatgtgcctagatatgagtccatttttagtgatattgataagatctatgatgcatcactacttttggaaaatgttgctgattccaaagatattagcactgg

SEQ ID NO: 342426 - DNA, 550 bp, Homo sapiens
ggctggaaacctaatagagactccctaagaaacctgcattctatctttccctgaccattcaatttccgtacttccaccagagcccaacttctatcagacaaactccatgctatctgcatgctaactccatggataatctgcatgaaaaggggggaaagagacaaaatcatgttacaaaacttgggcaagggtctagactcaacttgctttgaaagatcttaaatcttcccattcatttgtagacagcagtgggcctttttcttcctctgctctgcacgaccttctagcccaagtgctagtatcaccttttcctaaagacttttaagacaaactgtgaccatttatgtctacatgacacagtttcaggataacaaagtgtgaagacacacaaagacgtcaaacatttatcagagacctamgcgaaacgccaataaatgttacagggatcaagaatatggttactgacattgaatgtatcctgtggctttgaagaatccaaaggatgattctcgaataatgtatccttccaaattctccagaagttctaagt

SEQ ID NO: 342427 - DNA, 565 bp, Homo sapiens
ccgattaatataaatgagttgtaattttccaacccaggctgtcctagctcacatctattataccactggcagacatgtggactccacagctgtcccctcatttgtgtatgaaacagacacactggtggcattttttggttaccatagttacattaacaatgtacatgtgacatccttctatgtgaaaggtttctgtggcagatattttgtagaactgggagtaaaggaaaactatttaaagtttggggaacacataaattagtctgccattgtattccggagccaccatttcaatccagggaagagagccatcctacagtggtgtccaggaaaggacaatcttggaaacaaagattttcaagggaggcatttccagcaatgcctaacctcttcaggagagtgtccatttaatattcatttcaaaatatttgctcttcctatttgtgactgccctttgtgagataatgtattagcatagtcattttcaatttgyagggggacagtgggcagcaccaatattagcacctatctcagtaagacctaggaaacaaaaaaggagtttgca

SEQ ID NO: 342428 - DNA, 496 bp, Homo sapiens
ctcactgtggcccccaagctttcagaggaaaggtttcaacaagcaggcacacctctacttcattttcttgyggcgattaaaaatgtctagttctttaagtccttattagaaatagtcataaaaaatagtttagaaaaggaatttgaaatcaagtttattttaagagttcaggggcagatggcgttactttgcttctttaaaaaaagatggcattcaatgtggttgagttctatcaagtcaaaggacaagtactgtctcattcacccaaacactgctgtctttaaccttgactagcgggaacttctatgttaaatgtatgcacacttctgtacatctgccttcaaattttaaaggaacattttaatgtggaagggatatgttcttgacattttcttagtctaaagtttaaacagcacttcgtcttctaattaggaagccctaagcagtcaggctctttagagaaatatcactagatcagagctaaaggctcccgtct

SEQ ID NO: 342429 - DNA, 485 bp, Homo sapiens
agtagccactcaggagctaccatgctaggcagtgcagactgaatatttctgaagttgcattagatagtgctaatagagcaaacacaaattagtaactctcattcctccctcccaaagatccacctatctctttactcctcccttttgacatgtaccttttctttttttttgagtaacttgtgtacttgtcttatacactccccttaagattagaagctgtttaagggcagggtctggtcttcctggccctgtgacacagcaaacactgaatgtatttttaattaaatcagtgtgattcaatttgcaccattttattggatctcttttgcmtttcaactgacactagatttcatcagagtctagagaaaaggatggatcacagaacaggtttgtctcaatcacaaacagtaggatggatttttgctaaattgcaaggttttcttaagcacaaaatgtagaaaagacccaccagagctgtgagtatt

SEQ ID NO: 342430 - DNA, 604 bp, Homo sapiens
gacaggaggatccttctgggaggtcagtccacacagtggagtctgggtccatcttgcctcatggagtagctacaggcaatgttggtgttgaggcaatctatttttcttaaactctgtaaggcaagaaggaaatcttggttgaacaaaaatcccatttccccattattcaagccattcctaaaagaaaggaagcaaatttgaatcctgcatttgccatggatctatttggagcctgagaaaaagctaaaagaatgatgttttttgaacattatctacatgatatggatttggccaatccagaaaggatacataaagctcatgccctcagaaggcatttttcttcatttggggatcaaaattttagttctttgctgtgattatactatctatgagatggtgataatttccaggttggaggtttgtgttttataawttgcctggatagggtttcaatttagctttaatacaatatttggtctctggattttattaatttcaatgataatggttgaaaatataatagaaatgacaaataatattgataataactctttaccaagtatctgccatgcccaagggccttaaagagatcattcattactcc

SEQ ID NO: 342431 - DNA, 552 bp, Homo sapiens
aggggccattagccctgaagctgcttccctggctctccccaggtgcccagtgctgtgctccccacaaggccasctctcagcaacaagcagcctctccgacttcctgtgggaaagggtgccctggtgacctggaacacacaaaagggtcatttggagaatggagcaattagctgttcatgctgaactgctgccatcagtgacctgggaagtagaagtgaaagagccctgccctcatcacaatattacagtgagctgggagtctgggggccttgaccacttgggagcagacaatcctaggagctgctgttatccaagatgtcagagccctttggctctgctacaggaagcgacccatgtattcccaggacctagctggcatttggagaaagggggttagctgtaagcaaccaactggcttaaagggatgtgcacatctcagggcctgagcagctcggggccccagagcctcactactctgtgccaagtttccacgtgatggatcgtaaccattaattagacacctgggtgatgtttatggcccatgagttcaat

SEQ ID NO: 342432 - DNA, 514 bp, Homo sapiens
taaaatttacttttattgagggggtatcatgaaggttttaaagaggcaacagttgaaccggctctttgaggataggtagcctctgagcttctgggaaccttaggctatattcattgtatctccrgaacctagcatacttagcacattgcagggacttaatacatttttgttctgtggtaaacctggccaagtggcaagcagaagaaaggtatcccagcagaaagatttgcatgaataatggagaccagcatgtatgctaccaactagaaaaagcaagaagttcagtttggctggaatacaagtgcaagcagtgtctggtgcgttgggatgctagattgcagttggaataaattaatatctcactgaggatcttggaccttattatatggtgtggtagtgataagcccctgcaagaatcagagctccctatatccctgttgtgattctgggcttggctaatggtacgttagcaaatgtgatacaagcaaagcctgagaagtacttccatattggg

SEQ ID NO: 342433 - DNA, 530 bp, Homo sapiens
gacaagcaagacccaattgtagcatagtagacagatataatagcacaggcttaagagaaaggaaaccacaagcrccccaggttttattattaataataacattaaatatcattgctgataaagttataaataataatagcagataatatttattgagctcttaatagacgcctccgtccaaaaatcagctctaccacttgctgttgatttgagcttggaaagtgactgtattagtctcacagggctgccataacaaagtacctaacactaggtgcttaaaccacagaaatgtatctcctcacagctgtaagggctggaagtctgaaattaaggtgtcccagggccatgctgtctctggggactctaggggataatctctcctctccttttctagcttctggtatttgctggcagtccttggcattccttggtttgtagatatgccactcctgtccattgccatcttctctttgtgcatgttggtctccgtgtcccaatttcccctttctatagggactgcagtcctaatg

SEQ ID NO: 342434 - DNA, 530 bp, Homo sapiens
gacaagcaagacccaattgtagcatagtagacagatataatagcacaggcttaagagaaaggaaaccacaagcgccccaggttttattattaataataacattaaatatcattgctgataawgttataaataataatagcagataatatttattgagctcttaatagacgcctccgtccaaaaatcagctctaccacttgctgttgatttgagcttggaaagtgactgtattagtctcacagggctgccataacaaagtacctaacactaggtgcttaaaccacagaaatgtatctcctcacagctgtaagggctggaagtctgaaattaaggtgtcccagggccatgctgtctctggggactctaggggataatctctcctctccttttctagcttctggtatttgctggcagtccttggcattccttggtttgtagatatgccactcctgtccattgccatcttctctttgtgcatgttggtctccgtgtcccaatttcccctttctatagggactgcagtcctaatg

SEQ ID NO: 342435 - DNA, 608 bp, Homo sapiens
cccaagctccaggaaaagcatagcaggagaagtattttattaatctatccattcattcatttatttattcgaaagcatttctttaacatcaattatattccagattattgttaagcacagggaataaaaacatgaatcagatacagtccctaccctcaaggaactcactctctggtacaagagacatgtttcaaaaggtcattgtaaagaaatgtggaaaaggcaagaattatgcacagagggctatgggagtaccaagccagctgtgagggagccagggaagacttcttgaaggaaggattaagagctagctgctcaatgacaggagaaggtcatggaaggtgtagacaaaataatgagcatgtgtccatgtgtgggaagtggcttggtgtgttgggaagaacacaacacagagaaggaatgggagacatgaagccacaggcagggttgtggagagttttgcatgtgagtagggcctgtctgcatttttctcccttggctttgcctggctcctttccttccatccyaggggacctccccctgacactccacagagctttgagttctataatctgtagcttattcccactccatggagaaagaggaaa

SEQ ID NO: 342436 - DNA, 522 bp, Homo sapiens
taaacttgtgcatgggggtgtgttgtacagatgatttcatcatcaaggtataaagcctagtatccactagttatttttcctgatcctctccctcctcccaccctccaataggccccagtgtgttgttttcctctatgtgtccaagcattctgctaaaagaaaaacttcagccaaattaaactgaaaggagtttaattgagcaatgaacgattcacgaatagggtagcccccagaatcatagcagattcagagagactcccaggatgcctcgtggtcagaacaaatttatagacaaaaaaaaaaaaggtagtgacgtacagaaatcagaagtgaggtagagaaacagctggattggttacgggttgacatttgccttatttgaacacaatttgacactcagcagtgtatsagtggttgaagtatggctgctgggattgtccaagactccaccattgttataggtgcatactcctaagttaggttttctgtcctgactacctattaagttaggttacagttcgt

SEQ ID NO: 342437 - DNA, 539 bp, Homo sapiens
gagtgtacatgtttccatgactgcagttggaggctgcatcagctttcctgcctcgccactctgagaccacatgaaacctgcagttcattcaaactcgctccttccccatctgctctactctgccccctcacttcattacattttccctcttaaatttcatcctattgcatttggcccattgtaattttggagggtatatctgtgacctaaaatgctagctccctcaacctattctgcatttatygttttgatcaattgcatttaattcactacttcattcattcaactgacatatattgtcaattatggtgtcagattctgggctagcctctggggatcaataacattgctccctattcttaggaaatatacaatctagtgaaaaattgcaggttataattgatcagaataatgaatgtatagctacaaactctctgaaattaaaagtacaattttattagtgattatagctaagtattctaatgtagatataggcaggagagtgataaggaaaggcttccctagagaaatgacaattg

SEQ ID NO: 342438 - DNA, 367 bp, Homo sapiens
tctgtgacctaaaatgctagctccctcaacctattctgcatttatcgttttgatcaattgcatttaattcactacttcattcattcaactgacatatattgtcaattatggtgtcagattctgggctagcctctggggatcaataacattgstccctattcttaggaaatatacaatctagtgaaaaattgcaggttataattgatcagaataatgaatgtatagctacaaactctctgaaattaaaagtacaattttattagtgattatagctaagtattctaatgtagatataggcaggagagtgataaggaaaggcttccctagagaaatgacaattgagcagagacctaaaagacagagaagt

SEQ ID NO: 342439 - DNA, 599 bp, Homo sapiens
acaataggtatgtctaagtcataagagcaatgtatcttacactctttactagtaaaacatttgtwtatacatatacagtatataaagcatattgacaaaccttatctcattaaatttaatccctattacttaggtagatattttatttacctgtggacagaggggaaaacagagaggctcagaaaagggaaccaattaacttgagattgcacagctaatcagacagagctgagtttaaaatgaggacctttgattccaacactagtgctctttgaccataacagtaaagagtcttcaaatacaggacccttgatacaaacgcccctatgtgcccaagatagctttaaccacattgtaggtatttagtgggtagtactgaaagacgaaatgactgctggttaatgattaaaatgaggcctccttcaaaatcagctttatcggtaatgcagaagaactgaggataaggattcatcttttatactgccatggacagtaatttttggatttaaaacacagctacaaaaaaacagttgtctgtgattgtggccaaggttgctcaagatacatctgagttacctaacctatgggtctgttttttt

SEQ ID NO: 342440 - DNA, 544 bp, Homo sapiens
tgtattgtttcttctatttattctcctgtacatctgttcataagttgtagatatatatcttctgtctaagtagagaagggtagataaagaattatgagtcaggcaagtagttccaaggaacttcggaatgaaactccaagttaggaaggattcattacgggtagtaatcaggtagcatgaaggtgcagtgtgtggtcacactcagtgaccgaatagaaagagggctcaacaatacattttgagatgattaatgagccaaatgtcctcagagagctagatgccctactgagtaaaataaaatactaagaagtagtattcattaatactaacaaatagataagttttaaataatgtgtttaggacagggcaattaagagtcattgacaagagagtgaagatayggttctggccttgcaaaactttttaagagtgcttcattctggagataaaagaaacacaacttgcaaatatataaaccggtgggaaaacctaagattaaaactatttcactggtataacaaatagagtagagttttataaggaa

SEQ ID NO: 342441 - DNA, 507 bp, Homo sapiens
gattttaacaccattcattcctggctagattttgacccacatggcaccattctagaaaccacatagtccataaaggaaaatgttattgcaaagtagcaaatgtgaaggcttgaaatgtcaagtggatttaaagaaaaactgtacttctaaatggtaacaggtggcctttacttttcacactcattttaagagagaagatcacagagsagaacacgctcttcctgtcaaggtgaagatggataatcaggcaggaggtgaaaattaagtccaacataaggatgttacaagtcaaaacatttgaaaaggttataaaaatttgttttccatgatactcagtggttttgaatccttttgtggaaggatagtatgtggaatttgttgtgtcttttcaactatgatctgtccttcaagtagaaaaaaatgggttttgcagagaaggccaagttgtatttcaagagggaaaaaaaaaagacagtagagaatgattgacaaataaatactttggtg

SEQ ID NO: 342442 - DNA, 594 bp, Homo sapiens
ttcacactcattttaagagagaagatcacagagcagaacacgctcttcctgtcaaggtgaagatggataatcaggcaggaggtgaaaattaagtccaacataaggatgttacaagtcaaaacatttgaaaaggttataaaaatttgttttccatgatactcagtggttttgaatccttttgtggaaggatagtatgtggaatttgttgtgtcttttcaactatgatctgtccttcaagtagaaaaaaatgggttttgcagagaaggccaagttgtatttcaagagggaaaaaaaaaagacagtagagaatgattgacaaataaatactttggtgacaaatacttgcatgtgtcttctctacrgtgtcatccaactctataaacaaagttgagtctatccacatttaatcaattcacaggtgacttcctacctggaagagaactaagcctggcagccagcaagaggctcactgtgaaaccaaggtcttttagttttgtacacaaaccattgtgtcgtagctccttattggctgtgttttcaattcttcaaatctagccggtttgcataagcaaacaatatttccactccaccatt

SEQ ID NO: 342443 - DNA, 594 bp, Homo sapiens
ttcacactcattttaagagagaagatcacagagcagaacacgctcttcctgtcaaggtgaagatggataatcaggcaggaggtgaaaattaagtccaacataaggatgttacaagtcaaaacatttgaaaaggttataaaaatttgttttccatgatactcagtggttttgaatccttttgtggaaggatagtatgtggaatttgttgtgtcttttcaactatgatctgtccttcaagtagaaaaaaatgggttttgcagagaaggccaagttgtatttcaagagggaaaaaaaaaagacagtagagaatgattgacaaataaatactttggtgacaaatacttgcatgtgtcttctctacagtgtcatccaactctataaacamagttgagtctatccacatttaatcaattcacaggtgacttcctacctggaagagaactaagcctggcagccagcaagaggctcactgtgaaaccaaggtcttttagttttgtacacaaaccattgtgtcgtagctccttattggctgtgttttcaattcttcaaatctagccggtttgcataagcaaacaatatttccactccaccatt

SEQ ID NO: 342444 - DNA, 589 bp, Homo sapiens
tgaacgctctatccatcaaatattgcctgtgtgtcaaatattatgttcatgaatatggtgtgtagtccactaatttctaaatggacaatgttaatatcaattctagagcaagagtgataggctggttgtgtattacacagcagagcttgccatcatcctctttacatgaaaaaataatgaatctcatgtcatttgcaggttcttaaaagcaaagcatcatgtggtcacgtgacaatatgaagccacaactcataaatagtaaatgcaagcagaattttcttatcttataactgaaagctctttgatcctcctgggacccaaacttctttacaaaaagtttggaagttcaggggaaaaaaaaaccyctgaatagggtggttttttttctctctctttcccctggaagtcagccagtcattctatagctataatcatgtctaggatagaaaaatccatcacctgtggaaaacctcaaggtgctcattttcatgagtaatacaaatatttctttttttctagagtaactctaagaaagctacttttgtagagtagctaaacatgctcattaagtttagcatagtagttgtgt

SEQ ID NO: 342445 - DNA, 589 bp, Homo sapiens
tgaacgctctatccatcaaatattgcctgtgtgtcaaatattatgttcatgaatatggtgtgtagtccactaatttctaaatggacaatgttaatatcaattctagagcaagagtgataggctggttgtgtattacacagcagagcttgccatcatcctctttacatgaaaaaataatgaatctcatgtcatttgcaggttcttaaaagcaaagcatcatgtggtcacgtgacaatatgaagccacaactcataaatagtaaatgcaagcagaattttcttatcttataactgaaagctctttgatcctcctgggacccaaacttctttacaaaaagtttggaagttcaggggaaaaaaaaacctctgaatagggtggttttttttctctctcyttcccctggaagtcagccagtcattctatagctataatcatgtctaggatagaaaaatccatcacctgtggaaaacctcaaggtgctcattttcatgagtaatacaaatatttctttttttctagagtaactctaagaaagctacttttgtagagtagctaaacatgctcattaagtttagcatagtagttgtgt

SEQ ID NO: 342446 - DNA, 589 bp, Homo sapiens
tgaacgctctatccatcaaatattgcctgtgtgtcaaatattatgttcatgaatatggtgtgtagtccactaatttctaaatggacaatgttaatatcaattctagagcaagagtgataggctggttgtgtattacacagcagagcttgccatcatcctctttacatgaaaaaataatgaatctcatgtcatttgcaggttcttaaaagcaaagcatcatgtggtcacgtgacaatatgaagccacaactcataaatagtaaatgcaagcagaattttcttatcttataactgaaagctctttgatcctcctgggacccaaacttctttacaaaaagtttggaagttcaggggaaaaaaaaacctctgaatagggtggttttttttctctctctttcccctggaagtcagccagtcattctatagctataatcatgtctaggatagaaaaatccatcacctrtggaaaacctcaaggtgctcattttcatgagtaatacaaatatttctttttttctagagtaactctaagaaagctacttttgtagagtagctaaacatgctcattaagtttagcatagtagttgtgt

SEQ ID NO: 342447 - DNA, 557 bp, Homo sapiens
cctcatcttaactaatgacatgtgcaacaatgctatttcccaaaaggtcgcattctgaggttttgggagttaggatttcaacacatgttttaggggcacacaattcaaccatactagctcttcaggaaatttgactcaaaagatttcaggcccgaaagagttttcatgtctcctggctaatacggcgaaaccccatctctactaaaaatacaagaaattagctgggcgtagtggcaggcactgtagtcccagctactcgggaggctgaggcaggagaatggcattaacccgggaagtggagcttgcagtgagccgagatcgcgccactgcactccagcstgggcaacagggcgagactccatctcaaaaaaaaaaaaaaagagttttcctgtcaatgaaaatcacaggcacaccctgttttttgtgcttctccttattgtagttttcagatactgcaaattttctttttaacaaattgaacatctgtggcaaccctgcatagaacaagtctataggtgccatttttctttagtttatttcataaatattttttattt

SEQ ID NO: 342448 - DNA, 542 bp, Homo sapiens
gtcccagctactcgggaggctgaggcaggagaatggcattaacccgggaagtggagcttgcagtgagccgagatcgcgccactgcactccagcctgggcaacagggcgagactccatctcaaaaaaaaaaaaaaagagttttcctgtcaatgaaaatcacaggcacaccctgttttttgtgcttctccttattgtagttttcagatactgcaaattttctttttaacaaattgaacatctgtggcaaccctkcatagaacaagtctataggtgccatttttctttagtttatttcataaatattttttatttcaatagctttagaggtacaggtggtctttggttacatggatgaatggtataatggtgaagtctaagattttagtgcacccatcacccgagtagtgtacattgtacccaatgtttagttatttatccttcacccctccccacttcttcttccccaatataggtgtcatttatctaacagcacatgctcacttcatgtctctatgtcacattttggtaattttcacaatatt

SEQ ID NO: 342449 - DNA, 542 bp, Homo sapiens
gtcccagctactcgggaggctgaggcaggagaatggcattaacccgggaagtggagcttgcagtgagccgagatcgcgccactgcactccagcctgggcaacagggcgagactccatctcaaaaaaaaaaaaaaagagttttcctgtcaatgaaaatcacaggcacaccctgttttttgtgcttctccttattgtagttttcagatactgcaaattttctttttaacaaattgaacatctgtggcaaccctgyatagaacaagtctataggtgccatttttctttagtttatttcataaatattttttatttcaatagctttagaggtacaggtggtctttggttacatggatgaatggtataatggtgaagtctaagattttagtgcacccatcacccgagtagtgtacattgtacccaatgtttagttatttatccttcacccctccccacttcttcttccccaatataggtgtcatttatctaacagcacatgctcacttcatgtctctatgtcacattttggtaattttcacaatatt

SEQ ID NO: 342450 - DNA, 542 bp, Homo sapiens
gtcccagctactcgggaggctgaggcaggagaatggcattaacccgggaagtggagcttgcagtgagccgagatcgcgccactgcactccagcctgggcaacagggcgagactccatctcaaaaaaaaaaaaaaagagttttcctgtcaatgaaaatcacaggcacaccctgttttttgtgcttctccttattgtagttttcagatactgcaaattttctttttaacaaattgaacatctgtggcaaccctgcatagaacaagtctataggtgccatttttctttagtttatttcatamatattttttatttcaatagctttagaggtacaggtggtctttggttacatggatgaatggtataatggtgaagtctaagattttagtgcacccatcacccgagtagtgtacattgtacccaatgtttagttatttatccttcacccctccccacttcttcttccccaatataggtgtcatttatctaacagcacatgctcacttcatgtctctatgtcacattttggtaattttcacaatatt

SEQ ID NO: 342451 - DNA, 542 bp, Homo sapiens
gtcccagctactcgggaggctgaggcaggagaatggcattaacccgggaagtggagcttgcagtgagccgagatcgcgccactgcactccagcctgggcaacagggcgagactccatctcaaaaaaaaaaaaaaagagttttcctgtcaatgaaaatcacaggcacaccctgttttttgtgcttctccttattgtagttttcagatactgcaaattttctttttaacaaattgaacatctgtggcaaccctgcatagaacaagtctataggtgccatttttctttagtttatttcataaatattttttatttcaatagctttagaggtacargtggtctttggttacatggatgaatggtataatggtgaagtctaagattttagtgcacccatcacccgagtagtgtacattgtacccaatgtttagttatttatccttcacccctccccacttcttcttccccaatataggtgtcatttatctaacagcacatgctcacttcatgtctctatgtcacattttggtaattttcacaatatt

SEQ ID NO: 342452 - DNA, 560 bp, Homo sapiens
tttgcaaacagtatgcagtttacactgcattttcacttaataccctccccttaatgacctccacctggcaacctctatttaatggaaaactcagggtctcaatcccctgtatggcccatgttccatgggatgggacaaggactcagatgttcctcacaggcaaggaatgaatctccaggttggccactcccagattccctagctcagaacacattcaggtgcatctaccacacacggtcatcctcggggtgtgtttcagttaatgctatcaggtgcatttaccacacaaacagcagagttgaagaggattgactccagttttgaaagaaattctactmtgagttcaatgctatcaaacagcatcacgtgatacagaggaatatttcatgaaaggaagagttcatcaatgcagcaaacttcattgttgtcttattttaagaaactgcctcagccatcataaacctttagcaaccatcatcttgaccagttagtggccatcaacattgaggccagaccctccaccagcaaaaagatgaagactcgagaagggctcagatgat

SEQ ID NO: 342453 - DNA, 560 bp, Homo sapiens
tttgcaaacagtatgcagtttacactgcattttcacttaataccctccccttaatgacctccacctggcaacctctatttaatggaaaactcagggtctcaatcccctgtatggcccatgttccatgggatgggacaaggactcagatgttcctcacaggcaaggaatgaatctccaggttggccactcccagattccctagctcagaacacattcaggtgcatctaccacacacggtcatcctcggggtgtgtttcagttaatgctatcaggtgcatttaccacacaaacagcagagttgaagaggattgactccagttttgaaagaaattctactctgagttcaatgctatcaaacagcatcacgtgatacagaggaatatttcatgaaaggaagagttcatcaatgcagcaaacttcattgttgtcttattttaagaaactgcctcagccatcataaacctttagcaaccatcakcttgaccagttagtggccatcaacattgaggccagaccctccaccagcaaaaagatgaagactcgagaagggctcagatgat

SEQ ID NO: 342454 - DNA, 570 bp, Homo sapiens
gtaagtgtgtgggctggatgtctttatgatattttattttgagcccttttatagataaggatgacatgaagaaccaccaattattgagctcttaccgtttgcttggttttgcagtagatacttgagatagaagattgaatgagatataatctctgccttcaagaagcttatagcctatgaaaggggaaagacaagtaaatggacggttaaaatttggtataataagattataggtaacatttgtgggacatttattctcttcccagctctattctaagtgtttaacatgcatctgtgccttggtcctcacatcagacctaagaggaggtgctattttaatcttcattttacagacgaaaaaaaaatgtgcagagcaagtttatcttgcccagagccacattgccaggaagtggcagagtaactccacactctcagctgttaaatgtattatcaycccaataatatatggaagaaccccagttagcacagacgttgcagcagcacaaaggtaaggcacatcaccaagaccacagagtagccaggagtgcctcacaacgggagaaatacctg

SEQ ID NO: 342455 - DNA, 589 bp, Homo sapiens
gcaaacaaagagtctgaaaaacaagctttgcataaacatacagaaagaacgtamaaaaacttcaactccccagtggaaaaaaattataaatgttgaaaacgtgatagatgtgtcaaaagtacatcaatcaccgtaaatttgtgaaacataaatttttatgtgacatataatttatttttctgtttattatgtaaaaaatgttaaaaataacaaatttttcatgaagaaaataaaaagatcaaaaattcaacagctaatggtgcttcacctgttcctcttgtggccaagtgtaaaatgcgttcctcaatctcccagcccctcccaaagcatattaatcatgttttatctatgccaatgtgggacaggctaatccaggtgaatctggacaaaatatgttaatttcagtttctatgtgtttctatgtaggtcacagattctgcttgaattctagcttccccagcctaggaaaggaaaatctgagcaaatttaccagtcacatcttcagttctttacaactagtgagtaatcacctcacattgttaatgtcaaccattatgccactcattttacctaaaaaaaatgcaactgt

SEQ ID NO: 342456 - DNA, 589 bp, Homo sapiens
gcaaacaaagagtctgaaaaacaagctttgcataaacatacagaaagaacgtacaaaaacttcaactccccagtggaaaaaaattataaatgttgaaaacgtgatagatgtgtcaaaagtacatcaatcaccgtaaatttgtgaaacataaatttttatgtgacatataatttatttttctgtttattatgtaaaaaatgttaaaaataacaaatttttcatgaagaaaataaaaagatcaaaaattcaacagctaatggtgcttcacctgttcctcttgtggccaagtgtaaaatgcgttcctcaatctcccagcccctcccaaagcatattaatcatgttttatctatgccaatgtgggacaggctaatccaggtgaatctggacaaaatatgttaatttcagtttctatgtgtttctatgtaggtcacagrttctgcttgaattctagcttccccagcctaggaaaggaaaatctgagcaaatttaccagtcacatcttcagttctttacaactagtgagtaatcacctcacattgttaatgtcaaccattatgccactcattttacctaaaaaaaatgcaactgt

SEQ ID NO: 342457 - DNA, 557 bp, Homo sapiens
agagaactgtgagtcaattaaacttcttccctttgtaaattactcagtctcaggtatttcctcatagcagtgtgggaacggactaatatagtaacaaagaaatgataaatgtttgagatgatggatatgctaattaccctattctgatcactttaagtaccaaaacattactacataccccatgaatatgtacaattattaggttggtgcaaaggtagttaaggtttttgtttacctttgttttttttttttttgatatggggtcttgctctgttgcccaggctggagtgcagtggtgcagctcactacaagctccacctcccaggttcmcgccattctcctgcctcagcctcccgagtagctgggactacaggtgcccaccaccacacccggctaattttttgtatttttagtagagatggggtttcaccgtgttagccaggatggtctcggtctcctgaccttgtgatctgcccgcctctgcctcccaaagtgctgggattacaagcgtgctgagccaccgtgcccagccttgtctacctttaatggcaaaaact

SEQ ID NO: 342458 - DNA, 641 bp, Homo sapiens
gggtttgggtttaaaaaaaaaaaaaaaacaggatcttgccctgctacccaggctggattgctggagtgcagtggcatgatcacagctcactgcagcctcaacctcctgggcttgagaaatcctcctacctcagcctscaggatcacaagctgctaccacgtccaggtcattttattatttttttgtaaagatgaagtctcactatgttgcccaggctggtcccgaactcctggcctcaagtgatcctcctgacttggcctcccaaagtgctgggattataggtgtgagccaccactcctggtcttgtttaaccttctgaggaattgccagacttttccaaagtggctgtaccattttacattcccactaacaatgtatgagccgtccaatttctccatgacgtagttcattcttccacctccttcagagtaaaatctctttgtcctttatcaggcccagcctaccctcagccaggttatactgaaacttgaccctggctataacctggcagccacaagaggatgtagaggcactttcttgggggtgggaggctgttgtttttaagcaggaaaaaaaaaaagttctggtatatgcagtattttccacatgtggaaactactggttctcagtagggaggctac

SEQ ID NO: 342459 - DNA, 653 bp, Homo sapiens
ctgggccttgtgcccaaaaataatcaaaccccactcaagatgggatccttatcaccaggcaggcagtgagtgacccagtccccaaactccactttaccacctgctttctcagactactcacactaccaattgtgtcagtgtggttcctcttaaaaagagatgccaagatgtcattaaaaatgcaagagaaagccaggcatggtggtgcacctgtagttgcagttgagcccaggagttcaaagccaacctgggtaaccgcgagatctcacctctaaaaagaaaaagaaaagaaaaaaaaacattaaaaaggaaaaaaaggaaaaaaaaagagagaaaaaaggagaaaaagagaaaaaaggaaaagaaaaaaaaagaataaaaaaaaakaaaaagaaatgcaagaaatcctatggggttggggggagggtcacacctgtgaaaccccaaggagagagggaataggaaggaatcagaagggaaagcctccaaactgaatacaagtcctacctgtggaaggagggaggcaggaaggaacatggaggaggaaaagcctctgagtctggtactgcactgagaaagtctagtccaggtcaaccagaagtccagagcaaaggcttcttattagaggagttatgcattgagccaaaatggtg

SEQ ID NO: 342460 - DNA, 654 bp, Homo sapiens
tctgtccactttttacctattatgaataaggctgctatgaatatttgtgtacaagcttttgtgtggatgtacgttttcatttctcttgggtagacagatacctaggagagggaaaatctaggcactttgagtctactgtacttatgggcatggtaaacttcttgaagtctggcctgtctaggatatagataacttactagttagtattggctatgtctttttttttttttttttttttgagacagggtctcgctctstcacccagactagagtgcagttgtgcaatcatggctcaccgctgccttgaccttccaggctcaagccatcctcccacctcagcctccccagtagctgggactataggcatgtgccactgtgtctggctaagttttgcattttttgtagagatggtatttcaccacgttgtccaggctggtcttaaactcctaggctcaagcagtctgcctcagactcccaaagtgctgggattacaggcatgagccactgcacccagctggctatatcttaacttaattaaaatttctaagtgaatgaattttgcttaatatatataattgaatattaaataaccagggtcacctagtttgtttataatattttaaggatcttcattatcactttagagacccagaa

SEQ ID NO: 342461 - DNA, 449 bp, Homo sapiens
gcaaccaactgacttccagaggggggaatatcacatggcttttcaactcatttataaagatatcatggaaactgtctgatttcttcatgagcagctcttagaaaacaaacaaaaataaaacaaacaccaaatatgaacaacagaaaaaaacagccaaaataaaagtaggcctggagttaggtttctaggtcaagctgtctttggctacatctaattaaggagtctccacagggccagtgtctatcttgtttactattggtttgatttttaaaaataaaacacattgcatttgcaggctgtctgttaaccagaagtccatgcagttttttttttccatttttgctgttttaagtttgtgcatagctcaattgatgaatgcaattaaggcttgaagtcagtgatgtgaatgacayaacttctatgattccttacaattctcttggtttctg

SEQ ID NO: 342462 - DNA, 580 bp, Homo sapiens
ttagatgcttcagagggcagatgaatagcaaaagttctgggaggcggctatcctttgtggggctaagggaggggacaggagtaattgttttattttttcacaggcagggtcttgctctgttgcccaggctggaatgcagtggtatgatcacagctcactgcagcctggagctcccaggctcaagtgatcctgccaagtagctggggttacagatgtgtaccaccatgccctgataatgtgtttttatttttattttttgkagaaatggggtctggctggtctcaaactccttgcttcaagccatcctcccaccttggctgtttaagatgtgatgacaggcatgagccaccgtgcctggtttaggagtaattgtctgaacaaggctgtttgaacaaagaataggctctattgcccagtgagaccatccataggcagcgcgatggggagatttcattattgggtgggaggtggaattacatgctttacagggttccttccaacttttattccatgattctgtgttttttgaaaggttagaatgctctgtggctggcagttgagtgtaattcgctattgttca

SEQ ID NO: 342463 - DNA, 580 bp, Homo sapiens
ttagatgcttcagagggcagatgaatagcaaaagttctgggaggcggctatcctttgtggggctaagggaggggacaggagtaattgttttattttttcacaggcagggtcttgctctgttgcccaggctggaatgcagtggtatgatcacagctcactgcagcctggagctcccaggctcaagtgatcctgccaagtagctggggttacagatgtgtaccaccatgccctgataatgtgtttttatttttattttttgtagaaatggggtctggctggtctcaaactccttgcttcaagccatcctcccaccttggctgtttaagatgtgatgacaggcatgagccaccgtgcctggtttaggagtaattgtctgaacaaggctgtttgaacaaagaataggctctattgcccagtgagaccatccataggcagcgcgatggggagatttcattattgggygggaggtggaattacatgctttacagggttccttccaacttttattccatgattctgtgttttttgaaaggttagaatgctctgtggctggcagttgagtgtaattcgctattgttca

SEQ ID NO: 342464 - DNA, 583 bp, Homo sapiens
tcccccaattacttttgcatcaacctaatatttgcagtgtgacaacaataaatgatgtttcagaagtgaggactgctgggggctgaggtaatacttgggagatcgttttacaaagaggtagctggatttcasagctccagaatgagttctccaggaagcaaagaaaaaaggcatacttctcagagagtggtgcaggggaatcactttggcgttttggaggaaggactaaagatgaattgcttggtgcctagcacattgccagcacttaatacatacagttggccctctatatccctgtatctgtgagttcagtggattcaaacaatcatggattgaaaatattcaggaaaaaaaatcctcaaagttccaaaaagcaaaaattgaatttgtcatgtgccacctacaacactgaatgcacacaaatgcagtgacgagtgacattgcattaggtgttacaagtaatcttgagatgacttaaagtatgtgagaggatatgcacgtgttatatgcaaatactgcttcattttatatcagggatttgtgtaccttgaaggctcccggaaccaatcccccatggatacca

SEQ ID NO: 342465 - DNA, 583 bp, Homo sapiens
tcccccaattacttttgcatcaacctaatatttgcagtgtgacaacaataaatgatgtttcagaagtgaggactgctgggggctgaggtaatacttgggagatcgttttacaaagaggtagctggatttcagagctccagaatgagttctccaggaagcaaagaaaaaaggcatacttctcagagagtggtgcaggggaatcactttggcgttttggaggaaggactaaagatgaattgcttggtgcctagcacattgccagcacttaatacatacagttggccctctatatccctstatctgtgagttcagtggattcaaacaatcatggattgaaaatattcaggaaaaaaaatcctcaaagttccaaaaagcaaaaattgaatttgtcatgtgccacctacaacactgaatgcacacaaatgcagtgacgagtgacattgcattaggtgttacaagtaatcttgagatgacttaaagtatgtgagaggatatgcacgtgttatatgcaaatactgcttcattttatatcagggatttgtgtaccttgaaggctcccggaaccaatcccccatggatacca

SEQ ID NO: 342466 - DNA, 602 bp, Homo sapiens
aaaacttgcacacgcatgttcattcaacagtattcataatacccaaaatgtggaaacaacccaaatcctcatcaactgatgtatacataaataaaatctgttccatctatacaacggaatgttattctgccataaaaatgaatgatacatgctacaacatgtaggaaccttgaaaacattatgccccaaaagactacatgttgtatcattgctcttatatgaaatgttcagaagagagaaatccayagagacaaagagtagattggtgattgtctagggctgtgaggtggagatgagaggaggatgagacctaactgctcctcatcacacagggtttcttgtgggggtgatgagaatgttctaaaactggattgtggagatagtcacacagctctgggaatataataagaacacactttaaatgggtgaattaaatggtatgtcaattatgtctcaatcaagctgttttagaaatcatatagagtctattaaacaattactagaataagtgaatttagcaaggtttcaggatgtaacatcaatgtacaaaaataaattacatttcaatattctagtaagaattggaaaattatattacaaaa

SEQ ID NO: 342467 - DNA, 602 bp, Homo sapiens
aaaacttgcacacgcatgttcattcaacagtattcataatacccaaaatgtggaaacaacccaaatcctcatcaactgatgtatacataaataaaatctgttccatctatacaacggaatgttattctgccataaaaatgaatgatacatgctacaacatgtaggaaccttgaaaacattatgccccaaaagactacatgttgtatcattgctcttatatgaaatgttcagaagagagaaatccatagagacaaagagtagattggtgattgtctagggctgtgaggtggagatgagaggaggatgagacctaactgctcctcatcacacagggtttcttgtgggggtgatragaatgttctaaaactggattgtggagatagtcacacagctctgggaatataataagaacacactttaaatgggtgaattaaatggtatgtcaattatgtctcaatcaagctgttttagaaatcatatagagtctattaaacaattactagaataagtgaatttagcaaggtttcaggatgtaacatcaatgtacaaaaataaattacatttcaatattctagtaagaattggaaaattatattacaaaa

SEQ ID NO: 342468 - DNA, 605 bp, Homo sapiens
cttgcagtctagagggcaagagagctaagccaggagcctgcgtcmtgcccaggtagccatctggtacacccaggtgggctgcagggagatgggaaagaggatcccacgggagaacatggtttctaaagggcacccacaatggctggtaagtacagagggagcccttggatccctctgagccaggagggagccagctccaagccgcaggcctggattatgacgcagagggagcggcgggggcggcggcacaggtgcagcggctttacgcagccctcctggggctgagagctgtcctctcctggaggccctgagccctagcaaaaatagcaaaggctaagaaaggatgccgcaaataattttgtccagaggaggtggttatttggtatgttttggacattctctgctttagggatttgtttgactttttctttcttttatttttagtgagtgagaaatgaaaaaagttaatgcagaacaaggatcataaagcagactcagatatagatcacaaacaggtttaggtagatttcaggtctctgttacagtctgttaaagaataaagaaaagaaagaaggagagaggggactgtggctaggagggatgaa

SEQ ID NO: 342469 - DNA, 622 bp, Homo sapiens
atcgcaccactgtattccagcctggataacaagagcaaaattccttctccaaaaaaaaaaaaaaagagtttcacgctcaaacttgtcagcttgtcagcaaccaagtcccattcatcctatagaagacacctggagcccagagttatcccttgttttccctaaagacagactgtatcagttatcaattgtgagtaacaaatcattccaaaacttaatggcttaaggaaacaaccatttttttatttctcacagttctgtgggtrggcagggctcagcttggcagtcctgctggtcccactgggggcctctcatgcagctacagtcagatggtggctgaggctgcaatcacctgggggctccaccgagctagaacatccaagatggttcactcatagccctggaggactggcagagatggctgggaggcacagctgagctgtggtgctggggtggctggccctctatctccatgtagtttcaggcctccttattcacatggcctctccattagtctctcgagcagcattcagcagtgcatttctaattctgctagtctccagagcagagtataaaagtggacttctaacatgggggctcagtgctcctaaaagcagaaggtgct

SEQ ID NO: 342470 - DNA, 622 bp, Homo sapiens
atcgcaccactgtattccagcctggataacaagagcaaaattccttctccaaaaaaaaaaaaaaagagtttcacgctcaaacttgtcagcttgtcagcaaccaagtcccattcatcctatagaagacacctggagcccagagttatcccttgttttccctaaagacagactgtatcagttatcaattgtgagtaacaaatcattccaaaacttaatggcttaaggaaacaaccatttttttatttctcacagttctgtgggtgggcagggctcagcttggcagtcctgctggtcccactgggggcctctcatgcagctacagtcagatggtggctgaggctgcaatcacstgggggctccaccgagctagaacatccaagatggttcactcatagccctggaggactggcagagatggctgggaggcacagctgagctgtggtgctggggtggctggccctctatctccatgtagtttcaggcctccttattcacatggcctctccattagtctctcgagcagcattcagcagtgcatttctaattctgctagtctccagagcagagtataaaagtggacttctaacatgggggctcagtgctcctaaaagcagaaggtgct

SEQ ID NO: 342471 - DNA, 583 bp, Homo sapiens
cattgctgataggaatgaaaaaatagtacagccactttggaagacagtttggcagtttctcaaaaaagtgttcatgttcttaccatacgaccccacaatgacccttcctggtatttacccaaatgagatgagaacttacatccacacaaaaacctgcacatgaatgtttatagcagctttacccataattgccaaaaagtggaagcaaacaagatgttcttcaatatgtgaatggaaaaacaaactgtggaatattaacccaaatgatagactattaaaaaatgataaaaaagtgataaaaacaaattaactatcragtcacacaaaaaaaaacatggaggaaacttaagtgcatattactaagtgaaagaagccaatctgaaaagtctacttactgtatgagtccaactatatgacattctcaagaaggcaaaactatatactgaaaaaaagatcactggttcccaaagatttgggggatgtgaaaaggtatggataggttatgcacagatttttagaatggtaaaactactccgcatgatgttataatggtgaatacatgacattatgcattggtaaaacc

SEQ ID NO: 342472 - DNA, 583 bp, Homo sapiens
cattgctgataggaatgaaaaaatagtacagccactttggaagacagtttggcagtttctcaaaaaagtgttcatgttcttaccatacgaccccacaatgacccttcctggtatttacccaaatgagatgagaacttacatccacacaaaaacctgcacatgaatgtttatagcagctttacccataattgccaaaaagtggaagcaaacaagatgttcttcaatatgtgaatggaaaaacaaactgtggaatattaacccaaatgatagactattaaaaaatgataaaaaagtgataaaaacaaattaactatcgagtcacacaaaaaaaaacatggaggaaacttaagtgcatattactaagtgaaagaagccaatctgaaaagtctacttactgtatgagtccaactatatgacattctcaagaaggcaaaactatakactgaaaaaaagatcactggttcccaaagatttgggggatgtgaaaaggtatggataggttatgcacagatttttagaatggtaaaactactccgcatgatgttataatggtgaatacatgacattatgcattggtaaaacc

SEQ ID NO: 342473 - DNA, 357 bp, Homo sapiens
catttactctatcatgaatgaaatgtaagaaccacacttaaaacamgtctttcatcttaatgaatggtatctttcatttatatacaaaggaattcacttgccagcagcatttaagtatagaaatagtctcgtcttgagtgccttttataaagcagtgccatttctaactaggtgtatttgttacccagcttttcagtaactataggtatctaatagattcaagaaaagattggaaaattgagaagatttagcattttaaacatttgaaaaatgttgctacaaagcatagattatgaatgcattagtaaaattcacaccttatgtgagaatcattaagttggtttaataattatatca

SEQ ID NO: 342474 - DNA, 357 bp, Homo sapiens
catttactctatcatgaatgaaatgtaagaaccacacttaaaacaagtctttcatyttaatgaatggtatctttcatttatatacaaaggaattcacttgccagcagcatttaagtatagaaatagtctcgtcttgagtgccttttataaagcagtgccatttctaactaggtgtatttgttacccagcttttcagtaactataggtatctaatagattcaagaaaagattggaaaattgagaagatttagcattttaaacatttgaaaaatgttgctacaaagcatagattatgaatgcattagtaaaattcacaccttatgtgagaatcattaagttggtttaataattatatca

SEQ ID NO: 342475 - DNA, 357 bp, Homo sapiens
catttactctatcatgaatgaaatgtaagaaccacacttaaaacaagtctttcatcttaatgaatggtatctttcatttatatacaaaggaattcacttgccagcagcatttaartatagaaatagtctcgtcttgagtgccttttataaagcagtgccatttctaactaggtgtatttgttacccagcttttcagtaactataggtatctaatagattcaagaaaagattggaaaattgagaagatttagcattttaaacatttgaaaaatgttgctacaaagcatagattatgaatgcattagtaaaattcacaccttatgtgagaatcattaagttggtttaataattatatca

SEQ ID NO: 342476 - DNA, 357 bp, Homo sapiens
catttactctatcatgaatgaaatgtaagaaccacacttaaaacaagtctttcatcttaatgaatggtatctttcatttatatacaaaggaattcacttgccagcagcatttaagtatagraatagtctcgtcttgagtgccttttataaagcagtgccatttctaactaggtgtatttgttacccagcttttcagtaactataggtatctaatagattcaagaaaagattggaaaattgagaagatttagcattttaaacatttgaaaaatgttgctacaaagcatagattatgaatgcattagtaaaattcacaccttatgtgagaatcattaagttggtttaataattatatca

SEQ ID NO: 342477 - DNA, 548 bp, Homo sapiens
ttctccctagcaactcgtggcaaccattgatgtttactctgtcttcatagtttcacttttttcagaagagtcacatagttggaataatacagtggatatctttttgaatagttaaaaaattaaagctccgtggcagttgaatgtagtcatttaagatsttctttgtccttttgttttccttttgcttctttatcattgtaaagaatgatatattctgatgacatatgctttacatacttagaaaacgtgatttgtatagatatgtggcacataatagaaagggttgaggaaaaggacaccgtgctgtaccacacagcacaaactggagcatcttgctctgtgaggtgggtccagatagactctctagtaatggaaggggacaagtgcaaggggttgtactttataaaactggaatcacaaagtctttcatacttaccttcggttggaaataagaccaggcagtgaatgctataggtaaatacatatgttcctcactgatcctcttcctttgactgatggggttgataacagcctgtattatgatgatg

SEQ ID NO: 342478 - DNA, 548 bp, Homo sapiens
ttctccctagcaactcgtggcaaccattgatgtttactctgtcttcatagtttcacttttttcagaagagtcacatagttggaataatacagtggatatctttttgaatagttaaaaaattaaagctccgtggcagttgaatgtagtcatttaagatgttctttgtccttttgttttccttttgcttctttatcattgtaaagaatgatatattctgatgacatatgctttacatacttagaaaacgtgatttgtatagatatgtggcacataatagaaagggttgwggaaaaggacaccgtgctgtaccacacagcacaaactggagcatcttgctctgtgaggtgggtccagatagactctctagtaatggaaggggacaagtgcaaggggttgtactttataaaactggaatcacaaagtctttcatacttaccttcggttggaaataagaccaggcagtgaatgctataggtaaatacatatgttcctcactgatcctcttcctttgactgatggggttgataacagcctgtattatgatgatg

SEQ ID NO: 342479 - DNA, 548 bp, Homo sapiens
ttctccctagcaactcgtggcaaccattgatgtttactctgtcttcatagtttcacttttttcagaagagtcacatagttggaataatacagtggatatctttttgaatagttaaaaaattaaagctccgtggcagttgaatgtagtcatttaagatgttctttgtccttttgttttccttttgcttctttatcattgtaaagaatgatatattctgatgacatatgctttacatacttagaaaacgtgatttgtatagatatgtggcacataatagaaagggttgaggaaaaggacaccrtgctgtaccacacagcacaaactggagcatcttgctctgtgaggtgggtccagatagactctctagtaatggaaggggacaagtgcaaggggttgtactttataaaactggaatcacaaagtctttcatacttaccttcggttggaaataagaccaggcagtgaatgctataggtaaatacatatgttcctcactgatcctcttcctttgactgatggggttgataacagcctgtattatgatgatg

SEQ ID NO: 342480 - DNA, 548 bp, Homo sapiens
ttctccctagcaactcgtggcaaccattgatgtttactctgtcttcatagtttcacttttttcagaagagtcacatagttggaataatacagtggatatctttttgaatagttaaaaaattaaagctccgtggcagttgaatgtagtcatttaagatgttctttgtccttttgttttccttttgcttctttatcattgtaaagaatgatatattctgatgacatatgctttacatacttagaaaacgtgatttgtatagatatgtggcacataatagaaagggttgaggaaaaggacaccgtgctgtaccacacagcacaaactggagcatcttgctctgtgaggtgggtccagatagactctctagtaatggaaggggacaagtgcaaggggttgtactttataaaactggaatcacaaagtctttcatacttaccttcggttggaaataagaccaggcagtgaatgctataggtaaatacatakgttcctcactgatcctcttcctttgactgatggggttgataacagcctgtattatgatgatg

SEQ ID NO: 342481 - DNA, 479 bp, Homo sapiens
ttaatgtctaaattaatgagagtttaaataccttgaactctcatttatcattagaatgtggttagtccaagagtttgtcctaataaatttgacaatttcagtggtaaccagtatcttatttttaccatcaaaggctctagggcagatcttacttagctttggccataggggtgtaagttttacaaaagcaagtttaggcaagtcttagagacaaattatttgacttcccagtttggttttccatttaggcaagtatttctgcttacttccataatacattttttagtcttgttgctttttccatgacttttctataatcttgyctgcattttttaaaactttcttctctgcttttcttggtatttcttttgttctattattttttcaaactctgctagctatgtattctaagtttttctatagatagtatcaagaggacatagaattacagaattttaaggaatcttggaatgaattaa

SEQ ID NO: 342482 - DNA, 479 bp, Homo sapiens
ttaatgtctaaattaatgagagtttaaataccttgaactctcatttatcattagaatgtggttagtccaagagtttgtcctaataaatttgacaatttcagtggtaaccagtatcttatttttaccatcaaaggctctagggcagatcttacttagctttggccataggggtgtaagttttacaaaagcaagtttaggcaagtcttagagacaaattatttgacttcccagtttggttttccatttaggcaagtatttctgcttacttccataatacattttttagtcttgttgctttttccatgacttttctataatcttgtctkcattttttaaaactttcttctctgcttttcttggtatttcttttgttctattattttttcaaactctgctagctatgtattctaagtttttctatagatagtatcaagaggacatagaattacagaattttaaggaatcttggaatgaattaa

SEQ ID NO: 342483 - DNA, 459 bp, Homo sapiens
attctttggtctttgtgaattctgaaggtattcatgcattgagggaagatcatctcagtktaatgaaagcagtttttaatgtatattcattaaaattttttttgaagtttttgtctctagtacacagaaacacacaatattgtcatgggtatttgaccttaatgtgtttatgcacaaacttagttattcaaatattttcttatccctgaagaatcctaattattaataaaaaaatttctcatggaaaacaacatatataatagagattgttgagtgataaagtaaattgtagtaaataacagaagcttagaacaagttaagtaaacttgtctgagttaatagcaattacaggacttttaaaatacattagaccatgagggagtagtgtgtttgtggggtacaggacatcatggtcctgcttcagtgaagaaagaacttttacaccttattacaatttgt

SEQ ID NO: 342484 - DNA, 459 bp, Homo sapiens
attctttggtctttgtgaattctgaaggtattcatgcattgagggaagatcatctcagtgtaatgaaagcagtttttaatgtatattcattaaaawtttttttgaagtttttgtctctagtacacagaaacacacaatattgtcatgggtatttgaccttaatgtgtttatgcacaaacttagttattcaaatattttcttatccctgaagaatcctaattattaataaaaaaatttctcatggaaaacaacatatataatagagattgttgagtgataaagtaaattgtagtaaataacagaagcttagaacaagttaagtaaacttgtctgagttaatagcaattacaggacttttaaaatacattagaccatgagggagtagtgtgtttgtggggtacaggacatcatggtcctgcttcagtgaagaaagaacttttacaccttattacaatttgt

SEQ ID NO: 342485 - DNA, 517 bp, Homo sapiens
aggaactcaataagtaattatttagcaaaattaagactgtttatacaaagatgattcaaaagattgtcctctacagtctagcagcaaaggggatcgacatgtwaagacatgatgtgcagttcaggtggtaaagtgacactggaaaaattgacaaagtactaagggactccaatgaagcagatacccgtgtgtgtggagaaagatagctagaatcaaggaagacttcacacagcattctgagccttttttttttctttttctgttgttggagacaagttcttactctatcacccagggtggagtgcgatggtgtgatcgagactcactgcaacctcaaactcctgggctcgagggatcttctcacctaagcttcttgagtagctgggactacaggcacatatcaccatacctgtccaattttttgtagagtcaaggttatctatggttcccaggctggtcttaaactcctggccttgagcaattctcccattttggccttccaaagtgctgggattac

SEQ ID NO: 342486 - DNA, 390 bp, Homo sapiens
tactctctaagtctcagctcatgcatgatctttaggaaagccatccctgacagcttttattttccttccttataccccagtgcctaacacttagcaggaactcaataagtaattatttagcaaaattaagactgtttatacaaagatgattcaaaagattgtcctctacagtctagcagcaaaggggatcgacatgttaagacatgatgtgcagttcaggtggtaaagtgacactggaaaaattgacaaagtactaagggactccaatgaagcagayacccgtgtgtgtggagaaagatagctagaatcaaggaagacttcacacagcattctgagccttttttttttctttttctgttgttggagacaagttcttactctatcacccag

SEQ ID NO: 342487 - DNA, 390 bp, Homo sapiens
tactctctaagtctcagctcatgcatgatctttaggaaagccatccctgacagcttttattttccttccttataccccagtgcctaacacttagcaggaactcaataagtaattatttagcaaaattaagactgtttatacaaagatgattcaaaagattgtcctctacagtctagcagcaaaggggatcgacatgttaagacatgatgtgcagttcaggtggtaaagtgacactggaaaaattgacaaagtactaagggactccaatgaagcagataccygtgtgtgtggagaaagatagctagaatcaaggaagacttcacacagcattctgagccttttttttttctttttctgttgttggagacaagttcttactctatcacccag

SEQ ID NO: 342488 - DNA, 390 bp, Homo sapiens
tactctctaagtctcagctcatgcatgatctttaggaaagccatccctgacagcttttattttccttccttataccccagtgcctaacacttagcaggaactcaataagtaattatttagcaaaattaagactgtttatacaaagatgattcaaaagattgtcctctacagtctagcagcaaaggggatcgacatgttaagacatgatgtgcagttcaggtggtaaagtgacactggaaaaattgacaaagtactaagggactccaatgaagcagatacccgtgtgtgtggagaaagatagctagaatcaaggaagacttcacacagcattctgagccttttttttttctttttytgttgttggagacaagttcttactctatcacccag

SEQ ID NO: 342489 - DNA, 585 bp, Homo sapiens
agttgtcatttttcattgtacatatttcctgtctgagtatggcaatatctgccttcaaaatgcaattttcatccatcagacctttcrtttcttcatgattatgaaaatcctaaataaaacaaaagaaagttttagctagtactcaataaaataacatatcatgattacctctgaagttaaagaataacctgcacatccgtacactaaaaagtttaccataagtggatatccacctggagaaaaagttgaagcaaaactttgaaccttatagagcataaattccagaaagttcagaaatgtatttagagtcaatgaatttataaaagtaaacacacacacgcacaccagagaatttttaagaatatcggaattggaaaagcctttccctgaattacaacaaactcaaaagcataaattaaagcattaacaaatttgactaaattaagatatatcaaaaaattgcatttacactttgatatctaacccatacaccaccctatagtaagaacttttgttcacacgtatttggacagataaaatttcccagagttattacagttctgtttcaccgataacattctattt

SEQ ID NO: 342490 - DNA, 585 bp, Homo sapiens
agttgtcatttttcattgtacatatttcctgtctgagtatggcaatatctgccttcaaaatgcaattttcatccatcagacctttcgtttcttcatgattatgaaaatcctaaataaaacaaaagaaagttttagctagtactcaataaaataacatatcatgattacctctgaagttaaagaataacctgcacatccgtacactaaaaagtttaccataagtggatatccacctggagaaaaagttgaagcaaaactttgaaccttatagagcataaattccagaaagttcagaaatgtatttagagtcaatgaatttataaaagtaaacacacacacgcacaccagagaatttttaagaatatcrgaattggaaaagcctttccctgaattacaacaaactcaaaagcataaattaaagcattaacaaatttgactaaattaagatatatcaaaaaattgcatttacactttgatatctaacccatacaccaccctatagtaagaacttttgttcacacgtatttggacagataaaatttcccagagttattacagttctgtttcaccgataacattctattt

SEQ ID NO: 342491 - DNA, 585 bp, Homo sapiens
agttgtcatttttcattgtacatatttcctgtctgagtatggcaatatctgccttcaaaatgcaattttcatccatcagacctttcgtttcttcatgattatgaaaatcctaaataaaacaaaagaaagttttagctagtactcaataaaataacatatcatgattacctctgaagttaaagaataacctgcacatccgtacactaaaaagtttaccataagtggatatccacctggagaaaaagttgaagcaaaactttgaaccttatagagcataaattccagaaagttcagaaatgtatttagagtcaatgaatttataaaagtaaacacacacacgcacaccagagaatttttaagaatatcggaattggaaaagcctttccctgaattacaacaaactcaaaagcataaattaaagcattaacaaatttgactaaattaagatatatcaaaaaattgcatttacactttgatayctaacccatacaccaccctatagtaagaacttttgttcacacgtatttggacagataaaatttcccagagttattacagttctgtttcaccgataacattctattt

SEQ ID NO: 342492 - DNA, 585 bp, Homo sapiens
agttgtcatttttcattgtacatatttcctgtctgagtatggcaatatctgccttcaaaatgcaattttcatccatcagacctttcgtttcttcatgattatgaaaatcctaaataaaacaaaagaaagttttagctagtactcaataaaataacatatcatgattacctctgaagttaaagaataacctgcacatccgtacactaaaaagtttaccataagtggatatccacctggagaaaaagttgaagcaaaactttgaaccttatagagcataaattccagaaagttcagaaatgtatttagagtcaatgaatttataaaagtaaacacacacacgcacaccagagaatttttaagaatatcggaattggaaaagcctttccctgaattacaacaaactcaaaagcataaattaaagcattaacaaatttgactaaattaagatatatcaaaaaattgcatttacactttgatatctaacccatacaccaccctatagtaagaacttttgttcacacrtatttggacagataaaatttcccagagttattacagttctgtttcaccgataacattctattt

SEQ ID NO: 342493 - DNA, 593 bp, Homo sapiens
cagagtgaagtcctcgctctgtaaccaaaatacctcgctctgtaggtattttgtcttcagacaagttgcttctcttaggcttcttctaaaaaataaggattctgctaccttacttcactargttgtttggaagatgtaatgagattacatgtttaaatgttcagagaaatagtaaagcaatggaataatttattcttgaactttattgctgaaaccattttggaatcccaaataatgctcggtgtgtgtttttctgtaagttctaatattcaaatgttgcagttttcagaaaatgttattaagtgctaattttggttattacttgtattcattgtggcttgtaattcagggcattttacctaattcataacttattactaaatttatatatatatataaatttagtgagctcatcactgagctcatcaatcacaccaagggcagaaaactaataggtgtcaaaacctggcttggacaactaccactccttctctacctccccaaactctgagccagcagatctgtgcttggctgctggatctccatggtcctctccaactaacagacaagacaaaaccctgctttgattgttt

SEQ ID NO: 342494 - DNA, 593 bp, Homo sapiens
cagagtgaagtcctcgctctgtaaccaaaatacctcgctctgtaggtattttgtcttcagacaagttgcttctcttaggcttcttctaaaaaataaggattctgctaccttacttcactaagttgtttggaagatgtaatgagattacatgtttaaatgttcagagaaatagtaaagcaatggaataatttattcttgaactttattgctgaaaccattttggaatcccaaataatgctcggtgtgtgtttttctgtaagttctaataytcaaatgttgcagttttcagaaaatgttattaagtgctaattttggttattacttgtattcattgtggcttgtaattcagggcattttacctaattcataacttattactaaatttatatatatatataaatttagtgagctcatcactgagctcatcaatcacaccaagggcagaaaactaataggtgtcaaaacctggcttggacaactaccactccttctctacctccccaaactctgagccagcagatctgtgcttggctgctggatctccatggtcctctccaactaacagacaagacaaaaccctgctttgattgttt

SEQ ID NO: 342495 - DNA, 593 bp, Homo sapiens
cagagtgaagtcctcgctctgtaaccaaaatacctcgctctgtaggtattttgtcttcagacaagttgcttctcttaggcttcttctaaaaaataaggattctgctaccttacttcactaagttgtttggaagatgtaatgagattacatgtttaaatgttcagagaaatagtaaagcaatggaataatttattcttgaactttattgctgaaaccattttggaatcccaaataatgctcggtgtgtgtttttctgtaagttctaatattcaaatgttgcagttttcagaaaatgttattaagtgctaattttggttattacttgtattcattgtggcttgtaattcagggcattttacctaattcataacttattactaaatttmtatatatatataaatttagtgagctcatcactgagctcatcaatcacaccaagggcagaaaactaataggtgtcaaaacctggcttggacaactaccactccttctctacctccccaaactctgagccagcagatctgtgcttggctgctggatctccatggtcctctccaactaacagacaagacaaaaccctgctttgattgttt

SEQ ID NO: 342496 - DNA, 446 bp, Homo sapiens
cattgtggcttgtaattcagggcattttacctaattcataacttattactaaatttatatatatatataaatttagtgagctcatcactgagctcatcaatcacaccaagggcagaaaactaataggtgtcaaaacctggcttggacaactaccactccttctctacctccycaaactctgagccagcagatctgtgcttggctgctggatctccatggtcctctccaactaacagacaagacaaaaccctgctttgattgtttttcagttccatgaaggaaatgcaagttgacattttctcatttccaagacatgtactaacaacatgtaacatccccttattactcagctctgttcccatttcagagatcaccatacatcaatagtttcatagcgataatcacaatttcaatattgcgtgtcacctgttttggttttgctcaca

SEQ ID NO: 342497 - DNA, 446 bp, Homo sapiens
cattgtggcttgtaattcagggcattttacctaattcataacttattactaaatttatatatatatataaatttagtgagctcatcactgagctcatcaatcacaccaagggcagaaaactaataggtgtcaaaacctggcttggacaactaccactccttctctacctccccaaactctgagccagcagatctgtgcttggctgctggatctccatggtcctctccaactaacagacaagacaaaaccctgctttgattgtttttcagttccatgaaggaaatrcaagttgacattttctcatttccaagacatgtactaacaacatgtaacatccccttattactcagctctgttcccatttcagagatcaccatacatcaatagtttcatagcgataatcacaatttcaatattgcgtgtcacctgttttggttttgctcaca

SEQ ID NO: 342498 - DNA, 560 bp, Homo sapiens
gttttctgaatttgtgtgccatccctaggcagtagccatgcttatctgctctgtcttgatccaattttaaaatatgagctgttgaaataagtacaaagccctgtttgatacatggataytcatgagtcatggatgaggcttagctctattaaatccaactcacttacttcagattcagagaattttattgaatggcttcctgtgaggtagaattttaaaatatatttaaaacttgaggaagagctgcaagtagcccaggagattttcatgattatagagacacattacttgaggggccaactgcaagctggttcccactactcagtggaaagataacatggaacattccgctatctaaccaaagctgctgcacaggatataaaaaagcctcaaggtacagatctgatagcaaaagagacagggaactctgatctcttcctgcaacattatttgaacatccctgactattgagaacaatcccaactaatattggttaaaggaaagacaaacatggctctcaaaggataacataccatgaaggcctaggcaaagtctagcta

SEQ ID NO: 342499 - DNA, 560 bp, Homo sapiens
gttttctgaatttgtgtgccatccctaggcagtagccatgcttatctgctctgtcttgatccaattttaaaatatgagctgttgaaataagtacaaagccctgtttgatacatggatactcatgagtcatggatgaggcttagctctattaaatccaactcacttacttcagattcagagaattttattgaatggcttcctgtgaggtagaattttaaaatatattkaaaacttgaggaagagctgcaagtagcccaggagattttcatgattatagagacacattacttgaggggccaactgcaagctggttcccactactcagtggaaagataacatggaacattccgctatctaaccaaagctgctgcacaggatataaaaaagcctcaaggtacagatctgatagcaaaagagacagggaactctgatctcttcctgcaacattatttgaacatccctgactattgagaacaatcccaactaatattggttaaaggaaagacaaacatggctctcaaaggataacataccatgaaggcctaggcaaagtctagcta

SEQ ID NO: 342500 - DNA, 605 bp, Homo sapiens
ttgcgtgtcacctgttttggttttgctcacactgcttccttggagctactcaacaaatagtcaaatggccttcctgggactatgtaaaatatggaatgttttctgaatttgtgtgccatccctaggcagtagccatgcttatctgctctgtcttgatccaattttaaaatatgagctgttgaaataagtacaaagccctgtttgatacatggatactcatgagtcatggatgaggcttagctctattaaatccaactcacttacttcagattcagagaattttattgaatggcttcctgtgaggtagaattttaaaatatatttaaaacttgaggaagagctgcaagtagcccaggagattttcatgattatagagacacattacttgaggggccaactgcaagctggttcccactactcagtggaaagataacatggaacattccgctatctaaccaaagctgctgcacaggatataaaaaagcctcaaggtacagatctgatagcaaaagagacagggaactctgatctcttcctgcaacattatttgaacwtccctgactattgagaacaatcccaactaatattggttaaaggaaagacaa

SEQ ID NO: 342501 - DNA, 565 bp, Homo sapiens
tgccagagcagggtgctgggaacaatgaccgagcacaagtacataaactaataaacaccgtagctttgacctctatatatgaatcaccatgaaaactgaggggtctgaatcagtgaaggcatcctggtggcaaaggtcaatcattatcagattgcaggaccrgttataatggcaataatacagcaagtgagtccatggaaacaacagaatgatcagaatggccttttttccccttcttctgacttgtgaagaaagattgccttccttggacttaggaaaccccttagcttcttggaaaattcaaagaaggaagacacaggagagagccccaggggacaagattttctgttaaactggacattacaagactcaataactaattagaaaagtcaggccaggcatggtggctagcactttcagaggccgaggcagggggattacttgacctcaaaagttcaagaccagccagggcaacagagtgagaccttgtctctacaaaaaaaaaaaaaaaaaaaggaaaggaaaggaaaagaaatcaaagacatggctccttttatcccatgca

SEQ ID NO: 342502 - DNA, 565 bp, Homo sapiens
tgccagagcagggtgctgggaacaatgaccgagcacaagtacataaactaataaacaccgtagctttgacctctatatatgaatcaccatgaaaactgaggggtctgaatcagtgaaggcatcctggtggcaaaggtcaatcattatcagattgcaggaccggttataatggcaataatacagcaagtgagtccatggaaacaacagaatgatyagaatggccttttttccccttcttctgacttgtgaagaaagattgccttccttggacttaggaaaccccttagcttcttggaaaattcaaagaaggaagacacaggagagagccccaggggacaagattttctgttaaactggacattacaagactcaataactaattagaaaagtcaggccaggcatggtggctagcactttcagaggccgaggcagggggattacttgacctcaaaagttcaagaccagccagggcaacagagtgagaccttgtctctacaaaaaaaaaaaaaaaaaaaggaaaggaaaggaaaagaaatcaaagacatggctccttttatcccatgca

SEQ ID NO: 342503 - DNA, 565 bp, Homo sapiens
tgccagagcagggtgctgggaacaatgaccgagcacaagtacataaactaataaacaccgtagctttgacctctatatatgaatcaccatgaaaactgaggggtctgaatcagtgaaggcatcctggtggcaaaggtcaatcattatcagattgcaggaccggttataatggcaataatacagcaagtgagtccatggaaacaacagaatgatcagaatggccttttttccccttcttctgacttgtraagaaagattgccttccttggacttaggaaaccccttagcttcttggaaaattcaaagaaggaagacacaggagagagccccaggggacaagattttctgttaaactggacattacaagactcaataactaattagaaaagtcaggccaggcatggtggctagcactttcagaggccgaggcagggggattacttgacctcaaaagttcaagaccagccagggcaacagagtgagaccttgtctctacaaaaaaaaaaaaaaaaaaaggaaaggaaaggaaaagaaatcaaagacatggctccttttatcccatgca

SEQ ID NO: 342504 - DNA, 545 bp, Homo sapiens
atcaagaaatctctttaattttacctaatccccctttgacaatactatttgtggcaaacattaacatttgaggaattaagagtttcagagatacagttgccagagcttcccaatacaggtggcggtttcctctgggtggtacaaacttgcttgattcacttctatcaatggtgtcaggatcccagatgccaatgtcaggcactcctgctccaaatgggtcaccatggaaatgagctttgaattaagasagattgccttcaaatgcatttattttccttattattaagtagtccatgggtttttcccctaatacaagagaagagatttttatctttactgttagaaagctcagtatattctgtgtaagagagataggtttaaaaaacttaagaacaaatattttaaaaaccaaaactcagtaagaaatactattctcaattataatggtaatcccgggaccctagtgcagctctactttttaaatccatttttactggcttccacttaaatggctacttaaaattattttttattttagacaaaat

SEQ ID NO: 342505 - DNA, 545 bp, Homo sapiens
atcaagaaatctctttaattttacctaatccccctttgacaatactatttgtggcaaacattaacatttgaggaattaagagtttcagagatacagttgccagagcttcccaatacaggtggcggtttcctctgggtggtacaaacttgcttgattcacttctatcaatggtgtcaggatcccagatgccaatgtcaggcactcctgctccaaatgggtcaccatggaaatgagctttgaattaagagagattgscttcaaatgcatttattttccttattattaagtagtccatgggtttttcccctaatacaagagaagagatttttatctttactgttagaaagctcagtatattctgtgtaagagagataggtttaaaaaacttaagaacaaatattttaaaaaccaaaactcagtaagaaatactattctcaattataatggtaatcccgggaccctagtgcagctctactttttaaatccatttttactggcttccacttaaatggctacttaaaattattttttattttagacaaaat

SEQ ID NO: 342506 - DNA, 545 bp, Homo sapiens
atcaagaaatctctttaattttacctaatccccctttgacaatactatttgtggcaaacattaacatttgaggaattaagagtttcagagatacagttgccagagcttcccaatacaggtggcggtttcctctgggtggtacaaacttgcttgattcacttctatcaatggtgtcaggatcccagatgccaatgtcaggcactcctgctccaaatgggtcaccatggaaatgagctttgaattaagagagattgccttcaaatgcatttattttccttattattaartagtccatgggtttttcccctaatacaagagaagagatttttatctttactgttagaaagctcagtatattctgtgtaagagagataggtttaaaaaacttaagaacaaatattttaaaaaccaaaactcagtaagaaatactattctcaattataatggtaatcccgggaccctagtgcagctctactttttaaatccatttttactggcttccacttaaatggctacttaaaattattttttattttagacaaaat

SEQ ID NO: 342507 - DNA, 545 bp, Homo sapiens
atcaagaaatctctttaattttacctaatccccctttgacaatactatttgtggcaaacattaacatttgaggaattaagagtttcagagatacagttgccagagcttcccaatacaggtggcggtttcctctgggtggtacaaacttgcttgattcacttctatcaatggtgtcaggatcccagatgccaatgtcaggcactcctgctccaaatgggtcaccatggaaatgagctttgaattaagagagattgccttcaaatgcatttattttccttattattaagtagtccatgggtttttcccctaatacaagagaagagatttttatctttactgttagaaagctcagtatattctgtgtaagagagataggtttaaaaaacttaagarcaaatattttaaaaaccaaaactcagtaagaaatactattctcaattataatggtaatcccgggaccctagtgcagctctactttttaaatccatttttactggcttccacttaaatggctacttaaaattattttttattttagacaaaat

SEQ ID NO: 342508 - DNA, 563 bp, Homo sapiens
ttagccaatcggaattagtttagcctgtgcggtctaaccctagccaacaggagaacamcacagcagcagggccacgtgcatcagggatgagaaccccttcccctcccttgtccaagtgtgtgctcaccattgctccatctataagggcccacccttctatagaagtaacttgcgttgctgagaattaaaaggaaaattttatatttgagcgctatttatttagtggcaccaaaactttatatataacatttataaagagaaagaggttgaatggactcagttccacatggctgggaaggcctcacaatcatgatggaaggtgaaaggcatgtcttacatggcagcaggcaaacagaatgagaacaaagcaaaagggatgtccccttataaaaccaacagatctgtttgagacgtattcactactacaagagcagtatgggggaaaatgccaccatgattcaattatttctcaccaggtcccttccacaacatgtgggaattatgggagctacaagagctacaagtcaagatgagatttgggtgaggatacagccaaaccacat

SEQ ID NO: 342509 - DNA, 563 bp, Homo sapiens
ttagccaatcggaattagtttagcctgtgcggtctaaccctagccaacaggagaacaacacagcagcagggccacgtgcatcagggatgagaaccccttcccctcccttgtccaagtgtgtgctcaccattgctccatctataagggcccacccttctatagaagtaacttgcgttgctgagaattaaaaggaaaattttatatttgagcgctatttatttagtggcaccaaaactttatatataacatttataaagagaaagaggttgaatggactcagttccacatggctgggaaggcctcacaatcatgatggaaggtgaaaggcatgtcttacatggcagcaggcaaacagaatgagaacmaagcaaaagggatgtccccttataaaaccaacagatctgtttgagacgtattcactactacaagagcagtatgggggaaaatgccaccatgattcaattatttctcaccaggtcccttccacaacatgtgggaattatgggagctacaagagctacaagtcaagatgagatttgggtgaggatacagccaaaccacat

SEQ ID NO: 342510 - DNA, 563 bp, Homo sapiens
ttagccaatcggaattagtttagcctgtgcggtctaaccctagccaacaggagaacaacacagcagcagggccacgtgcatcagggatgagaaccccttcccctcccttgtccaagtgtgtgctcaccattgctccatctataagggcccacccttctatagaagtaacttgcgttgctgagaattaaaaggaaaattttatatttgagcgctatttatttagtggcaccaaaactttatatataacatttataaagagaaagaggttgaatggactcagttccacatggctgggaaggcctcacaatcatgatggaaggtgaaaggcatgtcttacatggcagcaggcaaacagaatgagaacaaagcaaaagggatktccccttataaaaccaacagatctgtttgagacgtattcactactacaagagcagtatgggggaaaatgccaccatgattcaattatttctcaccaggtcccttccacaacatgtgggaattatgggagctacaagagctacaagtcaagatgagatttgggtgaggatacagccaaaccacat

SEQ ID NO: 342511 - DNA, 576 bp, Homo sapiens
agtatcttatgtacaccaaggcctcataagtgaattgtcagaaaccaaacaggagtgagtctacaccttctggggagaacatgacgcttcaacaggcagagaaacaggcttctgacacactgagttggcagaaaaatctttgttgatatagaggttgcatttaaaccattgctctctaagctaaagtctacttttactagatcatctcctattggtactaattcttcactttgaatttgcatcaagccagacttcatgaccctggaccaaccatcagacggtcttttattcttgggccaagacatcctctctccacacagacggttttgtctctaccacttacttagaatgctctccaccaaacaagctcagctttttacgtgtttctcttcaagcacaacaaagggaactaaacaaaatactctggaaggagctggtccattytgtgagcaccaacaacatcccagataacgtttacatttgttctgcataaccctgatgaaggaatttcagtggaccaacagcaaatagaaactccgtgtcactgttcccttggatgcttccaaattatgtctt

SEQ ID NO: 342512 - DNA, 597 bp, Homo sapiens
ttcggtaagcatcgaatttataaacttctggttcctgttcttcctaatcacagtatagtcaataggatttttgtatttatctggaggaggctttgcactcatgaatactgtatcccgtcggttgtactcattgcaaaattatattaaaaaatggaaaaatttaatctctccctttaacgccataaataccagttaatgcaatttctgaggcaatttttaagtgttacatcccatacaacttgatgtgaaaaataccaataggctgtgagagtgagaaaccaagcaaactacactagtacttccccaaacggagtgaagaaagggtgcccaacagatataaaattccacgaaaatataatatgctatgtagatgatgactaaatttgcacataagttcaaggacaacttaatcaaatttgaaaacaatagccttaaaaaaactgaaaatttgttacttatattaaaagaaagttaaaagcaaaaaaaamccaaccaaacaaacaaacaaaacaaaacaaaacaaaaacacacccttcccaaggttgtctatgataaaggacgtttagaattgaagtgataatgaaacttttatgacag

SEQ ID NO: 342513 - DNA, 364 bp, Homo sapiens
gtgttgtgcatggttgccaccaatggtgaaggacaaatgaccacatctgccacggtgttttccctatattataatgcccccaaactaaatggaaggcacttagtgtgggtttttttttttttcctctttaaatactttcctccacaagtagctggctgtcctaaacaaaatacagtaaccagtcaggataagtaaaaagactagaagggacaatacattcaacrcctacctaccaagcacgtggtctttgccaggcactatggataggacaataccaaaggtgtcttgcctactccggagcagctcagagtgtgatggaggaggtggggaagggaaagattgtcatccataaatagaaagtaaa

SEQ ID NO: 342514 - DNA, 542 bp, Homo sapiens
gccttggtgagaagacatagattaggtggtaaagcaggacctgcattcggggaagagggaatagcatgtgcaaagccatggagttatgagaggacatggtgcattttaggaataataaaaaattcaatgacactttttaggcagcagatggggaaataagctgcggctagattgtagggggcacatgtgcacagctggagaaatgagaggttctccaacagtggggatgctaaagatttgtaatcaggagtgtgacaagctgaagcaagccatcagcgtaccttgtggcttatgcagggcttatgtagcagaattgtcarctatgggagaaaatatcaaccatctaggagtgaaggaagatgcttttctgaatttgaaattaacctccacatgatactatcattgaacatctgtaatgtgctgggctttggtgcatatgtagagaccttttttctcctgatgttgtgatcttgtaaccccctaaagagattgtactacagctagatagcagaggtttcactttttgaaatcctccactttga

SEQ ID NO: 342515 - DNA, 579 bp, Homo sapiens
gaaatcctgttgtacttctgacctttactgtgatctttggtcaagttatgatgttgtctagatatttgccccaccgaayctcatgttgaaatgtgattccccaatgttaaaggtgggacctggtgggaagtattaaggtcatggcgggtggatccttcataaatagcttggtgcactccccgtggtaacgagtgagttcttgctctgtgggttcaggtgacagctggttgtttaaagcagcccggcaccttccactctcctttttccttccattctcaccatgtgacatgtctgctgttctccagccttctgctgtgactgtatgcttcctgagacctcatcagaagcacatgccagcatcatgcttcctgggtagcctgcagaaccctgagccaagtaaaccacttttctttataaattatccagtcaggtaatttatagcaatgcaaaacaaactaacacaagttactttccctctctggacattatctttaaaaagatgatgtcaccagagcaccttcagcaatccttcctgcgccataaatatcttctataatcaagcaatctattagagattca

SEQ ID NO: 342516 - DNA, 579 bp, Homo sapiens
gaaatcctgttgtacttctgacctttactgtgatctttggtcaagttatgatgttgtctagatatttgccccaccgaacctcatgttgaaatgtgattccccaatgttaaaggtgggacctggtgggaagtattaaggtcatggcgggtggatccttcataaatagcttggtgcactccccgtggtaacgagtgagttcttgctctgtgggttcaggtgacagctggttgtttaaagcagccyggcaccttccactctcctttttccttccattctcaccatgtgacatgtctgctgttctccagccttctgctgtgactgtatgcttcctgagacctcatcagaagcacatgccagcatcatgcttcctgggtagcctgcagaaccctgagccaagtaaaccacttttctttataaattatccagtcaggtaatttatagcaatgcaaaacaaactaacacaagttactttccctctctggacattatctttaaaaagatgatgtcaccagagcaccttcagcaatccttcctgcgccataaatatcttctataatcaagcaatctattagagattca

SEQ ID NO: 342517 - DNA, 594 bp, Homo sapiens
cttctcaaaaagattaggtgaggtatagtccaagaaaatttaaaagacacccacccactaccactaacaagtaaaagatggagttaaaaactgttkagctacaacaaggaagagagcttaaatttcttccaagcacaaacactgatgcattattcctaggaagtttttttaactaaaattctgaaaaagaatacaatgtgtacaagacagtgagtctcaaagtctgcgcctctgactagccatatcagtatcattttaataaatttctagaaatgcagaatctcaggctctcaccccagggcaactgcatcagaatggaagtgagaagcccaggcatctgtgttgtgatgagccctccaggacatcctgaggcatattaaagtttgagaaatgctgatttaagtgaccaaagtgtccctgaacgtggcccctgtgcaatcaggcagagttttattaccgacagttcttttcctgtgcatcctcctcctcccttcttttggtagtcatggcaaaatttcttttggctaaccatccttcctccactacaaacgatttaggagagtttatccatcaaagctctgccttcatatgtaa

SEQ ID NO: 342518 - DNA, 594 bp, Homo sapiens
cttctcaaaaagattaggtgaggtatagtccaagaaaatttaaaagacacccacccactaccactaacaagtaaaagatggagttaaaaactgtttagctacaacaaggaagagagcttaaatttcttccaagcacaaacactgatgcattattcctaggaagtttttttaactaaaattctgaaaaagaatacaatgtgtacaagacagtgagtctcaaagtctgcgcctctgactagccayatcagtatcattttaataaatttctagaaatgcagaatctcaggctctcaccccagggcaactgcatcagaatggaagtgagaagcccaggcatctgtgttgtgatgagccctccaggacatcctgaggcatattaaagtttgagaaatgctgatttaagtgaccaaagtgtccctgaacgtggcccctgtgcaatcaggcagagttttattaccgacagttcttttcctgtgcatcctcctcctcccttcttttggtagtcatggcaaaatttcttttggctaaccatccttcctccactacaaacgatttaggagagtttatccatcaaagctctgccttcatatgtaa

SEQ ID NO: 342519 - DNA, 594 bp, Homo sapiens
cttctcaaaaagattaggtgaggtatagtccaagaaaatttaaaagacacccacccactaccactaacaagtaaaagatggagttaaaaactgtttagctacaacaaggaagagagcttaaatttcttccaagcacaaacactgatgcattattcctaggaagtttttttaactaaaattctgaaaaagaatacaatgtgtacaagacagtgagtctcaaagtctgcgcctctgactagccatatcagtatcattttaataaatttctagaaatgcagaatctcaggctctcaccccagggcaactgcatcagaatggaagtgagaagcccaggcatctgtgttgtgatgagccctccaggacatcctgaggcatattaaagtttgagaaatgctgatttaagtgaccaaagtgtccctgaacgtggcccctgtgcaatcaggcagagttttattaccgacagttcttttcctgtgcatcctcctcctcccttcttttggtagtcatggcaaaatttcttttggctaaccatccttcctccactacaaacgatttagsagagtttatccatcaaagctctgccttcatatgtaa

SEQ ID NO: 342520 - DNA, 562 bp, Homo sapiens
ggtagagggctgagcccaggaaaagcactgtgaggagggctcttacgagatcccccactaggcactggtgaggggatggggctcccccagtggcatcactaaggtaaactgagatgtatctatgttagatgtttccatgttagtcatttaagactcattttaactgcccagtgggttcactttgcccactgcctagacagagctgatttaycaacacaggggaattgcaagggagaaacagtaattcacacagaaccggctgtgcaggagaccggagttttattattactcaaatcagtctcctgagtatttgggcatcagagtttttaaagacacattggtgggtaggggcttgggaagcagagagtactgattgatcaggctggagatggaatcatagagggggtcaaagtgagtttttcttgctatcttctgtttctgggtgggatggcataaatgattgagccagattactggtctgggtggtgtcagctgatccattgagtgcagggtctgcaaactatctcaagcactgatcttaggttttacaatagtgatgtta

SEQ ID NO: 342521 - DNA, 562 bp, Homo sapiens
ggtagagggctgagcccaggaaaagcactgtgaggagggctcttacgagatcccccactaggcactggtgaggggatggggctcccccagtggcatcactaaggtaaactgagatgtatctatgttagatgtttccatgttagtcatttaagactcattttaactgcccagtgggttcactttgcccactgcctagacagagctgatttatcaacacaggggaattgcaakggagaaacagtaattcacacagaaccggctgtgcaggagaccggagttttattattactcaaatcagtctcctgagtatttgggcatcagagtttttaaagacacattggtgggtaggggcttgggaagcagagagtactgattgatcaggctggagatggaatcatagagggggtcaaagtgagtttttcttgctatcttctgtttctgggtgggatggcataaatgattgagccagattactggtctgggtggtgtcagctgatccattgagtgcagggtctgcaaactatctcaagcactgatcttaggttttacaatagtgatgtta

SEQ ID NO: 342522 - DNA, 517 bp, Homo sapiens
cccatgggttatgggttgcgcaagctggttctagacatttaaacagatttggagtaaaaaaagcaaattatggaaagatacacacattatgacacgatctatgtgagccaaaataaacacagaataatgtcatcaattatgtactctaaacatgaactggaaaaatatacaacaatactaatacagkggctgtttcaggggaacgtgagagggaatcaggattggaaacagtaattaaacaaaactttagtttatctttcatagtcttctcttttggattatctatcttctatatcatttttgtaattaaaaaaactataaccgtagaaattatacatagacttatgtattttaaaaaacaggaagtgattggctaactaccaacaaagattaattccaaatagcagaattatgaatgtcatcttctgttttgtactttttagatttcttttccaacaattaaaatgatccgtccctgaccaataaatgtaattaaaattctaaaacacagagccta

SEQ ID NO: 342523 - DNA, 517 bp, Homo sapiens
cccatgggttatgggttgcgcaagctggttctagacatttaaacagatttggagtaaaaaaagcaaattatggaaagatacacacattatgacacgatctatgtgagccaaaataaacacagaataatgtcatcaattatgtactctaaacatgaactggaaaaatatacaacaatactaatacaggggctgtttcaggggaaygtgagagggaatcaggattggaaacagtaattaaacaaaactttagtttatctttcatagtcttctcttttggattatctatcttctatatcatttttgtaattaaaaaaactataaccgtagaaattatacatagacttatgtattttaaaaaacaggaagtgattggctaactaccaacaaagattaattccaaatagcagaattatgaatgtcatcttctgttttgtactttttagatttcttttccaacaattaaaatgatccgtccctgaccaataaatgtaattaaaattctaaaacacagagccta

SEQ ID NO: 342524 - DNA, 517 bp, Homo sapiens
cccatgggttatgggttgcgcaagctggttctagacatttaaacagatttggagtaaaaaaagcaaattatggaaagatacacacattatgacacgatctatgtgagccaaaataaacacagaataatgtcatcaattatgtactctaaacatgaactggaaaaatatacaacaatactaatacaggggctgtttcaggggaacgtgagagggaatcaggattggaaacagtaattaaacaaaactttagtttatctttcatagtcttctcttttgsattatctatcttctatatcatttttgtaattaaaaaaactataaccgtagaaattatacatagacttatgtattttaaaaaacaggaagtgattggctaactaccaacaaagattaattccaaatagcagaattatgaatgtcatcttctgttttgtactttttagatttcttttccaacaattaaaatgatccgtccctgaccaataaatgtaattaaaattctaaaacacagagccta

SEQ ID NO: 342525 - DNA, 517 bp, Homo sapiens
cccatgggttatgggttgcgcaagctggttctagacatttaaacagatttggagtaaaaaaagcaaattatggaaagatacacacattatgacacgatctatgtgagccaaaataaacacagaataatgtcatcaattatgtactctaaacatgaactggaaaaatatacaacaatactaatacaggggctgtttcaggggaacgtgagagggaatcaggattggaaacagtaattaaacaaaactttagtttatctttcatagtcttctcttttggattatctatcttctatatcatttttgtaattaaaaaaactataaccgtagaaattatacatagacttatgtattttaaaaaacaggaagtgattggctaactaccaacaaagattaattccaaatagcagaattatgaatgtcatcttctgttttgtactttttagatttcttttccaacaattaaaatgatcygtccctgaccaataaatgtaattaaaattctaaaacacagagccta

SEQ ID NO: 342526 - DNA, 535 bp, Homo sapiens
gtaaagaaataataagaatttcagcaagagagaagtgctttaaagctaaggcaggttaatgggatgtgaagtgacggggtagcgrgaaagggaaggtgtggtcagggaaggccttttagacatgagttgaaactcaaaagatgaaagggatgaagaaggatacctgggccctgccttatttggatagccaccaaacaggacaatcccgaaaaagcaagtcaaaatcagcaacagaacaattctgctttctgaaagagctactctttaaaagttggccataaggttcattttctgctacttgagcctcatttttttcccattgatttacatcataaaatcgtgaacagggtttcatggaagatctctgtggacaaggctggacatacttggaagaaactggaagtaagaatgacattgcaaaggaagccaggacacagagactgatgctcaagaggccctctcttctcaattgacaccagccccactacactctgacccagtgattctcacatgcgtgcttacgaatcaaccagtg

SEQ ID NO: 342527 - DNA, 486 bp, Homo sapiens
ataaattataacctttccttttgtcctcattaacagatgctgagttttgacatttatcacccttggaaattctccggagtgtcttcaagatttgtgtttcaacccttgaaggctgttctgaatctcttttgcaagcaatattcactccattggtttcttaaactgaaatatctaaagcaggaaatgacagtggaccccattattataaattaatcactggtgaagacagaaaatttgccatcacattatggatagagaagaactcaattcccagttgtaccttctgagactcaatgtgtttcatgcacttgttaatcttccacagtcttaagatgacatagtggaagtatttggtargaagagaagggggatgttaatcagagctcaaaccaagatagcatgtaactgccgagctttaaagatttggttcttatcattgatgaattttaatttgtacattattaacactatgttgtaggtattgca

SEQ ID NO: 342528 - DNA, 572 bp, Homo sapiens
ggataagctttatgataattaccacaacacacttctaacttaaatgcaacatcatcagttctgttccaaaacccccgccagatttgttcgttcaactagcattatagatacagaacttgaactcaagggtctgaaagcaataggaattcaacagacatctggagcacagggaggccaccccaagttaagcacttccaatagggtaacacatayccgttaagcatccttgacatgcctgatgctgcattacctgatccattccttgcagcaaaaactggagtccatacattgatttccccattttacatataaggaaatcgaggctatgagagtttaagtaacccatctagggtcacacgtgtgaagggctgatatttaaatcaagattgagtcaaaggcccatgcaatcagctattgggcatggaactgttatgagataccatttccttattaaaatgttctcatttaacttgtttgaacttcagtttcttcttgagagttatgggaatgaaaggattagagcaggaatattttagttttattatctgatgagactttgaaaaatatcgtat

SEQ ID NO: 342529 - DNA, 552 bp, Homo sapiens
tattgaacttaaaagtcctaacaagataatcaacctaatggttcatgaacaaaattaaatgatttttaaagggcagaactcaaagcttccctcttattcttatactatatcgatttgttccattggtggggcagaatttatttyacagcttttgtttccaaagaattacagaacagacactgtcttagttcacccaggctgctataaaaaaaataccataaactgggtgacttacatacaacaaatttatttctcacagtactggaggctaggaagtttaagagcaagatgccaacagatcaggtgtcttccttgctctttgtcgtcttctcactgtgtcctcacatagtggaaagggcaaggcagctctcaggggtctcttctgtaagggctctattcccattcatgaggtctctgccctcagggtcaaatctcccaaattccccaccttctaatatcatattggtgataagttttcaatatgtgaattcagatcacagcagatataaatacatgtaataatttaagagatgacaaaaatatggaaaacta

SEQ ID NO: 342530 - DNA, 552 bp, Homo sapiens
tattgaacttaaaagtcctaacaagataatcaacctaatggttcatgaacaaaattaaatgatttttaaagggcagaactcaaagcttccctcttattcttatactatatcgatttgttccattggtggggcagaatttatttcacagcttttgtttccaaagaattacagaacagacactgtcttagttcacccaggctgctataaaaaaaataccataaactgggtgacttacatacaacaaatttatttctcacagtactggaggctaggaagtttaagagcaagatgccaacagatcaggtgtcttccttgctctttgtcgtcttctcactgtgtcctcacatagtggaaagggcaaggcagctctcaggggtctcttctgtaagggctctattcccattcatgaggtctctgccctcagggtcaaatctcccaaattccycaccttctaatatcatattggtgataagttttcaatatgtgaattcagatcacagcagatataaatacatgtaataatttaagagatgacaaaaatatggaaaacta

SEQ ID NO: 342531 - DNA, 598 bp, Homo sapiens
tatctccagtcatccttaaagatgaaacaagcctataatttgtgctcataactacttcatgtgaattttttctagatagcaaataatttttcataagtagatggttctatcaaattctagaaaacaaacagaattctatcaaattctaggaaacaaaccttctcacttgagaaggttaaccacttctccagcacaattattttcactattcattttacaaaagcagcagcaagaggaactacagcctagtgatttataaataaatattttcttaataagaggaattagtaacattcttgatgagtctacacaccaggtactttgctacagatatctatatgtattatcttaatcaccaccttataaagygggagctattaatatattacagttatttatcatttttaaagacaaattcaaggcttcaaatctatttcttctgcattttacattattgtatatacctcattgttttagctatttgagaacattttggattcagactttttctatttctgagcattaggccaacatgtgtgtcattatcaattttcgttctctgttttgtatgtatgtacatgtgtttgtctaacaaaaa

SEQ ID NO: 342532 - DNA, 560 bp, Homo sapiens
gagtacttttaaaagagacaaaagataggggaacacagatagttattgttggtggactggacaactaacctgtaagtagctacgtgaaggacataagaaaggactattgtctcaaatcacccctctcaaaaggtgagagaacaaaaactaaaaaagtaaaatatttatattatttaaaattatacaagtagctattagcataaccaaaaacaaaacagaaggaaaaaggaggaggtaataccaatgagctaaaccttcatggagtcagttaagatrtgaagtagcagacaaaccaaagttaaactgtcccgaaaagtaaataaatgaattaaaatgaacaactaaatcaggaaccaccagaggcatcactagagacacagcaggaatcttacacaagtcctatgaccaattcgatgttaacaaatttgaaaaccaaaaaaagacataatctatttaacaaaaccaaattaaaaaggaaaacacaatctcaacagttcatctgttacaaaaattgaacaaatatttaaacatcttcactacacacacacacacacacacgc

SEQ ID NO: 342533 - DNA, 560 bp, Homo sapiens
gagtacttttaaaagagacaaaagataggggaacacagatagttattgttggtggactggacaactaacctgtaagtagctacgtgaaggacataagaaaggactattgtctcaaatcacccctctcaaaaggtgagagaacaaaaactaaaaaagtaaaatatttatattatttaaaattatacaagtagctattagcataaccaaaaacaaaacagaaggaaaaaggaggaggtaataccaatgagctaaaccttcatggagtcagttaagatgtgaagtagcagacaaaccaaagttaaactgtcccgaaaagtaaataaatgaattaaaatgaacaactaaatcaggaaccacyagaggcatcactagagacacagcaggaatcttacacaagtcctatgaccaattcgatgttaacaaatttgaaaaccaaaaaaagacataatctatttaacaaaaccaaattaaaaaggaaaacacaatctcaacagttcatctgttacaaaaattgaacaaatatttaaacatcttcactacacacacacacacacacacgc

SEQ ID NO: 342534 - DNA, 560 bp, Homo sapiens
gagtacttttaaaagagacaaaagataggggaacacagatagttattgttggtggactggacaactaacctgtaagtagctacgtgaaggacataagaaaggactattgtctcaaatcacccctctcaaaaggtgagagaacaaaaactaaaaaagtaaaatatttatattatttaaaattatacaagtagctattagcataaccaaaaacaaaacagaaggaaaaaggaggaggtaataccaatgagctaaaccttcatggagtcagttaagatgtgaagtagcagacaaaccaaagttaaactgtcccgaaaagtaaataaatgaattaaaatgaacaactaaatcaggaaccaccagaggcatcactagagacacagcaggaatcttacacaagtcctatgaccaattcgatgttaacaaatttgaaaamcaaaaaaagacataatctatttaacaaaaccaaattaaaaaggaaaacacaatctcaacagttcatctgttacaaaaattgaacaaatatttaaacatcttcactacacacacacacacacacacgc

SEQ ID NO: 342535 - DNA, 560 bp, Homo sapiens
gagtacttttaaaagagacaaaagataggggaacacagatagttattgttggtggactggacaactaacctgtaagtagctacgtgaaggacataagaaaggactattgtctcaaatcacccctctcaaaaggtgagagaacaaaaactaaaaaagtaaaatatttatattatttaaaattatacaagtagctattagcataaccaaaaacaaaacagaaggaaaaaggaggaggtaataccaatgagctaaaccttcatggagtcagttaagatgtgaagtagcagacaaaccaaagttaaactgtcccgaaaagtaaataaatgaattaaaatgaacaactaaatcaggaaccaccagaggcatcactagagacacagcaggaatcttacacaagtcctatgaccaattcgatgttaacaaatttgaaaaccmaaaaaagacataatctatttaacaaaaccaaattaaaaaggaaaacacaatctcaacagttcatctgttacaaaaattgaacaaatatttaaacatcttcactacacacacacacacacacacgc

SEQ ID NO: 342536 - DNA, 572 bp, Homo sapiens
tctattctagtcttgataactgtgttataaatgtgttccaggcattcatttcaaagcaataatggtcatttataaacactcaactaagaaggagtaaaaacgaagttttcaaagaccacttgcatcaaaaccacttgtacatcttgttaaaatcattccatctgtgttcattctggacacgaaatagaatctgtgggaacgatatactcagcaatctacacttcaaatttaccctcgtttatcttacgtacaataaaatttgagaaccatggagctaaaggttgctcacctttctcattcagttcagaacacttttttgacttacaggaaataatttaaaagtacttttcaacctttaatatgatacaaatcatccggagatcttgttaaaaaaaatgcaaattctgattcagaaggtagagctcaagattctgcaatttaaaaaaatctcccaggcaatgctgattctgacagatctgragaccatccttagagtagcaagttgctagattacatgctgtaagataaagataaattgaatttgaaataaaataaattgaagcagaaatgta

SEQ ID NO: 342537 - DNA, 596 bp, Homo sapiens
tgaggtgatataacatgaagtgcacagaattacctatcaaatagtctttccaaaaatttttaacttgagtcaaatcaagctgccatacctaacttccagtgtatataaaatacagaagaaagaacaggttaaatggtaccatgggaaaccactgggcaaattcaaagctagcccagtattttaactagtcagtatcatggggagaaaagacagtagcaggattcttgaagaacaaaaggtataacctgttgtaaagattggatcttatttggatccttgaacagagtggttataaaatatttggagggaactactagattgaatatggtgtgagaatttgacactgagaaattatcaattgagtcccacgtgttaatagaaccrtaattatgtggggaaatacccttgtctaagattacagaatttaaggagtaaaatatctgtaaattgctttaaaatatttaataaaaataggaacgtacatagcaaaatattctattttcctgaatctttgaaaattttcttaataaaaagttgaaaattacacttataacctcagaacttttctgattaccctatccattaccctgtcacat

SEQ ID NO: 342538 - DNA, 615 bp, Homo sapiens
tcactcatttgtaacggcagcagcatctcaatgatatttctctaccaccatccaaactaggtacactgtgaaattttagcatctcttctttaaagcctactaatcttcttccttaaaaattgtcatgatttatttwaaaaaaagaataaatgtgaatagatttcctcagcagcagttgacagcctccatagtattccaaaagacagaaagatatcttcactgttaagtaccttttgacaggtgacttcacacacacaggcacagccatccttgtgaaggctttttcctgctcaaaaggcagcactggttcagagagtggatacatagaggcccaatgtgttcgtgtcacttgtgggcacttccttggtcctctgtaggtaggcataagtacagcagtttgttttattaccgtcagactttatttttaaaaatacatttgtattttgtgactataaaagaatgttttcttattgcagacaatctggaaaataaaaataaggaaaagctatcttaaactgcctacaatctctgaacatagaggaaacccttgctaacagtttgctcttttcccatagtctttttaaggtatatagaaagacagtttctttttcattt

SEQ ID NO: 342539 - DNA, 521 bp, Homo sapiens
ccacgtgttaatagaaccgtaattatgtggggaaatacccttgtctaagattacagaatttaaggagtaaaatatctgtaaattgctttaaaatatttaataaaaataggaacgtacatagcaaaatattctattttcctgaatctttgaaaattttcttaataaaaagttgaaaattacacttataacctcagaacttttctgattaccctatccattaccctgtcacatcaccttattttctttatggcactaatcaagattataaaattttttatttactgaagattctgacaccccccactaagaatgttagcttgatcagggaagggatctactgtcactagtcaccaatgttgtcctaataatggtacctgacacatagtcattttaaaaatattaaatagaacaaataactatgactaagtaagttagaagatgataaaatgccaakaacagtaagacacaagaattaaactgtagtaattaggcagtgagaggtctctgaagattttcagcag

SEQ ID NO: 342540 - DNA, 474 bp, Homo sapiens
aatttcttgggcttttccacagcatgatagtatatgtgtggttagacttctgacacagtagctcaggactccgagtgttccagtgaccagggtaraagctgcatgacttaggcacacggcgtcacttccactgtgctatatagttgaagcaatttaagtctgcccagattcaaggggaagagagttgaactcttagtgggaggagtcaaatttgcaatcatgttttgcaactgctgtgactggagaaatggtatacaaccagaaatactaccctggaatgactacttaaaatgagcacggttgttctgtttcatgcagatttgccatgaggcaaagcaaacttgaaacggagctgtcttcagaaagttttagtccttctagccctagttcctattctgttgattccttatcatgcagtgaagaatagtatataaattgtatcatgctaacagcataactaagaaaattttctaa

SEQ ID NO: 342541 - DNA, 474 bp, Homo sapiens
aatttcttgggcttttccacagcatgatagtatatgtgtggttagacttctgacacagtagctcaggactccgagtgttccagtgaccagggtagaagctgcatgacttaggcacacggcgtcacttccactgtgctatatagttgaagcaatttaagtctgcccagattcaaggggaagagagttgaactcttagtgggaggagtcaaatttgcaatcatgttttgcaactgctgtgactggagaaatggtatacraccagaaatactaccctggaatgactacttaaaatgagcacggttgttctgtttcatgcagatttgccatgaggcaaagcaaacttgaaacggagctgtcttcagaaagttttagtccttctagccctagttcctattctgttgattccttatcatgcagtgaagaatagtatataaattgtatcatgctaacagcataactaagaaaattttctaa

SEQ ID NO: 342542 - DNA, 535 bp, Homo sapiens
ttctctgccatgccattcttctgttcatctgctcgtctgctcatcttctccttctgaagtctagagtttggggtttatatgggtacagaatatggggcatggtaggccaaaggcaactttttgggcatgtaaaccggaatgcctgatctaatttagggctgcaggtttccaggcttgagggtggggtctttgtcagggaacccaccctcttctacccagtatttccctgtctcctgtccatatcaatacttagcaagacttattartactgaaatacctgatgcctgcctttttgatgccctgaccacacataacttattctatacttagacaaatgatgtgatggaaatcatgctataaaatactttatcagaatgaaaagaagtcgcagttgttacttttactgggcatcagaatcgcccaaaaggcttatcagtaatgtagattccagggtgcaaaaccccagatattttgcgtcatcagatgtggggcaacatagactgcctttctaagcataccagctgggtttgacaca

SEQ ID NO: 342543 - DNA, 570 bp, Homo sapiens
aaataatgcaggcatgattgactgaaggacacagaacagcttggtgcagtgtcagccacattcactacttgctttctacccatttcccggaggatggcccaccggtgggcttgctgtgatgtgctggaggaagagctgccaagaaaattcatcggttgtctgttctgggggctgtgatataaatatggagagcatgaggttgacaggagacctaagttctctttccagttctgtccctttctaactgtctgaccttgggagagccactcaaatctcctaggtgtccatgcatargtaggaggtagagctagcacagagttcagaggcatccacatgttgggtcttggatggtagagttttttttttttttttttttccctgtgcggtgcttcagataagatgaaatgtcacatgagacatctggaagctttgcctctgtttgaaacttggaagatcctatgaccttggtcctactcagcaaaaccccactagtgctgagtagctgttgctcactttagataccgtatccttggtcaccaccattcccgttgactcacataattcaggtgc

SEQ ID NO: 342544 - DNA, 582 bp, Homo sapiens
atccacatgttgggtcttggatggtagagttttttttttttttttttttccctgtgcggtgcttcagataasatgaaatgtcacatgagacatctggaagctttgcctctgtttgaaacttggaagatcctatgaccttggtcctactcagcaaaaccccactagtgctgagtagctgttgctcactttagataccgtatccttggtcaccaccattcccgttgactcacataattcaggtgccacatcaacttggcctccttggtcatgtgtgtttgtgacttccagaactcttttttgattgatcaaatgtctttgtttctaccttcctggttgcttcaagaatagactgagtttgccagataagaagtttctggataaataaaacacttgtattaacttttcacaatttttccatatacataatactggtcttcataactacgcctatttaagataaattcaattaggtttagtatactttaaaaaaatctgtaatttttatgatgttggagtttccgctttaaaatgattgttttgatataactttgaaataagatccaagtttcttttattttctta

SEQ ID NO: 342545 - DNA, 582 bp, Homo sapiens
atccacatgttgggtcttggatggtagagttttttttttttttttttttccctgtgcggtgcttcagataagatgaaatgtcacatgagacatctggaagctttgcctctgtttgaaacttggaagatcctatgaccttggtcctactcagcaaaaccccactagtgctgagtagctgttgctcactttagataccgtatccttggtcaccaccattcccgttgactcacataattcaggtgccacatcaacttggcctccttggtcatgtgtgtttgtgacttccagaactcttttttgattgatcaartgtctttgtttctaccttcctggttgcttcaagaatagactgagtttgccagataagaagtttctggataaataaaacacttgtattaacttttcacaatttttccatatacataatactggtcttcataactacgcctatttaagataaattcaattaggtttagtatactttaaaaaaatctgtaatttttatgatgttggagtttccgctttaaaatgattgttttgatataactttgaaataagatccaagtttcttttattttctta

SEQ ID NO: 342546 - DNA, 582 bp, Homo sapiens
atccacatgttgggtcttggatggtagagttttttttttttttttttttccctgtgcggtgcttcagataagatgaaatgtcacatgagacatctggaagctttgcctctgtttgaaacttggaagatcctatgaccttggtcctactcagcaaaaccccactagtgctgagtagctgttgctcactttagataccgtatccttggtcaccaccattcccgttgactcacataattcaggtgccacatcaacttggcctccttggtcatgtgtgtttgtgacttccagaactcttttttgattgatcaaatgtctttgtttctaccttcctggttgcttcaagaatagactgagtttgccagataagaagtttctggataaataaaacacttgtattaacttttcacaatttttccatatacataatactggtcttcataactacgcctatttaagataaattcaattaggtttagtatactttaaaaaaatctgtaatttttatgatgttggastttccgctttaaaatgattgttttgatataactttgaaataagatccaagtttcttttattttctta

SEQ ID NO: 342547 - DNA, 402 bp, Homo sapiens
aactttgaaataagatccaagtttcttttattttcttaaattatcaaaggaatcagaaataacttacagaaaatggtggggcgggggtygggggaagcgctggagctcactgttatttgctaatgtattgcattcctgctctctgtcttcagggagcctaggaaaatataattgttgggaaaaaagagcatcaggtaggagaaaaacctaacagattaagaaaaataaaatgagaagcactgatttagtaataggatattataacaatattactatataacatctgtgcttctcattttatataattatatgctgtatattttatatagttatagataatagagggttatttttaatcttaattgtaacaggaagcaaatatggcatctaccatgattttaa

SEQ ID NO: 342548 - DNA, 402 bp, Homo sapiens
aactttgaaataagatccaagtttcttttattttcttaaattatcaaaggaatcagaaataacttacagaaaatggtggggcgggggttgggggaagcrctggagctcactgttatttgctaatgtattgcattcctgctctctgtcttcagggagcctaggaaaatataattgttgggaaaaaagagcatcaggtaggagaaaaacctaacagattaagaaaaataaaatgagaagcactgatttagtaataggatattataacaatattactatataacatctgtgcttctcattttatataattatatgctgtatattttatatagttatagataatagagggttatttttaatcttaattgtaacaggaagcaaatatggcatctaccatgattttaa

SEQ ID NO: 342549 - DNA, 591 bp, Homo sapiens
ataccgtatccttggtcaccaccattcccgttgactcacataattcaggtgccacatcaacttggcctccttggtcatgtgtgtttgtgacttccagaactcttttttgattgatcaaatgtctttgtttctaccttcctggttgcttcaagaatagactgagtttgccagataagaagtttctggataaataaaacacttgtattaacttttcacaatttttccatatacataatactggtcttcataactacgcctatttaagataaattcaattaggtttagtatactttaaaaaaatctgtaatttttatgatgttggagtttccgctttaaaatgattgttttgatataactttgaaataagatccaagtttcttttattttcttaaattatcaaaggaatcagaaataacttacagaaaatggtggggcgggggttgggggaagcgctggagctcactgttatttgctaatgtattgcattcctgctctctgtcttcagggagcctaggaaaatataattgttgggaaaaaasagcatcaggtaggagaaaaacctaacagattaagaaaaataaaatgagaagc

SEQ ID NO: 342550 - DNA, 577 bp, Homo sapiens
tttagcatgatgttgctcttcaggcttacaaagagcacttagaagtaaagcttgcagagaaaactcagaaaacagcaaagcccataaaattcactctagtgcaaatcracgcttttaacttcagccttttaagttactccttcgtttcttatacaattggattcctaacttgcttaaagaagaagaaaaaagcgacagtgaaacatctatagaggcaaagggaaccattccctcttggttttcattcaaaggaaggccacatatttaaatatttcctgttttggtagaattattgaaggtatttctttatattttatttgttcgttcttttgttttaacctttctttatgctttgttttaattgtacttattataggtatcctatagctagctattattccatccttaacaaaaggatgcaataaaatggctagtcaacatgatagtgattttttgttcatatgtttatttttgcatttttcaaactttgcattcataagattgattagtactttttattatctactaatatggaattttaactagagtgtatattttgctaatgcttttatatttt

SEQ ID NO: 342551 - DNA, 577 bp, Homo sapiens
tttagcatgatgttgctcttcaggcttacaaagagcacttagaagtaaagcttgcagagaaaactcagaaaacagcaaagcccataaaattcactctagtgcaaatcaaygcttttaacttcagccttttaagttactccttcgtttcttatacaattggattcctaacttgcttaaagaagaagaaaaaagcgacagtgaaacatctatagaggcaaagggaaccattccctcttggttttcattcaaaggaaggccacatatttaaatatttcctgttttggtagaattattgaaggtatttctttatattttatttgttcgttcttttgttttaacctttctttatgctttgttttaattgtacttattataggtatcctatagctagctattattccatccttaacaaaaggatgcaataaaatggctagtcaacatgatagtgattttttgttcatatgtttatttttgcatttttcaaactttgcattcataagattgattagtactttttattatctactaatatggaattttaactagagtgtatattttgctaatgcttttatatttt

SEQ ID NO: 342552 - DNA, 542 bp, Homo sapiens
tgagatgggggctgaagccagggagccaagtggtctagctcagtggatcccatccccacgaagcccaacaagctcagatccactggcttggaattctcatggccagcacagcaatctgaagttgacctgggatgctggagcttggtgggggcaaggggcatccgccattactgaggcttgagtaggcagttttcccttcacagtgtaaacaaagcccccagggaagttcaaactgggtggagcccacaacagcttggcaaagccactgtcgccagactgcctctctagattccttctctctgaaacaaaggcagtagccacagtcaggggcttatagataaaactcccatctccctgggacagagcacttgggggaaggggcagctgtgggcacagcttcagcagactgaaacgttcctgccagctggctctgaagagagcagcagatttttcagcacagcatttgagctctactaagggacagactgcctcstcaagttggtcactgacccttgtgcctcctgactgggagacacctccca

SEQ ID NO: 342553 - DNA, 495 bp, Homo sapiens
gctataaatatgcatgtacaagttgttcttcatacaatgacttcttttcttctgggtagatacccaagattgggattactggatcaaatggtatatctacttttagctctttaaggaatctccacgctgttttccatagtggttgtaccagtttatcttctcaccaaccatgtaaaaatgtttccttttcatcatatacctgccaacatcaattattttttcattttttgactccggccattctttcaggagtgcagtggtattgtaatagsgttttgatttgtatttccctgataattagtgatgttaagcatttttcatatgtttcttggccatttgtttatcttcttttgagaattatctattcatgtccttagctcactttttgatggatttgtttgtttttttcttgctgatatgagttactgtagattctggatattagtcctttgctggatgcaaagattttcttccactctgtgggttgtctgttta

SEQ ID NO: 342554 - DNA, 565 bp, Homo sapiens
atggtcattttcaccatattgatgctacccattcatgagcatgagatgtgtttccatttgtttgtgtcatctatgttttctttagttttttttggttttgtttttgtttttytttgagatggagtctcactctgtcacacaggctggagtgcagtggcacaatctcgtctcactgcaacctccacctccggggttcaagcaattctcctgcctcagcctcctcagtagctgggattacaggtgtgtgccaacacacctggctaatttttgtatatttattagagacaggatttcaccatgttggccaggctgatcttgaattcctgacctcaggtgacccacctgcctcagcctcccaaagtgctgggattacaggcatgagccaccatgcctggccatcaactatgttttctttcagcagtattttgtagttgtccttgtagagatctttcacctccttggttaagtatattcctaactttttttttttttggatgccctttatttctttgtcttgtctagttgctctggctaggacttccagcactatgttgaatagaagtgg

SEQ ID NO: 342555 - DNA, 565 bp, Homo sapiens
atggtcattttcaccatattgatgctacccattcatgagcatgagatgtgtttccatttgtttgtgtcatctatgttttctttagttttttttggttttgtttttgtttttctttgagatggagtctcactctgtcacacaggctggagtgcagtggcacaatctcgtctcactgcaacctccacctccggggttcaagcaattctcctgcctcagcctcctcagtagctgggattacaggtgtgtgccaacacacctggctaatttttgtatatttattagagacaggatttcaccatgttggccaggctgatcttgaattcctgacctcaggtgacccacctgcctcagcctcccaaagtgctgggattacaggcatgagccaccatgcctggccatcaactatgttttctttcagcagtattttgtagttktccttgtagagatctttcacctccttggttaagtatattcctaactttttttttttttggatgccctttatttctttgtcttgtctagttgctctggctaggacttccagcactatgttgaatagaagtgg

SEQ ID NO: 342556 - DNA, 400 bp, Homo sapiens
tctctcgctctcttttatttttttgttctrcatgaatcttaaaatagttctgtgaggaaagtcatttttagtttgatggaaatagtattaaatctttaaattgcttagggaagtgtggccattttaacaattttgattcttcctatccacaagcatgaactgttttttcacttgtttgtgtcatctttgatttctttgaatagtgttttgtaattcttgttggagagatctttcacttccttagttagctgcatttctaggtattctttttgtggctacagtgaatgggattttgcttttcatttggctttcaggttgaatgttgttgtatgggaatgctactattttttgtacattgattttttttttgtatcctcaaactttgctgaagttgttagat

SEQ ID NO: 342557 - DNA, 400 bp, Homo sapiens
tctctcgctctcttttatttttttgttctgcatgaatcttaaaatagttctgtgaggaaagtcatttttagtttgatrgaaatagtattaaatctttaaattgcttagggaagtgtggccattttaacaattttgattcttcctatccacaagcatgaactgttttttcacttgtttgtgtcatctttgatttctttgaatagtgttttgtaattcttgttggagagatctttcacttccttagttagctgcatttctaggtattctttttgtggctacagtgaatgggattttgcttttcatttggctttcaggttgaatgttgttgtatgggaatgctactattttttgtacattgattttttttttgtatcctcaaactttgctgaagttgttagat

SEQ ID NO: 342558 - DNA, 400 bp, Homo sapiens
tctctcgctctcttttatttttttgttctgcatgaatcttaaaatagttctgtgaggaaagtcatttttagtttgatggaaatagtattaaatctttaaattgcttagggaagtgtggccattttaacaattttgattcttcctatccacaagcatgaactgttttttcacttgtttgtgtcatctttgatttctttgaatagtgttttgtaattcttgttggagagatctttcacttccttagttagctgcatttctaggtattctwtttgtggctacagtgaatgggattttgcttttcatttggctttcaggttgaatgttgttgtatgggaatgctactattttttgtacattgattttttttttgtatcctcaaactttgctgaagttgttagat

SEQ ID NO: 342559 - DNA, 400 bp, Homo sapiens
tctctcgctctcttttatttttttgttctgcatgaatcttaaaatagttctgtgaggaaagtcatttttagtttgatggaaatagtattaaatctttaaattgcttagggaagtgtggccattttaacaattttgattcttcctatccacaagcatgaactgttttttcacttgtttgtgtcatctttgatttctttgaatagtgttttgtaattcttgttggagagatctttcacttccttagttagctgcatttctaggtattctttttgtggctacagtgaatgggattttgcttttcatttggctttsaggttgaatgttgttgtatgggaatgctactattttttgtacattgattttttttttgtatcctcaaactttgctgaagttgttagat

SEQ ID NO: 342560 - DNA, 339 bp, Homo sapiens
cttgctttctctctctcctgccaccatgtaagaagatgcttgcttctcctttgccttctgccatgattgtaagtttcaggaagtccctctagccaagcggaactgtgagtcaattaaatctcttttctttataaatgacccagtctcaggtcacttayagcagtgtgaaaacagactaatacagacttcttaaacaatctattttttgtcatttgttcacccaccaccccatgcatcttcataacaagtaccctgttcttaaatacccacatatcacaaatttactgcttaaacattgttttctttcaagttccatgtgatttatttctacaaaagtga

SEQ ID NO: 342561 - DNA, 555 bp, Homo sapiens
tttcaaatgacatcacaggtggaggaccaatttaaaacaaagtccttttcatagcaaggcagtctttcataccattctatgaaaactgccatctatgtgaaaaaactttttgcttttaaattggtccgcagttgcctgtaatttgtttaatcttaaaaattggctcacaacacacttgtatcattaggtctatacacggcctgcattcattcatttatctactcatttattgctttttaaaaatgattaagcacctacaaactcaccaccctaaacaaaagctaacacmgtaacctacattaacctcagtctcttaccccactacatccttctattattcccaacctaaaaagtcgctatcccgaatcttatgcttgtcaattgtttgccttatttttaatagctttaatgattctatatgcactattataaagtattcttttattgtaattgcttttaactttattaaacaaggtatataactttattcagttaatattatgtagctaagattcatccagcttattgtatatcactgattcatttgttttgact

SEQ ID NO: 342562 - DNA, 555 bp, Homo sapiens
tttcaaatgacatcacaggtggaggaccaatttaaaacaaagtccttttcatagcaaggcagtctttcataccattctatgaaaactgccatctatgtgaaaaaactttttgcttttaaattggtccgcagttgcctgtaatttgtttaatcttaaaaattggctcacaacacacttgtatcattaggtctatacacggcctgcattcattcatttatctactcatttattgctttttaaaaatgattaagcacctacaaactcaccaccctaaacaaaagctaacacagtaacctacattaacctcagtctcttaccccactacatccttctattattcccaacctaaaaagtcrctatcccgaatcttatgcttgtcaattgtttgccttatttttaatagctttaatgattctatatgcactattataaagtattcttttattgtaattgcttttaactttattaaacaaggtatataactttattcagttaatattatgtagctaagattcatccagcttattgtatatcactgattcatttgttttgact

SEQ ID NO: 342563 - DNA, 580 bp, Homo sapiens
cacttccccaaactgaccttcctacccccagaaacatgattatttcagagaagatactgatacctcacagattgactctgtgggtgataaggctaagatcattttgtgaaaagtaattaggaagtccaagttcttgcagatcataaaatctacttatgctgattgagcagaaasaaaattaccacagagaattaggtagcttaccaaattttctggaggaccaggaatcaagctgagatctatgtaaccaagaacatgtggtcaagagaaatgcccaaccatcgtatgaaatgttctgaatgaaaccccactcctgacattcatgtcacttggtaccagtgatgttgagacttcttcctgaactgcccctggaagagctctccatctttctcatcatgcttggccaaagctctactctctctttgcggacacctccctgtaaggctcatactgaacttccaagtatcctggaggtgtgtgtctgtcttgtggcccattggctacccatataattctctgcaggggagactgggaaatgcagtcctctctgttcaggaaggtgtttctgactagagtagga

SEQ ID NO: 342564 - DNA, 580 bp, Homo sapiens
cacttccccaaactgaccttcctacccccagaaacatgattatttcagagaagatactgatacctcacagattgactctgtgggtgataaggctaagatcattttgtgaaaagtaattaggaagtccaagttcttgcagatcataaaatctacttatgctgattgagcagaaacaaaattaccacagagaattaggtagcttaccaaattttctggaggaccaggaatcaagctgagatctatgtaaccaagaacatgtggtcaagagaaatgcccaaccatcgtatgaaatgttctgaatgaaaccccactcctgacattcatgtcacttggtaccagtgatgttgagacttcttcctgaactgcccctggaagagctctccatctttctcatcatgcttggccaaagctctactctctctttgcggacacctccctgtarggctcatactgaacttccaagtatcctggaggtgtgtgtctgtcttgtggcccattggctacccatataattctctgcaggggagactgggaaatgcagtcctctctgttcaggaaggtgtttctgactagagtagga

SEQ ID NO: 342565 - DNA, 601 bp, Homo sapiens
ttaccaaattttctggaggaccaggaatcaagctgagatctatgtaaccaagaacatgtggtcaagagaaatgcccaaccatcgtatgaaatgttctgaatgaaaccccactcctgacattcatgtcacttggtaccagtgatgttgagacttcttcctgaactgcccctggaagagctctccatctttctcatcatgcttggccaaagctctactctctctttgcggacacctccctgtaaggctcatactgaacttccaagtatcctggaggtgtgtgtctgtcttgtggcccattggctacccatataaytctctgcaggggagactgggaaatgcagtcctctctgttcaggaaggtgtttctgactagagtaggagccataggtgcctacctgccacaagggagtagtttcagcatgctgttcacctattctcagaccttcctccatcttcaggacctctttccaaaatcaaaaaactagtcaagggaaaaggaagaaattcagtgatgttgagttttatggtacctaatatactttgggggcatttctaaatgcatgaatagtgtaggtaaaatgctaacttcttagaactcacc

SEQ ID NO: 342566 - DNA, 601 bp, Homo sapiens
ttaccaaattttctggaggaccaggaatcaagctgagatctatgtaaccaagaacatgtggtcaagagaaatgcccaaccatcgtatgaaatgttctgaatgaaaccccactcctgacattcatgtcacttggtaccagtgatgttgagacttcttcctgaactgcccctggaagagctctccatctttctcatcatgcttggccaaagctctactctctctttgcggacacctccctgtaaggctcatactgaacttccaagtatcctggaggtgtgtgtctgtcttgtggcccattggctacccatataattctctgcargggagactgggaaatgcagtcctctctgttcaggaaggtgtttctgactagagtaggagccataggtgcctacctgccacaagggagtagtttcagcatgctgttcacctattctcagaccttcctccatcttcaggacctctttccaaaatcaaaaaactagtcaagggaaaaggaagaaattcagtgatgttgagttttatggtacctaatatactttgggggcatttctaaatgcatgaatagtgtaggtaaaatgctaacttcttagaactcacc

SEQ ID NO: 342567 - DNA, 601 bp, Homo sapiens
ttaccaaattttctggaggaccaggaatcaagctgagatctatgtaaccaagaacatgtggtcaagagaaatgcccaaccatcgtatgaaatgttctgaatgaaaccccactcctgacattcatgtcacttggtaccagtgatgttgagacttcttcctgaactgcccctggaagagctctccatctttctcatcatgcttggccaaagctctactctctctttgcggacacctccctgtaaggctcatactgaacttccaagtatcctggaggtgtgtgtctgtcttgtggcccattggctacccatataattctctgcaggggagactgggaaatgcagtcctctctgttcaggaaggtgtttctgactagagtrggagccataggtgcctacctgccacaagggagtagtttcagcatgctgttcacctattctcagaccttcctccatcttcaggacctctttccaaaatcaaaaaactagtcaagggaaaaggaagaaattcagtgatgttgagttttatggtacctaatatactttgggggcatttctaaatgcatgaatagtgtaggtaaaatgctaacttcttagaactcacc

SEQ ID NO: 342568 - DNA, 641 bp, Homo sapiens
attccttcaaacaattgtgctttatagaagactgccagactgatgtggggccactagtttatgctggcatttgtggtcagggagaaattgtatgctaaccctattgaaaacaccatttttmatggcccttgtgacataggactaaatgaacatcaactgctattttatatcattggagccttaagtctaacaaatgcattttctcgggagccgcctttgggattttaaatctgagttggattattgttggtaaaatgtaaatttagacttttttcctgcaatttagtccaatatatacaagataggtctgttttcctagcagggtcaagcctattcttaagcagaggcaattgaatggcatagagtccttactaccttcctatatgtagtctggagcttgctcctcttagagccaggcaggcccacaagtgcttacagaagggatgggatggaacacttaaaagatggcattatattttctattcttactgatgtttatgttcaatccatatgggagctaaattttttcttgggctgtgccatatttcaacttatttatcttccttggagatcacaaatgtggtgagacacgtttttacttgtgcgcaatggaaaatagtcttaataattccatgtacttt

SEQ ID NO: 342569 - DNA, 641 bp, Homo sapiens
attccttcaaacaattgtgctttatagaagactgccagactgatgtggggccactagtttatgctggcatttgtggtcagggagaaattgtatgctaaccctattgaaaacaccatttttaatggcccttgtgacataggactaaatgaacatcaactgctattttatatcattggagccttaagtctaacaaatgcattttctcgggagccgcctttgggattttaaatctgagttggattattgttggtaaaatgtaaatttagacttttttcctgcaatttagtccaatrtatacaagataggtctgttttcctagcagggtcaagcctattcttaagcagaggcaattgaatggcatagagtccttactaccttcctatatgtagtctggagcttgctcctcttagagccaggcaggcccacaagtgcttacagaagggatgggatggaacacttaaaagatggcattatattttctattcttactgatgtttatgttcaatccatatgggagctaaattttttcttgggctgtgccatatttcaacttatttatcttccttggagatcacaaatgtggtgagacacgtttttacttgtgcgcaatggaaaatagtcttaataattccatgtacttt

SEQ ID NO: 342570 - DNA, 629 bp, Homo sapiens
tgtcagaaccagatataagcatttccaggactaacaagctctccaggactaataaactggccctaaaataaggaagaaacagtattcaaacgtgaacttgatttcagccagatctccagggcctgagttcacactgggggccaattgttgactcttttcaccatatggctgtgcagttgatgcactatgcctgtgtctttgggaaacacaacagttttttatttgtttttattatgacatatttttctacaacaccctttgtcccctagtccctatctcagtagaacactagagagaaaattaccatgaatgtggaaaaaacccggaaatcagtttctaaaatataacacgtgaacactagttccaagagattaaaaagttacrtgaaggagagtttgtaaacaactgaatttgagaaatactgggttagatgtagcttactagagagctttgctcaaatgcttatagagagcccttaatatgttaatgtaaatggtggctctcaaaaagaatttagggttttccaaaacattcgaagcttcttagaatgcatgtgccaaacatcttatggaccagtgttgctaggaagctgctttgggtaatgctgtaatatatccctggataatttt

SEQ ID NO: 342571 - DNA, 636 bp, Homo sapiens
atttggccctttacagaaaaagttttccaactcctgcttaacgttccaggtctggtagccccatcccaaagttttttgaatgagtagatccacaggtgtgtatctgttggcatgcatacaacctcatgcctgcagaccacctccactgcacaygttctttctgtgcagtggttctctgaattctccatgactgcctttgatttttccttcagcagcttctcctccctagccctctactttctagggtgaatgttccccagcagcctgttgtctgtcttccacaattctccttggcacttcatatgtcatcttctatcctcctggcattaaactattccttggtgatctctcataactgcacatttaaccctcttctcagaattgcctccctacacttctggttacctagatcagagggtcctctgagctcttagtatgtctgaaaccaattcatcatcatttccctcaagccaactcacactctagactttccaattttctgttattggtaacatcagtctcccacgttgagatctcagtcattaataataatgatcatatttgtttcatattttacctcctggtcctgaaaaacaaatatagcttcaaacagaatttaactaaaaataatgaagg

SEQ ID NO: 342572 - DNA, 636 bp, Homo sapiens
atttggccctttacagaaaaagttttccaactcctgcttaacgttccaggtctggtagccccatcccaaagttttttgaatgagtagatccacaggtgtgtatctgttggcatgcatacaacctcatgcctgcagaccacctccactgcacatgttctttctgtgcagtggttctctgaattctccatgactgcctttgatttttccttcagcagcttctcctccctagycctctactttctagggtgaatgttccccagcagcctgttgtctgtcttccacaattctccttggcacttcatatgtcatcttctatcctcctggcattaaactattccttggtgatctctcataactgcacatttaaccctcttctcagaattgcctccctacacttctggttacctagatcagagggtcctctgagctcttagtatgtctgaaaccaattcatcatcatttccctcaagccaactcacactctagactttccaattttctgttattggtaacatcagtctcccacgttgagatctcagtcattaataataatgatcatatttgtttcatattttacctcctggtcctgaaaaacaaatatagcttcaaacagaatttaactaaaaataatgaagg

SEQ ID NO: 342573 - DNA, 636 bp, Homo sapiens
atttggccctttacagaaaaagttttccaactcctgcttaacgttccaggtctggtagccccatcccaaagttttttgaatgagtagatccacaggtgtgtatctgttggcatgcatacaacctcatgcctgcagaccacctccactgcacatgttctttctgtgcagtggttctctgaattctccatgactgcctttgatttttccttcagcagcttctcctccctagccctctactttctagggtgaatgttccccagcagcctgttgtctgtcttccacaattctccttggcacttcatatgtcatcttctatcctcctggyattaaactattccttggtgatctctcataactgcacatttaaccctcttctcagaattgcctccctacacttctggttacctagatcagagggtcctctgagctcttagtatgtctgaaaccaattcatcatcatttccctcaagccaactcacactctagactttccaattttctgttattggtaacatcagtctcccacgttgagatctcagtcattaataataatgatcatatttgtttcatattttacctcctggtcctgaaaaacaaatatagcttcaaacagaatttaactaaaaataatgaagg

SEQ ID NO: 342574 - DNA, 542 bp, Homo sapiens
tatgcttgtaaacgtctccgccaagcatgggctctagaagtgaggatttgatgggtcacagtggcttggctggaagccacagggtagctttaataactttgtataatctaatgatgtcatgcaaacagaaaaatttggattagaaggggaataagtaaatgaggtagtagcatgctcgacaggtgaagatggctgagagtgtgtcaggtaatcctctgcctagacatatttctccttcaaatctcattggaattggggcttctcttggtctctatgacaatattactaccacagcatgggtagtggagagagcactggagagagagtcagcaggtctgatttctaatctgagctcttccatcagctggctgtgcaagtttaggggcccttcaacttcatggatggcaatggctcatccattcagtgaaaaaactaaccaaggtaattaagaaggaggatggagaaaagaagaagaaaataataatttmcacttacctagttttttatttaatttgctgaacaacatgctatgtggtttgcac

SEQ ID NO: 342575 - DNA, 572 bp, Homo sapiens
agctttcttcttttataattaatagaaaattattacactgacagacaagagacttcatatttgagccaatgggaaaacttgacgttgaaaccaggggaaataatttagcctcaaatagagttgttaatgccaggataaaagcaaacaaatgtgctaatgatcttccttgagaatctgactgtgatgaattttgatgaattcccagatggaaaatatatcagttctccctgggctgggaattggacactagaatgagaaaatggtgaaatkggagtcagcaaaaagcactccgaagatcttatttccattttctagagaacaagaattctaaagagatagataattcccacttcaaagaaccagatctgtgtggttgtaagcatctatgacaaagttggtggtgggcatgaggcagggggatgtcctgatttccatcatagaatctgccattgctctgctggcctatagaattgatgagaggggagagtttgatacagcagctgccttgatattctcctgtgcagtcatgttatcacccaacaaacattcattgccatctcccatatgcccag

SEQ ID NO: 342576 - DNA, 559 bp, Homo sapiens
cacactcttacaccctatgcttgcagtgctaatacaatagactaaatgtttatgtcccccccccaaattcaggtattgaaatcctaacccccaaggtragggtattagatgtaggtcctttgggagataactggggattggtactcttataaagagaccctagagagatcccttgccccttctatcatatcaggagacagagaagatgctttctataaaccagaaagccaggcttcaccaggtgccaagtctcctggaatcttgatcttggactttccagccttcagaattgtgagacacaaatttctgttatttataagctacccagtttatggtgtctcattatagcattctagatggactacagcaactaataatctgggatgttccaggatgctttgcatgggtggatgagggaagggcaggtatttacaatatcacttgatagtagtataatatcaacatgttaaatagttatcaaatttcttcataagtaacagcagaggcttcatcagagattctcattgtttgggaaagggttatccactgaggaaccgaa

SEQ ID NO: 342577 - DNA, 509 bp, Homo sapiens
aaaacaaatttaagaaaggtcacgaggaaagagtttatggcagaatttgcaatttatttattactttataataaaaagatggcaatttttttaagaggccatggagcctgccactttgagcaaagcataaaagcaagtgattgtggatttcaccttctgactcactcatgaaatggtattgggcctcctcattttctccctctataagatagcatttgtattgctaatgttatttccatcactactgctaggagaaaattcttataataaaaatagttacagggccaggtgcggtggctcacacctgtaatcccagcactttggraggccaaggtgggcggatcacctgaggtcaggaattcaagatcagcctggccaacatggtgaaaccccatctctactaaaaatacaaaaattaggtcaggcacggtggcttacacctgtaatcccagcactttgggaggctgaggcaggaggatcatgaggtcaggagatagagaccatcctgg

SEQ ID NO: 342578 - DNA, 588 bp, Homo sapiens
atttcttcgtagtcttggggctagaaatccaagtgaaggtgtcagcaggctggtttcttctgagtcctctttccttggcttgtagatgaccaccttctccctgtttttttcacatgggctttcctctgtgtgtgcctgggtcctaatttccccttcctataaggacactagtcatatgttggatgaaggcccactctaatgacctcattttaacttaattacttctttaaggaccctatctttaaacacagtcacattctgaggtacyggggatgaggacttcagcatatgaaatttgggggatacacaattcagcacatcacatccactaaaaatcacttgtaggtttacttcctgttacatcatagatttttttctaataaactacgttcaggaagaattttaataaaccaacagttttcaaactggtgcccagaccagagaacctgttcgaaatgcagattttagggatccatcccaaaccttctgaatcagaaattctgagggtgggggctgagcaacctaatttttattaacatacctttctggtgactgcgatgcacactgaagtgtgagaacctctgaaat

SEQ ID NO: 342579 - DNA, 599 bp, Homo sapiens
agggcgttagtataaagtgtagagtcaggagaatgaagtagtttttagaatcctctttgattagatcagtgatcttctcaatcccggctgtgctttctaattacctggagagattttaagaccctaccccagatcatcaaatcagaatccctggggttcgtgaagcccagacatctgtatatttttaaagctccctaggtgactctaatatgcagcccggattgggtgcatgtcagaatggaccagagcatagagacggaactgtagagagcaggagatgagactggctgagtagaggacctcctaygcccacgaggcgtcctgcacttagccaagaatcctggaaagtttttaggcaggggtgacatgatcagggctgtctcactgaattattctttgttgaaaactgccctgtcgtatacactgagctcatacagattgagtaaacagaaacgaggcattgacttcctctgccatgtctagttaccatggaaacagaataccatcactcacaaggaagtgtttccagcttgttctctgtgatcactgctgctcctttcatatgttctccagataaaactgaaatgtctttttgccta

SEQ ID NO: 342580 - DNA, 554 bp, Homo sapiens
cttttctaattttgtattttctttttcttttctttctttccccctcgctaactgtattttcagccacgttaatatacaggtctcatttgttgggttggttggtttaaaagctcaccagcagagggtgctacttgtttgcttctaaaattcatttcactggggcttgagaaatggaggccctgctactraagaactgtccccacaacagcttgtataggcaagattttcagaatgcctaacggcaccccggacttcaaggaatctgattcactttgcttttggcgttatttatttagaaccaaaactgaaaacctgtagcttgcataaacaaaaatgcactgatttttatatttccggtaaatcactaagggggaaatgctaatcatttttgcatttcatggcttttgtccatacttactacatagcaacaaggaacccagaattccaacatcctcttcacccaccgaagaataaaataacataaagtaaaaagagtatttgctttgctataacaacgttagcctctaacaatgaaactttcacttaccctattt

SEQ ID NO: 342581 - DNA, 561 bp, Homo sapiens
ctcccaaataaaagcatgagaaacatgtacattaccaatggaattctaaaaaatatattctatgtggctcttctctcacttcaaagataaaggaaattttgagaaaaacgtgaatgatattttgggatgttatgaaaactttaagtactatttttagtactatgaataattcttgcaaagcatagagttatttactaagctggaatgccctggctttctccacatgttctgaaaagagctccattcctttcagraccataaacaatggatcgttagcttctggaatcattgcatctacatcctgaaataagaggagaggcactgttttgtgcctacatgtgatgaaggcctaaagaaaacccactagatttcaaagaaactttctagttaccttgaaaaataaaggccaaaaatttaaatggaaaaataattttgacatgtcaaggactggatggggagctggttatgaaaggcacggagaagcagcagaggtggttgaccagagacttaagatcaaggctgccttaatttttttgttaaaataaagttcacacagtatga

SEQ ID NO: 342582 - DNA, 645 bp, Homo sapiens
ttgctatggtgtgaatgtgtctcctccaaaatttatattgaaaaccccatagtttcaaatttatattgaaaaccccaattgtagtattaaaagatggggggtcttttagaaagtaattacatcatgaaggctattccctcatgaattaattaatgcctaatgaaagggctacaagaaactagcttaggamttttttgcctgtctgccttctgccatgtgaggatacagcatttgccccttttgccatgtgagggtgcagcaataaggccctcacaagacaccaaatgccagtaccttgttcttggacttcctaatcttcagaactgtgagaaataaatctatattatttataaattacccagcctgtgatatttagttataacagcacaaatggactaagaaaggtattctcagagacaaagaattatttggccagatgacaaagtaggtcaagaccccaaggaataaaagagtatcttcatattcttaggccaaggataaaataatatttattaagttttattcctgctattcacatcacgatatttcatcgtcagatacattaaagatgctgccatagattttcctagtactctaaaatttcttcgggtgagtttctgaaagatgagcccctcagaatgagag

SEQ ID NO: 342583 - DNA, 645 bp, Homo sapiens
ttgctatggtgtgaatgtgtctcctccaaaatttatattgaaaaccccatagtttcaaatttatattgaaaaccccaattgtagtattaaaagatggggggtcttttagaaagtaattacatcatgaaggctattccctcatgaattaattaatgcctaatgaaagggctacaagaaactagcttaggaattttttgccygtctgccttctgccatgtgaggatacagcatttgccccttttgccatgtgagggtgcagcaataaggccctcacaagacaccaaatgccagtaccttgttcttggacttcctaatcttcagaactgtgagaaataaatctatattatttataaattacccagcctgtgatatttagttataacagcacaaatggactaagaaaggtattctcagagacaaagaattatttggccagatgacaaagtaggtcaagaccccaaggaataaaagagtatcttcatattcttaggccaaggataaaataatatttattaagttttattcctgctattcacatcacgatatttcatcgtcagatacattaaagatgctgccatagattttcctagtactctaaaatttcttcgggtgagtttctgaaagatgagcccctcagaatgagag

SEQ ID NO: 342584 - DNA, 514 bp, Homo sapiens
tcattatgatagagagagaatgaggagatagaatacatcaatcaaaaagtaaataggaataaaaggtaagagaggggtggagcaaaatggcagaatatgactctccagcaattgtcctcccagagaaacattaatttgaataaccgtgcatgaaaataccttcataagagctaaggaaaacaatggagcaatcatagaacctggttgtagcacaataataagaaaatacacattgaagagggcaaaagggacagttttatattacccacatcaccaatgccaggtggcacagtacaaagagagttaccattaactggggagaaggagcgggaagcaagcacaggacttttccttggatccyaacaccaggctcattaaagtaaaatccagcaccaggcaggccctcatgaccctagatgccagcctggtacttgcaaactgagcctacagacctgccccagcaccaggcaggatcctgtagcctccagctttatgcctgctaggtggactcagt

SEQ ID NO: 342585 - DNA, 625 bp, Homo sapiens
gaggcagaggttgtcaacttgctcaaagaattcaactggcattattctcaagaacataccaggcattgttacatgacaaaccttgaaaattaattcaaatcagatatctaaacttaatgcatamgaatatttgacaaagcttggagaataagccaaatgaaggtctttcttcattaaaggctaatggggttacatctgttctgttaggcaaatggcaataactttaaaatgtaaaaagacctctagaactttcctagttagattttctgtaatacctaccaccatcctgaggattatatgcttctctcatttctttatatagttggttttacttctattcttgacagagtgatctctttatttcaccatagcagtttggaatggtgcctggtagactctagagtaatacacattctctctttcagccaagaatgcaaagaagacagtttagagaaagaagaggtcaccacctactagtgaaaccacctttgcaaaaattataacagtgagaaaattatgacagtgaaagagatctgatctgaccaactctcatcttgcctttaaccttcaaactgtacttggtcattcctgggcttgggccaaactactttggaataaatttagc

SEQ ID NO: 342586 - DNA, 625 bp, Homo sapiens
gaggcagaggttgtcaacttgctcaaagaattcaactggcattattctcaagaacataccaggcattgttacatgacaaaccttgaaaattaattcaaatcagatatctaaacttaatgcatacgaatatttgacaaagcttggagaataagccaaatgaaggtctttcttcattaaaggctaatggggttacatctgttctgttaggcaaatggcaataactttaaaatgtaaaaagacctctagaactttcctagttagattttctgtaatacctaccaccatcytgaggattatatgcttctctcatttctttatatagttggttttacttctattcttgacagagtgatctctttatttcaccatagcagtttggaatggtgcctggtagactctagagtaatacacattctctctttcagccaagaatgcaaagaagacagtttagagaaagaagaggtcaccacctactagtgaaaccacctttgcaaaaattataacagtgagaaaattatgacagtgaaagagatctgatctgaccaactctcatcttgcctttaaccttcaaactgtacttggtcattcctgggcttgggccaaactactttggaataaatttagc

SEQ ID NO: 342587 - DNA, 619 bp, Homo sapiens
gggaatggagtatggttcaaataccatagaatcttcctgtttttaccaagttgtgattagttttattagataaatgtttttctttttttcttttttttacttgctatatgctattaggactgctcccagatattttaaatagttgtgcggttttgttgttgttatcatttttaccaattttactgggaagtagattcatggaccatctcacatgccccatgtgctctatctcttgtgtctactttatgctggaagtggaaccttagatgtttcttaagtaagtcaacatatcagttgttactctccagggaattaaaggtttgctatgccttgtaatattatttagttctgctatttcttgactgtgtcattgattatgagaggtaggcaaaaayaatttttgtgtgtagcggggcttatatttgaaaattattaatatgcttttctgtttgtctttgtgaatgtaatgatattcaccctagtgtacctagggcattttttttgccagtagagagattagaatttgatatagaatgaaaataaaacagctaaggtaaaactcagcttccatctcaaaacattgaattttgtaatcccactgtagtttgagagccaagtt

SEQ ID NO: 342588 - DNA, 532 bp, Homo sapiens
tattttcctcaaaactcttttcatggtctcatcaatagtgcctaccagtgtttttttaaatctttgatatttagggtataacacaatagatgttaaatctacagctcgctatttaggtgtcaaatgcttgcttatagaatgaaatgtggaaaaatagctcatttgcaaaactagagagctccatgatagggttctataaacaratattttattgttttagaaactaagtttatgatagatacatttttattaaactctataagtgcagtctccttgcacgggtagtctccatctcctcccgtggttgtttaacaaggttaaaaagagcatttcatgatcttcttccttaaataagatacccatgactgcttaactaaatttgccaacacctaaacactattttgtattagttaaaatatgttataaaaagtaaataaaacatagttaacaattataaaaatttccatctgtcacatttggttgaatttacttacataatttgcaagtattgttttcattctatttatttctt

SEQ ID NO: 342589 - DNA, 640 bp, Homo sapiens
tacttcttctgggttccagtccttggcatggattactgtccagctagaactagctgtgactagccttgctgctccctgttggaggtagaaaaggatgcttcagaaaatacaaggtgccacactcttaaaatgaacacttccctaaataagttggaagcatttgggtaaaatggcacaaaacactttggagaagcacagtttgatttcagtgtgcaaaagatgtaaaaactaggagaaggtaaatatgttcttatttcccaccttcaatatacggtacttactactaaaatactaactatactaaattgcctcacacttcacgtttctccttagtgagggtaaagatagcaaaaaatacttgctaccaagatttggccatggagtactgtaatattttgcactccagatgaggctgcaccactaggctatctcatgcccattaacaattgcacaaggctcaactaaattaatgawgttcctgagtcagcctggaaacagccggtgcttttctaaaaacaaaaacactggaccaactagaaagatagctttcatactgttctccatggaataagatgggggtaaagttttcacacatgaattaaactaaactgaaataagctgggccattgttttaataaat

SEQ ID NO: 342590 - DNA, 640 bp, Homo sapiens
tacttcttctgggttccagtccttggcatggattactgtccagctagaactagctgtgactagccttgctgctccctgttggaggtagaaaaggatgcttcagaaaatacaaggtgccacactcttaaaatgaacacttccctaaataagttggaagcatttgggtaaaatggcacaaaacactttggagaagcacagtttgatttcagtgtgcaaaagatgtaaaaactaggagaaggtaaatatgttcttatttcccaccttcaatatacggtacttactactaaaatactaactatactaaattgcctcacacttcacgtttctccttagtgagggtaaagatagcaaaaaatacttgctaccaagatttggccatggagtactgtaatattttgcactccagatgaggctgcaccactaggctatctcatgcccattaacaattgcacaaggctcaactaaattaatgatgttcctgagtcagcctggaaacagccggtgcttttctaaaaacaaaaacactggaccaactagaaagatagctttcmtactgttctccatggaataagatgggggtaaagttttcacacatgaattaaactaaactgaaataagctgggccattgttttaataaat

SEQ ID NO: 342591 - DNA, 577 bp, Homo sapiens
tatcccactccagcagatgagaaatgggggctcagagagttcctatgaattggataaaacccggggccagcaagtggtggactccagcctggaacaagatcaaatacttcctttagggtgctgctctcacctaagctgtgaatctttctggctgggggaattaacacttcatattaagcattgccggccaggtctcaaagcagtggattccagaatgaaaattagaacagaatgtggttgtagaatacctgacaaataaaataatccattatgtacagctctcaagggtgagaagcataccttctcagctacaacttgtatttgttcacctcctgagtgtggaagaacaatccatgttgaggccatgcaagtccacctcaaaaagtccctgcaaagcctccttrccttgcaatagaacattgcagctgcttgtatttcagtcctttctccatggcatttctatttcacatcatgctgtggttcatgaggcagtttgcatagtggttaaagatcacagaccccaaaacaggcagagccagacagaacttgaagcgggatgtggttgcagttccttcgg

SEQ ID NO: 342592 - DNA, 581 bp, Homo sapiens
taaattttcccaacacttctgccttcatgatctcattgattgtacaacagggaggtaagaaaaatgttattattctctttttccagttgagagattttatactttagaggttacccagctagtgagcagtagagccaatcctggaactgaggcttattctatcgcatacatcgtgccatcacctaggctgcattctaaaaatgtgggcagacatgggacttgatagcaaaggctgtacagcccattcaaggtatatttttggccacctacccttataaggtatcgattagacatggttctagacgtggctatctttaccaccttctaaccctaaatggaaatttagagatcccacagaattaaaatrtatatgtggaaaaaccaaagccttcactcactgacctataacttttcttctatcctatctgatctttgctaaatcttatttattacaactggtcatttctagacactaactcagggaaatcacgtcgtttgaatgtgcttccgcattctcctgtgatgttctgataatttcaaaattagacaattcattacttagaaaaagggcagaggtagag

SEQ ID NO: 342593 - DNA, 538 bp, Homo sapiens
gcggtttataaacaacagaaatttatttttcactgttttggagtctgagaagtccacagtcaaggaggcagcaaatactgagctaaaatgagatcagtattttaataactggtaaggttatactgtgtgcgtagccttacacataatgtaatctgtgagagctctcttctggcttgcagatggccactgtcttgttgtgtcttcacatggtggatggagacagtgagctctctgatgtctcttataaggacactaatcctatcctatcaggtccctaccgttatgacctcataaccttcattacctccttctggtccctatttccaaatacagtcacattgagggtgggggcttcaacatatgaatttggtcgtggtgggggaagtacaattcagtccatagkaattggtgaacttgctttgaaatgataaaagtattctctttacatctgtttgttttactattattgcatgatagtcacgtgggaagaagcttaaaccttggcatttttatttttcttgctaggatatattcctga

SEQ ID NO: 342594 - DNA, 515 bp, Homo sapiens
aaactaacagtgtttatgagaaagaactatttatcataccattttatttgtggatatgtaactgattggttttcaatgagttgtttcagtattttataagttcagccacaggtttacataatggaagccttaagaattacttgaattactaagaaaaaattcccacttatatgttgatcatgttttgtttctttgcttttcctaacaagggctataatttgggaaccaaagcttttgtttgtaatttaacatgtgacccctagtacctaatagtgtaccggtataccctagaggaactccagaagtactcagtaaccatctattaacctaagaaaatgtccaaaattgtttcatttctccaaatcattgaggggggccatggttggttgttttcaggctgttttcctgtctccatgcagtttttagtccaagaaattgaacagcagagtttactctggtcattttcttctttatcrctgttccaagaccaccaggcaattattgctagcacttac

SEQ ID NO: 342595 - DNA, 572 bp, Homo sapiens
agaaaattattaaaaatcacttcatattgaggctcatttgaagtgtgtctgagtgtaggtgtttaatttagttttggtttgttttttgcaatctcaggtatctaaaggccagtgcaagatagtaatgaaaaagcatagcctctggagccacactacctgggataaaatcttgtctctgtcaattattagctgagtgatcactacagactaagttagtttaacctttttttgcctcagtttccccatctgacaaacaggtttttaaaaaactcaacagggctagtatggaacaatacttggcacaaagtaagtgctgtataaaagtttgctaaattatcaytagtagtcttgccttgcagtgcctgggtctataactggtttctaccctgatgggatgtatgcccttgggggccccagctctctgtgctcagctttgccatagcccatagctttgaaatgagaacatgtttacaggggccccagctagctagtacatttaaaaaatgtggaactttcaatagagatgcaagcaaagtcctttaaacttgttggagaaccatcattaaaggtct

SEQ ID NO: 342596 - DNA, 572 bp, Homo sapiens
agaaaattattaaaaatcacttcatattgaggctcatttgaagtgtgtctgagtgtaggtgtttaatttagttttggtttgttttttgcaatctcaggtatctaaaggccagtgcaagatagtaatgaaaaagcatagcctctggagccacactacctgggataaaatcttgtctctgtcaattattagctgagtgatcactacagactaagttagtttaacctttttttgcctcagtttccccatctgacaaacaggtttttaaaaaactcaacagggctagtatggaacaatacttggcacaaagtaagtgctgtataaaagtttgctaaattatcattagtagtcttgccttgcagtgcctgggtctataactggtttctaccctgatgggatgtatgcccttgggggccccagctctctgtgctcagctttgccatagcccatagctttgaaatgagaacatgkttacaggggccccagctagctagtacatttaaaaaatgtggaactttcaatagagatgcaagcaaagtcctttaaacttgttggagaaccatcattaaaggtct

SEQ ID NO: 342597 - DNA, 573 bp, Homo sapiens
actagtaaattgctacttcattagtaattattgaagcccagcatatttagctttaattcttaaaccagacttaaagtttaggtatcatccccatttcatagataaaactactgctcaaagagcttcagtgcattgattaactaatcaaatctagcatatggcagggtgcttgattgcaggttggtgtcgtagagttctttgtgttatttatgacctccacctatttccccactacctagcctaagtctgagtgtgcatattgtctgattcagcatttcacaaactagtgtctcagcagcactgctcagtagaagttaatggggtccttggaaagtctcagtacacactggaatatttagggctctggagacctagacagcaaagaaatatttctaattttatttagggctgctagaaactatgaggtggggtgtgttaggagaaattcttctgctataatggatgaatcacgtgttgccctaatattacctggagagcatttcttaaggtgygaaccaactacatcaggatcattctagtttcttgtacaaatagagattctcgtgtttctcc

SEQ ID NO: 342598 - DNA, 625 bp, Homo sapiens
cctgccctaaaatagctttaagatactcttgggtgattaaaatctgggccatatgaggtttggggtccataagctagatagagtaattcaatttatatataacggttttctggatttgcaagaataaacacacaaatctctaatagatttactgaaatctatatcccacataattggcttttattgttatcaaatggattattttatcatgtgcagaaagaacagaggcttcagatggcaatataattacattcatattatatatgttttattgtaatcrttttacacataaagaaaaagggttttcttatgagtcaacttcttttttaatccataaatatgatgcatcttggaaggaagaggaacatttaagggcagttgtcaaagtttgcctcaaataatttcattacatagcagcctgctgatttaatagtcttcaaaggcatatagttccataatagactgtaagtaatttattagaaatgcatacaccattgcaactgtttctcaaagatgttctctagtaattatttttgttttctattataggcataacattaatattctaaaaatctaaatagttgtatttataaattcatccaatgttaatgtattcatcagaagc

SEQ ID NO: 342599 - DNA, 625 bp, Homo sapiens
cctgccctaaaatagctttaagatactcttgggtgattaaaatctgggccatatgaggtttggggtccataagctagatagagtaattcaatttatatataacggttttctggatttgcaagaataaacacacaaatctctaatagatttactgaaatctatatcccacataattggcttttattgttatcaaatggattattttatcatgtgcagaaagaacagaggcttcagatggcaatataattacattcatattatatatgttttattgtaatcattttacacataaagaaaaagggttttcttatgagtcaacttcttttttaatccataaatatgatgcatcttggaaggaagaggaacatttaagggcagttgtcaaartttgcctcaaataatttcattacatagcagcctgctgatttaatagtcttcaaaggcatatagttccataatagactgtaagtaatttattagaaatgcatacaccattgcaactgtttctcaaagatgttctctagtaattatttttgttttctattataggcataacattaatattctaaaaatctaaatagttgtatttataaattcatccaatgttaatgtattcatcagaagc

SEQ ID NO: 342600 - DNA, 589 bp, Homo sapiens
ttatatatgttttattgtaatcattttacacataaagaaaaagggttttcttatgagtcaacttcttttttaatccataaatatgatgcatcttggaaggaagaggaacatttaagggcagttgtcaaagtttgcctcaaataatttcattacatagcagcctgctgatttaatagtcttcaaaggcatatagttccataatagactgtaagtaatttattagaaatgcatacaccattgcaactgtttctcaaagatgttctctagtaattatttttgttttctattataggcataacattaatattctaaaaatctaaatagttgtatttataaattcatccaatgttaatgtattcatcagaagcctttgttacaccaaaaagctcactmtaagctgtaatgatgaactaattgattaatcatattttttgcttaaatcttaatgcttaatattaaagtttaattaagtagcgtcttgatgacttaatataatttttaaacaattgaattgcttccagtgctaaaagcaagaattatttaataggattgtgtttgtccactattttaacctcttatttcccacagc

SEQ ID NO: 342601 - DNA, 602 bp, Homo sapiens
ggaaacaaggaagacgcagaaacagtgatcaaaagtaagaactcgtatgccagcacttacagtaaatacagaacaaacaaatttgttaggtaaaacagaagtctctcattttagtttaaaaagatttaccaatatgttgaatagttttgtcaaaagaaaaaaaaaatccaaggaataaaactggaaaattgaaaatttgtaatataggataaaaatagcaaacatgaaagaaaaaaatcctgagtttctaattgttacagataataatattttttcatataaaaatcagtgaaagataatgaaatagaaaatagtaaaagaaacaactgraaaagcacataaaaccgtcatcaacctaaaggcaaataacaaaatatcatctatcaagcataaactgactgagctccagggaaaaacaaataaaccaagtgttctgaaatagtttcaaatatttaacacactgctctcagaaactagtgcatagtgaagatgaaaaaaaagctggaaagatcaaagatatgaataacagtgtgagattaatcttttagttttatttacaattctatacttgctaataatgtatttttcctctcagacactag

SEQ ID NO: 342602 - DNA, 632 bp, Homo sapiens
ctctgccattatatccccaaaatggctggatttctgtaacctgccctgagagtttccctgaatgcctgttamaaattccaaaggcatttaacctgttgatgattttatataaaattattttaaactgccacagcatttcattacaagcaattgatacatccaagcaaataatgtattaccttatggattttgattgctaggtaaatcttctttggaaaacctaaaggcgaatacctccacccttccttgggactgccacatttctctgagtagccctgatgctaggttccaattttttaccagttcaatccatcagatggcatgtatttattcatggatgctcatgtcttaaatataaaatattggaaaaaattgttttagtgctttgaaataagtgttttttaaaaaagtgatttaaaatgtcattttagttatattacaagatcacttttctcctgtaaaaattcctgcttcttgcttcaattatttatgaagtatttcttcaatctctcactcattgcaaatttttatttagagctgactacatttcagacactgaatactgtagttaaatggtgaacaaaatagacatattctttgctgctttaaaacttcagtagaggatagcagta

SEQ ID NO: 342603 - DNA, 632 bp, Homo sapiens
ctctgccattatatccccaaaatggctggatttctgtaacctgccctgagagtttccctgaatgcctgttaaaaattccaaaggcatttaacctgttgatgattttatataaaattattttaaactgccacagcatttcattacaagcaattgatacatccaagcaaataatgtattaccttatggattttgattgctaggtaaatcttctttggaaaacctaaaggcgaatacctccacccttccttgggactgccacatttctctgagtagccctgatgctaggttccaattttttaccagttcaatccatcagatggcatgtatttattcatggatgctcatgtcttaaatataaaatattggaaaaaattgttttagtgctttgaaayaagtgttttttaaaaaagtgatttaaaatgtcattttagttatattacaagatcacttttctcctgtaaaaattcctgcttcttgcttcaattatttatgaagtatttcttcaatctctcactcattgcaaatttttatttagagctgactacatttcagacactgaatactgtagttaaatggtgaacaaaatagacatattctttgctgctttaaaacttcagtagaggatagcagta

SEQ ID NO: 342604 - DNA, 607 bp, Homo sapiens
tgtagtgtgattataagtcaccttcaatgcttgtcttaattgaataaacagtatgtacacaaagactacagggaatataaaggaagcattttagatagagtcttttaatatcagaagcaagacaaggataaccaccatcaccatttctaattgtcattgtacctgtctgtataccttgtyaatacaattaaataagaaaaaaataaggtagaaagattagaaaaattatatggatataaatgacagtgacttgttaatacttaggtaacaggaaggcaagaagatattcttcaaatgttgtttttcgagggaataagaaccaaatatacgaaatattctttagtaaaaggagggtatgagaaagtttattagtagaatgggaaagtgagtaaactagcaaactctagttggttctcagtactgaaagacaacttgaggtctgtggtcttgaataaagagataacaatcatggagttactcatgttttctcaggctattttcagttgattggatatgcgtgtggagatgcatatggatttagcagacttctggttaggcagtgtaagtgtaggttagagcaagatagtttgggaaatgagtagaaaga

SEQ ID NO: 342605 - DNA, 616 bp, Homo sapiens
ttttgctatattgcccaggttagactcaaattcttgggttcaagggattcccacacctcagcctctcaattagctgcgactgcaggtgtacgccaccacacctggctaaaataaaaatcttgtagtttgagaaatatttggcttacacgcatattgcataaccactatagtcttctgctggctacagtctctgtctagaattacccatgatcctgcttgttcaacccacctttaatgccaggcattagtggttctttttaaattgcttccaccttttgtcactgtataattccattctatatagtttctgaaatgtttgcccactatgtaaagatggcaaatctagattagttcaggccatatgtttatttgatcaggtatagccccagttccaggatgctacaatgtgccagtttctcttcattttcttcctgtttatttgcaactttygatttcactttattgatacaaccatttccatgtaaaaactagtttgtaccgaactcacaaatctagtattttagaccagttttcttccccaaggacaattaatatgcagccattaaataactccataatgacattttcaaacacaaacaagttgtttacacctata

SEQ ID NO: 342606 - DNA, 593 bp, Homo sapiens
tgcctgacttcatggattaagtagaattttcaacttttcaagcctcagtttgtaaaaaagaatgatgtttctttctttccttcttctgtttctttcttttgctccatcttctcttctttccrggcatttattcaacaatgtaataagactttacattaaaaatttaattgtcttcccttttctacttggtactaatagccataaacagccctaagctaaaaatattcttagagacctgattctattagtgatgctttggctgtgatttccttgaccaataacacaagtcaatcttaagagttcaaaggtcttagtcttataaacctccttaaaagccatttattacttttcaccagagcatgcacttaaaaatgaatcagacaaggcaatcttttcaagcttaaaataaatttattcagaacaagaatatatgatccaaaggtcaaagccaatctgcccaagtttgattttcacctccaggagttcataaacctagagctgtttacgcttatgtttctgaggaaatattttgatcatggttgtagtatagacatattttctttttaaagaaaagtatagcagtctggcaacaa

SEQ ID NO: 342607 - DNA, 554 bp, Homo sapiens
aagtagaattttcaacttttcaagcctcagtttgtaaaaaagaatgatgtttctttctttccttcttctgtttctttcttttgctccatcttctcttctttccaggcatttaytcaacaatgtaataagactttacattaaaaatttaattgtcttcccttttctacttggtactaatagccataaacagccctaagctaaaaatattcttagagacctgattctattagtgatgctttggctgtgatttccttgaccaataacacaagtcaatcttaagagttcaaaggtcttagtcttataaacctccttaaaagccatttattacttttcaccagagcatgcacttaaaaatgaatcagacaaggcaatcttttcaagcttaaaataaatttattcagaacaagaatatatgatccaaaggtcaaagccaatctgcccaagtttgattttcacctccaggagttcataaacctagagctgtttacgcttatgtttctgaggaaatattttgatcatggttgtagtatagacatattttctttttaaagaaa

SEQ ID NO: 342608 - DNA, 551 bp, Homo sapiens
gagacctgattctattagtgatgctttggctgtgatttccttgaccaataacacaagtcaatcttaagagttcaaaggtcttagtcttataaacctccttaaaagccatttattacttttcaccagagcatgcacttaaaaatgaatcagacaaggcaatcttttcaagcttaaaataaatttattcagaacaagaatatatgatccaaaggtcaaagccaatctgcccaagtttgattttcacctccaggagttcataaacctagagctgtttacgcttatgtttctgaggaaatattttgatcatggttgtagtatagacatattttctttttaaagaaaagtatagcagtctggcaacaaccttcatttttttccacttcatgaaatttttttatttataattttttctttaaacttattttttattaaaaccatgttcctcaagctacaagttgtgacctaatattctgtcattaaatcaatgtattaaatggaatacgcatctaataaattaagaarcaatagatatataataatatgaacaataa

SEQ ID NO: 342609 - DNA, 593 bp, Homo sapiens
aatgtattaaatggaatacgcatctaataaattaagaaacaatagatatataataatatgaacaataaaatagagcagttatattaaactgttcattaagtatttgttaggacagtttgctttctgtgtgtgtgtgtgtgtgtgtgtgtgtgtgtgtgttttgggttacaatataaaacatattctttatcatacttttgtcccagtttgtttaataaattacccagacttagtggcttaaaccaacagtaatcatttattatgtcttacaatttatgtggtcagaaatccagaaggaacataacttatttctgctctagatgcctgtggcatcagctgaaagacatgcaggctgaaggctgctgtcactttcattctcatccactctcatgtctggttcttgatgtgtgcatgtcttgatgatctcatttgggctgtttgccggaacacstacaagtgtcctctccatatgactgcagtttcctcacaagctggtggctgggttccaagggcaatcattgtaatagagtgagagacagaggcagcattgcttgtgttgacctagccttggcagtcacaaagtcacccgatgt

SEQ ID NO: 342610 - DNA, 628 bp, Homo sapiens
cttggtcatagtctttgggatattagcattgaatattttataagacatgaagagacttgtattaaaggaacccctgccaaaattcatgaccattaaaatagaagagatagaaaaaatgtttacatttagagagaagaaaaagtgtaatgagtattatatactcttaattcctggggaatgtatatcagtcagaatagacctggcgtctttgttctcttcttccttttagtagtagtttacttcatataactaggtaatcaaaaagttccaagttttaaatttattttatgaaatttatattaattgactacttcaagaattattttaggcactggaatggttattgagccaaataaagatagakagctcaaacagcatatagcctaatcaagagaaatacataataaatatgccatttcattcccaagctgaaatagaggtaagtacagagtattatgatgattcctagaaaaaggtgactgactctggctgatggatttggaaaggtttgacagaagagctgctttttaaattgcactgtgatatgtttctaatcataagcaattttttactatggttataggttatgttaccttagatccttagaaaatagttctcacaaatgtca

SEQ ID NO: 342611 - DNA, 624 bp, Homo sapiens
ttaaaactttccgtaagaactagaaggcagacatcttacgtgggtgaaagagaggactgtcaaacaaaaagtacatatatatatatatctcatatacatgttatatatatgatttatataaatattatatcttttatatgagatctatataaatatcatatatattttgtatatgatatatatatataaatatgcaatacatattttatataaatattatatatgacatcgtatatacatatatgtatatatgcacaygtatacaaatacatatataagtgtgtgtatatatacatacatatagtatggatatattggggtattcattcaagaactaattaaaaggctactcatactcttattctcttatttctaaagcaactaaaataaaataaaatatttgccttcaagttaaatctgctgtcggatttatcagagttcagtaagaaaaacagaaaccattccatgtattatatgaataaaatggcttttatgacttttggaaaagctggaggggtaagaagttcatagaagctgctcttgagagtcaattacttgattgtgaatatttcagcttgaatgatcaaagtgaatggttcttacaaagctagcatgaatccatag

SEQ ID NO: 342612 - DNA, 577 bp, Homo sapiens
acttttgctttgactagacctagtccaactcttgttagtcattgactagatagtgctttttcttcagggtcacactgatgaagccatgttgcatcttctgacacagttatttgaagaaatcttttatgatcttcaggatctttaaaactcccactgatagctatgctcttgtctacagctgatctgagtgcaatgaatttggcactgctcrggtggaaagtttgctcagccctaatgtttcattcagaattgtgtaagctcatcctattgagatgtctgtggtgttggctcttgtttcagttattaatcatcagtcttcttcaattagggcaaaaacaagatgaatttttttcttgcaaattgatgaggatgttctgccaccagggggttcatcttcaacatcatctagatccttcttaaaatgaattatttatttgtaaactgccaagttctttgagatcattgtgctcataaattttttgtaaggaactactcttctatctaagctttatcataaatttagtgtgtgtccttgcttcaattgcagcagaattcatattgctctgataggggctct

SEQ ID NO: 342613 - DNA, 556 bp, Homo sapiens
agatgccccaacttctagaataatcagacaataacttttaaacagccattataaagatgttcaatgatttaaagctaaagatagcaaaagtgagtgaatatttgagaaatctccatagagaaatgaaaacaacaaaaaagaaccacaaggaaactctagaatttaaaacyacaatcaatgtattaagacaaaatatctgtaggatatttttattcaaatattagttatttgtattttcagtttttaaaaaagtcagtctgtctagagatgtactaattttattgatcctataaaaagaatttttgtcattattgattttatttaagctttgtttcgattttattttattgacttcctctcttatgttttgatatggtttgaatctgtgtccctgcctaaatctcatgtcaaattgtaatccccagtgttagagatggggcgtggtgggaggtgattgggtaatgggggcggatttccccattggtgctgttcccatgatagtgagttctcgtgagatctggtcatttaaaaatgtgttgcatctcccctccgactt

SEQ ID NO: 342614 - DNA, 556 bp, Homo sapiens
agatgccccaacttctagaataatcagacaataacttttaaacagccattataaagatgttcaatgatttaaagctaaagatagcaaaagtgagtgaatatttgagaaatctccatagagaaatgaaaacaacaaaaaagaaccacaaggaaactctagaatttaaaaccacaatcaatgtattaagacaaaatatctgtaggatatttttattcaaatattagttatttgtattttcagtttttaaaaaagtcagtctgtctagagatgtactaattttattgatcctataaaaagaatttttgtcattattgattttatttaagctttgtttcgattttattttattgacttcctctcttatgttttgatatggtttgaatctgtgtccctgcstaaatctcatgtcaaattgtaatccccagtgttagagatggggcgtggtgggaggtgattgggtaatgggggcggatttccccattggtgctgttcccatgatagtgagttctcgtgagatctggtcatttaaaaatgtgttgcatctcccctccgactt

SEQ ID NO: 342615 - DNA, 556 bp, Homo sapiens
agatgccccaacttctagaataatcagacaataacttttaaacagccattataaagatgttcaatgatttaaagctaaagatagcaaaagtgagtgaatatttgagaaatctccatagagaaatgaaaacaacaaaaaagaaccacaaggaaactctagaatttaaaaccacaatcaatgtattaagacaaaatatctgtaggatatttttattcaaatattagttatttgtattttcagtttttaaaaaagtcagtctgtctagagatgtactaattttattgatcctataaaaagaatttttgtcattattgattttatttaagctttgtttcgattttattttattgacttcctctcttatgttttgatatggtttgaatctgtgtccctgcctaaatctcatgtcaaattgtaatccccagtgttagagatggggcgtggtgggaggtgattggrtaatgggggcggatttccccattggtgctgttcccatgatagtgagttctcgtgagatctggtcatttaaaaatgtgttgcatctcccctccgactt

SEQ ID NO: 342616 - DNA, 514 bp, Homo sapiens
tttgtggcaaaaataaaaatatcttctgaattattggtaattttaaagctaaaaaacttgttaagcaaaacgagtgaagatttgggagagtttatttggtaattgacaatttgcgtagctgttagctatgtaagaacgtgttctttatcaccacataaaaatcgctcttattgtctgtgaatattacaagatttcaaggtgtggtaataaatttggtsttagaaaaagcattagagaaagattaatgcagtgagtatatttatgatttaaaatatatagaaagaacaccactattttattttaattttattttttttcttcaacttttattttaagttcaggggtacatgtgcaggatacacaggtttgtaacatagggaaatgtgtaccaaggtggtttgctgcacaaatcatcccatcacctaggtattaagcctattgtccattagctattcttcctgatactctcccttcccctgcagccccctcaacagaacccagtgtgtgttgttcc

SEQ ID NO: 342617 - DNA, 580 bp, Homo sapiens
cactgcactccagcctgggtgacagagtgagaccccgtctcaaaaaacaaacaacaacaataacaacaaaaagccaaactctatagagatatattgtataamtctattaatatgaaatgtcctagattgatggaacctgatagcagttgaaaatatgaaccagatagagatttacaaccttgtgaatatatgaaaaagcactgagttgtacactttaaaaggtaaattgtatggcacgtaaatgatatctcaatctaaaacaagaacttaacattttagttttgggcatgttgagtttcagactgttatttgctatccaaatataaatgtcgagaaatcagcttctttgatccattagtacctatagttcatttccattacaatgaaataattttaattgattcttattccgattactctttggatacagtggttttggaaattcgtatcatgatatgtttttagttcactttccctaacaaaccttatcactgattttaccactattacctatactacataatttacaaccaccagtaccacatatacgattaataattgcaagaaatagctgacacaa

SEQ ID NO: 342618 - DNA, 580 bp, Homo sapiens
cactgcactccagcctgggtgacagagtgagaccccgtctcaaaaaacaaacaacaacaataacaacaaaaagccaaactctatagagatatattgtataactctattaatatgaaatgtcctagattgatggaacctgatagcagttgaaaatatgaaccagatagagatttacaaccttgtgaatatatgaaaaagcactgagttgtacactttaaaaggtaaattgtatggcacgtaaatgatatctcaatctaaaacaagaacttaacattttagttttgggcatgttgagtttcagactgttatttgctatccaaatataaatgtcgagaaatcagcttctttgatccattagtacctatagttcatttccattacaatgaaataattttaattgattcttattcygattactctttggatacagtggttttggaaattcgtatcatgatatgtttttagttcactttccctaacaaaccttatcactgattttaccactattacctatactacataatttacaaccaccagtaccacatatacgattaataattgcaagaaatagctgacacaa

SEQ ID NO: 342619 - DNA, 553 bp, Homo sapiens
gatgtaatatttatgcagacagttttggaaaagagaaggtttctttttttgtttttatttcaaagtttctttcctaattatatgcaacttagcgtactatcaatccttaatatattcatcttggcttgcaggtttattgcctgaaaatacagtaatcatgtatttggaaaaaccatcttaggtctaaaacrtttagtatcttgaaaaatgaaggtcttttgtttgtttgtttaggttttgaagctttttaggctttatgcctttaaaaaaaaaaaaaagctcacacattttattttatagtgtcagagctaaaagtcctattagtgacacttgaaattttatagtagctgccacttgccagtgatcattaagtgaataaagcatccatcagtgatatggaaatcagccccatttataaatcattctgtacaatctgttaccagaggtgagctaaatgagcattttaggaacatctataaaaatttaagaccatgagtaggaataatttctcaatctatttagtagttggtggtgatagtagtcttacaagaaa

SEQ ID NO: 342620 - DNA, 589 bp, Homo sapiens
aagctgttttcataccatgtctggataaaagaagtcatgtagtaaatattgaataaatctatgatgacgtacatgtgtatatctatacacctgtctctattttcaattaaattataaattccttgagagtgtagaattttcttttaatctttttatatctgctgctactcttagcatcgatctgggcatgtcataagttgcttaataaatttccagttttctttctcaatatatcctaaaatattagttgatatattacttttttcattattcaactgtacataattggtgaaatcagagatattctttgatagcatagtatatctttagtatatcagagatatactaaaaagtatagcatttttagaaataaaattattcttttttctctcattttctttctaaataaaaataaattatttggaaaatatctttcaaatwcaggaatatatattttagtatattttgccatagagtgagagagtaaaatttttatttttggaagatctccttctccccccaccccaccatgcaatggtaaaaccatttactgatgaagaaacttgctattcaaactgtgatctgcaca

SEQ ID NO: 342621 - DNA, 526 bp, Homo sapiens
cttggtaagaaaattgatagttgttcaggaattatataggcaatctatacagagagatcagcatgctgtgaagtttaaaaagtgaaaaattatatgaaagcatatcttgtgtgaattttccacattgatgttcatgtaattatatttttaaaggcaacatacaaaaattggtagaaggcagagctagaaagtgaccaaaatgcacaataacttctttaaaaayctggcctaaaagatgatttcatctattcatcttgtcagctagcccctcctgcatttcatttcttgccattcgaatgtgctatcccccttttttattcctcaatcattttttaatttcaattttcttaataattttaatcactttctgccatttcaattagtatgatgttcatttccttggtctttctgttagaaattatgttttttctgtgttttttttttcttcagtatagtgggtgcctgttacttttccttgcaaatcccatggcaatttagacagagtacgcattcaccaaatacttct

SEQ ID NO: 342622 - DNA, 620 bp, Homo sapiens
ttatatgatctagttgccactgtaagttctacatatatgttgatttaatttattctaaaatcaatcatatgacgtaggtactattttaaccacattttacatatgaggagtctaaaacataaaaaattaccctggtttgcctaagcttaaacaacttacaagtacgtaaatttgagaacctctgaagttgtaaacattaayttagttaatatttgtggactggatgaataaagggattaagagttggagcaacataagctacatattttcttcttcttgccactaaattgttattgtattaaaccatattttattaataaaaaattagatgatactgtttttctttaaatgtagagataaattctccctcacagaagggaaaaacacatcctcacttcaacctaaagaaataatattttgatctacttttgtcctgtaacacttcatattaactttttcaaatatcaatgttaaaaatagcgattttttttaactcgcctatatagcaagcattgtccttggtatggagagcattctatttatttaactgttgctaggttagtagaatgaaaaaaagggaagatttgtgtattagtcagttttcacactgctataaagac

SEQ ID NO: 342623 - DNA, 620 bp, Homo sapiens
ttatatgatctagttgccactgtaagttctacatatatgttgatttaatttattctaaaatcaatcatatgacgtaggtactattttaaccacattttacatatgaggagtctaaaacataaaaaattaccctggtttgcctaagcttaaacaacttacaagtacgtaaatttgagaacctctgaagttgtaaacattaacttagttaatatttgtggactggatgaataaagggattaagagttggagcaacataagctacwtattttcttcttcttgccactaaattgttattgtattaaaccatattttattaataaaaaattagatgatactgtttttctttaaatgtagagataaattctccctcacagaagggaaaaacacatcctcacttcaacctaaagaaataatattttgatctacttttgtcctgtaacacttcatattaactttttcaaatatcaatgttaaaaatagcgattttttttaactcgcctatatagcaagcattgtccttggtatggagagcattctatttatttaactgttgctaggttagtagaatgaaaaaaagggaagatttgtgtattagtcagttttcacactgctataaagac

SEQ ID NO: 342624 - DNA, 558 bp, Homo sapiens
gattaagagttggagcaacataagctacatattttcttcttcttgccactaaattgttattgtattaaaccatattttattaataaaaaattagatgatactgtttttctttaaatgtagagataaattctccctcacagaagggaaaaacacatcctcacttcaacctaaagaaataatattttgatctacttttgtcctgtaacacttcatattaactttttcaaatatcaatgttaaaaatagcgattttttttaactcgcctatatagcaagcattgtccttggtatggagagcattctatttatttaactgttgctaggttagtagaatgaaaaaaagggaagatttgtgtattagtcagttttcacactgctataaagacatacttgagactsggtaattaataaaagaaataggtttaactgactcacagttctgcatggctggggagacctcagaaaacttacaatcagggtggaaggggaagaggcacatcttacatagtggcaggcaagagagagccagcaagagcagggaaaactgccttataaaac

SEQ ID NO: 342625 - DNA, 571 bp, Homo sapiens
tcagggttcctggactgtgatacaaatagactccatgtacactaagttttcctcctcacgcctgtggaacttgagggctaaggggaccagtgagaatatgaagcttatgctgtctgctgttgtcatgattaacaaagtactttacctctgactcagcatccatgaagcttggccagactaactttttatcttacaggttggaaaaaattttagtcttaatattttttatttatttattttggatattttttctaattagagaagcagtattttcttagtgcagagaatttgaaaaagagataaaagaagaaaaaattatgatctctacaatgagaagcataataatttgattctagttcaaattttaatatttttatgtgtacacatatatattaggtaatcatgttaatagcataaattgcattttctaaactgcttttgtcctttaaattatatgaatatttctgtgtcattaactttttgaacaygattttgaatatctgcttagtattttttcattacaactaaaccattatttacataaccattctattattgaatatttaggtta

SEQ ID NO: 342626 - DNA, 590 bp, Homo sapiens
ccagtctgcctcttttatatgtaataagattgattgaccttttaccaaatcacaaacatgaaaagtcacaaacttaagttttatgtaaaattgttaaaaacatctcatcccatagttttaygcccttgtggcaacaaataaatgatgtcttgggaatggagtggtccaaaccatgatgtatcatgaactcctagggacacatgatcaaaccaattttttcccacttacatgaaggattgctatttttaaaaaataatcaaaaactttcaccattccagttttctgagccagtattttccaaacatattagattcaaaataacatcatgtttggattccacaacttttttaaacaaaattatatgaatgagagagtttaaggcacagatatttccatttataattagcagctgtgacctgattgatcaattaaggtctaagcctggctggaatgtaagttggactaagatggagatgcaagtgggtatatacagctctagtgaatctgaaaatccatgaggctgaagttcaaatgatatatcagtgtatctactaacagcaatctttgcctagtgtgttgattttacttaa

SEQ ID NO: 342627 - DNA, 590 bp, Homo sapiens
ccagtctgcctcttttatatgtaataagattgattgaccttttaccaaatcacaaacatgaaaagtcacaaacttaagttttatgtaaaattgttaaaaacatctcatcccatagttttacgcccttgtggcaacaaataaatgatgtcttkggaatggagtggtccaaaccatgatgtatcatgaactcctagggacacatgatcaaaccaattttttcccacttacatgaaggattgctatttttaaaaaataatcaaaaactttcaccattccagttttctgagccagtattttccaaacatattagattcaaaataacatcatgtttggattccacaacttttttaaacaaaattatatgaatgagagagtttaaggcacagatatttccatttataattagcagctgtgacctgattgatcaattaaggtctaagcctggctggaatgtaagttggactaagatggagatgcaagtgggtatatacagctctagtgaatctgaaaatccatgaggctgaagttcaaatgatatatcagtgtatctactaacagcaatctttgcctagtgtgttgattttacttaa

SEQ ID NO: 342628 - DNA, 590 bp, Homo sapiens
ccagtctgcctcttttatatgtaataagattgattgaccttttaccaaatcacaaacatgaaaagtcacaaacttaagttttatgtaaaattgttaaaaacatctcatcccatagttttacgcccttgtggcaacaaataaatgatgtcttgggaatgsagtggtccaaaccatgatgtatcatgaactcctagggacacatgatcaaaccaattttttcccacttacatgaaggattgctatttttaaaaaataatcaaaaactttcaccattccagttttctgagccagtattttccaaacatattagattcaaaataacatcatgtttggattccacaacttttttaaacaaaattatatgaatgagagagtttaaggcacagatatttccatttataattagcagctgtgacctgattgatcaattaaggtctaagcctggctggaatgtaagttggactaagatggagatgcaagtgggtatatacagctctagtgaatctgaaaatccatgaggctgaagttcaaatgatatatcagtgtatctactaacagcaatctttgcctagtgtgttgattttacttaa

SEQ ID NO: 342629 - DNA, 590 bp, Homo sapiens
ccagtctgcctcttttatatgtaataagattgattgaccttttaccaaatcacaaacatgaaaagtcacaaacttaagttttatgtaaaattgttaaaaacatctcatcccatagttttacgcccttgtggcaacaaataaatgatgtcttgggaatggagtggtccaaaccatgatgtatcatgaactcctagggacacatgatcaaaccaattttttcccacttacatgaaggattgctatttttaaaaaataatcaaaaactttcaccattccagttttctgagccagtattttccaaacatattagattcaaaataacatcatgtttggattccacaacttttttaaacaaaattatatraatgagagagtttaaggcacagatatttccatttataattagcagctgtgacctgattgatcaattaaggtctaagcctggctggaatgtaagttggactaagatggagatgcaagtgggtatatacagctctagtgaatctgaaaatccatgaggctgaagttcaaatgatatatcagtgtatctactaacagcaatctttgcctagtgtgttgattttacttaa

SEQ ID NO: 342630 - DNA, 567 bp, Homo sapiens
tgttgaattaattaacaaatacagatcctacaaggaacagtgttggacaaaggaggacactcttaactgtgttggtggaaaaaggagcggttcagggaataagatcaagtggacaccctgggctgagtmtaaggcatttaaggaaacttaatttttgtgtctccagcacctcacaaaattcttggcacatagtagatgctttaaaaatatttcttaactaattttatagagatcttcttctttccactaatacatgtaaaaatatactttatttggtggggaaaacccactctacttattctgtaccacaaaaataggcccagaaaaagtacaatcaagaaaaccagaagcaatacaatagtatatattctgttacaatctagccatactgctatctatccaacattctgctttatacaccctattccagctaaattctgctcagaaataaaggcatatataaatagattttcccagttgttcttccagggtaaatacaaatacctatgaccattcattttttgagctcctattgtgtcagactaaatacttaccatattaaagtaa

SEQ ID NO: 342631 - DNA, 554 bp, Homo sapiens
ataaaagtgctctaagaagtacaagaagtaaaaggtgaagacttttgaaacaagtggaaagacagaatatctcagcaaaggaataaaaaatataaataaatagaaattttaaagctgaaaaattctttgaaaatcactgaatggacttaatattgaaatggaaataataaaggaaagaggcagtgaacttgaagacagagcagtagaaattatgcaggctaataaagaggaaaaatcaaaaaaaaaaaaaaaaaaaaaaaggcagcgcctcagagatccaaacccatgccaaaaggtctaacatccatgtcatgagaaactcagaatataggagaaagagtatartacaggaagaatgtttgaagaaataagagccaaaagcttcccagattttggtgaaaaacaaatgtacagattgaagctgagacaaccccaaagagaataaatgcaaagatgtgtctatatcataatcaaactactgaaaactaaagaatatgagaaaatcttgaatgctgccagaaaaaaaaagtaatgtattacttatagaagaataa

SEQ ID NO: 342632 - DNA, 548 bp, Homo sapiens
tctactctggttctacaatggctttggttattcagtgatgattacttatatttttctctaagaatttgagcttttttgaaacayttcagtttgccttaaaatgaaaaaagatacaaatggcatgtatgagaaaatggttcagaatgtaaactgttccaagcttccatacttacagaaaatcaacataaaaacctgttccaatagccactacatttttttttatttgaaaagcaaataactttgagagctgctgggtagatttttctgtaagaaatcatgaaacatcccaatgtctaccatccacagtccctaagaactaaagttcctgatgacctacacctgtaacagtctggcccaactattaaacaacgcaggatgtttaacacaagtcttagtgctacattttgatatagactggtacaaattttgtaagctaaatatctagtacccagtgttcagggatgaactcctattaaccctgagctgcagccatctctgtaattcaccatatgacctcactctcactgtcaatattacagtttagtgtt

SEQ ID NO: 342633 - DNA, 601 bp, Homo sapiens
gatggacgggtaggggacaacagtgttatagatcctgtgattctccatcaatgatgaactaatcatctggaaccaggaagctattagatgcctgattccctcctccccatcctactcaccactggcctaggttgcttggatctcaattcatcccccacattttacagctgaaggaactgagactcagaagttaagcaatttgtccgttaactgttagataaagggagaaaacagatgcgatttatctgagcctcctggcttctaggtcagggatctttccacgtwccatgcctatgtagcttctacacgtaagcccccttacctgtgaagggaacagagatgggtcaactgcaccttgagaacttcgcccagtagtaacacattccttcaacaactgttccaaagttttcttcatttctaaggccaaatcattcaaccatgtctgaaaaagaaattggaaaataatataaacaagacataaaataaactggaaaataatatatataagacataaaataaatatacaatctactaactctatactgttatttcaagacggggtattatactttcctattgatcattacactcctaaaatgtg

SEQ ID NO: 342634 - DNA, 597 bp, Homo sapiens
agtgagaacgcatctctaaaaaaatatattttaaaaattaactgggcatggtggtgcacacctgtactcctagctactgaggaggctgaagcaggaacrctgcttgagcccaggagtttgaggctgcagtgaactatgattggacacctcaggattttaattttctacacgtgaacggaactccagttagcctgtaaaacatatcacaatagtttcctagtctacctacctccagtcctacccctcaaatccacataccaacaaatagacataccaaaagagaattatataatactttgctatataaaatccagcaacagctccccagtgcccacagaatatgagattctaaggtccctgatatggctcacatgaagattctgcctagttcttttattatctcatgtcacttcctacctcacatatttcctcttataatacctaattgcttgctgttcccagcaaacaacatcaatctctcctttagcttttgtgacactacaatctcttgtctttcctcccactccatttatgtcctttgctcctcatcctatgcttgaagtctaaattttgcaaagttcaagcctggtcttacac

SEQ ID NO: 342635 - DNA, 610 bp, Homo sapiens
gataaaactggccccaaatgaagaatgaatattttctaagaaaagttaatgaaattaaattgtttccaattagattaaaacacttcaagcaatatgacttacctgttgtaggaatgctaccaaagtactggtcccccatttatcaagtttaggtaggttgatatcttttaagtacagaacaagtctttcacagtcttttggtctgtatacacgaccagtattagtactgattaccatgcaagtctggctcagtttctgcaggagatgtcgagaagtggtttgtgcactacartgaactgtagcaatttgagtggaccggagttgtgaaaatgcgtacctgagcagcatcctacgaaaaatgcatgacatctgactttgataaaaatgcaaccaacaaaatacattttatactcaataagaaatttctatctcataaatatttcagtttctaaaatgtatatgatgataggaaaaatggtaaatacagatatggcttccataactatcaaagcaactttcttttagactagaaaaacataaattcatgttttaaggcattgtgaggactgttttcagccaaaaaaatcaaagttctcagaattaatctagt

SEQ ID NO: 342636 - DNA, 548 bp, Homo sapiens
aaattagggcatagatttgaacatcacaattaacaaacttgacactattaattaacctgtacagaaaattaaatgaagcaagagcaaaattcatacaattttcaagttccatagaacatttataaaaaataaccaaatgccagatcagaaagaaggctcaacagaattcaaaaaattaaaatactttacaataagttctatgactaaatggagataagctacatatcaataacaaatatgtaactagaaaatctccaaccacctgaaaattaaacaacaaaatactaaggaatttataagttgaaaaaagaaactgaaacttgggtaggaagctgaagaagggcktaaaggaaaattgatagacataaatgcatatattagaaaaaagaaaagactatcaatattttgattttccatttcaaaaatctagaaaagaccaaataaaatttggagaagtgataggaatgaaataacaaagagcaacatcaattttaaaatacagttcagaaaatcaacattaaaagttggttggctacgcacagacttgg

SEQ ID NO: 342637 - DNA, 600 bp, Homo sapiens
gaggggggatcgcaggctaaaaaacttcctcttggatactatgtccactatctgggtgacgtgatcaataggagtccaaacacagcatcatgcaatatacgcttgttaaacaaacctgcatatgtcccctgtgaatctaaaattaaaattttaaaaattgaaagttggtattttgaaaagattagtaatattgataaatccctatcaagactaatcaatgaaaaagataataaaaattatcaatatcaggaaaaatgaaacatcattacaaagccaacagacattgaaaagatgagaatattatttaaaatatatattatgtgataatttagataaaacaatcrcctaaaaaaatacgacttaaccaaagctgacagacacacaaaaaacacaatagaaacaaaacaaaataatcccagtgtttaaagagccatagctcacgtttaccagctctttacaatgaaagatagaacatcatgggaaattgtgcattatgtcagtacaaaggacttaatagaggcttgttagaggattttggcttgtgttaggcgatttataaataattcaagaaaaatgtacttttcctgggaattgggtgtg

SEQ ID NO: 342638 - DNA, 600 bp, Homo sapiens
gaggggggatcgcaggctaaaaaacttcctcttggatactatgtccactatctgggtgacgtgatcaataggagtccaaacacagcatcatgcaatatacgcttgttaaacaaacctgcatatgtcccctgtgaatctaaaattaaaattttaaaaattgaaagttggtattttgaaaagattagtaatattgataaatccctatcaagactaatcaatgaaaaagataataaaaattatcaatatcaggaaaaatgaaacatcattacaaagccaacagacattgaaaagatgagaatattatttaaaatatatattatgtgataatttagataaaacaatcacctaaaaaaatacgacttaaccaaagctgacagacacacaaaaaacacaatasaaacaaaacaaaataatcccagtgtttaaagagccatagctcacgtttaccagctctttacaatgaaagatagaacatcatgggaaattgtgcattatgtcagtacaaaggacttaatagaggcttgttagaggattttggcttgtgttaggcgatttataaataattcaagaaaaatgtacttttcctgggaattgggtgtg

SEQ ID NO: 342639 - DNA, 495 bp, Homo sapiens
tggtctctgggtcctttccagggaaagtgccaatttacatggctattgttttctgaaccaacataaggcttggatattttgtttttttgtttgtttttttcagtcaacgtgtacaacrgaatgaacatttggggtgcttggatacatggatatatttagatgcactcactgtgatatctttggttacttctgtaacaatcagataaagattcaggcaagatcaacctataaggtatacccaaatcctatcaatatttacagctgaaagaaatgtattatgacagaaagtgcaaaggaatctatatttttacaccaggcaggggtgctccacaattttatctgtctgaattttggaaaccaatgctgctgaaggtttactatgaccattcaaatttaaaccaggcagtggccaccatagattccatagtacctgacataacaatgaatataaaaactgctgtcataactgatacttagtatgcagactgggatatt

SEQ ID NO: 342640 - DNA, 495 bp, Homo sapiens
tggtctctgggtcctttccagggaaagtgccaatttacatggctattgttttctgaaccaacataaggcttggatattttgtttttttgtttgtttttttcagtcaacgtgtacaacggaatgaacatttggggtgcttggatacatggatatatttagatgcactcactgtgatatctttggttacttctgtaacaatcagataaagattcaggcaagatcaacctataaggtatacccaaatcctatcaatatttacagctgaaagaaatgtattatgacagaaagtgmaaaggaatctatatttttacaccaggcaggggtgctccacaattttatctgtctgaattttggaaaccaatgctgctgaaggtttactatgaccattcaaatttaaaccaggcagtggccaccatagattccatagtacctgacataacaatgaatataaaaactgctgtcataactgatacttagtatgcagactgggatatt

SEQ ID NO: 342641 - DNA, 621 bp, Homo sapiens
ttcctttggtattcttaccgtataatataagcttgaggctctgcatggtggcaatggtcattccaaaatcccagaaattgaagtaaactggactaagtttatagagakagattggaacaataacaatgggatgtatggctttaagagagtgtataacattctgtaggggaagatgccatacctcccaaggcactgtctcaggttactgaggaagctgttactgagaaaagaggaaaaattgaaatttcaaaacagaaagacaagggagtccagttatttttttctccttcttgtcctaatggcagatttcctcttggttttttattttgcatatccttttaccatttctccagataaagtatcattggtttctctcaatgtgcttaggccacagtgcagaaacagttcttgtctatctggtcaattaccttttattatcaacccaatgaaattttcattctatattgttttagattctggcaacacattgttctatatatttttcttcagtgagttaaagtttttataccacaccagctttctcgcttttgttctttttagtcctcatgaaccagaaatacttctgtgagcaagaaggaattatatctctgaataaaaaac

SEQ ID NO: 342642 - DNA, 600 bp, Homo sapiens
acgtcccattctctagctaaactgaactgtttgatgttccatgagtacgactcatgagttcctgcttggggagcttttgtttgtgccatcttgaatattctcaccaatgcccctctcttccaatacagcctgatgaaatcctagacaactcaaggtttatgtcatacttcttgaacagcctcctccatgaatagtctttttctttctccatggataaaaccttctccttttaatctgcaagggggtttcactgtacatcttttatgtcacttatcttaagctacctcaaattatagttttccatgttctaatatcaaatgtttttgcctcttgcagttgaatgttaagatggcagtactctccaaattgatctacagattcaacacattttaatcaaaattccagatactctctttgcataaattgacaatctgatcctaaaattcatatggacattcaagggacccaaaattgccaaaacgatctcaaaaataaacagagttggaggaattacaattycccatttcaaaacttaccccaaagttacagtaatcatgattgtgtggtattggaagaagggtagacatataaatcaatgga

SEQ ID NO: 342643 - DNA, 526 bp, Homo sapiens
  misc_feature (1)...(526): n = A,T,C or G
aaaaacatgtccatgcaaattcttgtacatgaatgttcgtaggagcatgagttatactaaccaaaaagtagaaaaaactcaaagtccatcagctgwcactgatanatacaatgtagtatatccctacaatgtaatattattgtgcaataaaaaggaattatgtactgatacatgctatgatgtgagttaatcttaaaaacattacactaacacaataagccaaaaggttgcatatcatatgattctgtttacaagaaaagtcttgaagaggcaatctatagagacacagattaatggttgtctagaggtgaggggttgagaggaaatgggtagtgactgcttataggtatggggtttcatttaggagtaatgaaaattgtggtgatggtttcaaaatgtattgtggtgatggttgcacaactctgtgaatatagttaaaaccactgaatcatacaccttaaataggtggattgtctggtaagcaaattaaatctcaataaaacttttttttttttcttagtgagga

SEQ ID NO: 342644 - DNA, 618 bp, Homo sapiens
cattttgtctttcatagtttataaaccaggaagtacattccatgacaatgtgaataatttcatcaccttttagtttcacatcttaaaaccaacctatagaattcatygaaactataaaaaatttgggctcgagaatgtcaacacgcataaaaaaatgggtgaaacaaagcaaagcagaacaaaacaagtcaaaacaaaaccatcacatacttcatggattcatggtgaaaacaaaagagagactcttcttaccgagtactccaagtcgatagttgactgtgatgacgatcacattgccataacttgccaagacacttccatcatataaatttccagtaccttccatatatgagccaccatggatatacaccatcactggtttgggacccccactgtcccgaatatctggaaaacaaatggttggcaatcgttcttatcctcaaaaataacacacaatgaagcagagaatacattttccatcttagtgaaaagagggcataatttcaatatagttcttaaactgctgtttttattaaagtgtttcttaagcaactcatatgaatagctattgtggaaatagcaataggcatccattgttttctatcaaaattttgttta

SEQ ID NO: 342645 - DNA, 618 bp, Homo sapiens
cattttgtctttcatagtttataaaccaggaagtacattccatgacaatgtgaataatttcatcaccttttagtttcacatcttaaaaccaacctatagaattcattgaaactataaaaaatttgggctcgagaatgtcaacamgcataaaaaaatgggtgaaacaaagcaaagcagaacaaaacaagtcaaaacaaaaccatcacatacttcatggattcatggtgaaaacaaaagagagactcttcttaccgagtactccaagtcgatagttgactgtgatgacgatcacattgccataacttgccaagacacttccatcatataaatttccagtaccttccatatatgagccaccatggatatacaccatcactggtttgggacccccactgtcccgaatatctggaaaacaaatggttggcaatcgttcttatcctcaaaaataacacacaatgaagcagagaatacattttccatcttagtgaaaagagggcataatttcaatatagttcttaaactgctgtttttattaaagtgtttcttaagcaactcatatgaatagctattgtggaaatagcaataggcatccattgttttctatcaaaattttgttta

SEQ ID NO: 342646 - DNA, 587 bp, Homo sapiens
ttggctcacggcaatctctgcctcatgggattcagcgattctccagcctcagcctcctgagttgttgagattacaggcatccatgaccatgccaggctaatttttgtatttttagtagagacagagtttcaccatcttggccaggctggtctcgaactcctgacctcaactgatctgcccacctcagcctcccaaagtgctaggattacaggcatgttacaatgtttttttgaagagatctgttttataatattctggtaatgtttcttaaaggtagaaactttgcttaaaataatctgtgtaaaatatttgattatgtagcaggtttccctagaggaatttaacttttcaataaaattttagcactaataaatatgcactgataggagtcataaaatgtatggagcactgattatgtgcyaggtaatgtactcagaactttacatctataattttcacaccagttgacaataagttgcttttgtctacattttcacttgaggaaataagccttagagacttttagattatagaatagatattctaggtgtaaaacttgagtttcaacagaatatgttgaaaagtaa

SEQ ID NO: 342647 - DNA, 614 bp, Homo sapiens
actaatgaaaaaaaatcaagagctagagttgttaagtaactgaccaaaagtctaacagcaggtagagtggtggagtcaggaaacaaaatcaagaaatcttactcctgctggatgcagtggcttgagcttgtagttccagctgctggagaggctgaggcaggaggatcacttgagcccaggagttggaggctgtagtgtgccatgatcacacctgtgaatagccactaccataatccagcctgggttacacagcaagacctcatttaaaaaaaaaaaaaaaaaaaaaaaaaaaaagacctgwttccagaacctgtgttcttcatagccagtaagaaagaaaggatgttggccgggcatgatggctcacgcctgtaatcccagcactttgggaggctgaggtaggcagatcacgaggtcaggagttccagaccaacctggccaatatggtgaaactctgtctctactaaaaaagtacagaaaattagccaggaatggtggtgtgcacctgtagtcccagctactcaggaggctgaggaaggagaatcacttgaacctgggaagcagaggttgcagtgagctgagatcgcgccactgcactctagcctggatgacag

SEQ ID NO: 342648 - DNA, 546 bp, Homo sapiens
ttaaataatcaagtgttccaaaattcacttccaatatctcattggagtggcttgcattagatttttagtttagcataatacaaacgtatgacattctcaaaaatgtaattcccctttaactgaaacattttccagaaagagaattatttttcagctatgctttctttatatctggtcatataatcaatagttttaaaagtgtgataactttttgttgaataaatatagtaatatcaaattagcgagaatgattccaaatcagtcacttttactgatttctgtattctcaaaagttatgtattcattttagttatataaaattaactaaatttcaatgggtaaaattcaataactttgcaatgacaactgtcataatatctagtttcttaaaaccattgtrttttaatgtttgtcaggttgaaaaagtcaaatatagtaacataatcctgtcgttacttaaaatgcattgaattctggcattgttctccggaatacacatattttttcatatccttgattcaagttttataaactaaattttacccc

SEQ ID NO: 342649 - DNA, 582 bp, Homo sapiens
caatcctaggtccccttacaaagaaacagacagatgatttaggtgataatgacggtgctgaagatgaaggtattttttttcaccaaatctatttgcatgacaagggcctcaatcactttttccacccctttctatttttttacttctggtctttttttgaagagttgtttttaattcctgtttttgatgtgttttgtcttcttgcttgttgttacatacaaatatagagtattaatttttttaaaamattaatattaagttttacattttgatgccaaccattaaaatgttttaaaaagaggggcattttttttttgttttcttgaactgacttttgatatgtttcatcccacattttgactgaattttgtccaccttctttgaactaacaatctctcccttgtagtctctctgtgcccattttgcatgttttctaatctatgtaaatattttcccgaatattaaaatgtgcttcatttttacattcgacatttgttttaaaaaaacacacacacccaataaaatgaaggacaagctgaaagctaatataaagtgtttcttgagcaatatattttaatgtaa

SEQ ID NO: 342650 - DNA, 606 bp, Homo sapiens
taacagtgtggcccaagctgaaattcaaaaccaaatctgggaaaacggaaaggttgatgatctttcctagggtctgtgtgcataaatgtaaatgtatggataatattccaaggagatttcyaaagaaaatgagaactgttttacacagaggcctaaaatactagagagaaaagtgaacagcacaaggcttaaaatattatcataaagccagaagttgacaggtaaattttataataggttttatgagactcagtacagaataaactttaggattcaggttcacagggaagtaaaattgcagggaataatatcaccattcttccatacagaacccaacagtgccctggctcctggaatgccaggaaattgaagaagctggaaaggcacctttggtatttgcaaaaggcgttagataaaaaaaaaaaaaagaggcatgaataaaattaagaaacaaaatttcttatgtagctcatcttattcaatactcacgcttgagcacaaaaggaatgccacctggacacatgaaggagtaaccgacaaaggctttgaagtaggtgggggttggggtagcatgtccttaagtcaagcagatagaaggtaagggtt

SEQ ID NO: 342651 - DNA, 639 bp, Homo sapiens
gagtttcagacatcgtattataaacttcagtatgtaattttgaagtacgtgggcttttatttacataatcacttggccatttgcacacctaawgaaagtaaggataattccttcatataatctaacaatcagactattttaaaatttctctgattttctccaaagtgccattttttttctgctgctttgtttgaatcaggacataaacgatatctgcacattgccattggttgttatgtatcaagtttttaaaattataaccctcttttcccatccaccttctttggctataattgccttaattaagaaactgagtcagattgtttctataatgttctacattttaaaggtatgtggtttttttacatagtttaattaaaccatagtaaatggtttaatttaatttactccaccatcacctatgtttcttgtaaactatcaattagctctaaaggcatgattagattcaggtacaacttttaattttttttacaagaatatttcttaatatttctgtgtaattcatcttccaacatatcaggataggatcagtatgtcacataatgctgagtttcctgctttaagtgattctgagattagacaatggatcaagatggtgatatctgatttcccattaac

SEQ ID NO: 342652 - DNA, 321 bp, Homo sapiens
caggagtctggatgaaatgaataaggcaatgagtgtagttttaaagacaaataaaaggattgagacctgtagcatgttcacatgctgacgaaaacaactgagtagacagtgaaaagtggatggtactgaaaagasgggtgggtagaatgtttttgaacaatgtccatgagttggcaaaagaggatggtatctaatatacaagtcaagggtttggcctttcttggagtataagggaagggatggggtagatggtaggtatcggaggagagtggacattccctataattgcttctatgttttcactgaattgggaagcaaagt

SEQ ID NO: 342653 - DNA, 529 bp, Homo sapiens
tactgttaacttccattgtaccccacatgggagtatgtccctcagaaatgtcccagaaatactagggatagcttaccatatacaaaagcactgagccctgggtcacccattatctactgagaccttgtaggcctgasaatctaacagaatagaaagagccttttctttccaataagtcttcactcagtaagactggatggaattttaactggagaatttagaaaagatggttcattcattcatttatattaatatttaaaattaatctaccatgttttaggaattatacttgtactggggacacaagaagcaaagtgaagctcctatttatgaagaaaatcaccatcctagccaggagtggtggtacatgcctataatctcagctgctcagaaggctgaggcaggaggattgcttgagtccaggagctgaccagcctgggcaacatagcaagaccccatctttaaaaacaaaaagaatggaaattaccatcctagagatgagtaacacataaataagtacaaaggtggt

SEQ ID NO: 342654 - DNA, 536 bp, Homo sapiens
ggtaaaaccccatctctactaaaaacacaaaaattagccgggcgtgatggcgcatgcctgtagtcccagctactcgggaggctgaggcagaagaatcgcttgaatccgggaggcagaggttgcagtgagctgaggtcacgccactgcactccagcctggtgacagagcaagacttcgtctcaaaaaaaaaaacaaaaaaacaaaacaaacaaaaaaacaaacaaaaaacttctctgaggatgttcaggatcttatcttgctgagaacatggcctagttcatgactgtgtgaaaactcattgtttaagaatatgacaattttataggcacataaacattctgttttccaaawttacttcaaaataaaagaaaaagtaggaaaatgctagagcaatgaatattatgagtattgtcttacataaatttaacaaattaagaaaagggtgatggatttttgtttactattcatattaaccaaaggtgaagttacctgcttgcttgaatcctaatctgtaaaaaaaaaaaaaaaaagtcatc

SEQ ID NO: 342655 - DNA, 593 bp, Homo sapiens
ttctctttctctaagcaattcagaagttcttggaaatattctgaaactctaccaaaatcattacccactttttctcacaagtttcawacaaaagcagcagtgattcattcattcattcgacattttttttttaaagtctctcttttgacaggcagggatttagaggctgggagtccagcatggaagcaggcagataaatccccagttcttattaagcgtatgttctaggagaatgaatttaagactagggttggcaaacatttttacaggtacacaaaattactaaacaaattttttcttgataaaatggtaacctaaatcagtaactaaacaaaccattatgtagaggttcaatgttaatttcctagataaatattgcaatgaacctgaagctggtcaaacaaaaagcaatacgagtaaatgtaaattatcaaaaatttggttatcatatctattttataaggctatcctcttggccaaacttgatgttaaaaaaaggataaaatgttctttttatacagtagattataaaacctttttttttttaattttccctggtcagtgtagaaagttgaccaggttacaatcaattt

SEQ ID NO: 342656 - DNA, 593 bp, Homo sapiens
ttctctttctctaagcaattcagaagttcttggaaatattctgaaactctaccaaaatcattacccactttttctcacaagtttcatacaaaagcagcagtgattcattcattcattcgacattttttttttaaagtctctcttttgacaggcagggatttagaggctgggagtccagcatggaagcaggcagataaatccccagttcttattaagcgtatgttctaggagaatgaatttaagactagggttggcaaacatttttacaggtacacaaaattactaaacaaattttttcttgataaaatggtaacytaaatcagtaactaaacaaaccattatgtagaggttcaatgttaatttcctagataaatattgcaatgaacctgaagctggtcaaacaaaaagcaatacgagtaaatgtaaattatcaaaaatttggttatcatatctattttataaggctatcctcttggccaaacttgatgttaaaaaaaggataaaatgttctttttatacagtagattataaaacctttttttttttaattttccctggtcagtgtagaaagttgaccaggttacaatcaattt

SEQ ID NO: 342657 - DNA, 569 bp, Homo sapiens
ttgtaatctctaaaattattttacccagggacataagttgcgtggatggtttaaaatacacacacttacacagatttgaagtcttggtgaagcaatatgcaaaattgtaagcttttctaatgattcttcttaatttattataatgcctttgatggaatgcaaatctgcaacgtggaatttctgctgyttgtaaaagaataacattgctaagtttaatttttacggagaaatattgacagcattgataaaagcttaaaaatagctttattgttatagttgtatatattaaaggtgaatgcattgtcaaatgtccaggtcactcacaatataaatgtgtatgtggtgggacccatacattggtggttctgtaatccaatcatagaaaatttttactgattaccaatttccatattctgtcaaatgcttcaaaaattccattttacatttgcatatctatttgtttcagatatttcacctatgggacttaaagtttctgaataggtcagtgaggcagaatttcctctttttgccctctatctctgacttgtgtttggtgctagaaaaatgca

SEQ ID NO: 342658 - DNA, 569 bp, Homo sapiens
ttgtaatctctaaaattattttacccagggacataagttgcgtggatggtttaaaatacacacacttacacagatttgaagtcttggtgaagcaatatgcaaaattgtaagcttttctaatgattcttcttaatttattataatgcctttgatggaatgcaaatctgcaacgtggaatttctgctgcttgtaaaagaataacattgctaagtttaatttttacggagaaatattgacagcattgataaaagcttaaaaatagctttattgttatagttgtatatattaaaggtgaatgcattgtcaaatgtccaggtcactcacaatataaatgtgtatgtggtgggacccatacattggtggttctgtaatccaatcatagaaaatttttactgattaccaatttccatattmtgtcaaatgcttcaaaaattccattttacatttgcatatctatttgtttcagatatttcacctatgggacttaaagtttctgaataggtcagtgaggcagaatttcctctttttgccctctatctctgacttgtgtttggtgctagaaaaatgca

SEQ ID NO: 342659 - DNA, 562 bp, Homo sapiens
caggtcccactaatattgtgagtttcctcattatgaaatgggaaatactaccttttctgcagaactattgagaggatgagatgaaataaatatgtgataaatagtattgtgtagctattacagcaggctctcagtaaaggttagttatcctttcttctctaccacaattactgcttccttttgttttaaaaaattcaggttccttcttcaatctgaaaaacagcatgagaaacatttttcattattgcataaggaaaccaaaaaaagaaaaatacaaattctgtttaaaaaataattcacctagaacaatattctgtacctataatttacatagaaatataaatatataaaggagatgtgcaaaatgagatggatttaggttcttgtattatgactgagttcaggaagtrgtcaaaaaattaaaaagacattttttgtaaagaacaatactgctctttgctaacagagtaatgaaaagataaactcactgaggaataaaatcataatcattatggtgttaaaatagatgatgtatatttttattaagaaaagtacaaactaa

SEQ ID NO: 342660 - DNA, 566 bp, Homo sapiens
tgcaaaactttcaggaatggttgttcttattttctattttataggggtaattacattttagaaggaaaatctcatttagagcttctgaattatcactggaattgataagcttaatgccttttcattccttctctctttccctttcccttttctctaatcattgttcccttttctgcagtagctttcagcagctgtactgtcagggasgaaggatacactcttttctccacaacagagggcctgggtggtgaaagtggaagatactgttccaggagagcttcaggcatattgcctgcaagtgtaccactttttctcctgggtaagattcaaggaggttcctaacttcaccttgaaatcttggtgcatgtttatgacaccacttttcaagttcactcttctgtatataaaccatttttgctgtgtattagaatgcagctctcttaatagtgactaatttattcagtcttcaaaaatgcatatggtcccaaaggtaataaaattatggcctttgacatttgtcacgggggaggaacactgtttgtgtaaaaattcctgcaaaaaagcat

SEQ ID NO: 342661 - DNA, 599 bp, Homo sapiens
gttcccttttctgcagtagctttcagcagctgtactgtcagggaggaaggatacactcttttctccacaacagagggcctgggtggtgaaagtggaagatactgttccaggagagcttcaggcatattgcctgcaagtgtaccactttttctcctgggtaagattcaaggaggttcctaacttcaccttgaaatcttggtgcatgtttatgacaccacttttcaagttcactcttctgtatataaaccatttttgctgtgtattagaatgcagctctcttaatagtgactaatttattcagtcttcaaaaatgcatatggtcccaaaggtaataaaattatggcctttgacatttgtcacgggggaggaacactgtttgtgtaaaaattcctgcaaaaaagcattgtccataccaccaaattcaacaagaaaataaaaacattgtttgatggatagtgcattttcagtttagatgtacyaaatctagtgaatgagcataaaacctaaatgactaggttttatgtcatttgacatatcaaatgacaaaagatataatattaccggttatctagtgttacttctttctgtgagcacatcaa

SEQ ID NO: 342662 - DNA, 601 bp, Homo sapiens
acaaattattgcaattgcttttttctgaactctgactcaaagtgatcaggacaattggtattagcaacggcagaataaagagcatggaataatggatcttttcttagattatgtacaggtctccatctttatgactaatgtggcacaacattcttctctgcaaaggtttttctttttcctttaagaattaaacttaatgcagtatttgtcagttataaatccagctatgcaaataagggtccactaggactctgaagaagggaatgaacttcagttgcccttatgagctctattaatttgcatgtccatagtaatattccagtttccaggttcctgtaactatgtatgggcataagatacaaaaagtaagatgattcactcaaattccaactactrttttaaaaagtaacaaccaaaatgcaaagttctagcaatatttagtccaaaaagtgaatattttgttgttttaatacgtgggagtttattttcattccttttctcccttgcacatggaactactgaaacacttttattttttcccagtacatctttggccacttgaatttatagagaagagaagagcaatgtaaaatactaatga

SEQ ID NO: 342663 - DNA, 667 bp, Homo sapiens
ttttggtttttggagtagctcttagaaacctctttctcaggcagacaccaagcagatggaagcacagaaaagttggaagacttcatgtttgggaggtaggcrcagactgaaggaagtggatgccctaggttagagacaagataacagcattgtgagaatagagtaaaaatgaattcagcttgattcgtttctagctttatgttggctacttaatacagtatatagaagtgagaatgctttctacctaccttcttttctttctcctttcttcctttctccacttcttactcacagaagtgaaattgctgattgatttctgtgcgtaagaaaggaggaaatttttcccgtcccccactctccttccaccagtcctacaaatgtgatcactaagtttaggaaaaacatatgcacagtttgtgtgtaatgttctgggaagcatgaagtccaggggaatatgctttacagatggctatgcagaaccaatatcaaaaaaaatggaggggaaatataaacatagaaggggaccagaacatagttgtaagatgagattcagccttctgacttgttttttatttctgaacaaaaattgttcctttgtgacttctgatgaagtcctccatctttttagaagggaggcttggagagggttgcagtatgagaaaagagc

SEQ ID NO: 342664 - DNA, 667 bp, Homo sapiens
ttttggtttttggagtagctcttagaaacctctttctcaggcagacaccaagcagatggaagcacagaaaagttggaagacttcatgtttgggaggtaggcacagactgaaggaagtggatgccctaggttagagacaagataacagcattgtgagaatagagtaaaaatgaattcagcttgattcgtttctagctttatgttggctacttaatacagtatatagaagtgagaatgctttctacctaccttcttttctttytcctttcttcctttctccacttcttactcacagaagtgaaattgctgattgatttctgtgcgtaagaaaggaggaaatttttcccgtcccccactctccttccaccagtcctacaaatgtgatcactaagtttaggaaaaacatatgcacagtttgtgtgtaatgttctgggaagcatgaagtccaggggaatatgctttacagatggctatgcagaaccaatatcaaaaaaaatggaggggaaatataaacatagaaggggaccagaacatagttgtaagatgagattcagccttctgacttgttttttatttctgaacaaaaattgttcctttgtgacttctgatgaagtcctccatctttttagaagggaggcttggagagggttgcagtatgagaaaagagc

SEQ ID NO: 342665 - DNA, 435 bp, Homo sapiens
gacttggtctcaaaagaaaaaaaaaaaaaaaacttgaacagatgagggattggttcatataaatgagcaaaaaaattagtggttttttgagaaggaatctatactgtgaagattctgtgaaaattgtggaaatgagagcaatacagcatttagaatacaaacataagcaacaaaggatttagcctatttcataagcttagttgataaagcaacaacagggtttgagaggattgactttaattttgagaaaagttccactgtgggtaaattgatatcaaacagcatcaaatgctacagagaaaycgtctgtggaaggaagagttaactgatgcagcaaacttcattgttttcgtattttaagaaactgccacagctgctccaactttcagcaatcaccaccctgatcagtcagcagccatcaaggcaagatcctct

SEQ ID NO: 342666 - DNA, 629 bp, Homo sapiens
tgttcgtcttgttgtttttctttgttttgttggtatagatgctttactttttatgaaactattttaggtaagtagaaaaaattaatcaggaaactttaattttgccactctaagtcacagagtaattgaggaatgagtacattgggatttctttcttcaaaattgtgacaatgtttttgttgttgttgtttctttgtctcatttttctaaaggatgaaaaggtcacctggaacctccagagggaaaaacatataaaytaatgaaaatttagttaatacaatgtgtgaaatgtgtttttttcttaatgaccacaacagagactttcttgggaaactattcctattagctatggttttactatttattataaatatatttatttcaaattggatgaaatatttctgtttggtatggaggcatcctataaaagtaataccaataatttttattatttccaacagcagaaaataatgcctatggtatatatcacaagatttgatatcttctcgaattaagtattgatgtcttttttaaccacaagtgactaattttgtatatttatataataattttttttacaatttagtaaggtgttccttatttatgtatatgtgtgcatgtatatataa

SEQ ID NO: 342667 - DNA, 550 bp, Homo sapiens
agaatgttgctttttattttaaatgtaaacctcacatcaaatatactttctgaaagttagtagtctgttcagaagtggaattctataatcatgtctttatttcatctgagtattttttgttctgcattctgagttcttattgtttattgcaaataatagcagggtgttggttttcttcttatgaatgctttcttaaagtttcttctctaaaaagagtcattttgcctaaggttccacaggcacacttttttagaaatatatttttcyttatttttctttccctagcttctatttagaggttatttctaggtttttcacagctttatctttgagcagccatagtaattggagtgaaggtagatagatattttgttacaagataggtgctcacaatagcctcaaattaaaaccatagtaaactctacctattatcctaggtacctgccactgatactgaccatttgggtcttggtgtgagtatccttagcttctcccccaaattacgtagtcttacaactatttaaaccttccatatcatttatttgcaggc

SEQ ID NO: 342668 - DNA, 624 bp, Homo sapiens
tgattaatcttggcttgatttagtgcctttaatgtcactttattaactttaaaaaatagagattacaactgaattcagttataaaatatcaacattcataaaatatttaaaattgaaaattaattgattcatatttaagatgcattaaatcttatgataaaaatgctatgtatagctatttaatagataataaattttaatatgaataatgagcttctactttgtcttgtcagttcatattrtctgtaataagttttttaaatgtataccagttgcaaataaaataaatatggacaacatgtaaattaaaaatttcctaaaatattgatattattattcaagaaacatgggttttgataattttttaaattactgactgaagcataatctttttattgaatgacaaagcaaagtgggaagggcttattaataaagaaatgcctggagaatacacaaatggtgtgaatcaatttcaagtttagtgagctgcctgagagactcttagatacacaccaatctaccaggaagaaggcagcaagaggcatagacatggccagcccttgcagttagtaaatgatagtcactagaaatttgcaaaagttcaaaactatgtcttgaaatagg

SEQ ID NO: 342669 - DNA, 624 bp, Homo sapiens
tgattaatcttggcttgatttagtgcctttaatgtcactttattaactttaaaaaatagagattacaactgaattcagttataaaatatcaacattcataaaatatttaaaattgaaaattaattgattcatatttaagatgcattaaatcttatgataaaaatgctatgtatagctatttaatagataataaattttaatatgaataatgagcttctactttgtcttgtcagttcatattgtctgtaataagttttttaaatgtataccagttgcaaataaaataaatatggacaacatgtaaattaaaaatttcctaaaatattgatattattattcaagaaacatgggttttgataattttttaaattactgactgaagcataatctttttattgaatgacaaagcaaagtgggaagggcttattaataaagaaatgcctggagaatacacaaatggtgtgaatcaatttcaagtttagtgagctgcctgagagactcttagatacacaccaatctaccaggaagaaggcagcaagaggcatagacatggccagcccttgcagttagtaaaygatagtcactagaaatttgcaaaagttcaaaactatgtcttgaaatagg

SEQ ID NO: 342670 - DNA, 562 bp, Homo sapiens
gtgtattatttcatttcatgatcgacacttacttctcaatcactccccaaattctgtgagtattatattctacattttacaaataatgaaactatgtatcaaaaagttakataacttactaaagtcattcacctggataaaatagattattcaccaaaatctatgctctatccactattcgcaaaagcctccttaaaaggaggtgagactatcagcctgattcatgtattgaaagagttcaaacggatatctttctttttctactaaggtgaaatcctcaaaaatagtaggaacttagataattatggaggaagaagtcactaaaaaaagcatattacagattataaaggatacattctcttaattttttaagatttcagctaaattaaattacattgtccaatagtagtgttgcttggttgtattactatctttatgtatttctttatcactcatttaaatttataagagtttagtgaaaaatgcagtgtagtattatactatttttacaaatgactttcagaaagggtatgcagtaactctctgaggtgataataatcta

SEQ ID NO: 342671 - DNA, 506 bp, Homo sapiens
aattaattacttcttctgagctaaactgactctagagtctcaaggaagtggtctggagggcccaagtaagacttttgaaactgtgagggtccaggatggctagcgctagtaaaggattctcatccttttttctttcagtcctggatcctaaaatgagccaggagacttgcagttgagaattccagggtaatgattcatgacagacagacagagagggagaaagagagaacattttgtataagaagatttgtagacgccaaagggagggccttcactsgcctacacactgcctctgggaaactaggaaaaggtgcttatttccgatgggtgattcaaaataaaatccctcctctgggcagacagcttgctaagcagaaagcgctctttatataaaaaactaggtgcccctgtacatagtctaatgctggtgttcaggcttggggagcagagcaaaagcaagaatttggcctgtatttattttccttcaaaacacaactgtaagttgc

SEQ ID NO: 342672 - DNA, 319 bp, Homo sapiens
aatggaatcagcaaattttttagatccctccttctagacaatctgtgagttacatgaaggaagctatagatgggttctcccacagaatgacattaacacagatttcaattctatatacatacttatgacccaggactacttgggtgggatcacacactgacaaatacaggaatagcattggacaaaagcttggaagatgaaaaatatcagataggtttagagagtaaagagattctaattgcatagargaaaatacatttagtatggaatcatttctggtagttaaggcaaaaaaacaaacagataatgaaagtcccca

SEQ ID NO: 342673 - DNA, 630 bp, Homo sapiens
aacatttgtaaatgtgcttataatcatagagtagaaggttaatcagagaaaaactcaaaattcagaggttaagcgataaaacatttgcttttgcaagtattgaccatttctgtctccaaaatctttttatactttagtgatcaaaaattgcattgtttataaatttgacttggtcttgatctacacaaattttcacacaaacatgcacatataaggttatttttctacaatttttagattttatttatactgccggtatatttaaataggttcttaaagcaatattaagtcacaataacttattttgtgattaatrttcacaaaatagtgatgtctctcagtaagaacaaattttatacttggaaaaaaaagtcataattttaaccaaagcaaaagatgctctcccaagtattttcgagaatacttacaaagctctttttactgctctgtaagaccaatcttcttgggaagatattatttgccaaattaagaggtgagaagggtcaactaagattcaagtagagaagaaatatcagcaaatataggtagtacattttaaatatcctaatagtagtttaagatgtgatatttattaaaattttatcttaaatatatttgattagcaaaaat

SEQ ID NO: 342674 - DNA, 623 bp, Homo sapiens
gttgaggcatgcttcaaaagcagcttcattctcttgtcatccacataaagagaaagggaaaacagagtctttgttggattcttgagctgggagcagtgtggaaggaaagtgatgagagaaaaaaactaaattaggaacaaaacaaagctttgctgagcttttgagtccagcatcactgccctaagacttcttttttcatatgttgctggaatttgtgagctcctggattcttgaacacctccaaatatcttccagctatgcctcttggaacattactctgaaggtaagatgaaagtgtcaaggaaagcttctcccatttccagttctcccactcttcttttgacaagcattagccacaactaaaaggaaatcaggtataattctttgcaagctgcatgaatttctattcagtggtgaygagggagaagtgaggcatctcatcatttcaagcacaatgtgacagccactgcctgaccaagtggtttccagagctgctgcagtttgcctctctcacaggatggcagcgaaactccaaaaacatgtgagagagcaagaatttggcaactaaaaaatagtctacaaataaaaagaattcttcatagtaaaaaaaagcacattaccag

SEQ ID NO: 342675 - DNA, 477 bp, Homo sapiens
cagaagtttttcctacttagctggtttaacagaaggtttaatggaagaaaccattgtgaaggaaatttgttctyagtactgatctctatataaatcagattatgataattttatgaatctctatgtaccctgtactgtttatcagacattgtatagtgtagctttctggagcaggttgtgaagaggtgacttgtgaccttgagggctacagaaaggagtaaagatagtaacatcatttgcattcattttcatagtaccaaatttcctggattaaggtcaactaaaaatcattatgaggccgctactatataaagagtaatatataatgcagtgcataaacattgtaagaaaaaataaaccaaactatatgatcttgagaataataatgttggaaagttctgcacaaacgaatttctactggttacctacataatatcactaattctgtcctctgggccttagttcatgaaatgcctt

SEQ ID NO: 342676 - DNA, 634 bp, Homo sapiens
tgtcaagatccctgccttcataataaagtcacattctgaggtactaggagttagaacttcaacatataaatgttttagttggtggggtgggtagggaggaacacaacgataaaatcatttaaaataaattaccaaaatctatttatttagctgtaaaaaagatcatgggttggcaagtatagaaattctaaaaattcattttgccatttttttctgaaatgattatttcatttattttaaaatatctttgatcatttactttatatggtaagtttkggggctattcatttttatcagtggcaaaaacaaaaatatttttacccttatagcacgtagagtatggcagaaagtttgttgtaattttgtaactttgaagttttgcttgaaattgagaaatatgtactaattttaatgactttaagatattgatgcaggagattaataaccatactctcacagagggctttagtacacatgctgtttaagagaattttatttcgtagggcaccaaataaggaagaattttctgtaacaatttatttttagatatggctattcttcccgtgcttttatatttgtattttataagtttttttcccttacaaattgagattagaaaaaaatatgacttcct

SEQ ID NO: 342677 - DNA, 391 bp, Homo sapiens
ggaaaaccacactcagatattgtaataaaactgtctatagtaaaaaaaaaaaattgaaatcaacaaagaaaaaagccatcacatacaagaaaatttacatacaagaatcagtgaattttttagcagaaatcttgcaggccagaaggaagtagaagatatattaaggtgctgaaacaacaacaatccctatcatccaagaatcttgtatccagtaaaactggtcttttaaagtgaaagaggatttaagactttcctcaataaataaaagttgagaaagtgcccttcactaaatcttctctacagaaatactgacrgaaatcctccaagttgaaatgaagaaatgctagaaagcaacacaaagccaaaaggaaatttaaagttcaagagtaaa

SEQ ID NO: 342678 - DNA, 487 bp, Homo sapiens
gttgagatttcctctggaggggtgtctttgatgtcattaacattggagcatgggctagcaggccggtccaggggtacgtggtagatcttagtcatggactgcatctggggctcacttgaagaatgatttgtagttgtacaactttgattctggaaraggcaaacttaacaaggaggttaaagatacagggattgaaatgtatgccctgcagtgcaggtattacttctttggcacactttacaggccctgactatctgcttgatagttttgaaaaggcctggtccagtaaataataatttggccatctgatgggtgctatccatgcctaagtgaaaggtttggtgaagggttttaagtaatttcatttggttagctgcaggcaaaaatatttttccttctttcgtggctagccatctggaggggaggaaactatgtcttcatgaggttcctcattctatttcttctcctgagtattggggcttggttt

SEQ ID NO: 342679 - DNA, 507 bp, Homo sapiens
taaaaagacaaccaacagaatgggagaaaatattctcaaactatgcatctgacaaaggtctaatatctaaactctataagaaacctaaacaatgtttttgttgaacaaactaggaacatgtatgcccataaaaaatgggcaaaatacatgaacagacacttctcaaaagaagacatacaagcagccaataaacatataaaaattgcttcacatcagtaataatctgagaaatgcaaaccaaaaccacattgcaataccatctcccaccagtcagaatgactattattaattaatgactattattaaaaagtgaaaaaagtacagatgctaacagggctgtgaaaaaaagggaatgcttttacatttttttgrgaatataaattagttctgccactatgaaaagcactttggaaattcctcaaagaacttaaaacagagctgcaatttgacccagcaatcccattactgtgtataaatctaaaagaaaacaaattgttctaccaaaaa

SEQ ID NO: 342680 - DNA, 575 bp, Homo sapiens
tcagcatgctctccttgtgcatcgtgatgattaatttcaaatgctcaatgatgcaggtttctagatgaatttcagagttcactctgggttccaagtgtgtacctctggagtctgctcaccttcaggaaagagatcatgtactaacctaaaataatgaggattttaaaaatggctcacttacaatcaaagccacatcttgcaaaatgttctactcatactagctcttcttctttcagttggcagcttcctgtccctttctactcattttccatctgayaccatgtgactcaagtgggattcacaatcagaatgaacatgtttactgtataattccagattttacagtattttttaagaaaacaggagaaaccaggattcatgtgagtccttgagttgttgtttgatagacacctgagtgacgcttacccaccagaaatttccaagttgattgccatgataaatactattgagcttcctctagtgaacaaaaatcttattccatttgtcatcactgtcaaaggcaatgaaacatgtaatataaaaggtggtcagaaattgaaaaaaaattaaaaata

SEQ ID NO: 342681 - DNA, 417 bp, Homo sapiens
acaaaatcttttcaactacttcctatttcacctttctcccatagcraaatgtaagcaataggatcgggcaattattaagaaagatggcatgcttcctctggttcagtcctcaaggatctcatccggtaatgcagtgggttttgctatggggactgaccacatagcatttgcactgactacatggcatttgtaatccctcttctgaaccatgatgctgttgatgacatcttggtgcaaagatcgttcagctaaagttcacacctcagtgacaacataggcacaggatttaataaagcttactagaaaaaatgagaaaggtaaagaaattcaactgtagttacctcttcaaatgcccaactctttaatagcaatcatttttggcttgactattttgaaacaatatattttgacattgcc

SEQ ID NO: 342682 - DNA, 644 bp, Homo sapiens
cccttgcctaaactttactctagcactaacacctgctttttgcacagaacctaccttctctcctgtcctcattgtacggtgaggttagctcaatgataaggtgaggccaataatgataatacaagctgaaaaattaagttttcctaagccatgtcaaaaacaacattatgtgaaaattgcacatcacagtgctatgtcaaaaagctcctggcattaaatgcttttgttaaaaaagttgcaaatgtcaaagggtttcatcaaaatgtcatgtcatcttgaccttaaactcttcataacccaatcacaaaagaagrccaagacttcttagatgaatgagaatgatctcagtgaatggaactagacaagaatacagtgtgtggatattatggggaaaagggggtaataagaatgaaaaaaataatagtaagttaaacaattccacaatcacttttttattcttaaatctataaaggactgaccatgaaggtagttaaatattccttttatcaaaacttctgtataagcctttacaaaaagtagcatgagtcacttgacagaatggtaaggtttttttccaaccatctcaaaatatagcttcctcccaaagtggcaattgaaatgtatatcaagcatagaagtaaatt

SEQ ID NO: 342683 - DNA, 596 bp, Homo sapiens
ttcacacctatcagaaaaaagacctgggcatcttggccagtattatgagaaacaagagaaattcttacttccccatgagaagtttgaataatatagtatatattcaaaagcatgtgttctagaattagtccttttctgtttcaaaactgttataccccttagctttatatgctttgagcaagctacttatcttgctatgagacaatgctctatgtgtctcctgcatttctgcatgtcctgtgagtagagcactaagtactcttcattcagaatttttgaggatatttagtaaacagtctttgaagatacaatgtctccctctggaacaaagggcagggcaggcacacttttagcctattattaaaggttcttgaagctcaatgttcctcttctatcctgcagcccactgcacatgctgacattgcatgacccttctcatgggaattgggttttggggagtcactgcaataaatgctgatactatggctactgttattgctataagaaawaaatggtcctttgtctaacctagaagtcttatgtcttctacaggtgaatctttggtagactaactagtgagcttgcaagtggggtga

SEQ ID NO: 342684 - DNA, 589 bp, Homo sapiens
cccactttcttaaactcacccccattcacctcacacaaactcaaatgctgtaaccagcctattctcacactttttcactgagatatcctattattctctrtgaggtaccatttgctttgctatagtactaggactacagctttgtttgactacaggtatattcttcaacgtctttgggtagcagcctttaaccagaagagagaaaagtgggtcaggactacaaggcagaaactcaagctatgttaagtccactaagattggagttaattctgtaagcaataagacctacttaaaaattttatgcatgaaataatatggcttgaatttcctttaacatatatttcctggtgaatatatggttgatgtttgtgagggataaaagagtgtagtttagggacaacttccagctaagtcctgaacttgaggacaaggtaagaatgaagaggaaagttatggatttgagagatgtttattaggctaaaaacctgcagtctgtagtagttggcaatgaaaataaaagtgagaataaacaatcaatcaaggatattgataactggttaaccttgttatctcataattgattacccct

SEQ ID NO: 342685 - DNA, 589 bp, Homo sapiens
cccactttcttaaactcacccccattcacctcacacaaactcaaatgctgtaaccagcctattctcacactttttcactgagatatcctattattctctatgaggtaccatttgctttgctatagtactaggactacagctttgtttgactacaggtatattcttcaacgtctttgggtagcagcctttaaccagaagagagaaaagtgggtcaggactacaaggcagaaactcaagctatgttaagtccactaagattggagttaattctgtaagcaataagacytacttaaaaattttatgcatgaaataatatggcttgaatttcctttaacatatatttcctggtgaatatatggttgatgtttgtgagggataaaagagtgtagtttagggacaacttccagctaagtcctgaacttgaggacaaggtaagaatgaagaggaaagttatggatttgagagatgtttattaggctaaaaacctgcagtctgtagtagttggcaatgaaaataaaagtgagaataaacaatcaatcaaggatattgataactggttaaccttgttatctcataattgattacccct

SEQ ID NO: 342686 - DNA, 408 bp, Homo sapiens
ccagggcaccaaatactgaaagacctggagcatccaggtatcagccaacgaagctccccacatcacatgctgaaagccctggaacatccagaaggtgcccaacagtgaacaccaaaggcacaattggggccacagaacaatgtgactctgacaacccagagtcagaacaatgggggacctctgacaaacaaagaaagtgtcttgccttacacagaataaaaacagttgcccaaataggcaaagattacaagtgtgaygacaaccgcaagcatgcattttgtccctaagagcggaaaagtaaaacagccagttattggaaagagaaaatgtccgagaggaggagcaaggtaggttataaatgacatggctggccaggcatgctcccatctgaagcacccagacaacaga

SEQ ID NO: 342687 - DNA, 591 bp, Homo sapiens
ccaacatggcacatgtatacatatgtaactaacctgcacatgtaccctaaaagttaaaatataataataaaaaaagcacattaacatggcacatgtatacatatgtatctaacctgcacatgtaccctaaaagttaaagtataataataaaaaaaagaaagaaaagctttcatgtagttatcatacacaattttggataagttttagctgcagaaagtgtaaagttataatttctagtaaaaatctaaagaacttacatttgtttgactaataataaaatcaatgaaaaggaacaaagctgtcctcttttatttttaatataaataartatctaatcaaaataggaacctgagaaaaagaggttctatgggcgagcaaaaatttcctcagaaaatgatttggattttctcaaaaacagaaattgatagatgactctatataaataaagtctattaatttggaaatgaaataatatgatggaagatcccaaatttcagcacttgctttataaagatttagcttgaacaactcagagaacaggtgttaccaacaacctatcaaaaggaaaaataataataacgtatttattcc

SEQ ID NO: 342688 - DNA, 555 bp, Homo sapiens
aaaatctaaagaacttacatttgtttgactaataataaaatcaatgaaaaggaacaaagctgtcctcttttatttttaatataaataaatatctaatcaaaataggaacctgagaaaaagaggttctatgggcgagcaaaaatttcctcagaaaatgatttggattttctcaaaaacagaaattgatagatgactctatataaataaagtctattaatttggaaatgaaataatatgatggaagatcccaaatttcagcacttgctttataaagatttagcttgaacaactcagagaacaggtgttaccaacaacctatcaaaaggaaaaataataataacrtatttattcctattacatccaaattatatattcatagaaatataattttaagcattacaatattctgataaaatctcacaaaagggggaaaaagactagattcatccctggttaattaaataatttgactttctgaaattgctgcctataacttaatcaaatgctaacacgtttcagttatgaccattttggttttataggtgttgaactcaa

SEQ ID NO: 342689 - DNA, 555 bp, Homo sapiens
aaaatctaaagaacttacatttgtttgactaataataaaatcaatgaaaaggaacaaagctgtcctcttttatttttaatataaataaatatctaatcaaaataggaacctgagaaaaagaggttctatgggcgagcaaaaatttcctcagaaaatgatttggattttctcaaaaacagaaattgatagatgactctatataaataaagtctattaatttggaaatgaaataatatgatggaagatcccaaatttcagcacttgctttataaagatttagcttgaacaactcagagaacaggtgttaccaacaacctatcaaaaggaaaaataataataacgtatttattcctattacatccaaattatatattcatagaaatataattttaagcattacaatattctgataaaatctcacaaaagggggaaaaagactagattcatccctggttaattaaataatttgacyttctgaaattgctgcctataacttaatcaaatgctaacacgtttcagttatgaccattttggttttataggtgttgaactcaa

SEQ ID NO: 342690 - DNA, 652 bp, Homo sapiens
atttcattctttcttatggctaaagaatattccattgcaaacatataccatatttttaatccattcatttgttggtaaacatttaggttgattctatatcttgaatattgtgaatattgtgcaataaatgtggatgtgcggatatctcttttatatactgatttccttccttttggatatatactcagtagtgagattgtgggaacatamggcaactctattttgagttttttgagctgcctcaatagtgttttccatagtttctatgctgattcacatttccaccagtagtacaagcattcccctttctccacattctcaccagcatctattattttccatctttttgataacagctattttaactgagactagatggtatgtcagtgtggttttgaattgcagtttgttaatgattagggatgttaaacatgtttatacaactgttggccatttgtatgttttcttttgagaaatgtttattcacatattttgcccatttttaaatcagattttttttgctattgtttggcttatttatatattttagttattaatcccttgtccttgtttgcagatgacataatcttatatttaagaacacacaaagcttctaccaaaaagctcttataactgataaatgaattcaata

SEQ ID NO: 342691 - DNA, 579 bp, Homo sapiens
cagtcttaaaaacactgtcttttttattagtcgacagcatgaacaagtaacagtagaaacaagtttaaccaaaatgtccagaactgacaagaatttatagtaagttagaaaaaataaaggcaagcatacagactttcagaaacatagatatstctcctgaaaaatctcccagaagtgatagccatgagtcaaatattacatttacctttgaaagtccaaactgtagtgagttatccataaccttctgtggttccacccaattttgtgttttgcatgttttgagagaaatgcagaatttcctgtagggtgctgtggttttcattgcttggttgatgttgtgaacatccagggccagctttcctcaagttcaaagacaggaaaacacaagacaccaatgaagaagttacaaacctcccaatactctagtgaccctgacttagaagggccaggtagctgaaaacagtgacctgatcagtcagagaaagtagaatgggacctctttagcactaatacttgaaagaacatgctacagcctcatgtcatgtgctagacaagacattggagctcccaaaaaattgc

SEQ ID NO: 342692 - DNA, 553 bp, Homo sapiens
gcatataatcaatacccataattctttctggaagttttgtttacaaattcattaaaaaaatatttattgagcaatatattaggcatcaccccactttatcttcaactagamaactcttcatcctcttttaaagtctaagaaaatatcatttcctctgaggggtcttccctaacactcctctcacacaatcactgactagtttccccgttctacactcctgagacacagtgacttctcctatgtaacactattataattttaacaaaataatcagctattatttatttaatgtcaatttctcccacaattgggtggagaggttgaacagggctcttctcttttatttatgacacatcttcgctatctagcaaaatgtctggcatataaaatattctttggattagatgaatgaacgaaaggttgtgatataaagaccaaagattcaacaggtgttctgccaggaccagagactgtgaaaatgggctagaagctgctgctctaaaacctagtgtgtatgtggttggggcaaaggagtgggaaaagagtacaccag

SEQ ID NO: 342693 - DNA, 422 bp, Homo sapiens
ctgcctgatgtctgcaaaagagcttctgacatcctaaaggaactcagatctggaatcactatcctaaaaaaacaaaagtgtcaggaaaagcatttggaatattartttgttatttattgaatttgcagaattaggtctgcatcaaatcaacatttggagagtatattttccaccatccttaaagtgtattttgagaatatgatcaataacagataaaagtaataccagacagaaaaatgaatacctccccagacctcctcatctgtacatcactcccatttcattaaataaagaagatgataagatatagaagccagattggaaaagagacagccagggccattttaccacttcaatgacatgatagaagtcttgtaaaacatgcaaatgagtgtaggcccacaaagcatcacctaatgaag

SEQ ID NO: 342694 - DNA, 460 bp, Homo sapiens
acttgaagcagtatttttttttttttgctatagggaaatgcacttctcatttattgagttctatctttttattcttcattgccttttgggaatgatttagcatgtttattacttgatacagtgaaaagtagtttgagctccacattcactttgagagagtctgaccacagaaatcaaagaagatgaaactgtccagagctctgctgtacaccacatgaagtattttcaaagaggcaggtatggtatgtcttaactctgtcaacttcttgtactatcatcttccatatggkgggttcacaccaaaagcaaaggaaatgatggcatttcctttaactgtgagtgggattttagggaagacttcttttgttgttgttaaaattactcatataagctaagtatgtctccaacaggatgatggcataatgcctgctcctatacttgtacctcaccagtgtttgga

SEQ ID NO: 342695 - DNA, 502 bp, Homo sapiens
tcttccatatggtgggttcacaccaaaagcaaaggaaatgatggcatttcctttaactgtgagtgggattttagggaagacttcttttgttgttgttaaaattactcatataagctaagtatgtctccaacaggatgatggcataatgcctgctcctatacttgtacctcaccagtgtttggatcagttgcatatgggcctattattagattacagttaggtgtgtagtggtatatctcacttgtttctttatcaccagctcctagctgaattcctgcctcatactaaaaactcaataatattttcttacttaaattaattatggactctgatattttacytagctttggcatgtagcaaatggtgcccctaccccaaatatatgtccctgtctttatacctggaacctgtgaatgtgaccttgtttagaaaaaggctctttgcagatgtaattaagttaagggttttgagatgagctcatcctggatgatccaggtgggcc

SEQ ID NO: 342696 - DNA, 563 bp, Homo sapiens
gggtgaggacacagccaacccatatcagtgcctaaatctcaaaataattatgctgagttaaggaatccaagcaaaaaaagagcacatattaatatcatttaatttgttaaaaataaactgaggcacattaaaatattcaagagtttatttcagcaaacagggagtcatgaatcaggcaactccagaccacaagtggtttggaggcttccccaaagggttatgagggaaacacttttatagaytaaatgaggaagcaaggcaaaacagtttttaaaaattggtcaaagtggagcagtaaccttgtttggatcattccagtggaaagtccctaataagaggttagttgctagtttctgattggttaagctttgttttatttacagtgagttgggttttggtttgcttatgtagggacccagagccctggagctacctcagcctaaaggtcttgtaattaatattttttaacacatttacataaaattatagaaaaaatgtaatctacagtgacaaaacagatcagtggttgcctggggacagtggtggatggaggaatggatcac

SEQ ID NO: 342697 - DNA, 542 bp, Homo sapiens
ataaacttttttttttttttttaaagacagagtctcgctctcttgccaggctggagtgcagtggcgcaatctcggctcaccgcaatatctgcctcctgggtttaagggattctccygcctcagcctttcaagtagctgggattacaggcgtgacgactgcgcctggctaatttttgtatttatagtggaaacgcgtttttgtcatgttggccaggctggtctcgagctcctgaactcaagtgatctgcccgcctcggcctcccaaagtgccaggattacaggcatgagccaccgttcccagcctaaacttcaaatctatagccattacatggtttggtgactcaaaagttataacacgtaggtcaagaaaccagtggcagaaggagtgattcctctcactgtcactcccagtgaccctctcaggacatttgtacttccattctagcacttttaggctctgctgcagtggaggtactagttcacaggtgttaaagtgaactaaatatggcctgagaaggactccgtagttctacatttgagtc

SEQ ID NO: 342698 - DNA, 542 bp, Homo sapiens
ataaacttttttttttttttttaaagacagagtctcgctctcttgccaggctggagtgcagtggcgcaatctcggctcaccgcaatatctgcctcctgggtttaagggattctcccgcctcagcctttcaagtagctgggattacaggcgtgacgactgcgcctggctaatttttgtatttatagtggaaacgcgtttttgtcatgttggccaggctggtctcgagctcctgaactcaagtgatctgcccgcctcggcctcccaaagtgccaggattacaggcatgagccaccgttcccagcctaaacttcaaatctatagccatyacatggtttggtgactcaaaagttataacacgtaggtcaagaaaccagtggcagaaggagtgattcctctcactgtcactcccagtgaccctctcaggacatttgtacttccattctagcacttttaggctctgctgcagtggaggtactagttcacaggtgttaaagtgaactaaatatggcctgagaaggactccgtagttctacatttgagtc

SEQ ID NO: 342699 - DNA, 356 bp, Homo sapiens
cttttttcttttctctatttcacttcacctctccctgacccttgattccttggctatgacatcaaataaattgctagtacttaaatctttgtcttgacaactgcttctgggagaaccaagtgaaacttatctgacctgggtgtcattacagcagaggcattccacctaartaacaattacatgcattcaaataaactgttcacagtagatttatgtgctacttaaatcatgtgcttccacataaagatgtaaggttatagcaacctgaaacataataaattaaaaaaatgtgatgtggaaaaagaaaacaatgggtgggtggatgggcgactagatggctgaggagatatgttgcc

SEQ ID NO: 342700 - DNA, 616 bp, Homo sapiens
tgaccaaaaaccagaagatctgtgttctaatgctaggttttaggtacttagctttcccacaccttaatttactcatctgtaaaaggargagtttagattagataatcttacctaagttacttctcctctaagatcctatgtttctgtggcatctgggtataactgcagaactttagaagaaaagtctggacccaaaggtaggggttttagatctgactttgtacattttgtggttttatttcctcatttctaagaaatggagattagtgtctatcatttggtgacaagtgtaatgtgagattagatatttccttgtgtaagtaatttgcaagtaaaatggtctatacagatggaaaaaagtccccttcccaagatattaaagcatattaaaaagctagagtaattaagcaaatgtggcatctatgcaggaaaatgcaaatagattcaaagaataaagtctagagaagacttatgtatatattgacaggtagtttattgaagaaaaatacacataagcaatacactcatgaaaaggtaatatatatttctactaatctaataaatacaaataaaagccacaataagataacattttgttctcattaagcaaaaatga

SEQ ID NO: 342701 - DNA, 580 bp, Homo sapiens
atgaattacaaagagaactaatttaaaagcataatctctctctataggcaattccatggaggaaattatttttttaaaagtttgcatatttggcaaaaaatcagagaattaggtatacagaagttggtttctccagtatccacttttctatgcttcctctacctagtcatctcctaattgtgaacattttgttttccatgagtttatttactcaacagagttaagtmactttattgcacagggactttttggtatttataatctgtccccatatccattaaagtatatttagttctagattttaaggttcataggacaagcatagttttttttttttttgagatggagtcttgctctgttgcccaggctggagtgcagtggcgcaatctcggctcacagcaagctctgcctcctgggttcatgccattctcctgcctcagcctcccgagtagctgggactacaggtgcccaccaccacgcccggctaatttttttttgtatttttagtagagacggggtttcactgtattagccaggatggtctcgatctcctgacctcgtgacctggccaagcacaata

SEQ ID NO: 342702 - DNA, 514 bp, Homo sapiens
tttaactaaggaggtaaaaaatctccaaaacaaaaactataaaacactgattataaaaattgaagtggacataaataaatggaaaaaatatcctgtgtatatgcagtggaagaattagtattgttaaaaagtccatactcccaaaattattctgcagagtgagtcaatgcaatacctatcaaaataccaatgaattctttacagaaatagaaaaaatagggatcctaaaatttttattgaaccacaaaagactctgtaaatcaaagcactcttgagcaaacaaaaccaaaaccaaataaacacaacaacacagctgaaggcatctcactacctaacttcaaaatatactacaaagctataataacaaaaaaagcatggtgttgacataaaaatgaatacatagaccaatgggacagtatagasagcccagaaataaacccatagctcttaagccaacttatttttgccaaacgggccaaaaactcatactggggtaaggacagtcttttcaata

SEQ ID NO: 342703 - DNA, 502 bp, Homo sapiens
gcatgagtatatataaaaacagatacagggtaaattatacaaaataagattcagagtgttaaacgtgaagtggaagatagaataagaaactatgaaaattcatttatgggcattgatgttgaaattctgtatgtacagcaaagggaattaacacaattttcaagatgttaatatcataaggcaatgttttgagtttactgagcttttaaggtgccaatgttgcctgtttgtgttagaccactgctgtaattacatttcagctagctaatgaaatgctaagcagtgttttgtctatgcattgttgtgagagaagtagaagtgttttgattatgagcagatggagaaattgatttttttttttttttttttttttgctctttctttgtgggttaagaataaggtagtgaaaagccatggattggtatccttgattgggacttaaagtgttactgagtctgcggttaggtctacattactgkggtagaactagaaattcctgaaa

SEQ ID NO: 342704 - DNA, 573 bp, Homo sapiens
ataatactctgtgaattaatcaacctattccacacaaaccttttcaaaacacaagccttccattttggagaaactggcaagttgattctaatatcatatggaaatgcagtggaacaagaatagccaaaacagtctttaaaaagaataataaaactttgaagactctacacttctttaatttcaaactgtgggactgacataagcatagaggcagatcaattgaatagaattgagagtctagaaatamaccatccatttatgagcaattgattttcaacaaaggtgccaagacaattgaaaggaatataaaattcaataaatagtgcaaggacaacttgatatccacttacaaaaaaatgaatgtggactcttatctcacatcatatcagaagttaactaaactgcatcaaagacctcagtgtaaaactaaaactatagctaaaactatacatctctcagaagaaaaataggcgtaaacctttgttaccttggattaggcaatagttacctagatacatcaccaaaagcaaaaacacacaaaataaataaatttcacttcatcaaaactaaaaa

SEQ ID NO: 342705 - DNA, 513 bp, Homo sapiens
gaactaagacaagaaagttagctaaagaaaaggttatggtagccaaataattaaaaggtaaggttccaaacaatgtacacaattaattagaacaagttgtgtttgaaatcagtgagaggtcattaatctatgatgaatctcaaaaaggagactaaatatactgagaaaagccataccaaccagtgagtctatggtacccagttttcctcaaaaagtgggataaggggggaagacattcaattgttaagaatggagttctagggtttgtttaattgataaaatatcttcccctcattggataattccaatggttatttattttagttttcctgagataaaaacaatattttatctgctcaactgatgcttccaagccagatcttaggtgagggtrtgagatgtaggaataaagaagcctgaaacctatgcatgtctcctgctcctggggaatatctcctgcctaacgggacactcactttttaccagtatgtcttcaggagagctttggagact

SEQ ID NO: 342706 - DNA, 586 bp, Homo sapiens
tagctaaagaaaaggttatggtagccaaataattaaaaggtaaggttccaaacaatgtacacaattaattagaacaagttgtgtttgaaatcagtgagaggtcattaatctatgatgaatctcaaaaaggagactaaatatactgagaaaagccataccaaccagtgagtctatggtacccagttttcctcaaaaagtgggataaggggggaagacattcaattgttaagaatggagttctagggtttgtttaattgataaaatatcttcccctcattggataattccaatggttatttattttagttttcctgagataaaaacaatattttatctgctcaactgatgcttccaagccagatcttaggtgagggtatgagatgtaggaataaagaagcctgaaacctatgcatgtctcctgctcctggggaatatctcctgcctaacgggacactcactttttaycagtatgtcttcaggagagctttggagacttgaaaaaccataattctgcataaagaaatatattatccccccttttcttgtaaatatctttgcacatttctcatccttgaactgttaaaga

SEQ ID NO: 342707 - DNA, 581 bp, Homo sapiens
ttaagataggcatttttctttaagcaaatagtttcatgaaggaaaaaaacaccaaggggatcacttgacattagttctggctcaaccagactcaggttagtgaactattgtgaacagccaagaatttagtgacatatcacttcagatatgatggatgcttagcaattactgatcatatattgcactgacagagttggcattgaaagtggaagctgttcagaatgataaatggatatgacaatttattaaagatagaaagcatgattagtgttggatgtagatgtaccctttaaaaaacgaggtaggaaatgaaataaaaacaaaattttatatatatataaaatacatattayatatatacatacacacacatatatatcttgaggggtaataaagatattcttgaacataaatgtcacacaatttttagacagtcatggtgtctccacttctcctgactagtaccttcctcatgccctccttctggtcattagtattcctcatggagtccatattgcagagtgcctcaagcctgcttagaggatcttttgagtctgttctaacacttctgatttcattgt

SEQ ID NO: 342708 - DNA, 632 bp, Homo sapiens
catattaaaaatagaagtacacttgtctccaccaaccttatctcttaaaggacactttgatacatctactcacttaagtcatatgcatcattattcccactagctttatactaactcctactcatctttccagatttatttctgaggtattctggagccaatcctctgcctgggggcacattatgttttctcctactttgtgaaaccatttgcataacaaaattttactgtgtcatttggcatgtcttttacatcagtcacatcacagtcctgttgtgataaccacacagattaatatctgctatggcattgatgaaaagacgttgatcctaatttataggttaatatagagaattttagataaactgcagtagacaatgattctgtaatgctagggtgacagcagatcattcttggcccaggactataaaattctgtgtctgcgaatggggsaggaattgcttcggtggaacatagccactgggtattttgactccgtgaattgaaaaagaattaaaatgcaaaaagtcttgactttttgagtttcttagttgctttgccagtctctatacaatctgaaagcgacacctgaaactttccaacaggaactgtatatggaaaccaccagatca

SEQ ID NO: 342709 - DNA, 592 bp, Homo sapiens
aatggcttttatccaaaaattaggcaataacaaatgctagagaggatgtggagagaagggatcccttgcaagtattggtaggaatgtaaattaatacaaccactatggagagcactatggagcttcctctgaaaactaaaagtaaagctatcacatgatccagcaatctcactttggatatatactcaagaaataggaaatccatatatagaagagttatctacactccaatatttgttgcagcattgttcacaatagccaaggtttagaagcaacccaagtgtccatcaacagatgagtggataaagaaaatatcattcttatacacaawagagtactattcagccataagaaagaatgagatcctgtcatttgcaacagcatggatgaaactggagttcatcatgttaggtgaaataagccaggcacagaaagacaaacatcacatgttctcactcatttgtgggatctaaaaatcaaaacaattgaacccatggagataaagaatagaaggatgtttaccagaggtagtgaagggtagaggggaagtcgggaggggagtggggatgattaatgggtacaaaaattagaa

SEQ ID NO: 342710 - DNA, 582 bp, Homo sapiens
aattataacagtagtttttgtatgcttttcacatgatttgcacattttcttcttggttcaaatacmatgtttcataatgtttgacttttttaataacaggaagtatttttctggtttctctactttattataaaaattcaccatggtggcctgtgttcatattcctttgaacagattcctctttacttgaattctaagaatttattttgtgtatgtagtttacagtttacccatttaacttttaaatttatgaagtataccagttaggtgcagtttttcttttcatgtggttagaaattttaaaatgatctgtgatctgttttaaatgtaaaggagagaaagcagtgaagggtcagaaatttccacagcttagaatttcagactttagaatattattatgaattatagtaaaattggtttattctgtttcacacaatcatactttagcaaggtgaataaaatgataattcccaaagactttttctttttaaacaggtgatcaagtagtctggactggttactatggcttagtgtataacctggtgaaaatttcatgggaacttcaaggagacgaagaacagg

SEQ ID NO: 342711 - DNA, 613 bp, Homo sapiens
ggtttattctgtttcacacaatcatactttagcaaggtgaataaaatgataattcccaaagactttttctttttaaacaggtgatcaagtagtctggactggttactatggcttagtgtataacctggtgaaaatttcatgggaacttcaaggagacgaagaacaggatggacttagaaacatgatatggcaaacattgcagaaaacaaaggattatgaggaagatgtacgaatccaaaatgcartcaatatagctcaggtaaggtaaaacactgggcaataaatatgtacatctatcattaggaagcacggttgtcatttctctccatggtaaaaggaatgtctacattcagtgagtattaatgacttacaggtgagaataatatttttaaaacttaacactgatctatttttgattaaagataggagagttgagctctagacggtagtgtaaaggccaccaaaatctgtaatagaaacagaattaaattcatttaacacatctagggaaaagtacacctcagtaaggggtgattccaccatagaactctgacttggtgggaaattctgatagacatgttaggtacactagattgaagtagcatgttaagcc

SEQ ID NO: 342712 - DNA, 613 bp, Homo sapiens
ggtttattctgtttcacacaatcatactttagcaaggtgaataaaatgataattcccaaagactttttctttttaaacaggtgatcaagtagtctggactggttactatggcttagtgtataacctggtgaaaatttcatgggaacttcaaggagacgaagaacaggatggacttagaaacatgatatggcaaacattgcagaaaacaaaggattatgaggaagatgtacgaatccaaaatgcaatcaatatagctcaggtaaggtaaaacactgggcaataaatatgtacatctatcattaggaagcacggttgtcatttctctccatggtaaaaggaatgtctacattcagtgagtattaatgacttacaggtgagaataatatttttaaaacttaacactgatctatttttgattaaagataggagagttgagctctagacrgtagtgtaaaggccaccaaaatctgtaatagaaacagaattaaattcatttaacacatctagggaaaagtacacctcagtaaggggtgattccaccatagaactctgacttggtgggaaattctgatagacatgttaggtacactagattgaagtagcatgttaagcc

SEQ ID NO: 342713 - DNA, 613 bp, Homo sapiens
ggtttattctgtttcacacaatcatactttagcaaggtgaataaaatgataattcccaaagactttttctttttaaacaggtgatcaagtagtctggactggttactatggcttagtgtataacctggtgaaaatttcatgggaacttcaaggagacgaagaacaggatggacttagaaacatgatatggcaaacattgcagaaaacaaaggattatgaggaagatgtacgaatccaaaatgcaatcaatatagctcaggtaaggtaaaacactgggcaataaatatgtacatctatcattaggaagcacggttgtcatttctctccatggtaaaaggaatgtctacattcagtgagtattaatgacttacaggtgagaataatatttttaaaacttaacactgatctatttttgattaaagataggagagttgagctctagacggtagtgtaaaggccaccaaaatctgtaatagaaacagaattaaattcatttaacacatctagggaaaagtacacctcagtaaggggtgattccaccrtagaactctgacttggtgggaaattctgatagacatgttaggtacactagattgaagtagcatgttaagcc

SEQ ID NO: 342714 - DNA, 554 bp, Homo sapiens
aacttgtagactaaaccatggcatgaatttcagcctgtgcctgactattctggaggttttgccttaatttcccatacattttatgcaaaactggttcctgagaaaccgaacatatgagaaataactgtttagaaatacagccttaarataagtgcagttaacttttgtatttcttatgtagttaaaactcacctgggaataaataatggatttgatattattatgcttttatttttaatgtttaacatgagtatattaacattatacacaattttaatgcattcgtcaaagctgagtgacatgctatggactctgatgtttagctctgctttttattatctgaatatcccagatgacaaatgttatttgtgattcacagtactggtatatatagtaatctacaaattaattgataggttgataatcttagactgatcatttgtgtatatgcatgagctgaggctgacaaaaagacagcattggcagtatctttaggaatgtccaatattgcatactaggagtcattctgccctgaatgttttacccaacataaa

SEQ ID NO: 342715 - DNA, 649 bp, Homo sapiens
aacgtatctcaggtctaaagttctatctaaaacttctttccatgctgttttatcatttatgcttacgtttattttgaaagaataaactcaagactccctacatttatttattatgggtttcataagtttccataggtttctcttagtaaccacgaaagcaatttctctttcacacatgctgcctcattgagaatactcataaaacttttaaggttttaagtttcactagtgttagaatactgtagtaaattctgagtaacagaagcatgaacataagcttttttcctgatagaattttgttttgaaaaaaggaaagcaaatgatttatagtggtttgtggggtataccaaatagacatttaaggaataaaatatctaaaatatcttgactcatgcattgatgagtgggtgtttggagatagggagcataaagaggtaacagataaaaataactcacaccaacagttttagaaactatagtgatgtttamcaattataatttaagtaattgattcttttgtttctaccagtaaaaaccttctctgtaactgtctactagttaattattttctgagtgtcctttttcatattgcttctagttgagaagagcagttctatagtttcactgaactttgcttccaaatttcaaa

SEQ ID NO: 342716 - DNA, 581 bp, Homo sapiens
aaaataatgcacttgtatgtgtgtgtgtaaaacaagcaaaaaataaaaatatgatataatttcaggtagagacaagtgaagaacaaaaataacagcaggaatgacctttctaaggattttgacaaagaccagaatgaagcgaaagagtgagtcatctgactttcagaggaaagagcattccccaaactatcagtagcaagtgaaaaattgatagagtaatgattcatgctttttgctaaatatttctgcttctccctcctttgagattcacgggagtgctttctattttctggctccattgtgttgtggtgggtcatatggttatttctggccaatgattatggacrgaagctatgtgtgtcacttctgggctgaagtatttacttgttggcttgacaatttacagtgtcttttttccctttagaataataattccctttagaacaataatttctgttcaaaatagtgagtcccctcttacctttggctcccttaataaaaatgatggaactgagaaggaaaatcttttctgttttaagtgtttgagatttgaggagttacatagtactacacataaccca

SEQ ID NO: 342717 - DNA, 631 bp, Homo sapiens
aaagataagtttggtccagattatgcaacaagggaagccatcctgtgtcagggttctctagaggtacaggactaataagatagatgtatatatgaaagggagtttattaaggagtattgactcacacgatcagaaggtgaagtcccacaataggccatctgcaagctaaggagccaggaagatagtccaagtctcaaaacctcaaaagtagggaagccaaatgcagccttcagtctgtggctgaaggcctgagagcccctggaaaaccactggtgtaagtccaggagtccaaaagctaaagaacttggagtccaatgttcaagggcaggaagcatccagcacgggagaaacatrgaggcaagaagactcagccagtctagtccttccatgttcctctgcctgctttttttctagctgcactgggagctgattagattatgccacccccattgagggtgggtctgctttcccagtccactgactcaaatgttaatctcctttggcaacatcctcacagccacacccaggaacaatacgttgcatccttcaatccaatcaagttgacactcattattaaatatcacacatggatttcaggttagattttttactaagagtagtagaaattatt

SEQ ID NO: 342718 - DNA, 631 bp, Homo sapiens
aaagataagtttggtccagattatgcaacaagggaagccatcctgtgtcagggttctctagaggtacaggactaataagatagatgtatatatgaaagggagtttattaaggagtattgactcacacgatcagaaggtgaagtcccacaataggccatctgcaagctaaggagccaggaagatagtccaagtctcaaaacctcaaaagtagggaagccaaatgcagccttcagtctgtggctgaaggcctgagagcccctggaaaaccactggtgtaagtccaggagtccaaaagctaaagaacttggagtccaatgttcaagggcaggaagcatccagcacgggagaaacatagaggcaagaagactcagccagtctagtccttccatgttcctctgcctgctttttttctagctgcactggsagctgattagattatgccacccccattgagggtgggtctgctttcccagtccactgactcaaatgttaatctcctttggcaacatcctcacagccacacccaggaacaatacgttgcatccttcaatccaatcaagttgacactcattattaaatatcacacatggatttcaggttagattttttactaagagtagtagaaattatt

SEQ ID NO: 342719 - DNA, 631 bp, Homo sapiens
aaagataagtttggtccagattatgcaacaagggaagccatcctgtgtcagggttctctagaggtacaggactaataagatagatgtatatatgaaagggagtttattaaggagtattgactcacacgatcagaaggtgaagtcccacaataggccatctgcaagctaaggagccaggaagatagtccaagtctcaaaacctcaaaagtagggaagccaaatgcagccttcagtctgtggctgaaggcctgagagcccctggaaaaccactggtgtaagtccaggagtccaaaagctaaagaacttggagtccaatgttcaagggcaggaagcatccagcacgggagaaacatagaggcaagaagactcagccagtctagtccttccatgttcctctgcctgctttttttctagctgcactgggagctgattagattatgccacccccattgagggtgggtctgctttcccagtccactgactcaaatgttaatctcctttggcaacrtcctcacagccacacccaggaacaatacgttgcatccttcaatccaatcaagttgacactcattattaaatatcacacatggatttcaggttagattttttactaagagtagtagaaattatt

SEQ ID NO: 342720 - DNA, 507 bp, Homo sapiens
ttgggtctctgttttgttttgttttttgagacagagtctcactctgtcacccgggctggagtgcagacacagcctcggctcactgcaacctctttctcctggattcaagcaattttcctgtctcagcctccctagtagctgggattaaaggcatgcaccaccatacccagctaatttttatatttttagtaaagactgggtttcaccagattggccaggctggtgtcgaattcctgacctcaagtgatccacccaccttggcctgccaaagtgctgggattacaggygtgaggcaccaccactgaccttgtattgtttttaaagtctcagtttcatttatttctgctctgatctttattattattttccttctactaattggtttgttcttgcttctctaattccttgaggtgcaccattaggttgttaattttgaaatctttctacttttttaatataggtgtctattgctataaacttcctttttagttgtatcccatagataca

SEQ ID NO: 342721 - DNA, 541 bp, Homo sapiens
gactttggctaacagccagagaggtgctaaggttctcagtctaacagtttacaaataactaaatttataactaactaaataaccaccccagttttactgggatggtcctcatttttcctccatgtttgaaggatattttcactagatatactattctagagtaaaaggttattattagttttttttttcctttagcactttaaacatgtcatgccactctctcctggcctgtaaggtttccactgaaaagtctgttgccagaggtattggagctccattgtatgtggcttcttctctcctgctgcttttaggacactttcattatccttgaccttcaggagtttgtttattaaatgccttgaggaagtcttctttgggttaaatctcttggtgctctattaccttcttttacttgaatgttgatatcttctctaggtttgggaagttctatgatatatctctttgaatatactttctacccctmtctctttttctactttctctttaaggccaataactcttagatttcccctttcgaggt

SEQ ID NO: 342722 - DNA, 548 bp, Homo sapiens
aatcagtgatatggattgccagttcaagataatctccaaagctcagaggaaattgtaaagtgaaaaygaagagaggggagattaaaattgaataaaaagatgttattaaatccagtaattatgaatttaaaaccctcaaaaattgtcattgaagaagtattcaaagataccacagaaaacttatagagctgaaaaatgacttgaatatgtatattgaaatgacttactataccagttcaaaaaactgaatactaaagaaaaaataaactataagaacaaaagcaatattctacaaatattgggacagaaaaatgagcaaatattagtttatgtatataaagagaagtaaaatctgccttagatctctcccttgcagtataaaatcatgaaataattaatttttgctcccaagaaattttagattttcaagaacttagaataaattaccctccttatactttgcataagtacttaaactaagagattaagaatggaggtaactcaaagtttaatactacttttaaccaaaaaagagaatgagaataaca

SEQ ID NO: 342723 - DNA, 485 bp, Homo sapiens
ttcaaatctggaattgccatcataggccagagtaagtctagaatctagacttatgaatgcttccagtttgttcaaaatgccactaattggtagctggttgcaattggaagaatgccataaatgtaaatggacaccyaggtgtccagccctgctagcatatggtgtgacttttaagctcaaatttattcaggtgtatcacaaagaatcagtcagagaattttaaaatgtcatctttatataacgagggaaatttgacaccactaagtttatgggaaaagctgttccatgtaacaactaagtggagagcattacattttgaacaaaagagataactaggataatacgaatcaccatagcatttggaaagacctgggagttaaactcatatataccataaatctatgatctagctatcaatctatgtatctatctgtgtatctatctatctatctatcatgaacctactctaaaatttcatgctatag

SEQ ID NO: 342724 - DNA, 485 bp, Homo sapiens
ttcaaatctggaattgccatcataggccagagtaagtctagaatctagacttatgaatgcttccagtttgttcaaaatgccactaattggtagctggttgcaattggaagaatgccataaatgtaaatggacacctaggtgtccagccctgctagcatatggtgtgacttttaagctcaaatttattcaggtgtatcacaaagaatcagtcagagaattttaaaatgtcatctttatataacragggaaatttgacaccactaagtttatgggaaaagctgttccatgtaacaactaagtggagagcattacattttgaacaaaagagataactaggataatacgaatcaccatagcatttggaaagacctgggagttaaactcatatataccataaatctatgatctagctatcaatctatgtatctatctgtgtatctatctatctatctatcatgaacctactctaaaatttcatgctatag

SEQ ID NO: 342725 - DNA, 449 bp, Homo sapiens
taaactgcatacatttctaagaaccttgagacagtaaataagaagtggagaatactaatgcccatcatggtaatgcttacacaggaagccagccaaagctaaggactggcttccttaaggcagtacatccttataaacagacacttttctcaaagaaagctgagatggtctaacaaatcgacaaaggatagcactaccaaatgaycttcaatgtaggtgtagagtgaaaagctgtctttactttctgcattagcacactgtcaatgaatattcagatagacaaagacagggaaaaccaggttgagaagattagactgtttagaaagctgtcttggcaaaatattatatctgtgaggtatcctccagagctgaggctatgtccagctttctgtttgtcactgggaagtttacctgacaaaactgtcatgttcaacttcttaagccattcc

SEQ ID NO: 342726 - DNA, 438 bp, Homo sapiens
cattacagccccttccaggatattcctggggtctcttccatctctactaactgctgactacaaacagcctccacctatttcacctgacattgtactttatgaaagcagcagttctcagatggggctattttgcccctggggacattaggcaatatctggagacactgggggttgtctgtacttggggggagttgtgttactgcatccagtgagtccagggatccagggatgccgctcaacatcctaaaatgcacagggaacccccacacatacaacagagaaattgytgagccgaaatgtcagcagtgtcacagctgacaccctcacatacacacaatcacacagtatctgctctttcatgctcaggatctctcattctaatcatttcataggaaagagaaatgtcatttggaggtaggtagagtccaaaacaaagaa

SEQ ID NO: 342727 - DNA, 480 bp, Homo sapiens
caattgcataagcatttctcaaacctctgctgcatcacctgctaacatttcattggctcaagccagtcatatggctatgctgagatcagtagagtagaaaagtatatcttcccatggaaataaggagtaaggagataatatttctgagtaagaatctaaattaccatataccttttccaggagaaggagcactcaggcttctccccatagattagataaagtacttccttatgttggcatccaagacactcaagggagwtactaatggcattttggttaggacaattcatagtgtagaattgtcctgtgcattgtcagaggtttaatatccctagtttctgccagtatcatccctgaatcattatggtaatccaaaacatccccatacatttccaaaatgtcctttgtagataggtaccactcttggctgagaaccactgagccttatctcctgctaagtctttgtacacattctattca

SEQ ID NO: 342728 - DNA, 600 bp, Homo sapiens
agttccttatcaagattcagtcctactgtctgggagttctctgtgaatttcaaattccaaaacacatctggcttaagggtgcagtaaaggattgtgaagctgcactcagagactataagaaaaagatgtgataaacactcccattgcctatcaatgactgagctcttcagaggatgctgttgttgcttctgtttcccaagatgatcagagttcaggaagtggaattccaagcagctcagaggtaaatgagataagggttaaatggttctgtaaccatttcttctgcccctgcactgacagattatcccaaaagaacacagtcatgargagtaaagagcacagtcaagtgttgcaggacataactttgtcaaatacttcatatgtgccaggtgttgtgctaaaggctttactggcattatctcattcaatccttctaaaactttatgaggtagttactaatctacctattttacagatgagaaaaattgaggcttagagatattaatcagtgtgctgaaggtttgcaaagttagaaaatggtaacaaaattgtgaaatgactttctccatcaatttgcttgttttcgtcattagagtggac

SEQ ID NO: 342729 - DNA, 576 bp, Homo sapiens
gagttgtacttaccaagaattcttacaaattacaaggaagaaaaatgtaaaaactgtaattttgatcacgaacgtatcttatcttttctacgcaaggcatacattatacagaaaataatgacatcgactcrgtatcttttcctctgctgaccttaaaggataaatgtcttttacaatggcatattttcccctatgagattgtaaatatgtcttagtgcatatgaatgctgcttctgctttctgtgttataaaaatattacaaggcactctccattcctctggaattcagaaattttcacagagtcttcactaagtagggacaaaagaatgcaggctttggagaagtgatcatggagatgctatcctgacagggagagctgaagaagcccattgagctgcaggttcacaagttcaattattttcagagatgatagcaactctgtaaacacaggccacagatgtgtcactagccattgttcagaaggccaagaatattagaaagaatcttacaggaaagagaagttgtctttctttacacttcacctggtgtgagtatcaccttgggccagataacca

SEQ ID NO: 342730 - DNA, 509 bp, Homo sapiens
cttcacagccatgatgggagcagaaattgaaggcagaaaattcttctgttgtctgtcattaagttcctagactcctttttcatggctgccyctggtaacaaaggaatgtcctttatcttttgtattagtcaattcaggctgccataactaaatgccacagagtgagtggattaaacaaccaacatttattttcaacagctctaaaggctggaagtctgaggtcagggttcccatatggcagggttctgatggcttgcagatagctgccttctcactgtgtcctcacatggcagagccaggaagcaggctctctggtgtctcatcttataagggcactaatcccctaatgagggccccaccctcatgacctcatctaaacctaattacgtccccaaaaccctgctatgaactgaattcctgccctcaactttgtatgttgaaatcctaacccccaatgtaatggcatttggaaatgggacctttagaaggtagttaggacaaaagggtag

SEQ ID NO: 342731 - DNA, 662 bp, Homo sapiens
gtaggttgcttcacagctaaaatcaagcagagaatgataaatatgctacctattaggaagtgaacgtgtctctattgcttcactagacgtctcctgttgacttagagttccagcccccagtgcaggacataaggagaccaatgttttgtctattaaggtgacttctttaaattacaagaaaaaaacctgagatgagcataaatcttctcttttattgggttgcyacaggcacatatctcttctgcctgaaagacagtattatttaacaaactgaactaaaagttcaaactgaataaaccaggtgacttgattctgtttgtgtccaacattgttagcagaagctaccgtgtcaaaaagccattgctatgacataagaaatcaagcgaacccagtggtttttgaagacacaaatacatttatatattaagaaatataattgtgttgacaaattcttccatgctccatcacatacagaataaaactgtgtgtgtctttgtctgtataaaccacatccatctagtatggcactgcactctcttcctgggaatttttaaggtggctggccactagattcaaacaaataaagaaaggtaaaccattggaggcagtgatcactaagaaaagttttcatcaactctcattattattggacaaacatactt

SEQ ID NO: 342732 - DNA, 662 bp, Homo sapiens
gtaggttgcttcacagctaaaatcaagcagagaatgataaatatgctacctattaggaagtgaacgtgtctctattgcttcactagacgtctcctgttgacttagagttccagcccccagtgcaggacataaggagaccaatgttttgtctattaaggtgacttctttaaattacaagaaaaaaacctgagatgagcataaatcttctcttttattgggttgctacaggcacatatctcttctgcctgaaagacagtattatttaacaaactgaactaaaagttcaaactgaataaaccaggtgacttgattctgtttgtgtccaacattgttagcagaagctaccgtgtcaaaaagccattgctatgacataagaaatcaagcgaacccagtggtttttgaagacacaaatacatttatatrttaagaaatataattgtgttgacaaattcttccatgctccatcacatacagaataaaactgtgtgtgtctttgtctgtataaaccacatccatctagtatggcactgcactctcttcctgggaatttttaaggtggctggccactagattcaaacaaataaagaaaggtaaaccattggaggcagtgatcactaagaaaagttttcatcaactctcattattattggacaaacatactt

SEQ ID NO: 342733 - DNA, 555 bp, Homo sapiens
caagccaagctgggccacagacttaaatctaagacctgaaaccacaaaaattctagaaaataacattggaaaaactcttttgcacattggtcttggaaaataattcattactaagacccccaaaacaaatgcaacaacaacaacaaaataaataaatggaacccagttaaactaaaaaaggtctgcacagcaaaagaaataatcagcagagtaaacaaattaccaacagaatgggagaaagccttcacaaactatgcatccaacaaagaactaataaccagaatctacaaggaactcaaataaatcartaagaataaaacaaataatataaaaacaaataatcccatcaaaaagtgggcaaatgaaatgaatagattattctcaaaagaagatatacaaatggacaacaaacacgaaaaaaaagtgctcaacatcactaattgtcagagaagtacaaattaaaaccacaatgagataccatctaactcctccatgaatgaccattgttaaaaagtcagaaaacaatagatgttggtagggatgtggtgaaaagac

SEQ ID NO: 342734 - DNA, 290 bp, Homo sapiens
gttttccttctctccatgggtcacacgagccttctagtcagttttgatgaggtaacttggatactttggttgccgatgaaggattcacaagcttattatgtttttttccagtgggagcctctgaaggctgctgcttctagtcagccatattggcccggctctcctctcttcagggtgaaggarggggtctcttttggagccctaagcggtacagtgtggggttaggggaagtgtgaggtcatcacttccttgactatgccagctggtgtctcagtgtgtctcatgctccc

SEQ ID NO: 342735 - DNA, 496 bp, Homo sapiens
aaaaaaaaaaaaaaaagagacgctacatttcatataattttgggttttgagtttgacatgctttggtttttcctgaagtgacagccatcatttctttaccaggaaaaagagaaaaaaaaagaaaaagccattttcagaaaattttctatatctttttatttgtcatgcttktaatctatcatttgtaatcatttaaactttttttcaaggttcataatttaaatgggaccaattaattcatattggaactcaaggtctccctagctttcagcagcactgtccattctatcaagtacctacttcccccttcccttctgtacagcctcctgagaggtgagccatggactctcatctgcttgttgctttgtagatcagctgttcccctttcatattgcaaatttctgtgtttttcttatacatgtaatcaatcatttcttgatttccttttctttttcttgcagagattgcttcattttttgaagtatttctttaagtg

SEQ ID NO: 342736 - DNA, 597 bp, Homo sapiens
gtggtgtgtaaactactgtgatcctgagtggaaggaataaataatgaaccaatcaaaaataaccactacagcaacttttcaagacatagatagtacaataagatataaatagaaacagcaaaagttaaaaagcaggggtacaaaattaaggtatagagtttttattagttctgtttttgcttgtttgtgcaaacagtgttaagttaatatcagcttaaaataatgggttataaaagagtatttgcaaacctcatggtaacctcaaacaaaaaaaaatacaatgggtacacaaaaaataaaaagcaagaaactaaatcatatcaacaaagaaaattatcttcactaaaaggaagacaggaagaaagaagaaaaagaagacccccaaacatctagaaaacaarcaaaatgctaagagtatgctcttacttatcaataataacaatgaatgtaaatggactaaattattcaatgaaaagccaaagagtggatgaatggatgtaataaaaaacaagttctagtaatctgttgcctacaagaaacaaacttcacctataaaaacacacatagactgaaaataaagaaatttaaaaagatatc

SEQ ID NO: 342737 - DNA, 569 bp, Homo sapiens
gctaagagtatgctcttacttatcaataataacaatgaatgtaaatggactaaattattcaatgaaaagccaaagagtggatgaatggatgtaataaaaaacaagttctagtaatctgttgcctacaagaaacaaacttcacctataaaaacacacatagactgaaaataaagaaatttaaaaagatatcccttgccaatggaaaccaaaaaatagcaggactagctatacttatgtcagattaaatggatttcaggacaaaaactgtaggaacatacaaagaaggtcgctacataatgattaaggggtaaatatagctagakaatataactatcataaatatgtatgcactccaatctggagcacccagatatcttaaacaaattttattcgagctgaagggagacatagaccccataccatacagctggagactttcatactttactttcaacattggactggctactagacagaaatcaattaagaacatcagacatacctgtactataaatcagtggatctaacagatatttacagaacattgcatctaatggctgcagaataca

SEQ ID NO: 342738 - DNA, 595 bp, Homo sapiens
tacaacaatgtctcacatatcccactgtgtatttacagtggagttagtttttccaagccagaaaaacaagacccctcagctgtcagatatcaaactggatcaacattaccgatgcattagtagataattctccgtattagttctcatgtttctattacgtataacttactttttaaccacagctttgctttaaactataattaaaaagtcaactgaatctctgtgaaaacaaatggctcctgagattttgaaactaccagaaactaccagaaatttaaacagcctcaggagacagcacctacaggaataatgacaagcctgtagattgcataccraaaattacttagttgttaactaatttatgacttggaattttgataataactttcagccagtagggtcattgtgaagactttaaaactgctgtgcaagtcagaatgtgactcagccacagagaactgagactttttcaatctgagggcatggtgggaggtgggtccttcctaactaccttgtgggggtacaggaagaaagagaaagatccccacagaggctgactgtgttggcctaagtgtggggatttccaccaagcacc

SEQ ID NO: 342739 - DNA, 467 bp, Homo sapiens
aactagttttccaacttctgcaccactagggaatcaatctattctcatctttctgttttgattttctaagtcagaggctgacatgctcatatttgccttgaggtccaagatggctattggagctccagccatctcgtttgcgttcctcatgaaaaggaaggaaagaagtacataaagtcctttacacagatgtctgttcctgttttcagcatattttcatgtcttaccagtgtaactccctagctagaaattastttcaaggaagactaggtactttacaatcttttagcttgggtgtatcaccgccattaacaaattcagggccctgttgtcatggaagaattggagaaagatcctggataggcagctagctgtttctgctgcagtggacttcccagcatgcttcaagtcaactgtcacggtggggagggctggccttgtctctagggcttcatcctacctgaggt

SEQ ID NO: 342740 - DNA, 462 bp, Homo sapiens
cacctcatgacttacttttcataaacagtttactaatgagaatggagattcggttgttcataattctgtcacccaaaataatcatttgttctgtgcgtactaccactttccgaggcgactgtgcttccaaaactttttctgtaatcagaattctattgatcttagacaatgcagcatgtgtgtgtgaagtatggcagcaacttaatcttttgaaaagttgtggtcctgccacacccattgctttatctccatctgggtcctgcaagtgcctgatacaccgtcaatgttacatgagtattatccatccactggctaacctaaaactataacaacaaaagaaaacaaacccaaaaaagccagaacaagcaaacacaaccagaaacataagaaaaaacagtccacatrtatcatacccaagatttcaaacttcttcacaaaagtttccagaagaataatttgacc

SEQ ID NO: 342741 - DNA, 635 bp, Homo sapiens
ccccgtaattcagtcacctctcactaggttcctcccatgacacatgggaattgtgggagttacaattcacagtgagatttgggtggggacactgccaaaccatatcattttgttattaattaatgttgaaagaaagagttttctataatctgtgacttcagatacacctgcacttgaatatctgaatttaactgtgtgactttgagtttgttcctctactttattttattgcaaaatggggatggtattgactattgtcaactggcacatagtattcactccacaatattagtctacttcttcatttctctttattttatttctcatagataataacttctttggtgtcacaggctatgatttatttgtctttgacatctctgataactccgtaagtaggggtagatttccaaaaaaattgcagagttygcaaaattatagcaaatcattgccccgaagattactgaaaacaactagcatttctggagcataaatatcttgctaagcaccattctttgcacttcacatttattaattatttgtcttcatatcaatctatgaagtagtcactgttattatgaccatcttacagattagaaaacagtctgccacattaaatgatttgacaaaattta

SEQ ID NO: 342742 - DNA, 585 bp, Homo sapiens
gcatgcatatataatgcagaacataaatatgcatagattatatatgcattgtaatatatacatataacaaatatgtaagatatatgcatatcttatatatgtatatattataaatgtatacatatatgtcatatatagcatacatatataagatatgcatatattatatatgatatgtatatatttgtaatatatgcattatataatatataatatatagatatgagayatatacattgcttatatatacatacatcataatacatacatataatgtacatatagcattatgtacatagattttatatatatacctacattgtaatatatacatgtaatacatatataagatatatgcatatatctttatcattataataaatgataaatgtgcacagcatgaggtggtatggttttggaatagtcagaaaaactcctaaggagaggtaattatgtaagtacttagtctgaattacggtggtgagtagaaattagatctgtcagaggtggagggagagattaggtagagggttatggataaaattagtacgatgtgttggtggagatattggggtggatgacttg

SEQ ID NO: 342743 - DNA, 632 bp, Homo sapiens
tttttatcctgttgttgttttttttaagtgagaattcaagcaccaggaaataagattcatgcattcaatctgtcttggacattgtcttattcccaactcacagaatatttcctggtacacagtaagcactcttaatgttcttatctgattgatttctcatctgtcatctatttcatgatgatgtatatattataattcttatgaagatagcttactgaacatatttgggagtctttaggagactccaaacttttcctatatatttgcttaagctaccataacaagggaccacagacagggtgccttaaagcacagaactttattttctcacaattctagaggcaaaatatgcaaggtcatgatttcagcaggattagttcatcccaaggcttctctctttggcttgtagatggctgccttttgctggtatcttcatacagtcttctccctgtgtgtgtacacagccagccctccacatctgtgagatctatatccacacattcaatcaactgcagatcaaaatgttcaaaaaagataacaaataacaataaaataatacaataagttttacaaagaaatagcaacgcaacaaaamactatacaacaatataatacaaataaaaaactacagt

SEQ ID NO: 342744 - DNA, 625 bp, Homo sapiens
tatgaattttgggggtccacaattgagcccacaaggccatataatatgtcaytatgaatctactagaaaatatagagttcatgatataaaataatttataatccataaaactttcctgatttagaccatgggtcttgatttgttctttatttcagcaaacgctggtataatatgatactgatatgcttaagctcatgtaatggagacacaaaatacagtaactcaagaaagatacatgtttatttttgtttcagttcagacataagtggctattctatggcaagtgggcagttttccttcgggaggttgtccaggagcacagttcccttctaacttgttatccactattcactaaggtggttttctcatgtctgcatggctgaatctacccccactagtacaactttctcctttagaccaagagaaagggctagagaagaaatggtgaacaagcagttttcttttcaggacatgggcttgaagttaagcccttcacttcctctcacattccatggaattaatttactcatatcatcataccatttgcaaagaaagcttggaaatgcagtctcaatctggttgagtatgagatctgtcacatgattataccatatgtggtggttga

SEQ ID NO: 342745 - DNA, 625 bp, Homo sapiens
tatgaattttgggggtccacaattgagcccacaaggccatataatatgtcactatgaatctactagaaaatatagagttcatgatataaaataatttataatccataaaactttcctgatttagaccatgggtcttgatttgttctttatttcagcaaacgctggtataatatgatactgatatgcttaagctcatgtaatggagacacaaaatacagtaactcaagaaagatacatgtttatttttgtttcagttcagacataagtggctattctayggcaagtgggcagttttccttcgggaggttgtccaggagcacagttcccttctaacttgttatccactattcactaaggtggttttctcatgtctgcatggctgaatctacccccactagtacaactttctcctttagaccaagagaaagggctagagaagaaatggtgaacaagcagttttcttttcaggacatgggcttgaagttaagcccttcacttcctctcacattccatggaattaatttactcatatcatcataccatttgcaaagaaagcttggaaatgcagtctcaatctggttgagtatgagatctgtcacatgattataccatatgtggtggttga

SEQ ID NO: 342746 - DNA, 550 bp, Homo sapiens
aatccatgtcttctaaattgttaaatttattggcatacatttgtttgtgtattacatgttgtacttctaatatgtgtaaaatgtctagcagtaccttctctttattttttcaattttacatatctgataaagtaagcaacttttagcactaattttttcttctgtttgttttctaatttattgttctctactctgaccatggttatttgcttccttaaatttaatatgaatttagcttacatttattttgccagatrtaggtatttatttttgagactttcttctttactaatatgaggatataaagctgcacatttctctgtaagcactgttttagctgtattctataaattttgatatggtataactttattgtcttttagttgaaactatggtttctatttagtttttttggacatataagttatactcaattgtgttaccttttaaatatttgtagattttctggatatttctaatggtttctactttaattctgttgtgatcagaaatactacaattttagtcatataaggttgagtgacacatt

SEQ ID NO: 342747 - DNA, 588 bp, Homo sapiens
gggttgatgctccaaaatctaaaattaatgagtattttaggaagtgattttgatagtgatggtgtyattataattttttttctaaaagggagataataggactgtatcatatggtttccacaatccagatgtcaaatcagaaaacattctccccaccaaaaaaattaaaacaaatacagaggtaaatgtaggtataatttatgtagcaataatttgatttctatgattcttttttttcctgatgtggaaaatgggtataagattccccctctcattgggttgctaaaaggattaaagaaaattattagagaaatacctgacagataataggtgcctaacaattggaaggtactttatcttattccccacacagaatgacttaactaaattttgtagaaagaaaagctatttttaagaacgtgtggaacatgttcttttgaaaagcaacagatgctttgggaagtaattaactagtgcacatagaagaggacatttatcagtcacagaaagcattttacataaaaaggcagtttaaaagaggtaaagagaatgagaaaaaaatggccattgcaagctgatttcttcccc

SEQ ID NO: 342748 - DNA, 650 bp, Homo sapiens
tcaaaacaaatctcctgagtcggggtcagtactgtatctaaatggtaattctcctgaatccaggtgtagaattgtggattctatactcctttcttgttccaaatcacttttacataactttgaactaattttccctcaggactttaggaatcttctataacataggggccatatttatatgaaagctaacagatgtgattgggaagagtttacatatgtgggtatacatatgtgagtattgtcacagaaaatagtttaatgtgctactaaaattgtaaactaaactatatttttacgaagaagtttcttgacaacactttactctgccctatttgggtagataaaacacaaacgttttacacagtcwctaagagaaaacaaatagaaagttaatcagaaatagttgcccatgtagaatggccacactatcttacacatgaaaggcatacactggttatcaaatgtaaatggggatccaagtcataaaatcagagaaattctaagttttactttttctatttggtgactattggaaaggttacctaacgaagataatgctttaagtttacttacctgtaatgtggagataatgacaatatttcacagacttataaagattaaataagatagaaacgtagcctctcaaaata

SEQ ID NO: 342749 - DNA, 586 bp, Homo sapiens
gactatgacacctgattatgcacctttactgtaaataccttcagcctaggaacactggaccccctctgagagaacagccacaggctttacctcatttgcagggaagtttgaaaatcatctttatttactttccaggcaaaaatgacgaacgttttaaagcgccatcaggatccccaattaccttcctgccaccttcctttccttgtgtccaggaacctaacatttatttcctcttaccctcatgtttcccaagtttaaacctcagttttccagacactagttcttaggctacaattctaggacccaaatcgtaacacctgttcctcataaaatatgagctataggagtatctcagggctccactttctgtcttcacctagaacttctctgcatatcacttcttctttttctgggccgtcttgcgtgctcaaattcccattctggtaagctcttctgaagtctacrttgcatatgttaagaggctaactgcacagctcaaagacaatttaaaaaaatttaaaaacaggattctttccctttccaccatgctaactctatgttctacaatgtggctagtccagtccta

SEQ ID NO: 342750 - DNA, 582 bp, Homo sapiens
ttaccaattttctatacccattctaacaaggaatcttggcaagtatgagtkttaacaggaatgtaagaaaagagagggagaaaaagaaagagaaaggaaggcctatggtctgaccccctaataatgttgtatttctattgctcttacagtttttccctatgggatatttctgtgaatgacatagaaaacaagttagtgttttgtaagagagatttgttgatgatgtgctggggtagcactgacagagatcctaaatcaattcagcgtcttttttttttttcttttgagaaatgatgcctttatgatattagctctgttacttgagaaaaacagatctgtgtgatttattttattagacgtttgatctgactgcagagatttatgtttgttaaacttattccctggggatgaaggttagactacaaaagaagtctaagatgtttatgtaattaatattagataagtgttacatgcctttagaaatatggaaataacttttctttccaagtaacccaacataatttcacatcatttcacatgcatttcattagtatccactatgtagaaggtgctacagagagc

SEQ ID NO: 342751 - DNA, 602 bp, Homo sapiens
gacaaatgagtaatgacatgaatctgtcatagtagtatcatacacagtggcaaccactgatttttttactatagtagttttatcttacccagaatgtcatatggttgaaatcataccataggtaccctttttagattagcttcttttacttattaatataactttaaagttttcttttttatgttactttttcatggcttcatggttcatttctttttggtgctgaataatatttcattgtctgtattcctgatgtaccagaatttatttatctattcacctacagaaggatatcttggttgcttccaagatttggcaattatgaataaagctgctataaacatctatgtacaagtttttgtgtggacatgaggtttcatcccctttgggtaaatatcaaggagcatggttgctggatcacatggtaagaatatgtttagcttattaaaaaactggcaagctgtctttcaaagtggccgtaccatttttctttcccaccagcaatgaatgagagttcctgtgwctcattcatttgttgttctgagtgtttcatattttggccattttaataggtgtacaatggtattttattgttgtttaac

SEQ ID NO: 342752 - DNA, 567 bp, Homo sapiens
gctttgttatggggcagctcacagaaaaaattcagcaaaattagaactgaaagttctaaccatctttcaaaagcttacagtactaaakttcccaacccttcttgcatctctctttactatttctgctattcttattttgttctgatttattccatgcctttccattctgcctcaaaacctttttgaaagaaatttatataagaaaatacttatttctggaatctgaataatgtctttctgttcttgaatggccagaaagggagagaagaagggctttttatgactgtgtcagagattcttaaactatattaaagaactagcaacatgctttcagaagaggttttctgcttatacacaaacaaagaggagggcaagattaaagaaattaaaaattctgaagaaacacacattacactgatttctagtcaatgggacctgggtctggcatttgtcaattttatacataaaccgagtaatactggctttgtgatttgtttaaatacatatcatctttaggagtagatatgtcatttcctttcaaaaggttgtaagaaaaggagcagtaca

SEQ ID NO: 342753 - DNA, 567 bp, Homo sapiens
gctttgttatggggcagctcacagaaaaaattcagcaaaattagaactgaaagttctaaccatctttcaaaagcttacagtactaaatttcccaacccttcttgcatctctctttactatttctgctattcttattttgttctgatttattccatgcctttccattctgcctcaaaacctttttgaaagaaatttatataagaaaatacttatttctggaatctgaataatgtctttctgttcttgaatggccagaaagggagagaagaagggctttttatgactgtgtcagagattcttaaactatattaaagaactagcaacatgctttcagaagaggttttctgcttatacacaaacaaagaggagggcaagattaaagaaattaaaaattctgaagaaacacacattacactgatttctagtcartgggacctgggtctggcatttgtcaattttatacataaaccgagtaatactggctttgtgatttgtttaaatacatatcatctttaggagtagatatgtcatttcctttcaaaaggttgtaagaaaaggagcagtaca

SEQ ID NO: 342754 - DNA, 613 bp, Homo sapiens
tttagcttcttttgcttaacacagttttttagatattcttattgtttttataaattagtagttcattatttttcattgctggctagtattctatgaatgcagaattatttatgtatgcattttcttatttatgagtattcagattgtttaaattgagggtataaatgaataaagttgctatgattattcatatacaagtctttttgaagaaatatgtttttatttccctttgataaagaagawcgaaataactggctcttaggatatgtgtatgttcaacttcataaaaaactgcaaaactgtaaaaaaaaaagaaatagttatctaacatcttttacatcatttcatctgtgatatgaggtaataattgcatttattggttcattaagataatttaagataataccactagaacagtttgtggcatgtttaaatccttgacatgtggtagctattgttagaaagccactaacacatatattaaaaaaattatttaatgtcttttatcttggaattcatttggttatggtaatctaataggacaaataatacagttatgaatcccaaatttatagaactttgattcttggaagaagagaaaagcagataacag

SEQ ID NO: 342755 - DNA, 613 bp, Homo sapiens
tttagcttcttttgcttaacacagttttttagatattcttattgtttttataaattagtagttcattatttttcattgctggctagtattctatgaatgcagaattatttatgtatgcattttcttatttatgagtattcagattgtttaaattgagggtataaatgaataaagttgctatgattattcatatacaagtctttttgaagaaatatgtttttatttccctttgataaagaagatcgaaataactggctcttaggatatgtgtatgttcaacttcataaaaaactgcaaaactktaaaaaaaaaagaaatagttatctaacatcttttacatcatttcatctgtgatatgaggtaataattgcatttattggttcattaagataatttaagataataccactagaacagtttgtggcatgtttaaatccttgacatgtggtagctattgttagaaagccactaacacatatattaaaaaaattatttaatgtcttttatcttggaattcatttggttatggtaatctaataggacaaataatacagttatgaatcccaaatttatagaactttgattcttggaagaagagaaaagcagataacag

SEQ ID NO: 342756 - DNA, 544 bp, Homo sapiens
gagcaagaaatattttatttttattgctattaaagtaagtagcatacttttctgttagtcatcaggaaattattgtccataaaactttcctaggagaaaaaataattaaaattcttcttcttctgagaatccatatttactactacttgggtgtattagtcagcttataatagataaatggaaaagcagcagtgacaaacatccctaaatttcgtacactgaaaatgtgtttctttctcaaataaacctcacagattggctagagttctkttctactcagaatctaagctgataatgcttccatatttttgtagttactgtatctgcaaaaagactttagtggtcacaacagcaggggaagagagaattggagggccacctactggctcttttgtcctcttgcctatatatgaaacacatagattctgtgcacagtttactcacaaaagctagcacttttccctgcctaattgcaagggtgtgggaaactgtaatactacttcagaagtgcagaaggaaaaagcataagatttgagtaagcact

SEQ ID NO: 342757 - DNA, 579 bp, Homo sapiens
ttttggaagtatacaacattcagaccatarcagggatagtgtatgtacatgtaactatccatgactggcttatagtagaaaatttaaaaatgttgccattagtgtttctgtattatctctacatttcccctatgataaaggagggaagaaaaacagttcattcacacaacaaataaggatagaaatgaagggtatggaatggaaaagtaccatatctagagtgaataaactttatatatataggactggtatatgtgtgtgtgtgtgtagacatgtgtatatatatacatatatatatatatatacagacacacacacatctagtatatatacataacacacaatctctgtcactctctctatatagttgtacatatggactaagcaaacttgtaaaggaattaaaattttagaagaatttaaaattttaggtgtacattggaataggccaaggggatagagattcttgagcattcttctgtctcctttgcagctatttctaataaaaagaaaataaaatctaggcaaatctttgacacatgtattgaccagaagggtggttgtctatgttaaaattaa

SEQ ID NO: 342758 - DNA, 614 bp, Homo sapiens
gactttcagtcatttatttactactcattcaatacatagttattgcaagagaagtgtcttagtaagaggacaaaatacagcaaagaaagaaatcatggttgttccttcaggaagatttcaggctacagacaggataagtagtaatcaagttatccagcatctacaagaaacttaaacaaatttataattaaaaaaacttcatttaaaagtgggtaaagatatgaacagacacatttcaaaagaagacatacatgcggataataatatgaaataaaagctcagtatcactgatcattagagaaatggaaataaaacccaaaatgagatacartctcacaccagtcagaatggctattattgaaaagacaaaaaaaagaaaaaaaaaaagatgctggtgaggttgcagagaaaagggaacccttatacactgttgatgggagtgtaaattagttccatcattgtggaagacagtgtggtgattcctcaaagacctaaagacagaaataatatttgacccagaaatcccattactgggtatatgcctaaaagaatataaatcattatattataaagatgcatgcacacatacgttcattgaagcactattcacaata

SEQ ID NO: 342759 - DNA, 432 bp, Homo sapiens
acttgaaagttaaattaaagaaatccccccaaaattttcaaaaaatggaaatggtataaaaaaagcaaacagagtaaaacatttgtaaaaagtaaatttttacttaaattctgtgttaatatatcaaaatcatttatctcaagtaatacttggctaaattcctttagactttaacaggttgggagccaaatatttttttcygtgttactcaattatgccccatgtgtccttgcactgagatgtgtttaatgttgattattgggtcaagtcagggacttgataacctctgatttacaaaaacatgtgatggaatactacaagataaactcttcatgtgaatgaatttatgttatgtaaccaataaatttagaattttaagaaatgagatataaataactttttgttgtctgtatatgcattttactttttaaa

SEQ ID NO: 342760 - DNA, 482 bp, Homo sapiens
tggaataaaggtgattcttgctgtgcttaacagagactagaggcattgtgcctctgctctagagttttaggaagctttgaacttgagagagatgacttacagtatctggcagaagaaatatctaagcagcaaagcattcaggatgtggcctggctatttttaaaagyctatgctcatttgcataaacaaagaaatgatcttaagatagaacttatatttaaaagggaagcagagcatacaagttcagaaaatttgcagcctgaaaatgtgtagtaaagaaaatcccacattctaaggagaaattcaagcttgctgcagaaatttgcataagtaaagaaaagccaggccaggcatggtggctcacagctgtaatcctagcactttgggaggccaaggtgggtggatcacctgaggtcaggtgttcaagaccagctgggccgacatggcaaaaccccatgtctactagaaataccaaaattagc

SEQ ID NO: 342761 - DNA, 569 bp, Homo sapiens
actagggtggaagaggagacaaccagggaatggagaataaatgctaatgtgtacaaggtttctttttctggaggtgttgaagatgttctaaacttaaatggtggtgatggctgcatgactctgtgactataccaaaaatgaatgcattatatactttaagtgaactaatttcatgatatgtgaaattatctcaataaagccataaaaatattaaaacaaaaaaagtttwaaaaaagtcaaaacaaaggcactggcaccaagtcttaacagtgccttgaagaaagtcagcgttaagtcccaaataaagtactactagacacgattatataccattgaaaggctcttcttgcaagggttaagctatgtctgaaaataaatccaaaaggagttccaatataattttaatgtcaatgttgttagaaaatgagatgttttgaagactgatcagtggctataaattactcacttggctgtaaattactcatttttattcatggttttataattcaagtacattccttaaaaaacaaaaatactctttatcccgtaacctcacttgcataagtctc

SEQ ID NO: 342762 - DNA, 556 bp, Homo sapiens
tatcctgtctcaagtaacttactttctcagagtctgacttaatcccagtttgttccccaagagaggacttctagagtagagtagtcttattaccaattttaccatgaaatgacaaaaaaaaaaaaaaaaaacaggtttccaccaaaaataaaaatcattttttctctcccttatatattgagattcattgtcttttaagaaacttacttttctttattgtcccattcygctgagaatctaatgtgctctaactttactgcaaatttttattaaatttgtataaaaattattaaatttttattaaattttaatcataagaactgatatttaatgtctaccctgtgctagatacattacttattttatttagtgaaaaaattctgaggttgaaactctatttttatacttaaatcaaaatgattaactttctaaaggactcagcttgcaagtatcagagctgacatctgaactcaaggcaacctgctccagagtctgtccctgctctgcaaaacagcacactggaagagcggcattttggttcttcctatatatttaa

SEQ ID NO: 342763 - DNA, 556 bp, Homo sapiens
tatcctgtctcaagtaacttactttctcagagtctgacttaatcccagtttgttccccaagagaggacttctagagtagagtagtcttattaccaattttaccatgaaatgacaaaaaaaaaaaaaaaaaacaggtttccaccaaaaataaaaatcattttttctctcccttatatattgagattcattgtcttttaagaaacttacttttctttattgtcccattccgctgagaatctaatgtgctctaactttactgcaaatttttattaaatttgtataaaaattattaaatttttattaaattttaatcataagaactgatatttaatgtctaccctgtgctagatacattacttattttatttagtgaaaaaattctgaggttgaaactctatttttatacttaaatcaaaatgattaactttctaaaggacycagcttgcaagtatcagagctgacatctgaactcaaggcaacctgctccagagtctgtccctgctctgcaaaacagcacactggaagagcggcattttggttcttcctatatatttaa

SEQ ID NO: 342764 - DNA, 567 bp, Homo sapiens
gggtatttgtaaataaatgagtactgaccacaattagcatctcaaaaggaggcagtgacattctgaatttttttctctcttttttttttctttgagagagaaagggtcttgctttgttgcccaggctggagtgcagtgatgccatcatggctcactgcagcctctacctaccaggctcaaacgatgctcacacctcagccttccaagtagctggggctacaggtgcatgccgccacacctggctaatgtttttctctttttgtagagactgaatctcactgtgttgcccaacctggtcttgaattcctggactcaagcaatcctcccacatcagcctcccaaattgtggggattataggtgtgagccactatgctaagccctaaactttttccttgggcaatagttttcaaacaktttctgatagtaattattctaaagcaatcatcttccagctattttgccaattacccacaataaagatctgttttatattacaatctggtacacatttataaagataggaaattataggtttacgaaaacaattattttccttactacaacag

SEQ ID NO: 342765 - DNA, 567 bp, Homo sapiens
gggtatttgtaaataaatgagtactgaccacaattagcatctcaaaaggaggcagtgacattctgaatttttttctctcttttttttttctttgagagagaaagggtcttgctttgttgcccaggctggagtgcagtgatgccatcatggctcactgcagcctctacctaccaggctcaaacgatgctcacacctcagccttccaagtagctggggctacaggtgcatgccgccacacctggctaatgtttttctctttttgtagagactgaatctcactgtgttgcccaacctggtcttgaattcctggactcaagcaatcctcccacatcagcctcccaaattgtggggattataggtgtgagccactatgctaagccctaaactttttccttgggcaatagttttcaaacagtttctgrtagtaattattctaaagcaatcatcttccagctattttgccaattacccacaataaagatctgttttatattacaatctggtacacatttataaagataggaaattataggtttacgaaaacaattattttccttactacaacag

SEQ ID NO: 342766 - DNA, 631 bp, Homo sapiens
tcagcttactgagtcttcagatcacaggttctgcaaaagggtgactgggaagcatgggaaatcaaaggtgggcttacatcttctcctgcgagtgttctcaaaagtgagcttcaggagtcccgttcagccccatagtgcagaatggattgggagacctcattttgatggagcccatggaaatgccaatctcttggcaaaccagaacccgaccatttcctttcacctgsgcagtcacaccctagcctcctgtgaactccctggtctcatctcctactactttctctcttgtttactttgccccctcctacacccttgccccagggcttttgtacttgcttccctaaatcagataaatattggagagtaaattgaacttctagcagaaaatttctagatgaaattagctgacagggccaattgctttttaatgccctttctagtttttattacgtagatgacatggttttcacttccttctctttgtatccagtttagcccaatgtaaggcaatcattatattgaaaggggcagcatccaggacaatcagcctgtaagaggcaaggtgactacacaagaaactagagcaaggggctcagactcaggtctagcaggtagaagagcaaagcaggca

SEQ ID NO: 342767 - DNA, 631 bp, Homo sapiens
tcagcttactgagtcttcagatcacaggttctgcaaaagggtgactgggaagcatgggaaatcaaaggtgggcttacatcttctcctgcgagtgttctcaaaagtgagcttcaggagtcccgttcagccccatagtgcagaatggattgggagacctcattttgatggagcccatggaaatgccaatctcttggcaaaccagaacccgaccatttcctttcacctgcgcagtcacaccctagcctcctgtgaactccctggtctcatctcctactactttctctcttgtttactttgccccctcctacacccttgccccagggcttttgtacttgcttccctaaatcagataaatattggagagtaaattgaacttctagcagaaaatttctagatgaaattagctgacagggccaattgctttttaatgccctttctagtttttattacgtagatgacatggttttcacttccttctctttgtatccagtttagcccaatgtaaggcaatcattakattgaaaggggcagcatccaggacaatcagcctgtaagaggcaaggtgactacacaagaaactagagcaaggggctcagactcaggtctagcaggtagaagagcaaagcaggca

SEQ ID NO: 342768 - DNA, 580 bp, Homo sapiens
tgtgtaatggattttcctctcaggattgctttaactgcatccccaagttgtgacatattttcatttttattcagttctaacagttcacttagttttgaaactttctcttcacacgtggattatagagaaatgtgttgtttaatttccaagtgtttggagattttcctattatacctccattgttgatttccagtttgattccattacagtcaaataatgtactctgtatagttttaattgttttaaattttttgaggtttatgatccaggatatggtctaccttggtgaatattccatagatgcttgaaaagaatatgtattctgctgttttggggtacagtgttctataaatgtctattaaaccctgttgattgatggaggtgtttagttctatatctttgctgatttcccagtatttctatcaattattgagagagggatattgaagtccccaactataattatagaattgtccatttctcctttcaattcaataattttgtttcatgtattctgaagctgttttttggtgcatatactttataattgctatgycttcttggcatattgatcatctta

SEQ ID NO: 342769 - DNA, 327 bp, Homo sapiens
aagtactgaatgtgagcttgtggtatcagggaaaggggagcttgtgatgagttccctctgtcaagggttacctaaagttccatgtgaatgacaagtagcccttatctcttggtgtttggatgggctgagctgggctgatggacaaggtctttccataacttcagtckctttgcacctgctgacttacaggggcttttgcctcctaactgtaagaaagggaagatgtttggacaggcaagaaggagtgaagagaaagtagaccaaaatggagcttgggtcagtgtggagaaagcttttctcccagccccttgtatcaggtttgagcac

SEQ ID NO: 342770 - DNA, 523 bp, Homo sapiens
ttacaggggcttttgcctcctaactgtaagaaagggaagatgtttggacaggcaagaaggagtgaagagaaagtagaccaaaatggagcttgggtcagtgtggagaaagcttttctcccrgccccttgtatcaggtttgagcacctgtgcataggggcataaaaaccaacaagagtggctcatgagaagcttgaggacactctggacacaaagagctgcttcagggcccaggaaacagagtgggacacagctgttggagaaggccattctcagcagaacaaagtacagctcaggcccctcaaggaagggaaattcccaaaaccatttgcatccttaactctatctgcttcccatggaatccaatctgagacgtgtacacattggtcttttcagattcttgatccactcaattagaatcattgcaaaagatttgaaaaaagtttctatctcatccttgaagacaaatagaaaggtttcatatcactggagtaagcctaggatcataaggtttgggaagtttgat

SEQ ID NO: 342771 - DNA, 523 bp, Homo sapiens
ttacaggggcttttgcctcctaactgtaagaaagggaagatgtttggacaggcaagaaggagtgaagagaaagtagaccaaaatggagcttgggtcagtgtggagaaagcttttctcccagccccttgtatcaggtttgagcacctgtgcataggggcataaaaaccaacaagagtggctcatgagaagcttgaggacactctggacacaaagagctgcttcagggcccaggaaacagagtgggacacagctgttggagaaggccattctcagcagaacaaagtacagctcaggcccctcaaggaagggaaattcccaaaaccatttgcatccttaactctatctgcttcccatggaatccaatctgagacktgtacacattggtcttttcagattcttgatccactcaattagaatcattgcaaaagatttgaaaaaagtttctatctcatccttgaagacaaatagaaaggtttcatatcactggagtaagcctaggatcataaggtttgggaagtttgat

SEQ ID NO: 342772 - DNA, 588 bp, Homo sapiens
atgggttaaattgccccaggccttacacccttctaggaatagccccatttttagatgcaagagtctctctacttaggaatttaaaacaaaactaaagttcgacctatcagtaactttagaaaaacttgaagctaaaattgaaaagaattgcttgaaaccaaaatggaattcactgagattctaaagactctccactttagaattacaggcccctaaagtgtgttcctcagacaccccaccaaaacaacarcagctgactcaatcctgttctcactgctcctagctgcacagaaagccatggctcttcagagcaaaggttggatagatgaagcagtagcttggagaccttaccttccagagagcgcagtaagtgtacagaggactttacctctatcaatacaggcagacacgaagctgacctttgttctcctcctctcctggagacttggctcttcctatagacccgtttgctcataaggggctcaaattccagaggtcagaaagctctcatcacagctacccaagaagcaggtttcacaaaggactctagacacagactgactcccactctgtctgcgagggcagagg

SEQ ID NO: 342773 - DNA, 588 bp, Homo sapiens
atgggttaaattgccccaggccttacacccttctaggaatagccccatttttagatgcaagagtctctctacttaggaatttaaaacaaaactaaagttcgacctatcagtaactttagaaaaacttgaagctaaaattgaaaagaattgcttgaaaccaaaatggaattcactgagattctaaagactctccactttagaattacaggcccctaaagtgtgttcctcagacaccccaccaaaacaacagcagctgactcaatcctgttctcactgctcctagctgcacagaaagccatggctcttcagagcaaaggttggatagatgaagcagtagcttggagaccttaccttccagagagcgcagtaagtgtacagaggactttacctctatcaatacaggcagacacgaagctgacctttgttctcctcctctcctggagacttggctcttcctatagacccgtttgctcayaaggggctcaaattccagaggtcagaaagctctcatcacagctacccaagaagcaggtttcacaaaggactctagacacagactgactcccactctgtctgcgagggcagagg

SEQ ID NO: 342774 - DNA, 575 bp, Homo sapiens
caccttgcccactttcttctaggcccactgaggacaagaactgtgtgttattcacctgagtgtccccagcaaggactccacacaaaaggtgctcaataactagttactaaaatcaattgctgcaactgcacatcccctaaacattgccctaacactcatagacacatgcagtgtcttgcttattaaaggcaaaccacaagtatttatagaattcatttgatactgggttctcctaagtcagggctaccatacaaggttgcacagaatgtcgattgcaaagagataccacattgaaaaggctgtcttccacattgcagccatcaaaggcttaagtataaaagtgaaaaccacaaagctcttagatgaaaacagagatgtaaatcyttatgatctaggattaagcaatgatttcttagatatgccactgaaagcacaagagacaaaagaaaaaataaaatcgggcttactcaatatttaaaaacttttgtgcttcaaaggacaccatcagaaaatgaaaagacaacccacagaatgaaagaaaatttgtgaaaatcatatatctgataagagacata

SEQ ID NO: 342775 - DNA, 520 bp, Homo sapiens
acgggggcaggcaaatccagtttgttggtatagggtgtctaactggggaacttacagacaaaagcatggtcttcagtggccacgagacaggtagatctccacaccattattccccagaaccagggcttatataccaaagggaaaggggtatgtgctctatagagacaatgaaaggcaaccctccagaacaggccagaatgctatgtgtgtcatagcttatgatttgtgcaataacatcaacatttctttgacctaaaagcaggagtacatgttcttacactaaggacactacgtakaaattaggacacattcataggactagggctaatcagaagttaacgcggaggattcacatccaagatggagtcgcttttgtctctacagatggctaaaagtaattaggaaatcgttagtaagtactttaagctgtgtgttgttaggctaattacttcacctgtctgcacctcagttcatccatttgtaaagtaagaataatggaagtgccttttttatgaagttg

SEQ ID NO: 342776 - DNA, 520 bp, Homo sapiens
acgggggcaggcaaatccagtttgttggtatagggtgtctaactggggaacttacagacaaaagcatggtcttcagtggccacgagacaggtagatctccacaccattattccccagaaccagggcttatataccaaagggaaaggggtatgtgctctatagagacaatgaaaggcaaccctccagaacaggccagaatgctatgtgtgtcatagcttatgatttgtgcaataacatcaacatttctttgacctaaaagcaggagtacatgttcttacactaaggacactacgtagaaattaggacacattcataggactagggctaatcagaagttaacrcggaggattcacatccaagatggagtcgcttttgtctctacagatggctaaaagtaattaggaaatcgttagtaagtactttaagctgtgtgttgttaggctaattacttcacctgtctgcacctcagttcatccatttgtaaagtaagaataatggaagtgccttttttatgaagttg

SEQ ID NO: 342777 - DNA, 520 bp, Homo sapiens
acgggggcaggcaaatccagtttgttggtatagggtgtctaactggggaacttacagacaaaagcatggtcttcagtggccacgagacaggtagatctccacaccattattccccagaaccagggcttatataccaaagggaaaggggtatgtgctctatagagacaatgaaaggcaaccctccagaacaggccagaatgctatgtgtgtcatagcttatgatttgtgcaataacatcaacatttctttgacctaaaagcaggagtacatgttcttacactaaggacactacgtagaaattaggacacattcataggactagggctaatcagaagttaacgyggaggattcacatccaagatggagtcgcttttgtctctacagatggctaaaagtaattaggaaatcgttagtaagtactttaagctgtgtgttgttaggctaattacttcacctgtctgcacctcagttcatccatttgtaaagtaagaataatggaagtgccttttttatgaagttg

SEQ ID NO: 342778 - DNA, 436 bp, Homo sapiens
aaattcagtaaagttacaggatacaaaaccaaaaaacaaaaatcagcagcatttctatatgtcaatagcaaaccacctgaaaaataaatcaagaaagtaatcccatttgcaattgctacaaataaggtaaaatacctaggaataaacttaaccaaagaaagatctctacaatgaaaactataaaacaytgatgcaagaaattgaagaggacaccaagaaattgaagaggatattccatgttcatggattggaagaatcaatagtgtgaaaatgtccatactacccaagggaatctacagatttaatgcaatccctgtcacaataccaatggcattcttcacagaaatagaaaaaaaaatcctaaaatttacatggaaccacagaagacacagactagctcaaagctatcttgagcaaaaagaaaaaaaaaactggt

SEQ ID NO: 342779 - DNA, 560 bp, Homo sapiens
gaacatacatgtgcatgtgtgtctttatgatagaatgatttatatttctctgagtatatacccagtcatgggattgctggtaaaatggtagttctgcttttagctctttgagaaatcattgcactgtcttccacaatggttgaagtaatttacactcccaccaacagtgcatagcattccttttattccgcaaccttgccagcttttgttattttttgacttttattaatagccattcagactggtgtragatggtatctccttgtggttttgatctgcatttctgtaataatcagctatgttgagctctttttcatatgcttgttggccatatgtatatcttcttttgaaaagcgtcggttcgtgtcctttgcccgctttttaatggggtcatttttttcttgtaaatttgtttaagttccttatagatgctggatattagatctttgtcagatgcagtttgcagatattttctcccattctgtagcttgtcttttcactctgttgatagtttcttttgctgtgcagaagctcaaaaacagaaagattttttaaaaatt

SEQ ID NO: 342780 - DNA, 426 bp, Homo sapiens
tatttggagatagggtgtttatagaagttaatcaggttaaatgaggtcaaagaggtggggtcctgaatcaatggaattaatgtccttatatgaataggcaccagtctggtcgggtggctcacacctgtaatctcagcactttgggaggcccacgtggsgagattgcctgaggtcaggagtttgagaccattgagaccagcctggccaacatggtgaaacctcgtctctactaaaaatacaaaaattagccaggcatggtggtgcgtgcctgtaatcccagctactcgagaggctgaggcaggagaatcacttgaacctgggagggggaggttgtagtgagccaagatcacatcactgcactccagcctgggctatagagtgagactctgtctaaaaaaaaaaaaaaaaaaaaaaaaaagaataggc

SEQ ID NO: 342781 - DNA, 426 bp, Homo sapiens
tatttggagatagggtgtttatagaagttaatcaggttaaatgaggtcaaagaggtggggtcctgaatcaatggaattaatgtccttatatgaataggcaccagtctggtcgggtggctcacacctgtaatctcagcactttgggaggcccacgtggcsagattgcctgaggtcaggagtttgagaccattgagaccagcctggccaacatggtgaaacctcgtctctactaaaaatacaaaaattagccaggcatggtggtgcgtgcctgtaatcccagctactcgagaggctgaggcaggagaatcacttgaacctgggagggggaggttgtagtgagccaagatcacatcactgcactccagcctgggctatagagtgagactctgtctaaaaaaaaaaaaaaaaaaaaaaaaaagaataggc

SEQ ID NO: 342782 - DNA, 426 bp, Homo sapiens
tatttggagatagggtgtttatagaagttaatcaggttaaatgaggtcaaagaggtggggtcctgaatcaatggaattaatgtccttatatgaataggcaccagtctggtcgggtggctcacacctgtaatctcagcactttgggaggcccacgtggcgagattgcctgaggtcaggagtttgagaccattgagaccagcctggccaacatggtgaaacctcgtctctactaaaaatacaaaaattagccaggcatggtggtgcgtgcctgtaatcccagctactcgagaggctgaggcaggagaatcacttgaacctgggagggggaggttgtagtgagccaagatcacatcactgcactccagcctgggmtatagagtgagactctgtctaaaaaaaaaaaaaaaaaaaaaaaaaagaataggc

SEQ ID NO: 342783 - DNA, 591 bp, Homo sapiens
acatatattttggctgaaataataatgatttttctcacctcgattccattgccagaactgcagttatttcttgttgggaagcttgtacttggtataaaagcttaacaatatagttaaagtgctctgggtcaagcaccatcccggcttcaacaagctgtagaagagaaaagaaagagtggttattcttacaaaaatgtgacagaattgaggagccaatgtgtgtgaaacaactaagacactratggaagaagtgaaacatggagacaagtggaataaaactcatttaaaaaaattgaggcacagaaccacaaaaagatatcctaagaatttaaagcaaaaatgaaaatattaagtttttggattttcttcctgctctctaagttatctcaaccactttatcatatatacctcttatttagtactcagtctgtcttctaatctaggactggtattcatacctcatccctgattataaacttcctgagaagtattgttcctgtgcctcacatagggccatggcagagaagaatcagtgattccttgataaattaatcactcaggtggaccaactgcccacatgtaacatagcac

SEQ ID NO: 342784 - DNA, 601 bp, Homo sapiens
gataaactggatcatatgctgttagtgagaatataaaatggtacagccactctgaaaagcagtttgacagtttctctacaaactaaacatgcacatcccaaaggcagctgttgaactcctgggcatttatcctagagaaatgaaaacttttggtcacataaaaacttacacgtaaatgttcttagcagctttaattgtaataaccagaaactggaaaaaaaaaaaaaaactcagatacccttcaataggtgaatgagtagttatagttaaactgtggtacataccatggcatactattcaggaaaaagagggagaaactatgaaatgtgcaacaaattggattgatctcaagggaattgtgttgaattttaaaagctaatctcaaaaggctacatgctacacagtgcatacatttcatttatgtaatattcccgagataacaaaactaagaaatggagaactgattagtggttgccaggggacagggacagtggagaggggatgagtataaaagggtatcatgmgaaagttcctttgtagaaatggaacagttgcagttacatacacacacacaaatacatgtaaaaattgataaaaactg

SEQ ID NO: 342785 - DNA, 622 bp, Homo sapiens
agggtaggagcagtagagatcatgtgccaggatttggtattttttttctccttttagtcacagttatttttgaagttttgacatcctctgtctacaagttaggctgaaggtatgatttcatgtggaatttgctttttccttcttattgttttggggaggaaatagtataaagtaggtgtctatatagctgcctttttttcagctctgaagaatgtttatagcatattatatacattcattttttcttctggtttcttataaaccataggacagattaattagaagcagcagtgacttttaaggggtgaatatagtataattaactcttttcttttgttaaaggttacagatgagacgatttaaaaagaactggaagtgtgatttagattcagccttgaataaattagaggtatgacatttattattttaaatacattgctgggatctctgaaaatcaatagcaacaaaaaaggtttgaatawtaaccccattttatgaaaagttttagaaatgtggctgttatacagagaaaatgctcaaggaaaggaagttttgtttttcttacaagttaatattttgaaaggcaaacgttttaatttctagagttgtggactgtactaaa

SEQ ID NO: 342786 - DNA, 618 bp, Homo sapiens
aacactcacaaaaaactatgaagatgaaagaccagatattcccttttgtgaatttgctgaaacaggtaaaatgtaactattggcctgaatattgtgtatgaggatggtgcagttttcttttttgttttttagagacagggtcttcctttgttacccaggctggagtacaggggtgcggtcatagctcaccgcagcctcgaactcctgggctcaagcacttctcctgcctcagcctcccaagtagctgggactacaggcacatatcactacacycagctaatttttttattttttgtagacacagaatcttgcttcattgcccaggctagtctcgaactcttgtgctcaagggatcctcccacctcagcctctcaaagcactggtattacagacataagtcacagctcggccagtggcagtgttcttaacaagaatgtaaaactaaaaaaaaaattaaaaaaagaaagaatgtaaaacccttgaatattttccatgttgtggataaattaatgcaggctttagatactcttccttctctttctgaatttttccatctatttattgttagattatggtaaaaggtcaagaattggtgttttagtatcaaacgtttcacat

SEQ ID NO: 342787 - DNA, 591 bp, Homo sapiens
atcaaagatgaggattaccaccttggagaatgtgatacagattctgaatatgacttcagaagagttttaacttcctaaattggtttggaaggaagaatccttgtttagataattaagttttgggtatatttgtgtcttatctagtgtaatgcacatagattttcaaaactcatctagtattcyaagatacactaaaggaaaactattcagagggtaatttaaactttttggtataattcagaaagtattctgaatttttgtgttcattttcaatattgttttattattctcgattacagatgtagtacagctttagagactggactgagtacacactaaacctatttcatacccctaaatgttttcctgaaaactccagttacctgcttgcatattttccctattatgtctccctcttactaaatgctgcacagtattcagttttggatttcagaataaagtgggatttaccatgcttagtttcttttaaagtcaaaaagtaatctgaaaagtcacttttctgtgtgaataaaatcaatgaaaattacatatcaataaaaatttagtgctttaaaactattaacttgctgt

SEQ ID NO: 342788 - DNA, 611 bp, Homo sapiens
actttctgcaaacacactggcagaagagctgagcagaaagaactgtggatgtgaatttcagctctaagagagggagatgagccacatgggctacctgagcctccrtttatggagtgcatcgtttacaagagcgaatacacctactttgtgaggctgctgtgaagactgagcccagcatatcgtgataactagtagctattatgaagggatggtcacaagatgatggtggggtactctaagcttcagctagcaaaacggggcaccacagctgtgaggacttcaaccccctcgagtggggagggagcgctgagacaagcagaggcagagagcccaccctaacaggggattccaggggaactggcagcagaccaatcctctacctccacctgttttcagaaacctggggaagcaagccaggaaagagggacgtggcgaggttcttgacaacacagctccctagatacaaagcaggtgcacaaagtaggtgctcaataaatatttgttgaatgagcaaatgaggtcaccctgtttctcccccagctctaatcccagaagtcctctggagaagcaaatctcgacctccttcctcaaacactgtcatcagcaataca

SEQ ID NO: 342789 - DNA, 632 bp, Homo sapiens
ctgtgatcagattacaacaaacgaaacaagaagttagccaataggaaaagaaagcaagaagtgggtgttgtgtgggtctttcctttttgatgttatatgcacttatatgagatatctttataaactctcttttctttgccaaagggaggctttatacttacataaggtaaattattttcatcctacatttctgtgccttaccttcgttcaagaaattgatttaaattaaaagtrgttggaaattttaaaatccttccagccagttttagctctttcctttttggaggtgtcaaatgtatttaaaataaccgtgtcttatatgtatcagttttcaattccagtcttaacagtttataaggaacaggcacagaagcatgtaatttcacatttatgtaaacccaatttctagggcccagactggaagttcatgattcttgcatttgaattatcctaaaataatgcaagctatttttgtattttatcaactttacaattaaagaaatccacagaaatttttgtggtgtttaaagtgggacacttcctgtgtctagccgagttggttggtttttagcattgctggctgagaagcatcaactacttttttgctcacccatctgttggatttatcataa

SEQ ID NO: 342790 - DNA, 605 bp, Homo sapiens
tgttaccatacaaaaatcagtamcagatggatgacagatctaaatgggaaaatgtcaaataaagcttttaaagaaaatatctttgtgaccttagagtaggcaaatatttttttaacagcactaatcacaaaagaataaggtttaattggattataataaggagcttctgttcattgaaagacacgattaaaagagtgcagaggccacatatagcccaaggtaagatatatgaggtatatacagttgtctctttattcatggggaattggtcacaggactagggcaaatacccagtccatggatgctcaagtcccttatataaaatggcatagtatttgcatataacatacacacagtctcccacatattttaaatcatctctagattatttgtaatacctaatacaatgtgaacactatgtaaatagttgttatcctgtatagtttttttatttgtattattttttgaatatttttgagtatttatttatttatttagagatatggtctcactctgtcacccaggctggaattgtagctcactgcagcctcaaattcctgggctcaagcaatcttctgcctcaggctgtggagtagctggcatta

SEQ ID NO: 342791 - DNA, 516 bp, Homo sapiens
gctatttagctgacaactaccgagggttgtgaaacaagtcatcaagaatctgaaagtctaacataggaaaataaaaggtttttatgactctataagatgtatttccattggcatgcctagtatgtctatgtatttgtgttttgcatatacagtgtttcattcctaaaaatatataaaagagttctaattaatcagcttaaaaaataaaaacacaagccagatactaaaaaggaaaagactagtcaaatgctttttcaagttatgtaacaagtaaaattaataaataagctagctttaaaattattggtaaagtaatagtwgaaatgtctcaagaattaccagaatacatttttgtttgcatttattaatcaagcaatttcatacttatccgggccaaatactataaggtgtcaaaatttgtcacagaggttacaaaactataagcccatctcaagacagaatgatctttgcttgtgtaatctttaataaataagacattgatattggtttaatgaa

SEQ ID NO: 342792 - DNA, 580 bp, Homo sapiens
cccacataggctcatccgatgcttgaccttgatcctttaaccagtcccagccttgactaactcatgccttatccaaagttcctcctgacatacacaatatcccacagcctccctgactccaatccctccccatgtcatactgcagaggctcagaaagaggaggataagagatggcatttaatgttagtgagggtcaggataaggtcagaggtgggctgaaggagtcaggtaagaatgtcagagtgtccacagacaaccaagtgcaggtggcagaggctgccgggctcttcaagactacctgcagcaggtgttaatttactgtatttgttttrcagggccgacatgacaaattgccatacattgggtggcttaaaacaacagaaatatattctcttacagttcaggaggctagaagtgagaaaccaaggtgttgacaggattggtttcttctggaggctctgagagagagactcttccatgcctctctcctagcttctcgtgtcgccagcaatgcgtggcgtttcttggtttgcagatgcttcacttccatttgcttctctcttcattcacattgccactt

SEQ ID NO: 342793 - DNA, 580 bp, Homo sapiens
cccacataggctcatccgatgcttgaccttgatcctttaaccagtcccagccttgactaactcatgccttatccaaagttcctcctgacatacacaatatcccacagcctccctgactccaatccctccccatgtcatactgcagaggctcagaaagaggaggataagagatggcatttaatgttagtgagggtcaggataaggtcagaggtgggctgaaggagtcaggtaagaatgtcagagtgtccacagacaaccaagtgcaggtggcagaggctgccgggctcttcaagactacctgcagcaggtgttaatttactgtatttgttttgcagggccgacatgacaaattgccatamattgggtggcttaaaacaacagaaatatattctcttacagttcaggaggctagaagtgagaaaccaaggtgttgacaggattggtttcttctggaggctctgagagagagactcttccatgcctctctcctagcttctcgtgtcgccagcaatgcgtggcgtttcttggtttgcagatgcttcacttccatttgcttctctcttcattcacattgccactt

SEQ ID NO: 342794 - DNA, 573 bp, Homo sapiens
cttgatgagatggggcctagactagagcaaggtcagtggaaatgaaaaggaagggatggatttaataaggattagtgaatcaataggatatgttaattgaatatgtagagagaaaacagtcgayattggctcaaaaattttcatttattgattggaaaagatgatgctattttgagggtttttggggggatgtccgtaagaagcagtttagagctctgtgactgacatcaaggagaaagattagaactatcagaaaattatgtatgtccaaaaaccaatagttggttatggcaaaacagcaacaaaaactttcaaattaaaaaaaaaagttatctgataaacatagaataaaatagtaggaacaagtatttagttgtatcttaagagttgatagaataacaaaaagatcctgggctatataaagtgaaggaatagaagagctcatttttacactctgtgcattttcagaccctcaaatcatcacttctagcttgggtaattaaactgttgtaagtgatatagaaaaaactgatgggaaagggaaaaagttaagggattagagtggttaaactt

SEQ ID NO: 342795 - DNA, 573 bp, Homo sapiens
cttgatgagatggggcctagactagagcaaggtcagtggaaatgaaaaggaagggatggatttaataaggattagtgaatcaataggatatgttaattgaatatgtagagagaaaacagtcgatattggctcaaaaattttcatttattgattggaaaagatgatgctattttgagggtttttggggggatgtccgtaagaagcagtttagagctctgtgactgacaycaaggagaaagattagaactatcagaaaattatgtatgtccaaaaaccaatagttggttatggcaaaacagcaacaaaaactttcaaattaaaaaaaaaagttatctgataaacatagaataaaatagtaggaacaagtatttagttgtatcttaagagttgatagaataacaaaaagatcctgggctatataaagtgaaggaatagaagagctcatttttacactctgtgcattttcagaccctcaaatcatcacttctagcttgggtaattaaactgttgtaagtgatatagaaaaaactgatgggaaagggaaaaagttaagggattagagtggttaaactt

SEQ ID NO: 342796 - DNA, 573 bp, Homo sapiens
cttgatgagatggggcctagactagagcaaggtcagtggaaatgaaaaggaagggatggatttaataaggattagtgaatcaataggatatgttaattgaatatgtagagagaaaacagtcgatattggctcaaaaattttcatttattgattggaaaagatgatgctattttgagggtttttggggggatgtccgtaagaagcagtttagagctctgtgactgacatcaaggagaaagattagaactatcagaaaattatgtatgtccaaaaaccaatagttggttatggcaaaacagcaacaaaaactttcaaattaaaaaaaaaagttatctgataaacatagaataaaatagtaggaacaagtatttagttgtatcttaagagttgatagaataacaaaaagatcctgggctatataaagtgaaggaatagaagagctcatttttacactctgtgcattttcagaccctcaaatcatcacttctagcttgggtrattaaactgttgtaagtgatatagaaaaaactgatgggaaagggaaaaagttaagggattagagtggttaaactt

SEQ ID NO: 342797 - DNA, 565 bp, Homo sapiens
ggtaaaccttgctttgtgtgaagagagggcagaggatggtgccgccttttttttttttttttttttttttttttgttactctgtgtgaagagtcaagggtggaacgagccctrgctcttattttctaaaacaagaattgagtctggcgttttgcagagctctgaattgacagttatcacatccatctttcatttccacgtccttctaggggcagagaaaaagagtcctatttaaaaatttaaaccaaagctgtattgtcataagccacttcttgatgaaattgtggcccccccaccttaatatcactttcataaataggacatgggaggcttttcctctcgttttattataaagatgtgtgtgggcaattatttgtcttaattcatttttcttaaagttttaacttttagctaaaatgtctctgctctattgaaattaaaacttctaacagtgaaatcgaaatcattcatagactctggtattgcagggctggaactttgcagtgttctgaggtagttaagagctttcctgggttcgcccctggttttgccacttactagcagta

SEQ ID NO: 342798 - DNA, 591 bp, Homo sapiens
  misc_feature (1)...(591): n = A,T,C or G
tgttttccaatgtccaagtgcatccatttgggtattctctgttgtgaagtctctttcaaatcatttgtctgattttatattgaggtgtctctttatcttactaatttataggagttctgtaggtattgtggagagagtttntagtaaaggtgtttgtaacccttttnaatggatgcaggatctgaagtgacaacccccttattcncatgtgttagtatntggatctctctctctytatcaccttccctccctcactctttcccctccatacctcttctcttaccagttccaccaggggtttcttaagtttagtgttgtagctatttgttgtgtcccaggatccagtccttggtccacctctctgtctacactcttgcagtgtttcatggctgagaaaccatttgttatatgtctggagactccagactcacataccaaactgcctcctcagtgtcttcatttgaatattaaacaggcagctcagagtgtacctgtgcaaagccgcaattctgatcttgcaaacctgtttcattcatctcagctaatagcaattttggagtcattcttggtatcttttctccctcactcact

SEQ ID NO: 342799 - DNA, 585 bp, Homo sapiens
aaaaatagattgaattaatctttttgttaatataattgtaacccagaaaatctaagaaactctaggaaaattgccttcttgaattaataagatagtttcataagttgatttgatataaaatagaattacaaaaatcaatagcttttctctatgccaaaaattaaaaccaaaaaggagaaatgagaaaaatattttcttcacaatagtaacacaaacaagaaaatattgggggaataaatttagcaagtagggccaggatctacattaaatggaccataaagaaatcataggaacagtaagatggcagaatagsagctttctattatcatccctcccaacccgttacagaagcattgattttgagaactactcatagacaacagtaccttgatgggactccaggaacctagtggatgagttccagcactttgttagagcaaaaaatttaagaataggcacatcaaagagggtaagaaaatttcattttacccatgttggtcctcccccaggcagcactgctcagtgccaagagataacccctcgaaccatgttttctcccatgggggaaagtgagagtgtagtaag

SEQ ID NO: 342800 - DNA, 587 bp, Homo sapiens
atagcataaaattgtttaaatcctattactaaaaatagtaattaacatacagatctgttttttgatacaatgtgaagttaaggaagaccataaactgtatagacaatctgatttcaatttttttttactaaggtattataagaaagagctataccaaatgtcaagatgttaaaatcctgattattaagaatgggggatttagagatgttttctgccccccgccttcttttaagttttctgtggtttccarcattctcagtgaacacacatgaatttaagcattatgcattggagaaaacaacatttagttctgctggccaaggcagagggggaaacacagtgagtaacagcatttctatcagtagtcaaagaaagccaggtttctaatagtaattaaacaacagtcctgatggggcaggcattctctcacctatcagaccatgaaaccttgtatctctgggcccaagaggttcttgtttgagccacatcctgaccctgatgtgagcacccctgggtttcctttaatcttgactcccacctcattcttcccttcagggaaagttagctgctttggtaggcaaagtagc

SEQ ID NO: 342801 - DNA, 645 bp, Homo sapiens
cctcttgttccaatatataaccaaatccaagtctatcaagaatatagactcagatcacttgacttcaggcacccaataaatgtttattggatgaaggaaagaatgcttaagtaataaacaggaatggagcctggcgatacatcacagtggtatcaggcaccacggatcaactatcaggcaaacctgaattcaaattccaagtctgccactttcttggcaaccacgtgatcttgggcaagttgtgtaacctctgtaaacctcaggtgcaaaatgagggggaatatggtgtcaacatcactagattgtgaggtacattgcatgaaaaattatcattaaacmtccaagctcagtgttgcatgaaattaacttcttgtttcttttaactctttgcctatggcctccatttctttaggacctgaaaatctagctttggtttgaacaagacaggaaaattgtgtataatacataaagggatttccctccctcccttcctttctctatcccttcttcctttctcttccttcccctttctcctctcattctttcttatcccccctctctgtcctccctctcttgtccttccacctttccatatctgttacttatttatatatgaatatatttatataggtttgcatgtattta

SEQ ID NO: 342802 - DNA, 645 bp, Homo sapiens
cctcttgttccaatatataaccaaatccaagtctatcaagaatatagactcagatcacttgacttcaggcacccaataaatgtttattggatgaaggaaagaatgcttaagtaataaacaggaatggagcctggcgatacatcacagtggtatcaggcaccacggatcaactatcaggcaaacctgaattcaaattccaagtctgccactttcttggcaaccacgtgatcttgggcaagttgtgtaacctctgtaaacctcaggtgcaaaatgagggggaatatggtgtcaacatcactagattgtgaggtacattgcatgaaaaattatcattaaacctccaagctcagtgttgcatgaaattaacttcttgtttcttttaactctttgcctatggcctccatttctttaggacctgaaaatctagctttggtttgaacaagacaggaaaattgtgtataatacataaagggrtttccctccctcccttcctttctctatcccttcttcctttctcttccttcccctttctcctctcattctttcttatcccccctctctgtcctccctctcttgtccttccacctttccatatctgttacttatttatatatgaatatatttatataggtttgcatgtattta

SEQ ID NO: 342803 - DNA, 478 bp, Homo sapiens
tatatgaatatatttatataggtttgcatgtatttacacccaagtgctaatattatatattagataaatgcaaatgtgatataactccttttattgttattacaatatctttgtgaaaaaaatcatatagttaaaataatatattgactatgttaaatctgcccttcagatggatgaaataattttgtaatatgtaagtaataaccatttgtatagtagtttggtttgtaaatggaatccagtacttaatttggttttatttggtttgatgtaactctcacattacacacagaaaaataaaaggttctgggtagtgggttgaactgtgtcccacaaaaaagatatgtccaagtcctatsctctggtacctgtgaatgtgaacttatctggaaatagggtcttcacagatgtaattaagatctggagaagagatccttctggacatacaatggatcctaaatcaaatgactaatatcct

SEQ ID NO: 342804 - DNA, 604 bp, Homo sapiens
aaaaaaacaaatgaagtacatgctaattcttctcaaaagctaggtttataactgagtatttcagtgaaaaactcacttggcttctaaatttatctatactgctttgaccgagccactgagaaattacttctgatatataggcttgtgggaaatattttgtgtgttcatttgaaaatatctaaaaaggaataaaaatttcaagagcagattgacttaactaatttatratctcctaatttagcaaaaatgctaaagcaaaagcaattctatgaattacagtagcatgtttatgctgtgttctgatactgtagattttatctttttttcaactgaactttgaacatgctctaacacctctgctgtgaagagatgaactgagaaacaagcagaatattaaacatccacttatatgcttccccagggagtcttctgctaatattacacattgcaacaacattgcttgaatggtttagtaatggcagcaaaacagagtgaatgctacatataatgaccggttatttatactctgcctaacttctagatagctttagaagccttacagagatacacttaaaccactagtaatacaaaaaaaaaagaaaat

SEQ ID NO: 342805 - DNA, 575 bp, Homo sapiens
agggagttattaggggaattggctcactcaattctggaggctgagaagtcccgtgacaggccatctgcaagctgaagagccaaggaagctggtagcatggctcagtccaggtccaaaggcctcggaaccaaggaagtcaatggtgtacccctgtctgaagcagaaagcccaaragcccagggggccactggtgtgagtcccagaacccaaaagccagagaacctggagttctgatgtccaatggccagagaagagagacagcaagaatgcacccttccttcacctttttgttctatccagacccccagccaattggatggtgccggtgcacattgagggcagatcttcccctgccaatccaccaactcagataccaatctcctccagaaacaccctcacagatatacctggggcaacccaattattctaatcaaatgccaaaccaccagggtttccttttcacaaaagagggacagcctcagtactgactgaagcattgagaataaataatgcaatgattaggaataaataatgctttaccagcaatctgggtatcctttcattcagtcaaattg

SEQ ID NO: 342806 - DNA, 575 bp, Homo sapiens
agggagttattaggggaattggctcactcaattctggaggctgagaagtcccgtgacaggccatctgcaagctgaagagccaaggaagctggtagcatggctcagtccaggtccaaaggcctcggaaccaaggaagtcaatggtgtacccctgtctgaagcagaaagcccaaaagcccagggggccactggtgtgagtcccagaacccaaaagccagagaacctggagttctgatgtccaatggccagagaagagagasagcaagaatgcacccttccttcacctttttgttctatccagacccccagccaattggatggtgccggtgcacattgagggcagatcttcccctgccaatccaccaactcagataccaatctcctccagaaacaccctcacagatatacctggggcaacccaattattctaatcaaatgccaaaccaccagggtttccttttcacaaaagagggacagcctcagtactgactgaagcattgagaataaataatgcaatgattaggaataaataatgctttaccagcaatctgggtatcctttcattcagtcaaattg

SEQ ID NO: 342807 - DNA, 449 bp, Homo sapiens
gaagagagaattcatttagtagtctagacatagaatatcttgttggtaaatattccttgtgcttttaaaaagaatttgtatcctgctgttgttgagaaaagttccctataaatatcacttgggtcaggttggttgtaacacctttaataaatgaaattattgcagtataktatagtatagtatagtatagtatagtatagtatagtatagtatttaaaggagataaaaattatatatataaaggtaatgcctttaacaaataaaattatattatttatccttgggaaaactccttgctataaaatccattttctttgataccaagggccatttcagtttgtttgtttgtttttaattagtgctaacatggtgtgtcttttctatccttttactttttgtgcctttacatttaaagttgaggtcgggggactggaggcagtatacagtta

SEQ ID NO: 342808 - DNA, 599 bp, Homo sapiens
cattaccagcatgtaccagcagtttatcatttgatgaaatgttggagggaaatttacaaaccaataaacattttaaatttgcttcccaaacttttacaaatgacacatgccagattcaaatatgtgcacatttctgccacataatactatatgaggcagttactataagcctgacacttgggtgggcacgagttactatgggcccagacttctagaaacttacagcacctgaaccagaataaggaaacaatgaatccatttttaatgactaaacaaatgcatgaataaatgaataaatctatcaagattgaaagaccaagctgtgctcaaggtgatgaggggtcctaagagaaggcacttaactcaacacaggagaaatgatgtcaaaaagataaaaagaactcatagagacaggaggtagaataatggttgccagggsgtagggaaatggggcaatggagagttattgtttaatagatacagagtttcaattttacaagatgaaagggttctgtggatgcatggtggcatcggtaacacagcaatgccatagaactacacacataaaaatagttaagatggtagattttatgctatgt

SEQ ID NO: 342809 - DNA, 599 bp, Homo sapiens
cattaccagcatgtaccagcagtttatcatttgatgaaatgttggagggaaatttacaaaccaataaacattttaaatttgcttcccaaacttttacaaatgacacatgccagattcaaatatgtgcacatttctgccacataatactatatgaggcagttactataagcctgacacttgggtgggcacgagttactatgggcccagacttctagaaacttacagcacctgaaccagaataaggaaacaatgaatccatttttaatgactaaacaaatgcatgaataaatgaataaatctatcaagattgaaagaccaagctgtgctcaaggtgatgaggggtcctaagagaaggcacttaactcaacacaggagaaatgatgtcaaaaagataaaaagaactcatagagacaggaggtagaataatggttgccagggcstagggaaatggggcaatggagagttattgtttaatagatacagagtttcaattttacaagatgaaagggttctgtggatgcatggtggcatcggtaacacagcaatgccatagaactacacacataaaaatagttaagatggtagattttatgctatgt

SEQ ID NO: 342810 - DNA, 587 bp, Homo sapiens
tatgtatgcaacattgtgctatactctagacatacagataataataagatattcsttggcctaaagagttcacagtttagtaagggacatagacctacaaggaaattagtacaataaagtgtttcaggtgccatgataagcacgcagtagaggtatgaaagagagagtggccaattctgtacgtgttgagtcaggaagcaggcagtgggagaggttgggagaatcaggaaaaacttcagaaagagttagctcctttgagttaaatagacgagtatttgttctccagctggatagagaatatttcaggcataagtgaaccaggatagggaagtgtgggccctactggtgtgtccaccagtcagtgtgttcagggaactgaaaactgtttggatgattggagcatttggtgccaggggaagctaagggagaaacaaagttagagaagtgtgcagtcacgtctgctttgattaatccaccttgaacaatgcaacggggacaaaattctgcactgcttccttttgcaaactgaggaaaatgtaaacttcttactatggtgttccaaggccttgccagtctcattaattctt

SEQ ID NO: 342811 - DNA, 574 bp, Homo sapiens
gagttaactcaaacaaagtgccaacagtaaatgtgtgacactgaatggctgttytattatttttttaaaaaaaattaatttacattatgttcctgactggtctaggagttagaacttgcaatctttagcctaaccaaatcctactgtccttttaacaatagctcaaagactaagccaggcatggtgagtcatgcctgtaatcccagtgctttgggaggctgaggcaggtggcttacttaagcccgggagttggagatcagcatgcatagcatagtgaaaacccctctctaaaaaaacaataataactcaaagaccaattttctcttttttttctgtgcattgtataagtggtcctcattgtgccctgtgtctatttggttatatgcctgcctctctcatcagaggaagagcttcgtgagtgcatggacatggaccatgtcatattcatttttgttttaatctcctgctccaagcacagtgcctatgacagaaaaactgctcaataaatgtcactgaatcgatgctaatctctcctaccctaaataccttaaagcacttatgcaccatttgattt

SEQ ID NO: 342812 - DNA, 574 bp, Homo sapiens
gagttaactcaaacaaagtgccaacagtaaatgtgtgacactgaatggctgttctattatttttttaaaaaaaattaatttacattatgttcctgactggtctaggagttagaacttgcaatctttagcctaaccaaatcctactgtccttttaacaatagctcaaagactaagccaggcatggtgagtcatgcctgtaatcccagtgctttgggaggctgaggcaggtggcttacttaagcccgggagttggagatcagcatgcayagcatagtgaaaacccctctctaaaaaaacaataataactcaaagaccaattttctcttttttttctgtgcattgtataagtggtcctcattgtgccctgtgtctatttggttatatgcctgcctctctcatcagaggaagagcttcgtgagtgcatggacatggaccatgtcatattcatttttgttttaatctcctgctccaagcacagtgcctatgacagaaaaactgctcaataaatgtcactgaatcgatgctaatctctcctaccctaaataccttaaagcacttatgcaccatttgattt

SEQ ID NO: 342813 - DNA, 609 bp, Homo sapiens
tgtgttggagaattccttgggtacatatgggactgctcgtcttagagaaattgtaccacataatccttttgctgtgaaaaatatcagagaagcaatagctggtacatactcctttgtaatttctactgaaatacttttgttattttaaaagaaaatttagctagttaagattcatactcttatgtttatccctgaaattaatttttaatatacagtaatagcacacacacacacacacacacacacacacacaccatgacaggcaggcccacaccacgaggaaaaggtcccaatagatagtacagtatcatacattgtgcatttattttagggatttttaaaattaaatcatttatttttctaacaattattttttaaaaaacataactgtaattgtttatctctgaccacacggtggcttacatcttttttccactggagtgacaagtaagaaaaagagtaagaaatattttccctgacattaaatacacacacacacacgcaggcgcrcacacacacacacacaaacacacacacagacctgtaaattcattttgtgatgttagttgccttcaaagcaccatactttatgtctcaggatcagtcttt

SEQ ID NO: 342814 - DNA, 587 bp, Homo sapiens
ccaaaattatattactgaaaggaaataattttatagttcaaattcttcttgttgcagatgagaaaactgagaaaatatagtgcaacattttctaacatttttggtaagtggtataccagcccctgcttaaacacttttagtggagaagaaacttactaaatttttggacaggttaaccgttatccatttcttcttgtgctgagtgcaaatactacttattaactactcatcagtattaaaaatgtccaatggcaaatggatcaatttctctttttatttaaacatagttatcatgaactcgcaatacccactcttttcttttttatcttcattcttgcaactcttcttcatgtttactgcatttgagattccagtcattctggtgtgctcctctstaggtgaattcttggtaaatgatgtctactttcaagggtggcaatgttaaacacattacttctggtctgattttggtaataatcagcattaaaataagtttaaaatataaacttattttaatgaacagtttttcttaatgtatactaatgctttgtttacattttttgttaacttatattgagtttatagtc

SEQ ID NO: 342815 - DNA, 545 bp, Homo sapiens
ttgcatacatcacttgcactacctccctcaatgccacagcgaaatgttttttgacattctctttstgacttaaataatgagctgcattttcactcatcttttgctctgagaccaggctaatatctcctaaaagtattctaaatttatactcagtggctttctaaggtcatttaaattcctaatgaaaagtcactcaaggccacagtacaaaataaatacattgttattgatcatgcaataaggtattaggctaatttaatagggcttctccctgagatgtacttaattcaccaatattgtcatttctcagccatcatggatcctgctggtttttcatggcctagaagtagtcatcatctctactccatgttgccacctggatattccaggatgcctcatctctgttaaacttcttctccctgtcggcaaagtacagtgacagaataaggattcattactcttgaaatgaccctttccacaacatcctctttttatctccttaatcagcaaagtggtactctgaggactggcaggttcactgccta

SEQ ID NO: 342816 - DNA, 582 bp, Homo sapiens
atgtgcaggtttgttacatggatatagtttgtggtgctaaggtttgggcttctattgaacccatcacccaaatagtgaacatagcacacaatagatattttttcaacctctgccccatcccttttttccccatttttggagtctgtagtgtctactgttcccatctctgtttgtgtgtacccaatgtttagctcctacgtataagtgagaatatgtggtatttgtttttctgtttttgtgttaatttgcttaggataatggccttcagctgcatctatgtggctgcaaaggacataattttattctttttttatggctttatagtattccatcrtatatatgtatcacaatttctttaacccattgtcaatgggcatcgaggttgattctatgtctttgctatgcacattcacaattacatcttaattttcaatcttaagtttgtctataatttgacatatgtgactcacagttgtctagaaaacagggacttgtttttgataaaaacttagcaacactgaaaagctgttctcagaagaaattcatagacttaattaattttattaatagagaatgaaaaac

SEQ ID NO: 342817 - DNA, 593 bp, Homo sapiens
ttgccccaaggtcacacagctgggagtggtggggccagattgccacccagggctggctgagkgcacggcttgtgttcctgttcacattgaaccctgccaaaggaggtgcactagcaaagacagaggaaggaaagggtccgggctgttcagagagggaagctgcagtaaagaagtgccccctaagaggaaaagctattggggccagagacaaaggttctgaagatcacaccccagaaaatgttctgtgttgctgtggtagattgttattacaatggcccccaatggatcaccagtccctgtatccacaccctttgcagtgtggattgccacttctccctacaaaaggtagagtttatttccccaccccttcagtcaagttgatctatgactgctttgtgaatgtagcgggagggaccttgtgagcattctagagcccaggtcttgagaggtgtgaggcttccaatctcaacctcctgctgccctgaaaccccatgcaaggaaggctgagccagcttctttgaggatgagagtccacgtggagagagagatgccgcacccccaccctagctgcacaaccaactcagctgaagcac

SEQ ID NO: 342818 - DNA, 593 bp, Homo sapiens
ttgccccaaggtcacacagctgggagtggtggggccagattgccacccagggctggctgagggcacggcttgtgttcctgttcacattgaaccctgccaaaggaggtgcactagcaaagacagaggaaggaaagggtccgggctgttcagagagggaagctgcagtaaagaagtgccccctaagaggaaaagctattggggccagagacaaaggttctgaagatcacaccccagaaaatgttctgtgttgctgtggtagattgttattacaatggcccccaatggatcaccagtccctgtatccacaccctttgcagtgtggattgccacttctccctacaaaaggtagagtttatttccccaccccttcagtcaagttgatctatgactgctttgtgaatgtagcgggagggaccytgtgagcattctagagcccaggtcttgagaggtgtgaggcttccaatctcaacctcctgctgccctgaaaccccatgcaaggaaggctgagccagcttctttgaggatgagagtccacgtggagagagagatgccgcacccccaccctagctgcacaaccaactcagctgaagcac

SEQ ID NO: 342819 - DNA, 600 bp, Homo sapiens
tttcacaacccactaatggttagcaactcagtttgcaaaaacaaactgctatcctagagtgtgctttttgtgtgcagtgaagcaacttccattctccatctattttggagctctccatgggtctgaccaaagcttcttaacctacttttcttatctttttgacccctccttccttggcacacacagacgctgttgatctttggctctgcagagtcactgagtcatgagatgcatgcaagagacaccggacaaggagtcacacacgtctcctttacaatatccgtggcrgacattactaatcaatcatggtactgtcccattaagctcaacgtccacttcagaatctttcctaacccagcactccagacatttttttttgggaggggagtgggacaaaaatctattttacaaaccctttatctgaagctgaaaagcaaactctctgagtcccagagagatgaagaggctttcccaaggtcacagggctgattgggagtgaggcagaaactggaagcctgctccctggctcacaggccactggtgtctctgctgagccagagcttcacaggtgttttattttcttttaagacagggtctcac

SEQ ID NO: 342820 - DNA, 553 bp, Homo sapiens
ctcacctgcaacaatgaacagagaagatgtctctatcctcacagagcttttggtctaatkataaagaccttacaatcataaacaacccaatttatttttatttatttctttatttctttagacagtgtctcattctgctgcccaggctggaatgcagtggcatgatcatggttcactgcagccttgacctcctgggctcaagctatcctcccttcttggcatcccagtgtgctggtattataggcgtgacactgggcccagcccaattgcaaaaataataatgggtaaagcatttgaacccgtatttcaccaagcaaacatatggatggcaaacagaaaaatgcaaagatactcaccatcagtaatcatcagggaaatacacattaaaaccacagtgagttaatgcagcacatccgttgtaacagctgcaattaaaaagactgaacatgccaagcgttggcaaggaagtggctgaagtgggactctcatacattgctggagggagtgtaaaatggtacaaccactttggaaaactgtttatcagttttttaaa

SEQ ID NO: 342821 - DNA, 535 bp, Homo sapiens
tgcctcagtctggggtccaggagaaacagcagctgtaaggggggttgggtgctgaggctggtgtgggctgggatcagagctgatgaagtgggagtttgggactattgacttaccttatcccacacacaggacagcagccaagtggactctggctcagaggaaaaacttccagggaccatgcattcaatggtctccatccacagctttctaggtgcctgttgccttctccaaagcaaaacccagcctcagcccaagtcctccaggatttggtccctatcctcctccagtcttccatgctgtggctcctctcagctctgctccagccacagggaccatttgagttaccagaaagctccatctccttggctgccaaaactttgccgtggctgtrtcctttgcttagaagacccactacctcccccatgctgctgacgcaactccaacagcagccccagcaaccaccaagctgttgttgcaataccccggtgtgagttacatgcctctcccctaagtcattgcagcctcgggcctgctt

SEQ ID NO: 342822 - DNA, 556 bp, Homo sapiens
gacaacaatagcaaaggcttggagactgatatggtttggatctgtgtccccacacagatctcaggtcgaattgtaatccccagtgttggcagtggggcctggtaagaggtgattggatcatgggggcagtttcttatgaatggtttagcaccattcctttggtgctgttctcgtgatagtgagtgagttctctcaagatctggttgtttaaaagtgtgtagcacctccccactctatctcttgctcctctggccatgtgaagtactgctcccccttcatcttccactatgattggaagcttcctgaggcctccccagaagcaaaaaccgctatgcttcctgtacagcctgcagagccatgagccaattaaaccttttttctttataaattasccagtcttgggtattttttctacagcagtggaagaataatacagagacataatggcactttggggatagtgagtaaatcaatgtcacttggtcaaaaggaccaaaggaaggattggcagggtctggtaaggtggggttaagaccagaccctgattggctttggt

SEQ ID NO: 342823 - DNA, 342 bp, Homo sapiens
agcagatccttgcagaggtcactctggccatgaagcatggcagggagccaccatgaccaggcctggccttcctttctccaaggagaccccaatttaggtttttttaaaaacaarcaatgagaaaaatcatttgggataccagcaaacttaggccaaacaatttttcgcctgctccataattctccttcctgaacaatattgagagatcaccaccttggtttctgcctatttagcccttatctcctgggaaaagagcacacagatcttagcataacaggcttcatagtcactgtgtgtctatttcactcccaagagataagataatcatcattaattatatgg

SEQ ID NO: 342824 - DNA, 601 bp, Homo sapiens
ccagtgttcaggccttggtgaggagcagatgcttccctgagagttgacatcctggtgctagtcccttatgtgcagttaactttctgggtgaccttgggcaagtcactttccctctctgggtctccacgcaccctcatctgtataatgagcacactggactaagtccatgctgccagttcctgcagcagcatggggctctcawattcagatggcccccagggaaccagcaggaaatgtaactaagaaaagagaggcattgggaaaggtgggaggtgtgggtccctggagaaaactccaaagagggggctattgccgtggagcagggtaggatgagtattagagttgctgacaattcttcaaatatttttaaagagaagctgaaaagtcaatttttttccttaagacatatctgacttttaaacattagctcaattctttaaaagaaaaaagtcaccacttgggtcatcccagactcatctactggccggggctactcacagcctaccagtttgagaccctgtgttgtaacgtttctggaaaggtgagacagcagataaagaggagggggctcttgcaggggagtcgtgggcacccaagatta

SEQ ID NO: 342825 - DNA, 601 bp, Homo sapiens
ccagtgttcaggccttggtgaggagcagatgcttccctgagagttgacatcctggtgctagtcccttatgtgcagttaactttctgggtgaccttgggcaagtcactttccctctctgggtctccacgcaccctcatctgtataatgagcacactggactaagtccatgctgccagttcctgcagcagcatggggctctcaaattcagatggcccccagggaaccagcaggaaatgtaactaagaaaagagaggcattgggaaaggtgggaggtgtgggtccctggagaaaactccaaagagggggctattgccgtggagcagggtaggatgagtattagagttgctgacaattcttcaaatatttttaaagagaagctgaaaagtcaatttttttccttaagacatatctgacttttaaacattagctcaattctttaaaagaaaaaagtcaccacttgggtcatcccagactcatctactggccggggctactcacagcctaccagtttgagaccctgtgttrtaacgtttctggaaaggtgagacagcagataaagaggagggggctcttgcaggggagtcgtgggcacccaagatta

SEQ ID NO: 342826 - DNA, 569 bp, Homo sapiens
ctcctgaaccaccctcgcagacgtatccagaataatgtctgaccaaatgcctgggcaccctgtggtccagtcaagttgacacataaaattaaccatcacgaggagagaaagagagaggcagagggagaggaagagaaagagaaagagaaaggcattgctagctatagaccaaatggtggctggggagagaaggaagctcacgtttcatttcatttcagagccacaccatgaaatatgggtcagtatccccattttagagttggggaaactgaggctaagtgatttacccaggggggacccacagctggtgaccccatgccatcttgtccctgggtaagatttgcatyggtggagaaagggtgaggatgctgcccacgggcctatcccctaggttctaactcttatttttggtagtatcttatgtacttccagggcagatcagaatctgaccgaatggctgctagcctgcctggtactgcaggtgttgagggaaggtgacattgctgtcagcaccacgcataatggagtcttcaaggcctcccatagtcctctgcttcaaagctgctgag

SEQ ID NO: 342827 - DNA, 528 bp, Homo sapiens
actggaagaattaaaaataaaaatcgactttcagagaacaaaatcagacctgacaactcaagtcattcaaaccaggcatggttagcggattgcaaatgtgtttgtcaaaagcrggtggcagggatggtggaggggacattgtctcagaaaggagatttgggaaagcattccacttggccaggtcttcctctgggcctgaggtctgaccttgcctcctttagagatgaggtttccagccgcagccccaccccaccctgtctattgcatctctctttcaacttttatgctgctctgggatcatgcccagtaaattgcagatgccccattaaatagagttgatcctcattacagtaggttgaatattccttatccaaaatgcttgggaccagacgtgtctcggatttcaaattttttaagatttgggagtatttgcattacatttactgtttgagcatcccaaatccaaaaatctgaaatcggaaatgctccaatcagcatttccttcaagcatcatgttggcactcaaaa

SEQ ID NO: 342828 - DNA, 570 bp, Homo sapiens
ggtgtttgcagaacagcaggaggccttgtggctgcagtagggcgaaccagtggggagtggtaggacttggggtcagagatgtgataagagaacctgtgggctgtgtagaattggcctttctctaagttcgggttgattctaggaatgcaagtttggtttcacatttgctctttatggtgtgtaacattaayaggaaaagaagaaaactacatgatcattttaaagatgcattccaggaataaacccatgtggttgtgatatattatccattttatgtatcgctggattcaattttcaatgttcttttgggtttgggtatcaaagttatgctggcatcataacacaagctgagaagtgctctctttttttctattcgctggaagagtttatgaaagactggtgtcacttcttgcttaaatgtttggaagaatttaccagcaaagccatctgggcctgtagttttcttgatgaaaagctttaaaattatggattcaatttttaatagatatgctactattcagaatttctgtttcttcttgtgcccattttgttaagttatatttttatgga

SEQ ID NO: 342829 - DNA, 493 bp, Homo sapiens
ttgggcgggtggataattagactctgagagaagccatctgctttgggccccttgggtctcgggcaggctggggcagcgcagctcctgaccacgcagtcagctctcaccatggagcccctacgtgcaaagggttttaatgtctttggccataaggaggcctggctgcctccccagcagcagggcyttaagtgaggagctagggctcagtccggtgtttatttccttgtcaggttgttctacttcttggggccctggggtagagctgcacggattgggccaggtggggtggggaggggtaggcaaaatttactaggcacaactgtggcactgcagagttgggagagacccacgccagcaccacgtgggcccttcctctttccagaagggacagctgaggcccagaaaaaggaagggactgggccaaggtcctacagtccttgtaaagacaccatctttaaaggttgatgtcatcccttgctggggacaggaggga

SEQ ID NO: 342830 - DNA, 560 bp, Homo sapiens
aacttctttgtgatgtgtgcattgatctcacagagttgaaagtttatttggattgagcagttttgaaacactcttcttgtagaatctgcaagtggataattgtggagattggaggcatattgtggaaaagcaaatatcgtcatataaacactatgcagaagccttctgagaaacatctttgtgaggtttgccttcaactcacagagctggacctctcttttgagtgaccagtcttgaatctctctttttgtacaatctgcaagtggatatttggagcgatttgaggcctacatttgaaaatcaaatatcttcccttaaaaactacacagaaacattctcagaaattgtttgtcatgtgtgctttcaaattaccaagttgaacctatcttgtgattgagcagtattgaatctctctttttgtggaatcggcaagtggatatttttagccctttgcggactgtggtggaaaaggaattatcttcaaatccattctacacagaagcattcagacaaacttctctgkgatgagtgcattggtcacacagaattgaacctttcct

SEQ ID NO: 342831 - DNA, 350 bp, Homo sapiens
gtgacacagggggaaactgagactcagagaaggggaagggctttcccagggtcacagagaaaggcagcagtgaacgtgagactggagcccaggttcctggggcacttgttgtatgtagccctgggatgcctcaggcggaggcagaakggtcactcgcttggggtccatggtcctctttaggcctttcctccctcccaacacagaaatattggccccaccccaagacctgctcatgaggaggtggctcctgactctactttgccatcagaatggcaaagtccctttgagctgtagcatttcgtgccaaagcagaaagatggaccagtgacctctgatgttcctcattagct

SEQ ID NO: 342832 - DNA, 604 bp, Homo sapiens
gaatacctagttaaatttgcaataaagaacaaataactttaaagtagaaatatgtcccaaatattgagtgggatgcacttacactaagaattattcagttgatctgaaatgtaaatttaactgggcctcctttattttatctgagcccccaggcacsagctgtgtgaccttggatcacacagatcaccttccctctctgatcttcaattttctctcctttacaagtggggataaatcgcggtcctcacatggttgttatgagaattggtaagacgcatagaccgatagtagattgtggtggctgagaccgtgactcttcagccagactgcttaggttcaaatcctgactctgccatatcctagctctgtaatcctgggtatgtgcctcagtttcctcatctgtaaaaaaagataaacatttttctcacagggctataggtaggattagataacataatacacacatatagtgcctattatagaaaagttagtggcacatagtaagtgtaagtgccaaatagggattaggtatttttattttattattattataggtattattattaccatgattgattgtcccctactactcagtggcctccta

SEQ ID NO: 342833 - DNA, 567 bp, Homo sapiens
tcctgatggtcaaaggctggtctggatccctgagaaacagctataggacacacagacctctccctaccccggaccatgagaggagggagggtggtgcggggctggtgacagagctaaagggtgttgctataattaaacaccatgtcttacatcaattccacactgacgcttctctacagagtcaggctgacattcatttcttataagaacgctttgtcaaaataatttttttattaaaaaaagaaagattcctgccaaagcagcagagccatattttccaggactctccaagggaraactgactcagagcaagctctgagcaggggtatctgcttattggcaccttagagatctgagcctgtggtagacgtgagctctgagaggttattggctccacatcttgtgctcctaggtcaagatcccagacccctctgtaggatggaagtgaagatgcttggagcttggagctctggtccaacccagagggggaagtgacttgcccaaggtcttagtgccttctggcagggtagggctggagctgtctcattcatgagtgagcactgtgaa

SEQ ID NO: 342834 - DNA, 473 bp, Homo sapiens
ctggccctgaccctggctcagggccaggaccagggcagacaaagtggggagtctctccaggaagccgtaacractaggggtttgtgctcacaccatcaccatctcctcctttttcagcatttccaagccccaatcacccaaatgaccccacagttccctccacccacctgccccacccagaatccactgctgagggttatcatgcctccctggggcctaccaagaacccatgtgaaattggctctgagccaaggcatcagatgggcacaggggcctcctgcccctccacaccccttctcgccagagccagcttcacagacatgtggcccaggcagttgtgtggggcccatgctttgtttgatgctctgctgttgctgtcttgaaattcttaatttatttctcacaaagagtctctatttttcagtttgcaaggggccctgcaaattatgtagctgatcctgcctccagccatc

SEQ ID NO: 342835 - DNA, 655 bp, Homo sapiens
atgatggaatatgttgctgagagaaggtgtgtatacaccagggggctggagtctgtgggcatcttgaactctgcctaccatggtatgtcatatgttaggaggtgcaaagtgatccagagagaaactaagcaggaaaggggtcacagagtgatgggtggggggggttgcaatttttaatatgtgctcaggaaaggcaccatgagaagcagcatttgggcagaggctgcccaatggtgagggagttagccttggggagtgygcacccagccgagggaatggcaagggcaaagaccccgaggcagcacattggaacagcaaggaccagagagccagggggagggccacaggggatgagaccagatggtatagggcctctaggcatggcgaggacaccagcttttcaaaagccgactgcaatgcaggatcatcaaaggattttgaggactggcatgatttgacttacatgtttaaaaggtcccttgggctgtggcattgagaatagactgcagagggcaagggcagagcagggagatcagttaggaggcccttgacgtcacccaggggaagagagatggtgccttccaccagggtggtagcagtggaagaggtgagagtcagtcagatactgggcgtcttttgaaagtagagctgacag

SEQ ID NO: 342836 - DNA, 597 bp, Homo sapiens
gtgccttccaccagggtggtagcagtggaagaggtgagagtcagtcagatactgggcgtcttttgaaagtagagctgacaggcttcctggcttagcagtgtgctgtagggcagagagaggagccaaaactcatcagcatcccaggctccatgcacaacctccggccccagacaccctcgacaggcatctctggacagctgtatgaaaaggaataggtgtcttctagattgtcttcttacattagaagacaagaggcctcctagggcaaaacattgatccaacctttcaacaataccccagtgtcctaattaaattctcctatttgcaggcaccaagtcagtgcctcactccatagacccgtcagygggatcttcaggaggggtagaaggtctagatttcagcttcccagcccggcctgctcagcacccccggctccattcacactgctgcaggaatggccgccccaaaacacaagtcacaatatgtcactctcttcctcaaaagcgatttccatagatcatcacttctgcaagatgtgatcatatggcctcgattctaagtcaccaccaattgtcagagggcctttggattaaacaa

SEQ ID NO: 342837 - DNA, 636 bp, Homo sapiens
gaaacagaaaatgtcagagtgaaaatagaagygttgccagtctcgcctcctgcctccgctcagtagagcctgtgctcatgccgagatgggtgatggcagggtggaggaagaggttgggcccttgacctagttgggttcccttcaagatgccccagcaaggacacaaggttggggctgggctgggcaagaggaagagtgaggtgatggcaggatctccaggtaggatgtcagcctcaactcaagcgaagtcacacgtactggccacaggcctgtgttctccatcctgtccaggctagcagatttggacaacccaatagaaaactgtaatagggtatgattaagggaaggggagctggaatgggcataaagcttggctcagtggcacaagaaacagaaaatatcttacagttttttattcaacattaagtgcaaaatgagtcaacaggattacgcagctactaaaaagccagtgtgaccttaggttgcattcacagaagtatggggttctaaaaagggagggaggggattgtctcctcttgctcctataggaatcaacccggcagattatatccgggtctgacctctgtcactttatcgccaaagagagattgggcctccataacctgtcagtcagtc

SEQ ID NO: 342838 - DNA, 636 bp, Homo sapiens
gaaacagaaaatgtcagagtgaaaatagaagtgttgccagtctcgcctcctgcctccgctcagtagagcctgtgctcatgccgagatgggtgatggcagggtggaggaagaggttgggcccttgacctagttgggttcccttcaagatgccccagcaaggacacaaggttggggctgggctgggcaagaggaagagtgaggtgatggcaggatctccaggtaggatgtcagcctcaactcaagcgaagtcacacgtactggccacaggcctgtgttctccatcctgtccaggctagcagatttggacaacccaatagaaaactgtaatagggtatgattaagggaaggggagctggaatgggcataaagcttggctcagtggcacaagaaacagaaaatatcttacagttttktattcaacattaagtgcaaaatgagtcaacaggattacgcagctactaaaaagccagtgtgaccttaggttgcattcacagaagtatggggttctaaaaagggagggaggggattgtctcctcttgctcctataggaatcaacccggcagattatatccgggtctgacctctgtcactttatcgccaaagagagattgggcctccataacctgtcagtcagtc

SEQ ID NO: 342839 - DNA, 584 bp, Homo sapiens
caggcttttcacatttgttatttcatggactctccatgacaatcctgtgaggggggttggttttccctgtcatagcctcagaaaggttaagtaacttatgcaatgtcacacagccagtcagtggcagggccaggagtagaacccatggctgcgagactctaaagcccacactctgtccttgaatagctaagcagaccccaacactgattcaagatcactgcytcccagaacccagccccactgtccaaagctataaccccagctcttcacctggacagtgactttgtgcaatttccagcacctcctgcagacaccttgctcatctccatcacctcctgcactgtccctggtcccacccatggctgacagtgggtcctcgccatctgtcccgtctctgcctgcatggccctgcctcctctccatctgtgtctctgttccctcatacctcaaatgttccaatttgttcaccacctaaagtcccactgttacccccttgggttaagaaatcccctttcttacataaagcacaacaaatacccctgaaagaagctataaatcaaggactcctctgtgagaattccttt

SEQ ID NO: 342840 - DNA, 594 bp, Homo sapiens
aaaccctcttgccaccaggcgggacaaactgtgtgatgcaattcctgctccatagctctctgtgggaccacagccttgcctaccttcttctgcctgtcctcttctgtcccctaagagtcctccctcgataaaccacgtgtgtaagggtcaccagccaggcttttcttgagggaactgagcccaagacaggaccttaagcccaatggctcttcatcccacaacttggagctgatctcccggaaagcttctcactcacacaggagaaatggggggtgtcacaccatgtggaccctagggagactctccctctaaacctgccagaggcagccccctgcctcgttgcccatgttacagaagtggaaacgaaggtgcagtgacttatccagggtcaggtagttagtctggggaagatcttggaatcaagcccagggctatttgactccaatccgttctaccacaccagagttttccctagaaggagtgccctgagccccatgctttacccagtccaccctttcaggagcaactaaaatgccacctcttgyaggcagccttccctgcttacctgtcagacttcatcatgcactcctgtag

SEQ ID NO: 342841 - DNA, 634 bp, Homo sapiens
cttcattaaaatgaaagatctcaagggctcaaaaggccttaaagacatgccaacctccaccagagacattctcctaccaggatcaggattgacaatgatttcaaaagtaagtacccttcttactcacgattcagtgagactgatgccaagcctgagagtgcctgagctcatctagggaacccacactttgagaaacactgatcccaattacctggcttacagggtccggstccagcctattcagcttcagcctgtgaccccctaaagcagtcacttctccctcctggagggcagtcatgtaccccactcatccctaatccctgcgtctggtatacagcaggtgctcaggaatgcttgtagaatgagactgaggctgagggagatgtcaaagaaggcagaggagagggggcattgaacagcctggcatatgactggaatctatgaatttctagtctgacaaaggctgatttctatttatttcctttcttgcagtaagtaaagcaggctttctttgtgtttgaatggaatacacacacactcagcaccctattgtgaaaaaaatcaggctttattgtaaaaacaattgtgccaaatttaaagcagagattaaaattgaggcctgttaagtgtggtc

SEQ ID NO: 342842 - DNA, 634 bp, Homo sapiens
cttcattaaaatgaaagatctcaagggctcaaaaggccttaaagacatgccaacctccaccagagacattctcctaccaggatcaggattgacaatgatttcaaaagtaagtacccttcttactcacgattcagtgagactgatgccaagcctgagagtgcctgagctcatctagggaacccacactttgagaaacactgatcccaattacctggcttacagggtccgggtccagcctattcagcttcagcctgtgaccccctaaagcagtcacttctccctcctggagggcagtcatgtaccccactcatccctaatccctgcrtctggtatacagcaggtgctcaggaatgcttgtagaatgagactgaggctgagggagatgtcaaagaaggcagaggagagggggcattgaacagcctggcatatgactggaatctatgaatttctagtctgacaaaggctgatttctatttatttcctttcttgcagtaagtaaagcaggctttctttgtgtttgaatggaatacacacacactcagcaccctattgtgaaaaaaatcaggctttattgtaaaaacaattgtgccaaatttaaagcagagattaaaattgaggcctgttaagtgtggtc

SEQ ID NO: 342843 - DNA, 486 bp, Homo sapiens
ctgacttggctctctgcttgactgttgttggtgtataggagaacgcctggacacagaggggagcaacacacactggggactattggaaggtagagaatggsaggagggagaggatcaggaaaaataactagggttatttttctacaagttacccagataattaaatagtgaaaaggatagcatttttcaacaattcatggtctaaaactggatacatccccaaaactatcaaaagtgaaagaatgaacaaatcacggtgtctttatacaatggaatactactcagtaataaaaaagtcactgatctacacaattacatatgggtactaggcttaatatcttggagatgaaataatctgtacaacaaacccccatgatacaagtttacctgtgtaacaaacctgcacatgtacccctgaacttaaaagttaaaaaaaatagatccaactatatatggtcaactgactttctacaagttacccagata

SEQ ID NO: 342844 - DNA, 444 bp, Homo sapiens
ttttagcttccttgcaatgggttcaaacaccctcctttagctcagagaagtttgttattaccgactttctgaagcctacttctgtcaactcrtcaaagtcattctctgtccagctttgttctgttgctggcgaggagctgcaatcctttggaggagaagaggagctctggtttttagaattttcagcttttctcctctggtttctccccatctttgtggttttatctacctctggtctttgatgatggtgacctacagatggggttttggtgtggatgtcctttttgttgatgttgatgctattcctttctgttgttagttttccttctgtcaggtccctcagctgcaggtctgttagagtttgccggaagtccactccagaccgtttgcctgggtgtcaccagtggaggctgcagaagggcaaatattgcagaacagcaaata

SEQ ID NO: 342845 - DNA, 567 bp, Homo sapiens
ctagattcatgccaaccaacacttgaaatgctgtcccatcaccatggacaacctatgtcatcaaagaagcagaaggaggggtctgtgattctactttgtctaggaagtttttctcattctaatccatggcttgcaatacatcttagtgtcattcaccttgttttgatttttccactcagtgatatacaggagtgctgtagtgccacatcagtgcatatgcagtgggatattcggctctgtggcaytgccccttctttaggtggcatgttacaaaaatgagccaaagatgatgtctgtgtattgactcttaggtggtttatttcttcactgctggctgagacttgtgagctaaaaagcctgcttccaccaaattcaaatttttacacatctaattatttttaaataaaaataccctgaagaagaagattttcagcaatttagaccttcctgctttgcgtgtcctgtaaaaattcaccctgcatctgccaaccacaaacaagatagccttgtggttgtaagactccaggccactactgtaccttggagactctgacccagagattcccc

SEQ ID NO: 342846 - DNA, 600 bp, Homo sapiens
tcagggagctaagaggaacaaatacaagagaaaagacattcatctactaatagaggtcaaccaagtaaataatccggacacatctattggtccacaagcctcaccctttcagagaacttccaatcatgttyttaggacctttttcttaaataatgaagacagccaaaatcatcagagagagtacaagaccaaaaacaagagaaaaaaaggaaagagagagagagagagagatagagacagagagagagaccaaaataagaaacgaaacaacacagagggcagaagaacaacaaaattataataagcagccttagaaagtgaaataaaataagaagagcccataaaaagaaacaatatcacaaaaacagttcttgaaaatgaaaaacgtgatcacagaaattcattaaaatcaacagaagtcttgtagtttaagttgagaaagtctcccagaaagtagagagaaaagaaaaattgatggataataggagataaatgaatttttaaaaaggccccaaagttttaacatctgaagaataaaaattctctagaaaaagaacaaagaaaatggggatgagggagcaccagagtaatattttttaa

SEQ ID NO: 342847 - DNA, 600 bp, Homo sapiens
tcagggagctaagaggaacaaatacaagagaaaagacattcatctactaatagaggtcaaccaagtaaataatccggacacatctattggtccacaagcctcaccctttcagagaacttccaatcatgtttttaggacctttttcttaaataatgaagacagccaaaatcatcagagagagtacaagaccaaaaacaagagaaaaaaaggaaagagagagagagagagagatagagacagagagagagaccaaaataagaaacgaaacaacacagagggcagaagaacaacaaaattataataagcagccttagaaagtgaaataaaataagaagagcccataaaaagaaacaatatcacaaaaacagttcttgaaaatgaaaaacgtgatcacagaaattcattaaaatcaacagaagtcttgtagtttaagttgagaaagtctcccagaaagtagagagaaaagaaaaattgatggataataggagayaaatgaatttttaaaaaggccccaaagttttaacatctgaagaataaaaattctctagaaaaagaacaaagaaaatggggatgagggagcaccagagtaatattttttaa

SEQ ID NO: 342848 - DNA, 561 bp, Homo sapiens
aaaattataataagcagccttagaaagtgaaataaaataagaagagcccataaaaagaaacaatatcacaaaaacagttcttgaaaatgaaaaacgtgatcacagaaattcattaaaatcaacagaagtcttgtagtttaagttgagaaagtctcccagaaagtagagagaaaagaaaaattgatggataataggagataaatgaatttttaaaaaggccccaaagttttaacatctgaagaataaaaattctctagaaaaagaacaaagaaaatggggatgagggagcaccagagtaatattttttaaaatttttccaaaaattgaataaagtacccacattcaaaamaaaatggattaaaactaaattcaccccaagacaatcactgtgaaatttcagatcactaagatctgacagaagagtctacaagcttccaaagtggggatgggggagaaggggcgtgtcagttttcacatgcaaaggatgaatgaaaggatttctgcttcttctaacagcaggctaggtgttttgtactaaaccttcctctggggacaattata

SEQ ID NO: 342849 - DNA, 516 bp, Homo sapiens
gggcatttagtgctataaatttccctctacacactgctttaaatgtgtaccacagattctggtatgttgtgtctttgttctcgttggtttcaaagaacatctttatttctgccttcatttccttatgtacccagtagtcattcaggagcagatccaaccccacatttcccctcagcactccmctagcagaggttatccgtgatggctgagcccctgcagcagacttctacctggacatccagatgtttccatacatcctctgaaatctaggcagaggttcccaaacctcaactcttgtcttctgtgcacccacaggcccaacactatggagaagctgccaaggcttgggtttgcactctctgaaacaatggcctgagctgtaccttggccccttttagccacagctggagctgcagcagctgggatgcagggtgccatgtcccaaggctgcacagagcagtgggggcctggacctggcccatgacaccatttttccctcttaggcctctgggcctg

SEQ ID NO: 342850 - DNA, 595 bp, Homo sapiens
gcccatcagtggggaaattatatgtgcattttaaatacttagcaataagcagaacatataagcactaaggtaaaaaaaaaaaaagcaattaattacaggtcactgttacattattctattataattccattattacacatagagaatgctttttttaagttagcagcaacaatgagaactaagaaatggtctaatgatgaccagagcaaaccctgagctgagtaagacaatggctcctttgatcataacaaactccaaatggtgtcactacagttcaccaggccattgaatgaaagtcttataacaccttgagaagtctggaaaacaattcactctacaaaattcatagttcccgactgtatcttaggtatgtgggggtayaccagaaaataagattgatgggatcttacacaaagcatacaacagagataaacataaaactcagaagtaaattaggaaaaaataatctgatctggtgacccaggacttccaggggaaactactttttgttgttgtttgaggaaataaagaaactgaggcaaagacaaatggtctcatgagtggatgtgtgtcagaagccacagcactgagtttg

SEQ ID NO: 342851 - DNA, 577 bp, Homo sapiens
gaggaagctgaaaaatacaacgtgtctttgccatcatttctttaattgcatgcaacagaaatcaactagcttgcttatgcaaaaaggaaaaatttttggaaatgcctggggaaggaagatcacagcatcaaagggaagactgaagagccagctttgaacacacaggactcaggaagccacagaggttcttgagaataggaagtccttgaatgtctctcctgggcaccactgctagaatgaatgatgtctagtctttcttcagtcctgtgtatgttcactcaakagtcaaaataccagggactagttagcggaaaacgtctgatggaaggattattcaaccatctcttcaagttaacatgtgcaaagggaaagcaactggattcactgtccaaacgatgatcaagtaggagtgaagtagttccccaaaaggaaataatagcagatttatacgttgaagaatggacagagagtggccactatactgatattctcattttcatattaatctgtgttgttccagctacctgccccatcctagctaatcccagaatctcagggaccctgccatgggaactga

SEQ ID NO: 342852 - DNA, 577 bp, Homo sapiens
gaggaagctgaaaaatacaacgtgtctttgccatcatttctttaattgcatgcaacagaaatcaactagcttgcttatgcaaaaaggaaaaatttttggaaatgcctggggaaggaagatcacagcatcaaagggaagactgaagagccagctttgaacacacaggactcaggaagccacagaggttcttgagaataggaagtccttgaatgtctctcctgggcaccactgctagaatgaatgatgtctagtctttcttcagtcctgtgtatgttcactcaagagtcaaaataccagggactagttagcggaaaacgtctgatggaaggattattcaaccatctcttcaagttaacatgtgcaaagggaaagcaactggattcactgtccaaacgatgatcaagtaggagtgaagtagttccccaaaaggaaataatagcagatttatacgttgaagaatggacakagagtggccactatactgatattctcattttcatattaatctgtgttgttccagctacctgccccatcctagctaatcccagaatctcagggaccctgccatgggaactga

SEQ ID NO: 342853 - DNA, 614 bp, Homo sapiens
ttgtgtcctctatatttctttcagcagtgttttgtagttttccttgtagagatctttcatctccttggttagctatatttctaagtatacatatattttttgtagcagttgtaaaaggggttgagttcttgatttgattctcagcttggttgctgctggtgtatagcagtgctactgatttgtggacgttgattatgtatcctgaaagyttacttaattcatttatcagatctaggagctttttggatgagtctttagggttttctagttatacaataagatcttcagtgaacagtgacagcttgacttcctctttaccaattcagatgccctttatttctttctcttgtctgattgctctggctaggactttcagtactatgttgaatagaagtggtgaaagtgggcatccttgtcttgttccagttctcagggggaaggctttcaacttttcccgttcagtataatgttggctgtgggtttgtgatagatggcttttattaccttaagccatgtcccttctatgctaattttgctgagggttttaatcataaaaggatgctggattttgtcaaatgctttttctgcatctattgagatgatcataagatttg

SEQ ID NO: 342854 - DNA, 614 bp, Homo sapiens
ttgtgtcctctatatttctttcagcagtgttttgtagttttccttgtagagatctttcatctccttggttagctatatttctaagtatacatatattttttgtagcagttgtaaaaggggttgagttcttgatttgattctcagcttggttgctgctggtgtatagcagtgctactgatttgtggacgttgattatgtatcctgaaagtttacttaattcatttatcagatctaggagctttttggatgagtctttagggttttctagttatacaataagatcttcagtgaacagtgacagcttgacttcctctttaccaattcagatgccctttatttctttctcttgtctgattgctctggctaggactttcagtactatgttgaatagaagtggtgaaagtgggcatccttgtcttgttccagttctcagggggaaggctttcaacttttcccgttcagtataatgttggctgtgggtttgtgatagayggcttttattaccttaagccatgtcccttctatgctaattttgctgagggttttaatcataaaaggatgctggattttgtcaaatgctttttctgcatctattgagatgatcataagatttg

SEQ ID NO: 342855 - DNA, 601 bp, Homo sapiens
tgtctaaatcaaatggggacgagggcaggactaaagggaggcaatctttttatcactgggctttagtctacgttaaaggactatttcttaagtttcctaaaaccttgtaattgagatcccataccatttaaagttttaatattaattttacttggttttaacaaattgaccataccatttaaacttttaatattaattttacttggttttaacaaataccccaccatctggtggctgtctggataaaacgtgtaattttatagacacaagaatccacaagtgttttattactttattaattgtgtttattattttacttatttcctctctttttctccttcctctcaccactgcctctgtgttctggkagcaccctttccccccaaccaccaagcctggctatggaataaaccccatttctcttgcaccttccctcataactgttttctgattgtctcacatccataattgacttaaaagtacaagtcctttgctaacttataaattaataacattaacattaccttaatgtaatgaaacatctgaattaaaaagttattcctggaatcctcaagaataagagtgcaccccatgttagagg

SEQ ID NO: 342856 - DNA, 393 bp, Homo sapiens
gttgtagtttggtttagtgcactggttttctcaaatgctggtcatgctagcagttaagctgtcacatggacaaactcaggatctctggttgaccagggtgttgcaaacagtggaatkagatattgttttctccttctttggagcaggtttgttccttatgagttgctgtaatggctttagattgttggcccccagccaggaggtggcactttcaagagagcaccagctacgatagtagaagggggatataagcttgccctacattggccaggataaataatggggtttctcaggtgacggttggggccacagagctcccatttatgtcttttgtctttggctaccagggtgggtagagaaaaaccatcaggggaaggcagggttaggtgggtc

SEQ ID NO: 342857 - DNA, 393 bp, Homo sapiens
gttgtagtttggtttagtgcactggttttctcaaatgctggtcatgctagcagttaagctgtcacatggacaaactcaggatctctggttgaccagggtgttgcaaacagtggaatgagatattgttttctccttctttggagcaggtttgttccttatgagttgctgtaatggctttagattgttggcccccagccaggaggtggcactttcaagagagcaccagctacgatagtagaagggggatataagcttgccctacattggccaggataaataatggggtttctcaggtgayggttggggccacagagctcccatttatgtcttttgtctttggctaccagggtgggtagagaaaaaccatcaggggaaggcagggttaggtgggtc

SEQ ID NO: 342858 - DNA, 542 bp, Homo sapiens
tattgataaaaggattatatgaaaatgaaaaacttctgtttatcaaaagccatcatcaagtgggaaaaagcaaaccatggatatgagaaaatatttgcaatgcacataatggacagaaaactgattcccagaatagtttttctttttaattcctagaatcagtaagaaaaagacaaataagagaagaaaacagcaagatgcctgaacagactttacaaaaaagatatctaaatagcatatgaaaaggtactcaacctcattactcactagggaattgtaaagaaatgagataacactaaatttactcatcagaattgttataataaaaaagatcgacaatactargcgttcgtaagaatgcagagcaaccataactctcctacattgcctgtgagtacttaaattgacacaatcctttgaaaaattctttggcaatatctactgtatttgaatatacacatgctctatgacccagcaattttacttctgagtatatatcaaacagaaatacatgcaaatgcataagagacatagataagaat

SEQ ID NO: 342859 - DNA, 560 bp, Homo sapiens
tttatgctaatcaagtaatgtatgtcatggaatttatttcaggcgctcttatctctgtagttttctaaatatttacctcatatttttaaaaatgtaaataagtcattaatttgtatttaaacatttaccttcagggtgttgtcttctggaatatcatccaacatttgtttcttatattgattttgttgaaaattgggcttaagtgtctgtagtgcactgtttttgtctagccctctcattgtgcagccagatatttttgatgaatgtgtttgtctgagtagctcggtttctttgttgcgagataagttaggaggttcaggtrttcttaattgtttttgttgttgagctcccgaactcactggacaagaattttttccatcatttgccactaagtttgttcgtttacattgaggcttaaaatcatttttattccaagttttcaagctggtatttttgttaccatctctgtagctgtaatagtgcaaaaaaaaagcatttgtttctatatggtttcttaattacaaaaaaaattaataatgaaaaattcatttatatggcaa

SEQ ID NO: 342860 - DNA, 560 bp, Homo sapiens
tttatgctaatcaagtaatgtatgtcatggaatttatttcaggcgctcttatctctgtagttttctaaatatttacctcatatttttaaaaatgtaaataagtcattaatttgtatttaaacatttaccttcagggtgttgtcttctggaatatcatccaacatttgtttcttatattgattttgttgaaaattgggcttaagtgtctgtagtgcactgtttttgtctagccctctcattgtgcagccagatatttttgatgaatgtgtttgtctgagtagctcggtttctttgttgcgagataagttaggaggttcaggtattcttaattgtttttgttgttgagctcccgaactcaytggacaagaattttttccatcatttgccactaagtttgttcgtttacattgaggcttaaaatcatttttattccaagttttcaagctggtatttttgttaccatctctgtagctgtaatagtgcaaaaaaaaagcatttgtttctatatggtttcttaattacaaaaaaaattaataatgaaaaattcatttatatggcaa

SEQ ID NO: 342861 - DNA, 557 bp, Homo sapiens
tttgttgatcatgctcccagccaggaatgagggtgggcctgctctggagggacagcccaccttgcctctgaaggcagccggcacagaacaggcagagtggagtcaggcttctctgctctcctcgtaccmtctgtgcgtactgcttcccccgtgcctaccagtacaggtggttccagagtaatcttcctcctttcttttcctgccactggcagccacagaatgttgggactaattaatctgatacctcaggataataaatctctttggtagaaacagcttgctaatgataaatgatagttttaatactatacatgcacaatctcatttgattcttgcaacaactctgtgatgtagctaagttttgtctgttacactctttacaaaggaggaaactgaggctccattctgatctaaacctccatcctttcttgtctgacatgctgtgagaatctcaactgattgtccaagcagtctggcctcccttcagtctgttctctgtacagcatgagggaaatctttagtaatcccatctgatcacgctattccctgtttaaacc

SEQ ID NO: 342862 - DNA, 557 bp, Homo sapiens
tttgttgatcatgctcccagccaggaatgagggtgggcctgctctggagggacagcccaccttgcctctgaaggcagccggcacagaacaggcagagtggagtcaggcttctctgctctcctcgtaccctctgtgcgtactgcttcccccgtgcctaccagtacaggtggttccagagtaatcttcctcctttcttttcctgccactggcagccacagaatgttgggactaattaatctgatacctcaggataataaatctctttggtagaaacagcttgctaatgataaatgatagttttaatactatacatgcacaatctcatttgattcttgcaacaactctgtgatgtagctaagttttgtctgttacactctttacaaaggaggaaactgaggctccattctgatctaaacctccatcctttcttgtctgacatgctgtgagaatctcaactgattgtccargcagtctggcctcccttcagtctgttctctgtacagcatgagggaaatctttagtaatcccatctgatcacgctattccctgtttaaacc

SEQ ID NO: 342863 - DNA, 569 bp, Homo sapiens
atacaatagtagaagaagtaggtgtcggcctgtttgaaggggtttattaagtaatttggggaagtatatttttgaagcctataaatattaatttgtccctggtgttgagatttgtcttgtggttgtcagttgtgcatgttcttatatgttttggataggggagagtaaaaaggggttgagcatagtttatttttttctttggctcaaatatgtagttttaccataaaccacggaaagtttcctgttcttgtttgattaaaaaaaagtacacttccattcattgtttccatgtaacttcytatactttttactaaaaaaggttgaaatctaggataaattatgagctatctctcgggcaaagaaacgatttcatttcaggaaggagcttaggaagcgaaccttcttgagtatgagaaacagtaatagcccttggcatgtatgtgtgtgtgtgtatatatacatacatatacatatacatatgcctttccttacataataatgatttgcaaagagtgaatttggaccccgacttctaatcaacatggaaaggcagggaagattccatgtca

SEQ ID NO: 342864 - DNA, 451 bp, Homo sapiens
ctgtttgcacctttccagattaaatctaggagctgtcaatacatctcattttgattatgtctgggaacttaaaagactcaacatctatctacacatttgtaaagcagcaaggcttgggacaatggcagacaagttggttcccagctttgagcaaattctcacactgtacttctggaagtccctaggctttttccagctttagtggagctacgccaaatgcaggtgtacaaggaggtctccaaaaaccaccaccatctttcccagccatatcttcatgaaagataaggagttaagtctaagtgcctccacactcccccatatttacatctggactgatggtataggggagggaggactaaggaagggaatggccagagagcrtagtgcatatgcccactgagatttttaaaaatgtattctctaagaacaagctgcccatcatcaaccctga

SEQ ID NO: 342865 - DNA, 594 bp, Homo sapiens
tccctgtggttcctgggaggatcctagacttcaagtcaatagctttgaattcagatttagactctgaaactaagtggcaataatgaacaaagttctcaatcttcttgaacctcatttcgttagctataaaacaggaagactaatgcccctaaattgttgttaagctaaaatgagacaacacraggatgtcttgtgcaattactggcacaaaattgatacttaataaatgttagtggaaacaaaagcgtgtcctccatatttttggtttgacttaattagctcaccgaaagaggtgtacagctgctggtaaagcaattcaaaaattctgactttaaagagaccatctcataaattacagcacaagcttatttcccaaaggagaactggcagacagaataattagtctcaggactatactcttagagccagtgaagaaagtcagttcaacaaatattcattaagcatatatcatatgcctggcatgtgctagtgctggggatactgtgatgaagaaatcttgtccatgtccctaatggaggcataaccataaaacacctaactgtaacatggtgtctcacatcatgaggtatcagc

SEQ ID NO: 342866 - DNA, 545 bp, Homo sapiens
agattttttctgtgtccaatgaacctgccccatgtccctttggtgccccctctgagggcagaccctctgtctcctcctcccactggacatggaacatgtgtggggtgcagagggtatgcatcaggcgcctctgttggccacaccaggttcctgctctcggagtggggcatggtctgttgactgagggacacagctgtcgatgaagccctcctgggttcccttgccctgtgccatggtactacttccatgttagtgggcgggggggtgggggtggggggcctgtcttacctgacagcagcaaattttaaacactgcgtcagtggggagatgatattggaggctggaggatccttcctgtgacctctctgagaaccaggtctgctctgctagtgatagaattgcccagcggaaagatctgagcctgttctccttctggtgcccccacaaccctccatgctctgcrggcaaacacagggacaactctacgactctacatttggccgattcacaaattccatgagcatagttcctccctctctgttagc

SEQ ID NO: 342867 - DNA, 596 bp, Homo sapiens
tctctgttagcaacaggcatcgcaatgccccccagatgttcatcagagtccagcttctgaggttgtgcctataatttagggccttatcctcctgctctaagggaaggccagatgtgggagccttcacacagactctccccagagtgctggagtccagaaacactcatctggatgctaacagatcagaaggatcccaatggggagaggtcctgcagcaggaatctgatcacagtgggaccgtggcatactgtctcatcctcakggctggccttgctaggggatcgggcatgattttcctgaacctgtagtattttgaatctgtagatactggtggcctccggtctcaggcactatctaactttgcaaacatcgacatttcttcctgacctcctgaaatgcaactgcttccacagcttcatgtgataacagctttgaatactcctctgcaatagaaaatagaagagacaaagttctggtgttggctttgcagcttttactccttgtcacctagggccccatctgcaaaatgagggcattgttctacttaactggtatgagctaaatgtaattttctgttctgatggtctctctgttct

SEQ ID NO: 342868 - DNA, 564 bp, Homo sapiens
gaatgagacccacaacctgaaatagcatttggagaagtattaatacatgagcctccgtgaaatcacttctttcaaggctgctgtgcagcatgcccctgacaactgggcacacctgagctggtgctgttgggctgtgatggctgcacgcaaacgtggctctggatgcagggatgaagggctaagcagatgtgatacagtgtgtcctctactagagtgctgaggtgggcagaaggagcagcctctctggctgcagcttatccacctgagaaatggagagattctctgccatctgggattatgaagatgctgagaggtgcacaggagtgactgtgctcttgcttttggactcagagtcccytgaagcccaagaggagaaatcatgaaggcaggaccagaggtgattgttaatttcaattatttacagttatggccattttgacacgggtaccaagaccattcaataagggaaagaatagcttcttcaacaaatggtgctgagacagcgaggtatccacatgccagagaatgaggttgaatctctattttacatcatatacaaaaatt

SEQ ID NO: 342869 - DNA, 511 bp, Homo sapiens
tatcttaaccccactctcccccctccaaaggctaccactgctgagttggggtcccatctgtttcctgaggttggtgatttctgcctgaagtctctgggtggctcagttcagctcatcgacctccatctaaatggctttgaggtcctcacccttcctcctgkcagtgacctggagcttctggtacaggaagtgggggaaggcaagagtgaaaagatagcacagagagagtgaaagcagggctcctaaccccagatctctaagcctcggtcaaccaagacttttatgtcctggccaggctggtcactgtggccaaaaccaacacacagaggagacatattcctgtctgctaggaatgtatagtccagctgagaaaacaaaacagtcctatgtaacatacttacgtaactatcaaagatcacctagccagttcctagacaataatatggaatggtctgtcccagtcagatcttgatgaaagagatagtaacatagacaatccatagtgggagga

SEQ ID NO: 342870 - DNA, 511 bp, Homo sapiens
tatcttaaccccactctcccccctccaaaggctaccactgctgagttggggtcccatctgtttcctgaggttggtgatttctgcctgaagtctctgggtggctcagttcagctcatcgacctccatctaaatggctttgaggtcctcacccttcctcctggcagtgacctggagcttctggtacaggaagtgggggaaggcaagagtgaaaagatagcacagagagagtgaaagcagggctcctaaccccagatctctaagcctcggtcaaccaagacttttatgtcctggccaggctggtcactgtggccaaaaccaacacacagaggagacatattcctgtctgctaggaatgtatagtccagctgagaaaacaaaacagtcctatgtaacatacttacgtaactatcaaagatcacctagccagttcctagacaataatatggaatgstctgtcccagtcagatcttgatgaaagagatagtaacatagacaatccatagtgggagga

SEQ ID NO: 342871 - DNA, 440 bp, Homo sapiens
tatccagctccggctttctracctccaagcatgggcactcactttgtcaatgaagaaggaaaacttgttgagtttcttgatctgctcctgctcctactactttacctcctagacctcagtgtcaatcatcacatccagagactccaacaagctttggtttatcacaacttcctggatgcctccagggcagaccagagaacctacagacccatgctccccaaaaccactgtcaagaccaaagccctccttgctaggcttcccaccccaaactgtccacctccatagctcctttgtctgcctccatggtcccggcctccagccatgatgatggagatgctctttctccccccagggctaacgagactccagctgctataaccgcctggctcagcatagccttggcttcgtgcccctctgtgctgttccacaagagtggcagc

SEQ ID NO: 342872 - DNA, 561 bp, Homo sapiens
gactaaccaactactccattgcatacagagtaggaatgtggagggtaggaatgtctgggttgttgggtctggaaagctaagctaagaacctgccttgccacacactttcccactgtccatataattgaggttaattaaggacctagagctagggaaggggcaagatggcctcacctcagaccttgtctcatgcacacctctgcatgcagacaggtgactacaagccaagatggagcttgcctcacrggatcttcttcccaaacaagagttcccttgcattggaactggtaacatccccagggatcccacctacttcacccaaattaccatcaacccaccctccaagacccaactcaactcagatgttctctccccttgactgatgaccctggtgtgatgtggccccctccttcctgtattcctccagtgcttactctgtccagttcattgaccaacaaaaactcactaatcactgcagtagaatacacattctgctgcatcctcaggatgaaaaggtaaagaagacacagtccttgtcctcaagaaattcattattccata

SEQ ID NO: 342873 - DNA, 625 bp, Homo sapiens
ttcattattccataggcactcatttctgtggagtaaatatacctaccatrgttgatctcaagcaatcaacacggtgttactgaacatggagttaggaacaaaagcaggcaattggctttcataagctggtgcgggagggttccaggacaccgctggacatcatatgccagaagcaaggaaacataaatggaaaagtgaggcaggagtcaaggaaggaggaactatgaactggcttttaaaggatgaattcgagtctacacacagaaaagggagaaaggaactccaggaaaatggagagacatttgcaaagacctaacagcataaacatgtgtaaaagtttggtgtatttggagaatgacagtaccctctcccctaagcctgacccagatgagaaactggttgacactcaacctctaacagatgcccatgacaggtgtcctgtgcacgttctcagccgggactctgatggccctgccacctgcctccagcctgcctccatccagctcaccccaacagggcccggcctctgtcccatgcaacctcaggagaatcttctctatgtctgtaggtgtctgggcaaaggacagctgtcttgaggagaaatcataccaaacaaggttttaaa

SEQ ID NO: 342874 - DNA, 565 bp, Homo sapiens
ttaggaacaaaagcaggcaattggctttcataagctggtgcgggagggttccaggacaccgctggacatcatatgccagaagcaaggaaacataaatggaaaagtgaggcaggagtcaaggaaggaggaactatgaactggcttttaaaggatgaattcgagtctacacacagaaaagggagaaaggaactccaggaaaatggagagacatttgcaaagacctaacagcataaacatgtgtaaaagtttkgtgtatttggagaatgacagtaccctctcccctaagcctgacccagatgagaaactggttgacactcaacctctaacagatgcccatgacaggtgtcctgtgcacgttctcagccgggactctgatggccctgccacctgcctccagcctgcctccatccagctcaccccaacagggcccggcctctgtcccatgcaacctcaggagaatcttctctatgtctgtaggtgtctgggcaaaggacagctgtcttgaggagaaatcataccaaacaaggttttaaactaaggtcagatgtcctcatgcatgtttaat

SEQ ID NO: 342875 - DNA, 625 bp, Homo sapiens
ttcattattccataggcactcatttctgtggagtaaatatacctaccatggttgatctcaagcaatcaacacggtgttactgaacatggagttaggaacaaaagcaggcaattggctttcataagctggtgcgggagggttccaggacaccgctggacatcatatgccagaagcaaggaaacataaatggaaaagtgaggcaggagtcaaggaaggaggaactatgaactggcttttaaaggatgaattcgagtctacacacagaaaagggagaaaggaactccaggaaaatggagagacatttgcaaagacctaacagcataaacatgtgtaaaagtttggtgtmtttggagaatgacagtaccctctcccctaagcctgacccagatgagaaactggttgacactcaacctctaacagatgcccatgacaggtgtcctgtgcacgttctcagccgggactctgatggccctgccacctgcctccagcctgcctccatccagctcaccccaacagggcccggcctctgtcccatgcaacctcaggagaatcttctctatgtctgtaggtgtctgggcaaaggacagctgtcttgaggagaaatcataccaaacaaggttttaaa

SEQ ID NO: 342876 - DNA, 238 bp, Homo sapiens
gtcaagaatcccagggcatccctagaaagacctcagaggcgaggccatcctgacttagctttccctgtccagttctcctaggacctactgttgtgacatccactttcgccccatcagaaattctccactggtgaagcatgtgatagactatattcccaccccacccagggaccccacttaggagaaytgctaccccctgaggtctttcctaagagattgggccctaaatcctcccagt

SEQ ID NO: 342877 - DNA, 503 bp, Homo sapiens
tctttagagtgactcctgtaacttccaagcaagaagaggctgactctcttccctacaaactatggtgtggtttatcttcattgaaagtgaccattggccaggtacagtagttcacgcctgtaatcctagcactttgggaggccaaggctggtagatcacttgagctcagaagttcatgataagcccatctctaaaaaacatggaaaaccccatctctaaaaaagaacaaaaattggctaggtgtggtggcgtgtgcctgtagtctcagctacttggaatgctgaggtgggaggatcgcctgcacccagggaggttgaggctgcagtgagctgagattgtgccaccrcactccagcctgagcaacagaacagcaccctgtctcaaaaaaaaaaaaaaagaggaaaggaagaaagaaagaaagaaagaaagaaagaaagaaagaaagaaagaaggaaagaaagaaagaaagaaagaaaaaggagggaaggggaggagagggaagg

SEQ ID NO: 342878 - DNA, 503 bp, Homo sapiens
tctttagagtgactcctgtaacttccaagcaagaagaggctgactctcttccctacaaactatggtgtggtttatcttcattgaaagtgaccattggccaggtacagtagttcacgcctgtaatcctagcactttgggaggccaaggctggtagatcacttgagctcagaagttcatgataagcccatctctaaaaaacatggaaaaccccatctctaaaaaagaacaaaaattggctaggtgtggtggcgtgtgcctgtagtctcagctacttggaatgctgaggtgggaggatcgcctgcacccagggaggttgaggctgcagtgagctgagattgtgccaccacactccagcctgagcaacagaacagcaccctgtctcaaaaaaaaaaaaaaagaggaaaggaagaaagaaagaaagaaagaaagaaagaaagaaagaaagaaagaargaaagaaagaaagaaagaaagaaaaaggagggaaggggaggagagggaagg

SEQ ID NO: 342879 - DNA, 590 bp, Homo sapiens
cttttttttccttttctgtctcctttatactacagtggggattttttaaaattctgtgttatcacaatataactatgcctttctttctcttcctaacagtaaagggtgttactttaatttttgctataagacaagagacatgagactgatacctttagaactgcaatttaaataaagaatattcttttcaaaagaaagttttatcaatatccataaagtccctgttaaaattttcacaccagtttttgatagaactgggcagttgtgtgagacttcctcatggtccctccaagggacaaacagaaggtccccattccaatgaagtctttcctggacttcctaaaattccaagaatgctacaggctccagctcaagaccatcatttggaattctctctcccaaagtgctagagaacagaacagcccctgaggccagtgaagactacccatggggaggagttgggatagcagagttgagctgagctaggattaggatctgagaggcaaggggtccagggagaattgctggattcmgctgttctccacagaccttcagtggttgtcttaggcctggagttgttggagagaagg

SEQ ID NO: 342880 - DNA, 464 bp, Homo sapiens
tttcatgcaatactttcccttcttctcaatgccacacctcttcctcccaacctgcttgctcactgcccttttcaagaaagccttctcaaatgaacaaaacctgtcacccggtctctccatttctccatgacatccccaccatctgggaaagtgcttgctctctctgtgattccagtctggtgaaatgttgcctggttggcctctgcatttttctcatgtttgtgtgcatgactttcccatatgccatgtggctctagtgtcttcttttacctcacaaaacacccatccaggttagacagwgccgtaaacaagggcgatcgagacatggagaatttcaaatgcagtttattgcagcaaaacaaggaaatggggagtttaagacctctccacaaaagaaaaacaacttgcttacaccttatgtacaaaaccaaaacagcacagagataagatgctaaggagctgtc

SEQ ID NO: 342881 - DNA, 597 bp, Homo sapiens
gccttctccaacagactgagaggtctctgcagacggggccaaaatctcctccttctgaacttccttcttgcacaagggacagagctgtcctcatccagaagcctgggaggcaggaggaggacaggctaaggatgattttctgcgatagtcttgactctattcatggccttctgaagcagaagcagcctggacttctgcttcacacacctccgtctccccagacacacacccagagggtcagccccactggaagtttccaggggtgatcttgggagtgataaccccagtaattggaggccagcaggtggagataaggtcgctaagccatgataatgcaggaggtgagccaagtaaatgctgggttctgggtcactttayagggattcatggggagttcacggtggaacagacaaaaatctcggtgagtgcatggtaatttcctacatgaagaacccaagaggcctcaagggatctaaaaggtgttgtcgacatacaaattaggctgactccagccagccaggctatttaaggggcgagctgggccgagaacgcagcggctgtttgcgccccttctgcctcccgcgcggccagcaccgg

SEQ ID NO: 342882 - DNA, 645 bp, Homo sapiens
ccatataaaatgaggagaggagagaagaagaaatgaatattaacagtgtagatggacgtgattaatgagaaaccaaacagccctttttcctcggtcatctagtctcactcttacaatgtgaatgattttttaaagacatataaaatcatttacaaaattggcaaattctattacctttgtaaaaatgtatttttccctagtccattaaagtttgaaaatacttattacaaatcataagctagaagactttaggttatataaatatttttaatgtyaattatgaacaagttctgcacggtagaaaagtggcttataggttttttaagtgttggttggttttaattatattaattagaaaataatctacaatttccttataaaacttacataaactgtttggtgtctttgtgagagtaattcttctgatggaattataagtactagaagtgaagctagataggcctcctttttccatgtttagacagaaggcaaaagggaacaccacaaagtctcactagattatcagttggctatgcatgatgaatgcttcacacgaaaattcattattttagaagttaattaactgttaaactttctaaatttctttctagtggaattataacatgattgataatttatttttat

SEQ ID NO: 342883 - DNA, 608 bp, Homo sapiens
gtttgttaattaaggcataaaactgattttgcaaacaaaacaactctagcccatttgggattcttgaagagggcaggaagaagagtggggtgcctggacgtgcccttctcttcagcttctctctctgtcccttatgtctatattttttcttcctacttttcggaatgaaggttccccaggttccactttcaccaaggactctgctccccctcagccactgcccctgcctttctctcacctgcctaccctactgcagcatggtgctcatgaagttggcttgtattcaccgggtatatgtaaggtccccaatccctccaagattcaagccactaggcccagatgtgaggttcaggagtagatgctctaaatgcactgaggcgagaaaagtaacataagaaaggattgaggagctggaaattgcctatatggagcctaagaaactcagccctgatataaggtctggaggagaaaggtgggccaaacattgacgagtacaagtctggctgtttgttttagtgtgtatctgtttatatatacatgtggattttaakgtgtataggtgtgatgatcgatgaggctggagggtgggggcttcttgtacatatgaa

SEQ ID NO: 342884 - DNA, 513 bp, Homo sapiens
ctgtacccacagaattgaattcagcaaaactcatgttcatttggccctccctgtctgtaactgtgagatcagcagggatggttaaccctcttttgaggataaggatcagagaagtattttatttaagggcatagagtaaagttttctgctgtaaaaaatcttcctctattttggggtacagagaggcagcatacatattgattatgcaagcagtaaatcyggtaattatctttgaaacgtctttctctttaccttccatttttaatcgatcaccaaacgtcagtgattttatctcttaaattgttctataatccatccaattctctccactttcactgctaccttgctattgcaaacattaacatcttgtatctgggctactgcagttgccttctaaatggtgcctcctacatctgttattttcctgctacagtttgttttgtatactatagccaggatgatgtttttaaaatccaaacctagtcttcacattctgccccctaaaataaaagt

SEQ ID NO: 342885 - DNA, 513 bp, Homo sapiens
ctgtacccacagaattgaattcagcaaaactcatgttcatttggccctccctgtctgtaactgtgagatcagcagggatggttaaccctcttttgaggataaggatcagagaagtattttatttaagggcatagagtaaagttttctgctgtaaaaaatcttcctctattttggggtacagagaggcagcatacatattgattatgcaagcagtaaatctggtaattatctttgaaacstctttctctttaccttccatttttaatcgatcaccaaacgtcagtgattttatctcttaaattgttctataatccatccaattctctccactttcactgctaccttgctattgcaaacattaacatcttgtatctgggctactgcagttgccttctaaatggtgcctcctacatctgttattttcctgctacagtttgttttgtatactatagccaggatgatgtttttaaaatccaaacctagtcttcacattctgccccctaaaataaaagt

SEQ ID NO: 342886 - DNA, 513 bp, Homo sapiens
ctgtacccacagaattgaattcagcaaaactcatgttcatttggccctccctgtctgtaactgtgagatcagcagggatggttaaccctcttttgaggataaggatcagagaagtattttatttaagggcatagagtaaagttttctgctgtaaaaaatcttcctctattttggggtacagagaggcagcatacatattgattatgcaagcagtaaatctggtaattatctttgaaacgtctttctctttaccttccatttttaatcgatcaccaaacgtcagtgattttatctcttaaattgttctrtaatccatccaattctctccactttcactgctaccttgctattgcaaacattaacatcttgtatctgggctactgcagttgccttctaaatggtgcctcctacatctgttattttcctgctacagtttgttttgtatactatagccaggatgatgtttttaaaatccaaacctagtcttcacattctgccccctaaaataaaagt

SEQ ID NO: 342887 - DNA, 552 bp, Homo sapiens
caatggggaagtactaaccgtaactgcccgaacctattgagtgtttaattaatgaatgtttgcaatttttgagagacttaatatcaattattttatcaaccaatgggacttaattcaaaaattaaatatgtattcctaaaccaatcattccatgtgaaactgattaagatgtggaaggcccatgaaatatgaaccatttaacatgtgaatacacgtcatgaagatgacattggaaattccaacaaaaatctaaaataagataatggaaattcaaaattaattaatgtgtccatgattaagatataattttaactcagacaatttacattcatatgttatatcttccttagttcctattaaraattaaactcatttagattattgtatttggctgaaaagattctggtaatgccatggtgttcttttgtaagttcataaacaattatcaaatgcttttgttggttcataaacaattatcaaatacttcacatcgtataatcactggaaagagaaaaaagctatcacagatcttagccaattaaagagcttata

SEQ ID NO: 342888 - DNA, 535 bp, Homo sapiens
tatataaggtacctagaatagttaaattcatacagacagaaagcagaatgctggtaggcaggagtttagagagagggaggaatgaggatttattgtttaatggtatggagtttcagtttgggaaaatgaaaaaaattggagacggatagtagcaatgattgcacagcaatgtgtatccacttaatacctctgaactgtacacttaaaatggttaaagtagcaacttttgtgttatgtatttggcaacaatttttaaaaaataaaaataagaggaaatgggcaggagatagttagatattggagaattgtgagaggaatggaatcagaacwggaagcaaacatttgcttagccactgctcactctgtaatgtccataattctaagctcaaagctcctcctgtcatccctagccccacagattctggtctcctctttgactgagataggtacagggaagcagtctgagctccactgtggattgcccagacacaaaccaagtgttgcttattttgccttaaaatgctgcaggattgag

SEQ ID NO: 342889 - DNA, 345 bp, Homo sapiens
catcatggttcagccagattgatgcaagcaataggcactccaggctatggaagaacctatgattgagttgcagggtatctcttgatattaactaggataaagaattggaggaaattctttcatctctcaacaaagcctggctttaaagattatgttttaccttcagtctcaaaaatcctacactggataycaaaatttaaaagttgattgtttctttttgcattcctgcaataacaatttgaattctctccaaagacagaagatgcctgtcacaggatggggaaaatcacttgagaggaaatgtaaaaaatagcaaaaacaatcaatgttttccaacagatatta

SEQ ID NO: 342890 - DNA, 649 bp, Homo sapiens
ctttgctttattctttatattctggtcatcctgagagctwgtatggtgtaacagaatctttgatttcagacttccagagttttaaaccttggatttgctatacattgttggcaagttgcttaacctctttgtgcctcagttccctgaactaatgaatttaggtaattatggtatctactttatgggatctctatgaaggttaaaataataaagcacttagaaaagttagctgataaatagtaaatgctaatcagaatttaaagctactactagtactattcatgagcttcttgatacttaccaaatacactctctctataatgtttggtgcttcacagtgtttttacttcttctatttctgttgtctggaaagtgcttgccatacagtacactttcctaacttctcatctactaaaatttagcacaggagacaattccaggaagagttctttacttctgcccgaagctattttcctattgcatcctataattactatatcatttcatttactataatacaataaaaccatttgtgcccatcatcccaattagccccaggtcattagggtagagattgtttcataaggtaccagtaatgttcaattaaggactgtgaaattgaaccaaattaaaatcaacttgcttgaaa

SEQ ID NO: 342891 - DNA, 599 bp, Homo sapiens
gacaggggcacttatccaagtaaaatatgacaaaaatatagcagagttagcaaagaaaaaaaaggctgaaaatgataaatatttaggaagtaaaataacaggatgtgatatttgtatacaggagtatgtgatataataaaaatgagataagagataacactcagtactatagtttgacttttgaacttttgtaatttactaagttagagaacacttaataagagcggaaaatacgtttaagttgaacatactgagataaagctgcatgtgagaattccaggctgtgccactaggcggcggcatttgtgcgcctgcattgtgcgaattccgcccaagctttactctctgcatgatttgtcagtgaaattctgaatgtctaaagacctctcattctccacttctgttgtattattagtttctgaccacacgatggagtcatttcttcacatttcctcacactgattttgtttwttaagaaaatcaatccagtcaaacactagctggaataaaagacatttaaattttcagaatattcctctaaaaatttaggttctctttgacaaggaacataaaaattaattcagtgagtattcagaacc

SEQ ID NO: 342892 - DNA, 590 bp, Homo sapiens
ctaaaggtcatgcagcattttaattttcctgtcaaagagcatcactctgagtaactgagaaaagaaataagggcttgaaactccaagcttaattctgattaccaagagaaaacatcatttaagcaaagggaagtttaggacaatcaggctatatgatttagaattttttccagctaagattagcacaacaaatgacaaaaataatattaaaaacaaagatagactcttaattggaaatggaattcagaatgagtagaaggctctgaaaatggaatatttgacattacaaatgtttcactaattagtaacaggaaagccaccctaaatacagcttggctacctagtgtgctctccaaagaactcttagtgtaactgggacctactagtgtggagggttgagtcataattcaggacaggtacatgaagatagccagggaggccaccaaactttaaaaaacttcaaacaacaacaagaagaaaccctatattcaaccaagaaaaagggaagtatgatgagtcagtttgattgcttagaatatgcatmgtttcaaaaggaattttgggtgggtaagtgggaaggatgatgcagt

SEQ ID NO: 342893 - DNA, 574 bp, Homo sapiens
acaaacttaaaaatctgaattttgcttaacattttgattagagatttccaactaatttctaataaaatgtaaacaaaatgtaaataatttatgtggtaaatgyaaacatttttaaaatccaactgtgataggtagtaaagagatagattctgtggaaatacgctgatattttcttttcgtctcaatatcagattatcacaaaaatttttgtatttctgtttcatgactgtatatacataaaatatttataaaatgtgatacttatatctctgcttgtatgaattggtagaatatcacagctctttggatgcaacaataaattatttgtataacataaccaacttcaagtacatttttgttctataggtctcctaatttagtaagaacattatttttaccaccatgctctgttccacccaaatttgtattcatatcaacatggaaaaaaaatctaattttatcttcaatgttgaattttaaactaaatttacagtgtcattcacaaataacaatcaattttataatttttaattttatagttagtaacaatgagaagtttcagtttgaaaaataa

SEQ ID NO: 342894 - DNA, 574 bp, Homo sapiens
acaaacttaaaaatctgaattttgcttaacattttgattagagatttccaactaatttctaataaaatgtaaacaaaatgtaaataatttatgtggtaaatgtaaacatttttaaaatccaactgtgataggtagtaaagagatagattctgtggaaatacgctgatattttcttttcgtctcaatatcagattatcacaaaaatttttgtatttctgtttcatgactgtatatacataaaatatttataaaatgtgatacttatatctctgcttgtatgaattggtagaatatcacagctctttggatgcaacaataaattatttgtataacataaccaacttcaagtacatttttgttctataggtctcctaatttagtaagaacattatttttaccaccatgctctgttccacccaaatttgtattcatrtcaacatggaaaaaaaatctaattttatcttcaatgttgaattttaaactaaatttacagtgtcattcacaaataacaatcaattttataatttttaattttatagttagtaacaatgagaagtttcagtttgaaaaataa

SEQ ID NO: 342895 - DNA, 488 bp, Homo sapiens
ccaaccctgcttattcctgtgaaccaactagttatcttcaactgcagctcagaagaaacaaaaaaggacaggtaatgtaaaaatctggattaatattccaattctgggcaattatcctgcaaatcctgtagaatggtgggaatgaatcaggtgcccacccaaatcttagcaagcataaatatagccactagttatctgggtgtgtcacaagacgtttcttytctctccctcgtggaaagaggactcaattcaacagcttcatcttagcattcagctcatgataagtagtccatgcaatactctgacacacatttttatcccaacctcaattccaagcttcaggttgaagccctaggaaagaatactggatctgagaaactcagaggcagatgataatggaggctaaaaggcacagtgaaggtgagcatgactaattccagctgattaagccaagcctcctatttcatggataaagatcatgctaggat

SEQ ID NO: 342896 - DNA, 608 bp, Homo sapiens
ttattcttttcttccaggttgtttggctgcttgtggttttttgagtttatatagaaattatagggcaatatttgatggctcactcctgtgatcccagaactttgtgaaaccaaggcaagtgaattgcttgagcccagcagtttgagaccagcctgggcaatatggtgaaaccctgtctctacaaaaattacaaaaacttgctgagcaaggtaacatgcaactgcagtacaaaccacttgtgaggctcaagtgggaggataaaatgagcttgagaggtcaaggttacagtgagccatgattacaacactgcactccagcctaggtgacacagctagatattgactcaaayattttagaatattttagtacttctgcaaaacgtaccattggatttttgttaaagatatctcattcatctgtagatcatttcaaataccattaacatctaaagaaacatgcatgttctacatcttgaaaaagagtatgttcaagaatttgtctagttttcatacatatgcagacatgctagttttcttttggtttttaacttcaagttatgttttattgcagtcagaaataatatttgttgtgcttaccatctgtttaaa

SEQ ID NO: 342897 - DNA, 587 bp, Homo sapiens
gtgccatgggccatttctgctgctttcagaagccccctttaagcctcagtgtttctaggccgaggccctgactgactctttatttgtgtcctaatgaatcccccacacataatgcatggcactgactgttcttccttcttttcaargacagggccacacacactccactccacagggcatgcctggaccatacgtgtctctttttgttctgaaaaaacaattttttttttttgagatggagtcttgctctgtcgcccaggctggagtgcagtgacacgatctcagctcactgcaatgtctgcctcccgggttcaagtaattctcctgcctcagcctcccaagttgctgggattacaggtgcctgccattttttctgtatttttagtagaaacggggtttcaccatgtttgccaggctggtttcaaactcctatcctcaagtgatccacaagcctcagtctcccaaagtgctgggattacaggtatgagccaccacacctggtcaaaaatttttttattttaacttgacatataactgattatgaaaatgtcaactttatgggtagatatacatgcaaatatgtgcaa

SEQ ID NO: 342898 - DNA, 587 bp, Homo sapiens
gtgccatgggccatttctgctgctttcagaagccccctttaagcctcagtgtttctaggccgaggccctgactgactctttatttgtgtcctaatgaatcccccacacataatgcatggcactgactgttcttccttcttttcaaggacagggccacacacactccactccacagggcatgcctggaccatacgtgtctctttttgttctgaaaaaacaattttttttttttgagatggagtcttgctctgtcgcccaggctggagtgcagtgacacgatctcagctcactgcaatgtctgcctcccrggttcaagtaattctcctgcctcagcctcccaagttgctgggattacaggtgcctgccattttttctgtatttttagtagaaacggggtttcaccatgtttgccaggctggtttcaaactcctatcctcaagtgatccacaagcctcagtctcccaaagtgctgggattacaggtatgagccaccacacctggtcaaaaatttttttattttaacttgacatataactgattatgaaaatgtcaactttatgggtagatatacatgcaaatatgtgcaa

SEQ ID NO: 342899 - DNA, 587 bp, Homo sapiens
gtgccatgggccatttctgctgctttcagaagccccctttaagcctcagtgtttctaggccgaggccctgactgactctttatttgtgtcctaatgaatcccccacacataatgcatggcactgactgttcttccttcttttcaaggacagggccacacacactccactccacagggcatgcctggaccatacgtgtctctttttgttctgaaaaaacaattttttttttttgagatggagtcttgctctgtcgcccaggctggagtgcagtgacacgatctcagctcactgcaatgtctgcctcccgggttcaagtaattctcctgcctcagcctcccaagttgctgggattacaggtgcctgccattttttctgtatttttagtagaaayggggtttcaccatgtttgccaggctggtttcaaactcctatcctcaagtgatccacaagcctcagtctcccaaagtgctgggattacaggtatgagccaccacacctggtcaaaaatttttttattttaacttgacatataactgattatgaaaatgtcaactttatgggtagatatacatgcaaatatgtgcaa

SEQ ID NO: 342900 - DNA, 597 bp, Homo sapiens
cttgggtctgttcccacccacttcagggatgccacctcccacctcagggcagccttcagccatgactcctacctacccgcagtttgagcaatcagaaacggagactgttcatctgtttatccaggctctatcagtcggtgtcatcatcggcaagcagggccaagcacatcaagcagctttctcgctttgccggagcttcaattaacattgctccagcagaagcaccagatgctaaagtgaggatggtaatgatcactggaccaccagaggctcagttcaaggctcagggaagaatttatggaaaaactaaagaagaaaattttgttagtcctaaagaagaggttaaacttgaagcttatatcacagtgtcatcctttgttgctggyggagttattggaaaaggaggcaaaacggtgaataaacttcagaatttgtcaagtgcagaagttgctgtccctcatgaccagacacctgatgagaatgaccaagtggttgtcaaaataactggtcacttctatgcttgccaggttgctcagagaaaaattcaggcaattctgactgaggtaaaacagcacaacagcagaaggctctgcaaag

SEQ ID NO: 342901 - DNA, 532 bp, Homo sapiens
ggaaaaaaatccccaaacccagactttacaacttttacaaagattactcaaaatggatcacagacctatataaaatgaagaactacaacactcctggaagataacatagagcagaatctcaattaccttgggtttgcctcctttaatacaacaccaaaaacataattgatgaaagaaaaaaaytgctaagttggactatattaaaaataacatttcttcactacaaaagacactgttaaaagaataaaaagacaagtcacagaatgggagaaacgatttgcaaaacacataactaataaaagactggtatccaaaatatgcaaaaagaaaaaaaatgctcttaaaactcaagaataagaaattaacaacccaatataaaatagcaaaaggtccaaaaatatacctttctaaagaacatataagcatggcaaataagcatgcaaaaagatgctcagcaccatataccattagggcattaaaatttaaaatagcaatgacatactgtcacacacatattggtatagctaaaatc

SEQ ID NO: 342902 - DNA, 576 bp, Homo sapiens
acaattggtgctggggaagttggatatccatacatgcaaaattatgcatttggttctttaccctacaccataaacaaataaaaatggatcaaagacctaaatgtaagagcttaaactacaaaatttttgaagaaaatacaggtagaaaacatcttgacattgtgtttggcaatgatttctaggataggacacccaaagcacaagcaacaagagaaaaataaagacaaattggactttatgaaaataaaataaaacttttacacattaaaggatattatcaacaatattgcaaagcaatgcacagcatgggaaaatatttgcacatcatacatctgataagagattaatayctggaatatataaagaactgctataactaaacaacaacaaaaaaaaactacctcattcaaaaatgggcaaaggacttgaacagacatttcttaaagatggtgtaaaatggccaaaaagcatatgaaaatatactcgagagaactaattattagcaaaatgcaaatcaagcctacaatgagctatctcttcacatccattaggatagccactatcaaaaaacagaaa

SEQ ID NO: 342903 - DNA, 613 bp, Homo sapiens
gctcacatgcacaaatataactattatacctggacccagaaaggagagatatttggactcttatagccagtcctatggccataagtaaagtaaagggtcccctgtttgtataaagctcacagaggattatgacactcaggcacatcatataaagcctgagtggtacaaagagtgtcatagcagggaacagcaaccaggtgcgattgtgactcttggatgctcacccagctgacccgattgtcattctctcacaagaacagggcctacatacaaggtactaaaactcacacaaaagagcaattgaaggttgaaattkttcctctcgtacacagatctgacccacaggtggtttggtgatgcatattcagcacacctgtgaggttggggctcccctactggaacacaatcttcaggtgggattgggcatcttatacatggatcttgcccactgttgagattgtgactctgctttgacccaactcacaggaggtgttgactcacatacatgaagccaggacctgagtgggactgtgaaacttacttctgaatatttccaagtgtgtgattaggacataaaagttagcccagctcctgaataatttgactctccttt

SEQ ID NO: 342904 - DNA, 570 bp, Homo sapiens
tactgcctcctgtctcttcacattccagggctcttttctttgctccagacaggtcatcaagtctggcttaaagatagcaagacctgttttattagaaaaaaataacatgactcttgctaggataatccgattactaatctagtactatgctcagtagagaagaaagaacattatagaagactctagaaaattaattccaatctactgtttactaacataaactttagaatatttagaaagtattttaaatktgtgggttcttagctctattacccagtgatactgaatcaaaagtcagttgtgaaaattgcatttttaggtgtgggtaacaatattttatgcattaaatttctgatattaccactaatttagactctacacagatgagctcaaaaaagggaaagattaatgttaagatgaaacatcttaaagattatattttctacctgaacagatacccaattttttctttttgaagcaggattctggaactcacttatgcaaagcagaacttccaaaaaaaaaaccagaataaaatatttaatgtagaatatgagttgtatattgaag

SEQ ID NO: 342905 - DNA, 371 bp, Homo sapiens
aagaggattcaaaactccactgatcaaagagcaccagtggtggtagctggagaccctggktgggaagtagtttgcagttaggaggaactagattggggacctgctttaacagatagtctggccatgtctttttagagcacctgtactgtgctaggagatgctttctgcccccagtcagcttgggctcttcaaagcatgaaggctggaatggctaagttgcccaagaagcaaagatgatggcccattcctctttctggtagctccatccctggggggtgcagtgctgctaccagtggttggctgtaattctaagccagtaggtgttaccctgtgaggcactgtggaagtgggtcctacagaccatcactgct

SEQ ID NO: 342906 - DNA, 617 bp, Homo sapiens
aggttgtaggtcaacagatggtaacaatatactattgtgtgactgtggaataacatctctagtgatttctttgtcagtggtctttaacttaacataatttggagaatatgattcctacaaattaacatttttgtttttcttgtaactacaggttattatgatggttgtaatgaagattatatgagtataatggagctatatgtttctgaattctgaacaactagttacaaaatattcttttttctgttgaacatgtgacgtatctggtctgttaaacatagagacctttagttttgatatatatagatttaaatatacagacgtgtratgtaaaataaactttagttgtaacagatttatagagaaagtaatcatttgtttatgtttgtatacctattttgaaaagaaaaatattagaatgaaacagataattttacaagtgttgatatcttaccagcaaaccagaaatttcaaagattttgaaagcaaatctattttctctgctttgtatgaaattcatttatctaaaatgttattgcttctggcttagaattattttgtgcaaattctctttttctttttttggtttgtctgtttgcctgttgctcaccatagac

SEQ ID NO: 342907 - DNA, 508 bp, Homo sapiens
agtcaataagttagagcagaatgtgctaatgtgaccgcctgagattacattctaggaggaaacccgggtggcacctacctgaggctgtgcattggaggaaggatggacaggtcaactgggcttcagtgaacatgtgcccctagccaacccagggagacgtgggcttgccaagagcaggcaataagggtgtcatactgcaggcatggtgagctgtcaggtgggcacagaggggtaggtatgggggggtccatgagtaggagaaccctctcacggccctgaactcaccccagagatcccccagccttttgaagcagaggctgtacctgaagctgcagggtggrcactgcgcagtggactggtaaaagtggggtaagcatccagtcactgaggggctttgattgcccatttttctgatgagcaatttgagcccccaaagccacaagccagcaggggcaaaagcactgggctgaggcatcaccttttttcttcactggctcccataagcctc

SEQ ID NO: 342908 - DNA, 541 bp, Homo sapiens
agtacccagttggtgaaaagactggttagtgctacagatactggtccaggcagggtagctctgatttacaggcgcccgccaccacatccagctaattttttgtattcttaatagagacagggtttcatcatgttggccagcctagtcttgaactcttgacctcaagtgatccaccctccttcgcccctcaaaatgctgggattacaggcgtgaaccactgtgcccggccacaacattactttagaataaagttgcttcttacctacatctatattttatttgacaatatctaaaaacagccccaaaacaataattacatcctgacagaggacatcataaccctcytcccatctcaactctcattgcacctgcccgtgcacccccacagttaagatggtgacatatactttgacccagcttataggcattatgataactcttacacataggcccagcaaaagagagagattttgactctcatagataggactagggccatgagtaaggtcctgtgtcttctacttgtatgaaaatcacagag

SEQ ID NO: 342909 - DNA, 591 bp, Homo sapiens
tgatgtgattatattgcctggctacttccctcaaaggaatggtaatatatgctttactgagcacctaagtgatgtaaaccttctctcttgcctggactctgcccacaggtaaggttatgacatatcaccaagcctagcacttaatggcatgactgtcctatcatgtttgtgccctgccctgaagaagcactktgacattactggcctaagtaaaaaggtaattcgagtcttctgcctgggacatgtgcacaggggagattgtgaaatatctcttggcttatcaacatgatgatgtgattctcctctgttgcctggtacctttttccagttgggattgcaacatattgctgggcccagcaccgggtgatgttattcttctcccagggcccagcccacaaatggcgttgtggcatctctctgggtccatcacctaggtgctgtgactctgctcttctaactgggcactttccacaaaaggaattgtgacacatagctggacccagctccctggtcatggagctgtcttgtcttggtcctgtgcaaaggggtcattgtgatatattgcttggccaagcagctaggtgatatgac

SEQ ID NO: 342910 - DNA, 581 bp, Homo sapiens
tttaagaccttaccaaagactaatttctgtattccatgacagtgttgaaaggaaaggtgktatagtttgacagtttcggacagcggagaccaaaggtaaatgactgttacaagagaagaaagacttcagcatcacagacagagaatgggtatagcaagtgattacagggtctcaataagaaacatgagggatggcaaggagtagtggctcatgcctgtaatcccagcactttgggaggctgaggtgggcagatcacctgaggtcagaagttcaagaccagccaggtcaacatggtgaaacccatctctactaaaaatacaaaaactagccgggtgtggtggcaggtgcctgtaatcccagctactcaggaggctgaggcaggagaatcactttaactcgggaggtgtaggttgcagttagccaaaatcacgccattgcactccagcctgggcaacaagagtgaaactctgactggaaaaaaaaaagaaatctttttaaactaaaaaacacattcccagagaaaatatccatagaaccagcttgagagactccaagaatctccagcctaaaaaattggtatc

SEQ ID NO: 342911 - DNA, 581 bp, Homo sapiens
tttaagaccttaccaaagactaatttctgtattccatgacagtgttgaaaggaaaggtggtatagtttgacagtttcggacagcggagaccaaaggtaaatgactgttacaagagaagaaagacttcagcatcacagacagagaatgggtatagcaagtgattacagggtctcaataagaaacatgagggatggcaaggagtagtggctcatgcctgtaatcccagcactttgggaggctgaggtgggcagatcacctgaggtcagaagttcaagaccagccaggtcaacatggtgaaacccatctctactaaaaatacaaaaactagccgggtgtggtggcaggtgcctgtaatcccagctactcaggaggctgaggcaggagaatcactttaactcrggaggtgtaggttgcagttagccaaaatcacgccattgcactccagcctgggcaacaagagtgaaactctgactggaaaaaaaaaagaaatctttttaaactaaaaaacacattcccagagaaaatatccatagaaccagcttgagagactccaagaatctccagcctaaaaaattggtatc

SEQ ID NO: 342912 - DNA, 582 bp, Homo sapiens
atgagtagtagattcatgtgtataccacatttcttttataaaaataaaaatgttctaaagatatgttgctaacmatctcaatatacttaacaaagctgaactatataattgaaaacattaaagattataaatgttgctatattttatatatatatatattttttttgtttgtttgtttgttttaaaagattaagttttacttttgatgcctaggctggagtacagtggcacaatctcggctaactgcaacctctgcctcccgggttcaggcgattctcctgcctcggcctccagagtagctgggattacaggcacgcaccaccacacctggctaattttgtatttttactagagatggggtttcaccatgttggccaggctggtcttgaacttctgacctcgggtgatctgcccaccttgacctaccaaagtacagggattacaggtgtgagccaccatgcctggcccttgtattttttacaattaacaataaaacaatcattgactaataacaacaacaacaaaaagcaaatatacaagtcataaaataggggcaacattttacacaggcaaacaaacaca

SEQ ID NO: 342913 - DNA, 582 bp, Homo sapiens
atgagtagtagattcatgtgtataccacatttcttttataaaaataaaaatgttctaaagatatgttgctaaccatctcaatatacttaacaaagctgaactatataattgaaaacattaaagattataaatgttgctatattttatatatatatatattttttttgtttgtttgtttgttttwaaagattaagttttacttttgatgcctaggctggagtacagtggcacaatctcggctaactgcaacctctgcctcccgggttcaggcgattctcctgcctcggcctccagagtagctgggattacaggcacgcaccaccacacctggctaattttgtatttttactagagatggggtttcaccatgttggccaggctggtcttgaacttctgacctcgggtgatctgcccaccttgacctaccaaagtacagggattacaggtgtgagccaccatgcctggcccttgtattttttacaattaacaataaaacaatcattgactaataacaacaacaacaaaaagcaaatatacaagtcataaaataggggcaacattttacacaggcaaacaaacaca

SEQ ID NO: 342914 - DNA, 582 bp, Homo sapiens
atgagtagtagattcatgtgtataccacatttcttttataaaaataaaaatgttctaaagatatgttgctaaccatctcaatatacttaacaaagctgaactatataattgaaaacattaaagattataaatgttgctatattttatatatatatatattttttttgtttgtttgtttgttttaaaagattaagttttacttttgatgcctaggctggagtacagtggcacaatctcggctaactgcaacctctgcctcccgggttcaggcgattctcctgcctcrgcctccagagtagctgggattacaggcacgcaccaccacacctggctaattttgtatttttactagagatggggtttcaccatgttggccaggctggtcttgaacttctgacctcgggtgatctgcccaccttgacctaccaaagtacagggattacaggtgtgagccaccatgcctggcccttgtattttttacaattaacaataaaacaatcattgactaataacaacaacaacaaaaagcaaatatacaagtcataaaataggggcaacattttacacaggcaaacaaacaca

SEQ ID NO: 342915 - DNA, 595 bp, Homo sapiens
atcgctgtgcctgtaagctgggtccagctatgacttaccacctgacctttggccagatccacatgggatggtcaatattctaactgtgtattgtgtccttatatgagagtcaggacctcaccagtaagttttgtcagtgtgtgagggagacaattttaattgtcagctgggtgtgcctataagattcacaattttacttctttactggaccctgatatgrcactctttatatcatgcaaagactttatagaatatgcataagtaatatattgtgtgatctttctacatgtagaaggcccataacccttacctgtttgtctaagcctagctagaagagttaaaatctcttctattggctgggttcacatatgcgagtcttcattatacctgtgagcagggcctaatgtgtgaccatcccacctgtgggcaaagactagcggggagagttgtatcaataggtgctgggccagtgatatgtcaatatttttactatgggcagggtcctggcagtaaaagtcacatctcctgggtgctaggaaaagcaatatgtcacaatccaccctgtaaacatgttccaggtagaagacagccacat

SEQ ID NO: 342916 - DNA, 595 bp, Homo sapiens
atcgctgtgcctgtaagctgggtccagctatgacttaccacctgacctttggccagatccacatgggatggtcaatattctaactgtgtattgtgtccttatatgagagtcaggacctcaccagtaagttttgtcagtgtgtgagggagacaattttaattgtcagctgggtgtgcctataagattcacaattttacttctttactggaccctgatatgacactctttatatcatgcaaagactttatagaatatgcataagtaatatattgtgtgatctttctacatgtagaaggcccataacccttacctgtttgtctaagcctagctagaagagttaaaatctcttctattggctgggttcacatatgcgagtcttcattatacctgtgagcagggcctaatgtgtgaccatcccacctgtgggcaaagactagcggggagagttgtatcaataggtgctgggccagygatatgtcaatatttttactatgggcagggtcctggcagtaaaagtcacatctcctgggtgctaggaaaagcaatatgtcacaatccaccctgtaaacatgttccaggtagaagacagccacat

SEQ ID NO: 342917 - DNA, 460 bp, Homo sapiens
cacatcgcctaggtgatcggcccagtaatgtgtcacaatacccaggagggcagagcccagcaggaaagtcacattatctagatrcttaacctagttatatttcacaatctaaactgtgggtggggcctaggaaaaagggaaaaatcagtcagatactaagcgatgatatatgtcacaatcacacctgtgaaaaagttcagagataaaatttacaatctctcacacacccccgcttcagggtcagagtcaatacctcctgtgagtttcacccaaaaggcaagtaacaacctcaacagtggactggatccatgcatgagagccccaactccacccgcagagagtgtcccagtcaaaaagtcaaaatatcacagtggtgctgattcttggtgcaaaaataaccatgttacctgtgtttagaatccatatataaaagtaaaaatgccaacttttgactgcctct

SEQ ID NO: 342918 - DNA, 460 bp, Homo sapiens
cacatcgcctaggtgatcggcccagtaatgtgtcacaatacccaggagggcagagcccagcaggaaagtcacattatctagatgcttaacctagttatatttcacaatctaaactgtgggtggggcctaggaaaaagggaaaaatcagtcagatactaagcgatgatatatgtcacaatcacacctgtgaaaaagttcagagataaaatttacaatctctcacacacccccgcttcagggtcagagtcaatacctcctgtgagtttcacccaaaaggcaagtaacaacctcaacagtggactggatccatgcatgagagccccaactccacccgcagagagtgtcccagtcaaaaagtcaaaatatcacagtggtgctgattcttggtgcaaaaatmaccatgttacctgtgtttagaatccatatataaaagtaaaaatgccaacttttgactgcctct

SEQ ID NO: 342919 - DNA, 392 bp, Homo sapiens
tcatctgtgtgctgggtctttgtaggacaccttctgtgccactcaagagcttcatacagtatgcatgagaatgaaaacctgctctgagaccttcatgctggtatgaactcatgatcctacatattgccccaagttcaggtatgagagttatcatttctcttatttgttgggtccaggtataagagtcatcagtatgtaagctgggtccagaaattagtcaccatcccatttgtggatggatccatatatgacagtcacaattccaactgtgaactgtttctgtgagtgacayccaggacctcatgcgtatactctgttctgatttaatagttacaatccaaactgtggcctgtgtacacatgagtcacaatctcaattttgacatgggccct

SEQ ID NO: 342920 - DNA, 392 bp, Homo sapiens
tcatctgtgtgctgggtctttgtaggacaccttctgtgccactcaagagcttcatacagtatgcatgagaatgaaaacctgctctgagaccttcatgctggtatgaactcatgatcctacatattgccccaagttcaggtatgagagttatcatttctcttatttgttgggtccaggtataagagtcatcagtatgtaagctgggtccagaaattagtcaccatcccatttgtggatggatccatatatgacagtcacaattccaactgtgaactgtttctgtgagtgacacccaggacctcatgmgtatactctgttctgatttaatagttacaatccaaactgtggcctgtgtacacatgagtcacaatctcaattttgacatgggccct

SEQ ID NO: 342921 - DNA, 540 bp, Homo sapiens
gcaaattgaacccatgcatgagagccaaacctcagacagcacctattaggagagttaaagcctaatattggtgctgaatcttggtcagagactcaggctggatccacatattagagtaacaataccaacttctgactgcttttgggtgtgagaatcagaacctcaacagtgggctgtgtctatgtgggagtgtgacaatctttactgttggcagtgtatgcatatgagagtcaaaatctcaacagtgtactgggccttgttatattattactctttgcaccatctgcggcggtatataatatgtgtaagacttgcaatgcactccaaaacatttgtgcytatatgaacccatgatcttactcatttctccaagtctagggatgagattcaccatctcttctattgactggtttagatataagagtcattaccatgcctgtgagctaggtccagcaataagtcaccattttacctgtggccagatccacatatgacagtcaaaattccaactgtaaactgtgtctactagtgacattcagg

SEQ ID NO: 342922 - DNA, 536 bp, Homo sapiens
tatcaatatataatgtccctttttgtgtttttaaactgctgttgcaatataagaatatatattgaatataagaatatatattagttactcctgttcacttttggtgtccattggcatggaatatctttttctaccccttcaccttaagtttatgtgagtccttatgtgtcaggtgagtctcttgaagayagcagatactttattgttgaattcttatccattctgcaattctgtatcttttaagtggaacatttaggccacttacattcaatgttagtatcgagatgtgaggtactattttattcatcatgctatttgttgcctgaatacctgggtttttttttcaattgtattattgttttataggttctgtgagatttatgctttaaggagattctattttggtgtatttagaggatttgtttcaagatttagagctccttttagcacttcttttagtgctggcttggtagtggtgaattctctcagtgtttgtttttctgaaagagactgtatctttccttcatttatgaagc

SEQ ID NO: 342923 - DNA, 618 bp, Homo sapiens
gatgtgatctgttttcaagtctctcagctgtgaataccagcacctgctcttgtgggtgtagcaggggagcraagcggactctatgggggtccttggttgtatttttaagtgccctggttttgtgttggttgccctccaaaaaccaggaggtggcactttcaagagcgcatcagctccagtagtataggtaggatacaagcttgccctagggtctgggagtgggtggggccatagcgctcctaagagattgtccttttttttagctaccagtgtgggtagagaaacaccaccaggttggggcagatataggcgtgtatgagctcagactccttgtgcgtggcttgctgtggctgctatgggggaaaggagtttggttcccaggccaatggagttatgttcccagggggattatggctgcctctgctgctcacacaggttgccagggaagtggaggaaagctggcagccacaggcctcacccagctcccccgcaactcacagcctgaaaggccagtctcactcacactgtgccctcccaatagaaccgagtttattttcaggcagccgttgagcagagtggagaacttgcctcaggctacaagcctcccagctgagaaag

SEQ ID NO: 342924 - DNA, 618 bp, Homo sapiens
gatgtgatctgttttcaagtctctcagctgtgaataccagcacctgctcttgtgggtgtagcaggggagcaaagcggactctatgggggtccttggttgtatttttaagtgccctggttttgtgttggttgccctccaaaaaccaggaggtggcactttcaagagcgcatcagctccagtagtataggtaggatacaagcttgccctagggtctgggagtgggtggggccatagcgctcctaagagattgtccttttttttagctaccagtgtggrtagagaaacaccaccaggttggggcagatataggcgtgtatgagctcagactccttgtgcgtggcttgctgtggctgctatgggggaaaggagtttggttcccaggccaatggagttatgttcccagggggattatggctgcctctgctgctcacacaggttgccagggaagtggaggaaagctggcagccacaggcctcacccagctcccccgcaactcacagcctgaaaggccagtctcactcacactgtgccctcccaatagaaccgagtttattttcaggcagccgttgagcagagtggagaacttgcctcaggctacaagcctcccagctgagaaag

SEQ ID NO: 342925 - DNA, 539 bp, Homo sapiens
gattttctgcattttgatgattttcagggtttcaagtggtctaaataaaacaatagcaacaactcagtttagctctagcactgagtttctagagcttggaaatatggtggtggagagcagctactcmttcagaatctgtggtcattttcatgttatggagatctaaaacttatgcttagaattgaaaacatagatgtcccccattagtgcagatttttatggtaagtcaaacaaaaaataggaagagcatgttattgaatttctcttgtacctttcattttcatgatatgaattctttgatttttatcatattcttctgatttcttctagttgtgagaaacttgagttaggatttatatttgtggctgatttagagtatactgaactagctgagaagaattttcccttatgtctttgtcaaaagcaaaatactatcactcttaaacttgacattaacatagtcttcactaaaaaagagcaatcaagcaaatttaatcttttcatacaaaattaactctatcccttgagtcacttaacat

SEQ ID NO: 342926 - DNA, 539 bp, Homo sapiens
gattttctgcattttgatgattttcagggtttcaagtggtctaaataaaacaatagcaacaactcagtttagctctagcactgagtttctagagcttggaaatatggtggtggagagcagctactcattcagaatctgtggtcattttcatgttatggagatctaaaacttatgcttagaattgaaaacatagatgtcccccattagtgcagatttttatggtaagtcaaacaaaaaataggaagagcatgttattgaatttctcttgtacctttcattttcatgatatgaattctttgatttttatcatattcttctgatttcttctagttgtgagaaacttgagttagratttatatttgtggctgatttagagtatactgaactagctgagaagaattttcccttatgtctttgtcaaaagcaaaatactatcactcttaaacttgacattaacatagtcttcactaaaaaagagcaatcaagcaaatttaatcttttcatacaaaattaactctatcccttgagtcacttaacat

SEQ ID NO: 342927 - DNA, 539 bp, Homo sapiens
gattttctgcattttgatgattttcagggtttcaagtggtctaaataaaacaatagcaacaactcagtttagctctagcactgagtttctagagcttggaaatatggtggtggagagcagctactcattcagaatctgtggtcattttcatgttatggagatctaaaacttatgcttagaattgaaaacatagatgtcccccattagtgcagatttttatggtaagtcaaacaaaaaataggaagagcatgttattgaatttctcttgtacctttcattttcatgatatgaattctttgatttttatcatattcttctgatttcttctagttgtgagaaacttgagttaggatttatatttgtggctgatttagagtatactgaactagctgagaagaattttcccttatrtctttgtcaaaagcaaaatactatcactcttaaacttgacattaacatagtcttcactaaaaaagagcaatcaagcaaatttaatcttttcatacaaaattaactctatcccttgagtcacttaacat

SEQ ID NO: 342928 - DNA, 574 bp, Homo sapiens
tggctcatggtctacagtttgctgattcttgttctcattcttcacagaaggccagttcatagttgttctctgcatttttaagctttatagtgtatrtctatcttacttagatggttttgcacatttcagtaaatattcattcaataaactcatatgggatagtatgtgggttccaatgtgacaatacttttttattatttatttttcatcaacttttattaatattttaagttctgggatacatgtgcaggatgtgcagttttgttacataggtaaacgtgtgctatggtggtttgtaacacagatcaacccatcttctaggtattaagtccagcatccgttagctactcttccttatactagaaagctttttcatattattagagttaattttcttttttccccttggaataattatatagaaatgccctgtgctgtgcaatatagtagccactgtccacatcaggatattaagcatttgaaatgtggctagtcctaattgtgatgtgctataagtgtaaaataaacaccaatattgaaaacagtacaaaaaagaatgtgaaacatctcaata

SEQ ID NO: 342929 - DNA, 574 bp, Homo sapiens
tggctcatggtctacagtttgctgattcttgttctcattcttcacagaaggccagttcatagttgttctctgcatttttaagctttatagtgtatatctatcttacttagatggttttgcacatttcagtaaatattcattcaataaactcatatgggatagtatgtgggttccaatgtgacaatacttttttattatttatttttcatcaacttttattaatattttaagttctgggatacatgtgcaggatgtgcagttttgttacataggtaaacgtgtgctatggtggtttgtaacacagatcaacccatcttctaggtattaagtccagcatccgttagctactcttccttatactagaaagctttttcatattattagagttaattttcttttttccccttggaataattatatagaaatgccctgtgctgtgcaatatagtagccactgtccacatcaggatattaagcatttgamatgtggctagtcctaattgtgatgtgctataagtgtaaaataaacaccaatattgaaaacagtacaaaaaagaatgtgaaacatctcaata

SEQ ID NO: 342930 - DNA, 594 bp, Homo sapiens
ccaggaacaaagacaaatcagcccaagtaatataatcctgatggcttcttggctatctgaattatggattcaggctactatcatattttttagttctaattgggaagataaactctattacatctaatgggcaggatatcttgggcctgacctttcatttgaggcatactacttttcttgttctttctcagattggcattggtargtaagcacttcttaaagtaatattgtcccaaaatggattagcattcatatccctccttcattttcagtgaagtatttagtaaatgctgatttatacatgacagtctatgaagttctaactgttgagatatgtttttctatggcccatggcataattttttttttttttggtgatttagaaaataaagataatttaagcaaattgaatagcaatcattaagattctcacaaacagataatttgattagctatttttaaagatccctttaattacagatagtctgtgggaattatatgtctgtgcttttgtctgaaagatctcatttatcttttctttttaattttcagtgtcatcctataggcattggaaaaagcaggaagattctaacc

SEQ ID NO: 342931 - DNA, 635 bp, Homo sapiens
tatttcatgagtatcttttattgaatgggaaactctggaatatttgcattataataagtcatttgtttacactgtcttaacctaaatctttaatggtgtaactgtaggcaccaagacaggccatagggagtgacactgcttggccaatcttcctctgatcccagaggcagaggattgcttttttccttttgcttttaggagtggtactggtcaccaaagatttagtatttgttttctatcttgtacattcctcacaaagataacttgaacagaaaaaaattgtgytccacggaagttgtatgtgctgtgctgtaatccatgagattaatgggttcctagtaagcctatcattactattttctcctttttaaaagcattaaaatattttgagacatatttttatggtatggaaatatcttgaggtgtacactatgcatttagtatggtgatggtgctttggaggctggaaaatagactcttctctctaggcccttacaaaaatcatttacatgagataatagctaactatacagtagtatctaattttactagggcataaaaactcacaaatttagctttttcgtttgagcagtctggtgtcagcatttggctctcatctcccatcatacatcaga

SEQ ID NO: 342932 - DNA, 542 bp, Homo sapiens
gtgaatacctaacaaagcatctatagtagaggcagcattgaacaaccagatggaaaagatgacccatccaatgaatgtcagccaatctttgtcctcagccatcacaatggttgcacagtggacatggaaactgactagccataatgtcagggatggaggctatgcatgggcataaaagcatatactccctctcaccaagggtaatctagctattgacagtgctgaatgtctgaccaataagtactggcccaaagtgrcccctcaatacagaaccatccctcaaaaaagccaatcagacatttgtggcaggttgattacatcaaattcctttccaccttggaaggcacagcaattcatcctcaatgggcctgatggttattcaaacatgcttttgccttttttgcctctgccaggtcatatttactagcataggatccaccagtctcaccttttatggccattctagcactccatcaagctgatgaaccactagcattccatcaagctgatggccaaaaggctcagctttagaataactgtct

SEQ ID NO: 342933 - DNA, 585 bp, Homo sapiens
agaaatggcatatgcaaaggcattctgagaaccaggaagagtttaacaagtctaaatccaygggaggatcccaagataaaggcagaggtgggatcattagatgttttggatgccaggcttttataacaaaagtgactagtaatcactaaaggatttaaaataagatcatgaccagatctgtgttttaacaaagcccttctgatagaaggccagtaaggagtaatccaggaggtaaaagggataaggaaatagcattagtgatggtgacagaaaaaaaggaaagaacatattcaagagggtcttcgatgagaaaatttggtaaaagtaaggaagaaggagattccttggatggtgccttgagttttttcctaatccctctatccccctagtagaaacatcttctcctttgaacctattttatttctacgttagtggacttttaggggggtacctatttattcatgtctccctcctcctactggtaaactcattatgggcagagactgtgccttatcccccttatattcttagcaggaccagaactagggtgaggagagtgaggcattcaacttcaggttcatgctg

SEQ ID NO: 342934 - DNA, 587 bp, Homo sapiens
gtgatggtagcaaagagaagatacatgataaatcagwcatgaatcctgccctcaagttatatataataagtgaaaagaaaatcctgggagcagaatcgacccaattttcctttctcttctgatgtcaggtgggctctgaacacaatcctcataatccccatttcctagtttccatgcaccattgtgatccctccccttgagtatgggcaggacctgtggcttgtttctagtcaaaagaataagcaaaggtgacacgacagatgggatacatgtacatgactatgtgattatgttacacaaacttgtcatacccattttgttggagtctctgtcttttaccggctttaaggaagcaagtggccatatggccaggaactgcaggacgattctagttgctgaagctggctctggactgatagccagcaagaaattgaaaccctcagtcctacaaccacaggaattaaattctgccaacagctgaaatgagcttgaaaacatctccttccctaattgagccccagttgagaactaagtactggcaaatatgttgattgaagctttgtgagaccttgagcagaggattcaag

SEQ ID NO: 342935 - DNA, 554 bp, Homo sapiens
tgtggcttgtttctagtcaaaagaataagcaaaggtgacacgacagatgggatacatgtacatgactatgtgattatgttacacaaacttgtcatacccattttgttggagtctctgtcttttaccggctttaaggaagcaagtggccatatggccaggaactgcaggacgattctagttgctgaagctggctctggactgatagccagcaagaaattgaaaccctcagtcctacaaccacaggaattaaattctgccaacagctgaartgagcttgaaaacatctccttccctaattgagccccagttgagaactaagtactggcaaatatgttgattgaagctttgtgagaccttgagcagaggattcaagtcagctgtgccctgactcctggccccaaaaactatgagacaacaagtacacattgctttaagccactaagtttatgataatattgttatacaacaatagatgactaacacatctttcttcttatattattcaagttgctaacatatcataagaggtaaactcaagtattctgaacatccag

SEQ ID NO: 342936 - DNA, 586 bp, Homo sapiens
atgaaggttctttccattgttcttccagaagtctcatcatcacaggctcattgtagtataaatattttcacataaggaatgaaagtgatgtgttagcatgatcttatcaggatcaaggtaactaaaaacaaatgacaaggtttctctttttattattcaacaytgagaagcagaaaagtgttcaactgttactgtatttatttaatgctcaccttttaaagagtaaattcagttagttacgtgttataaaatgtgagataagacataatcctagagtaatgaaattttctcctttgtaaaaggagattcactataatttttcatgtaaagggaacatgaaaccaataacctagttccaaatggacagctaataaaattaagtttgcacatttaagagaaagttattttaatttcctttaattgtatacaatgttaaaaaggctttttgcaaatcattaacagttaagacgtactttcattgacaatttaggtagacaaaatattcaatgttgtgtgacaaaatcattcttataacattagtaaatgcataagcacatttccaaaaattgcaagaaataaaagccaa

SEQ ID NO: 342937 - DNA, 586 bp, Homo sapiens
atgaaggttctttccattgttcttccagaagtctcatcatcacaggctcattgtagtataaatattttcacataaggaatgaaagtgatgtgttagcatgatcttatcaggatcaaggtaactaaaaacaaatgacaaggtttctctttttattattcaacattgagaagcagaaaagtgttcaactgttactgtatttatttaatgctcaccttttaaagagtaaattcagttagttacgtgttataaaatgtgagataagacataatcctagagtaatgaaattttctcctttgtaaaargagattcactataatttttcatgtaaagggaacatgaaaccaataacctagttccaaatggacagctaataaaattaagtttgcacatttaagagaaagttattttaatttcctttaattgtatacaatgttaaaaaggctttttgcaaatcattaacagttaagacgtactttcattgacaatttaggtagacaaaatattcaatgttgtgtgacaaaatcattcttataacattagtaaatgcataagcacatttccaaaaattgcaagaaataaaagccaa

SEQ ID NO: 342938 - DNA, 540 bp, Homo sapiens
tcaaactgaagaatgtttatttggttggaaataaggagtcactgaagatctttatggaatgtagtgacataactagatctgtgctttcaaaagtatatctaaaagtaatgtacatggcagactacaaaaaagataaaatgaagaagtcaagagatcattataggagtctagatcaaagataacaaggacctgaagtagaataaaggcagtgggaatagaaagttaaaaaaaaaaataacgacagggatattaaacagataaaatcaatagaacaatcagttagttatccattccacaaacatcttttgagcaactactacatatctaccagacactgccaggagctggagacaggaaaaataaaataagctgtagtccttcacctcagagttgagagtcaatctgtcatctcaataagaaaaactgatygaaaactgatctcctagctaagataaggaaaggcatcatagaggaaggagcatttaagttgaattttaaaagacagtttgaaaatgtagaatatggtagactttatttcag

SEQ ID NO: 342939 - DNA, 603 bp, Homo sapiens
tctttggacttttcagttacatgatccaaaacatctctttctttgtttaaggccatttaagccgagctttttgataatttcaagtaaaaccatcctaattacaaattagatgtcactgtaggcacaagtaaaacggttataaaactgcagcacaaaataagacctgcccagtgcagataccagagactgtgycctttctccactcttctggctttagctgtctgtattagtcagttctcacgctgctaataaagatatacacaacactgggtaatttataaaggaaagaggtttaactgactctcagttccacatggctggggaggactcacaatcatggcagaaggcaaaggaggagcaaagtcatgtcctgcatggcagcaggcaagagaaaacttgtgtaagagaactcccctttataaaaccagatctcgtgagacttactcactatcatgagaacagtatgggaaagacccacccccatgattcaattaccccccaccaggtccctgccacaacatgcggggattatggaagctacagttcaagatttgggtggggacacagctgaaacatatcactgttcatggttctaagctttga

SEQ ID NO: 342940 - DNA, 603 bp, Homo sapiens
tctttggacttttcagttacatgatccaaaacatctctttctttgtttaaggccatttaagccgagctttttgataatttcaagtaaaaccatcctaattacaaattagatgtcactgtaggcacaagtaaaacggttataaaactgcagcacaaaataagacctgcccagtgcagataccagagactgtgccctttctccactcttctggctttagctgtctgtattagtcagttctcacgctgctaataaagatatacacaacactgggtaatttataaaggaaagaggtttaactgactctcagttccacatggctggggaggactcacaatcatggcagaaggcaaaggaggagcaargtcatgtcctgcatggcagcaggcaagagaaaacttgtgtaagagaactcccctttataaaaccagatctcgtgagacttactcactatcatgagaacagtatgggaaagacccacccccatgattcaattaccccccaccaggtccctgccacaacatgcggggattatggaagctacagttcaagatttgggtggggacacagctgaaacatatcactgttcatggttctaagctttga

SEQ ID NO: 342941 - DNA, 587 bp, Homo sapiens
gagtggggaaaggaggaggagagaatatgagatactactcaatgtctctgacagcatgcattttttgccccaattctccattcttggctagatcagtgacctttatcagatatgtaagccttgcacaaaataccatagactgggtggattattaaacagaaatttattttctcacatttctggaggctgsaaatctgagatcagggtgccagcatggtagagttctggtgtgcagatggccaccttctcgctgtgtcctcacatgacaaagagagaaagagagcaagctctctggtgtctcttcctataaaagctctaagcccatcatgagggccctaccctcatgacctcatctaaacctaattatatctcaaaggccccatccccaaataccatcacattgggggtcagggcttcaatatatgaaattttgggcaatggatatgattccatctatatctgagtgttttctcccactctttggtttacactttggccatgtgatttgcttggctaacagaatgagctggaattgacagtatatgccagttccaaagccaagccttaaagagcccttacatgttaac

SEQ ID NO: 342942 - DNA, 587 bp, Homo sapiens
gagtggggaaaggaggaggagagaatatgagatactactcaatgtctctgacagcatgcattttttgccccaattctccattcttggctagatcagtgacctttatcagatatgtaagccttgcacaaaataccatagactgggtggattattaaacagaaatttattttctcacatttctggaggctgcaaatctgagatcagggtgccagcatggtagagttctggygtgcagatggccaccttctcgctgtgtcctcacatgacaaagagagaaagagagcaagctctctggtgtctcttcctataaaagctctaagcccatcatgagggccctaccctcatgacctcatctaaacctaattatatctcaaaggccccatccccaaataccatcacattgggggtcagggcttcaatatatgaaattttgggcaatggatatgattccatctatatctgagtgttttctcccactctttggtttacactttggccatgtgatttgcttggctaacagaatgagctggaattgacagtatatgccagttccaaagccaagccttaaagagcccttacatgttaac

SEQ ID NO: 342943 - DNA, 587 bp, Homo sapiens
gagtggggaaaggaggaggagagaatatgagatactactcaatgtctctgacagcatgcattttttgccccaattctccattcttggctagatcagtgacctttatcagatatgtaagccttgcacaaaataccatagactgggtggattattaaacagaaatttattttctcacatttctggaggctgcaaatctgagatcagggtgccagcatggtagagttctggtgtgcagatrgccaccttctcgctgtgtcctcacatgacaaagagagaaagagagcaagctctctggtgtctcttcctataaaagctctaagcccatcatgagggccctaccctcatgacctcatctaaacctaattatatctcaaaggccccatccccaaataccatcacattgggggtcagggcttcaatatatgaaattttgggcaatggatatgattccatctatatctgagtgttttctcccactctttggtttacactttggccatgtgatttgcttggctaacagaatgagctggaattgacagtatatgccagttccaaagccaagccttaaagagcccttacatgttaac

SEQ ID NO: 342944 - DNA, 519 bp, Homo sapiens
ttttagtattttgtccccaccctcaaccgtagcttggattcttcatcgcagagaacctctctttgactctgcagaaaataagccaaagtcatttgctggagtaggagaggggtggttggttggctgtgtagagtgtagtaaaatatctggaggttcattttcttaaatctactttcagttattccttggtgttcagttccaccttcaaacttatytccagagatgtacctgatgccacctattcctaaaccctttgaagatttttgttgtgtaaatcaggttgttttcttggctttttccacttctggttggggattcaggtttctcaagttggttcatgttcatccatatactttctagcttccaaagttttgttgctgttgtcttcattcccattccttttcttcttgttgcttatgccttaaaaaatccctttacggtgtatttagtagattttgagagagtgtatatgtaggttaatgcatgcattcggtgtgtcagcttttatttcttaaaacc

SEQ ID NO: 342945 - DNA, 519 bp, Homo sapiens
ttttagtattttgtccccaccctcaaccgtagcttggattcttcatcgcagagaacctctctttgactctgcagaaaataagccaaagtcatttgctggagtaggagaggggtggttggttggctgtgtagagtgtagtaaaatatctggaggttcattttcttaaatctactttcagttattccttggtgttcagttccaccttcaaacttatctccagagatgtacctgatgccacctattcctaaaccctttgaagatttttgttgtgtaaatcaggttgttttcttggctttttccacttctggttggggattcaggtttctcaagttggttcatgttcatccatatactttctagcttccaaagttttgttgctgttgtcttcattcccattccttttcttcttgttgcttatgccttaaaaaatccctttayggtgtatttagtagattttgagagagtgtatatgtaggttaatgcatgcattcggtgtgtcagcttttatttcttaaaacc

SEQ ID NO: 342946 - DNA, 609 bp, Homo sapiens
ggggactaatctgtccactatggaagtttaactgcagcttaaattaacagggaagtggattaggaaaaaggaggaaaagagaaattaacatcaagtggctattcattgtagaatacattattagacctttaatgtattatttaacctcgtactagtactgtatcatagatttaatgttctgattttaaatgtgggaaaagtcatcttagtgatatacaataatcttctgcaaagtcactctgtgtgtatatggtagagtctgggaagtaaacctaaatgtttgcctccacatgtcttmtattattcaaccatactgatccaggagtgctctatcatgatgccgctggaaatataatacaagctacatatataatttaaaaatctgtagtaactacactttgaaacgtgaaaagaaacagatgatattaattttaataatgattttatttaatccaacccatagtcatttcaacatgtattcagtataaacaaataatgagaattttacattctttatcttgtaccaagtattgaaatctggtgtgtattttacacttacagcacttcttgatttggattagccacgtttgaagtgctctgtagctacat

SEQ ID NO: 342947 - DNA, 615 bp, Homo sapiens
tttaaattttgccaaatccaacattttgaaatgcaatttaaatgtttaaccaaatcccaaacatcactgcatttattcttttctgactagaagctgcagttttctaacagcccaagtcaaagcatctttctaaactatttgatatcttttaaaggattctcagcctttaaaatagtctctttaggtagcaacttcatgcagcaactttattcttccatctgcctctctccccctctgtctacctctttaccccaaggccaggagaggttaagttatttaggttatagttgatccaagggaaagtgatgaagcaggaatgtatctcacctttgctgagttcttactataatacgtgcttcaaagtagacacatgtcaagtatttgsaatgtattaggcattctgtcaagtgctttatgtgtattttgaacatcacaccagtcttgtgatgtaagttttatctttaccattttattgaaaaggaaattgaaactctttgaggaataagcaaattgtccagttataaaacttgtaagtttagagacagcagttgacaccaggcctgtctggagcagcatatgtcccaccttccttgcatatctaatactccctgagaa

SEQ ID NO: 342948 - DNA, 600 bp, Homo sapiens
tctttctgtgcctggctttttcactcaggatactgtcctccaggtttatccatgttctctcaaatagcaagatctccttttttaaggctggacaatattccatcrtgtgtgtgtgtgtgtgtgtgtgtgtgtgtgtgtgtgtgtgtgtgtgtgtaccaccatttctctatccattcatccatcaacaaatgcctaggttgtttccattctggaccatggtagatactgctgcaataaacatgggagctcagatatcttgacaaggtgctgacttcatttccgttggatacatacccacaagagggactgattgctgagttatattgtagtcttatttttaattttttgaggaacctccactcagttttccatagtggctgcactaatttacatacaaaagtttcctttcctccacagtctcaccaacacatctctttttggtttatttctgaactctctattttattccatctgtctatgtgtctgtttttatgccagtaccatactatttttccatattataactttgtaatatagtttgaaatcaggaagtgtgatgcctcaaactttgtttttctttctcaagattgctttgcctat

SEQ ID NO: 342949 - DNA, 566 bp, Homo sapiens
gtaacaactgggaaaagatcgaacaactgggaaacacatcgaagacacagaggattggtatccagaatacataaagaactcctacaagtcagtaagaaaaacacaacccgataggaaaacaggcaaatgccaccagcaagcagaagacacagagagggatacacatgaatgataagtgagcagaggaaagcattcccagtctcactcataattatggagatgcaaatcaagcccacagtgasaaatcactttgtatgaattatgctggcagaggtgaagaagcttgacaatagaaagtgtgggcaaggatattaatcagtagcaactctattgctggagagagagtaaattggcagaatcatattttaaaacaatttggtcttattatgatatagaacattgacattccttccagcaatttcactcattgatctatcctgaagaggaatttgcgctcatgtgcaccaggagactattcataccatgaggcatttcattagagattattacagggattatgagaagaattcatcgcatcattaggtgaaaaaaggcaccaaaggttt

SEQ ID NO: 342950 - DNA, 570 bp, Homo sapiens
catcattgttgattctatccattctgggttgatgtgagccataaaagttctgtttgttttcagggtcaaatactgagcaacaggaattacgctaacaactttattctgaatataaatttctaaaaatcaacttttgcatggatttaagatactttygtctgttatgttggctagaataatactgactggaacttgatatttttgtttactaaattaagattgtaaaaactcatgttacttgcttagatattgatttttttaaagctcattatgtcaaaacacttgatttcgttccactttagaattatcttccacacatttaaagattcaccaaggtagtggttctaaaaccatactgtgaataattttctcaggaggagctcataaaaatattcagatccccaggcaatgcctctgcatgtatagactgagtaggaccagagatttttgtttgcaatgagtacacgcaaatgatactaaagcagtggtccagtcatactttgaaaaatgttgatgagtttcaggagagtggttaggacttttctatttttattggtgttcgtatactat

SEQ ID NO: 342951 - DNA, 618 bp, Homo sapiens
ctaataaggctaatcccatcctcttgactaactcaacaggttttagaaaggtcaaatgatacatacatacatgtgtaaatgctttgtgagctgttagcactgcaaacattaaaaatactgtgcttggccaggcatggtggagcactcctataatcccagctacttgggaggttgaggcgcaagaatcacctgaacctgggaggttgcagcgagctgagatccctccactgcattccagcctaggcacagagaaagactccatctcaaaaaaaaaaaaaaaaaaaaaaaaaaaaawatatatatatatatatatacacatataatgctaaatgaaaagtactttatctccacacctacacagcatcagcgaaagtttcagcagttctgtcatttcactgaaaaccaaataatcaacatagatttactgaagattataccaagaattaaaactaggtatccaatatataagaaagaaatgtctttgcttttctactttgcagttaaatatattggtatttaatagttcaaaagtatatgatgagtttttctaaaaccattaaaattgagtgctgctgtttctcagataggataaattcattagtctaatagagtgctaca

SEQ ID NO: 342952 - DNA, 618 bp, Homo sapiens
ctaataaggctaatcccatcctcttgactaactcaacaggttttagaaaggtcaaatgatacatacatacatgtgtaaatgctttgtgagctgttagcactgcaaacattaaaaatactgtgcttggccaggcatggtggagcactcctataatcccagctacttgggaggttgaggcgcaagaatcacctgaacctgggaggttgcagcgagctgagatccctccactgcattccagcctaggcacagagaaagactccatctcaaaaaaaaaaaaaaaaaaaaaaaaaaaaaaatatatatatatatatatayacatataatgctaaatgaaaagtactttatctccacacctacacagcatcagcgaaagtttcagcagttctgtcatttcactgaaaaccaaataatcaacatagatttactgaagattataccaagaattaaaactaggtatccaatatataagaaagaaatgtctttgcttttctactttgcagttaaatatattggtatttaatagttcaaaagtatatgatgagtttttctaaaaccattaaaattgagtgctgctgtttctcagataggataaattcattagtctaatagagtgctaca

SEQ ID NO: 342953 - DNA, 574 bp, Homo sapiens
tcttaggaagacctcagcctgggatttgttgcctgcctctaccacttattacctgattgactttagacaaattagttaacatttctttgccgtagtttctttatctataaaacaggagataatagtagctatctactggagttgttttgggacaaaaaagggccaatgcatgtaacacaatttgcacacttcttgaaacatactaagcactctgtaaatgagagtttttattatttaggagggtagtttaaattatctaaatgtatttctttcactgagttatgtaattgttgttattcagacaaaaaggaaatttcaggaagtggtaccttggtgatggggaaagaagcgcatggctgaaggaacctggaaaaaacatgtttagaagagtattttaatgcaattttgccacatggtatgggcaacrgggttaacattcttccctgtctttactcaagagtcttcaatgaaagttcaatttcccatttatgtgctgtgtagttgcatttatcttggggctacaatagacgcatggaatctttcttcaaagaggaagagaatgagacagagccag

SEQ ID NO: 342954 - DNA, 574 bp, Homo sapiens
tcttaggaagacctcagcctgggatttgttgcctgcctctaccacttattacctgattgactttagacaaattagttaacatttctttgccgtagtttctttatctataaaacaggagataatagtagctatctactggagttgttttgggacaaaaaagggccaatgcatgtaacacaatttgcacacttcttgaaacatactaagcactctgtaaatgagagtttttattatttaggagggtagtttaaattatctaaatgtatttctttcactgagttatgtaattgttgttattcagacaaaaaggaaatttcaggaagtggtaccttggtgatggggaaagaagcgcatggctgaaggaacctggaaaaaacatgtttagaagagtattttaatgcaattttgccacatggtatgggcaacagggttaacattcttccctgtctttactcaagagtcttcaatgaaagttcaatttcccatttatgtgctgtgtagttgcatttatcttggggctacaatagamgcatggaatctttcttcaaagaggaagagaatgagacagagccag

SEQ ID NO: 342955 - DNA, 389 bp, Homo sapiens
gttaataattctagagataaatctggaaaagttggtaaagatgcccatggaatttggcactaaagaacttttggcaatttttaaggaaggggaggatcatgatcagatcctttttaggaaagtatagaggaaggaaatatgggactwtttaaaaaaaataaacataatacatgggccaaatatggaccatttataaagatgtgaaaagaccagagatagagccattaaacaaatgtcaatacatttcaaatgatgaaatcatacagtctgttctctaatgacaacacaaataaattaaataatgaagatatatatagtctaaatatttggaatttaatttccaaattaaattaaatatttcaattcttctaaatatccattagaccaaa

SEQ ID NO: 342956 - DNA, 540 bp, Homo sapiens
tttggcactaaagaacttttggcaatttttaaggaaggggaggatcatgatcagatcctttttaggaaagtatagaggaaggaaatatgggactatttaaaaaaaataaacataatacatgggccaaatatggaycatttataaagatgtgaaaagaccagagatagagccattaaacaaatgtcaatacatttcaaatgatgaaatcatacagtctgttctctaatgacaacacaaataaattaaataatgaagatatatatagtctaaatatttggaatttaatttccaaattaaattaaatatttcaattcttctaaatatccattagaccaaatattacaaggaaaattaaacttttaaaaaagatatataaataaactaataagctactcagtatcacatgtcttaatgtatcacttaatagaaactggattctcatattgtttcttcattcagttcattgtgacaagttgtgttggttgagacagctgaataaaacagcctcatacagatatatagctggaaaaggaaggtgtt

SEQ ID NO: 342957 - DNA, 595 bp, Homo sapiens
attaaactatgcaatccataataccattaaataatttaattaggttgaaaatgatcatgcataaatatattataatgattttataacatagtcatattttacatttatgaaaagtatatattgagataactagaaatatgcaaayagacataaatatatatttatgtctagtaaaataagaccacatgtaccatatgtaccacatcatacatcaaaaaatttgatatgataaatatcaaaataatgaatctaaaactatttcctagaaaaatgtaataagtaaaatgcccttataaatatatttttgaggcaaaaatctaaaatcatattttaattaaaaaaatacacacacacacatacaaattatctatgcccacatttcactcattctattattgtttaatgtgttgtcagtgatctctcagaggcctttatagattctgaatacaagtcttttgtattgggaatattatccagctttgtggcttgcattttcaccctcttatgctacgtttgatgaacagtatctgaattgtgatgaggctcaatttatcaatcttattttgattgagcttttggcaccttaagaaatatt

SEQ ID NO: 342958 - DNA, 456 bp, Homo sapiens
ggcattttatgttactgaaatatttttcagcattcatggagataagcctacattttcccagaaggtcaattaatatggtaaatcatattgataaattccctaacttggaaccttcctttcatttctgatataaaaccaacttggccatttgtattgttttcctaatgtgtgataatgctgagatactgatatttcatttaagattttgactttgctattttattcataactggttgtcatctatagtttctttttctgtgctttctttatcaggtttacctattaatgttataacattttcatacaaacaatttggatgttttcctttctattctgtattctctaaraatttatctactatgggtactatctttttcttctatggaaagttgttaaactgtatttttctaagaaatattgtatttcatctagattttcaaatatatttgcacaaag

SEQ ID NO: 342959 - DNA, 551 bp, Homo sapiens
gagaacaagcatgggaatggatattaagggtataggataatggtggaaggaacatagagttggatcaggctgaatttattgatttgaacccactaagtagggactctgcatttaatgttgcagcttggggagttaaaggttttaatagtttatttgcttagctagctgaaatatggattaaaagatagcccactgtgaatgatccagaaatgcctgatatcccttggtttaatgtagaggaaaggatccaaaggcttagggagattgggatggtggagtgaattagtcacgttagacatacccatcccagctgggagggtccagaagatacacccttgaccaatgccttgctaaayagatttgtgaggacagcacctgcctcttagaagagctctgtaattcttctctgtaggtcagatctaacactgggaaccacagtcactcaactccaacatttaaatacaatggggataattggatcctgaggtagcaggggccaactggcagccctcaaccatcaaaggcaaggtgggcatagctaccgtaattga

SEQ ID NO: 342960 - DNA, 595 bp, Homo sapiens
ctgttaaaatgaaaaagggctagattaataaagttgatccttagatgatattcacactgggacaaaacatagcttctgaaatagaggaacagacacattatagtatattaagggaaaatattgggtagtaggtaggtctggatacactgaagtttgtaagacagcagcattggaataattccaaatgcctgatgtaatcatcacaactatttgatcagaaaacatatcaataatttattcaaatattcttgattctcccactgcaaacagatgcattcctcaacttaatgtcattcacatccctgctccgcaagrttgctttatcaaaagatataatttgcaatagcacaagaacgagaatttattatttcagtgaaatctagctatattcaaatgttcattaatttgaagagaataaagctagcaacaacaggatagcctgtgtgtgctgatgtatttttaatttcaaacagttaattagtgatagagggattccaagttgcaaaggacttaattgaaactgaacatcatgttcctggaacacagtaggtgctcactaaatgtgtgttgaatcaatcgatcagcaccgtcgctg

SEQ ID NO: 342961 - DNA, 504 bp, Homo sapiens
tgaggtgcttgctgaaggcaaagggaacacagaatgggtagtagaagaaggtaggcatcaataccagctacaaccacatgaccagcttatttaaaaatcataggaagcatatttgaaaatmataaagcaacaactataaatctgttgtatatctacatgtcacagtgatcccgtgacaatggtggtcctgtatagtattactttttactgagtgactatatatatatatcctattagtatcctaatatagatacgtatatacatatatacatacatgtacatatatacatatatgcatacatataaatatacatatatacacacatataatgtatatctcatacgagtgctcaccaatgtatagatatgtatagatgtatatattgtatatgtatatatacgtatatgtgtgtatatatatatgaagtgttcccatatataatatatgaaggggagtttattaagtattaacttacacaatccaaagctcccacaataggctgt

SEQ ID NO: 342962 - DNA, 582 bp, Homo sapiens
atacatctcaaattaatttttgtgttttgtgtgaagtagggtctaggtatattgctttcccaaaggacagctagttttcctaacacgatttgttaagattattcattttcctaatgaatttttgaccaaacaaatcaaatggacatctaagtgtgtctctagtttttagccctttattctattactttaatctatttattggttctgtgccagtaaaataataatttgattacagcatattatagttaatcttgaggttatgtagtgtatgtctcccaagtttgttcatctttctcaagtttgctttggatagtctaggtccttaatatttctgtatgaattttaaaagcagggttgttggattttgatagaaattacatggaacctatagrtcaatttgaggtaaaattgacatcttaacatttagtcttctatcaacatggcatatttctctatttcttcaagtcttcttaattcctttcagtaggtaactaaactggacactatacatctttggttaaacatgttcccctataggtggtatcaaaaatgtcacttcatatctttcacccttagctgagc

SEQ ID NO: 342963 - DNA, 454 bp, Homo sapiens
aggatcttaccaccctagcaaatgaattagctgaaagttctggaatagatggccccttttcaggtctcatggasagatggtttgcaaagtggaaaggactcatgacctcaatatttacttctcttgcaattgttaaaggtgtacttattattgtaagttgttgtatcataccttgtatttgtgggttagttcaaaggcttatagaaacagctcttaccaaaatctccctcaattctcctccaccctattcagataaactcctacttctggaccaccaagaagaacaacaaggccaaattatctcagaaaaattttaagaggaagaactataaaaacaagagtggggaaattgccagaaacaataagttcctcttcaaatatcctggttctttctggttctgtaaaccaccattcccacctaattggtaatgcacagactctcccttcccatcta

SEQ ID NO: 342964 - DNA, 547 bp, Homo sapiens
agcctaatatttaaaacaaattaattttgttctcattgaagtaaaggcaagtagtactgagcaggccaactacacaaatcctattccattctcagacgtattcccagagtaaacacagttcataaaccactgctcaactctaaccttcccatttttcccatgaagaaactgaggctccggaaaggttatgacttgccaacatgacccatgattagtgaatgggtcgggatcaatccaaatmatctaaaccccatactagagtttttcccacgataaccacatataagctgtatatttgtgtgtatatatgatttgttcattcattcaacaagtatttggtaaacattctttatgcaccaggcacaatacttagggacagagcagtgaaccggtactcatatcccttcctttcaaggtgttttcgatcttttggggaattagttattttttaaaaatcacacataaaaataatctaattaaattcataagaaggaaagcagcaggagatccaaggtcattggcagcctgaagttaatttctgaatcca

SEQ ID NO: 342965 - DNA, 547 bp, Homo sapiens
agcctaatatttaaaacaaattaattttgttctcattgaagtaaaggcaagtagtactgagcaggccaactacacaaatcctattccattctcagacgtattcccagagtaaacacagttcataaaccactgctcaactctaaccttcccatttttcccatgaagaaactgaggctccggaaaggttatgacttgccaacatgacccatgattagtgaatgggtcgggatcaatccaaataatctaaaccccatactagagtttttcccacgataaccacatataagctgtatatttgtgtgtatatatgatttgttcattcattcaacaagtatttggtaaacattctttatgcaccaggcacaatacttagggacagagcagtgaaccggtactcatatcccttcctttcaaggtgttttcgatcttttggggaattagttaytttttaaaaatcacacataaaaataatctaattaaattcataagaaggaaagcagcaggagatccaaggtcattggcagcctgaagttaatttctgaatcca

SEQ ID NO: 342966 - DNA, 634 bp, Homo sapiens
aagctagctactgtagaattacaaagtattttccagtttatttatttctgagacagggtctcgctctgtcacccaggctagagtgcagtggcacaatcatatctcatagtttactaagaagtaacctgggcaaattaacctcgttgagtacaaacagaatggtggttttcatgtggcttatgtttcttagatcatgctgtaaagccaaaatgttttgaatgttactcattgacagacagcaatcatagtcaagagtctgygtaataactttgaccagattgctgaagctactgcctaataaatatatactttatttataagtattgccatttccaaattttcttaagcagttccatccataggcttaataatatatacaataaaattttccccttatgccttctgtttcctctgggtctaggctaaatctttgattctactgtttgtagaacctgctttgaccttctttctctgtgtcaccccttctcctggacagcaaatgtagaaatcatcagctgcttcaacagtgaggatcgagtgggccaaaaattcttagggttatatactacaattttttttctaatatatagtattttataaacatcaaaaagaagtctagttctgccaagggtct

SEQ ID NO: 342967 - DNA, 576 bp, Homo sapiens
tgaagctactgcctaataaatatatactttatttataagtattgccatttccaaattttcttaagcagttccatccataggcttaataatatatacaataaaattttccccttatgccttctgtttcctctgggtctaggctaaatctttgattctactgtttgtagaacctgctttgaccttctttctctgtgtcaccccttctcctggacagcaaatgtagaaatcatyagctgcttcaacagtgaggatcgagtgggccaaaaattcttagggttatatactacaattttttttctaatatatagtattttataaacatcaaaaagaagtctagttctgccaagggtctgtaggcaaaatatcattccactataaacaagtagacatgctagaaacaaaacacaaagccacctttaataggaaagtcttggtatcatgcagtctagacaataattcttcaattagcacctagtggtattagagaaagaaaatagaagagaggtatagaaaaatagaagagataacttgaacaatgagctgagtcaaatgtgctgaacatatgataatttggga

SEQ ID NO: 342968 - DNA, 646 bp, Homo sapiens
gcaaaatatcattccactataaacaagtagacatgctagaaacaaaacacaaagccacctttaataggaaagtcttggtatcatgcagtctagacaataattcttmaattagcacctagtggtattagagaaagaaaatagaagagaggtatagaaaaatagaagagataacttgaacaatgagctgagtcaaatgtgctgaacatatgataatttgggataacacaaatctgatgtgtaacaaaatgtgtaaaagttgcaaaagaatagaactcttaataaatgatgctgggacaattggctactaatatggaaaatagaaaaactactataacctacacaaatatgaattctagacagattaaaggcctaaatattaaaagagaagctttaaaactttcaaaagagaatataaaaaaaatttacaacaggcaaaacaaaccaaagatgaaaaagatgagaaatttcactacattaaaattaaagataccgtaaacagagataagatatataagctacatcctagaggagatacttttaatgtaaataacccataaacagtttatatcaagaatagtgaaaacaataaaaaatgtgaatgacccaaaagaaaaatgagcaaaggatatttcatgaaaaggaagaa

SEQ ID NO: 342969 - DNA, 566 bp, Homo sapiens
  misc_feature (1)...(566): n = A,T,C or G
ttttaatgtaaataacccataaacagtttatatcaagaatagtgaaaacaataaaaaatgtgaatgacccaaaagaaaaatgagcaaaggatatttcatgaaaaggaagaatcacccaacaacatayaaaaagatgtatattctcaataatattcaaaagatccaaaataaaaattagatgtcactttatgcccagattggtaaaaattaaaatgtctgagcatgccacttgttagtgagaatgtaggaaagagggaaatactcctgctttgttagtaatattgtcagctgatgtggctaatttagaaaataatttattaataccaagtgaattgaagatgcctttatagtaccatccaggacgcttgtaggtttaggtctttcccctagagccgctcttgcaggagagcttgaggcagcacaaacaaggctgtttatattagcaccctntgtaatacaatagtttatacaacctgaaagcctaccaataagaggtaagtaaatatccattagtcacacaattgaaaaatatgcagaaattgagtgaacaagatgaattaaaatgg

SEQ ID NO: 342970 - DNA, 595 bp, Homo sapiens
gagtacctactgtatgctaagaattattctaagtatggaagatatgccagtgaacaaaatatgtttaaaaagtttgcctcaaatgtaaatgtgcatagaaatcacagcrctcttgattcttttgcctggacacagttctggaagatgcagtattaacaagcacttctaatagtcactaatatacattactagtaataatacaaagatacttgccattatctcaattaatccttacgagaactctatgaatcaggtgctattattattatttcatttcgtaggtgagcaacctagacttagagaaattcgtgtcctgctcttggctacatggctagcaagaggcagattcaggacactaactcaggtctgtccaacactaaaaccagctcaatgggagcctgttgtcttaatagtttcagaaagcagagctctggacttaggaagaccatggtgcagacacagcatcaacctggctgcaatgaacagcagggtatgatggctggggctgggtgcctgcttttagtctaagggtacagttacacactgactccagttagggacagtgctcagctgagttcaggaacactcaaaagtc

SEQ ID NO: 342971 - DNA, 623 bp, Homo sapiens
agaactctatgaatcaggtgctattattattatttcatttcgtaggtgagcaacctagacttagagaaattcgtgtcctgctcttggctacatggctagcaagaggcagattcaggacactaactcaggtctstccaacactaaaaccagctcaatgggagcctgttgtcttaatagtttcagaaagcagagctctggacttaggaagaccatggtgcagacacagcatcaacctggctgcaatgaacagcagggtatgatggctggggctgggtgcctgcttttagtctaagggtacagttacacactgactccagttagggacagtgctcagctgagttcaggaacactcaaaagtcactgatggagacccaaaaataaatgtgtcagtaaaggatgattaaatgacaaactgatgttagctgcagtgatattaatagaaaaagaaaaaagtaaaacctttacccaaacactagatgacaccaaaatacttcagtcttgcgtgtgtatgcatacgatattcatcctcaatacactgtggtgtgggagagggacacactgcaagaaactggggctccaccaccccttattgtggtttatacaaagtaaactggagccatgac

SEQ ID NO: 342972 - DNA, 566 bp, Homo sapiens
tatgtatatgtagatatctatataaatatatagatatatatgtatatgtagatatatctatatctccatatgaccagctgcagaaacgaggactgtaattgtcatgagtatttcctcctcctttggttaaaaacatgtttgtgcatgtgtacacctgtactaagaaaatatcttcattttatttcctttctcctttttcatgtgacataagatttattgacttcatatcagcatttaaatattggtaactttgtgtaataatacttgggttgaggattggtacgtttctggctgtatgaaggatggttgtattatgttaggcataattttgaccttattattgtctctatttgaagattatstatgatctcaggggatgtgtatgggttcaagttgacaaggagtggacttgtgatggttaatactgagtgtcaacttgattggattgaaagatacgaagtattgatcctgggtgaatctctgagggtgcttgccgaaagagattaacatttgagccagtgggctggggaagacagatctacccttaatctagtgggcgcaatcta

SEQ ID NO: 342973 - DNA, 592 bp, Homo sapiens
gagcagttggcagtgttaagattaaattttaaagcactttatgcaggcagggttcctaatgatattttatacttcagataaaattgaataatcattagatattttactgccaaaataaaatctaagyagataaaaatgtatcttctgtttaaaattcatcatggtgaatgatagaattttttatatcaacatggacgttttccatgaatagactcagtcttgagccaacgcaatcttcttccatatatatcagcatttgaaagtgttacctgttttccaagtgtaatgtaagtaacataaatattgattggaaaagcccctgttgtgactctgaaagtgaaaaacacttcaaagatgcttataaataaattagaaaatcaggtgagcctccatcagaattatttgaatgtttagtctttttccccccgctttaaagtctgcagggttttttttttcccttcttggagatctttcccacgtcacaaattatagactcttcattgcatagtaaatgccttggatttgactaaattctctaaagagtctaggccaatttcttatcatccgtgcaagcacatctttgcatttcatg

SEQ ID NO: 342974 - DNA, 550 bp, Homo sapiens
ccatttttttgtttgttttttttccacaagagattgcccaaggaaaaagagagagagagaaaaaaatccaattataaggatgaatgagattgagattcaaataacatgaggaaataaagaaacttgggctctgagaggtgaagccatttgctgtatataacaacatgcttcccaagttattagaagtctgaatattaactgtctttttacatttctaaatgaaatccttttattttcttgttggtaggcagtcaggtaatgagagaaaaggataagttgagaaattattcaggtttctacctgatttaaaaaaaaacaaaaaagtttcagttaaacagwggacttcagggacactcttttttgtgatccatcttttaagagacttcatagctatatgaaaagcgttaaaaacctctaggaataaaatagtagatataactatttattaacaggagaaaaacagcattttgatacattaaaacaaatatttctataggcgatgagtggaattggcacacataatagtgttttagacatttcattatgttat

SEQ ID NO: 342975 - DNA, 542 bp, Homo sapiens
gagttcccctgctgatcagaataattttcttttaataagaatgtttataacattaccaatgaaagtaacaaaaatatttgarctgtcatcttattttttctgttcatacagtttcttaacattttatagattttttatttaatttgtttttttccccctttggtaacttggtagttattgaaaatggaaagttcccacatactttaggcaaagatggaatctttggtagtcatgctacagggagcatcaaaatcagtttaattttaatttaatttaatttattaccattttttgagacagagtctcactctgttgcccaggctggagttcagtgccatgatctcagctcactgcaacctctgcctcccggggtcgaacggttttcctgcctcagcctcccgagtagctggaattataggcatgcaccaccgtgcttggctaattttttgtatttttagtagagacgggttcacaatgttggccaggctggtcttgaactcccgacctcaggtgatccgcccgcttcggcaaaatcagtttta

SEQ ID NO: 342976 - DNA, 542 bp, Homo sapiens
gagttcccctgctgatcagaataattttcttttaataagaatgtttataacattaccaatgaaagtaacaaaaatatttgaactgtcatcttattttttctgttcatacagtttcttaacattttatagattttttatttaatttgtttttttccccctttggtaacttggtagttattgaaaatggaaagttcccacatactttaggcaaagatggaatctttggtagtcatgctacagggagcatcaaaatcagtttaattttaatttaatttaatttattacyattttttgagacagagtctcactctgttgcccaggctggagttcagtgccatgatctcagctcactgcaacctctgcctcccggggtcgaacggttttcctgcctcagcctcccgagtagctggaattataggcatgcaccaccgtgcttggctaattttttgtatttttagtagagacgggttcacaatgttggccaggctggtcttgaactcccgacctcaggtgatccgcccgcttcggcaaaatcagtttta

SEQ ID NO: 342977 - DNA, 542 bp, Homo sapiens
gagttcccctgctgatcagaataattttcttttaataagaatgtttataacattaccaatgaaagtaacaaaaatatttgaactgtcatcttattttttctgttcatacagtttcttaacattttatagattttttatttaatttgtttttttccccctttggtaacttggtagttattgaaaatggaaagttcccacatactttaggcaaagatggaatctttggtagtcatgctacagggagcatcaaaatcagtttaattttaatttaatttaatttattaccattttttgagacagagtctcactctgttgcccaggctggagttcagtgccatgatctcagctcactgcaacctctgcctcccggggtcgaacggttttcctgcctcagcctcccgagtagctggaattataggcatgcaccaccgtgcytggctaattttttgtatttttagtagagacgggttcacaatgttggccaggctggtcttgaactcccgacctcaggtgatccgcccgcttcggcaaaatcagtttta

SEQ ID NO: 342978 - DNA, 592 bp, Homo sapiens
gcattgaaattgatggcaggattcagaatcctatctgagatttacaaaatttggtttacactccatggtcggagcttaacaaatgtttgatggatgagtaaagaaatcccaggatccctttgaggctacccatagacactgcagcatcatttctagaatcaagrtcccagggtccccagtgtccatcactaggacacttagttatggggattcctgagaggaaaacagaggccttccccactgtggcttcctgcgtcactcacattactgtcattcggtgggtcagcagtaccccacagactcaggcagaggctcctgtttctatgttcagcttcattcctgttaaactaaaccagcccatgcttctgcagagtgttcctcaagaccagtttctcctgaagagctttccctggactgccaccgttaacagtctctctcttcatcaactgagtgaggacacagacatggcacagtgtcctgcttacagctgttgttctgctgctaagtggctgtgtaagcttagacacaacactcctgagcctttcctagtttgtcaaagaaactgggtgatgagctagagcatcctgatgtg

SEQ ID NO: 342979 - DNA, 592 bp, Homo sapiens
gcattgaaattgatggcaggattcagaatcctatctgagatttacaaaatttggtttacactccatggtcggagcttaacaaatgtttgatggatgagtaaagaaatcccaggatccctttgaggctacccatagacactgcagcatcatttctagaatcaaggtcccagggtccccagtgtccatcactaggacacttagttatggggattcctgagaggaaaacagaggccttccccactgtggcttcctgcgtcactcacattactgtcattcggtgggtcagcagtaccccacagactcaggcagaggctcctgtttctatgttcagcttcattcctgttaaactaaaccagcccatgcttctgcagagtgttcctcaagaccagtttctcctgaagagctttccytggactgccaccgttaacagtctctctcttcatcaactgagtgaggacacagacatggcacagtgtcctgcttacagctgttgttctgctgctaagtggctgtgtaagcttagacacaacactcctgagcctttcctagtttgtcaaagaaactgggtgatgagctagagcatcctgatgtg

SEQ ID NO: 342980 - DNA, 527 bp, Homo sapiens
ttcacagggctgtaaagatgtttcttcccagtggtccttcactccaaggctgcactggagattatgctggtgaggaagctttggtctcgtaggtctttggccccaaggcaaaaggtcatggctgtaaktgtctttcttcctgatcccctctaggattgtgaagatgtccagtcccaatctgaacattgtgaccttactgggcagttgtctcacttacagtagcgcttacctctttgggattcaggatgttttagtggggagctcaatggaaactctcattcaggtaggtgaagttttaaaatttggttttgactataaagttttgattatttttttaaaccagctgctcccgtgggtggtggtttcctttatccttggagtgggcacttttcgagggaatcccagaacacttggtgaggttcactctgtacctcgtgcgctctgtgggacccagaccctacagatcagagtgtgtggagaactgataaaggttcctcttgtgactcttctgtccccttccacccata

SEQ ID NO: 342981 - DNA, 513 bp, Homo sapiens
tccagcctcacgaggggctgaggaatacagtggaatcatggaatcgtgacactgcaagattaatgtttaaggattcaatgatttgcaaaaagcaggtgcataatgaaatagtttatagttttgttgaggcactaatttgattggggtagcaaagcacataaatgaggggtaagccctagtgtcaccaagcacacagctgttagcccaactttatcatctcttctcctaacacgtagtcactctcatttaggttctagtggagtcacctaaatgctgcagtttttacatactgagggggtatcatgtactctagaagaattcatgctccagsatgttcacaaagatctgctttgtgttcctggtaattgtgggcacctccagttctgactctgtgtcccttctaggtgacagggaaagacgtgtcctgcacttcgaccagcacccacttctgtgcttcccggtattccgatgtttggattgctctcatttggggatgcaaggttggtaaccaca

SEQ ID NO: 342982 - DNA, 557 bp, Homo sapiens
cagttttgtactgcggggaggcacacaccagcaatttctgttggggtatgggagaacctgttggtcaagagtgcttttggttccattggggttacatgactaccaacagacacataaacctggaagccaaatggagaaataaaaaggaagacacgagggacacgaaaacaggaaagaaaacaggatttgaatatttcacttgagtccagcatagtacttggcaatatcatatttttgtgattccttttgataaccctgtgaagtagacactttcatttttacagacaaggattatgaggcttagagaaatgaggtagtttcccgcaacatcacactgctggacagagatgtacacacagctcctgggactcaagtaggtgggttttcccagggacacatggcttcatgtgttcttctgggaatggcaggtgacgcttggcagacgagacaamaaagcaaggctcatgtaagaaagctgggatgtgctcccctatagtccagaataatagacctgggtcctcacctcaggaaacgggcctccacttcctcactgccaa

SEQ ID NO: 342983 - DNA, 558 bp, Homo sapiens
aaataacatttattaagtatctagtaggtataaggggctgccctgagggttttcttatgtgatatcttagtaaatcctcatagcagtccttaaggtaggtattattatcctaattttacagatgaggaaattggttgcaaacctactgctcrttgacctcttgttccacttctctgagcctccgtcacctcttcaccccccagggtctgctcctgctgtatggtgcctacctggctggcctgactggccatgtcagctcccctcctgtgaatcagtccttaaccatcatggtgggggtcaacctccttgtactggctgctgggctgctttttgtagtcaccagatacttgcattcctggcccaacctggtctttggactcacatctggagggatctttgtttgtacaactacaatcaactgcttcatcttcattccccaggtatggattttgcagggctggtcctcttagtcactctagagtttttcactgacaaattgctcattttgttttctactgatacctttccatgccacttattggagagtcagaaagcaga

SEQ ID NO: 342984 - DNA, 558 bp, Homo sapiens
aaataacatttattaagtatctagtaggtataaggggctgccctgagggttttcttatgtgatatcttagtaaatcctcatagcagtccttaaggtaggtattattatcctaattttacagatgaggaaattggttgcaaacctactgctcattgacctcttgttccacttctctgagcctccgtcacctcttcaccccscagggtctgctcctgctgtatggtgcctacctggctggcctgactggccatgtcagctcccctcctgtgaatcagtccttaaccatcatggtgggggtcaacctccttgtactggctgctgggctgctttttgtagtcaccagatacttgcattcctggcccaacctggtctttggactcacatctggagggatctttgtttgtacaactacaatcaactgcttcatcttcattccccaggtatggattttgcagggctggtcctcttagtcactctagagtttttcactgacaaattgctcattttgttttctactgatacctttccatgccacttattggagagtcagaaagcaga

SEQ ID NO: 342985 - DNA, 608 bp, Homo sapiens
gttttccatccacactgctgccttcacagtattgccactcaaagtgtgatcctcaggccagcagtatcagcaccacctgggaacctgttagaaatgcagaatcttaggccccacccagatctgctgaatcagaatytacattttttacaaaatccccagatgactcacaagcacattaaagtgtcagaagactgatctagagcctgccctgaagccatagtatttcatgctgggtgtggtgtctttggcaactctgggatgtccagtctggtcccaaaagtcaggatctcaatgggattagtgaaactctgcaggctttaggtgttcaacagaaagcttgttatttggcaatgttggggcattaaacagccctgatacttcttcaggatattgggagttaaccattaattctcaactgatgaaaacctggaacctagactagagtttctgtcaggctaccagaagtttcctttatattaaccaggccaggaatccctggagccacctggaatagtgtatggaccaagtaaagacaaaaggaaggatttctcataggctctgcagaagcactttactctgcgtggggttttcttgtttttgtttttctg

SEQ ID NO: 342986 - DNA, 506 bp, Homo sapiens
caagcagttgataaataaggagtaaatggtagcaatgaagtcaaagcggtaaatgtagactgctattttgaaaagttgttatgcaatacatgtaaactagaaaagcaacaaatctatatgatatttatatgatctacatattctaaaatataacatggggttaattactatttcatwgtaatgtatgactctagaattaatcattttatagaccttatgattgcactaggtgttcaaaagatctcactatataaaagagaataatgaagtaccagccacttaggaggctgaggcaggaggatcgcttgagcccaggagtttgaggctgtaatgtgccattattgtgcctatgaatacccactgcactctagccttggcaacacagtaagacccagtctctaaaaaaagaaaataagagaaaaattgaaatacatagatttcattgaacctaaatagggctacatgtattttcttgttgttgttgttgtttttttcctggttcccat

SEQ ID NO: 342987 - DNA, 566 bp, Homo sapiens
tgttgtgtacttgagcattcatgcatggcactaatcgtctgttaggttggctaatctaagtttttcctcaacaaagagttataattaatgaagttaaaaggcaaaagctaccttattgtactttaaaggaagaagtcttaaattttaaggtaatagagttggaatggatctattatgtggaatcttctgagccattgcttagcctcatcatcctgggatatctggaaagacattccctcaacaagatattaagaaataagaaagatattaagaaataagggaggcatgaatattcttgatgacctctctgctgattatactttgttggccagagacactaacatgagatgctattttgcaagttgtctctgtgatctcaatagtaataatgggattctagggtggttgaatgyaggaggagacatttaaccattagagaaaaggtgtgtgtcattacacaataagccatagagagaaaatggttgccatagtgtcctggctcatggaaatctgtgactattgctaattactcacagtcctagaaaagaaaaaaaatcatccctaga

SEQ ID NO: 342988 - DNA, 588 bp, Homo sapiens
actttttcctttgcattcaccttggtgaagctgatgactatatgccttggggtacatcttttatastatctcacagaggttctctgtatttcttgaatttgcatgttctcttctctaacaaggttggggaaattcccatggacaaataaatgtttttactcaaatatactcaaatatgttttccaagttgcttactctcctttttttttcaggaatggtaatgagtcatagatttggtttctttacataatccaatatttcttggggttctttattttttttaaattcttttttctctattttgtctgagttgacttgaaaaaccagtccttaagctctgagattctttcttcagtttgatctattctgatgttaatgctttgaatcgtattgtaaaattcttaatgtgagttcttcagttccagagggtcagtttgcttctttcttaaaatgactatttttactccaactcctgtatagttttactggatttcttagattcctaggatcaggtttcagctttctcctggacttcagtgagcttccctgccatcagattctgaattctatgtctatcatttcagtcat

SEQ ID NO: 342989 - DNA, 588 bp, Homo sapiens
actttttcctttgcattcaccttggtgaagctgatgactatatgccttggggtacatcttttatactatctcacagaggttctctgtatttcttgaatttgcatgttctcttctctaacaaggttggggaaattcccatggacaaataaatgtttttactcaaatatactcaaatatgttttccaagttgcttactctcctttttttttcaggaatggtaatgagtcatagatttggtttctttacataatccaatatttcttggggttctttattttttttaaattcttttttctctattttgtctgagttgacttgaaaaaccagtcyttaagctctgagattctttcttcagtttgatctattctgatgttaatgctttgaatcgtattgtaaaattcttaatgtgagttcttcagttccagagggtcagtttgcttctttcttaaaatgactatttttactccaactcctgtatagttttactggatttcttagattcctaggatcaggtttcagctttctcctggacttcagtgagcttccctgccatcagattctgaattctatgtctatcatttcagtcat

SEQ ID NO: 342990 - DNA, 618 bp, Homo sapiens
catcatttgtcaaaaagactatttttttcccacagaattgcttttgtgcctttgccaaaattgtcggagaggcaaactatcagagatcctcagggaggatcacttgaggccagaagtttggacctgcctgggtaacatagtcagaccccacctttcaaaaaaaattaaattgttaatatatttgtgggcctatttctcaactctattagtttccattgacctatttttgtatttttatgcctataacactcaaaacattactgtagctagggaaatcataatgtattaaaatcagataatatcagttatcaattatttatttttcaaagttttacactattctaggtcttttgtgtttccatgtgaattctacaatcagyttgtcagtcttttaaaatatttttcgtatagatatttttaataatttggtttttaaactttatattagaattaagagtgacttaccttccgctgttacagtgatgtggaattttgtatttattcacatatttactttacttttaccaatgagttccatactttctcatactatcatgttgctctttagttacctctcatttcaacctaaagaactccctctttttttttttttttttt

SEQ ID NO: 342991 - DNA, 580 bp, Homo sapiens
ctggcttcagaggtgaaagccccaagccttggcagcttccgtacggtgttgatcctgtgagtacactgaaggcaagagttgaggtttgggaacttctgcctagatttcagaggatgtagggaaatgcctgaatgtmcagacagaagtctgctgcaggggcagatccttcatggagaacttctactagagcagtacagagggtaaatgtagggttggagcccccacaaatagtccccattgggctattgcctagtggagctgtgagaagagggccactgtcctctagacccctgaatggtagatccaccaacagcttgcaccatgcacttggaaaaagcctgcaggcactcgatgccagcctgtgaaagcagccccaaggactataccctgcaaaaccacaggggtggagctgcccaaggccaaaagagcccaccccttgcattagcatgccctggatgtgagacacggaattgaagatattattttggagatttaaaatttaataactgccctgcctgtctgcctttgctataccctgcaaagccacaggggtggagctgcccaaggccatgagagccca

SEQ ID NO: 342992 - DNA, 580 bp, Homo sapiens
ctggcttcagaggtgaaagccccaagccttggcagcttccgtacggtgttgatcctgtgagtacactgaaggcaagagttgaggtttgggaacttctgcctagatttcagaggatgtagggaaatgcctgaatgtccagacagaagtctgctgcaggggcagatccttcatggagaacytctactagagcagtacagagggtaaatgtagggttggagcccccacaaatagtccccattgggctattgcctagtggagctgtgagaagagggccactgtcctctagacccctgaatggtagatccaccaacagcttgcaccatgcacttggaaaaagcctgcaggcactcgatgccagcctgtgaaagcagccccaaggactataccctgcaaaaccacaggggtggagctgcccaaggccaaaagagcccaccccttgcattagcatgccctggatgtgagacacggaattgaagatattattttggagatttaaaatttaataactgccctgcctgtctgcctttgctataccctgcaaagccacaggggtggagctgcccaaggccatgagagccca

SEQ ID NO: 342993 - DNA, 491 bp, Homo sapiens
atcttgttcaagtaacatctcatgcttgtatcctttctatatcacctacgacaagttaaaatcctcttgtttgaaatcaccctgatcatgagagctttctgccctgaggcaatgtcctccatttgtgaacatctatgactgttgtaaaaatcctctttatatagtgttgcaatttgttttcttgtatttgaattcttttgtcttagtgattccctctgaaaaagttgcacattcttcaataggacagcatttcaaaagtccggagatagctaactaattcttcctaagcccttctatttatggctaagtatccacagttccttcaactattccaaaattgatgtaacttsgagttctttaactaatttgctcattctcccctaggtagatcctgatttttcaatattcctcttaaattgtgatgtccccaaatttacacagattccaagattggtttcaatctatacggaaatataatgtgatttttcact

SEQ ID NO: 342994 - DNA, 491 bp, Homo sapiens
atcttgttcaagtaacatctcatgcttgtatcctttctatatcacctacgacaagttaaaatcctcttgtttgaaatcaccctgatcatgagagctttctgccctgaggcaatgtcctccatttgtgaacatctatgactgttgtaaaaatcctctttatatagtgttgcaatttgttttcttgtatttgaattcttttgtcttagtgattccctctgaaaaagttgcacattcttcaataggacagcatttcaaaagtccggagatagctaactaattcttcctaagcccttctatttatggctaagtatccacagttccttcaactattccaaaattgatgtaacttggagttctttaactaatttgctcattctcccctaggtagatcctgatttttcaatattcctcttaaattgtgatgtccccaaatttacacagattccaagattggtttcaatctatayggaaatataatgtgatttttcact

SEQ ID NO: 342995 - DNA, 423 bp, Homo sapiens
ttcagatgatcctgggaaacacctgtaaagaagtaggaaagtgacaaagagaagaggagagaaccaatataggatgtgtttccctgaaactcactgctgtggacaactggaagctaatcttgctggaaaacaatgggagctattttagaacataggcctcagattgatccaattagagagctaagggagctggtgaatttatgcaccaactaytgtcagtaattgtttgattgctgctgccaatggaaatcatttcttggcatttctggctcaggcaaaaaccgaacccacatccacagaggaccctcaggcacagaggtgaataaactagcagctggaatttaaggcagagtgcaatgaaacggtacagttgtaaggaacatgggcaaggcaacaatgtcttctgctagggaaacagtggtg

SEQ ID NO: 342996 - DNA, 547 bp, Homo sapiens
atctgcattctttttttattttcatcaggataatgatttcaaaacttctctctcactttaaaagattaaaaatggccaaaattcaccactgaatattttcctcagctttagctaggtttatgttttagcttcccaatagctattactataattattattctatctgcatatcagttatctgtttaaccaataaaagcaactacattgtgtgtyacatcccatatctcagcatattaactttctgcacaaaataaacccctctatgccagatttccttttttagtttgaaacaaatctttacaatcattatatcaacacctgtaacactcaatttcaattaggcaaaaactaatgtgatattaaattctaaaataatcgtgaatgaaaatcattgatagaatctgagcagtttatagagtagcttcaataaatgtaaataattttaaaacctgtagggcactttcaaaattttgtctaaattatctcctcacaagttatttgagtgtactgtgtactaccttcaaaagtgttcaaattataagatcat

SEQ ID NO: 342997 - DNA, 593 bp, Homo sapiens
tagactggattaagaaaactctttagtgttgtcccctgccctcatctcttgttgatttcagagctataactagaatttgattccagcataactggaatgagattgcattcaacagcaagaccacaccaaggttaactggcttgtgcactaaatttatctaagaacttgatattttcaagaaatgtataatatgagaaataaattaaaagggatctccaacagcatttgaaaagcatttagtggccatctctgtagcccttatgttggcatcaggagattctgagctcatgttttttatatttccaattcttgaagaaggtgcttatcaactgaaagaaaaaycctagttgtcttcttaccctttaaaaaagaattatggtgaaaatagcaaagataatattcctagaactccctctttctaccaaaataataaatcagattgtatgtccacatcactaggaaagtgagagatgagtagcaccatagagacttgaaagatgaatttatcttaaccgttttagccaattagcttaatgagtatttgaagagtaaatttttataagcttaatcaggacatgactccaaattataat

SEQ ID NO: 342998 - DNA, 582 bp, Homo sapiens
gacctaactggctttgtctgcttggtacttttcaggcacaatctccattttaagctactttaacggaagttaacaactatctggggaaagaaggagacatcatgatctcccactagaattactggaagagcactctggcatgttcgttttccacagtgcattcagagtgatctgtctgatatgtaatccgcctcccttgcaccaccccccgactaaagacatgaaatatttcattgattttcaatccacttagctattaacacagaactttttgtcagagttttcagccctctacatagtccttccctagatatttttcagcctgatctctcactatgctccccctctgtctactttaggcatactggctatgcttcctgttaccatatgtctttgtaaaagttggttatgcttcatcaggttaaccccttcacatctcagcataactgtcacttcgctgacctccctttttaggtcaaattctctatgcataatgtctcataccaccataaatctctcctttgtgcatagcggttagagattgttttacrtttttattattaattaatgtctgtctccctc

SEQ ID NO: 342999 - DNA, 524 bp, Homo sapiens
tgtttaggacttgaatcttaaggaagtgacaaaagttgccagacaatgtgaatgtatttatggcacaattaatagtttcaaagattcagtggcagaggcaactgaagcagcatcttaaatggaagcttctcttgtgtaaccatttctggagtattaatgattttttgcttgctacctgttattaagcattgcgatctggcttataggtgggcttataggtatcttcacaataaatccattttttttctttaaaaagcctaaattgaccccagttgtttgtaacaaatcaatcttactgtcaccaaaaccaataccaagaatgggactcaggactcagactcttatagaaatagaaaaaatgtaggatayagtatctgttatatgaactaaagtcagtgaagatttcagtattccataataaagataccttgcatgtgaaggaaaaaccattaactaaattattcactggggtttacctgaagacaagactatgggactgtagttacacctgaagagaagaatat

SEQ ID NO: 343000 - DNA, 524 bp, Homo sapiens
tgtttaggacttgaatcttaaggaagtgacaaaagttgccagacaatgtgaatgtatttatggcacaattaatagtttcaaagattcagtggcagaggcaactgaagcagcatcttaaatggaagcttctcttgtgtaaccatttctggagtattaatgattttttgcttgctacctgttattaagcattgcgatctggcttataggtgggcttataggtatcttcacaataaatccattttttttctttaaaaagcctaaattgaccccagttgtttgtaacaaatcaatcttactgtcaccaaaaccaataccaagaatgggactcaggactcagactcttatagaaatagaaaaaatgtaggatatagtatctgttatatgaactaaagtcagtgaagatttcagtattccataataaagataccttgcatgwgaaggaaaaaccattaactaaattattcactggggtttacctgaagacaagactatgggactgtagttacacctgaagagaagaatat

SEQ ID NO: 343001 - DNA, 629 bp, Homo sapiens
ataatcctgatatctcatattacaccaatattgaaaaaaaaaagtctgagcttgacttgttactggcctttttgttattaatatagcactagtttaaatagaaattctcttcttgttacacttcaycatttccacagagatactaaattttaaatgttccagatcagtgatatttattactacaaagtaagtgtggcttacaggttgaacctcctgttttaatgtacatattaaactaaaaggtaacaacagatggaactgttggaaatgtttccattacatattttatttaagcaatacacttatcattactgcttacagaagagctatgaaaatttaaaaaatttccctgaaacaggtcccaagtttctccagttcttttgacttttaagtagctttgtagtagatgaaaagaatgagaaactgtagattcttctggtgccataacataaaggactggctcatactgagctgtcaacaatatttgaccttaaatttatacaaattgtcttataatttaactgtccattaaataacttattttatttaatgataatattattttataaatctcctgtattattatttattcacgtattttaatttgaaagtagatgtgtaactacact

SEQ ID NO: 343002 - DNA, 629 bp, Homo sapiens
ataatcctgatatctcatattacaccaatattgaaaaaaaaaagtctgagcttgacttgttactggcctttttgttattaatatagcactagtttaaatagaaattctcttcttgttacacttcaccatttccacagagatactaaattttaaatgttccagatcagtgatatttattactacaaagtaagtgtggcttacaggttgaacctcctgttttaatgtacatattaaactaaaaggtaacaacagatggaactgttggaaatgtttccattacatattttatttaagcaatacayttatcattactgcttacagaagagctatgaaaatttaaaaaatttccctgaaacaggtcccaagtttctccagttcttttgacttttaagtagctttgtagtagatgaaaagaatgagaaactgtagattcttctggtgccataacataaaggactggctcatactgagctgtcaacaatatttgaccttaaatttatacaaattgtcttataatttaactgtccattaaataacttattttatttaatgataatattattttataaatctcctgtattattatttattcacgtattttaatttgaaagtagatgtgtaactacact

SEQ ID NO: 343003 - DNA, 629 bp, Homo sapiens
ataatcctgatatctcatattacaccaatattgaaaaaaaaaagtctgagcttgacttgttactggcctttttgttattaatatagcactagtttaaatagaaattctcttcttgttacacttcaccatttccacagagatactaaattttaaatgttccagatcagtgatatttattactacaaagtaagtgtggcttacaggttgaacctcctgttttaatgtacatattaaactaaaaggtaacaacagatggaactgttggaaatgtttccattacatattttatttaagcaatacacttatcattactgcttacagaagagctatgaaaatttaaaaaatttccctgaaacaggtcccaagtttctccagttcttttgacttttaagtagctttgtagtagatgaaaagaatgagaaactgtagattcttctggtgccataacrtaaaggactggctcatactgagctgtcaacaatatttgaccttaaatttatacaaattgtcttataatttaactgtccattaaataacttattttatttaatgataatattattttataaatctcctgtattattatttattcacgtattttaatttgaaagtagatgtgtaactacact

SEQ ID NO: 343004 - DNA, 501 bp, Homo sapiens
aatataatacaaacccaaactgaggagcattttatggtagatttaaaagtgtcaacatgaggaaagtcagggaaagcctggaagtatttccagactttgacacaagcattcattgtaatgtgtgatttagctgtggatcaattttccgtaaagtacatcactgagactattagtataacgtctaaggtccaataattaaatagtaggaatgtatcaatattaatgctctgatttgatgttgataaaatggttattttaaaaatgcccttgtttgtcaaaaagtatttgagagtgatgagcatgagggtaagaagtaaggygacaaatctaaacttgaaattcattagtctttctttctcctattggtaattttggttcatactcataagatttggaacacatgttcgtgtttattttgccatgataacacttctttttttatttgtataaatttatgaaatactggtgcttttttttttcctaaatctattgcatagtggt

SEQ ID NO: 343005 - DNA, 596 bp, Homo sapiens
gatgtcaaaatgaagactcaaaaacccactgatgatgaagttgaaagaaggatgacaaggaggtaaatgtaatccaaattcagaataataatttatgatgctgacggtttcatgacagaaggtacccacatcataaaaccaccaytaagaaactgtctagtccccaccgtttataagccatagcaggggctcatagtttctgataaattggacactcctcagtgatgatagccaagtgggaaatgcaggctattttaacaaagaatgacttcaagttctcattgtttattaggccattgagtgagcaccaggtttacagaaggaagaagatggatgttctctgtggaataggttactccgcccacttgatttgagactctttatggagatgatatttgggtaaatattcacatttttcattctggatttattccaaagtgctcacacccacaaccctttcaaaaacttctgccccaaattattaatttcaagccctctatcatctggctaaggagtttgcattctatataagaactagtataatcccttatgtctaacttcatagtttatgcaatcttggtcccatatatactact

SEQ ID NO: 343006 - DNA, 536 bp, Homo sapiens
tccttctgccctccccccatcactgccaagtgttcctgtaggcttaatcactcacgcacccattgcttaggcagtgacatgtaattaaaatggcatcatacaaatagaatgagaaagtgtgaattcccatcagaggataacaatttgtaaaatattgcagtgcacatcttgtttggtttgttttacattttaatcaagcttgataaaggaaatgtttataaaagaactaatctgtgcaagttcaaagatgaatatcaacatatttttataagygattacatatactatttgtgttcactcagcattcaaatacaaaaaaaaattattgagcatttactgagtgctaagccctatatatgtactatggtcctaaaacaatgtcataatgattatgtttaggtggtcaaatttcaggtaattttaaatatatatttaactccaatgttctacgattactttttggagttattgttaaaattacaatcctcaaaatataaaaatacacagttgtatcatttacaatctgttaatgactc

SEQ ID NO: 343007 - DNA, 507 bp, Homo sapiens
tctgttttataaaggatactcctttggaaatattagagataagaagttaggaaaattcttattttgatttttattactttataggtttagggcagaggtgctcattcttttggctcccctgggtcacattggaagaggaattgtcttgggccacacataaaatacactagcactaaygacagctgatgagctaaaaaatatctcctaatgttttaagaaagtttatgaatttgtgttgggccacattcaaagctgtcctgagccgcatgcaccctgtgggccgttggttggacaagcttggtttagggagttaaaagccatttaaatatactgcctctctgtcattctaggcatacattttagggatgtattttctgctctggagcttctattctgaagcattcaccttagtaatgcattccttcacaacaaatattggaaaagacagaatgagagagttgaattaggccaataacataaagaaaatattgagttgatggcaggtga

SEQ ID NO: 343008 - DNA, 520 bp, Homo sapiens
tcaccttagtaatgcattccttcacaacaaatattggaaaagacagaatgagagagttgaattaggccaataacataaagaaaatattgagttgatggcaggtgaaaatattctgtattattttattagaaaatatagctattgtattaagaaaggagatagattttatgtagaamgctcattaagacttttagtgttttactacgtatttatagttccttaatagaattatgcattgggtgttcaactgttttgaattaagtgatcatttataatgttattaatgataattttactttctgcattatagctttaagttattttaagaactcattctcctcctttattgcttatagtccataacttaaaacttttaactttatcctattacagttcacccttttcactgccatcgctccaacacaggtctccatcattttatatccagattgctgaaatagctttctagctactttctctgaagaaattgtgataaataacagtctttggaattggtact

SEQ ID NO: 343009 - DNA, 520 bp, Homo sapiens
tcaccttagtaatgcattccttcacaacaaatattggaaaagacagaatgagagagttgaattaggccaataacataaagaaaatattgagttgatggcaggtgaaaatattctgtattattttattagaaaatatagctattgtattaagaaaggagatagattttatgtagaaarctcattaagacttttagtgttttactacgtatttatagttccttaatagaattatgcattgggtgttcaactgttttgaattaagtgatcatttataatgttattaatgataattttactttctgcattatagctttaagttattttaagaactcattctcctcctttattgcttatagtccataacttaaaacttttaactttatcctattacagttcacccttttcactgccatcgctccaacacaggtctccatcattttatatccagattgctgaaatagctttctagctactttctctgaagaaattgtgataaataacagtctttggaattggtact

SEQ ID NO: 343010 - DNA, 520 bp, Homo sapiens
tcaccttagtaatgcattccttcacaacaaatattggaaaagacagaatgagagagttgaattaggccaataacataaagaaaatattgagttgatggcaggtgaaaatattctgtattattttattagaaaatatagctattgtattaagaaaggagatagattttatgtagaaagctcattaagacttttagtgttttactaygtatttatagttccttaatagaattatgcattgggtgttcaactgttttgaattaagtgatcatttataatgttattaatgataattttactttctgcattatagctttaagttattttaagaactcattctcctcctttattgcttatagtccataacttaaaacttttaactttatcctattacagttcacccttttcactgccatcgctccaacacaggtctccatcattttatatccagattgctgaaatagctttctagctactttctctgaagaaattgtgataaataacagtctttggaattggtact

SEQ ID NO: 343011 - DNA, 572 bp, Homo sapiens
acaggcctgcattcccacaggacctagtaactgtgccatcaaaagttttgctttatgtctgctataaaaacccattctcctccagtgtaccctttgctttatctatcccctgataattttacctgaatatctaatgtgccctgtataccatgcaaaatgctgacattaagtacatctcagttttgctttcaagttgcttacagtctaatgagaaaagtatacaacaaaataggcattcaaaagttcaagttgtaagttctattataacaacaaaatacgcattcaaaagtccaaattgtaagttctattatataataaaaagtatcatgtggttttggacaacaaaagagaagtaaataaactaatattagcatgagtctgaaatctgaaaaatgaaatgagtcagrcatagctgtgggaatgaagtttgggatgaggtacaaaggtaatgtggccagtgtgttagaattgggagcaaaatgttacaaggagagggaacagcttgtgaagtatccattggaaaagagaggatgtggcattttttaagaactgagagaactgtactatgatta

SEQ ID NO: 343012 - DNA, 586 bp, Homo sapiens
cttaataaatagttttgaatgtttgaattattgaaaaagattagaacaaatatttacatgagataattgacaagaaatgtgacagattggaggcaggtgctgaagaaaactagaaaaatgtcttggttatgggtggatcaacaaggtagatgatgctaccgataacagagagtcaatacaggtgaagaaacaggtttagcaggaaagacaattagtgcagttttggatatgttgagtttgagatgattcagaaattttaattgtaggtctctagtaaacattagttgaatatagagaacgagcttaagcaagagctgagttggagacagttctagttaataacaatagatgtcactcatactgtcattaaatgctgaaggcctggttccaagggatttatatatactaacaaatttaatacgtcaatgctatgaaataggtaaaatgttattagcccagtttcacaaatggtaaatttgagckttattcagattaagtattttgctcaagctcacaagagatggagttgtgatttgaacccaggcagtctgactccaggctaacatacctttaaccatgatgctac

SEQ ID NO: 343013 - DNA, 581 bp, Homo sapiens
ttaaatgcattcctttcatatatactgcaastatgtggaacaaaaaattcgaagtagaggtcagtttaatttttttttaaggacaccatcattcttttttttttttttttttttgcacatagacctctagcaaaagtttgaatagtgccatatctaagaaactctgaatcttgctatttttgagatacattttattacatcttgtcataagattttatcatggcaatttttcttctgctgtggagaagtcaactgtgatttttttcaataaccatttacagggcaccaggtgccaacagggcattatgccagctatcatgtctgatgtagagttgtttaaaatactgtttgtgcccttgagaagctaaaatagttgaatagataaagaatttaagtttatatgactgagagcaatatgtactaagtatcatttgactgtcataaacaaagatttacagggatagagaaaacaaaagagtattctgaaagaaaacatgaaagactttgaaaaaattattaagatctaataggtgggaatggtgttgtaatttccttttgtacctgtaatacattgcaactaa

SEQ ID NO: 343014 - DNA, 581 bp, Homo sapiens
ttaaatgcattcctttcatatatactgcaactatgtggaacaaaaaattcgaagtagaggtcagtttaayttttttttaaggacaccatcattcttttttttttttttttttttgcacatagacctctagcaaaagtttgaatagtgccatatctaagaaactctgaatcttgctatttttgagatacattttattacatcttgtcataagattttatcatggcaatttttcttctgctgtggagaagtcaactgtgatttttttcaataaccatttacagggcaccaggtgccaacagggcattatgccagctatcatgtctgatgtagagttgtttaaaatactgtttgtgcccttgagaagctaaaatagttgaatagataaagaatttaagtttatatgactgagagcaatatgtactaagtatcatttgactgtcataaacaaagatttacagggatagagaaaacaaaagagtattctgaaagaaaacatgaaagactttgaaaaaattattaagatctaataggtgggaatggtgttgtaatttccttttgtacctgtaatacattgcaactaa

SEQ ID NO: 343015 - DNA, 492 bp, Homo sapiens
gctcatcactgtagccccagggtcaaagacagtgctgacaaataaatatttgatggcctgctctgcttaccacagagacaggccatcaggattaaagagattatataaatataataaaactttaaaatttttatgataaaaataatgtgatttattactgttggcaaggtatttatctttttcaaactttgatttttacattaatgaaatatagataaaataataaataccttgtaggaatgctgaaaggcttataagatgttttatagtcaaacacgcrcacagcaactgccacgtgggatgcactcaataaatcctaaatgttttagttaatctatgcataagtctagtcatcttctcttcattattttaaaaagcacatgtgtatcaacttttactggctaagatttgttatttgagttagtagtttcccataacatcactttcagcctgtcccagtaggccaggttacatgttttcatcacaccttca

SEQ ID NO: 343016 - DNA, 599 bp, Homo sapiens
tggcttacattcccaccagcagtgtagaagtgttccctgttcacygcacccatgtcaacatctactgtttttggattttgtgattatgttcattcttgcaggagtaaggtagcattgcattgttgttttaatttgcatttccttgatcataagtggtgttgagcattttttcatgtttgttggccatttgtatatcttcttttgagaattatctattcatgtccttagcccacttttggatgggattgtttgtttttttcttactgatttgtctaagtttgttgtagattctggatattagtcccttgtcagatgtaaagattgtgaagattttctctcactctggttgtctgtttactctgctgactgttccttttgtcatgcaaaagctctttagtttaactaggtcccagctatttatctttgtttttattgaatttgcttttgggttcatggtcatgaaatccttgtctaagccaccatctagaaaggtttttccaaagtgatcttctagaatttttatagtttctggtcctaggtttaagtccttaatacatcttgcattgatttttgtataaggtgagagatgagggtccagt

SEQ ID NO: 343017 - DNA, 599 bp, Homo sapiens
tggcttacattcccaccagcagtgtagaagtgttccctgttcaccgcacccatgtcaacatctactgtttttggattttgtgattatgttcattcttgcaggagtaaggtagcattgcattgttgttttaatttgcatttccttgatcataagtggtgttgagcattttttcatgtttgttggccatttgtatatcttcttttgagaattatctattcatgtccttagcccacttttggatgggattgtttgtttttttcytactgatttgtctaagtttgttgtagattctggatattagtcccttgtcagatgtaaagattgtgaagattttctctcactctggttgtctgtttactctgctgactgttccttttgtcatgcaaaagctctttagtttaactaggtcccagctatttatctttgtttttattgaatttgcttttgggttcatggtcatgaaatccttgtctaagccaccatctagaaaggtttttccaaagtgatcttctagaatttttatagtttctggtcctaggtttaagtccttaatacatcttgcattgatttttgtataaggtgagagatgagggtccagt

SEQ ID NO: 343018 - DNA, 518 bp, Homo sapiens
tgtctccgcgtgttcattctgcagatgaaattaggatgtcagtatgttttgtgtcctctgttcttagagcatyctctacaagctctacaaggcgattgatctacttttagagatctctaccacctgcacgttacctgtcatctgtttgtcacatcaagcttgcacattaaacattcctttcattttagtgccaaatcttcataaaattttaaaattaataatacactaaatttcttgaagatgagaaatcagacacagggctacagagttccaggccagattctcctgctttcagactatagcatcttctcagctaaatttcctagtcagcccttgggaagtaaatctcaaaaccattgttaatggaaatctagttactgcttactttcattagattgaagaagtataatttgagagtcatataatctcagttatatgtagcctgacagagcttgacaaagcaacttaaccttttgaacctcaggttacataaataaggattataataatacgttatc

SEQ ID NO: 343019 - DNA, 518 bp, Homo sapiens
tgtctccgcgtgttcattctgcagatgaaattaggatgtcagtatgttttgtgtcctctgttcttagagcattctctacaagctctacaaggcgattgatctacttttagagatctctaccacctgcacgttacctgtcatctgtttgtcacatcaagcttgcacattaaacattcctttcattttagtgccaaatcttcataaaattttaaaattaataatacactaaatttcttgaagatgagaaatcagacacagggctacagagttccaggccagattctcctgstttcagactatagcatcttctcagctaaatttcctagtcagcccttgggaagtaaatctcaaaaccattgttaatggaaatctagttactgcttactttcattagattgaagaagtataatttgagagtcatataatctcagttatatgtagcctgacagagcttgacaaagcaacttaaccttttgaacctcaggttacataaataaggattataataatacgttatc

SEQ ID NO: 343020 - DNA, 624 bp, Homo sapiens
caagttggaggctttaattgaaattgttaatgatttactacaagtaaacactattgagccctccttgtctccatggaactcacatgtgtttgttgtacaaaaaaggtcaggaaaatggaggatggtaacagacttaagagctgttaatgcagttattaaacctatgggggcattacaacccagtatgccctccccttccatgattcctaaagaatggcctttaattatcattgaccttaaggactgcttttttcatattcctttagacaagtcagactgtgaaaaatttgcttttactataccttccactaacaattcagctcctgcagctagatatgaatggaaagttttacctcaaggaatgattaacagtcctactatttgtcagttgtttgtcagtactgtgttacaacctatctgacagacttttaaaaataattacatttttcattatatggatgatataccgattgctgcccccactaaagatgaattaattcartgttttacctttttaaaattagctgttgccaaagcaggactccacattgctcctgacaaaattcaacaagccactcctttctgtacttaggaatgcagctagaagctcactccattaagccc

SEQ ID NO: 343021 - DNA, 589 bp, Homo sapiens
aattttttggtgaccatgtacttataaatttcattaaatctatgtaaatgagaaatatctattacacactgccaactggcattttctagaatagaaaatctttaaaaaaaatattggtaaattagtggtgggaaatgtgctatgccagagtttctcctgcagaggggagagtgctgcagcagcatagttacaagggaggtccactcacctgctaccctcatacaggatcttgcatttgaactttcagagacaggagctaaaatttctggtcttacagtggcaactcaagctaataacaataataacattaataataatcaccataatgaaaatcaacattcattaaacacttagtgtgtgtcaatgtgttaatcaatttcaatacataatttagtttcacaccaatgatggaacgtgggattattatattcatttgacaaatgagaaaatgagtcyaaattagcaaataagagagagtggattaaaactcaggtatgtcttttaggattattgatcttaaccacaacattacaccaatataatgaaggtaggggttgatatcccttgttggcattagtatattgtacac

SEQ ID NO: 343022 - DNA, 630 bp, Homo sapiens
actcatactaatgccagaaaaacatttctctggtaactgccccagggtaaaccaaggaagggaagtatggtggaaagatgttcaatctaatatatggtcaaaaggttctattttaacgtggggaagaggctatgcttgtgtttccccaggtgaatatcaatctcctgtttggattcctgctagacacctgaaattatgtcctgaaaatgcatacaacaacaagacagagaaatttgctgaaaaagcaccacagcaagaaacaactaacacatccaatcatcaaaaagaagaaagtgaccatgctaactcctttacaacagacaatccagtcagccatcctgaacaacttgtctctgcagatccaggtctggctcagcctctgcctcctcctgatgacactgatccttctaccctctgtcacccaacagactgttaaaaactatacatattgggcctatattccttttccctctcttatttgakccatgacatggatggacgtgcctatcaggtctatgttaatgatagtatttggatgcctggttctgtagatgatccatttcccagcttgttattggcctattcagggatttgacttcttcctggtttagtcttgggagggcgtatgtg

SEQ ID NO: 343023 - DNA, 526 bp, Homo sapiens
cttactccattatagcccccctactaggaacagtggtgaagggaaatccaccctcctaatggacagaaatgagagcagttcgttccatcattcacctcatggaggaagttgggaataagtggtctaaggagtgtgtgtgtgtgtgtgtgtgtgtgtgtggtgtgtgtatccacacacatacrtaccttagcagtggaaataaaatagcctgattgaccgagcagatatgtaaatgaacaagactagaagatcaggaccaggagatctggagaagagggtggtagaaggacctatggggaagggcgcaaagagtgcagacttttttaatgtccaccattgcagatgagaatctcacaaatcaatggacagaatgacatgaactgcatgtcatttggtctcttagtaactttagtccttgtgtaacgggttcataaaaagagtagctacggtagcagggatgaaggttatgcatggactcaattgcatagtcttccttttgccagagtttgcagtctcccttctacca

SEQ ID NO: 343024 - DNA, 526 bp, Homo sapiens
cttactccattatagcccccctactaggaacagtggtgaagggaaatccaccctcctaatggacagaaatgagagcagttcgttccatcattcacctcatggaggaagttgggaataagtggtctaaggagtgtgtgtgtgtgtgtgtgtgtgtgtgtggtgtgtgtatccacacacatacataccttagcagtggaaataaaatagcctgattgaccgarcagatatgtaaatgaacaagactagaagatcaggaccaggagatctggagaagagggtggtagaaggacctatggggaagggcgcaaagagtgcagacttttttaatgtccaccattgcagatgagaatctcacaaatcaatggacagaatgacatgaactgcatgtcatttggtctcttagtaactttagtccttgtgtaacgggttcataaaaagagtagctacggtagcagggatgaaggttatgcatggactcaattgcatagtcttccttttgccagagtttgcagtctcccttctacca

SEQ ID NO: 343025 - DNA, 526 bp, Homo sapiens
cttactccattatagcccccctactaggaacagtggtgaagggaaatccaccctcctaatggacagaaatgagagcagttcgttccatcattcacctcatggaggaagttgggaataagtggtctaaggagtgtgtgtgtgtgtgtgtgtgtgtgtgtggtgtgtgtatccacacacatacataccttagcagtggaaataaaatagcctgattgaccgagcagatatgtaaatgaacaagactagaagatcaggaccaggagatctggagaagagggtggtagaaggacctatggggaagggcgcaaagagtgcagacttttttaatgtccaccattgcagatgagaatctcacaaatcaatggacagaatgacatgaactgcatgtcatttggtctcttagtaactttagtccttgtgtaacgggttcataaaaagagtagctacggtagcagggatgaaggttatgcmtggactcaattgcatagtcttccttttgccagagtttgcagtctcccttctacca

SEQ ID NO: 343026 - DNA, 598 bp, Homo sapiens
taacaaagagtgagtacagctgaaggagctggggagcagaaagtatatgcktcaggtatgaggaagaaaatagattttggaagttatgagaaatgtagagagtaagttgaacatagtttgtgatttttttgttctctaaaagtattagggcagcaggagccgctgcacggagacatgatggctaggctaaaacagtaaggtcaagttgtttgcacagaaaggctacagggtgcggtcctggctcttgtgtaagaattctgaccgcactaaccatgcctaggaaggaaaggagttgttgttttgtaagggattgaggtttgggagattaatcagacacgatcagcaggcagagcatgtgtgtttttatgagaattatgctgagataggtaacagatgaggatgaaatttgggcttgactgaagatatggggtctgtctgtgaagccttgcggcagtacagcccaggtaattttctgagtctgatgggtgtcagggtcagtccaagtgaaagagaagagaggctgggatgacaggtgcaaaggaatagtaaagaaagcatgtttgagatccagaacagaataatggattgtggagggagg

SEQ ID NO: 343027 - DNA, 598 bp, Homo sapiens
taacaaagagtgagtacagctgaaggagctggggagcagaaagtatatgcttcaggtatgaggaagaaaatagattttggaagttatgagaaatgtagagagtaagttgarcatagtttgtgatttttttgttctctaaaagtattagggcagcaggagccgctgcacggagacatgatggctaggctaaaacagtaaggtcaagttgtttgcacagaaaggctacagggtgcggtcctggctcttgtgtaagaattctgaccgcactaaccatgcctaggaaggaaaggagttgttgttttgtaagggattgaggtttgggagattaatcagacacgatcagcaggcagagcatgtgtgtttttatgagaattatgctgagataggtaacagatgaggatgaaatttgggcttgactgaagatatggggtctgtctgtgaagccttgcggcagtacagcccaggtaattttctgagtctgatgggtgtcagggtcagtccaagtgaaagagaagagaggctgggatgacaggtgcaaaggaatagtaaagaaagcatgtttgagatccagaacagaataatggattgtggagggagg

SEQ ID NO: 343028 - DNA, 598 bp, Homo sapiens
taacaaagagtgagtacagctgaaggagctggggagcagaaagtatatgcttcaggtatgaggaagaaaatagattttggaagttatgagaaatgtagagagtaagttgaacatagtttgtgatttttttgttctctaaaagtattagggcagcaggagccgctgcacggagacatgatggctaggctaaaacagtaaggtcaagttgtttgcacagaaaggctacagggtgcggtcctggctcttgtgtaagaattctgaccgcactaaccatgcctaggaaggaaaggagttgttgttttgtaagggattgaggtttgggagattaatcagacacgatcagcaggsagagcatgtgtgtttttatgagaattatgctgagataggtaacagatgaggatgaaatttgggcttgactgaagatatggggtctgtctgtgaagccttgcggcagtacagcccaggtaattttctgagtctgatgggtgtcagggtcagtccaagtgaaagagaagagaggctgggatgacaggtgcaaaggaatagtaaagaaagcatgtttgagatccagaacagaataatggattgtggagggagg

SEQ ID NO: 343029 - DNA, 513 bp, Homo sapiens
ttgtctttttcttattttcakaattagaaatggattccactgtgtcttatccaagagaaagaaaaagggtctctatttctaaaatagagcactccttctatcttatcatatttatctaaatagatgggtatagtggtttcagagcttcacacctttccagaaagcatgagaactaaattgtgcctgtcttttctataacatttatttttcaagtcatgttctaactaggctgccattatggacattaaatacaccaaaaacccttggctgatcagaagcatactgatcttactttattcaataaagatttacaaaatgctgaacatttgccagttcttaaatcacgcaatcagaattaaagaagacatggttcctttccttaaagagcttatagtggggaataaaatcagccaatagtgagaacaaagtattatgagtggtgatggtaacacaaggaccacagaaaagggccatgatacccccttggtgagagctgagaatgtcgaaaaaggc

SEQ ID NO: 343030 - DNA, 574 bp, Homo sapiens
ccatgtttggtttcctgtagaaactaaagttaacatcttaacatatatcccagagttgtttttcagaaacctagatccccaccaaatggatctgctggcacaaagacctcagataaaagggaactgagaaccgaacyctgtttgtactaaatttcttcctgagggtcctggaggaagttatactcatcggccaaactttagcattcttttctggtgaccctaaatttttagacaaagctcagtttccttaaccaatcacaaataagagggtctttaaatctacttataacctgtaagcacacctgcctcaagatatcccacctttttaggccaaaccaatgtataatcttcatgtactgatttactgttttgcctgtaatttgtgctttcctgaaatttgcccccacctttaaaagtccttgcttgtaagccatcaaggaggtcaggtgttaagtgctagtcgcccagtcaattccctttgcttggtgccctgtaaataaataccctcctttcagtgtggatatttggcttcactgtgccgggcgagaaggcctccgttcagttcagtaaaaag

SEQ ID NO: 343031 - DNA, 574 bp, Homo sapiens
ccatgtttggtttcctgtagaaactaaagttaacatcttaacatatatcccagagttgtttttcagaaacctagatccccaccaaatggatctgctggcacaaagacctcagataaaagggaactgagaaccgaactctgtttgtactaaatttcttcctgagggtcctggaggaagttatactcatcggccaaactttagcattcttttctggtgaccctaaatttttagacaaagctcagtttccttaaccaatcacaaataagagggtctttaaatctacttataacctgtaagcacacctgcctcaagatatcccacctttttaggccaaaccaatgtataatcttcatgtactgatttactgttttgcctgtaatttgtgctttcctgaaatttgcccccacctttaaaagtccttgcttgtaagccatcaaggaggtcaggtgttaagtgctagtcgcccagtcaattccctttgcttggtgccctgtaaataaataccctcctttcagtgtggatatttggcttcactgtgccrggcgagaaggcctccgttcagttcagtaaaaag

SEQ ID NO: 343032 - DNA, 578 bp, Homo sapiens
cttggaggaggagaccagagcacataatcctaagagcaaaagaaagggagggaccaagccaacctgttccttctttcacatttctcactgaggaaggataagtgagagggtaagtggagagaggctggaaatgttccagtgatggatggttctcgttccacagcagagggaaatctgtcctcaacatggggtcgtggaaacataaaacaggtgagctcaatatttggatgaggcccatattgtccaaaattgccttagtagttttgactaagacacatttaaagtcacgtgatgtttgcctcacaatcttctcttcttcttggagtacatgtccacccaaacactgggaataattttctttcaattgatgtattttggtacttctcttccaatggtggaaartaatgctttggttattatgaggttgatctacatgaaactgatgatacttgatttttcacccaccacgaacatcaacttaatgtagctcaccctaataaatacagatagaacatgatgcagaatatttataagagaatgaggaaagagaaaaagtgtttgaatattaatcaattaat

SEQ ID NO: 343033 - DNA, 578 bp, Homo sapiens
cttggaggaggagaccagagcacataatcctaagagcaaaagaaagggagggaccaagccaacctgttccttctttcacatttctcactgaggaaggataagtgagagggtaagtggagagaggctggaaatgttccagtgatggatggttctcgttccacagcagagggaaatctgtcctcaacatggggtcgtggaaacataaaacaggtgagctcaatatttggatgaggcccatattgtccaaaattgccttagtagttttgactaagacacatttaaagtcacgtgatgtttgcctcacaatcttctcttcttcttggagtacatgtccacccaaacactgggaataattttctttcaattgatgtattttggtacttctcttccaatggtggaaagtaatgctttggttattatgaggttgatctacatgaaactgatgatacttgatttttcacccaccacgaacatcaacttaatgtagctcaccctaataaatacagatagaacatgwtgcagaatatttataagagaatgaggaaagagaaaaagtgtttgaatattaatcaattaat

SEQ ID NO: 343034 - DNA, 556 bp, Homo sapiens
tcaaattcttatacattgaatctttctttcctagtgacaaagtatcagagctataaactatcaggaaaaaagtgactcctagagataaaaaatgtatgatccaggatattattagttttagcagcagtatttaaagggaaagtactaaatatatctttgacattatttcaccttgcattaaattagacttgtggtaaggcaaaaattatataagttcatgaaaataacttaatttattttggttatgtttttatgtttgcaagggtgggaccagggtgatttcaatgatcactgtggcatattgagcatgccaccccaggcattcagaattgccattcctaagttttgtgggtgtttagcattcraaatacagctttcagtctgtgacatggaaatcttttgatgtcttaggcttctgaattgagaaggagtggggccttaaatgggggacaagaattcaactaatcagaacagtgtaagcctcattagaaactagcaaattggcttatggaccgtgtgcctcaatctcatatgtttgattacctgagtcagcctt

SEQ ID NO: 343035 - DNA, 606 bp, Homo sapiens
tctgcaactcagctccattctgatcgaaactgaaacaatagctagcttacaaacaataaatgagaactgtggccacaaatctaatgctgcacttgaggtgacaatgatgtgacaaatctttcttcacagcttgagttgactgttttatttggtcataattttcatggacttatgttggtatttgtatatttctactccatctcccttttgattaaaagggtattagaatacagaggggtgtgtgtgtgtgtgtgtgtgtgtgtgtgtgtttatatgtgtatgtgtgcatgcaggcatgaatgtrcacattggaaggcaaaattggcatcagccaagcattaaaattccttctttcatctttcaattgtgtcccaaagaactgtgtttatgcctcaatataccaactcttaaactacccatccccctagaaaaatgcatttaaggttagagatgacctcaacttttatttggcatacattagagggcctaaaaattgttttgtatataacaagtgctaattagtgtgcccatgttgtttatcatatacctttgtctattacaatttcataaaaacagaataaaacaaggactatctagggcaaacca

SEQ ID NO: 343036 - DNA, 606 bp, Homo sapiens
tctgcaactcagctccattctgatcgaaactgaaacaatagctagcttacaaacaataaatgagaactgtggccacaaatctaatgctgcacttgaggtgacaatgatgtgacaaatctttcttcacagcttgagttgactgttttatttggtcataattttcatggacttatgttggtatttgtatatttctactccatctcccttttgattaaaagggtattagaatacagaggggtgtgtgtgtgtgtgtgtgtgtgtgtgtgtgtttatatgtgtatgtgtgcatgcaggcatgaatgtayacattggaaggcaaaattggcatcagccaagcattaaaattccttctttcatctttcaattgtgtcccaaagaactgtgtttatgcctcaatataccaactcttaaactacccatccccctagaaaaatgcatttaaggttagagatgacctcaacttttatttggcatacattagagggcctaaaaattgttttgtatataacaagtgctaattagtgtgcccatgttgtttatcatatacctttgtctattacaatttcataaaaacagaataaaacaaggactatctagggcaaacca

SEQ ID NO: 343037 - DNA, 520 bp, Homo sapiens
gtggttattggactaaaatctctgtttccttgctgccagccaaggggcactcacagctcstgagtggaccttgcccatgtggtcccctccatctccaaagccaaaaatagagacttcacatggaatctgtcttgcatttcaaatctctctctccagaaagagcccaagtcatctaaataggtcaagtctagccaagataatctccttttcttaatttcaactgtgccacataaacaacctaatgacaatgtaaaatccattatagccacagtcttgggaattacacaggaatcttgggtgccatcttaaaattctgcctactttccaaaatgatcaagtgtattctttatccttaaaagactggaatttgatggctgggtgcggtggctcacgcttgtaatcccagcactttgggaggccaaggcaggtggatcacttgaggtcaggagttcaagaccagcttggtcaacatggtgaaaccctgtctctactaaaaatgcaaaaattggccaggtgtggt

SEQ ID NO: 343038 - DNA, 593 bp, Homo sapiens
atcaaatttgtcaatgcacagttagagggtgggcagaaagacaaaattaagaaggagatagaggcaggaaagtctaagactaagataaattgagtcaatctacataagaaaacatttgaagagaaaggggtgatggaagaaaaaaattgtgtgtaggctgaaagaaaaaacagagggggtcagaagaagaagaagaactagggagaagcataataaatctatgagaaataatgagcatgcataaaactataagcaaaattgggggtgaacatatttttcctaaaaaggtatatttatacttttgaaaaggtcttgaaaagggttatttgactccaaatatttgtggraaagataccatgagtgtggtatcttaaatcataatcatgatcaaatcataaaagttctggattcttctggggaagatagatagagagttgctactgttacagtaaaggactccagcatcactggcataaagggccctggagatataagtcaatggcttcatggttatgcatgggatagaacatacctagcagatacaacataaaaatgtaatcaatctctgttgattgaaaaatctggccttagta

SEQ ID NO: 343039 - DNA, 266 bp, Homo sapiens
ttcagctgcctacactgatctcttcttatctttgattttcagcagtttrtctatgacgtatacagatatgtttacaccgtaaacattctttgtggggtactctgagcttcatggatctgttatttgttgaatgatctgttttgaacaacatagatctgtttttcattaattttgaaaaatcctcagccattatttatacaaatatttattctgcttatttctatatcttttctccttctgagattccaattagttaatattttaga

SEQ ID NO: 343040 - DNA, 555 bp, Homo sapiens
ctttaaggcctgttcttcagccatgaaagaatggcacctgtccttcctctaaaactcatgggagctctcatctaacccttctccttatctcattgttatttgcatattgatttactgttccctttaccaaaaagaaagaccttcaccataggaattatctcttaaatatatttaaacttgttattcattaaatttattttgattccatgttttccaaaagtttttttttttttaaactctattgggaaagcactacagtaatgaatcaatacagtagagttaatgcaactaagagaaaatagggctcaggaaagcaggaagccaataagccaaccacagtaaccgtgcttaaatctcaacttggcrctgaacaacctgggcctccagaacaaagtggcatattattatctagccctcattatcataaaagagaagaacaatggttcctttgcagaaaactgattcaccttggccataaagttcaagaaaactctcatactgtactttacatagatgttagtcagtagcataattgtatccttaactaactccatg

SEQ ID NO: 343041 - DNA, 555 bp, Homo sapiens
ctttaaggcctgttcttcagccatgaaagaatggcacctgtccttcctctaaaactcatgggagctctcatctaacccttctccttatctcattgttatttgcatattgatttactgttccctttaccaaaaagaaagaccttcaccataggaattatctcttaaatatatttaaacttgttattcattaaatttattttgattccatgttttccaaaagtttttttttttttaaactctattgggaaagcactacagtaatgaatcaatacagtagagttaatgcaactaagagaaaatagggctcaggaaagcaggaagccaataagccaaccacagtaaccgtgcttaaatctcaacttggcactgaacaacctgggcctccagaacaaagtggcrtattattatctagccctcattatcataaaagagaagaacaatggttcctttgcagaaaactgattcaccttggccataaagttcaagaaaactctcatactgtactttacatagatgttagtcagtagcataattgtatccttaactaactccatg

SEQ ID NO: 343042 - DNA, 603 bp, Homo sapiens
ggccagcagctgcttcgtccgatggagtgtgatgaaagtgatgcgagcctagcctagctagtmctgagcctagcctttaaaagagctggcacctcccatgttggtctcttgggcccctgaactgccatataagatgtctgactgtcttgagagtcaccatgctgggggaatgtcaaggaccaaggagagtccattgaggtcactttcatgggttctttggagacatcattctactcaccaccctatatagggaacagttattaaatactttgactaaggaactccgcggtccctttgtcctcctcaccattagacattttggatctattcatccagcgtatttttgctgagctttgttgattcctcaggtggcatttagagataggattaaagatactatgtgttttctcacaaagtccccattgtatccaagcaatgcacttaggtatgcagtgcctcacaaactcgaaatttacaagtgagaccaatacagcagcagcagatttttattctattccaactccaaaaggctggctggactatttgtcctatacatatagcttcatataggaaatacatactaatccactgggatgtcaaaat

SEQ ID NO: 343043 - DNA, 444 bp, Homo sapiens
cattttctactgccagcccttattctaagtatagatatcttttggttatatttgtatttttgataatgagttttttttgataatgagttttttaattgcctataagctcgaattcggcaatatgttagaaaagatttagttctcatactatttgaggcagccaagttaattctagaaatatttyctaaatggttgaatgtgatcaactcattctaaggatgtctacctcaatgtaatttagaatagtaaaaagtcaaaaaggaaataaatatccaaagtagaattaaataaatcaagttttgcttaattacatagtggaatacttcaaagcaattaaaaatattttcatagaggaatatttaataatatggaaaatgtttatgatatataaaatgaagcagaacactaaaaattatgtataatataccatataatcctgtttta

SEQ ID NO: 343044 - DNA, 582 bp, Homo sapiens
tctcagatttatattttagattctaattccttaacattttcctcttggttggcttgagcctgtttttattatggggctacaagcatggcagcaggtgaaataatgccaaccaaggcgagcagtcttaaggaaaagacaaaacaaaacatttgtactcctcagtccttagagcyaagaaggtagactaagataagacttaaaatacagggtttcctcattggtttacacatacaaatgcttgatgatacaagcagaaatttttccttttctaattttaaatcattgttggaccaaataaaaaaggacaatgacaggctctgaatccgaataatccgaatgatataataaaacacaagccagacctgcatctctaggcaaaggaggcaaatgcagtattttcttttggaaatatttggtggttaatcagaacaggtcagaggcattctgaaatgcttgcttccaaggaagccctgaaatcaaattaagcctgctggataaagcacgaggaaaagatgtgttatacaaaatttgagtgttgtgaaaatgtttttttgttttacttaccctttctttcttccaaaa

SEQ ID NO: 343045 - DNA, 612 bp, Homo sapiens
tgaatagctctttttaagcttgtattgggatcatcagtcatctactcactggtagaaggtaaataagcagacaaatgtcctttgtgctagtactctcttatctccttgttaatctgtaattagtctaggaagcagcatatatgatttgggatcagaatcagttttatctccaacattagaatggtaaatcttttcattaacagaaacagtacatggaacagttattggactttttcttattgggtcacattggatatttatttcagattgcagttatgcatggacgggtatcatatggtgctttgatgacctttagaaattctcttgattaaacgctgttgtacttcattatgacatttctttccttgtactaccagatttgatgtgtatggcttaataacgcaagtagacatgaatgttaataacttcacaattcattgctttgctattttttaatgctcatgaaatttagaacaagtttcactggctggrggcttacatgaatcatataaattagagggtaacaaaagaacatattagcatttgttagcctagatgcacgaattttgtactaaccattttaatatgtactacaacttttccaccctcaag

SEQ ID NO: 343046 - DNA, 448 bp, Homo sapiens
taccagtattcaaacaggaattttctgctaatatagaatcaggaaaaattctgactaaatgtgtaaaacttatgaactttattttgtaagagttttggcacttttttgaaaatctgccccacttgcctgtgaatcttctagaccaagattgtccarcccacagccagagagccacatgtggctcaggacagctttgaatgcagcccaacacaaattcataaactttcttaaaacattatgagattattttgtgattttttttaaagctcatcagctatcgttagtgcattttatgtgcagcccagaacaattcttcttcttccactgtggcccagggaagccaaaagattggacacccctgctctagacaattgtaagtgttctgcttatagtttataatctcacatatttttattatgcaaaggagaacttttggtcaaggaaattc

SEQ ID NO: 343047 - DNA, 602 bp, Homo sapiens
acataacaatataatattgaactttaccagtattcaaacaggaattttctgctaatatagaatcaggaaaaattctgactaaatgtgtaaaacttatgaactttattttgtaagagttttggcacttttttgaaaatctgccccacttgcctgtgaatcttctagaccaagattgtccaacccacagccagagagccacatgtggctcaggacagctttgaatgcagcccaacacaaattcataaactttcttaaaacattatgagattattttgtgattttttttaaagctcatcagctatcgttagtgcattttatgtgcagcccagaacaattcttcttcttccactgtggcccagggaagccaaaagattggacacccctgctctagacaattgtaagtgttctgcttatagtttataatctcacatatttttattatgcaaaggagaacttttggtcaaggaaattcctagacrtcgaaaaccaaaaatcaaagaaagaccttccctggcgttctaggttgggtttcagacgagttaaaaagtagatgattttgttgtgttttaaaacattgtgtcaatttcctttgataagaaatt

SEQ ID NO: 343048 - DNA, 384 bp, Homo sapiens
  misc_feature (1)...(384): n = A,T,C or G
atccaatcggtggtgtccttgtgatagtgagttcctatcagatctggtcatttaaaagtgtgtggcaccatccccacctctgtcttgctcctgcttttgccatgtgacacagctgctctccctttgccttctgccatgattgtaagtctcctgaggcctccccagaagctgagcagatgctgccatgcttcctgtacagcccacagaaccgtgagtcaactaaatgtttttttkttttttttttagtatactttaagttttagggtacatgtgcacaacgtgcaggtttattacatacgcagccataaaaaatgatgagtcaattaaatctttataaattactcagtctcgggtatttctttagaaagaatggcttaaaatncc

SEQ ID NO: 343049 - DNA, 586 bp, Homo sapiens
ttaactgtgacttgatgttttgatagaggatgcttcagaacaggttcctatcaagattagagaaaacaagttacagaaaaacccattcttttcttagactctcctatgcttttttagcataaacaaaagatttgtttatctttccattttcatcattgcaatattacctgtacgttgtcttacctatatttaatgtctcattgtccatataatattttcaagaaataataagaacatgggactttgatcataaaacatctagtgtggctttgtggtgtctgtatttgggaagcttagtcttaattccttctatggttaacaacctctcatcttttggctgggcacggtggctcaatgactataaatcctagcactttgggagccgaagtgggcagatcacttgagcccaggagttcgagaccagcctagacaacatgacaaaatcctgtttttaccaaaaatacaaaaattagctaggcatggtggcrcaattgtggtcccaactactcaggaggctgaggtgggaggattgctgacgcctgggaggcggaggttgcagtgagccaagatcgcacaactgcactcc

SEQ ID NO: 343050 - DNA, 622 bp, Homo sapiens
agacttaaataagtatatattctacaattcaaaaaataarcgtcctttcagattgcttccaagatcagctgattgttatatgtgcattataacatataaatttcatttatggagggagtataaaagatgaaaacatggactcaaaatcaaagatctttaatcttataatatacttgcctaaggccccatcaagtagtatatttaaactttaagctttgcagtattcatttgcaaaatggtcttatgatatccttattaccagtagctacaatgggttgctgtgagacttgagacaaaatatatgaagaatttatcagagctcaccatataataatcttttggttcatcttattgtaattcccattcttgctctccgtgagctagccccataagacacagtaatttactcctctatgttttatggagggtaaagatggtctgctgccactgttgtcaatgaatcaaatttatcccatgtatttacccttcctaggttcatgactcctagtcttcagataggtaaactgggcctttaatttatgcacttgaaattatgatgcataattatgcaccaggtctcaggaaaatctaagactcaataaagactcatctgtcagataac

SEQ ID NO: 343051 - DNA, 622 bp, Homo sapiens
agacttaaataagtatatattctacaattcaaaaaataagcgtcctttcagattgcttccaagatcagctgattgttatatgtgcattataacatataaatttcatttatggagggagtataaaagatgaaaacatggactcaaaatcaaagatctttaatcttataatatacttgcctaaggccccatcaagtagtatatttaaactttaagctttgcagtattcatttgcaaaatggtcttatgatatccttattaccagtagctacaatgggttgctgtgagacttgagacaaaatatatgaagaatttatcagagctcaccatataataatcttttggttcatcttattgtaattcccattcttgctctccstgagctagccccataagacacagtaatttactcctctatgttttatggagggtaaagatggtctgctgccactgttgtcaatgaatcaaatttatcccatgtatttacccttcctaggttcatgactcctagtcttcagataggtaaactgggcctttaatttatgcacttgaaattatgatgcataattatgcaccaggtctcaggaaaatctaagactcaataaagactcatctgtcagataac

SEQ ID NO: 343052 - DNA, 529 bp, Homo sapiens
cattttatgcataaggggaatttcatcacctcaaggtatgtagaggatgctgaatattttttggctgtccagaattgattcctcattctttggcaactaacattgatcttccttgaggaattctttgcycctattgaatgcagtcttggtagggctatgaatcacggtgtcttgtcgtatcctagccatgggctagacatataagttggtatttttgaaacatgactgtgtaccagttacctagcggattctttaaaatgcccactgccgggcccaccatcagattaggtctgggatggggcataaggatttgcatttttatcacattctcaggtgatactggtgctgctgatacagggactgcgctttgagagaaaatgttctaagctatgtccattggactctccctcttcagactctgatttacaacagaaagaccaaaataatcattacttcactcatcccagcacttgctccaacaacatggtacaatgcctgctgccaagatttctggagccagtttcctata

SEQ ID NO: 343053 - DNA, 529 bp, Homo sapiens
cattttatgcataaggggaatttcatcacctcaaggtatgtagaggatgctgaatattttttggctgtccagaattgattcctcattctttggcaactaacattgatcttccttgaggaattctttgctcctattgaatgcagtcttggtagggctatgaatcacggtgtcttgtcrtatcctagccatgggctagacatataagttggtatttttgaaacatgactgtgtaccagttacctagcggattctttaaaatgcccactgccgggcccaccatcagattaggtctgggatggggcataaggatttgcatttttatcacattctcaggtgatactggtgctgctgatacagggactgcgctttgagagaaaatgttctaagctatgtccattggactctccctcttcagactctgatttacaacagaaagaccaaaataatcattacttcactcatcccagcacttgctccaacaacatggtacaatgcctgctgccaagatttctggagccagtttcctata

SEQ ID NO: 343054 - DNA, 529 bp, Homo sapiens
cattttatgcataaggggaatttcatcacctcaaggtatgtagaggatgctgaatattttttggctgtccagaattgattcctcattctttggcaactaacattgatcttccttgaggaattctttgctcctattgaatgcagtcttggtagggctatgaatcacggtgtcttgtcgtatcctagccatgggctagacatataagttggtatttttgaaacatgactgtgtaccagttacctagcggattcttyaaaatgcccactgccgggcccaccatcagattaggtctgggatggggcataaggatttgcatttttatcacattctcaggtgatactggtgctgctgatacagggactgcgctttgagagaaaatgttctaagctatgtccattggactctccctcttcagactctgatttacaacagaaagaccaaaataatcattacttcactcatcccagcacttgctccaacaacatggtacaatgcctgctgccaagatttctggagccagtttcctata

SEQ ID NO: 343055 - DNA, 529 bp, Homo sapiens
cattttatgcataaggggaatttcatcacctcaaggtatgtagaggatgctgaatattttttggctgtccagaattgattcctcattctttggcaactaacattgatcttccttgaggaattctttgctcctattgaatgcagtcttggtagggctatgaatcacggtgtcttgtcgtatcctagccatgggctagacatataagttggtatttttgaaacatgactgtgtaccagttacctagcggattctttaaaatgcccactgccgggcccaccatcagattaggtctgggatggggcataaggatttgcatttttatcacattctcaggtgatactggtgctgctgatacagggactgcgctttgagagaaaatgttctaagctatgtccattggactctccctcttcagactctgatttacaacaraaagaccaaaataatcattacttcactcatcccagcacttgctccaacaacatggtacaatgcctgctgccaagatttctggagccagtttcctata

SEQ ID NO: 343056 - DNA, 580 bp, Homo sapiens
aattcatatttccataatatgytacaagtattaacagtaaatggatctgtaagccaaagcatccttgaaataaatgctaagggaaaagccagtgtgtatcaaatgaaataggagaggatatgattaacttttcccctgtattttcttagatgatgacactaatggaatttttgatgtaatttaaaaaccactctgcactaaagaaagaaaacactacctgatttgataacccataccagataaaaataaacaagcagaaagatcatcactaattacaggtaggctgaaaatacattgtgatatctaccacatgctaaaatcaaggtttaaaataaacttcggaattaggggaacctcttgaaccttgcaaatattgtacaaactttcagtataataaattataagcaaataatgaattcgctagtaagcaatctcaatgtaaaagaagcataattttccagtttaagaaaaaaaattacattttgatggctatttggaaccgaggttgagtaagcagtcctctttttttatgactttacacagcctgttattgcagtgcttccaatattaatcattcatt

SEQ ID NO: 343057 - DNA, 580 bp, Homo sapiens
aattcatatttccataatatgctacaagtattaacagtaaatggatytgtaagccaaagcatccttgaaataaatgctaagggaaaagccagtgtgtatcaaatgaaataggagaggatatgattaacttttcccctgtattttcttagatgatgacactaatggaatttttgatgtaatttaaaaaccactctgcactaaagaaagaaaacactacctgatttgataacccataccagataaaaataaacaagcagaaagatcatcactaattacaggtaggctgaaaatacattgtgatatctaccacatgctaaaatcaaggtttaaaataaacttcggaattaggggaacctcttgaaccttgcaaatattgtacaaactttcagtataataaattataagcaaataatgaattcgctagtaagcaatctcaatgtaaaagaagcataattttccagtttaagaaaaaaaattacattttgatggctatttggaaccgaggttgagtaagcagtcctctttttttatgactttacacagcctgttattgcagtgcttccaatattaatcattcatt

SEQ ID NO: 343058 - DNA, 542 bp, Homo sapiens
ccccattcatgagggctttaccccaaygccctattcacttctaaaagtctccaccttctaagaccactactgtgggagttaggatttcaacatgcaaattttgagaagacacaaatatttagacatagcaacatgctatgaaatgagaaaaaaagcaatcatataaaattctcaattaaaccacaaatggaagcaagtgaggaaggcaaaaaaggaacaaagaacaagattaaaaaatagaaaactgtaagaaatatgatagaaattaatgcagatatctcaattactacttgaatatctataatctaaatgcatcaattaaaagatagaaattgccagaatgtatcaaaaagcctagacccaattacatgttgtctacaaaaacctatgttatatatgaagacacacatagattaaaagggatagcgaaatatatactatgattgtactaatcaaaagacagcaggagtagctatattaatttcaaatatagcagaattcagattaaggaaagttgtcagggctaatgaggggcattacat

SEQ ID NO: 343059 - DNA, 542 bp, Homo sapiens
ccccattcatgagggctttaccccaacgccctattcacttctaaaagtctccaccttctaagaccactactgtgggagttaggatttcaacatgcaaattttgagaagacacaaatatttagacatagcaacatgctatgaaatgagaaaaaaagcaatcatataaaattctcaattaaaccacaaatggmagcaagtgaggaaggcaaaaaaggaacaaagaacaagattaaaaaatagaaaactgtaagaaatatgatagaaattaatgcagatatctcaattactacttgaatatctataatctaaatgcatcaattaaaagatagaaattgccagaatgtatcaaaaagcctagacccaattacatgttgtctacaaaaacctatgttatatatgaagacacacatagattaaaagggatagcgaaatatatactatgattgtactaatcaaaagacagcaggagtagctatattaatttcaaatatagcagaattcagattaaggaaagttgtcagggctaatgaggggcattacat

SEQ ID NO: 343060 - DNA, 634 bp, Homo sapiens
gttgtttctttacttccctgataaacttgttttctctttactctgtggactcaccctaaattcttttcttgcacaagaattaagaaccctctcttggggtctggattgggattcctttccagtaacaacagcaggttacacatttttmtcaagctcatatggaatgttcaccaagaaagaccacatactgggctagaaaacataccttaaaaatgtaaatgtataaaaaattcgtacaatgtctcctctcagaccgtaatagaattaaactaaaaatcaataacagtagctagaaaatcctcaaatacttggagattaaattacactcttctaaataacacatggatcaaagaaaaaatctcaagtgaaattgaaaaagatcttgtggtgctgggataattggttattcatatgcagaagaatgaagctggacccttcccctatcaccatacacaaaaattaagtcacgacggattaaagacttaaatgtaagacatgaaacaataaaaatcctaggaaacaccctatgaaaatattttatatggaaataccccataaaaacataggaaatactctttttaatactggccttggcaaataatttattactatgtcctcaaaggcaattgcaacg

SEQ ID NO: 343061 - DNA, 570 bp, Homo sapiens
gcagcagctgtggaatgccaattacagtgagagctatttgaagggcagagttgagatttttatttctttgaattagcactcacccctattgtcatattctgtggtctatgaggggggatgaaatcaatattataactcgtatgctcacatactatctcatcatggtttttcctccagtaaggaatgctgttaagatgtgaagtgacaaactcaagggggcataaatgttttacctcttactatgaggtcagcagcagatgaaacactgtccacccccgtttgcaccatacaaacatatttcccactgtgtttcagctgaatgtttctgatcattaaatcaccagatgaactctgttgggaaaacaggtaatgaatacactgttatttttttaaaaaacacaaagaagtttgaagtctatggccaaaaacaacaacattgcaatgaaaactatayttagggagcaaaccaaggtggtataagagagtagattgctacaatggaatgtatggaaatataaacaagttaaaaaccatacatgactgcagtcaaagatttctgtagccaaataa

SEQ ID NO: 343062 - DNA, 658 bp, Homo sapiens
ccctctctccctctccttctcctagggttatttagaaatgtatccccaggacaaaaacctttaatgcttgctgacctttagaaactcttaggtcttacgagcttcatatattcataggaggttgattatcacttctatggaaatctctcattttcggtgaaaaactgttactattaaatgccatctaaggcattggggtaaggttgttawtcttgccaacctttatttgcttattttgaaggcatctgggtaaaagagaactgtgtcaggattttatgtcctcacatatctggatacaccttttaggcacaatggctggctttgtttcttgaaggagtaaggaaaagtttggtggtggacttttgacttctgttcactcttggcactgacaggtgaagacaaatagctgcatcataaaaaatgaagccatcttcctaaagaaatgtagtcaggggaaatataatttttaattatccttttacactgcacagtagaaaaaggaagcaattaactaaaacaagtagaaatggaaatgattttttttcagccccaacatggaattgagtgtatgaatacataaaaggagaacacaatttgacagagaataagagagatcctctccttattttttgtctccattaataaaatatatttgtat

SEQ ID NO: 343063 - DNA, 658 bp, Homo sapiens
ccctctctccctctccttctcctagggttatttagaaatgtatccccaggacaaaaacctttaatgcttgctgacctttagaaactcttaggtcttacgagcttcatatattcataggaggttgattatcacttctatggaaatctctcattttcggtgaaaaactgttactattaaatgccatctaaggcattggggtaaggttgttaatcttgccaacctttatttgcttattttgaaggcatctgggtaaaagagaactgtgtcaggattttatgtcctcacatatctggatacaccttttaggcacaatggctggctttgtttcttgaaggagtaaggaaaagtttggtggtggacttttgacttctgttcactcttggcactgacaggtgaagacaaatagctgcatcataaaaaatgaagccatcttcctaaagaaatgtagtcaggggaaatataatttttaattatccttttacactgcacagtagaaaaaggaagcaattaactaaaacaagtagaawtggaaatgattttttttcagccccaacatggaattgagtgtatgaatacataaaaggagaacacaatttgacagagaataagagagatcctctccttattttttgtctccattaataaaatatatttgtat

SEQ ID NO: 343064 - DNA, 266 bp, Homo sapiens
tatgtcaaactaattctttcccccctcaatttgtcattgttagagaatatagttagtcatgaattaaatgtgataaaggatgtgagagagaaatgtccaaaaaaaaaaaaaaaaaaraaactcggtaaaattagttgaaatgggatgaaatagtcctagatggattatttaccatatttataaataaacttgcatctaatatttagaaataataagaaacatatttgccattctttagagtataaaataattcaagtaacacaaca

SEQ ID NO: 343065 - DNA, 652 bp, Homo sapiens
caagtgagtccttcccttcctgactcactcccagactaccaagcaattcagcacccagatgttaatgcctggcacagtttggagcctccagaaccttactgattgatcactgccattttttttctttaacacagagtctcactctgttgcccaggctggaggcacgatctcggtggctcactgcwacctctgcctcccagtttcaagcgattgtcctgcctcagcctcccaagcagctgggaccataggtgtgcaccaccatgcctggttaattttcttttttgtgcctttagtagaaacagggtttcgccatgttggccaggctggtctcaaactcctgagctcaggccatcttctcgccttggcctcccaaagtgctaggattactggcatgagccaccatgcctggcccccactgccattggttttaaacagcaaggcataataggaacaagaacctctctggcccaagacttgtcagactcctccatcaggaggcatgtggagagacagaattaggattacatgtgattaaagaagggaatgggcatgcttgtgtgtgcactttccaataatggcagctttctgccatggagtgatttccaggtgctgtgaaattttgaagttttcaaaacacttggcttagttagtt

SEQ ID NO: 343066 - DNA, 652 bp, Homo sapiens
caagtgagtccttcccttcctgactcactcccagactaccaagcaattcagcacccagatgttaatgcctggcacagtttggagcctccagaaccttactgattgatcactgccattttttttctttaacacagagtctcactctgttgcccaggctggaggcacgatctcggtggctcactgctacctctgcctcccagtttcaagcgattgtcctgcctcagcctcccaagcagctgggaccataggtgtgcaccaccatgcctggttaattttcttttttgtgcctttagtagaaacagggtttcgccatgttggccaggctggtctcaaactcctgagctcaggccatcttctcgccttggcctcccaaagtgctaggattactggcatgagccaccatgcctggcccccactgccattggttttaaacagcaaggcataataggaacaagaacctctctggcccaagacttgtcagactcctccatcaggaggcatgtggagagacagaattagsattacatgtgattaaagaagggaatgggcatgcttgtgtgtgcactttccaataatggcagctttctgccatggagtgatttccaggtgctgtgaaattttgaagttttcaaaacacttggcttagttagtt

SEQ ID NO: 343067 - DNA, 521 bp, Homo sapiens
aaacctcaattcttgacttctatgcacccgcaggctcaacaccatgtggaagctgctaaggcttggggctttcaccctctgaagccatagcctggactgtaccttgtccccctttagccatggctggagcagctaggatgtaggacaccaagacactaggctgcacacagcagtgggagctctgggtctggcccatgaaactggtccttcctcctaaacctccaggcctgtgatgtcagggsctgctgggaagctctctgacatgccctggagacatattccccattgtcttggcaattaacattgggctcctcattatttatgtaaatttctgcagcaggcttgagtttctccccagaaaatgtgtttttcttttctatcacgttgtcaggctacaaattttccaaacttttatgctctgtttcctcttgaacactatgctgcttagaaatttcttcctctacatacattaaatcatctctctcaagttcaaagttccacagatttctagagcaggggca

SEQ ID NO: 343068 - DNA, 605 bp, Homo sapiens
catctctctcaagttcaaagttccacagatttctagagcaggggcaaaatggcaccagtctctttgcatagaaagagtgacctttaatccagttcccaacaagttcctcatctacatctgagacatctaagcctggaatttattgttcatactactatcagcattttggtcaaagctattcaacaagtctctaggaagtaccaaagtttccacatctcagacttctgaaaccccaagtctttaggaagttccaaaatctcccwcatttttcctatcttcttctaagtcctgcaaactgttccaacctctgcctgtttccaattccaaagtcagttcgacattttcaggtatctttacagcagcatcccactacctggtttactgtattaagtccattctcatactgctaataaaaacatacctgagactgggtaatttataaaggaaattgtaaaaggtttaattggctcacagttcagcatggctagggaggcctcaggaaacttacaataattatagaagggagagggaacacatccctcttcacacagtggcaggaaggtgaagtgctgagcacaagaggaaaaagcccttataaaaccttc

SEQ ID NO: 343069 - DNA, 605 bp, Homo sapiens
catctctctcaagttcaaagttccacagatttctagagcaggggcaaaatggcaccagtctctttgcatagaaagagtgacctttaatccagttcccaacaagttcctcatctacatctgagacatctaagcctggaatttattgttcatactactatcagcattttggtcaaagctattcaacaagtctctaggaagtaccaaagtttccacatctcagacttctgaaaccccaagtctttaggaagttccaaaatctccctcatttttcctatcttcttctaagtcctgcaaactgttccaacctctgcctgtttccaattccaaagtcagttcgacrttttcaggtatctttacagcagcatcccactacctggtttactgtattaagtccattctcatactgctaataaaaacatacctgagactgggtaatttataaaggaaattgtaaaaggtttaattggctcacagttcagcatggctagggaggcctcaggaaacttacaataattatagaagggagagggaacacatccctcttcacacagtggcaggaaggtgaagtgctgagcacaagaggaaaaagcccttataaaaccttc

SEQ ID NO: 343070 - DNA, 463 bp, Homo sapiens
cattttccagtaaggaagccaaggctcaggaattatgtaacttgtctaacaccccataggtggcaagtgacacagccaagatctgacccacatctttctgatttccatgctttkccctttccatatgctaaaattaaagaagcaagtaaaacgtatgtttaacttcatctgacacagtgaataatgtgcatcgcaattcctatactgcatgccaattaggcattaataattcatgtaaataatgatacaaatacccacacagaaactgaagctgtctggtggctaataggggaagatttgtaagtatatgctggtggtggagggtagggtattagagagaggaggtgattatcacaccatgagccccatcccaaacccaaactctgggatttcattgactcttctcctgattatcttcactcttaaatcagcttaatcttctcatagagtatgggagttattg

SEQ ID NO: 343071 - DNA, 599 bp, Homo sapiens
ctggtatcatttaagaaaacttaaacacattactgtttttatagatactcttggcaactagtatatgctgcattgataaataaaatgaaggctaataacaacttgtggtggttccaggataggttcatgtagtgatttggttttgataggagaggtattgcctttgctctgtgtcttastcctttttggcttctctaacaaaactacctagacaggtggcttataaacaacagaaacttaattctcacagttttggaggggagtctgagaagcccaaggtcaaattgctggcagattcagtgtcacctctcgaagtccctcacctcctaatactctgacattgagggttaggatttcaacaaagaatttggggggaacaccacaaatatccagtctctagcaccctgattacatattggtacaatccttattaatgagctcttcatcaactttgacaggtatggatgcaagaggatccacttcagccatctcgaatgtccaccctatgtcaagttatatgcctatagtactgttcttaattgtatatgtcctgtggtgatattaactcctttttattatttattggaaagttatttggt

SEQ ID NO: 343072 - DNA, 518 bp, Homo sapiens
tagccacactcttttttctatacctaatacaaagataaacacacaaacttctttaatcaaatttacacgtgctaattaacatctaaagtagcagaactgtcttacattactttaagttaaccataaaaaatgctagccaatcatattcaactttatattattgaagttctttgcaattttagacaaaaaagtatgttttcaaaaaaattggaaatgatatggaaacagaaatgcgtcaatgaaattagcaaccaagcataaaaattgtctcattcttacataaagttagttaagcaaacatttttattaaattaagaaatttgaaaaataaattaagaaaacaattttctgcaagtaaaagtatggtatcactgcgcgtaagttacctaatcctttcaagccatacttctatcacctttaaaatasagataataatggcacctacctcttgggagtagttatgaggattaaatgtgggaatgagcataaattacttgggagacagaatgttttcaatc

SEQ ID NO: 343073 - DNA, 518 bp, Homo sapiens
tagccacactcttttttctatacctaatacaaagataaacacacaaacttctttaatcaaatttacacgtgctaattaacatctaaagtagcagaactgtcttacattactttaagttaaccataaaaaatgctagccaatcatattcaactttatattattgaagttctttgcaattttagacaaaaaagtatgttttcaaaaaaattggaaatgatatggaaacagaaatgcgtcaatgaaattagcaaccaagcataaaaattgtctcattcttacataaagttagttaagcaaacatttttattaaattaagaaatttgaaaaataaattaagaaaacaattttctgcaagtaaaagtatggtatcactgcgcgtaagttacctaatcctttcaagccatacttctatcacctttaaaatagagataataatggcacctacctcttgggagtagttaygaggattaaatgtgggaatgagcataaattacttgggagacagaatgttttcaatc

SEQ ID NO: 343074 - DNA, 616 bp, Homo sapiens
actggccaaatcgtttggcataatgtgcttgtgatttacacaggaggttgtgaaaggttttgtaaagactagcttgtttgagtatatcaaattatcatttttattacagctttttatttatcgtagtacataaaatgattttgagaaatctccaaagaatgctgatttgatacagattttgctgtgatacaattaacatttattgcaaatgcagatttttatgataagtaaaytctgatatgatagtattaccgtagacttttttactatattcataatgcataaatcacattattctcaaatattttcagtcagaatgatatatatgtacatatatatataaacatagtcatagaggcaataaatgaaaagttagtgcagctcttctctctaagacataaaagttatgtttcattttatctcaaagagtctataaacaaagataggtgctacaaatttctccatacctctcatgacagtgtacaactctattcaatgcaaatttgatttttttctatgtctttaagggtgtgaatctttgaaaaaagtaatcaatcactatttgtttgggggttgtagtttgatatctcttttggaatacctcaacattatattg

SEQ ID NO: 343075 - DNA, 616 bp, Homo sapiens
actggccaaatcgtttggcataatgtgcttgtgatttacacaggaggttgtgaaaggttttgtaaagactagcttgtttgagtatatcaaattatcatttttattacagctttttatttatcgtagtacataaaatgattttgagaaatctccaaagaatgctgatttgatacagattttgctgtgatacaattaacatttattgcaaatgcagatttttatgataagtaaattctgatatgatagtattaccgtagacttttttactatattcataatgcataaatcacattattctcaaatattttcagtcagaatgatatatatgtacatatatatataaacatagtcatagaggcaataaatgaaaagttagtgcagctcttctctctaagacataaaagttatgtttcattytatctcaaagagtctataaacaaagataggtgctacaaatttctccatacctctcatgacagtgtacaactctattcaatgcaaatttgatttttttctatgtctttaagggtgtgaatctttgaaaaaagtaatcaatcactatttgtttgggggttgtagtttgatatctcttttggaatacctcaacattatattg

SEQ ID NO: 343076 - DNA, 642 bp, Homo sapiens
gcctggttcctaacaggccacagaccagtactggtccatgaaccagggggattgggcacccctgctttaaacaacacacatttgttcccttacagttctgtggattagaagtccaacgcaagtctcaatgggctcacatcaaggtgtcagcagggctttgttccttggggctccaggggagaatccatttccttcccttttgcagtttctagaggctgcccgtgttcctttgctcttggccaccagcaagtgattgtatggcttagacctctgctggtgtagtcatacctccttctttgactctcctgcccctctctttcccttctaagsaccctggtgattacagtgggcctaccagaattcacagcgagatggctaacttaatcacctttgccatgtacattacttccctattgctcttgaaacaaattactacaacacaaatttattctcttacagttctggaggtccaaagtccaaaatcagtttcacttggctaaaaatcaagaaattggcaggcctatgttgcttatggagtttcaaggaggcaatctgtttttctgcctttctggcttccagtggccacctgcactccttaggtcatggtctctttctccatcttcaaaccaagagcacagcatc

SEQ ID NO: 343077 - DNA, 489 bp, Homo sapiens
attcaaattttatgattactttttctattatttgaagaatgccactggtattttgataatgaccacattaaatctgtagatcggatttgggaagtgtggtcattttcacaatattcttccaattataaatattggacatctttccatttttctatgtcctttccattctttcatcagtgttttataatttccattgtagagatctttcmtttgttaaatgtatttctagatattttatttatttatttgtaactatttcaaatgggattgctttttagctagtttattacaggtgtatagagatgctgggtttttttgtataatgatttttttatctgcaactttactgaatttacttatcagttctaagagtcttttggtggagtacttaggtttttctatataggagatcctgtcatctaaggatctgaatacacatttatcaaaagaagacatagaaataattaaaaagtatatgcaaaatgctta

SEQ ID NO: 343078 - DNA, 489 bp, Homo sapiens
attcaaattttatgattactttttctattatttgaagaatgccactggtattttgataatgaccacattaaatctgtagatcggatttgggaagtgtggtcattttcacaatattcttccaattataaatattggacatctttccatttttctatgtcctttccattctttcatcagtgttttataatttccattgtagagatctttcctttgttaaatgtatttctagatattttatttatttatttgtaactatttcaaatgggattgctttttagctagtttattacaggtgtatagagatgctggktttttttgtataatgatttttttatctgcaactttactgaatttacttatcagttctaagagtcttttggtggagtacttaggtttttctatataggagatcctgtcatctaaggatctgaatacacatttatcaaaagaagacatagaaataattaaaaagtatatgcaaaatgctta

SEQ ID NO: 343079 - DNA, 469 bp, Homo sapiens
ttaaggtcatgtgatttgcatttaccaaaaataatttcacatattaaatgcagtgcatcaggtatttttatgtaaggacaaatttcctgcataacatacaactgactatctgaaccatttttctctttttttttttttttttttaracagagtctcacgttgtcgtccaggctggagtgcggcgatctcagctcactgcaacttccacctccctggttcaagcaattcccctgcctcagcctcctgagtagctcggattacaggtgcacagcaccatgcccggctactttttttgtatttttagtagagatggggtttcaccatgttggccagactggtctcaaactcctgatctcacccaattcccctgcctcaacctcccaaagtgctgggattacaagcgtgggccaccgtgcccagacctgaaccatttttaagtttacagttttccttttgtcttttgaggtta

SEQ ID NO: 343080 - DNA, 591 bp, Homo sapiens
ggaaactctttctatcactggtatggagtcaagcctgcagaaggcaaagcaaataagctgaatctaccccttatgtccaaatasgcaatggaagttttaaatttgggaactatataattggaaatggctttaatgtttgaaataattactacatccctgcaaaatggtcatgcagcctctgcttgcataactctaatgatgggaaactcactactccttgacaggggattatatttttagactattctaagtagcagaaaaacatttggtatgttgcactgaaacctgctctctgcaacttgctcctacacatagcatatttaattcctgtccacactgtcagccctgcagatatttgaaggcagccactctgggccctattagcttctcctttctaggttcagtctacccagtccttttcagtggccgagcctccagccccattcaccattaaggatcctctcaatcctttcccgtttaatgagccgttaaaagtcagggaggtaactttgacggaggaaccacccacctcattttttttaaaactggaaataaattgcacataaaggtgctgattgctcagaagtgtaa

SEQ ID NO: 343081 - DNA, 602 bp, Homo sapiens
aaggatagctatataggagagagcaacaggtccaatatcaggtaggagaacttgagaacttaggtgggaaaaagatggggactctgtaattgttggtaggcttgaaaggcttggtgaacttgaggttgtgatcgaggtacattctcccctgaccttttttttgtcagaaaggaaagaaagaaggaagaataaaaagaaggaaaaaagataygacagatgtcaggaagaccaaatcctgaacaagaaagtagtaatccaaatacacggcaaagtaaaatgtgacatgattttaagcaactgacagaaagaaaagaaaaaccatttgaccttgaagttattgtgcctcctctctttcaagtcacccataggtcccgacatcagacctgcaaagagaaacatggaatcctagcatattgtccctccctgtagagggcaacgattaactgattataataatataaatgcttttcttatgggttactttttaaatcactttttaaagagttataactatttaaatcactatgaaacataaagaagagaagaggtaggagaatgcaaggccatgtgacctaaatctccttccattataacaagaagtc

SEQ ID NO: 343082 - DNA, 508 bp, Homo sapiens
ttgtggacagcttaaggatctgtgacttgtgctttttccaaagagggtttggggaacttcaatatttgaaggggaaagggcagagaggaggggaagagggaaataaaaaaggagggaaggtaggcagtgaggcaagtggttacattctcctgaggctttaattagtgctcagtgaatctgcatttcacgtatgagaagaggggagtgggggaaaagtcaattatgcattcatctcacactcaagtaaatctgcattccacataagataatgtaagcatgtgaaattatagctatctgtytggaaacaaaaggaaggtagttttttgtgtaattggactcagttcccaagcttaactttccctttggcatagtgattttgggttccaagattttaggtttctttcacgtcatcaccaaacctatgaccacattggcccttctgtccagcagaatgttggctacatacttcagtagccaagacctaaatttactgcacatctgcttgagc

SEQ ID NO: 343083 - DNA, 577 bp, Homo sapiens
tgttattatgcttaggttcaataaagtatgaacagtgtagaaatatgattggacaaaaaggctataatctcatgctaatagactaagtgggggaacccagcaaggcctgtctgtctggattcttcttagcccctctgagcatgcattycttccttctgggtatgggcagaaccctctctggagtgagggtcttatgacctacagccaaacaagctaggtcagataacttctttgtgcccggtttttacacagaaaggtggggagagatagagtaatatttttagttttcctgtctgcctttggggaaaaggggttctggtttctatgacccaccttgggaaagagactaatttccatgggtagcctttgggggaaatgggactgagaggcaagaagacaggaggtcatagaaaaacttctgcttctgaggatttcatttttggatattattttctgagccccaacattgcaatgtcaatattctatctctggaagataaggaacaggaggtctctattaatcacttacaccccagttaagttatctgctctttttcagagtcagcttttctttgggg

SEQ ID NO: 343084 - DNA, 577 bp, Homo sapiens
tgttattatgcttaggttcaataaagtatgaacagtgtagaaatatgattggacaaaaaggctataatctcatgctaatagactaagtgggggaacccagcaaggcctgtctgtctggattcttcttagcccctctgagcatgcatttcttccttctgggtatgggcagaaccctctctggagtgagggtcttatgacctacagccaaacaagctaggtcagataacttctttgtgcccggtttttacacagaaaggtggggagagatagagtaatatttttagttttcctgtctgcctttggggaaaaggggttctggtttctatgacccaccttgggaaagagactaatttccatgggtagcctttgggggaaatgggactgagaggcaagaagacaggaggtcatagaaaaacttctgcttctgaggatttcatttttggatattattttctgagccccaacattgcaatgtcaatattctatctctggaagataaggaacaggaggtctctattratcacttacaccccagttaagttatctgctctttttcagagtcagcttttctttgggg

SEQ ID NO: 343085 - DNA, 539 bp, Homo sapiens
agtgagtaaatctccaagaagttgcttttagttcaggtcaaatgtcatcttcagaagaaaggaaggaaggaaggaaggaaggaaggaaggagggagggagggagggagggagagggggatgagaggggaaggaagggsgccagttttggggaggtcaggaaaagcacagtaataagagcaaggtttttcctgtggatttactcagtgccttctccattgagaaaagtctctagtgatttggaggatttcttctcttcctggtacagagcaggtaccttacaaatggggatttcctttagaaaatacaattcccttacaaaagggtaacttctactctttgtttttagagttactctggtgtctacagtttcttagaataattagctcaaaaataatccttatgctaaagaggcatattttggagtagcacattctggcctcctacagtcgtattttggagtggcatagttttggtattctacatcctggaagatctaagggggcccagtgaaatcacaagagtccttataaatggaaga

SEQ ID NO: 343086 - DNA, 539 bp, Homo sapiens
agtgagtaaatctccaagaagttgcttttagttcaggtcaaatgtcatcttcagaagaaaggaaggaaggaaggaaggaaggaaggaaggagggagggagggagggagggagagggggatgagaggggaaggaagggcgccagttttggggaggtcaggaaaagcacagtaataagagcaaggtttttcctgtggatttactcagtgccttctccattgagaaaagtctctagtgatttggaggatttcttctcttcctggtacagagcaggtaccttacaaatggggatttcctttagaaaatacaattcccttacaaaagggtaacttctactctttgtttttagagttactctggtgtctacagtttcttagaataattagctcaaaaataatcctyatgctaaagaggcatattttggagtagcacattctggcctcctacagtcgtattttggagtggcatagttttggtattctacatcctggaagatctaagggggcccagtgaaatcacaagagtccttataaatggaaga

SEQ ID NO: 343087 - DNA, 569 bp, Homo sapiens
agaagcctgtacttcttcccctaagctagctttgaaatataatatatcactttttttagaactaataaacaaatttattaacgttacaggatacaaaatcaagatgcaaaaatcaatggtgattttatacaccaacaacaatctcatttatattagcaacgaaaagaaaccacttagtaattaacttagcgaaagagatgaaaaatttgtacattgaaaattataaaagatcgatggaggaaatttaaaagacacaaataaatgggaagacatctcatgttcatagattggaagaattttttttaacttttagtttaatttcaggggtacatgygcaggtttgttatacaggtaaatttgtgtcatgggagtttgttgtacagattattttattaccccagtattaagcccagcattcactagctattctttctgatcttctccctcctcccacccccactctccaataagccccagtgtgtgttgttcccctctgtgtgtccatgtgttctcatcatttagcttccacttacaagtgagaacacatagtatttgattttttgttcctg

SEQ ID NO: 343088 - DNA, 569 bp, Homo sapiens
agaagcctgtacttcttcccctaagctagctttgaaatataatatatcactttttttagaactaataaacaaatttattaacgttacaggatacaaaatcaagatgcaaaaatcaatggtgattttatacaccaacaacaatctcatttatattagcaacgaaaagaaaccacttagtaattaacttagcgaaagagatgaaaaatttgtacattgaaaattataaaagatcgatggaggaaatttaaaagacacaaataaatgggaagacatctcatgttcatagattggaagaattttttttaacttttagtttaatttcaggggtacatgcgcaggtttgttatacaggtaaatttgtgtcatgggagtttgttgtacagattattttattaccccagtattaagcccagcattcactagctattctttctgatcttctccctcctcccacccccactctccaataagccccagtgtgtgttgttcccctctrtgtgtccatgtgttctcatcatttagcttccacttacaagtgagaacacatagtatttgattttttgttcctg

SEQ ID NO: 343089 - DNA, 569 bp, Homo sapiens
agaagcctgtacttcttcccctaagctagctttgaaatataatatatcactttttttagaactaataaacaaatttattaacgttacaggatacaaaatcaagatgcaaaaatcaatggtgattttatacaccaacaacaatctcatttatattagcaacgaaaagaaaccacttagtaattaacttagcgaaagagatgaaaaatttgtacattgaaaattataaaagatcgatggaggaaatttaaaagacacaaataaatgggaagacatctcatgttcatagattggaagaattttttttaacttttagtttaatttcaggggtacatgcgcaggtttgttatacaggtaaatttgtgtcatgggagtttgttgtacagattattttattaccccagtattaagcccagcattcactagctattctttctgatcttctccctcctcccacccccactctccaataagccccagtgtgtgttgttcccctctgtgtgtccatgtgttctcatcatttagcttccacttacaagtgakaacacatagtatttgattttttgttcctg

SEQ ID NO: 343090 - DNA, 543 bp, Homo sapiens
taaggcctggccttctcaccccagtctgggccactgtgaagggccatcctagccccagagctccccgtggggtcagctgagtccttgttgcctgtctggtagcccagcttctccctctgcccagccctgcttccttgtcttgcccccgcagtgtggatctgcagagcatgccstaataaacttcccacatgctaatctccatcccagtgtctgcttcctagacgacccaacctgtgatacccacattttaacgatgcggaaactgaggttcagagagattaagtgacttccccatcatgggctagaaacagcacaagacccaaatcagaagtcctggtcctgctactcactagcaatgtggttttgttcacgtgatttaagatctcaccctcagttccctcatctgtaaaatgggtatcatgtgacctgactcacagggttattgtgagttatctcatgaagacacgcagacccaagcatctagcacagtgtctgccagagtgtagacaccccaccatcagggtcctcagctggtcaacagca

SEQ ID NO: 343091 - DNA, 599 bp, Homo sapiens
aattgagacataaatagagtaaatcrctaatgacatttcctactaatagtcactgagtctggtgggtgtctgtttcaggttttccttattttatttattctaatgctgtactggttatcttgtgattacttttcatttgtaactcaataaaaaaaaatcttgggttttttttgttgttgttgttgttttttattttttttgagacagtccccctctgtcgccaggctggagtgcagtggcactgtgattcccctgcctcagcctcctgagtagttgggactacaggcgcgtgccaccaccctcagctaatttctttggtatttttagtagagatggggtttcaccatgttggccaggatggtctctatctcttgacctcgtgatctgcctgcctcggcctcccaaagtgctgggattacagacctgagccaccgtgcctggccaaaatcttggtaatttttaaaaaaattacaagtgtttgcaatgttcctgacattaaacaaaatactgcaggaatattcaagaacctccaaatctgtaacttctgagtaaatctgggtcatttttcagcagcttatctattgtcaaaatagatttaa

SEQ ID NO: 343092 - DNA, 599 bp, Homo sapiens
aattgagacataaatagagtaaatcgctaatgacatttcctactaatagtcactgagtctggtgggtgtctgtttcaggttttccttattttatttattctaatgctgtactggttatcttgtgattacttttcatttgtaactcaataaaaaaaaatcttgggttttttttgttgttgttgttgttttttattttttttgagacagtccccctctgtcgccaggctgsagtgcagtggcactgtgattcccctgcctcagcctcctgagtagttgggactacaggcgcgtgccaccaccctcagctaatttctttggtatttttagtagagatggggtttcaccatgttggccaggatggtctctatctcttgacctcgtgatctgcctgcctcggcctcccaaagtgctgggattacagacctgagccaccgtgcctggccaaaatcttggtaatttttaaaaaaattacaagtgtttgcaatgttcctgacattaaacaaaatactgcaggaatattcaagaacctccaaatctgtaacttctgagtaaatctgggtcatttttcagcagcttatctattgtcaaaatagatttaa

SEQ ID NO: 343093 - DNA, 566 bp, Homo sapiens
gtcactgatggactgtatgactttagatrtattgtttaattttctatgcttgcttcttcaccagtaaaatgataatgggtcttaaatctctgttgggatccttgtatggcaaataaggtaagtacagaaaaactgataaaaatagattccttgtggtgtttgagctcagctaagccagcatgagttaaccaaaatgatgtggcaaaatcagcaggcatgaatgaggtgacggtgccatctgctgcttcgttttaggaatttcaaggtaagttagaggaatttaatctattttattcatttgcaagtaaaactgaaaaatttctgcaggctagacctgtctcataataaaaatggcactttcattctgctaaaaggcatctatggttcttcattcctaaggaattatcatcattaggagttagcttctattaagatcacctgttagagttcaataattaccatgtacatttatttttaattttaaatttctgccaccatcagttcctagaaagaagggaacatatcttgctcagtaccaactcccagtgcctagagtgatgcactga

SEQ ID NO: 343094 - DNA, 566 bp, Homo sapiens
gtcactgatggactgtatgactttagatatattgtttaattttctatgcttgcttcttcaccagtaaaatgataatgggtcttaartctctgttgggatccttgtatggcaaataaggtaagtacagaaaaactgataaaaatagattccttgtggtgtttgagctcagctaagccagcatgagttaaccaaaatgatgtggcaaaatcagcaggcatgaatgaggtgacggtgccatctgctgcttcgttttaggaatttcaaggtaagttagaggaatttaatctattttattcatttgcaagtaaaactgaaaaatttctgcaggctagacctgtctcataataaaaatggcactttcattctgctaaaaggcatctatggttcttcattcctaaggaattatcatcattaggagttagcttctattaagatcacctgttagagttcaataattaccatgtacatttatttttaattttaaatttctgccaccatcagttcctagaaagaagggaacatatcttgctcagtaccaactcccagtgcctagagtgatgcactga

SEQ ID NO: 343095 - DNA, 608 bp, Homo sapiens
ttattaatagtaaccataagtgtgttctagatacacattatttcactggaagcaacctttacaaaaattgaattaccaaggagtcacttaagttgcctaagtcactaagttgcacagagctacccaagctgactgattccagagctggacattttcaatcatcttcctatcctcccaacacatctcagatcaatatttatacatggcagtgcatctggaatcatagaatgacagcagcttgcaacttttcccttctacattatgaaatgtccactctgccagcaagatgaattctgaaagcataaatttaatcatacttcctctcttccataggaagaagtttcccaaggctctttctgttttagtcagtttcttagtgtactgtatcaggctcctcctaataggatcccattttacttcttagcctcatgggtccagatcatgtcacttcctctgggaactcrcaaaactaaactcaatcagtaactcattcattcctatattgcttctgcggcctccaacattgatttaatagcactaaatgacatttactacaactattgatttagagtattccttccacttctctaagcacctgaaaaagaggc

SEQ ID NO: 343096 - DNA, 501 bp, Homo sapiens
  misc_feature (1)...(501): n = A,T,C or G
atataaacatttgtcctccatttaattttcctactcatatattgattgatttacctattccttcattaattcaacaaatatgtgctgaaactattccaggacttggacctatgcagttaataaaacagaaaaaataatccttnaagctcaggagcatagattttaattgaagcaacagccaagaagccaaacaaatracatactatacagtatagtaggtagtgattattgctaactagagaaaagtaaaccaggaaaggtagatgtatgttattaataaatccctttgagaaagacattatgtactcctttactcaactaaaacaaattaatacttctatagggaacattttataggcaagctaagcaataaaaccaaaccatgtagagttttaaatctaaggaatataaagctcaccaataatgtatttctttgtgttttctttctctgttcacatttattcctttgagtcatgtttggtagtctgaaagtataatcct

SEQ ID NO: 343097 - DNA, 535 bp, Homo sapiens
aatgaaactaaatatcctcttacctaaatgtccttttacaatgggtaaggttgtgtaaggatgagaagagcatgtttttgtttatttacccttgacctagagtttaaatgtgggagtttaagtaaaagagatttttctctaattttctgcagaacctgaaaaaggagaatagcagagaaaacacagcatatattgtctcctgtgtttgatttttacagctgacagctggcagctgaatgtaataacctggaataaaggagaaacaatagtggaatttactagcaaagactgtttgccttaaagattcttcaaagtattgtcatggaactatgtttagaggaaggatacgaagcacttataatcattctttaagaagtacaataaagcaaaaggcaaacatccttcagctgatgtcatcccrtagtgtatgatgcagtattttcaaattagaatttatctacagcgcagctgacttcagctcctacaaatctcctcagcagcgatgctactttccacacagatgctataggtgggc

SEQ ID NO: 343098 - DNA, 578 bp, Homo sapiens
attaaataaataaaatttgctggatattctcttcagttgcccctggggattctctcagttccaacctgtgctttgagaggctgagctcaaatgaacrcattatcagggcaaacaaacttggcccctggcttctagttaattgagccaatagaaggcagtggtgatcagggctcttgtcaggcaggtcatgcagttccaataaacattttcaacttaattcttcaggtgacctgacagcttcccagtgcatatgtcacacccctttttggttcccttaacacttcccgaaactttatatacagtcctttaattaaatgcccttagattaccccttgagtatgccatttgtttccttctgggggcctgattgctagggagaagactgatgaatccagtgagatactgaaacaaaagtaaacagtgtaattttgcatattattgggactcatagactatattacttagacataacctttggccataaagataagtggtcaaatgatgaatgatgattaaagtctcaaatttctgatgctatagtcgcaagatgtggcagaaatgctaaataattcatgctt

SEQ ID NO: 343099 - DNA, 578 bp, Homo sapiens
attaaataaataaaatttgctggatattctcttcagttgcccctggggattctctcagttccaacctgtgctttgagaggctgagctcaaatgaacgcattatcagggcaaacaaacttggcccctggcttctagttaattgagccaatagaaggcagtggtgatcagggctcttgtcaggcaggtcatgcagttccaataaacattttcaacttaattcttcaggtgacctgacagcttcccagtgcatatgtcacacccctttttggttcccttaacacttcccgaaactttatatacagtcctttaattaaatgcccttagattaccccttgagtatgccatttgtttccttctgggggcctgattgctagggagaagactgatgaatccagtgagatactgaaacaaaagtaaacagtgtaattttgcatattattgggactcatagactatattacttagacataacctttggccataaagataagtggtcaaatgatgaatgatgattaaagtctcaaatttctgatgctatagtygcaagatgtggcagaaatgctaaataattcatgctt

SEQ ID NO: 343100 - DNA, 521 bp, Homo sapiens
ttcgcattcacaaagtataggaagtttgaccttgcttaggtaatgtcatgagcttcattttctgctggtttttagaggaacgttttaagaattgccaagagcttaatcagtaattgttacttcgtctrtctcctcaaataaagtttcacagcttaacagaaatgttagaacttcaagacagctttctttttctctatctactctctttgggtcttattaaaaaatacatattttagacaaatgtgagttcgctttttaagaagcacacatattaaatacctgtggaaacaatttatatttaaaagaccagttcagtcaattaacatctaataatccaccttcttctgtaaaaattgaggactttaaatgacacattgccaaacttcattgtaactctacaatagaagaatccatatttaacttgcattgcaaatatcaaaaaatattctttaaatgttaattctatataatgaatttcaatgttattttacaaatgataatgatttggggtaataagattt

SEQ ID NO: 343101 - DNA, 552 bp, Homo sapiens
aaacagactcatacaaatatacccaaatgattttgtcagcagtgcaaatcaattgaaagaaggaggatagccttttcaacaaatggtgctggagaaattagacatccataggaaagaaaaaaagaaaaagaaaataagcctaagtcttcaaccttacacaaaaattaaaagttaactcaaaatagaccacagtcttaaaagtagagcataaaactgtmaaactttcagaaaacataggacaaaatcttcagaatctaaaggtaggcaaataattcttagacttacattaaaaaatggttaatgaaaggaaaagctggtaagttggatggacctcatcaaaataaaacatacatactctgcaaaagacactaggaagagggtaaaaagacttgttacaggccaggtgtggtggctcatgcctataatcccagcactttgggattccttgagcccaggagttcaagaccatcctgagcaagaaggtgagaccccatctctacaaaaataaataagtaaataaaagccaagttacagactgggaataaatagttg

SEQ ID NO: 343102 - DNA, 506 bp, Homo sapiens
tatttgtgcataataaaatgtgataactttttacaacagaatgtgattttatttttatgtttttcttcataaggtcccaaagaacttcaagtacttctaatataagctgaactgattagatttcattaatggaattmcatatttatgaaggaaatacaaattctcagtccaggatttaagtatttctcttaaagaattctacctgggattatgattaacttaaaataaagaacccagatgtgccagctctgggcagattttgtgccagctttaggcagcttcagattttgaagctttgtggaggcagaagtctctccatattcagatacatgacattggctgtaagagcaactgagggcactaaatagtgatcacgtttcaaatacagaatttataattaattttaaattaattttcagatttagtactaaagaacttgaccagatcaatggatccaaaggatgtgcttattttcaaaaaggaaatatttatatttctcgctgtag

SEQ ID NO: 343103 - DNA, 532 bp, Homo sapiens
ttagtgctccaagtagagaactgtgactctgcctcttatgtaagcctgaaactggagggttgcttcccctgtggggttgcggtcaccctgaagtgttctacaaagtctgtctatgggtgcacccatgctgagctcttgtgggagaagacccagctgtgtctgcagtggtggaygaggttggtaagaagtccccttctccaagatccttgataagcaccagggctgtctgactgttgggacagctgtagacattccctgctgagcccagcacttcaattctgcctctattgaaagaaacttcccaccagtggaacaatctaatccttaagacctgccatctggattctttattcacacagggtgttcccttgatgtggcacactctccctttccttaggagtagaagttcctgagagacagactactatgagtgctgctgctcctcagggtctagccactcagtggctccagactagtgctgggggatgtctgctaaggatccagtgatatgacctgtcctccagttttccag

SEQ ID NO: 343104 - DNA, 552 bp, Homo sapiens
ctactaatatggttttttttttttttaactaaactacccagtaagctgttaagggacattggggatttccaacctctttgaaatgaagctaagtgacaaaagtagggatgtcagcttytgtagccacaggatatgtgtaataggatacaaagcgttttcctccaaaaaaacttacgaagagtccatttttacggctgtggttttgagtagcttgtatataacttcattttccacctttgactggagccaggaactctgtcaaggactagagatcagcataattaagaacagcatgtacaaataagttctgctgaggttgaagggtggagagggaggtggagcaagataaaacactagctgcaacatctgggagcttctttgtaagaaatggatattgaaacagtagaagtggagattacaaagaattgtcttggaagaaatcatctggaaatagttatcttaggcaacatatatgagatcttgttttcatctttttatggtaatacaaacatttaggggaataccatcatagaagtataattatttcttaga

SEQ ID NO: 343105 - DNA, 552 bp, Homo sapiens
ctactaatatggttttttttttttttaactaaactacccagtaagctgttaagggacattggggatttccaacctctttgaaatgaagctaagtgacaaaagtagggatgtcagcttttgtagccacaggatatgtgtaataggatacaaagcgttttcctccaaaaaaacttaygaagagtccatttttacggctgtggttttgagtagcttgtatataacttcattttccacctttgactggagccaggaactctgtcaaggactagagatcagcataattaagaacagcatgtacaaataagttctgctgaggttgaagggtggagagggaggtggagcaagataaaacactagctgcaacatctgggagcttctttgtaagaaatggatattgaaacagtagaagtggagattacaaagaattgtcttggaagaaatcatctggaaatagttatcttaggcaacatatatgagatcttgttttcatctttttatggtaatacaaacatttaggggaataccatcatagaagtataattatttcttaga

SEQ ID NO: 343106 - DNA, 600 bp, Homo sapiens
ttaacatttctcagccttcagttaactggcccttcttcagtcttttcccataactcagttcctctctccacaagtcttttcttttctttttttttttttttttgagatggagttttgccttgtcacccaggctggagtgcagtggtgcgatctcggctcactgcaagctccgcctcccaggttcaagcgattctcctgcctcagcctcctgagtagctgggactacaggtgcctgccaccacacccagctaatttttttgtatttttagtagagacagggtttcactgtgttagccaggatggtctccatctcctgacctcatgatccgcctgcctcagcctcccaaagttcatcagggattacaggtgtgagccaccrcacctggcaagagagtacacatttttatccattcttcctccaagataaggacttactgcccttgcccctgctttgtttttgctcccaacctgggagctggtggcaaagattagggtccttctctaaggcaaaagcatcaaagccaaaccttttcacaatgaggaccaatcctttaggtaatggcattccctttagaaggctctattaaaatagcagcatga

SEQ ID NO: 343107 - DNA, 600 bp, Homo sapiens
ttaacatttctcagccttcagttaactggcccttcttcagtcttttcccataactcagttcctctctccacaagtcttttcttttctttttttttttttttttgagatggagttttgccttgtcacccaggctggagtgcagtggtgcgatctcggctcactgcaagctccgcctcccaggttcaagcgattctcctgcctcagcctcctgagtagctgggactacaggtgcctgccaccacacccagctaatttttttgtatttttagtagagacagggtttcactgtgttagccaggatggtctccatctcctgacctcatgatccgcctgcctcagcctcccaaagttcatcagggattacaggtgtgagccaccacacctggcaagagagtacacatttttatccattcttcctccaagataaggacttactgcccttgcccctgctttgtttttgctcccaacctggragctggtggcaaagattagggtccttctctaaggcaaaagcatcaaagccaaaccttttcacaatgaggaccaatcctttaggtaatggcattccctttagaaggctctattaaaatagcagcatga

SEQ ID NO: 343108 - DNA, 677 bp, Homo sapiens
tggattaccagctttaagttcaccagctttcactttaggtgtggtggaaaaatcctataaagaacatttaaaggcaaatgtatttcagtttggaccatgacattatgcaattgtacatcgcatgttcttattccagatcttcaaacagatgaaaagttaactattgtattttgattgaagcccagaccagctgtgagaggaaaatttaccactttctacttggaagattagaggctgttcctagcaaggcaaaaaccagttattaaasttttctcattaaataaagaccatgtgtgttactgtgggtgtgtaaacaatgagtgcctgccatcccacacaggatacacaaggtggactgcaggagaatgcgagcagggcagaggaaagtcctatttatccacacgtaaattcattttcctgactttcagggctaacatctgccccaaaactccccaaatgaaactcaaggagcttcaaacccctttttaaatattttcacaaagtctatatggatttgggatgtgaaaagagtgcttaaatgttcttgttctatcatttactggctgtgggtcatgagcaattcactgaaactctttgaacaacaatttcctcatctataaaacagggtgaataatacctaccatggagggtatcaggatgtttagcaataatatgca

SEQ ID NO: 343109 - DNA, 677 bp, Homo sapiens
tggattaccagctttaagttcaccagctttcactttaggtgtggtggaaaaatcctataaagaacatttaaaggcaaatgtatttcagtttggaccatgacattatgcaattgtacatcgcatgttcttattccagatcttcaaacagatgaaaagttaactattgtattttgattgaagcccagaccagctgtgagaggaaaatttaccactttctacttggaagattagaggctgttcctagcaaggcaaaaaccagttattaaagttttctcrttaaataaagaccatgtgtgttactgtgggtgtgtaaacaatgagtgcctgccatcccacacaggatacacaaggtggactgcaggagaatgcgagcagggcagaggaaagtcctatttatccacacgtaaattcattttcctgactttcagggctaacatctgccccaaaactccccaaatgaaactcaaggagcttcaaacccctttttaaatattttcacaaagtctatatggatttgggatgtgaaaagagtgcttaaatgttcttgttctatcatttactggctgtgggtcatgagcaattcactgaaactctttgaacaacaatttcctcatctataaaacagggtgaataatacctaccatggagggtatcaggatgtttagcaataatatgca

SEQ ID NO: 343110 - DNA, 595 bp, Homo sapiens
caatatcccacggcaaacaatatttttacttccaagtcattatatacatcaacataaaacagatcaattaatgagtcagaaaccctgaagaactaatcatttctcaaaacacaaggcagtcaggtcaaaaactgacgtaagtcaccaygtatagaagcctacaagagccaaacactgaagattcaggttaaaaggttgcaaccttaaaaaaataaataaaaggcaaaacaaattatacaaccatgtcgaattttaaatctgtaattaccaaatatctgaaccaaatgccaaattcaggaaacatgcatcctataaacaacttaaacactctctgttctttgtaactgttttttccagaagcacactgacacttctgcaaagtgaagtgcctttcctgcctgcacagccccatgatttgctccctctcagggccctctaatgcacccctaagctactaaagcccagacataagatttgatcaataaacctagaaagaactcagtgcattactgccaattgtgtccatcacagaaagtaccacctggagactcttgaggaaaaaaatgaggaagggggagatttttgaaaggtttta

SEQ ID NO: 343111 - DNA, 581 bp, Homo sapiens
tattctggtccacctgaggctacacaaatgtaccctcttcttaaagaaactgatttggatagacagggaataggagatttcaatcctgctgaactaggttgcttctcttatgaaatcagcctgcaatagactttcaaaaggaattccaagtaggctttgaaaataatgggaggagtaagtggcccatcaagccaacatttgcttgagccagaggacttgctcaccgaagacrttgctggatttcttatctgactagtcagtcaagaaaatttactttgatgaccataaatggacattttttacaatgatcattatttacagatgcaagtgctgtgtgaaatatagtacttaaactcaactataatttaacactacctatttccataatgagtgttcaaaaggatgaatcaatagaccttccaagagaacatgtaatagcttttaagaatataggcgtgcttcaattatttgaattaaaatcaaaattgaggaatacaaattttagcttttctttctctgtagggttagcagtaaatcatcaaagaatatactcaatttcattagtttgtataaacaagaca

SEQ ID NO: 343112 - DNA, 591 bp, Homo sapiens
aataatcttgtttattatctctcttttggatgctgcaagggccctctgtaacatcccaaagttggtttgaggtcaaaaagacttaattttgaacttgaaatttaattttgaaaagcctgtcaaatacatcaaaggtttaaaacacttaaccaaaataggaacagaggtcactttaaaataakagtcattcatttagccaaagtgataattaaaaggttttaaaaagcaaaaacctttatcctttgatagagaggagactcaatttaaataaccaaaagacccactagagacagcaagaggcagaattttgacagaattggtctctcctctcttctctctctctttttacagtttatgtaaaagtcgaataaaaatcttttactaactcttattaattctacattaaaatcttatgcaaaagataaccagttttacttttgtattaacgtattacaaacactatagtcaattttaataaaaccttataaacaaatccatttaatctcagtcagcttttgaccacacaagatttccataaaccttttataatctgacaaaactttttcttctattttctgaactgtttatact

SEQ ID NO: 343113 - DNA, 570 bp, Homo sapiens
gtagtacatatataattaacacaatatcaaaaattaataaagataggaatgagggaatgtggcggtttgtgactgccactgcaggtgctcttcttagacgcagctggccagtctcacttccagaatatataaggatgttatatttaggcccagtcctagtcatttaggcgcttaaaaataacttgatttgacctgaattaaacagtgttccagatcggctttctgcatcagaatctcagaagcttctacatactcagctagaatgtactgtatggttttttaaaaaattgtgttagaagagttcatctttgtttccacgacaggactgaatccactgtcattaataaaatgccatcaaagtgcattcgctcagcacagataagcaagtgggtagaagggccaggccaaggagtgaccctctcagcaayaggcagccactgaggatttgaaaagaggagtgtcacaagccctatgccccattttaccactaactatgattttccacttctactcttcagtgactgctcttttgaaagatggtacaatgaccttccaagtgtctctcagtgt

SEQ ID NO: 343114 - DNA, 621 bp, Homo sapiens
gctggtacatcaagccctattcaatttgaaaaatctaaaatagttaaagctgtattgaggaaaattaagatttctacttattcagattctacattaggaaatgctgggattgctttagaactaacttgggcttagagtattgctctgtgtctgctagtatagtgctatggcttaaaaaaaaaaaaaagrtattttagtaaaagtccctgtctgttttgtagactctcatggattaaacaaaaaacctagccatcccttgtaggataaatacctttggaaaaacatgttccaattcaatgtggacttccacattgctcacatttaaaatcagaggtttcctttaaacagaatctccattctctttgcagattagctgtggcacttctcgcatattggctgggctttccacctccctccctcttctttctttcacctcctccgcttgtatgatcaggaaaaatcagtttaatattagccaaaataaaacaataataaataaatcttctaggggaaaaaaattacactccatttacattgctccaacctcagtgggggcctcaacactgctgagccccgctgctttctccctggaccaccgagctcactgagaccttagccaac

SEQ ID NO: 343115 - DNA, 621 bp, Homo sapiens
gctggtacatcaagccctattcaatttgaaaaatctaaaatagttaaagctgtattgaggaaaattaagatttctacttattcagattctacattaggaaatgctgggattgctttagaactaacttgggcttagagtattgctctgtgtctgctagtatagtgctatggcttaaaaaaaaaaaaaagatattttagtaaaagtccctgtctgttttgtagactctcatggattaaacaaaaaacctagccatcccttgtaggataaatacctttggaaaaacatgttccaattcaatgtggacttccacattgctcacatttaaaatcagaggtttcctttaaacagaatctccattctctttgcagattagctgtggcacttctcgcrtattggctgggctttccacctccctccctcttctttctttcacctcctccgcttgtatgatcaggaaaaatcagtttaatattagccaaaataaaacaataataaataaatcttctaggggaaaaaaattacactccatttacattgctccaacctcagtgggggcctcaacactgctgagccccgctgctttctccctggaccaccgagctcactgagaccttagccaac

SEQ ID NO: 343116 - DNA, 599 bp, Homo sapiens
tgattatggcaccagcggatcaggtgtctggcaagggctcactttttggttcacggatggcaccttcttgctgtgtcctcacatggtagaagggaacagatagttctcttttataagggcactaatcccattcatgaaagctccacctccacragctaatcaccttccaaaggccccacctccaaatgccatcaccttggaggttaggatgtcaacatatggacttgagggagacacaaacattcagaccatagcaggctccctaatttttaaatgaaggacctcactgtctggcagtctgtctcacaaactcagcatctcaagttaagcctcatggtcagtttataaggaagatagataccatcacatccagctgacggatggatgatgagcaaactgaggatcaaagggattaaatgatgtgtccctggtcccatgactactaagtgacaaacagaacctggttatcctaaccctcagttcacactgcatgcaccacatctgtttcagtacagtgccaatttatcttctcagttccccttcatatgtcccacagtctagcccaactgggccaatgaacctaccccagccttttaaca

SEQ ID NO: 343117 - DNA, 599 bp, Homo sapiens
tgattatggcaccagcggatcaggtgtctggcaagggctcactttttggttcacggatggcaccttcttgctgtgtcctcacatggtagaagggaacagatagttctcttttataagggcactaatcccattcatgaaagctccacctccacaagctaatcaccttccaaaggccccacctccaaatgccatcaccttggaggttaggatgtcaacatatggacttgagggagacacaaacattcagaccatagcaggctccctaatttttaaatgaaggacctcactgtctggcagtctgtctcacaaactcagcatctcaagttaagcctcatggtcagtttataaggaagatagataccatcacatccagctgacggatggatgatgagcaaactgaggatcaaagggattaaatgatgtgtccmtggtcccatgactactaagtgacaaacagaacctggttatcctaaccctcagttcacactgcatgcaccacatctgtttcagtacagtgccaatttatcttctcagttccccttcatatgtcccacagtctagcccaactgggccaatgaacctaccccagccttttaaca

SEQ ID NO: 343118 - DNA, 599 bp, Homo sapiens
tgattatggcaccagcggatcaggtgtctggcaagggctcactttttggttcacggatggcaccttcttgctgtgtcctcacatggtagaagggaacagatagttctcttttataagggcactaatcccattcatgaaagctccacctccacaagctaatcaccttccaaaggccccacctccaaatgccatcaccttggaggttaggatgtcaacatatggacttgagggagacacaaacattcagaccatagcaggctccctaatttttaaatgaaggacctcactgtctggcagtctgtctcacaaactcagcatctcaagttaagcctcatggtcagtttataaggaagatagataccatcacatccagctgacggatggatgatgagcaaactgaggatcaaagggattaaatgatgtgtccctggtcccatgactactaagtgacaaacagaacctggttatcctaaccctcagttcacactgcatgcaccacatctgtttcagtacagtgccaatttatcttctcarttccccttcatatgtcccacagtctagcccaactgggccaatgaacctaccccagccttttaaca

SEQ ID NO: 343119 - DNA, 611 bp, Homo sapiens
gggtctgtgtgagtgtgccttatgacagaatggtgtcctatccaggattgtttcctgacttgtgccctgagctgccaggataggctctggccatctgagatgctgaactgaaataagcaggttggaaaaggaatgaatgaatgaatacaaattattgtaaaatgaaaatttgtgaagtatccaataatcatacaaaygcatgataatacatgacatggggtgaaagcacttagttacccgccatattgattatttgtttttgaactgcatggtggaaggactccttagaaattttgctccgcaaactttcattcgtgatttattccacacccgtattgcaattgctcacagatacacaataaattggataaataattatttgttggtgtggggtttttatttttatgtcacaacaagaacatataaataattttctttttattaatctttcttaaatgtatgaaaggaaaataaaaactggtgaccaaaattcacttgccaagaggaaaagaatcaagctgaaagttgagttatgcaagaagctgccttttcttttgttcctaagcagaaagctacagataaaaggttaaatacctgcacaggtagctagc

SEQ ID NO: 343120 - DNA, 611 bp, Homo sapiens
gggtctgtgtgagtgtgccttatgacagaatggtgtcctatccaggattgtttcctgacttgtgccctgagctgccaggataggctctggccatctgagatgctgaactgaaataagcaggttggaaaaggaatgaatgaatgaatacaaattattgtaaaatgaaaatttgtgaagtatccaataatcatacaaatgcatgataatacatgacrtggggtgaaagcacttagttacccgccatattgattatttgtttttgaactgcatggtggaaggactccttagaaattttgctccgcaaactttcattcgtgatttattccacacccgtattgcaattgctcacagatacacaataaattggataaataattatttgttggtgtggggtttttatttttatgtcacaacaagaacatataaataattttctttttattaatctttcttaaatgtatgaaaggaaaataaaaactggtgaccaaaattcacttgccaagaggaaaagaatcaagctgaaagttgagttatgcaagaagctgccttttcttttgttcctaagcagaaagctacagataaaaggttaaatacctgcacaggtagctagc

SEQ ID NO: 343121 - DNA, 630 bp, Homo sapiens
ggattagcatcatcttacctttaatttctaagcaactatcagtattttcatgttaccaaagtctatcaagtcattaggaaaaatgaccaaacccattgtttgttatcatggagaccaaacagctggctgacttagataaagatttcactcttctgtatcttatcgtgtgacaagctggagtcacaacagaggatttggagatgctgaatttgtctttaaacactacacttggaaaaaaataaaaactagattagcctacattttgaaatacgctttttatttatttcagtctttcattcatttataatcatgaatctgaatagtggaattatgggttggggttttkttttgggcagctttgaaaggttttaaaagagaaaaggaaactatcagccctatctctgaaaaacaaggaaacacaatgaaaatattttacatcatatggagataatacataaatagtaaaaggactgtgctattataagtctaaaacacagggcacacttcctactctttatcttaagatacagaccctttgatggagagtatttgtaatgaaaataaagctgagctaattgttagctttaattactaaaggtaacaggatacagcaaacagggtctcctgaaa

SEQ ID NO: 343122 - DNA, 630 bp, Homo sapiens
ggattagcatcatcttacctttaatttctaagcaactatcagtattttcatgttaccaaagtctatcaagtcattaggaaaaatgaccaaacccattgtttgttatcatggagaccaaacagctggctgacttagataaagatttcactcttctgtatcttatcgtgtgacaagctggagtcacaacagaggatttggagatgctgaatttgtctttaaacactacacttggaaaaaaataaaaactagattagcctacattttgaaatacgctttttatttatttcagtctttcattcatttataatcatgaatctgaatagtggaattatgggttggggttttgttttgggcagctttgaaaggttttaaaagagaaaaggaaactatcagccctatctctgaaaaacaaggaaacacaatgraaatattttacatcatatggagataatacataaatagtaaaaggactgtgctattataagtctaaaacacagggcacacttcctactctttatcttaagatacagaccctttgatggagagtatttgtaatgaaaataaagctgagctaattgttagctttaattactaaaggtaacaggatacagcaaacagggtctcctgaaa

SEQ ID NO: 343123 - DNA, 589 bp, Homo sapiens
tgaaagatgggcacatttgttgaaatgaatgttcagtatggctgagtgcaagaaactggtagagacgagagatgacacaagaaaggtaagattgagttcaaatcgcattgggctttgtttgccacattagggaatttgaaatgtttctgctgagtgatgagggagcttaccaaagagctttaagcaggtcaagcaatatgaacaattgtgttttataagctggcaggagagaagagtatggtttggaggaagcaactcaagagtcaagaagaccagttatgaggccactgtaccaggtcatttatgatggaaatgaccaaagcagcaaagatgggcatgaaaaagaggtacagattttaaagaaaactaaaataattaacagaatatgattatactgatgagaaagaggagctgaatgggaagaagcagtaaaattatcatccagatttctgaaytggtggctggatagttgctattagaattgaaatgtaggacctttaacaagaaagtctttgggttaaaatataatgagtttagtcctgagatatctgtgtgacatcccagaataaaaataccctagtagccagtg

SEQ ID NO: 343124 - DNA, 450 bp, Homo sapiens
gtgtatttttataattgttataataaatgatctttaaaaggttttttttttaaaaaaaaaaagcaagtaaaattgtgaggttgtaatttcagaaataattgtgaattttagttaaatttactggccttccatttaatactttttgtcaggtaacctctactaatttgacaccaaaactagcatttatttggttaatatgttcgccctaaataatacgtggttgataaagcaattataagagagcccagtaatacaggagctgctataagaactggaatatatgacaattctttcttttctgagggataatttgaggaaaaaccttgtctcatatctatatttacataacccagtgttgtttgtgtgtgaatgtgtatatgtgtgctgaaatacctstttacgtgctagaaacaccctcgtggtaatggtggcatagtgggtaattgtttt

SEQ ID NO: 343125 - DNA, 585 bp, Homo sapiens
cttgaactcctggcccaagtgatcagcctggcttggcctcccaaagttctgggattatagacatgagtcactactcctggaccctccattttcaataaacttgaaagtttatgttcaatttttcttttggcaagcatgcagtacttcaaaagyggtgctatgtgctgcacattgtatcacatcaggaggcacacaatgttgttcataccactctctaagcatcctccatcttcccctacgaagtttaagagaaccttggggaaatcatttaaccttgcagagcctcagctttctcatagagacaatggggataatagtagtacacccttgcaaagtttagtgtaaagattacactatgtaatctttgtaaagaccataacatggtgcatagtacactgaaaaatataagagaccttaacttattatgaataaggcatgcaaagtagttagtacagtacactggtctaggagagtgttaataatgttagctattattgcctttataaattattttggctgaacaggccaggtaaatttcattgagtagacagtatttgaaggatgaaatgaaaaggcatagaccgc

SEQ ID NO: 343126 - DNA, 517 bp, Homo sapiens
ttatgttcaatttttcttttggcaagcatgcagtacttcaaaagcggtgctatgtgctgcacattgtatcacatcaggaggcacacaatgttgttcataccactctctaagcatcctccatcttcccctacgaagtttaagagaaccttggggaaatcatttaaccttgcagakcctcagctttctcatagagacaatggggataatagtagtacacccttgcaaagtttagtgtaaagattacactatgtaatctttgtaaagaccataacatggtgcatagtacactgaaaaatataagagaccttaacttattatgaataaggcatgcaaagtagttagtacagtacactggtctaggagagtgttaataatgttagctattattgcctttataaattattttggctgaacaggccaggtaaatttcattgagtagacagtatttgaaggatgaaatgaaaaggcatagaccgcaacacactaagcctcagagaaacctctctgataagtttct

SEQ ID NO: 343127 - DNA, 377 bp, Homo sapiens
ggctaatacagattttggtattgagattggctctggagaaacagattttcaaaagtgagggttttttaaaaaaaaaatcattctgcagtttctgaaattggctttctaatctgacacagtttaaagatgataatgattccttttccagtagtaaagaggcaaacagttcgtggcacaaactgtagatatatacaaaatatggatattcctaatcaaacacttytaagatgcaaggagcttagtaactctgtatatattagctttgaacacttttggaaaactaaggaatatgacactgaatcactggaaaaagtagtttacaaaaaaaaaaatgagctaagggattcaaattcccacctcaagtgctacataaatga

SEQ ID NO: 343128 - DNA, 424 bp, Homo sapiens
tatatgaggtattaaaactcaagatgttaggtatctggctgaagatctcatagctaacatgggtgatgctgagtttgaagtgaagtattcctgtatagacttcaaaatccctagtttccctrccctaccagacctttttcatatatcattgcttttaatcttcacaacagcttttatccacactttaaaattataaaacctaaagtttagagagtttacacaactggcctaagtcatgcagctagtgagacagcagagattcaaacttggtctctgactccaaaattcatattcttttttttttcacttttattttaggttcaggggtacatgtgcaggtttgttatataggtaaattgcatgtcacagggatttggcgtgcagattattttgtcatcaagcatagcaccaaataggtagtttt

SEQ ID NO: 343129 - DNA, 503 bp, Homo sapiens
gatcctgactccaaaagaaaatactgggaagttacatgggatgaccccgtgtgaccactccagtgtggttcaggaagctcttctccagtgctcctcactcattcatgcagtttttctgaagatggaggcctttgcagaggtgctgagagtgacctggttggtgtcarccatttgttcatgtttctcatttgtggtgaaaaatctattgaagactctgagtgtagagtgggcatgggtagtggctttgttcccttgcttcttcccgatgccttgagactagcaggagatatcaacttggcatttttgtctattctgcagactcaatcttttattgggactgtcattccaagatgacacctaaaggatagtgagcttagaatgcaccacacttgtgtttataagaaagccaactcctttacattacatcaaaattggttccaaactttggttagaaaaaggggtgctatttattttatttatttgccttttaatggacctcatgt

SEQ ID NO: 343130 - DNA, 503 bp, Homo sapiens
gatcctgactccaaaagaaaatactgggaagttacatgggatgaccccgtgtgaccactccagtgtggttcaggaagctcttctccagtgctcctcactcattcatgcagtttttctgaagatggaggcctttgcagaggtgctgagagtgacctggttggtgtcaaccatttgttcatgtttctcatttgtggtgaaaaatctattgaagactctgagtgtagagtgggcatgggtagtggctttgttcccttgcttcttcccgatgccttgagactagcaggagatatcaacttggcatttttgtctattctgcagactcaatcttttattgggactgtcattccaagatgacacctaaagratagtgagcttagaatgcaccacacttgtgtttataagaaagccaactcctttacattacatcaaaattggttccaaactttggttagaaaaaggggtgctatttattttatttatttgccttttaatggacctcatgt

SEQ ID NO: 343131 - DNA, 585 bp, Homo sapiens
ggaattatttggcatagaggttaaagtaactgcttagtacattaagtaataaaagataggatggattatttggacatagaactgaaattgtttaaggaataaaagaaccaaatagcaatcctggagctgaaatatataatatcaaaaattaataattcaatggactgacttaacggagtacttggcactgaagaagttacaatacattaggtaataggtmagaagaaaaattcagaaatgatggagaaatgcaaaagagagactaaaagacatagtgaataaagtagaaaaaaatcacatgtttaattggagtcctagaaggagaggagagaaaaaaatatgacaaagaatatattaagaaattataacagaaaaatttacaagctttcaaagacctcaaatcataggatgaaaagactgctataaaacttccttccagctttgacataataagcacattccaacatcatcatttcacaaacaacaataaaaccatagacaatttactaaaacaactcaccaaatgctataatagttggagcaaaggaagtctacctgggagtcgcaggacttgaggaacaacac

SEQ ID NO: 343132 - DNA, 630 bp, Homo sapiens
attctagcactttgggaggctgaggtgagcagaccccttgagcccaacagttctagattagcctgggcaacacgatgaaaacctgtgatatgatttggctgtgtccctacccaaatcttgaattgtagctcccataattcctacgtgttctgggaaggacccggtgagaggtaattgattcatgggggcggatctttcctgtactgtcctagtgataatgaatacatctcactagatctgatggttttataaaggggagttctcctacacaagctctctcacctgctgccatgtaagacgtgacttggctcctcaatttgccttcagccatgrttgtgaggccccccaagccatgtagaactgtgagtaaattgaacttcttttctttataaattaccaagtctcaggtaggtctttattagaagtgtaagaacgaactaatacaccctgtctctactaaaaaataaaagatttagctaggtgtggtggtgcatgtctgtagtcctagctactcaggaggctaaggagggaggatcacttaagcctgggaggtagaggctacagtgagccttgatggcaccactgcactccagcctgagtgacagaatgagaccttatctcaaaaaaaaa

SEQ ID NO: 343133 - DNA, 630 bp, Homo sapiens
attctagcactttgggaggctgaggtgagcagaccccttgagcccaacagttctagattagcctgggcaacacgatgaaaacctgtgatatgatttggctgtgtccctacccaaatcttgaattgtagctcccataattcctacgtgttctgggaaggacccggtgagaggtaattgattcatgggggcggatctttcctgtactgtcctagtgataatgaatacatctcactagatctgatggttttataaaggggagttctcctacacaagctctctcacctgctgccatgtaagacgtgacttggctcctcaatttgccttcagccatgawtgtgaggccccccaagccatgtagaactgtgagtaaattgaacttcttttctttataaattaccaagtctcaggtaggtctttattagaagtgtaagaacgaactaatacaccctgtctctactaaaaaataaaagatttagctaggtgtggtggtgcatgtctgtagtcctagctactcaggaggctaaggagggaggatcacttaagcctgggaggtagaggctacagtgagccttgatggcaccactgcactccagcctgagtgacagaatgagaccttatctcaaaaaaaaa

SEQ ID NO: 343134 - DNA, 597 bp, Homo sapiens
ccaacagttctagattagcctgggcaacacgatgaaaacctgtgatatgatttggctgtgtccctacccaaatcttgaattgtagctcccataattcctacgtgttctgggaaggacccggtgagaggtaattgattcatgggggcggatctttcctgtactgtcctagtgataatgaatacatctcactagatctgatggttttataaaggggagttctcctacacaagctctctcacctgctgccatgtaagacgtgacttggctcctcaatttgccttcagccatgattgtgaggccccccaagccrtgtagaactgtgagtaaattgaacttcttttctttataaattaccaagtctcaggtaggtctttattagaagtgtaagaacgaactaatacaccctgtctctactaaaaaataaaagatttagctaggtgtggtggtgcatgtctgtagtcctagctactcaggaggctaaggagggaggatcacttaagcctgggaggtagaggctacagtgagccttgatggcaccactgcactccagcctgagtgacagaatgagaccttatctcaaaaaaaaaagttagatta

SEQ ID NO: 343135 - DNA, 563 bp, Homo sapiens
ccttttcctgattcttaataatgtttgtgagttatagataatgtacgtcactttcaatggaaattttggattaagttgtctctctaaacattcattttagaatctatttctgaggtaagatgcaagtgaaaactaagactttccggctgtgcatggtggctcagcacttttggaggcggaggcaggtggatcacttgaggtcaggagttcaagaatagcctggccaacatggtgaaaccccatcrctactaaaaatacaaaaaaattagccacatgtggtggcgtgcacttgtagtcctagctacttgggagactgaggcaagagaatcacttgaacccgagtggcagaggttggcagtgagccgagatggcaccactgcactccagcctgggcgacagagtgagactgtgtcaaaaaacaaacaaacaaacaaaactaagactttccacctcaagccacttataatttaaatcacaatcttatttgataagaaatatttagcttagcaaatcttcgaaagaaccttagtgagaagtggttaatttgaaagatagaattcatc

SEQ ID NO: 343136 - DNA, 572 bp, Homo sapiens
ttgcagttcatttctccccaaatatttaatagccaattaagatgtaaaaatgtgcctgttaaataatattacaggcaggttaatagtgaagcaacaactttatgaaatctagaagcttgttctgatttattttttcagcaaaaggatattagcattgataaccatctttctggctgcagaagaaaataaaatatattatttccatacgagtctatgacacgtacaaatatatttaaattttaagaacaccttaaaataacaattcagctttacaaaattgtcacatcaggagaaaattggttgccttagaaaataaaacaccacttcatcaactgctactgtaaagtcccctaaatagtgtattcctgactgcatttaataattttgttttaagacaaaaagttatggaggccaaagaatgcataactgagaataatgtaatgcaataattatttttgtgattttaattgtattcarttctatgggcattttttagtttccttattttgggtggtgaattgtagtactggacattctagaataatttgttcctaaaaaaatctttcttcagg

SEQ ID NO: 343137 - DNA, 612 bp, Homo sapiens
ctgatcttcagataaaatgtaggacatatttcctgggttcagctgaccctgctgcaaagagcccagtgactttgtcttcaataacatatttatattagaagcttcccctgtagttcatttgacatatagtgctgacatctcactgacaggggtcaaattttgttcaggcgaaagtgtctttggaaaacttcattgtgtttcatacacaggctataccaacagtatttttcctaatgtttcaaacgatggtgtgtggagagcatagtcctgaaaaataatcagaaacaaccacaataaaatgtgaattaattaattgtgaactccataatgtttaataatgactcatactcatgataaaaacagtatatttgaaagttcaagaatttccttatatcttgtagttttaaatraaactgagcttctggtgagaaatcttaggagggcttcatacatgaaggactagagtgaatgcttacctgtaaatgctctgtgtgtttcctgggagcaaaatggttggatggatagagaactgaactaaaggtcaagagaaacaaaaaggattcagtggatggcttctaagcttataatattcattgaatttagcgtgattta

SEQ ID NO: 343138 - DNA, 617 bp, Homo sapiens
cctctggctgcaataagcagggctgggatgtgaaataaggcttgagagcaggcccagtcatcacacaagggccattagccaagatgaagagtttagaaattatcccaaggcagtgagagccattggctgatgagaagcgaagaaatggcaggatcagatctgtctttcacagagggtgtgctgattgcagaggggaatggattagaggaggccaggccagaggcagggaaacaagttaggaagctgttgccaagggtaagggcagttcgatttgcttcagtgagaaacagaggccagatgtccaggagcacagtcaagggatggattcagccctcagagtggcagggaaggaatggttcrtgtttgttgatgtaactggagtcactgaactttgacctttactagtcaaagccatagctgcacagagtcacatgcccgtagtgatcgatgagaagcattgccctctctctcttttcctccgtctgacatgtggagccataaattcactgcccccttctaagaaaattgcagccagagtttttctagccagtgtgaatttggtccaaagggaccatggccagagggaggccatttgtaaaacatcctttaggtaattg

SEQ ID NO: 343139 - DNA, 592 bp, Homo sapiens
gtcaaaaattcacacatgacttctgactctccccaaaattaattactaatagcctattgttgaccacaagccttaccaatagcataaacagtctattaacacatattttgtgtacatatataaaatatatatatacacacatatatataaattatagtgtattcttacaataaactagtgaaaaatgttattaagaaaattataaggaagagaaaatatacttactatttattaagtagaagtgggtcattataaaggtcttcatcctcgttgccttcacattgagtaggctgaggaggaaaaggaagaggaggaggggttggtcttgctgtctcatgggtggagaggtgaaagaagtagaggaggtggaaggggaggcaggtacatttggtgtaacttttattgattaaaatccactaaagatgaacccaagcacttcaaacccatrttgttcaagagtcaaatgtatttttatttaactataaaagtaatctatacaaattttaaatcagaagacaaataaagaagaaaacaaaagtctttgctatccccaacttactccaagaggcaccccagatactgctttgatgca

SEQ ID NO: 343140 - DNA, 585 bp, Homo sapiens
  misc_feature (1)...(585): n = A,T,C or G
accttctttacatactccacattgtgtcttccccattttttattcctctgttatttctctcattctcaacaatcccagatttcgaaccacaacatgtttctgaagcagagctgtaaactrctacagtgtcatggccagagcccttcccctgccagctctatcaaagtggggtgcccaggtttcagtttcacaaggattatgtctcaggttcttggttgcagtgctggttcagattcccaacagtttcttggtacactagaaacacctcaaatgcttggtgaatagaatggttacagattgagcaactgccctataactttttatgtttacttttatgtctagatgtgtgcatgtgtgtgttcagaagcatgagagaggggtagagcatgagtggagaatagaagagaagtcaggaaaattcatcacacttacaaggcaaataatgacttgccaagaattctccacacctgactgaacaaaccccttcaccaaagtagtgttttggataaagtcatttttgatagggtgaaataataccaattccatgtagcgaagtttgcttttgggataatcaganaacaactg

SEQ ID NO: 343141 - DNA, 575 bp, Homo sapiens
actgtgtactattagcagtgccaaccaccaactgattttaattagatttaacttttgctcttgatgtaacacaacttggctgtgctgcctccrattaacaaaggaccattaatcattttatgtaacaaaagaacactgtgggcctgcactgaaagcatttaatagagaggttaagtttgtgtgcactgaaataatattcaactaaagcataattgaatcctggccagtggtgaaggaaagtgatatcccagggaggaccctgaagctccctagagcagggttgctcagccacaccgctattgacatatggggccagatcattctttgctgaggaaggctgtcctgtgcactgtaggatgtgtggcagcatccctggcctctacccactaaatgccagtagcacataccaccaccatcacttccctcccaccaatgtgacaagcaaaaatgtctccagacatatgtaatgtcaatacacatatccccacagaggggaagggcacagttgtccccagttgagaaccactgccccagaggaataggcagctctcaccttttctgcactgtctggctga

SEQ ID NO: 343142 - DNA, 575 bp, Homo sapiens
actgtgtactattagcagtgccaaccaccaactgattttaattagatttaacttttgctcttgatgtaacacaacttggctgtgctgcctccaattaacaaaggaccattaatcattttatgtaacaaaagaacactgtgggcctgcactgaaagcatttaatagagaggttaagtttgtgtgcactgaaataatattcaactaaagcataattgaatcctggccagtggtgraggaaagtgatatcccagggaggaccctgaagctccctagagcagggttgctcagccacaccgctattgacatatggggccagatcattctttgctgaggaaggctgtcctgtgcactgtaggatgtgtggcagcatccctggcctctacccactaaatgccagtagcacataccaccaccatcacttccctcccaccaatgtgacaagcaaaaatgtctccagacatatgtaatgtcaatacacatatccccacagaggggaagggcacagttgtccccagttgagaaccactgccccagaggaataggcagctctcaccttttctgcactgtctggctga

SEQ ID NO: 343143 - DNA, 626 bp, Homo sapiens
aggctaagaagtacatctgtctggacctcagtttcctcatctgtaaaacaaatggattgaacgagaatgatacctaagctctcatttactcttgagttctcttaacatctagtgactctatgctttcctgagtataacagaagtaaggaaaggcagtttccctttatcctgggrttctttgggacatatgagactatgacggaggtaggaaaatactcaacgatgggtaccttcgtacatttctctacctatgtggtgaccagtaagtagagacagccaagcacacataactggtgatttacagggtcttgtcaataaatagtgaaaatagataagcatctttactacaattaattttcaacagccacaacattaaattcctacccatagagactgtgctcctagggtccagtgacctctctaggcatattgttttaaatcaatcagatccaagagaagggtaacatattattagtaatttatcacagggcgtcctaacattttacccattaggatacatacagaaaatgataatatttgtataatatctttaggtaaagggaaaagctaatcccagccagagatgaccagcctatgtagatgagttcacattcgttcacctgaga

SEQ ID NO: 343144 - DNA, 513 bp, Homo sapiens
ctaatcccagccagagatgaccagcctatgtagatgagttcacattcgttcacctgagagctgagagggtcaatgtggcagcacattggaagccttcttgctgcgtgtggttggatattctgccttagtttaaaagacttcatctttagatttcttcccagcccagaacctgtcagcttggccctgagacttttgataatgagagggggagggagaaataaawctcttttgagctctgtcttctaccttagaagagtatcaagtgctaaaatagctcgcagcaatcagcagaatcagagtgaaggaaggtgcagagtactatggaagaagtcgggggatggtcaggatagggggaaggtatgcagtgttgactgacaaaattacaacaaatttagtttaaagattttagttggcttttatttgtgattctagaatctggcaacatattattccataaaatagaatgaatgttctgatgagctgagcagaggagcttggctttatagacagaaa

SEQ ID NO: 343145 - DNA, 513 bp, Homo sapiens
ctaatcccagccagagatgaccagcctatgtagatgagttcacattcgttcacctgagagctgagagggtcaatgtggcagcacattggaagccttcttgctgcgtgtggttggatattctgccttagtttaaaagacttcatctttagatttcttcccagcccagaacctgtcagcttggccctgagacttttgataatgagagggggagggagaaataaatctcttttgagctctgtcttctaccttagaagagtatcaagtgctaaaatagctcgcagcaatcagsagaatcagagtgaaggaaggtgcagagtactatggaagaagtcgggggatggtcaggatagggggaaggtatgcagtgttgactgacaaaattacaacaaatttagtttaaagattttagttggcttttatttgtgattctagaatctggcaacatattattccataaaatagaatgaatgttctgatgagctgagcagaggagcttggctttatagacagaaa

SEQ ID NO: 343146 - DNA, 577 bp, Homo sapiens
tgaccctcctcccatctagagtggggtttatgtccccacctcctaaatctggactctgagactcttggtcagtagaatgtggtacaagtgatgctgtgccagtttttgagccaaggccttaagaaactgatggctgccactttccttcaggccagttgctcttagaacccagctgaggtcccagctaatagccatcatcaaccagcagatatgtcagatgactacaaccccagctacctatgacatcaattgcatgagaggytccaaataagaaccgcccccattcaacccccagaaccatgaaaaacaataaaaagattccagttattttaagtcacataattttctgttacacaacaataggttgctggggcaacgtggaagaggaatttgactttttctgtatagctacaacaagtaaaactagtctataggaagctccaagcactctaggatagtaagtacaggcagttagatttcggtttaatgttaagaaaagctttgtgtaaagtgttgggaggatatggaaaaaaggaatcccttgtacactgttttcccagtgtaaattaggacagcc

SEQ ID NO: 343147 - DNA, 279 bp, Homo sapiens
aattaggacagccataatggaaaatagtatggaggtcctcaaaaactaaaaatggaactaccatatgaaccagcaatccaacctctgggtctacatgcaaaggaaataaaatcagtatattgaaaagaagtcttggataaagaaactgtggtgtgtgtgtgtgtgtgtgtgtgtgtgtgtgtgtgtrtatatatatatatatatatatatatatatatatatatatatatatatatggtggaatactactcagccatgaaaatgaatgcatttgcagca

SEQ ID NO: 343148 - DNA, 564 bp, Homo sapiens
taagtgaattcttgatttcatagaatatttgtcacttagagctgtaccaggtgccagaacataacaatgaataagagacagttctcttgacctcaaattgctcacagtctagaaggattgaatggagrtcaacaagcaaatagacacttaaaatgcaggatgataattagtgtcctagaactatacacatagtggcatagaaacatactaagggcacctacataggtctgcaggaggcagggaatggctttacaggaatgtttggattgaggcttctagaatgagtcaggtatattcccaggagagggcattccatgaagacaaatggctgtgcaaaggaatggagctataagagcatggcatgctcaggacctcccaagctcaccatgtaactgagcatagagatgagaaagaggcagacagtacaggctgatcaacaaagccagatgcagagagaatccagccagatctttgtcctcaaggagcccctgaagagtattacgcaaatcagcgacatgatcagatttttgaagaagaaatatcactctacaacaaaggcaaagg

SEQ ID NO: 343149 - DNA, 560 bp, Homo sapiens
ccagaacgtgaccgaaagaagagaggagaaccgatttacagggcttttgcatttgatagagatgagggccccaacgcagaaatctcctacagtattgtggatgggaatgatgacggaaagttctttattgaccctaaaactgggatggtttcttctagaaagcagtttacagcaggcagttatgacatcctaacggtaagatcttccaaactccagcagcacagcagatggggggaagtggttatgttcttattcaagtatactcctttgagcaataaatctttagagtaaaaagtgaagccacacagctgtggaagggttctttctgggaggcaagtgcaggtgagaactcttgcctgtttcattgatattcttaaatgacragacaatttcctttggttgtgtcctgtcagcattttcccccattcccaggccacagcctgtttcaccacatactcaaccactctttctgcagccctaaatcatcctcaaagtgctgaacatagatgcaaactagcggtaggggaacagcagggcaacacatcctacccaccactgaa

SEQ ID NO: 343150 - DNA, 516 bp, Homo sapiens
ccaccccaggataagtcagaaagtatccagaatagtcctcactaaaggatggggatgcagccactggatcttccacttcatcagagacagggctctgatgtctctgatgaagtggaagatccaacatagactcatttctcacagcaacatgtgaggcaaaccccatgtttgcctcagagaagctaacagatgataggaataataataatagcagcagtagctaatattaactgaattcttactacagttagacctcatgctgatactctgcattcataaactcatgtaatcctcatagcaactgccatgttgtaggtattggcacctccaaacaagaagactagggtgyggagaagttaggtggcttgcttgaggtgactcatctgtttcgtgacagagttgagattgggatgcaaaattacctgctacaaagcccatgttgccaaatactaacattgtattataaaaagtataataatatcccttacaaaataaagaactagtttatgcagaggc

SEQ ID NO: 343151 - DNA, 546 bp, Homo sapiens
gggcaagtgatcccacagacagtaggaaagagtgttatagactgaattgtgatctcccaaaattcatatgttgaggccctaatctccactgagactgctttggagataargcttttaggaggcaattaatgttaaatgaggtcttaagggtggggtcctaatgtgataggattagtgacccataagaagagaagaaagacagatctctctacatccaggtgcacctaggaaaggccatgtgaacacaatgggagaaggagctgtctacaaaccaaggagagagccctggacaaaacctgaccaatgctgacaccctgaacttaaattcccagactccagaactgtgagaaagtaaatgtttgttgtttaagtcatccagtctcaggtacttcgttatggcagtctgagcagactaatacagaaagcattgtcaagatggatgccacagtcttcttataacctaatctctgaagtgatatcatcacttctgctatatcctgttcattagatgtgagtcagtaagtccagcccactctcaagggaagg

SEQ ID NO: 343152 - DNA, 546 bp, Homo sapiens
gggcaagtgatcccacagacagtaggaaagagtgttatagactgaattgtgatctcccaaaattcatatgttgaggccctaatctccactgagactgctttggagataaggcttttaggaggcaattaatgttaaatgargtcttaagggtggggtcctaatgtgataggattagtgacccataagaagagaagaaagacagatctctctacatccaggtgcacctaggaaaggccatgtgaacacaatgggagaaggagctgtctacaaaccaaggagagagccctggacaaaacctgaccaatgctgacaccctgaacttaaattcccagactccagaactgtgagaaagtaaatgtttgttgtttaagtcatccagtctcaggtacttcgttatggcagtctgagcagactaatacagaaagcattgtcaagatggatgccacagtcttcttataacctaatctctgaagtgatatcatcacttctgctatatcctgttcattagatgtgagtcagtaagtccagcccactctcaagggaagg

SEQ ID NO: 343153 - DNA, 546 bp, Homo sapiens
gggcaagtgatcccacagacagtaggaaagagtgttatagactgaattgtgatctcccaaaattcatatgttgaggccctaatctccactgagactgctttggagataaggcttttaggaggcaattaatgttaaatgaggtcttaarggtggggtcctaatgtgataggattagtgacccataagaagagaagaaagacagatctctctacatccaggtgcacctaggaaaggccatgtgaacacaatgggagaaggagctgtctacaaaccaaggagagagccctggacaaaacctgaccaatgctgacaccctgaacttaaattcccagactccagaactgtgagaaagtaaatgtttgttgtttaagtcatccagtctcaggtacttcgttatggcagtctgagcagactaatacagaaagcattgtcaagatggatgccacagtcttcttataacctaatctctgaagtgatatcatcacttctgctatatcctgttcattagatgtgagtcagtaagtccagcccactctcaagggaagg

SEQ ID NO: 343154 - DNA, 546 bp, Homo sapiens
gggcaagtgatcccacagacagtaggaaagagtgttatagactgaattgtgatctcccaaaattcatatgttgaggccctaatctccactgagactgctttggagataaggcttttaggaggcaattaatgttaaatgaggtcttaagggtggggtcctaatgtgataggattagtgacccataagaagagaagaaagacagatctctctacatccaggtgcacctaggaaaggccatgtgaacacaatgggagaaggagctgtctacaaaccaaggagagagccctggacaaaacctgaccaatgctgacaccctgaacttaaattcccagactccagaactgtgagaaagtaaatgtttgttgtttaagtcatccagtctcargtacttcgttatggcagtctgagcagactaatacagaaagcattgtcaagatggatgccacagtcttcttataacctaatctctgaagtgatatcatcacttctgctatatcctgttcattagatgtgagtcagtaagtccagcccactctcaagggaagg

SEQ ID NO: 343155 - DNA, 616 bp, Homo sapiens
gacccagcaatctgttcaaatacaccctcgaggtggctcttatgctcactgaagtttgagaaccactgatctagagtcttattcagaaattgcattttccacaagctcccaggtgatactgagactgttggtccagactttttgagtaccactgtcctacccttgactatagcatcactattaattgaatgtctgttaaccaaccctcctgtggcccctatcatgttgtctgcagccctgcaactaactagctgtggctcagggcaagttacttaacccctcagagtttattcatatattaaatagaatgaaaaagtacgctaacttgcagggctattatgagaaatgggaataatgtatctaaggcacttggcgcagtgcctgaagtggagcagaagctctgaaagcagatgttattagccatattatgattatcatttaaarttcttattaagtaactgagcttgcctaggagggtccaagactagtagagaagaaacgtgcatgcagctctctgtcgggataatcaggacatgcgcaggagctcagaacagggaggtctaactccagagaaggaaaatgtggccttacaagttcaaagtgcttttcattcagt

SEQ ID NO: 343156 - DNA, 217 bp, Homo sapiens
tgtagtcaatcgctggctgtcttaatctgtttgggctataaaaaataccygagacttcgtaatttataaacaacagaaatttattgctcatagttctggaggctgggaagtccaagatcaaggcaccagcagatttggtgttggtgggggcacgttctatttgaaatgggcctccaccagacactagatgttcttgcatgacagaagagaagaacag

SEQ ID NO: 343157 - DNA, 633 bp, Homo sapiens
tctgggcacactgaataccatttaattcaactggtatgaaactctggagaaaagtctggaaatgaatacggtttcatgctttatttgtattttactcaaatatgtcatgtttttaagtggcactaagaagtcaaggttgaatatgctaagacaaggctaatttttaaaacttaaattcacatttataatgaattaacacttaagacagcaatacagcaggtgggttgttttgtattagtctttgggggtgcgcttttggactgtgtggttctcgtaacacctcagccatgggttctttccatgtgtctatatttcagccttgaaaatacccggaaacagtatgattttcgatagggtgaccatataatttatcatcccaaatggggcaattttgagagttaatggggtcctcgaccctggctgcatgtcagaatcacataggatttctgtggctgtatttactgaatttcatattttagaaaactaattttggtttatttttacattccacattctttgcatttcattttgctgatcaatgaacaatatattacttttatataacaattattaatagtsagttaagggaaggagaataattatgccaattccacagacataaatgggactctt

SEQ ID NO: 343158 - DNA, 604 bp, Homo sapiens
gggaggaggtgcttgccaggcagaagaatcggaggtggagtcctgygctctttttgcctggagggcaggaaatggtgggagaaagtattggctaaagaggtgaggggaaaagggaggatcataatgcatgaactcctcaggtttaattttcctacactgtaaatctaattatataatccctttgcttaaattttctgattactctttttatttatttattcatttatttggagatagggtctcgctttgttgccaaaatgcagtggcatgatcatagctcactgtagccttggcctcccaaatcgctaggattataggcatgagccacctctccaggcctcttgattactagtactgcccacaggggtaaattgtaatctcttggctgtatggtaaggagctcagtggcaactgagactggaggcagggatccctttaggggcccatgcaggagtcctggagggaggtgatggagcctgagccaggcagaacagttgagtgcattggacatatttagaaagggcgatgggaagagagggaggcaaggccacggtgctaactagagcacatagccatgaggatggggaacactcctctgtcaaga

SEQ ID NO: 343159 - DNA, 583 bp, Homo sapiens
ccagctgtcaagttgtgagctgccaacaaccaggtgagtgagcttggaagcttggaagagggttttcccccatgtgtcttgggatggccgcagccccatccaacatcttgattacagccttgtgagaaaccctgagccagagacatcagctaaccacactcagattctggccccacagaaactgtgagatagtaagtgtttsttcttttcagatgctaattttatgatgacagtcttaggcagcaataggtacctaatacagattttggtacctagaagtgatatctagaaatgtaggagtgtaggcagtggatggaacctggaagggttttgaagagagggttagagaaagcctaaattgccacagactttttatagaaatctgggttttgaaatcactgctcttaattattataacttccatgcatctcaaaaaatgcagatactctgcacatagagaaaaaactttaggcaaatacttgtgttcctctttagctattgcgggatctggccagcagcccgcaatgcaatggggctctctctttgttcccaggcagatcagcaggttgagaaataatagaca

SEQ ID NO: 343160 - DNA, 583 bp, Homo sapiens
ccagctgtcaagttgtgagctgccaacaaccaggtgagtgagcttggaagcttggaagagggttttcccccatgtgtcttgggatggccgcagccccatccaacatcttgattacagccttgtgagaaaccctgagccagagacatcagctaaccacactcagattctggccccacagaaactgtgagatagtaagtgtttcttcttttcagatgctaattttatgatgacagtsttaggcagcaataggtacctaatacagattttggtacctagaagtgatatctagaaatgtaggagtgtaggcagtggatggaacctggaagggttttgaagagagggttagagaaagcctaaattgccacagactttttatagaaatctgggttttgaaatcactgctcttaattattataacttccatgcatctcaaaaaatgcagatactctgcacatagagaaaaaactttaggcaaatacttgtgttcctctttagctattgcgggatctggccagcagcccgcaatgcaatggggctctctctttgttcccaggcagatcagcaggttgagaaataatagaca

SEQ ID NO: 343161 - DNA, 546 bp, Homo sapiens
aattcctcagtacttccctaaatgtttccaccatttctattgaccataccctgctccaccacacccctcattctctgcacgaaggctactgatgtgtatgtgctgtgttaaatgccacctcattcattcagctgtcaaacattgagtacctattttaagttgtgcattgttgtagtatcttagtgaaaggattagtgaatgaatggttttactcatccctcagagttggaaatatctgttaaataatacatggctaggcatgtttatcttttaggaagaaaagtgctctataaatcagaggastattataatatttacatgttggtctcatgaaaaatgataccagcagttttcactataatatgaatcctgataatttgcatttatatagcacattattggcacaacaactttgtccctttgagcagcttcatttaaagtggttttgctttaattatctctcacagagcagctataaaaatgattgtgaaataatttgcaagtgtatatgttattcataaatggtaaataacagttaaattgcaa

SEQ ID NO: 343162 - DNA, 633 bp, Homo sapiens
aggattagtgaatgaatggttttactcatccctcagagttggaaatatctgttaaataatacatggctaggcatgtttatcttttaggaagaaaagtgctctataaatcagaggagtattataatatttacatgttggtctcatgaaaaatgatacmagcagttttcactataatatgaatcctgataatttgcatttatatagcacattattggcacaacaactttgtccctttgagcagcttcatttaaagtggttttgctttaattatctctcacagagcagctataaaaatgattgtgaaataatttgcaagtgtatatgttattcataaatggtaaataacagttaaattgcaaagacaatgcaatagaatctgacatttctcaggataatattttagttgctcacctgattgatgtagtcaactctgaatcattaacatctggattaggacagatgtgtgtctggggagggaagagggagtgtgcacttacgttagaagcatctcctgttttaccctttgatttttttctgtgtctgacaagatagtcacaaagcatgtatgtgttcacaggctaacaatgtgagttcaaatgtacaaggtgttttaaatactaataaatgaacact

SEQ ID NO: 343163 - DNA, 659 bp, Homo sapiens
tatggttctgcaaatacagtggagataagaacaatacccaaaactttactggcacactttttaaccctttttctaccacaaagtactatagggcaaagcttgtcccatgtccagctgactctgaatggcaagttatcccggcatagaggtggtagcaccaccatttgtctctccctcaaaaaaggcatatttgtaccaaagtgagtgatagtgcagccatttatgcaaatagccataatctggttgcatttatttttaaaagtaaataatgttctggaatacagccaaacactaggataatatttaatggagaataactagaggattttttttctattagtcaggaatcagacagggacatcactatattcagtactatttactgtcatgctgtaatarccaatgcaattagacaagataaaccagtttgtgtcataaagaaaaaggtaaaactatctctgtttgcatgtaatataattatatatctgaaaaactcaaaagactgaaaggaaaaacttctataagtgataggaaaataacaggttaaaaatttaatatacaaaaatcaatagcctacatatatataaccaaaaaaaacagtgaaatatatattggaagagaagactctatttagggtagtacatatataaactttaaaa

SEQ ID NO: 343164 - DNA, 659 bp, Homo sapiens
tatggttctgcaaatacagtggagataagaacaatacccaaaactttactggcacactttttaaccctttttctaccacaaagtactatagggcaaagcttgtcccatgtccagctgactctgaatggcaagttatcccggcatagaggtggtagcaccaccatttgtctctccctcaaaaaaggcatatttgtaccaaagtgagtgatagtgcagccatttatgcaaatagccataatctggttgcatttatttttaaaagtaaataatgttctggaatacagccaaacactaggataatatttaatggagaataactagaggattttttttctattagtcaggaatcagacagggacatcactatattcagtactatttactgtcatgctgtaatagccaatgcaattagacaagataaaccagtttgtgtcataaagaaaaaggtaaaactatctctgtttgcatgtartataattatatatctgaaaaactcaaaagactgaaaggaaaaacttctataagtgataggaaaataacaggttaaaaatttaatatacaaaaatcaatagcctacatatatataaccaaaaaaaacagtgaaatatatattggaagagaagactctatttagggtagtacatatataaactttaaaa

SEQ ID NO: 343165 - DNA, 593 bp, Homo sapiens
ggaatgtagtgcaaagaaaaacctcagcagtaatgttagagtagtgaagcataaactgactccattaaatatttagaaacctaaaggcccttcaacttcttgtggcttctgcattagaaatttgtagatctttttgttttttccaaagtagattaaattccaagtaaataaatagtccaattattattaatagaatgagtagacatttaaaatctattccaggattgatggtaaacatttggctgctagaattcagattcccttaattaaacgtcagaaataaaattatgaattctaaacagtaaaaaaaagcaaaaaaatttcatattaaaaattctatatctgcaagctgggatatttatagaaatacttattttgccatcttggtagtgtaaattatttttctcctaaaaaggcagaaagcctagggaaagtcacaaaataaaattgggaaagaagtagaagaaaacatcagcttatataacaccaaattacaaaacaatttacatgraagtttagaaaactttactttcctctcaaccccctggccacatataactcacagtctgtgagtgatttgcttaagacaacac

SEQ ID NO: 343166 - DNA, 616 bp, Homo sapiens
agggagttttttcctccgtggaatgatggcctggtaatggtaccaacatgggggcactatgatggtttaaggagatgatgcaacacacagcagtgtgcttcacattcacctgctgccctgactttctcatcaaacctcttggttctcaacccttgcattctggcttctgccttgatggctctactgagaagctcttgagatgctgactcctctcgtcatcargctcactatacatctattttagcctgtgtcctccttggcggtttcacagcattcaacactgatgaccttactgacattctcttggcttctgcacaagggtcctctccttttccctcctctttctttgttggcaagtgtttgtctccttgcctggcttctccccttctgcccaaagcccacatgtagtcatctccagggttcttttggaggcctggtttgaccatcctctctgttcttgttcccttggtgagttcaccctcctacagagtccaccatcctacatgcagatgttgttcaaactttcacttctaaccttgacctctcacctgaacaacagagccagacatctctcgggtaaccctttacttgtcctctacactgagctgcttcctgt

SEQ ID NO: 343167 - DNA, 626 bp, Homo sapiens
tttcaacatgcaactgggaatatgttccctacaccctgctcctggccggcccgggggcttcacaagaaagctggaatgtggacatgacttttgctctactcataaatctgttgtggtttgatttttaaccactgtgcctcccccttacctgccatgaaaatgcatgccttatatttcacaaatcttgtgattagtaatatgggcacaccttcatatatccacaattatatttaagaatgtttctactcctygggtctttaccttttaaaattcccagcaatatctggtttaggggtctgtttattctctgcacccttcttagtcattaccaccacaggaatgaattccgggaactcattagcatttattgaacatctactatacggtaagcagtgtactaagtgccaaggagatcatctgagtgaatagagttatcatctctgccctcatgtggctgacagtctgtagggtaggtggccattaatcaaataatcacacaaatacatatatgttccttgaatacatttatatgagtgctccacaggggaaagaaagaggcctggtagaaatgaaaaatttcctagttctcagctttgtctacatttaagatttaaaagctgctctat

SEQ ID NO: 343168 - DNA, 626 bp, Homo sapiens
tttcaacatgcaactgggaatatgttccctacaccctgctcctggccggcccgggggcttcacaagaaagctggaatgtggacatgacttttgctctactcataaatctgttgtggtttgatttttaaccactgtgcctcccccttacctgccatgaaaatgcatgccttatatttcacaaatcttgtgattagtaatatgggcacaccttcatatatccacaattatatttaagaatgtttctactccttgggtctttaccttttaaaattcccagcaatatctggtttaggggtctgtttattctctgcacccttcttagtcattaccaccacaggaatgawttccgggaactcattagcatttattgaacatctactatacggtaagcagtgtactaagtgccaaggagatcatctgagtgaatagagttatcatctctgccctcatgtggctgacagtctgtagggtaggtggccattaatcaaataatcacacaaatacatatatgttccttgaatacatttatatgagtgctccacaggggaaagaaagaggcctggtagaaatgaaaaatttcctagttctcagctttgtctacatttaagatttaaaagctgctctat

SEQ ID NO: 343169 - DNA, 626 bp, Homo sapiens
tttcaacatgcaactgggaatatgttccctacaccctgctcctggccggcccgggggcttcacaagaaagctggaatgtggacatgacttttgctctactcataaatctgttgtggtttgatttttaaccactgtgcctcccccttacctgccatgaaaatgcatgccttatatttcacaaatcttgtgattagtaatatgggcacaccttcatatatccacaattatatttaagaatgtttctactccttgggtctttaccttttaaaattcccagcaatatctggtttaggggtctgtttattctctgcacccttcttagtcattaccaccacaggaatgaattccgggaactcattagcatttattgaacatctactatacggtaagcagtgtactaagtgccaaggagatcatctgagtgaatagagttatcatctctgccctcatgtggctgacagtctgtagggtagrtggccattaatcaaataatcacacaaatacatatatgttccttgaatacatttatatgagtgctccacaggggaaagaaagaggcctggtagaaatgaaaaatttcctagttctcagctttgtctacatttaagatttaaaagctgctctat

SEQ ID NO: 343170 - DNA, 596 bp, Homo sapiens
tgactggctgtcactttgagcaagtcattcaattttctctgagccttagtttcctcacaggcaaaaaaagtagacactcatacctacatgcaaggggaatgagagtcgaaattacatgtatgtgaaagtactttgtaaactcttagttatcttattattactacaaaatgtaattaaggttaacttattttttggtgacattcttaaatagatcattgaaactctcaaatcttgtagggagcttccttgttactcttttgatctatattggaaagatctggccatgccaagtgggctgttttacaaaccaaatgagctttccctatcctcctttcagtttaggggtctgaagctagccatgtctgagaatcatcagaatgtagcaatgaatcatttataacttccccygaaaataaaatgtgtgatagttatagattaacaaccatattctccttgtgcttttgccatgatactggagatggaagactgacacagagataaagtgttctcctactgatttctccttacatctcttctggtggtttgtcatgtttctttcttctttttaaaaaatcttttccagatctccctttgaa

SEQ ID NO: 343171 - DNA, 544 bp, Homo sapiens
ttgggtgctggggccggggcggctgagatttaccagtgaaacccaaagaaagagagggcagaaaactagagaaaagaaaccagataatgctacccaagaggacgaaataaagaagcaggaaacgaagcctgmggctaaaccctggagatgactattaggaaaacaccagaggatgccccgcccgccagcccacaatgagcagcctgtccaagtcacaaagcggggcctcgggccttgacagttcgcgatctgtaagcagaatgttccagggcctccctgtcgcctgcatccagcctgggggcaatcttcactggtgtgggaggccgaaagtggacggcgacggaggcccctctggttatctctttgccgtgccaacacagtctctgcgcccactaagatgcatgaaataaaaatttccgtgactcgccctttgcagtggagaactgaaacaggcacaccagggaattggagcggaggagggtaactcaaactcagagtgagagggtttgcagggggccgatttggggccaacaggcttcccagc

SEQ ID NO: 343172 - DNA, 544 bp, Homo sapiens
ttgggtgctggggccggggcggctgagatttaccagtgaaacccaaagaaagagagggcagaaaactagagaaaagaaaccagataatgctacccaagaggacgaaataaagaagcaggaaacgaagcctgaggctaaaccctggagatgactattaggaaaacaccagaggatgccccgcccgccagcccacaatgagcagcctgtccaagtcacaaagcggggcctcgggccttgacagttcgcgatctgtaagcagaatgttccagggcctccctgtcgcctgcatccagcctgggggcmatcttcactggtgtgggaggccgaaagtggacggcgacggaggcccctctggttatctctttgccgtgccaacacagtctctgcgcccactaagatgcatgaaataaaaatttccgtgactcgccctttgcagtggagaactgaaacaggcacaccagggaattggagcggaggagggtaactcaaactcagagtgagagggtttgcagggggccgatttggggccaacaggcttcccagc

SEQ ID NO: 343173 - DNA, 544 bp, Homo sapiens
ttgggtgctggggccggggcggctgagatttaccagtgaaacccaaagaaagagagggcagaaaactagagaaaagaaaccagataatgctacccaagaggacgaaataaagaagcaggaaacgaagcctgaggctaaaccctggagatgactattaggaaaacaccagaggatgccccgcccgccagcccacaatgagcagcctgtccaagtcacaaagcggggcctcgggccttgacagttcgcgatctgtaagcagaatgttccagggcctccctgtcgcctgcatccagcctgggggcaatcttcactggtgtgggaggccgaaagtggacggcgacggaggcccctctggttatctctttgccgtgccaacacagtctctgcgcccactaagatgcatgaaataaaaatttccgtgactcgccctttgcagtggagamctgaaacaggcacaccagggaattggagcggaggagggtaactcaaactcagagtgagagggtttgcagggggccgatttggggccaacaggcttcccagc

SEQ ID NO: 343174 - DNA, 612 bp, Homo sapiens
ttgtggctcacatggatcttcattcggacttgaggtgtctcactgggaagccctgctggccccagcttgttccaagcatcagagacttagaaaatgttgcagaagtcactccagagcagggatccgctcagaggtggggctgggcagaagccctgtttgaaaggtctaacggccatactggaatgtgggaattaacttttttttttttttttgagatggagttatgctctaattgcccaggctggagtacaatggcaggatctcggctcaccgcaacctctgcctcctgggttsaagcgattctcctgcctcagcctcccgagtagctggggattagaggcatgagccactacgcctggctaattttgtatttttagtagagacggggtttctccatgttggtcaggctggtctcgaactcccaacctcaggtgatccacctgccttggcctcccaaggtgctgggtttacaggcttgagccaccatgcctggccagggattgactttttttttaaattttaaattattattattgttttttgagacagggtctggctctctgttgcccaggctggagtgcagtggcaccatcttggctcactgcaacctct

SEQ ID NO: 343175 - DNA, 612 bp, Homo sapiens
ttgtggctcacatggatcttcattcggacttgaggtgtctcactgggaagccctgctggccccagcttgttccaagcatcagagacttagaaaatgttgcagaagtcactccagagcagggatccgctcagaggtggggctgggcagaagccctgtttgaaaggtctaacggccatactggaatgtgggaattaacttttttttttttttttgagatggagttatgctctaattgcccaggctggagtacaatggcaggatctcggctcaccgcaacctctgcctcctgggttgaagcgattctcctgcctcagcctcccgagtagctggggattagaggcatgagccactrcgcctggctaattttgtatttttagtagagacggggtttctccatgttggtcaggctggtctcgaactcccaacctcaggtgatccacctgccttggcctcccaaggtgctgggtttacaggcttgagccaccatgcctggccagggattgactttttttttaaattttaaattattattattgttttttgagacagggtctggctctctgttgcccaggctggagtgcagtggcaccatcttggctcactgcaacctct

SEQ ID NO: 343176 - DNA, 612 bp, Homo sapiens
ttgtggctcacatggatcttcattcggacttgaggtgtctcactgggaagccctgctggccccagcttgttccaagcatcagagacttagaaaatgttgcagaagtcactccagagcagggatccgctcagaggtggggctgggcagaagccctgtttgaaaggtctaacggccatactggaatgtgggaattaacttttttttttttttttgagatggagttatgctctaattgcccaggctggagtacaatggcaggatctcggctcaccgcaacctctgcctcctgggttgaagcgattctcctgcctcagcctcccgagtagctggggattagaggcatgagccactaygcctggctaattttgtatttttagtagagacggggtttctccatgttggtcaggctggtctcgaactcccaacctcaggtgatccacctgccttggcctcccaaggtgctgggtttacaggcttgagccaccatgcctggccagggattgactttttttttaaattttaaattattattattgttttttgagacagggtctggctctctgttgcccaggctggagtgcagtggcaccatcttggctcactgcaacctct

SEQ ID NO: 343177 - DNA, 555 bp, Homo sapiens
acagagtttgcattcatggtctcttttctattttagaattatttttaacatgatggtggaaagcacagtctttattcagtcattttaaaacaagagtccaacaatcatcccctacccccggtcctatgagattgagcttaattattctgatagttattttctttaatccataacctgtgtcttaagcatggacattttgttaggaagtctggtttattagagaagataggtttgagatgatcccctrttatgagtcatattgtttctggacttctatagatcttcctctctccaacacagaatgaagacagagcagtccaacccaatttaaacaactccttttatttcacagagactcatggactagaccattctaaagtaatgtggattattaaatgtagcattaattttatgatatcattattacttcctgtattctttatgtatttacatgcctggtttattctgatttctttacccactttccccaacagtctacctgttttgccctaacctttagatatctctaaatctggctagtcaaaatgtatttta

SEQ ID NO: 343178 - DNA, 533 bp, Homo sapiens
gtctggtccttatcaagttcatgcactacacttgggaccactgctgcatcatgccagggagcctagaggtgtctaaacagttatccaacaactgtgatacccaaggttaactttctcttgttttcggaggcagggagtactaagtctcccctttctcctttcctcccacgtgttctcttgcagggaatcctctagcttgtctccagggaactcccagaaatggtttgtttcagtcagtttargctgctataagagaatatcttagagtgggtaatctatcagcaataggaatttattgttcacaattctggaggctggaaagtccaagatcaaggctccagcaggttcagtgtctgctgagtgcttcttctgcttcgaagatggcacctttttgctgtgttctcacatggtgaaaaagggacaagcagctccctttgggctcttttataaggacactaatcccttccatgaggttgaaacccatgtgacttaatcacttccaaaagtctccccctcctaatgctatcacatta

SEQ ID NO: 343179 - DNA, 533 bp, Homo sapiens
gtctggtccttatcaagttcatgcactacacttgggaccactgctgcatcatgccagggagcctagaggtgtctaaacagttatccaacaactgtgatacccaaggttaactttctcttgttttcggaggcagggagtactaagtctcccctttctcctttcctcccacgtgttctcttgcagggaatcctctagcttgtctccagggaactcccagaaatggtttgtttcagtcagtttaggctgctataagagaatatcttagagtgggtaatctatcagcaataggaatttattgttcacaattctggaggctggaaagtccaagatcaargctccagcaggttcagtgtctgctgagtgcttcttctgcttcgaagatggcacctttttgctgtgttctcacatggtgaaaaagggacaagcagctccctttgggctcttttataaggacactaatcccttccatgaggttgaaacccatgtgacttaatcacttccaaaagtctccccctcctaatgctatcacatta

SEQ ID NO: 343180 - DNA, 533 bp, Homo sapiens
gtctggtccttatcaagttcatgcactacacttgggaccactgctgcatcatgccagggagcctagaggtgtctaaacagttatccaacaactgtgatacccaaggttaactttctcttgttttcggaggcagggagtactaagtctcccctttctcctttcctcccacgtgttctcttgcagggaatcctctagcttgtctccagggaactcccagaaatggtttgtttcagtcagtttaggctgctataagagaatatcttagagtgggtaatctatcagcaataggaatttattgttcacaattctggaggctggaaagtccaagatcaaggctccagcaggttcagtgtctgctgagtgcttcttctgcttcgaagatggcacctttttgctgtgttctcacatggtgaaaaagggacaagcagctccctttgggctcttttataargacactaatcccttccatgaggttgaaacccatgtgacttaatcacttccaaaagtctccccctcctaatgctatcacatta

SEQ ID NO: 343181 - DNA, 534 bp, Homo sapiens
agggatggagcagaaggcagagccctggagataagaggcttctcaggggagcagagagagggaagcggaagacagttgggtggcctgaggggacctgcccagttcttgttatgctcactaggccttaattaaagacctttggtcatgcagctcttagtgatggtcagggtccctgaggaatggggctgatcaagactgttaaaggtctaaacacattaaagattatgtttggtttctacatgttattcaaaacaaaatggtataggccataaaataaatacaaagaaagttaataaaatgtatcccacgatggtcatactgatggccttttgcaaatattgaattctttaaaaatttgttttcctgttttgtggtttctgctttcataatgccatagctctttcttatcagcttattgaagaatccatccctgatgaggggtctgagggagggttcctgtcaatgaaacttgaatgaaaactagagaaatctgagtcctcagcycacggagaagcagagtgaggaccccaatca

SEQ ID NO: 343182 - DNA, 506 bp, Homo sapiens
tgatgctgccacttagagttatggcctttgtgcatattcctcttcctctctgatcctcctgattccttcactgggtagcaagtgagagaaataaattgaaagagtatgtgaagctatatgcaaatagttatgtggcagtgaatgtttctttttcaacaattccaatttcactggattcagattgcttctccagmcgctgtgatatttttggtaacatggtttatttgcctaaggagcagatgccagggttggatcccagccctgctatttatcagcagtgtgatcttgggaagtaatctaatctctttgtttccccatctcctcactgtgaaatgggatagtaatattgcatatctcagagggtcattgtgaggattaatttaattcgtacacatgaaaggcttactactgtctaacaaaaatcaattctgttagaaatcactagagtagctaccctccagggccagggtgggaaggaggtagaaggcagtagtttttgtttttct

SEQ ID NO: 343183 - DNA, 506 bp, Homo sapiens
tgatgctgccacttagagttatggcctttgtgcatattcctcttcctctctgatcctcctgattccttcactgggtagcaagtgagagaaataaattgaaagagtatgtgaagctatatgcaaatagttatgtggcagtgaatgtttctttttcaacaattccaatttcactggattcagattgcttctccagaygctgtgatatttttggtaacatggtttatttgcctaaggagcagatgccagggttggatcccagccctgctatttatcagcagtgtgatcttgggaagtaatctaatctctttgtttccccatctcctcactgtgaaatgggatagtaatattgcatatctcagagggtcattgtgaggattaatttaattcgtacacatgaaaggcttactactgtctaacaaaaatcaattctgttagaaatcactagagtagctaccctccagggccagggtgggaaggaggtagaaggcagtagtttttgtttttct

SEQ ID NO: 343184 - DNA, 506 bp, Homo sapiens
tgatgctgccacttagagttatggcctttgtgcatattcctcttcctctctgatcctcctgattccttcactgggtagcaagtgagagaaataaattgaaagagtatgtgaagctatatgcaaatagttatgtggcagtgaatgtttctttttcaacaattccaatttcactggattcagattgcttctccagacgctgtgatatttttggtaacatggtttatttgcctaaggagcagatgccagggttggatcccagccctgctatttatcagyagtgtgatcttgggaagtaatctaatctctttgtttccccatctcctcactgtgaaatgggatagtaatattgcatatctcagagggtcattgtgaggattaatttaattcgtacacatgaaaggcttactactgtctaacaaaaatcaattctgttagaaatcactagagtagctaccctccagggccagggtgggaaggaggtagaaggcagtagtttttgtttttct

SEQ ID NO: 343185 - DNA, 667 bp, Homo sapiens
atttccttcatccaaatccacacaataataaggagtcatgattaatctgcagttcctatagacaggcaagttgaatagcaggcagtacactggttttgcactgtatactatctctgggggactcaatggattattgtgatatgatcacacttaactggatgggggtctcagtgccaaaaagttgaggtaccattcttaagaacaagtctactaatctcaggaatcattctcacctttggattaagtgagtaagcttttagacctattaaaacattttaactctttcaaactcttctctactgccttccctggctggcttagtaaatggattgttgtacatatgatctggtactgagcagttttctgtcctgcttctaaaayccactgaatccaaataagatgagaaatattcggtagggtaatttgtgttgtgcaatgttgctaaaccatgtcaactgccctaaagtggcatggggtggaagagcaatgctcttctttacccagggtagacccacttctttcccttccttggttgaattgattagcaactatctattctttagacactaaacaaatgatagttatttttcaaacaaaattcataactaaataccatttaactaatgtagtgactaaatcttataaaaatcaaattatttcccagttg

SEQ ID NO: 343186 - DNA, 540 bp, Homo sapiens
ctcagtgccaaaaagttgaggtaccattcttaagaacaagtctactaatctcaggaatcattctcacctttggattaagtgagtaagcttttagacctattaaaacattttaactctttcaaactcttctctactgccttccctggctggcttagtaaatggattgttgtacatatgatctggtactgagcagttttctgtcctgcttctaaaacccactgaatccaaataagatgagaaatattcggtagggtaatttgtgttgtrcaatgttgctaaaccatgtcaactgccctaaagtggcatggggtggaagagcaatgctcttctttacccagggtagacccacttctttcccttccttggttgaattgattagcaactatctattctttagacactaaacaaatgatagttatttttcaaacaaaattcataactaaataccatttaactaatgtagtgactaaatcttataaaaatcaaattatttcccagttgtggtagatactggatgactaaaaatgaattctttttcct

SEQ ID NO: 343187 - DNA, 540 bp, Homo sapiens
ctcagtgccaaaaagttgaggtaccattcttaagaacaagtctactaatctcaggaatcattctcacctttggattaagtgagtaagcttttagacctattaaaacattttaactctttcaaactcttctctactgccttccctggctggcttagtaaatggattgttgtacatatgatctggtactgagcagttttctgtcctgcttctaaaacccactgaatccaaataagatgagaaatattcggtagggtaatttgtgttgtgcaatgttgctaaaccatgtcaactgccctaaagtggcatggggtggaagagcaatgctcttctttacccagggtagacccacttctttcccttcyttggttgaattgattagcaactatctattctttagacactaaacaaatgatagttatttttcaaacaaaattcataactaaataccatttaactaatgtagtgactaaatcttataaaaatcaaattatttcccagttgtggtagatactggatgactaaaaatgaattctttttcct

SEQ ID NO: 343188 - DNA, 667 bp, Homo sapiens
atttccttcatccaaatccacacaataataaggagtcatgattaatctgcagttcctatagacaggcaagttgaatagcaggcagtacactggttttgcactgtatactatctctgggggactcaatggattattgtgatatgatcacacttaactggatgggggtctcagtgccaaaaagttgaggtaccattcttaagaacaagtctactaatctcaggaatcattctcacctttggattaagtgagtaagcttttagacctattaaaacattttaactctttcaaactcttctctactgccttccctggctggcttagtaaatggattgttgtacatatgatctggtactgagcagttttctgtcctgcttctaaaacccactgaatccaaataagatgagaaatattcggtagggtaatttgtgttgtgcaatgttgctaaaccatgtcaactgccctaaagtggcatggggtggaagagcaatgctcttctttacccagggtagacccacttctttcccttccttggttgaattgattagcaactatctattctttagacactaaacaaatgatagttatttttcaaacaaaattcataactaaataccatttaactaatgtagtgactaaatctkataaaaatcaaattatttcccagttg

SEQ ID NO: 343189 - DNA, 634 bp, Homo sapiens
caggagcatcctgggtaatgggatactgtaatactgatatygattaatcaaagttgttattagttttccagagctaccaaaacaaaaaaagtcacaaactaggtggcttaaaacaacagaactttgctgggtgcagtggcttacacctgtaatcctagcactttgggaggccaaggcaggtggatcactggaggtcaggagtttgagaccagcctggccaacatggtgaaaccctgtcttgtctttactacaaatacaaaaattagccaagtgtgatggcgggcacctgtagtcccagctcatcaggaggctgaggcaggagaatcactcaaacccgggaggcagacgttgcagtgagctgagatcatgccattgcactgcagcctgggcgacaagagcaagactctgtctcaaaaacaccaacaccaatgccagaaaccccataaatttattctgtcatggttgtggagggcagaagcctgaaatcaaggtgttggcaggggcatgttccttctgaagctcctagggaaggatcctcccttgcctgtttcggtttctggggcattccttggtttgtggcagctaactccaatctctgcctctgttgtcacatggtgttctccctgtgtatctc

SEQ ID NO: 343190 - DNA, 634 bp, Homo sapiens
caggagcatcctgggtaatgggatactgtaatactgatatcgattaatcaaagttgttattagttttccagagctaccaaaacaaaaaaagtcacaaactaggtggcttaaaacaacagaactttgctgggtgcagtggcttacacctgtaatcctagcactttgggaggccaaggcaggtggatcactggaggtcaggagtttgagaccagcctggccaacatggtgaaaccctgtcttgtctttactacaaatacaaaaattagccaagtgtgatggcgggcacctgtagtcccagctcatcaggaggctgaggcaggagaatcactcaaacccgggaggcagacgttgcagtgagctgagatcatgccattgcactgcagcctgggcgacaagagcaagactctgtctcaaaaacaccaacaccaaygccagaaaccccataaatttattctgtcatggttgtggagggcagaagcctgaaatcaaggtgttggcaggggcatgttccttctgaagctcctagggaaggatcctcccttgcctgtttcggtttctggggcattccttggtttgtggcagctaactccaatctctgcctctgttgtcacatggtgttctccctgtgtatctc

SEQ ID NO: 343191 - DNA, 634 bp, Homo sapiens
caggagcatcctgggtaatgggatactgtaatactgatatcgattaatcaaagttgttattagttttccagagctaccaaaacaaaaaaagtcacaaactaggtggcttaaaacaacagaactttgctgggtgcagtggcttacacctgtaatcctagcactttgggaggccaaggcaggtggatcactggaggtcaggagtttgagaccagcctggccaacatggtgaaaccctgtcttgtctttactacaaatacaaaaattagccaagtgtgatggcgggcacctgtagtcccagctcatcaggaggctgaggcaggagaatcactcaaacccgggaggcagacgttgcagtgagctgagatcatgccattgcactgcagcctgggcgacaagagcaagactctgtctcaaaaacaccaacaccaatgccagaaaccccataaatttattctgtcatggttgtggagggyagaagcctgaaatcaaggtgttggcaggggcatgttccttctgaagctcctagggaaggatcctcccttgcctgtttcggtttctggggcattccttggtttgtggcagctaactccaatctctgcctctgttgtcacatggtgttctccctgtgtatctc

SEQ ID NO: 343192 - DNA, 601 bp, Homo sapiens
ggtcctctcactaaatagaaacatcgtgaaaatagaggtagtgtcttatttatctttgcatctctagagtttagtacaatgcttggatttagaccacatggtagagattataaatattttcataaaattgaatttaacaaatgaccccgtgtgttggatgactgttttgctgtttagaacatgggcagaaattgctgaaaaaagggaaatacaaagaaacagtcaatgggttttttttttaratagtcaatgttgagtgaatagcttgctaaaatattagaaggtaataacacggctgatatatatttgaattaatatgaacaacagatatttatattaataatctctcttttagaaaagaagaaatacagcctcagagaggttggatatagaatctagtcctttgttttttagcctttcaagttgtccacagataagagagaaggggcagagcagtgaatgctgtatcattaggctgaagcagaaggaaactgtcatggtaattgggacaggtgcattgggagacataccagttttagagaagataaattaattcacaatagctcagttatgtcacagcctggcaaaatgtcagtacaaa

SEQ ID NO: 343193 - DNA, 515 bp, Homo sapiens
agtttgcttatagttttaggattgttcgtattttcttggtgtctaaagcaaagttcatcatttttgaccaatttacagatgcatatttttttacatagatatgcaaaccatttgttaaataaggcttagttcttaatctacttaatttttagagtgctacaaggttatttcattcaatgattgttgtattagtyagtgttctctagaggggcaggcctagtagaatagatgtatatatgaaagggaatttattaaggagtattgatgcacagggtcacaaggtgaagtcccacaataggccatctgcaagctggggagcaaggaagccagcccgagtcccaaaatcttaaaagtagggaagccgacagtgcagccttcagtctgctcgaaggcctgagaaccccatcgctgcaagccagtagtgtcagtctaagagtccaaaagctgaagaccctggagtccgatagtcaagggcaggaagcatccagcaggggagaaagatgaaggctggaaga

SEQ ID NO: 343194 - DNA, 548 bp, Homo sapiens
gtttttctcactgacaactgttaagattttcaatttatctacatcttcagtttcattacaatgtccatagatttgagttattttttatttattctgcttagatctcaaaatgcacttttatctgaggacattgacttttttaatactgataaattttcagctattttcttttcatattttttctgccattccctctgtcttattttgaaagcctattaaacatatattaaagtctctcaattatgcttccatatcccttatctactctttcatatttttaaaaaatctttctatatcatggtgctatgttctgggtacatttttcaatactatcttctaattagccaattatttttcaactgtatccagtcttgagtttatactaaatgttggagtttttttatttgaatgattgattttttcatttgcgaaatttcaaagtggttcttcttcatatctacatggtcttttttcatttctgcccaatcatgttcattatgtccctgcyttatttttaaatgttatgctttctttcaccttgctggagc

SEQ ID NO: 343195 - DNA, 466 bp, Homo sapiens
tcatgtttatctctgtagcccctgtgtcccatgcagagtacatctgagcaacaaacatttgttgaataataagtgaccaacaaatatagattaaagtgacaaatggaactaacaaatggaactaacawatagatgctatgttattggggaagtataagactaattaccaaatttatttttgactttttaaaaaggcattcttttttcttgttgtcttgatattttatatattacctttcctcagtactttgtgtatttttttttcaatataaggaagaatagaatactacggaccaaagcctgagggggagagaagtaatgggagaagaagcaaccttctaaaagtgggtgataggcaaacagagggtggtctctatgttttctccacaagagtgtttcagatgaactcagactactgatatcctagaaaagactgactacaaaaggcttggaaatagaaggatct

SEQ ID NO: 343196 - DNA, 466 bp, Homo sapiens
tcatgtttatctctgtagcccctgtgtcccatgcagagtacatctgagcaacaaacatttgttgaataataagtgaccaacaaatatagattaaagtgacaaatggaactaacaaatggaactaacatatagatgctatgttattggggaagtataagactaattaccaaatttatttttgactttttaaaaaggcattctttttycttgttgtcttgatattttatatattacctttcctcagtactttgtgtatttttttttcaatataaggaagaatagaatactacggaccaaagcctgagggggagagaagtaatgggagaagaagcaaccttctaaaagtgggtgataggcaaacagagggtggtctctatgttttctccacaagagtgtttcagatgaactcagactactgatatcctagaaaagactgactacaaaaggcttggaaatagaaggatct

SEQ ID NO: 343197 - DNA, 605 bp, Homo sapiens
ttcatagtcacccaatcacagcatagttgcacaggtaacattyagtgagctgcccttcatagtcacacagctaataagtggcagaatccagcttctgaactccaagagcaggtacctttcagttttgtggctttagtgtctgttgcagtggagtgtgttgaagacaagaattgcctgcacagtagcattttaagttctagtaaccatcaccactcggtggagaatagaactattctgttctcctggagaacagaactattaaaattgttgtttaaataaattggctttaaaaatgcaaccatgtcttccaatcccaggaaatcctatccggatctcagcactgttggacctggagttttcagagtgagagaaaacaatttttgcattctagggtggatgctgaaatatattttcttcttaaaaagtttgacaacactgatgagcccttatggtcagccaaagaaaggcaacaacctacctacagtttgagggaattcttgaactagcaaatttattccaaatgtaggagattcataacaagatgttaaaaaatatatttaatgcagaaaatgtttgactttactgtaggcaaagtacattgctcg

SEQ ID NO: 343198 - DNA, 547 bp, Homo sapiens
gtggtacgtatacaccatgaaattctaggcagccatataaaagaaggagctcatgtcttttgtgggaacatggatggagctggaggccattatccatagcaaactaatataagaatagaaaaccaaatattgcatgttctcacttacaagtgggagctaaaagatgagaacacatggacacaaagaggggagcaatgaacactagagcctacttgaggggggaggataggaggagggagaggatcaggaaaaataactattgggtactagggttagtacttgggtgaagaattaatcggtacaacaaaaccccatgacacaagtttacctataaaacaaatctkcaataaaagtttttaaaaaatagaaaatttccttctattttttttaaagtggacatgtgttatctatataaatattttagtagtaacaggcagtttgctatactttcttaacccatgatgtattcttgatctcattaagacccaagcccaggctgggcatggtggctcatgtctgtaatcccaccactttaggaggccaaggc

SEQ ID NO: 343199 - DNA, 574 bp, Homo sapiens
aagacttttaaaaggtgctctttaattgaaattcatacttaatttttgcatttgttctatatattatactctactaatttctaccttgttaggttctaatttattgcctcaaatatcaagttataataatgaggtgatacctagtaactgatagatgtgagttttaaaaattctkccctagttatctggagcttcatttgtttcaggttgcttacatagtccccatttttctctttcaattgctatctgctccgcacttccgtcaattatagaaatatgtatctgtgtgtgtgtgtgtctgtttgtgtacatacatacatataaactaaaatatcctgttctctcctttttctgttgcttaaggaaaacactactggtactagatccatgaaagagccgtacaggttgagtaggaattttgctttattttcttgtttgatttgtggcctgaaagagtgaggagaaattttgatgttatgggactttgcctcttaataccaaacaaatttttgtcctgctaataaacccagtaagtccctgagacctcacagactatgagatcacttttatcgtt

SEQ ID NO: 343200 - DNA, 574 bp, Homo sapiens
aagacttttaaaaggtgctctttaattgaaattcatacttaatttttgcatttgttctatatattatactctactaatttctaccttgttaggttctaatttattgcctcaaatatcaagttataataatgaggtgatacctagtaactgatagatgtgagttttaaaaattcttccctagttatctggagcttcatttgtttcaggttgcttacatagtccccatttttctctttcaattgctatctgctccgcacttccgtcaattatagaaatatgtatctgtgtgtgtgtgtgtctgtttgtgtacatacatacatataaactaaaatatcctgttctctcctttttctgttgcttaaggaaaacactaytggtactagatccatgaaagagccgtacaggttgagtaggaattttgctttattttcttgtttgatttgtggcctgaaagagtgaggagaaattttgatgttatgggactttgcctcttaataccaaacaaatttttgtcctgctaataaacccagtaagtccctgagacctcacagactatgagatcacttttatcgtt

SEQ ID NO: 343201 - DNA, 579 bp, Homo sapiens
ctgaccattagaaaattcttctatatcttgagccaaaatctgtctctgaaagttctattactggttacagcgctagcactcaagtttatatagaaagtctaattttacattcacatggcaggccttcaaatgtcagaaggtggttatcacattctcattttcagactatttattcccagtacttttaacagattgtttacatggcatggcttacccatattggttattctttttyatatctcttggccactcaatttggctttagccttttaaagtggaccactgggacaggaaaggaacagaactataaacactctctttctagacacctatgtgtattcatacaacttcaagtcacattttcttttctttgaaagcctcattacatcattggtcaattgtatgcttactgtcaattcaaactttctgtctcttagagcaaaatttctgaatacaaaaaagagaccaaatatccatccttattaaatttcagcataatgaattcaattcattctccagctagtaaagattttttgttaattattttattattcacaacttgaatgggcagacttccta

SEQ ID NO: 343202 - DNA, 562 bp, Homo sapiens
ttacattcacatggcaggccttcaaatgtcagaaggtggttatcacattctcattttcagactatttattcccagtacttttaacagattgtttacatggcatggcttacccatattggttattctttttcatatctcttggccactcaatttggctttagccttttaaagtggaccactgggacaggaaaggaacagaactataaacactctctttctagacacctatgtgtattcatacaacttcaagtcacattttcttttctttgaaagcctcattacatcattggtcaattgtatgcttactgtcaattcaaactttctgtctcttagagcaaaatttctgratacaaaaaagagaccaaatatccatccttattaaatttcagcataatgaattcaattcattctccagctagtaaagattttttgttaattattttattattcacaacttgaatgggcagacttcctatattttctttcaagtcattggcaaaaatatcaaaaaactacaaggctaaaaaaacttcctttcaattgaacaggaatccatgttttc

SEQ ID NO: 343203 - DNA, 579 bp, Homo sapiens
ctgaccattagaaaattcttctatatcttgagccaaaatctgtctctgaaagttctattactggttacagcgctagcactcaagtttatatagaaagtctaattttacattcacatggcaggccttcaaatgtcagaaggtggttatcacattctcattttcagactatttattcccagtacttttaacagattgtttacatggcatggcttacccatattggttattctttttcatatctcttggccactcaatttggctttagccttttaaagtggaccactgggacaggaaaggaacagaactataaacactctctttctagacacctatgtgtattcatacaacttcaagtcacattttcttttctttgaaagcctcattacatcattggtcaattgtatgcttactgtcaattcaaactttctgtctcttagagcaaaatttctgaatacaaaaaagrgaccaaatatccatccttattaaatttcagcataatgaattcaattcattctccagctagtaaagattttttgttaattattttattattcacaacttgaatgggcagacttccta

SEQ ID NO: 343204 - DNA, 623 bp, Homo sapiens
gagtagaatcatggttaccagaggctgcaaaagatagtggggaggaagagtattatggagatgtttaatgggtacagaaatatagttagatagaatgaataaggtctagtatttgacagcacaacagggtgattacaataaacaatagtttattgtacatttttaaataaattgtataattggcatatttgtagcacaaagaaatgataaatgcttcaggtgatggataccccatttaccctaatgtaattattatgcattacacacttgtatcaaaatatctcatgtaaccataaaaattaaaaatttaacaactaaataaaaaacasatttatcagccaagtttaaaacacagcaattttcatttcctacaaaaaggaattcaaagcaaaaaaggattaaatgggaaaagagtagttttatattaacacaaggtacacaatcgaaatataccaaaaaacataacattcaaagctagctttgtgaggaatacagtgggcagaataaagatataatagcaaacatttactagtaaggttctcactatatatcagactatgccaagagtgccacgtagattatcttatttaatactcataaaaattgaataaacccatgtccta

SEQ ID NO: 343205 - DNA, 541 bp, Homo sapiens
gggattggcacctttataagggaggccagagagaaagccctacccccttctaccatgtgaaaccacagtgagaaagcacagcttattaagcatgaagtgagccctcaccagaaatgagataaatggcaacacaataatagcaggtgactttaatactccactgacagcactagacaggtcatcaagagagaaagtcaataaagaagcaatggacttaaactataccccacaacaaatgaacttaacagatattacagaacattctacccaacaactgaaraatatacactctgttcattgaaacatgggacatattccaagatagaccatatgataggccacaaaacaaggctcagtaaatttaagaaaatcaaaagtacattaagtactctctcaaaccacagtggaataaaactgaaaatcaactccaaaaggaacactcaaaatcatgcaaatacatggaaattaaataacctgctcttgaacaataaaatcaagatggaaatttaaaaattccttgagctgaacaataatagtgaca

SEQ ID NO: 343206 - DNA, 452 bp, Homo sapiens
tgaacccctcagtgctgtagaactcatgacacctggtacctaagaaaacagtggtgaagatggctttaaaaccagtgcattgattgaaactctaagagggaattcaatctcctcctccacacggcccagcctggcacctgcccatcacctaccrtggcaaggcacttcaggtttttcttttggagagggtagaacaggtccctggactaaagacacaaggtacaacccaagacaaaaaggaaccctaatggaaataagtctcacactgagtgttaagagcctcaactctcttgaaccatttagtatcctggacacagacttacattctattctctatgactggaaagttcttttctaaggaacctgaataactgaagagaaaatacaagaatggtctgtaactggggagttacataaccacatgccataaaaaggttgccatacagtgaaga

SEQ ID NO: 343207 - DNA, 491 bp, Homo sapiens
attggacattgtaggaaattttctaaaatggaaggcagatatctattctaaagcaaacaaataattcaaaaaagcaaactagggcagcccaaggtggctcgcacctgtaatcccagccctttgggaggacgggacaggaggattccttgagcccaggagttcaagaccatcctgagcaacatggcaaaaccccatcctacaaaaaattaaaaaactagccaggcatggtggcacacacctgtagtcctagctaatcgagaggctgaggtgggaggattgcttgagcccaggaggtcgagtctgcagtgagccaagatcgtgccactgcactctagcctgggcaaaagactgagaccctgtctcgaggaaaaaraaaaagcaaactagaagaaacggaggctgcaaacagagaagaagttaacttcaccaaaatttttttgaggtgttcaacaaaataagagaagaaacaacagagacttccattttttcat

SEQ ID NO: 343208 - DNA, 414 bp, Homo sapiens
ggcatctttaggtggcagaatagaaagctcccctgttatacacacacacacacacacacacacacacacacacacacacaagttgacagctatctacacagaaaaaacaccttcataagaaccaaaaacaggtgagcactcatagtacctatagtacctggtttaaacttcatatcactgaaagaggcactgaagaaatagcaaaaactgtcctgaattgccaacactacccttctgcaacccccagcagcactggcatggtgcagagagcatctctgggggttgggggagggaaaacacaacaactgtgaggcattgaactcagtgctgttctgccasagcagaaaggaaaaccagaccaaactcagctaatgcccacccacagaaagagcatttaaaccttagccagagggg

SEQ ID NO: 343209 - DNA, 453 bp, Homo sapiens
agtctgaccttcagttcctgcaaaccttgccaccaagggccaaaatgctcttggtctcaaagtaaacttgaaaggcagtctaggcctaaatgactgcaactcttaggcgagtcctagggctgaaataggcccagagatagtggactagatgggcccatgacaaactgagacagcagctggggcagtcaaaagagtgctggcataacccctcttctaamccttggaggcacagctcacagctccaaaacagaccacttccttctgcttgaggagagaagagggaagagtagggaggacttcgtcttgcatcttggataccagctcagccacagcaggataaggcaccagtcagagtcattaggccccattccaggccctagctcccagacaacatttctagacacaacctgggacagaagggaactcgctctcttgaaagaaagactcagtcct

SEQ ID NO: 343210 - DNA, 603 bp, Homo sapiens
tattaatttgcaaaatgacaggtctcaactaaatgatctttaagcttccctctggtttttattttgtatgaattataaatcttggtctcaaattcctcatctgaaaaatcataaaaataaataactctacttttaaagatactggtcaggcatggtggttcatgcctctaatcccagcactttaggaagccaaggcagaaggatcacttgaggccaggagttcaagaccagccttgtcaacatagcaagaccctgcctctacaaaattttaaaatttaaccaggtgtggtggtacacaccagcagtcccagctactcaggagggtgaggtaggaggatcacttgagcccaggagttcaaggcagcagtgagccatgatttcaccacygcattgtagcctgggagacagacagaccctgtttctaaaaaaataaataaaatatactatctaataattgtttgcggataaattccctcaaaacaattcttgagcaacgtgctatgcaccaagtactatgccaactgttgaagacacagacaagaataagatacatttcccttttttagctcttttaggaatcgccaaactgctttccacaatggt

SEQ ID NO: 343211 - DNA, 588 bp, Homo sapiens
ggagagtggagaagatgagaactaagatgttcgtgccattctaaagaggtttaggcctcatcttgtagcactgggagactatcgtggtatttttagaagaggactgacagggtttcactttagaaaggtcattttggcagcaatgtgaagaatcaatcagaggccagcagccmagctaagaggctactgtagacatccaggctagtgatggtgagggctaaaattaagacagagttcagaaattctttgttgtgaaatccaatggacagtctttagtccttcactggcctgacctctcagcagtagttaacactaacgagcacatgcgccctctttaaaactctttttctttgaacattgataatatcatactttcctgattttcctcctactctccagtctctctccttctctatgctcctatctttccttgccaaccccttaaatgtagtatttctcaattctctatctttggccctctgcccttcccacactatgaattccccctgtgtatcacatttactttctatattttaaatagggatggctcccagatccatatctccatcccacgtcactgtcctgatc

SEQ ID NO: 343212 - DNA, 588 bp, Homo sapiens
ggagagtggagaagatgagaactaagatgttcgtgccattctaaagaggtttaggcctcatcttgtagcactgggagactatcgtggtatttttagaagaggactgacagggtttcactttagaaaggtcattttggcagcaatgtgaagaatcaatcagaggccagcagccaagctaagaggctactgtagacatccaggctagtgatggtgagggctaaaattaagacagagtycagaaattctttgttgtgaaatccaatggacagtctttagtccttcactggcctgacctctcagcagtagttaacactaacgagcacatgcgccctctttaaaactctttttctttgaacattgataatatcatactttcctgattttcctcctactctccagtctctctccttctctatgctcctatctttccttgccaaccccttaaatgtagtatttctcaattctctatctttggccctctgcccttcccacactatgaattccccctgtgtatcacatttactttctatattttaaatagggatggctcccagatccatatctccatcccacgtcactgtcctgatc

SEQ ID NO: 343213 - DNA, 455 bp, Homo sapiens
aggtgatggtggagctagtagtggcgaaagagaatcctggagagagaatcctgtgtgatctccttagatcatttcacaaatagccacttgctttgtctccttaaacaacccttcccccrgtcatccctatggtagttcctccaaaacacccagccctcctctctctctcaggctctttctgcccgcattctctgcctagatcattcttactcatttttcatggctggggacaagggtcacctcctctgtagagcctactctgatgccctgaaattaggtcactcctatgtgcttccacagaacctaatgcccccctctccacttgcctacagaccattaagctcaggactccatctctgggtcctcttcccaacactagaggagagtgtcctcagaagtggcaggatcctccctttccacagtgcttaagagattctgctccagaaaatggccca

SEQ ID NO: 343214 - DNA, 455 bp, Homo sapiens
aggtgatggtggagctagtagtggcgaaagagaatcctggagagagaatcctgtgtgatctccttagatcatttcacaaatagccacttgctttgtctccttaaacaacccttcccccagtcatccctatggtagttcctccaaaacacccagccctcctctctctctcaggctctttctgcccgcattctctgcctagatcattcttactcatttytcatggctggggacaagggtcacctcctctgtagagcctactctgatgccctgaaattaggtcactcctatgtgcttccacagaacctaatgcccccctctccacttgcctacagaccattaagctcaggactccatctctgggtcctcttcccaacactagaggagagtgtcctcagaagtggcaggatcctccctttccacagtgcttaagagattctgctccagaaaatggccca

SEQ ID NO: 343215 - DNA, 594 bp, Homo sapiens
ctatctgcctgcctggtaactcaaggtcccagagtacaaatcagttgcaagcaatcccatgagtaatrcttttgaggtggccagtacacttgcttccccatctttagttagtatttctctttctaccttcatacagacagcacaattcagaaatcaacatgtactgtcatatagatatatggtactatattgtgtattggggaataaaaaccagcatataaagttaagaaataggaggagagataggaagagccatattagcagtgactagcaggacttacagcttttcatatactaccttgcttcaaattgtcctaagtcaggtactgagagtaggagagcctccctcagccagaataactgcatgagttaaaggcctactaataatatacatggaactagaatttagcacagcagtctacttaccagtcatagatttcagaatggtatttaacaagacccagttggacctacggtggggacaagacagatacatcttctctgttggcaaatactgagcctgggagagtttcttttcattcacacataaggatacacaaatccataagatccgcagaaacaaaatactagaga

SEQ ID NO: 343216 - DNA, 594 bp, Homo sapiens
ctatctgcctgcctggtaactcaaggtcccagagtacaaatcagttgcaagcaatcccatgagtaatacttttgaggtggccagtacacttgcttccccatctttagttagtatttctctttctaccttcatacagacagcacaattcagaaatcaacatgtactgtcatatagatatatggtactatattgtgtaytggggaataaaaaccagcatataaagttaagaaataggaggagagataggaagagccatattagcagtgactagcaggacttacagcttttcatatactaccttgcttcaaattgtcctaagtcaggtactgagagtaggagagcctccctcagccagaataactgcatgagttaaaggcctactaataatatacatggaactagaatttagcacagcagtctacttaccagtcatagatttcagaatggtatttaacaagacccagttggacctacggtggggacaagacagatacatcttctctgttggcaaatactgagcctgggagagtttcttttcattcacacataaggatacacaaatccataagatccgcagaaacaaaatactagaga

SEQ ID NO: 343217 - DNA, 594 bp, Homo sapiens
ctatctgcctgcctggtaactcaaggtcccagagtacaaatcagttgcaagcaatcccatgagtaatacttttgaggtggccagtacacttgcttccccatctttagttagtatttctctttctaccttcatacagacagcacaattcagaaatcaacatgtactgtcatatagatatatggtactatattgtgtattggggaataaaaaccagcayataaagttaagaaataggaggagagataggaagagccatattagcagtgactagcaggacttacagcttttcatatactaccttgcttcaaattgtcctaagtcaggtactgagagtaggagagcctccctcagccagaataactgcatgagttaaaggcctactaataatatacatggaactagaatttagcacagcagtctacttaccagtcatagatttcagaatggtatttaacaagacccagttggacctacggtggggacaagacagatacatcttctctgttggcaaatactgagcctgggagagtttcttttcattcacacataaggatacacaaatccataagatccgcagaaacaaaatactagaga

SEQ ID NO: 343218 - DNA, 599 bp, Homo sapiens
acagtactgcccatgggccttttgcggtggtggctatggggagacgctcctctacctgtggaaatggtaggtaagtgtaggaagggctttgtctcatttgtgagtaccagcttagccacagtcgaacagaacaccaggtagatttctaatgtatttgactccagtccctgactcctggatggcatctctgaacccaccgggggactggggaaattcactggcctgaaggagaggacacaagcttggctgaattcaccacctgctgattatggagccctatggctttagtgaacataagcagtagccagggagtggttacagcaggccttgggtgagatcggtgctgttctgacttcagcacatcccaggggtggtggccacaggggtgcttgtgtcgccacaccccyggctccagatggctcagcacagaaagactccatttgtttgggagaaagtaaaggaagagaacaagagtctctgcctggtaatccagagaattcttccagatctcaccccaccaagacagtacctctatgagtctgcaataactacagtgtgaccaggcttgggatgcagcccaatgccgatatggcttagat

SEQ ID NO: 343219 - DNA, 526 bp, Homo sapiens
catgggagaagcatgggtccctggggcttctcactcactcaccacttccctgggcaggggaggctcccctggctccatgtggctcacaggtgggtggttgtcccgacttgcttttcttcattctctgttggttgagttgttttcttgatgaatcccaatrtatgtacttggatgcttcagttgaagatgctgtatgtatcactccttttatttctctctgtgagagtgtcacacattagctgcttctagtcatttatcttacacttttctttctctagttgttgatatttagctttattctattgtggtcagagaagatatttgatattatttctttttttttttttttaagtttttttgagatggagttttactcttgttgcccaggctggagtgcagtggtgtgaccttggctcactgcaacctctgtcctctgggttcaagcaattctcctgcctcagcctccagagtagctgggactacaggtgtgtgccaccacacctggctaattttttgtatttttagt

SEQ ID NO: 343220 - DNA, 652 bp, Homo sapiens
gattctacagaagatcatccttaagacacataatcatcagattttccaaggtcataatgaatgaaagaatgttaaaggaagctagagagacaaggcaggtcacctgcaaagggaatgccataaggctaacagcagacctctgggcagaagccatataagccataagaaattgggggcctatattcaacattcttaaagaaaaaattcttcaaccaagaatttcatatctagacaaacaaagcttcctcagcaaaggagaaataagatccttttcaggtaagcaaatgytaagggagcttgtttctaccagacctcccttagaagagatcttgaaaggagcattaaatgtggaaaggaaagaccattactagccaatacaaaaatacacataaacacatagactagtgatactataaagcaacacacaaacaagccagcacactattcaggtaacaacacaatgaaaggatcaaatccacatatatcaatactaaccttgaatgtaaatgggccaaatgccccatttaaaaggcagagtgtgacaagctagatttaaaaagcaagacccaatggtatactgtcttcaagggacccatctcacatgcgatgacacccataggctcaaaataaaggaatggaggaaaagctacca

SEQ ID NO: 343221 - DNA, 452 bp, Homo sapiens
ttattgagacataatctgtataccataaaattctcccatgtaacattctcccatttgtaactttcaatgaattttagtatatttattgtgttcctcaactgtcaccataatttagtttttgaacactatcattactccaaaaggatgccttgtgctggtttacaattaatttcaccatctaccctagtaccaagaaatcaattacctctctctaatgttctgcctctgaatgttccatatatatggaattawacaatatgtagtttttagtgtgtcttttaacttggcataatatttccaatatttatccatattgtaatataaatcagtatttcattatttattatttttctgattagcatttcaatgtatgaatagttcacattttgatattcattaaagagttgatcaagatttggattgttttacctttttagctattataaataatg

SEQ ID NO: 343222 - DNA, 550 bp, Homo sapiens
aataagcacataaaaacttggctggttcataggagaagtaacatgtttccagctctagtaaaaaacaaattgaagtggcctataaaaakgtacagagtacgacagaatgaaaaataaatgaacaagaatacagagaggatgtggtaaattatcatgtttccctaatatgttattggacactaaatggtattagaattatttatcaataataattctaaactgttgcaattgaaagaatatattaagtggtgttatatgagaagtgccagggcattctcatttctgtccaatgggagaaacattttcgtttgagacctccgtgaataatacagtcttttagttaggagagctgcattttgagtggtgcaggcagaatggcgatctctcacccacacaaacactaagatagagagagacagagacagagacagagacagcagagagagacagagaaaggaagtacaggtactcagatagagataagccatttcttgacattaagaaataaagtagaatccattggagggaaataaaactgcctcaggaacag

SEQ ID NO: 343223 - DNA, 617 bp, Homo sapiens
atgtatcaaaatagcacatrcaccctataaacatgtacaattattatgtatcaattaacaaaagatcatggaaaggggaattataaacagtaacaaggacaaaaatacaaatgcaagaatattcttgttaaaaacatttttggggacttcaacttatttttgattaaactttctattccatagtttattgagatatccttagattttacccattgtctgttccccatgaccaggatcttatctaggatatcatatatttagtcattatgtctccttaggctcctttaggttatgacaattttttcagatttttcttatttttgatgaccttgttttttaagttatttttcttgtgtaacaaagctgcacttgtacccctgaacttaaacataaaagttaaaataaataagtaaaacttttttttcttgtttttttcttatttttgataaccttgactgtttggtgatatactcgtcaggtatttgtataatgtccctcaactgaggttttactgatttttaaaaaagtcataattagaataaaattatggtattttggaagaatgaccaaaggcatgaagtgccattttcatcacagtatatcaaggatacacatga

SEQ ID NO: 343224 - DNA, 605 bp, Homo sapiens
ttacagtgggtcctgaccttctcgtgctttggatctctcctgcatcttcttctgtcacatctcagatgaactgttctagtttactcttccacttttaagggctcatgtgaatagattggacccactcagataacccaggataagctgtgtgttttaatgtacatcgccttaatttgtaaattttttgtcatgttacgtatctataggtttcagggattagggtgtgaacatctttgggagccattattctgcctaccacaacaacttacagagttatgtgaggagrtgtgaaatgcctatgtggctggcatggagtaaactctcaataaacaaagttcatgtctggagtttggaaaaagacactgaataataagtgctggaatcatcagtagggcttcatggaaaagagggactgagttttgaaggaaggaaaggactcagtaaaggaaaggacagaaaagaggctattatgtcatgtaaataatataaacaaaagaacaaatgcttcaagttgtagcagcaagacacaggccttgataaaaaattgaactgaattcaaatgctcacgcacttgttatgaggtttgttatcttagacatttaaat

SEQ ID NO: 343225 - DNA, 543 bp, Homo sapiens
tatgggttcaagcttcttttctgaggacaatactgcatcctgcctccattgcttcttgtccccctttgtcatgacggagtatgcctctgactttgatattaggattggatccttccctgaatctccctcaaatagcacttacttctccaatttaaaatctaaaacttgccctatgcataccttccctccctcattacaatactagttcatagggtttgattttgtagagctttgytaaagaagtttagatttaataattttaaatgagtcattgattattttgttctgataagtcaatattttaagatgatgttcttgttcatggattcaatgagcataaaatttgtggctggaattgattgggagcagatagaaggactcagagttgtactagccaataatccagccatggtgtgatgggatattcacacggctccccctgcctatgtccttttttggaatgagaaaagaaaaagttgtatcagtggtttacaatatttatggtagctatcggcaatgcacattgaatgagcaaactgctag

SEQ ID NO: 343226 - DNA, 594 bp, Homo sapiens
caatctctaagaatagtgagtagaatgattgactaaataacctacaaatgaataacactcgatagtgacttggatgtttatgataaccatgacaacaaaacaccatgttgctaacctattaagagtttctttaaaaatgtaaagtactgtgagccatcatgaaaaactgctaggttttcaattaaactctcaactttggcatgtgtgcttcataagaccataaaatgggcactgtactttgcacggtgccatgtgatactgttttcagtaaccagagcactaaaattctgcaagtagcatcagtcytaggctgtcaggcagaacaaggcacgggtgcttcatcttgagggagtggaactctgcatttttcaaatcaagtctgtaataaaaatgatcccttagaccatatagtgctatatatatctatatctatataatctcatatgatgctgccaagtaggtacaataggtagaattctccaattgtatagatgagggaaaacaacacatgtgactgaggttatgtagcaaataaatgacagagccagaactagaccttgtattttttaacctacagtctaatcttgtgttctg

SEQ ID NO: 343227 - DNA, 631 bp, Homo sapiens
gtctaatatgtagtctcaaacctctttttctttgcctctgctgtcccctctgcctggaatagactcccaacctcccatgcaaaccctcctgactatttttgaaggtcagctcaagggtaagtctataccatcctctagcctctcacagtgtgttgcacacaactccactgtaacggtcaccactttgctgtgtaaatgcttgttcctgctctctctgtgccayactgtgttatctgctgtttcaatcccagaacatcaacagtgtggagcatttagtaaatactcaagatatgtttcaggattagataattctataaaagcctgtgtcaacttgttctatataataatttgggtattaggatagtgcctgtaagtgttaaaggctccatgtaattcagactgttctcaaaaatatttactctgtggttcgactctgagtaaaataatgacaaagaaaatggctgagaatacgagaacccacactatggaaggaactacatgcaatgaaaatagctaactgaaacataaatatgcacagaaagagataaatgaggcattcatacaacaacagtgtctgagtctaccacaagtgggttatgattacaggacgctgtggagcagcatgaataaa

SEQ ID NO: 343228 - DNA, 631 bp, Homo sapiens
gtctaatatgtagtctcaaacctctttttctttgcctctgctgtcccctctgcctggaatagactcccaacctcccatgcaaaccctcctgactatttttgaaggtcagctcaagggtaagtctataccatcctctagcctctcacagtgtgttgcacacaactccactgtaacggtcaccactttgctgtgtaaatgcttgttcctgctctctctgtgccatactgtgttatctgytgtttcaatcccagaacatcaacagtgtggagcatttagtaaatactcaagatatgtttcaggattagataattctataaaagcctgtgtcaacttgttctatataataatttgggtattaggatagtgcctgtaagtgttaaaggctccatgtaattcagactgttctcaaaaatatttactctgtggttcgactctgagtaaaataatgacaaagaaaatggctgagaatacgagaacccacactatggaaggaactacatgcaatgaaaatagctaactgaaacataaatatgcacagaaagagataaatgaggcattcatacaacaacagtgtctgagtctaccacaagtgggttatgattacaggacgctgtggagcagcatgaataaa

SEQ ID NO: 343229 - DNA, 631 bp, Homo sapiens
gtctaatatgtagtctcaaacctctttttctttgcctctgctgtcccctctgcctggaatagactcccaacctcccatgcaaaccctcctgactatttttgaaggtcagctcaagggtaagtctataccatcctctagcctctcacagtgtgttgcacacaactccactgtaacggtcaccactttgctgtgtaaatgcttgttcctgctctctctgtgccatactgtgttatctgctgtttcaatcccagaacatcaacagtgtggagcatttagtaaatactcaagatatgtttcaggattagataattctataaaagcctgtgtcaacttgttctatataataatttgggtattaggatagtgcctstaagtgttaaaggctccatgtaattcagactgttctcaaaaatatttactctgtggttcgactctgagtaaaataatgacaaagaaaatggctgagaatacgagaacccacactatggaaggaactacatgcaatgaaaatagctaactgaaacataaatatgcacagaaagagataaatgaggcattcatacaacaacagtgtctgagtctaccacaagtgggttatgattacaggacgctgtggagcagcatgaataaa

SEQ ID NO: 343230 - DNA, 631 bp, Homo sapiens
gtctaatatgtagtctcaaacctctttttctttgcctctgctgtcccctctgcctggaatagactcccaacctcccatgcaaaccctcctgactatttttgaaggtcagctcaagggtaagtctataccatcctctagcctctcacagtgtgttgcacacaactccactgtaacggtcaccactttgctgtgtaaatgcttgttcctgctctctctgtgccatactgtgttatctgctgtttcaatcccagaacatcaacagtgtggagcatttagtaaatactcaagatatgtttcaggattagataattctataaaagcctgtgtcaacttgttctatataataatttgggtattaggatagtgcctgtaagtgttaaaggctccatrtaattcagactgttctcaaaaatatttactctgtggttcgactctgagtaaaataatgacaaagaaaatggctgagaatacgagaacccacactatggaaggaactacatgcaatgaaaatagctaactgaaacataaatatgcacagaaagagataaatgaggcattcatacaacaacagtgtctgagtctaccacaagtgggttatgattacaggacgctgtggagcagcatgaataaa

SEQ ID NO: 343231 - DNA, 524 bp, Homo sapiens
aaagcatccaaaataaaaatatatttttattaaaattcattctatgagtgtgattgtcagtgacattgcttcattattgattagcttagtccctgtaaagaaaaattatatgttgctgtttctggtcaataacacaggtagagaatacctagtatcctcaatatcttctatttcctatttcaatttctggtacagaggtctggggaagaaaccccagagttgcctgcctttaagtattcaattgttacttatataggktcttctatatatcaggttctctttatggtgctggaaatgaaacagtgaacaaaatccatgccctcattgtacatatattctagaggggaaaacagtcaatacatagatatgtcacatatgtagtaggttagatggctgtaaataggaagagaactgtgcagggatggggttagatagtgctggggtaggaaagcgtaatcttagatacggttgccagggaaaaccttcctgagaaattggcatttgaggaaaggcctgaaggatgt

SEQ ID NO: 343232 - DNA, 461 bp, Homo sapiens
gaagaatttaaagtgaggccagccaatacccctgctttgcttcagctacatcagctgcataggttcaggcacagaatacatggaacattgtatttaaatagggcctggattttacaaaagtaacacaatgaagaagagagatgcaargctatttgagggtgtttgtgggagagattgtaaaatattagctaagtaagaaggggactgcaaattttagtggtataaaggaatgaggaaaagtgtaaatacagtggggtcaaagaatgtttggagccaaggcactagaggcaattagctgaaaatgtaggtgattattggtgagtgacatggtttaaatgaaaagtatagaagggtacaattatccatcatgaaaagttctagggtacaactaagatctgagtagctgaagtagaatgaaagtagaatggacctttccatatccagccaggttcagtgacaga

SEQ ID NO: 343233 - DNA, 461 bp, Homo sapiens
gaagaatttaaagtgaggccagccaatacccctgctttgcttcagctacatcagctgcataggttcaggcacagaatacatggaacattgtatttaaatagggcctggattttacaaaagtaacacaatgaagaagagagatgcaaggcyatttgagggtgtttgtgggagagattgtaaaatattagctaagtaagaaggggactgcaaattttagtggtataaaggaatgaggaaaagtgtaaatacagtggggtcaaagaatgtttggagccaaggcactagaggcaattagctgaaaatgtaggtgattattggtgagtgacatggtttaaatgaaaagtatagaagggtacaattatccatcatgaaaagttctagggtacaactaagatctgagtagctgaagtagaatgaaagtagaatggacctttccatatccagccaggttcagtgacaga

SEQ ID NO: 343234 - DNA, 461 bp, Homo sapiens
gaagaatttaaagtgaggccagccaatacccctgctttgcttcagctacatcagctgcataggttcaggcacagaatacatggaacattgtatttaaatagggcctggattttacaaaagtaacacaatgaagaagagagatgcaaggctatttgagggtgtttgtgggagagattgtaaaatattagctaagtaagaaggggactgcaaattttagkggtataaaggaatgaggaaaagtgtaaatacagtggggtcaaagaatgtttggagccaaggcactagaggcaattagctgaaaatgtaggtgattattggtgagtgacatggtttaaatgaaaagtatagaagggtacaattatccatcatgaaaagttctagggtacaactaagatctgagtagctgaagtagaatgaaagtagaatggacctttccatatccagccaggttcagtgacaga

SEQ ID NO: 343235 - DNA, 461 bp, Homo sapiens
gaagaatttaaagtgaggccagccaatacccctgctttgcttcagctacatcagctgcataggttcaggcacagaatacatggaacattgtatttaaatagggcctggattttacaaaagtaacacaatgaagaagagagatgcaaggctatttgagggtgtttgtgggagagattgtaaaatattagctaagtaagaaggggactgcaaattttagtggtataaaggaatgaggaaaagtgtaaatacagtkgggtcaaagaatgtttggagccaaggcactagaggcaattagctgaaaatgtaggtgattattggtgagtgacatggtttaaatgaaaagtatagaagggtacaattatccatcatgaaaagttctagggtacaactaagatctgagtagctgaagtagaatgaaagtagaatggacctttccatatccagccaggttcagtgacaga

SEQ ID NO: 343236 - DNA, 570 bp, Homo sapiens
ttcccattcacacggattgtgaattctcattgttaacctagagtcccagctagtcaggaggctgaggcaggagaaaagtgtgaacctgggaggcagaggctgcagtgagctgagatcgtgccactgcactccagtctggtgacacgatgagactccatctcaaaaaaaaaaaaaaaaaaaaaaaaaaaattarcttcaaattccaaaacacttaatgttgcaccctccttgaacaataactaaaaaaactcgtttccactctgtgaaaatacaatctttgagcttataactggtatcagcagatcaatataaaaaatacagtaccaagctacactggtatatttccattttaagaactccacaatatcctcattgctgagagcatagtccttgcattagttttcagtatgctatgaacaattatctgctgcatgtaaacatgtctaaataactatagataaaatacatcaatcataaatttctgtaaaagataataaaatatcttctttaaaaaacaaaacaataagctattactgcattatttccaattttatgaaaatggaacaaata

SEQ ID NO: 343237 - DNA, 570 bp, Homo sapiens
ttcccattcacacggattgtgaattctcattgttaacctagagtcccagctagtcaggaggctgaggcaggagaaaagtgtgaacctgggaggcagaggctgcagtgagctgagatcgtgccactgcactccagtctggtgacacgatgagactccatctcaaaaaaaaaaaaaaaaaaaaaaaaaaaattaacttcaaattccaaaacacttaatgttgcaccctccttgaacaataactaaaaaaactcrtttccactctgtgaaaatacaatctttgagcttataactggtatcagcagatcaatataaaaaatacagtaccaagctacactggtatatttccattttaagaactccacaatatcctcattgctgagagcatagtccttgcattagttttcagtatgctatgaacaattatctgctgcatgtaaacatgtctaaataactatagataaaatacatcaatcataaatttctgtaaaagataataaaatatcttctttaaaaaacaaaacaataagctattactgcattatttccaattttatgaaaatggaacaaata

SEQ ID NO: 343238 - DNA, 428 bp, Homo sapiens
acttagaatgggtaggagatgtttttcatttataaaatgagatgaaaatgcttgtaaatagggagcaggacctcacgacaggctagctttcaataccatgaaaaagtgcacagggtrattgatgatctggaaactgatctctttaaaaccacgtcatgcttgcctttggaaagtctttacacaccctagtttgaaacccctgtcccagatgatttccaatatcctattattttattttggttattgttttcctttttgactacatttttcatagcatgtacatgacaaatatatataagatattaaaatagaattgtttccaagttgattctaggattcatttgacaaattggtgaagatccattatgtgttaagcagtgccctatgttaatacaacaaatctctgcccttgaagcaacttacactgc

SEQ ID NO: 343239 - DNA, 428 bp, Homo sapiens
acttagaatgggtaggagatgtttttcatttataaaatgagatgaaaatgcttgtaaatagggagcaggacctcacgacaggctagctttcaataccatgaaaaagtgcacagggtgattgatgatctggaaactgatctctttaaaaccaygtcatgcttgcctttggaaagtctttacacaccctagtttgaaacccctgtcccagatgatttccaatatcctattattttattttggttattgttttcctttttgactacatttttcatagcatgtacatgacaaatatatataagatattaaaatagaattgtttccaagttgattctaggattcatttgacaaattggtgaagatccattatgtgttaagcagtgccctatgttaatacaacaaatctctgcccttgaagcaacttacactgc

SEQ ID NO: 343240 - DNA, 428 bp, Homo sapiens
acttagaatgggtaggagatgtttttcatttataaaatgagatgaaaatgcttgtaaatagggagcaggacctcacgacaggctagctttcaataccatgaaaaagtgcacagggtgattgatgatctggaaactgatctctttaaaaccacgtcatgcttgcctttggaaagtctttacacaccctagtttgaaacccctgtcccagatgatttccaatatcctatyattttattttggttattgttttcctttttgactacatttttcatagcatgtacatgacaaatatatataagatattaaaatagaattgtttccaagttgattctaggattcatttgacaaattggtgaagatccattatgtgttaagcagtgccctatgttaatacaacaaatctctgcccttgaagcaacttacactgc

SEQ ID NO: 343241 - DNA, 408 bp, Homo sapiens
tcctactttctttacccttaatataagtaactttgaggagattgtacctttaaatgtctctaaatgtggctgtcttttgatatatcagcaatcctcacaaaacaaactgtgagggagagaaaactgaaaaacatattagcttaaaaatgagagtaaactttgaaaatgaaaacaagtgtgacagatattccctctcagcacttctaaaatrcaagttgtcactgttagttagaaaagagctttatttttagacaaagatcttcttatacaacttacactgtaccatccattgttctatgactgtgaataaatagaatcttgcactcttagcccggaattttctttgtttccttaagcttccatctccctaactcttatttatagagatagaattgggaggcaaaacca

SEQ ID NO: 343242 - DNA, 408 bp, Homo sapiens
tcctactttctttacccttaatataagtaactttgaggagattgtacctttaaatgtctctaaatgtggctgtcttttgatatatcagcaatcctcacaaaacaaactgtgagggagagaaaactgaaaaacatattagcttaaaaatgagagtaaactttgaaaatgaaaacaagtgtgacagatattccctctcagcacttctaaaatacaagttgtcactgttagttagaaaagagctttrtttttagacaaagatcttcttatacaacttacactgtaccatccattgttctatgactgtgaataaatagaatcttgcactcttagcccggaattttctttgtttccttaagcttccatctccctaactcttatttatagagatagaattgggaggcaaaacca

SEQ ID NO: 343243 - DNA, 441 bp, Homo sapiens
actgctatgtaactaatgtaggatgcagwtatcctgaagtgccagctatgcctctgtccctataagcaaaaggaattactatggggaatcttgaacctactcacaaaaaagcgggagaaaatcattataaggctttgctactattaagtgaattttcttgtaatagtcttgtcactaccaactaggaaacaacattttgctattatcagggttgggactcactcatttgaacaaaacacatcctggaaaagattagtaggagaaaaaaagatccattgcaaatactaaataaattaattagcataaatcatgtatgtggtataatacaggtgttgtcattaactcagtatgtaaccctagctgtgtcttgagtttctcatctgtatatggggagaacatcactgtctcactacttcacaaagacttgaggctcagttagat

SEQ ID NO: 343244 - DNA, 441 bp, Homo sapiens
actgctatgtaactaatgtaggatgcagatatcctgaagtgccagctatgcctctgtccctataagcaaaaggaattactatggggaatcttgaacctactcacaaaaaagcgggagaaaatcattataaggctttgctactattaagtgaattttcttgtaayagtcttgtcactaccaactaggaaacaacattttgctattatcagggttgggactcactcatttgaacaaaacacatcctggaaaagattagtaggagaaaaaaagatccattgcaaatactaaataaattaattagcataaatcatgtatgtggtataatacaggtgttgtcattaactcagtatgtaaccctagctgtgtcttgagtttctcatctgtatatggggagaacatcactgtctcactacttcacaaagacttgaggctcagttagat

SEQ ID NO: 343245 - DNA, 441 bp, Homo sapiens
actgctatgtaactaatgtaggatgcagatatcctgaagtgccagctatgcctctgtccctataagcaaaaggaattactatggggaatcttgaacctactcacaaaaaagcgggagaaaatcattataaggctttgctactattaagtgaattttcttgtaatagtcttgtcactaccaactaggaaacaacattttgctattatcagggttgggactcactcatttgaacaaaacacatcctggaaaagattagtaggagaaaaaaagatccattgcaaatactaaataaattaattagcataaatcatgtatgtggtataatacaggtgttgtcattaactcagtatgtaaccctagctgtgtcttgagtttctcatctgtatatggggagaacatcactgtctcactrcttcacaaagacttgaggctcagttagat

SEQ ID NO: 343246 - DNA, 356 bp, Homo sapiens
caatgattttaatcatttgagatgtgtgtyacaagttgttgaacctaccagaatatcaaattttgtaaaaaataaataagaataaaaatatgaatttacaaattttcccaaatagccaaattctgtttatatatcactgtagggatgctttaaatgtgtttctagtattgtcacattatttcttttttttttttttttataagagacagagtctcattgtgttgccaggctggaatacagtggtgcaatcatagctcactaaaacctggaactccagcctcctgagtagataggactacaggcacatgccaccatgcccagataatttaaaaaaatattttgtagagacagagtct

SEQ ID NO: 343247 - DNA, 356 bp, Homo sapiens
caatgattttaatcatttgagatgtgtgttacaagttgttgaacctaccagaatatcaaattttgtaaaaaataaataagaataaaaatatgaatttacaaattttcccaaatagccaaattctgtttatatatcactgtagggmtgctttaaatgtgtttctagtattgtcacattatttcttttttttttttttttataagagacagagtctcattgtgttgccaggctggaatacagtggtgcaatcatagctcactaaaacctggaactccagcctcctgagtagataggactacaggcacatgccaccatgcccagataatttaaaaaaatattttgtagagacagagtct

SEQ ID NO: 343248 - DNA, 404 bp, Homo sapiens
ttttcaggtgatactgatgcaccagctaggctaactcattagcctcgctgttaatctgagaacgatcccttctcagagagcaaacaaagcacagctggtaatgaagactttagccctctcccgtctcctcctcttcctggatctggacagtgcgggcagctacaaagcatcagttctgtgtggtggggcaggcaggataagacaaagtaggttccttgaggagaagcaccaactgtaaggtgagaaaagtgagcttcatgaactaggctacctgacttctggttactgtttgcttttctttctccgtagttttyacggagcctttaataaagcctttaaccaaaggtccagtcgcatctctttcctatgtttcagaataaattgaagctgagttcagcaagcat

SEQ ID NO: 343249 - DNA, 571 bp, Homo sapiens
tgttttaaaattcatatggatccataaaagagcccatataaccaaggcaatcctaagcaaaaagaacaaagctggagacatcaaactatactatgaggctacagtaaccaaaacagcatgatactggtacaagaacagacattgcrgtttattgtatgttattgaatgactttggtaaccctactggcaagaaacaatattaaattgaatccttccccttaaccagtttgcttctttttattttctttgttgtgagaagagaaatagttttgattgtagtatcttttaattcagaaaaatagacaaaaagatcatacactatgccattcatctaaagacaatggcttggtatgaatttggtgtagcctgtttatgctatgcacttcatacatttatttttataatatagttcacctatatataaccacatgagtattttcccacttgtcagaaacttataattcttgatgactgctaatgtatggatagcatcccttgtttttgctgaattgtggcttagttactcacttctcgttaatggacatctagtttttaatatatctgatttgta

SEQ ID NO: 343250 - DNA, 571 bp, Homo sapiens
tgttttaaaattcatatggatccataaaagagcccatataaccaaggcaatcctaagcaaaaagaacaaagctggagacatcaaactatactatgaggctacagtaaccaaaacagcatgatactggtacaagaacagacattgcagtttattgtatgttattgaatgactttggtaaccctactggcaagaaacaatattaaattgaatccttccccttaaccagtttgcttctttttattttctttgttgtgagawgagaaatagttttgattgtagtatcttttaattcagaaaaatagacaaaaagatcatacactatgccattcatctaaagacaatggcttggtatgaatttggtgtagcctgtttatgctatgcacttcatacatttatttttataatatagttcacctatatataaccacatgagtattttcccacttgtcagaaacttataattcttgatgactgctaatgtatggatagcatcccttgtttttgctgaattgtggcttagttactcacttctcgttaatggacatctagtttttaatatatctgatttgta

SEQ ID NO: 343251 - DNA, 543 bp, Homo sapiens
atcaccttgtaattatcctttttctgaatatcatatagttaacaaatattttgcttattgcaataaaaatgcaagcatcatttcaacattggttgtatcttcacaagcaagggaagaagaataaatatctcagtgctctgagtttatcgatgtcaacagcactatttatattattaagggcaaaatttatgtccaaattatctgaaaaatatttgcttttcactctattatgtacaacaaatamagatgataaatggaatgaaataatcttaaggaaaatgttttccaacttcagaaacctttaacaaaatgtggcataaaatagtcattcctacacgaaatagtctcatagaaggagatattttgtgatcaaaattaatattctttttatgtttttgctgcatgtctaaagctgtatgtttaaaattacatttataatagtaagaatggggtttattttaatggacatgtaatctgtgcttaatgaacaaattactttgaaataattctgttgttttatctctaaaaggataagcaaattgg

SEQ ID NO: 343252 - DNA, 543 bp, Homo sapiens
atcaccttgtaattatcctttttctgaatatcatatagttaacaaatattttgcttattgcaataaaaatgcaagcatcatttcaacattggttgtatcttcacaagcaagggaagaagaataaatatctcagtgctctgagtttatcgatgtcaacagcactatttatattattaagggcaaaatttatgtccaaattatctgaaaaatatttgcttttcactctattatgtacaacaaatacagatgataaatggaatgaaataatcttaaggaaaatgttttccaacttcagaaacctttaacaaaatgtgrcataaaatagtcattcctacacgaaatagtctcatagaaggagatattttgtgatcaaaattaatattctttttatgtttttgctgcatgtctaaagctgtatgtttaaaattacatttataatagtaagaatggggtttattttaatggacatgtaatctgtgcttaatgaacaaattactttgaaataattctgttgttttatctctaaaaggataagcaaattgg

SEQ ID NO: 343253 - DNA, 543 bp, Homo sapiens
atcaccttgtaattatcctttttctgaatatcatatagttaacaaatattttgcttattgcaataaaaatgcaagcatcatttcaacattggttgtatcttcacaagcaagggaagaagaataaatatctcagtgctctgagtttatcgatgtcaacagcactatttatattattaagggcaaaatttatgtccaaattatctgaaaaatatttgcttttcactctattatgtacaacaaatacagatgataaatggaatgaaataatcttaaggaaaatgttttccaacttcagaaacctttaacaaaatgtggcataaaatagtcattcctacacgaaatagtctcatagaaggagatattttgtgatcaaaattaatattcttttyatgtttttgctgcatgtctaaagctgtatgtttaaaattacatttataatagtaagaatggggtttattttaatggacatgtaatctgtgcttaatgaacaaattactttgaaataattctgttgttttatctctaaaaggataagcaaattgg

SEQ ID NO: 343254 - DNA, 543 bp, Homo sapiens
atcaccttgtaattatcctttttctgaatatcatatagttaacaaatattttgcttattgcaataaaaatgcaagcatcatttcaacattggttgtatcttcacaagcaagggaagaagaataaatatctcagtgctctgagtttatcgatgtcaacagcactatttatattattaagggcaaaatttatgtccaaattatctgaaaaatatttgcttttcactctattatgtacaacaaatacagatgataaatggaatgaaataatcttaaggaaaatgttttccaacttcagaaacctttaacaaaatgtggcataaaatagtcattcctacacgaaatagtctcatagaaggagatattttgtgatcaaaattaatattctttttatgtttttgctgcatgtctaaagctgtatgtttaaaattacatttataatagtaagaatggggtttaktttaatggacatgtaatctgtgcttaatgaacaaattactttgaaataattctgttgttttatctctaaaaggataagcaaattgg

SEQ ID NO: 343255 - DNA, 378 bp, Homo sapiens
ccttatctgtaaattgggatgacaacagcctacgtcaaaaaaatgtgaaggtaaatgagataatgtaaggctgatacttagtaagcawtttaaaaacacccaaaaaactattgccatgattactctacttactctatttctctatgctccaggcaaatgaactactaatgacccaggggtccttccccattctcttcttcacaaggaaatattctctctctgtgtgctgtttattaaaatctactgccccttttagaagcctttccagatcatcccatggccaagaacgatcgctgcttcctcttctttacatacagatgtttttctcctgcttgacaattatttttgtgcaattattttccttttgattgtgttttt

SEQ ID NO: 343256 - DNA, 378 bp, Homo sapiens
ccttatctgtaaattgggatgacaacagcctacgtcaaaaaaatgtgaaggtaaatgagataatgtaaggctgatacttagtaagcaatttaaaaacacccaaaaaactattgccatgattactctacttactctatttctctatgctccaggcaaatgaactactaatgacccaggggtccttccccattctcttcttcacaaggaaatattctctctctgtgtgctgtttattaaaatctactgccccttttagaagcctttccagatcatcccatggccaagaaygatcgctgcttcctcttctttacatacagatgtttttctcctgcttgacaattatttttgtgcaattattttccttttgattgtgttttt

SEQ ID NO: 343257 - DNA, 532 bp, Homo sapiens
gggaatatattttctgttgagtcctatactagtaagattttcaacacaaggtgactctcgaccttgccttgtaggaagagtgctgagaaaatatttcacctgctctttctccataaggagcttggtgctgatcattgctattttcttattcgatctgtaaagataacaaagacaaatgcttagtatttcatwtttccttaaatgattcttaatgccttgcagtcattacatttaaagtgttgccctgagagtaaaccaaattacccactaaatagtgttttcacaccgaagatgtgtaagagcatacctgttgtaaggaattataattttaaaatcattctaaagaagcacctttgtttctaaggtgatttacactgaacaagcagttcaaacaaagtagacagggaagagaaatggctatcagtggtgtatggctcaacaggcaaaatttgctgccttctaaaatggctctacttgtaagattctgaagattccattagaaatacttgtatttaaagggcaataatgtggg

SEQ ID NO: 343258 - DNA, 532 bp, Homo sapiens
gggaatatattttctgttgagtcctatactagtaagattttcaacacaaggtgactctcgaccttgccttgtaggaagagtgctgagaaaatatttcacctgctctttctccataaggagcttggtgctgatcattgctattttcttattcgatctgtaaagataacaaagacaaatgcttagtatttcatatttccttaaatgattcttaatgmcttgcagtcattacatttaaagtgttgccctgagagtaaaccaaattacccactaaatagtgttttcacaccgaagatgtgtaagagcatacctgttgtaaggaattataattttaaaatcattctaaagaagcacctttgtttctaaggtgatttacactgaacaagcagttcaaacaaagtagacagggaagagaaatggctatcagtggtgtatggctcaacaggcaaaatttgctgccttctaaaatggctctacttgtaagattctgaagattccattagaaatacttgtatttaaagggcaataatgtggg

SEQ ID NO: 343259 - DNA, 532 bp, Homo sapiens
gggaatatattttctgttgagtcctatactagtaagattttcaacacaaggtgactctcgaccttgccttgtaggaagagtgctgagaaaatatttcacctgctctttctccataaggagcttggtgctgatcattgctattttcttattcgatctgtaaagataacaaagacaaatgcttagtatttcatatttccttaaatgattcttaatgccttgcagtcattacatttaaagtgttgccctgagagtaaaccaaattacccactaaatagtgttttcacaccgaagatgtgtaagagcatacctgttgtaaggaattataattttaaaatcattctaaagaagcacctttgtttctaaggtgatttacactgaacaagcagttcaaacaaagtagacagggaagagaaatggctatcagtggtgtatggctcaacaggcaaaayttgctgccttctaaaatggctctacttgtaagattctgaagattccattagaaatacttgtatttaaagggcaataatgtggg

SEQ ID NO: 343260 - DNA, 625 bp, Homo sapiens
atctcactaaaaattatgcttttgaaacaaattaatgagcttaattcattctctgagtgtatgttttgacttacttcgttaatttttttgacatggaattgttagctttcaatgctgctgcaaaggcttccttatattcttctaactcagttgtaacctcttcataagcagtttacattttgtagaatttacattcyacatctttaagtgtgagttccttcttatttagtgaagccgtattatccttgtttaactgctctaattgttttttatattgtgcttgtaactaaaacaaaggaaaataatacacttttaaaacaataacataattattatatgtttgttgcctttcattttgagtcagtgattcaaagagcatttctgaatatgttaaaaaagaggctgaagcttaaaatatttcagcaatatcaaaactaataactgaattcagaattaagtctgatttataaaaatttgaaatcataattatgttagtattaatgtaatctggtcatataaaaagtaatagaatccattcataatttgaaaaagtgatcaatgaacaatgtagcttaacaccaattcaaaagtatcacataatttctaaatcacaattttttcctat

SEQ ID NO: 343261 - DNA, 625 bp, Homo sapiens
atctcactaaaaattatgcttttgaaacaaattaatgagcttaattcattctctgagtgtatgttttgacttacttcgttaatttttttgacatggaattgttagctttcaatgctgctgcaaaggcttccttatattcttctaactcagttgtaacctcttcataagcagtttacattttgtagaatttacattccacatctttaagtgtgagttccttcttatttagtgaagccgtattatccttgtttaactgctctaattgttttttatattgtgcttgtaactaaaacaaaggaaaataatacacttttaaaacaataacataattattatatgtttgttgcctttcattttgagtcagtgattcaaagarcatttctgaatatgttaaaaaagaggctgaagcttaaaatatttcagcaatatcaaaactaataactgaattcagaattaagtctgatttataaaaatttgaaatcataattatgttagtattaatgtaatctggtcatataaaaagtaatagaatccattcataatttgaaaaagtgatcaatgaacaatgtagcttaacaccaattcaaaagtatcacataatttctaaatcacaattttttcctat

SEQ ID NO: 343262 - DNA, 625 bp, Homo sapiens
atctcactaaaaattatgcttttgaaacaaattaatgagcttaattcattctctgagtgtatgttttgacttacttcgttaatttttttgacatggaattgttagctttcaatgctgctgcaaaggcttccttatattcttctaactcagttgtaacctcttcataagcagtttacattttgtagaatttacattccacatctttaagtgtgagttccttcttatttagtgaagccgtattatccttgtttaactgctctaattgttttttatattgtgcttgtaactaaaacaaaggaaaataatacacttttaaaacaataacataattattatatgtttgttgcctttcattttgagtcagtgattcaaagagcatttctgaatatgttaaaaaagaggctgaagcttaaaatayttcagcaatatcaaaactaataactgaattcagaattaagtctgatttataaaaatttgaaatcataattatgttagtattaatgtaatctggtcatataaaaagtaatagaatccattcataatttgaaaaagtgatcaatgaacaatgtagcttaacaccaattcaaaagtatcacataatttctaaatcacaattttttcctat

SEQ ID NO: 343263 - DNA, 625 bp, Homo sapiens
atctcactaaaaattatgcttttgaaacaaattaatgagcttaattcattctctgagtgtatgttttgacttacttcgttaatttttttgacatggaattgttagctttcaatgctgctgcaaaggcttccttatattcttctaactcagttgtaacctcttcataagcagtttacattttgtagaatttacattccacatctttaagtgtgagttccttcttatttagtgaagccgtattatccttgtttaactgctctaattgttttttatattgtgcttgtaactaaaacaaaggaaaataatacacttttaaaacaataacataattattatatgtttgttgcctttcattttgagtcagtgattcaaagagcatttctgaatatgttaaaaaagaggctgaagcttaaaatatttcagcaatatcaaaactaataactgaattcagaattaagwctgatttataaaaatttgaaatcataattatgttagtattaatgtaatctggtcatataaaaagtaatagaatccattcataatttgaaaaagtgatcaatgaacaatgtagcttaacaccaattcaaaagtatcacataatttctaaatcacaattttttcctat

SEQ ID NO: 343264 - DNA, 176 bp, Homo sapiens
tagcaggggttgtacaccacctttgtgatattgttctacatatccatggggaaagaaaatgatagtactccccaatatcacaggtggtgtacaaccccttgtgatactgtttctaatatccatgttgggggaggatattaytcccaatattgcacgtgttgcacagaccccctttg

SEQ ID NO: 343265 - DNA, 619 bp, Homo sapiens
gcctggaaacccatggccctaaatgggaacaggcattcctgcttttgcacccaaaagttgtctttcagctcaccatgcaccccctgtcctgtacccatatatgccccagaccccaggctccagaagcagacaagcagatgaggagatgaacagaagagcagaattgcagaatgatgtggmagaaagaagagaaggagcatctgaatgccaagaggagtttggctggcagtggttggagagatcagcctctggatggcaaagctcccggggaagatcatcttcccattccatcccctttccagcttcccatccatcccattgagtgccacctccaccactcaataaaacccccacattcaccatcctcaagtctgtgtgcaacttaattctttctggatgctggacaaggaactgggtaccaagagcgcactgaacaggttaacacttaagctgtctgtggatggcaaagctaaaagagtgcactgtaacacatgcccacttgggctgtgggagtcgcaggaacccacccctagacagtaccatggccacttgccctgcctattgcacctgcctgtctgcatgcttccctgcccagtaaggggtttgacagcacacacgg

SEQ ID NO: 343266 - DNA, 474 bp, Homo sapiens
cccctgtcctgtacccatatatgccccagaccccaggctccagaagcagacaagcagatgaggagatgaacagaagagcagaattgcagaatgatgtggcagaaaraagagaaggagcatctgaatgccaagaggagtttggctggcagtggttggagagatcagcctctggatggcaaagctcccggggaagatcatcttcccattccatcccctttccagcttcccatccatcccattgagtgccacctccaccactcaataaaacccccacattcaccatcctcaagtctgtgtgcaacttaattctttctggatgctggacaaggaactgggtaccaagagcgcactgaacaggttaacacttaagctgtctgtggatggcaaagctaaaagagtgcactgtaacacatgcccacttgggctgtgggagtcgcaggaacccacccctagacagtaccatggccacttgcc

SEQ ID NO: 343267 - DNA, 543 bp, Homo sapiens
gggaacaggcattcctgcttttgcacccaaaagttgtctttcagctcaccatgcaccccctgtcctgtacccatatatgccccagaccccaggctccagaagcagacaagcagatgaggagatgaacagaagagcagaattgcagaatgatgtggcagaaagaagagaaggagcatctgaatgccaagaggagtttggctggcagtggttggagagatcagcctctggatggcaaakctcccggggaagatcatcttcccattccatcccctttccagcttcccatccatcccattgagtgccacctccaccactcaataaaacccccacattcaccatcctcaagtctgtgtgcaacttaattctttctggatgctggacaaggaactgggtaccaagagcgcactgaacaggttaacacttaagctgtctgtggatggcaaagctaaaagagtgcactgtaacacatgcccacttgggctgtgggagtcgcaggaacccacccctagacagtaccatggccacttgccctgcctattgcac

SEQ ID NO: 343268 - DNA, 474 bp, Homo sapiens
cccctgtcctgtacccatatatgccccagaccccaggctccagaagcagacaagcagatgaggagatgaacagaagagcagaattgcagaatgatgtggcagaaagaagagaaggagcatctgaatgccaagaggagtttggctggcagtggttggagagatcagcctctggatggcaaagctcccggggaagatcatcttcccattccatcccctttccagctycccatccatcccattgagtgccacctccaccactcaataaaacccccacattcaccatcctcaagtctgtgtgcaacttaattctttctggatgctggacaaggaactgggtaccaagagcgcactgaacaggttaacacttaagctgtctgtggatggcaaagctaaaagagtgcactgtaacacatgcccacttgggctgtgggagtcgcaggaacccacccctagacagtaccatggccacttgcc

SEQ ID NO: 343269 - DNA, 619 bp, Homo sapiens
gcctggaaacccatggccctaaatgggaacaggcattcctgcttttgcacccaaaagttgtctttcagctcaccatgcaccccctgtcctgtacccatatatgccccagaccccaggctccagaagcagacaagcagatgaggagatgaacagaagagcagaattgcagaatgatgtggcagaaagaagagaaggagcatctgaatgccaagaggagtttggctggcagtggttggagagatcagcctctggatggcaaagctcccggggaagatcatcttcccattccatcccctttccagcttcccatccatcccattgagtgccacctccaccactcaataaaacccccacattcaccatcctcaagtctgtgtgcaacttaattctttctggatgctggacaaggaactgggtaccaagagsgcactgaacaggttaacacttaagctgtctgtggatggcaaagctaaaagagtgcactgtaacacatgcccacttgggctgtgggagtcgcaggaacccacccctagacagtaccatggccacttgccctgcctattgcacctgcctgtctgcatgcttccctgcccagtaaggggtttgacagcacacacgg

SEQ ID NO: 343270 - DNA, 619 bp, Homo sapiens
gcctggaaacccatggccctaaatgggaacaggcattcctgcttttgcacccaaaagttgtctttcagctcaccatgcaccccctgtcctgtacccatatatgccccagaccccaggctccagaagcagacaagcagatgaggagatgaacagaagagcagaattgcagaatgatgtggcagaaagaagagaaggagcatctgaatgccaagaggagtttggctggcagtggttggagagatcagcctctggatggcaaagctcccggggaagatcatcttcccattccatcccctttccagcttcccatccatcccattgagtgccacctccaccactcaataaaacccccacattcaccatcctcaagtctgtgtgcaacttaattctttctggatgctggacaaggaactgggtaccaagagcgcactgaacaggttaacacttaagcygtctgtggatggcaaagctaaaagagtgcactgtaacacatgcccacttgggctgtgggagtcgcaggaacccacccctagacagtaccatggccacttgccctgcctattgcacctgcctgtctgcatgcttccctgcccagtaaggggtttgacagcacacacgg

SEQ ID NO: 343271 - DNA, 543 bp, Homo sapiens
gggaacaggcattcctgcttttgcacccaaaagttgtctttcagctcaccatgcaccccctgtcctgtacccatatatgccccagaccccaggctccagaagcagacaagcagatgaggagatgaacagaagagcagaattgcagaatgatgtggcagaaagaagagaaggagcatctgaatgccaagaggagtttggctggcagtggttggagagatcagcctctggatggcaaagctcccggggaagatcatcttcccattccatcccctttccagcttcccatccatcccattgagtgccacctccaccactcaataaaacccccacattcaccatcctcaagtctgtgtgcaacttaattctttctggatgctggacaaggaactgggtaccaagagcgcactgaacaggttaacacttaagctgtctgtgratggcaaagctaaaagagtgcactgtaacacatgcccacttgggctgtgggagtcgcaggaacccacccctagacagtaccatggccacttgccctgcctattgcac

SEQ ID NO: 343272 - DNA, 619 bp, Homo sapiens
gcctggaaacccatggccctaaatgggaacaggcattcctgcttttgcacccaaaagttgtctttcagctcaccatgcaccccctgtcctgtacccatatatgccccagaccccaggctccagaagcagacaagcagatgaggagatgaacagaagagcagaattgcagaatgatgtggcagaaagaagagaaggagcatctgaatgccaagaggagtttggctggcagtggttggagagatcagcctctggatggcaaagctcccggggaagatcatcttcccattccatcccctttccagcttcccatccatcccattgagtgccacctccaccactcaataaaacccccacattcaccatcctcaagtctgtgtgcaacttaattctttctggatgctggacaaggaactgggtaccaagagcgcactgaacaggttaacacttaagctgtctgtggatggcaaagctaaaagagtgcactgtaacacatgcccacttgggctgtgggagtcgcakgaacccacccctagacagtaccatggccacttgccctgcctattgcacctgcctgtctgcatgcttccctgcccagtaaggggtttgacagcacacacgg

SEQ ID NO: 343273 - DNA, 599 bp, Homo sapiens
cacatgcccacttgggctgtgggagtcgcaggaacccacccctagacagtaccatggccacttgccctgcctattgcacctgcctgtctgcatgctyccctgcccagtaaggggtttgacagcacacacggtggccagacaagccacacccctgttgcacatcctgccaaggggagtcagggaagtctccagtttcatcaggaatgtaaatttgttcagcctttgtggaaagcagtttggagatttctgaaataacttaaaacagaactaccattcaacccagcaatcccattattgggtatatacccaaaggaatataaatcattctgtcatagacatatgcacgcatattttcattataacactattcacaatagcaaagacacggaatcaacttagatgcctgttaacagaagactggattaaaaaaatgcagcgtacatacaccatggaatactacacacctataaaataggatgaaataatgtcttttgcagcaacatgaatggagctggataccattattctaagtgaattaatgcaggaacagaaaaccaaacaaacactgcatgttctcacttataagtgggggctaaaca

SEQ ID NO: 343274 - DNA, 599 bp, Homo sapiens
cacatgcccacttgggctgtgggagtcgcaggaacccacccctagacagtaccatggccacttgccctgcctattgcacctgcctgtctgcatgcttccctgcccagtaaggggtttgacagcacacacggtggccagacaagccacacccctgttgcacatcctgccaaggggagtcagggaagtctccagtttcatcaggaatgtaaatttgttcagcctttgtggaaagcagtttggagatttctgaaataacttaaaacagaactaccattcaacccagcaatcccattattgggtatatacccaaaggaatataaatcattctgtcatagacatatgcacgcatattttcattataacactattcacaatagcaaagacacggaatcaacttagatgcctgttaacagaagactggattaaaaaaatgcagcgtacatacaccatggaatactacacacctataaaataggatgaaataatgtcttttgcagcaacatgaatggagctggataccattattctaagtgaattaatgmaggaacagaaaaccaaacaaacactgcatgttctcacttataagtgggggctaaaca

SEQ ID NO: 343275 - DNA, 464 bp, Homo sapiens
aaaaccaaacaaacactgcatgttctcacttataagtgggggctaaacattgagtccacatggacacagagaagggaacaatagacacaaggtctactgtgggtggagggtgggggtagagtgaggatcaaaaaactccctattagatactacgytcactacctggatgactacgtaatctgtacaccaaatcccattgacacacattttacccatataataaacctgcacatgtacccgctgaacctaaaataaatgttggaaggaaataaagttacaaccaactcttgtactattgtgaggaaacaatcatatgtgttgacaaaaaaatcagctactaatagatttataatagtatatatgtagcagaaaaatatcagatataacttatatacccaaaagtatgacttaaaaacagcatgacaatctttatgatgggatattgtgcaactactagaagcaca

SEQ ID NO: 343276 - DNA, 464 bp, Homo sapiens
aaaaccaaacaaacactgcatgttctcacttataagtgggggctaaacattgagtccacatggacacagagaagggaacaatagacacaaggtctactgtgggtggagggtgggggtagagtgaggatcaaaaaactccctattagatactacgttcactacctggatgactaygtaatctgtacaccaaatcccattgacacacattttacccatataataaacctgcacatgtacccgctgaacctaaaataaatgttggaaggaaataaagttacaaccaactcttgtactattgtgaggaaacaatcatatgtgttgacaaaaaaatcagctactaatagatttataatagtatatatgtagcagaaaaatatcagatataacttatatacccaaaagtatgacttaaaaacagcatgacaatctttatgatgggatattgtgcaactactagaagcaca

SEQ ID NO: 343277 - DNA, 464 bp, Homo sapiens
aaaaccaaacaaacactgcatgttctcacttataagtgggggctaaacattgagtccacatggacacagagaagggaacaatagacacaaggtctactgtgggtggagggtgggggtagagtgaggatcaaaaaactccctattagatactacgttcactacctggatgactacgtaatctgtacaccaaatcccattgacacacrttttacccatataataaacctgcacatgtacccgctgaacctaaaataaatgttggaaggaaataaagttacaaccaactcttgtactattgtgaggaaacaatcatatgtgttgacaaaaaaatcagctactaatagatttataatagtatatatgtagcagaaaaatatcagatataacttatatacccaaaagtatgacttaaaaacagcatgacaatctttatgatgggatattgtgcaactactagaagcaca

SEQ ID NO: 343278 - DNA, 464 bp, Homo sapiens
aaaaccaaacaaacactgcatgttctcacttataagtgggggctaaacattgagtccacatggacacagagaagggaacaatagacacaaggtctactgtgggtggagggtgggggtagagtgaggatcaaaaaactccctattagatactacgttcactacctggatgactacgtaatctgtacaccaaatcccattgacacacattttacccatataataaacctgcacatgtacccgctgaacctaaaataaatgttggaaggaaataaagttacaaccaactcttgtactrttgtgaggaaacaatcatatgtgttgacaaaaaaatcagctactaatagatttataatagtatatatgtagcagaaaaatatcagatataacttatatacccaaaagtatgacttaaaaacagcatgacaatctttatgatgggatattgtgcaactactagaagcaca

SEQ ID NO: 343279 - DNA, 578 bp, Homo sapiens
tactattgtgaggaaacaatcatatgtgttgacaaaaaaatcagctactaatagatttataatagtatatatgtagcagaaaaatatcagatataacttatatacccaaaagtatgacttaaaaacagcatgacaatctttatgatgggatattgtgmaactactagaagcacattttcagagattatttattaacatatgataatgactacattgagtggtttttagaagcatgaattgaaaccatgtataagcatgactttattgaacttaaatataacattacacacacatttacataattataaaataagtatgctcatgttcataatatgtatttatttatattcatatgtaaggccaataggaagtaatctctgtatctgagttattatttcataaataatttatgcttgttctgtgaaaataaaaacactgctatggatcttccaagtatcctgaaaggataccgtttataattaaacaataacaattttagaaataattattttaaataaggctatgataaatctggtttcattgcacactttaactttggaacatttcatgaaacgtcc

SEQ ID NO: 343280 - DNA, 578 bp, Homo sapiens
tactattgtgaggaaacaatcatatgtgttgacaaaaaaatcagctactaatagatttataatagtatatatgtagcagaaaaatatcagatataacttatatacccaaaagtatgacttaaaaacagcatgacaatctttatgatgggatattgtgcaactactagaagcacattttcagagattatttattaacrtatgataatgactacattgagtggtttttagaagcatgaattgaaaccatgtataagcatgactttattgaacttaaatataacattacacacacatttacataattataaaataagtatgctcatgttcataatatgtatttatttatattcatatgtaaggccaataggaagtaatctctgtatctgagttattatttcataaataatttatgcttgttctgtgaaaataaaaacactgctatggatcttccaagtatcctgaaaggataccgtttataattaaacaataacaattttagaaataattattttaaataaggctatgataaatctggtttcattgcacactttaactttggaacatttcatgaaacgtcc

SEQ ID NO: 343281 - DNA, 578 bp, Homo sapiens
tactattgtgaggaaacaatcatatgtgttgacaaaaaaatcagctactaatagatttataatagtatatatgtagcagaaaaatatcagatataacttatatacccaaaagtatgacttaaaaacagcatgacaatctttatgatgggatattgtgcaactactagaagcacattttcagagattatttattaacatatgataatgactacattgagtggtttttagaagcatgaattgaaaccatgtataagcatgactttattgaacttawatataacattacacacacatttacataattataaaataagtatgctcatgttcataatatgtatttatttatattcatatgtaaggccaataggaagtaatctctgtatctgagttattatttcataaataatttatgcttgttctgtgaaaataaaaacactgctatggatcttccaagtatcctgaaaggataccgtttataattaaacaataacaattttagaaataattattttaaataaggctatgataaatctggtttcattgcacactttaactttggaacatttcatgaaacgtcc

SEQ ID NO: 343282 - DNA, 578 bp, Homo sapiens
tactattgtgaggaaacaatcatatgtgttgacaaaaaaatcagctactaatagatttataatagtatatatgtagcagaaaaatatcagatataacttatatacccaaaagtatgacttaaaaacagcatgacaatctttatgatgggatattgtgcaactactagaagcacattttcagagattatttattaacatatgataatgactacattgagtggtttttagaagcatgaattgaaaccatgtataagcatgactttattgaacttaaatataacattacacacacatttacataattataaaataagtatgctcatgttcataatatgtatttatttatattcatatgtaaggccaataggaagtaatctctgtatctgagttattatttcataaataatttatgcttgttctgtgaaaataaaarcactgctatggatcttccaagtatcctgaaaggataccgtttataattaaacaataacaattttagaaataattattttaaataaggctatgataaatctggtttcattgcacactttaactttggaacatttcatgaaacgtcc

SEQ ID NO: 343283 - DNA, 546 bp, Homo sapiens
ttaatgttttacacactttagcattccacagcaccattacatactcatttttctactagaataccttggtaaaaattcacagtagagatcaggcttgtccttcatacattaactaatcaagtaggaaagtgcaaatgagaacacagtgccaaacataggcaccacatggaaacaagcatggaactgccaggaagccatytttgtagatttgtagcccaattatatttttcctaatgtattgcacacaaaacttgggggaaaaaaaagaggcagagagaaaacaggttatatcagccctatctcacaatccacaagttcatcctgttagaggagtaactatgtaaaacaaattttatctgttgaatgtcctatttagttaatcgcaaaactgtatgagaacacacttgtgacttatttagcagcttgtttgttcgctttccactggcttcacaaatgtcctttggaaatagaatgtacatttggaaccttgtacaccttttctttctccagtaccctcttgtcacttccatcactaaggtgacagaa

SEQ ID NO: 343284 - DNA, 571 bp, Homo sapiens
gcttgtccttcatacattaactaatcaagtaggaaagtgcaaatgagaacacagtgccaaacataggcaccacatggaaacaagcatggaactgccaggaagccatttttgtagatttgtagcccaattatatttttcctaatgtattgcacacaaaacttgggggaaaaaaaagaggcagagagaaaacaggttatatcagccctatctcacaatccacaagttcatcctgttagargagtaactatgtaaaacaaattttatctgttgaatgtcctatttagttaatcgcaaaactgtatgagaacacacttgtgacttatttagcagcttgtttgttcgctttccactggcttcacaaatgtcctttggaaatagaatgtacatttggaaccttgtacaccttttctttctccagtaccctcttgtcacttccatcactaaggtgacagaagcaactaggggcaatgcatttgtagcacacctgggtcagaggtatcctccaggggaaggatcagacctgcttgaaagcatgtcgttggaattgggaggcttctagtagctataacat

SEQ ID NO: 343285 - DNA, 571 bp, Homo sapiens
gcttgtccttcatacattaactaatcaagtaggaaagtgcaaatgagaacacagtgccaaacataggcaccacatggaaacaagcatggaactgccaggaagccatttttgtagatttgtagcccaattatatttttcctaatgtattgcacacaaaacttgggggaaaaaaaagaggcagagagaaaacaggttatatcagccctatctcacaatccacaagttcatcctgttagaggagtaactatgtaaaacaaattttatctgttgaatgtcctatttagttaatcgcaaaactgtaygagaacacacttgtgacttatttagcagcttgtttgttcgctttccactggcttcacaaatgtcctttggaaatagaatgtacatttggaaccttgtacaccttttctttctccagtaccctcttgtcacttccatcactaaggtgacagaagcaactaggggcaatgcatttgtagcacacctgggtcagaggtatcctccaggggaaggatcagacctgcttgaaagcatgtcgttggaattgggaggcttctagtagctataacat

SEQ ID NO: 343286 - DNA, 563 bp, Homo sapiens
caaattttatctgttgaatgtcctatttagttaatcgcaaaactgtatgagaacacacttgtgacttatttagcagcttgtttgttcgctttccactggcttcacaaatgtcctttggaaatagaatgtacatttggaaccttgtacaccttttctttctccagtaccctcttgtcacttccatcactaaggtgacagaagcaactaggggcaatgcatwtgtagcacacctgggtcagaggtatcctccaggggaaggatcagacctgcttgaaagcatgtcgttggaattgggaggcttctagtagctataacataagcactgatgtttactcttccctgccctccactttgatcactctgggaaacgtttttttttcttaaaaaatcaattgtattgaaagataatttacataaaataaatactattttaaagtgcacagtttgctgagttttgccagatgtaaccatccaggtgaataaaattgattaaactgatctttcaaataataaattaactttgcaatcttgctagaaatttaatttgttcacagtttattatc

SEQ ID NO: 343287 - DNA, 602 bp, Homo sapiens
gtataatgcctttgtctcgatttggaatcggcaatactgggttcataaaataagayaggaaatgtccctttaaattttctttttcttttttttttttttttttttttgagacggagattcactcttgttgcccaggctggagtgcaatggcacaatttcggctctccacaatctctgcctcccagattcaagctattctcctgcctctgtctcccgaggagctgggattacaggtaagcgccaccatgccctgctaattatgtacttttagtagagatgggggtttctccatgctggtcaggttggtctcaaactcctgaccccaggtgatctgcccgtcttggcctctcaaagtgctgggattacaggtgtgagccactgtgtccggcccttaaattctatttcttaaaaagagtccgttcaagattgatgttatagatactcctcaacttacaattgttttatgtcttaatgaactcatcctaaattgaaaatattgtaagtctaaaacgcatttaatatatttaacctactgaatatcatgacttagcctcgcctaccttaaacttgctcagaacacttacattatcctacaattgggc

SEQ ID NO: 343288 - DNA, 602 bp, Homo sapiens
gtataatgcctttgtctcgatttggaatcggcaatactgggttcataaaataagataggaartgtccctttaaattttctttttcttttttttttttttttttttttgagacggagattcactcttgttgcccaggctggagtgcaatggcacaatttcggctctccacaatctctgcctcccagattcaagctattctcctgcctctgtctcccgaggagctgggattacaggtaagcgccaccatgccctgctaattatgtacttttagtagagatgggggtttctccatgctggtcaggttggtctcaaactcctgaccccaggtgatctgcccgtcttggcctctcaaagtgctgggattacaggtgtgagccactgtgtccggcccttaaattctatttcttaaaaagagtccgttcaagattgatgttatagatactcctcaacttacaattgttttatgtcttaatgaactcatcctaaattgaaaatattgtaagtctaaaacgcatttaatatatttaacctactgaatatcatgacttagcctcgcctaccttaaacttgctcagaacacttacattatcctacaattgggc

SEQ ID NO: 343289 - DNA, 429 bp, Homo sapiens
tcataattatattgatgtctgtaggttctgtagttacatcctctatttaattcccattatctacattatgtagcttctctaatttttttcragataaatcttgctagccattgtttattaaaaaaatttttttcaaagaaccaatttgtgggtatattaattagctccaccttttgttatttgctatgttgttggtttacatttttatctttatcatcttccttcttcttaatttggatatactttgcttattttttagcctcttaaaaaagaacctaaaggtcattgattgaagccttttattttcaatatattacatctataaatgtacctttaagaaacgatttatctgcatcccacattttattaagtttttaaaaaattttatttcagtttaaactattttttttgtgtgtgaaacttttcttg

SEQ ID NO: 343290 - DNA, 596 bp, Homo sapiens
tatttcattttgcattagttttaagaattagttttacaaataatttcccatgttattttaattgtcaaatgtattggcctaaagttttcataattatattgatgtctgtaggttctgtagttacatcctctatttaattcccattatctacattatgtagcttctctaatttttttcgagataaatcttgctagccattgtttattaaaaaaatttttttcaaagaaccaatttgtgggtatattaattagctccaccttttgttatttgctatgttgttggtttacatttttatctttatcatcttccttcttcttaatttggatatactttgcttattttttagcctcttaaaaaagaacctaaaggtcattgattgaagccttttattttcaatatattacatctataaatgtacctttaagaaacgatttatctgcatcccacattttattaagtttttaaaaaattttmtttcagtttaaactattttttttgtgtgtgaaacttttcttggccaatgggtttttctgaagtattttgtttaatgttcaaatgttggggtgttattgtacatatcctactgttgtccatct

SEQ ID NO: 343291 - DNA, 618 bp, Homo sapiens
ggtttttctgaagtattttgtttaatgttcaaatgttggggtgttattgtacatatcctactgttgtccatctctggttcatgatacratgcatgttctccattgcacttagataacatgcctccatgtctctggagaattcctcagtctttctaaaatgcttttgatgaatactggccgttattttgtagaatgtcctgcctcaatttcagttagtctgatgttttctcacggttaggactaaagttatacattttgtctaagaataccatagaattgatgttttgtcctactcagtgcatcatataagaaattacatgaagttcatttatcttattattagtaatgttaactatgatcacttggctaagttgacatctccactttgaagttactattctataattatcttgtgggaagatactttcatattatgcaaatatgttctttcccaacatatattcaccactaatcttagcattcctccaaggttctttcttgcaacaattattactatgatatttgcaaagtgatgattcttatattttatgtctcctacatttaatgaaatcttactgtaataaaatactacccactctcaatctttggtttattatt

SEQ ID NO: 343292 - DNA, 602 bp, Homo sapiens
ttccttacttcctaacatgacaaaatatttcaaactaatcttgtattttccctgcccaatcctgatatcaaatatgtccccaaggagccttggttcctttaattggagaatggtgttctcattgttactgggatgatgttgtttctaggcccttttgttagaggagctagaaaatatatgtatgtatactcacwcatttatacacatctgtacttatttatacaattatccatctgtacgtatactaaaaacaatgatttcatgaaacttttgatcccaatccaacactagataaagactatataggcccatttatttgcaaatcagcacataaacatagaagaattattaacaatataagctgtagcttatgctaaatgttggttggaacagacaataagttatggagaacttcagaggacactaaggttggatgggattttggaagttgtacaggtcaatgccactccatctattggctgagtttcactaggttaatacatgaacaacaacaaaaataacctagatcagaagttaaaggtcattttattgactatctgccgtgtctgtgccattgcagtgtactaggtgcacttacgagt

SEQ ID NO: 343293 - DNA, 602 bp, Homo sapiens
ttccttacttcctaacatgacaaaatatttcaaactaatcttgtattttccctgcccaatcctgatatcaaatatgtccccaaggagccttggttcctttaattggagaatggtgttctcattgttactgggatgatgttgtttctaggcccttttgttagaggagctagaaaatatatgtatgtatactcacacatttatacacatctgtacttatttatacaattatccatctgtacgtatactaaaaacaatgatttcatgaaacttttgatcccaatccaacactagataaagactatataggcccatttatttgcaaatcagcacataaacatagaagaattattaacaatataagctgtagcttatgctaaatgttggttggaacagacaataagttatggagaacttcagaggacactaaggttggatgggattttggaagttgtrcaggtcaatgccactccatctattggctgagtttcactaggttaatacatgaacaacaacaaaaataacctagatcagaagttaaaggtcattttattgactatctgccgtgtctgtgccattgcagtgtactaggtgcacttacgagt

SEQ ID NO: 343294 - DNA, 602 bp, Homo sapiens
ttccttacttcctaacatgacaaaatatttcaaactaatcttgtattttccctgcccaatcctgatatcaaatatgtccccaaggagccttggttcctttaattggagaatggtgttctcattgttactgggatgatgttgtttctaggcccttttgttagaggagctagaaaatatatgtatgtatactcacacatttatacacatctgtacttatttatacaattatccatctgtacgtatactaaaaacaatgatttcatgaaacttttgatcccaatccaacactagataaagactatataggcccatttatttgcaaatcagcacataaacatagaagaattattaacaatataagctgtagcttatgctaaatgttggttggaacagacaataagttatggagaacttcagaggacactaaggttggatgggattttggaagttgtacaggtcaatgccacyccatctattggctgagtttcactaggttaatacatgaacaacaacaaaaataacctagatcagaagttaaaggtcattttattgactatctgccgtgtctgtgccattgcagtgtactaggtgcacttacgagt

SEQ ID NO: 343295 - DNA, 441 bp, Homo sapiens
tgggcattgaacacaggtggctcccacctacatataatccaagcactttgggaagctgaggcagaaggatcacttgaggccaggagtctgacaacatcctgagcaacacagcaagatcccatctgtacaataaaaaataaagaagttagctgggcataggggcaaatgtatgtagtcccagctasttgggaggctgaggtgggaggactgtttgagtccggggtttcaggctgcagtgaaccatgatcatgccaccgcactgcagcctgggtgacagaacaaaaccctgtctctagaaaaaaaaaaaaagaaatccaagtttttatcaccttctgagagtaatcaacattcaggaggaacagagaagaacaaaagaccactgaatggttgagggtgggttgctggttaggttcagtggccagctgagtagtatctgaaaaa

SEQ ID NO: 343296 - DNA, 547 bp, Homo sapiens
ctgaggtgggaggactgtttgagtccggggtttcaggctgcagtgaaccatgatcatgccaccgcactgcagcctgggtgacagaacaaaaccctgtctctagaaaaaaaaaaaaagaaatccaagtttttatcamcttctgagagtaatcaacattcaggaggaacagagaagaacaaaagaccactgaatggttgagggtgggttgctggttaggttcagtggccagctgagtagtatctgaaaaattcattagtaaaattatggcactaggggtgagtcatgcagtcgaaggatgaatactaaatccagtacaaacacccatggtctttctttacatgaattccagtgaaaaatttctaagtgcctaaaatagcaagcggtctgaaatgatggcagcagtttattaaagactgaaaaaagaggccaggcacggtggctcacacctgtaatcccagcactttaggagtccaagaccagtggatcacaaggtcaggagttcaagaccagcctgtccaacatgctgaaaccccgtatctacagaaaa

SEQ ID NO: 343297 - DNA, 547 bp, Homo sapiens
ctgaggtgggaggactgtttgagtccggggtttcaggctgcagtgaaccatgatcatgccaccgcactgcagcctgggtgacagaacaaaaccctgtctctagaaaaaaaaaaaaagaaatccaagtttttatcaccttctgagagtaatcaacattcaggaggaamagagaagaacaaaagaccactgaatggttgagggtgggttgctggttaggttcagtggccagctgagtagtatctgaaaaattcattagtaaaattatggcactaggggtgagtcatgcagtcgaaggatgaatactaaatccagtacaaacacccatggtctttctttacatgaattccagtgaaaaatttctaagtgcctaaaatagcaagcggtctgaaatgatggcagcagtttattaaagactgaaaaaagaggccaggcacggtggctcacacctgtaatcccagcactttaggagtccaagaccagtggatcacaaggtcaggagttcaagaccagcctgtccaacatgctgaaaccccgtatctacagaaaa

SEQ ID NO: 343298 - DNA, 482 bp, Homo sapiens
cactgcagcctgggtgacagaacaaaaccctgtctctagaaaaaaaaaaaaagaaatccaagtttttatcaccttctgagagtaatcaacattcaggaggaacagagaagaacaaaakaccactgaatggttgagggtgggttgctggttaggttcagtggccagctgagtagtatctgaaaaattcattagtaaaattatggcactaggggtgagtcatgcagtcgaaggatgaatactaaatccagtacaaacacccatggtctttctttacatgaattccagtgaaaaatttctaagtgcctaaaatagcaagcggtctgaaatgatggcagcagtttattaaagactgaaaaaagaggccaggcacggtggctcacacctgtaatcccagcactttaggagtccaagaccagtggatcacaaggtcaggagttcaagaccagcctgtccaacatgctgaaaccccgtatctacagaaa

SEQ ID NO: 343299 - DNA, 547 bp, Homo sapiens
ctgaggtgggaggactgtttgagtccggggtttcaggctgcagtgaaccatgatcatgccaccgcactgcagcctgggtgacagaacaaaaccctgtctctagaaaaaaaaaaaaagaaatccaagtttttatcaccttctgagagtaatcaacattcaggaggaacagagaagaacaaaagaccactgaatggttgagggtgggttgytggttaggttcagtggccagctgagtagtatctgaaaaattcattagtaaaattatggcactaggggtgagtcatgcagtcgaaggatgaatactaaatccagtacaaacacccatggtctttctttacatgaattccagtgaaaaatttctaagtgcctaaaatagcaagcggtctgaaatgatggcagcagtttattaaagactgaaaaaagaggccaggcacggtggctcacacctgtaatcccagcactttaggagtccaagaccagtggatcacaaggtcaggagttcaagaccagcctgtccaacatgctgaaaccccgtatctacagaaaa

SEQ ID NO: 343300 - DNA, 356 bp, Homo sapiens
aggctgcagtgaaccatgatcatgccaccgcactgcagcctgggtgacagaacaaaaccctgtctctagaaaaaaaaaaaaagaaatccaagtttttatcaccttctgagagtaatcaacattcaggaggaacagagaagaacaaaagaccactgaatggttgagggtgggttgctggttaggttcagtggccagctgagtagtatctgaaaaattcattagtaaaattatggcactaggggtgagtcatgcagtcgaaggatgaatactaaatccagtacaaacacccatggtctttctttacrtgaattccagtgaaaaatttctaagtgcctaaaatagcaagcggtctgaaa

SEQ ID NO: 343301 - DNA, 587 bp, Homo sapiens
aatggttgagggtgggttgctggttaggttcagtggccagctgagtagtatctgaaaaattcattagtaaaattatggcactaggggtgagtcatgcagtcgaaggatgaatactaaatccagtacaaacacccatggtctttctttacatgaattccagtgaaaaatttctaagtgcctaaaatagcaagyggtctgaaatgatggcagcagtttattaaagactgaaaaaagaggccaggcacggtggctcacacctgtaatcccagcactttaggagtccaagaccagtggatcacaaggtcaggagttcaagaccagcctgtccaacatgctgaaaccccgtatctacagaaaatacaaagcttagccgggcatggtgacatgtgcctgtagtcccagctacttcagaggctgaggcaaaagaaatgcttgaacccgggaggcagaagttgctgtgaattgagattgtgccactgcactcgagcctggtgacagaggaagatgctgtctcaaaaaaaaaaaaaaaaaaagaaacggcatcttcaagaaccacaagaaccacaagagagttccacgctgaagaa

SEQ ID NO: 343302 - DNA, 482 bp, Homo sapiens
cactgcagcctgggtgacagaacaaaaccctgtctctagaaaaaaaaaaaaagaaatccaagtttttatcaccttctgagagtaatcaacattcaggaggaacagagaagaacaaaagaccactgaatggttgagggtgggttgctggttaggttcagtggccagctgagtagtatctgaaaaattcattagtaaaattatggcactaggggtgagtcatgcagtcgaaggatgaatactaaatccagtacaaacacccatggtctttctttacatgaattccagtgaaaaatttctaagtgcctaaaatagcaagcggtctgaaatgatggcagcagtttattaaagactgaaaaaagaggccaggcacggtggctcacacctgtaatcccagcactttaggagwccaagaccagtggatcacaaggtcaggagttcaagaccagcctgtccaacatgctgaaaccccgtatctacagaaa

SEQ ID NO: 343303 - DNA, 587 bp, Homo sapiens
aatggttgagggtgggttgctggttaggttcagtggccagctgagtagtatctgaaaaattcattagtaaaattatggcactaggggtgagtcatgcagtcgaaggatgaatactaaatccagtacaaacacccatggtctttctttacatgaattccagtgaaaaatttctaagtgcctaaaatagcaagcggtctgaaatgatggcagcagtttattaaagactgaaaaaagaggccaggcacggtggctcacacctgtaatcccagcactttaggagtccaagaccagtggatcacaaggtcaggagttcaagaccagcctgtccaacatgctgaaaccccgtatctacagaaaatacaaagcttagcygggcatggtgacatgtgcctgtagtcccagctacttcagaggctgaggcaaaagaaatgcttgaacccgggaggcagaagttgctgtgaattgagattgtgccactgcactcgagcctggtgacagaggaagatgctgtctcaaaaaaaaaaaaaaaaaaagaaacggcatcttcaagaaccacaagaaccacaagagagttccacgctgaagaa

SEQ ID NO: 343304 - DNA, 559 bp, Homo sapiens
ttcatctcctcattaataactgattggtctaatatcaattctgatttttaaaaagctaattagaaaaagaattaattatagaaccaataagaggtttgaatagttacaagctattcaaaggagaattcaaaaaaccattcaggtatgaggccataaagtatgatgaaataaatttcattaatatattttaaaataaactgattagacaggcaacaacacctgggcacgggtctcctcacctccagcaacacaaacccaatcacgcagctatggggttgcaaaggctgcatagtgacaaacagactgctctgagctgagatttctttacttgtatctgtattctgagaccgggtctcactctgtcactctggctgcaatgcaggggtgcactcatagctaactgcagccgtgacctcctgggctccggggatcctcttgcctcaccctcaycatagctatggctacagatgaacaccaaaacacccagctaattttttttttttttttttgtagaaagaggagccttgctatgttgcccaagctggcctcaaactcccac

SEQ ID NO: 343305 - DNA, 613 bp, Homo sapiens
gccgtggctcacaaccataatcccaacagtttaggaggtcaaagcaggagaaacscttgaggccaaaacttcaggaccagcctgggaaacacggcgagaccccctcaattaaacaacaaaaagaaataagaaaaaattagctgggcatggtagtatgcatctgtagtttcagctacttgagaggttgtggtgaaaggatcgctttagccccagagttcaagaccagcctcggcaatataacaagatcccatctctacaaaaaaaatacaaaaattagctgggcatggatggtgtgcacctgtagtcccagatgcttggaaggctgaggtgggagaattgcttgagcacaggtggttgaggctgcagttagctacaacaccatcactgcactccagattgggtgaaacagagactctgtgttcaaaagaaaaagaaaagaaatacacatttggtttctgcccctcatcctggcacagagcttctcaagctcttataaaggccttggtgatgaaagtgatggggcatcttctgtttcaatatttggtcttagtcccaggtttctaacacaagagcctctaagacctttgggatcaccatagtaagaatgcatttg

SEQ ID NO: 343306 - DNA, 613 bp, Homo sapiens
gccgtggctcacaaccataatcccaacagtttaggaggtcaaagcaggagaaacccttgaggccaaaacttcargaccagcctgggaaacacggcgagaccccctcaattaaacaacaaaaagaaataagaaaaaattagctgggcatggtagtatgcatctgtagtttcagctacttgagaggttgtggtgaaaggatcgctttagccccagagttcaagaccagcctcggcaatataacaagatcccatctctacaaaaaaaatacaaaaattagctgggcatggatggtgtgcacctgtagtcccagatgcttggaaggctgaggtgggagaattgcttgagcacaggtggttgaggctgcagttagctacaacaccatcactgcactccagattgggtgaaacagagactctgtgttcaaaagaaaaagaaaagaaatacacatttggtttctgcccctcatcctggcacagagcttctcaagctcttataaaggccttggtgatgaaagtgatggggcatcttctgtttcaatatttggtcttagtcccaggtttctaacacaagagcctctaagacctttgggatcaccatagtaagaatgcatttg

SEQ ID NO: 343307 - DNA, 621 bp, Homo sapiens
ggggtggttgttgtcagaagaacaaaccatgtgattagaggcttggaactgtcagcctcaccccctgggctccaggaagaaakagtggccgaagactgacttaattaccaatggtcaatgacttcatcaatcatgcctgcataatgaagcgttcataagcgcccttaacaactggagttggagaatgtctgggttgctgaacacaagggagataccaggaaggtaacatgcacaatagaggacatggaagttctgtacccctctcgacataccttgccctgtgtgtgtttttttttttttttttttgagacagagtctggctctgtctcccagcctagagtgccatggcacaatcgtggctcactgcgaactatgcctccctatctcaagccccatcctctcatcctctcacctcagcctcctgagtagctagaattataggcactgagtagctagaactatagataactgtgcctggctaatttttagaaaaatctttttgtagagatgcattttcaccttgttacccaggctggtcttaatctcctgagcacttaagcgatgctcccgcctcagtctcccaaagtgctgaaattacaggcatgagccactgtgcccagc

SEQ ID NO: 343308 - DNA, 621 bp, Homo sapiens
ggggtggttgttgtcagaagaacaaaccatgtgattagaggcttggaactgtcagcctcaccccctgggctccaggaagaaatagtggccgaagactgacttaatyaccaatggtcaatgacttcatcaatcatgcctgcataatgaagcgttcataagcgcccttaacaactggagttggagaatgtctgggttgctgaacacaagggagataccaggaaggtaacatgcacaatagaggacatggaagttctgtacccctctcgacataccttgccctgtgtgtgtttttttttttttttttttgagacagagtctggctctgtctcccagcctagagtgccatggcacaatcgtggctcactgcgaactatgcctccctatctcaagccccatcctctcatcctctcacctcagcctcctgagtagctagaattataggcactgagtagctagaactatagataactgtgcctggctaatttttagaaaaatctttttgtagagatgcattttcaccttgttacccaggctggtcttaatctcctgagcacttaagcgatgctcccgcctcagtctcccaaagtgctgaaattacaggcatgagccactgtgcccagc

SEQ ID NO: 343309 - DNA, 621 bp, Homo sapiens
ggggtggttgttgtcagaagaacaaaccatgtgattagaggcttggaactgtcagcctcaccccctgggctccaggaagaaatagtggccgaagactgacttaattaccaatgrtcaatgacttcatcaatcatgcctgcataatgaagcgttcataagcgcccttaacaactggagttggagaatgtctgggttgctgaacacaagggagataccaggaaggtaacatgcacaatagaggacatggaagttctgtacccctctcgacataccttgccctgtgtgtgtttttttttttttttttttgagacagagtctggctctgtctcccagcctagagtgccatggcacaatcgtggctcactgcgaactatgcctccctatctcaagccccatcctctcatcctctcacctcagcctcctgagtagctagaattataggcactgagtagctagaactatagataactgtgcctggctaatttttagaaaaatctttttgtagagatgcattttcaccttgttacccaggctggtcttaatctcctgagcacttaagcgatgctcccgcctcagtctcccaaagtgctgaaattacaggcatgagccactgtgcccagc

SEQ ID NO: 343310 - DNA, 621 bp, Homo sapiens
ggggtggttgttgtcagaagaacaaaccatgtgattagaggcttggaactgtcagcctcaccccctgggctccaggaagaaatagtggccgaagactgacttaattaccaatggtcaatgacttcatcaatcatgcctgcataatgaagcgttcataagcgccctyaacaactggagttggagaatgtctgggttgctgaacacaagggagataccaggaaggtaacatgcacaatagaggacatggaagttctgtacccctctcgacataccttgccctgtgtgtgtttttttttttttttttttgagacagagtctggctctgtctcccagcctagagtgccatggcacaatcgtggctcactgcgaactatgcctccctatctcaagccccatcctctcatcctctcacctcagcctcctgagtagctagaattataggcactgagtagctagaactatagataactgtgcctggctaatttttagaaaaatctttttgtagagatgcattttcaccttgttacccaggctggtcttaatctcctgagcacttaagcgatgctcccgcctcagtctcccaaagtgctgaaattacaggcatgagccactgtgcccagc

SEQ ID NO: 343311 - DNA, 622 bp, Homo sapiens
ttttgtgaagttgaggtgggaggatcatgtgagctcagaaatttgagrccagcctgggcaacataacaagaccccatctctacaaaaagtaagagaacatagccagatatgctggtacaggcctataatctcagctatttgggaggctgaggtgggaggatcacttgagcccaggagtcccatgctacagtgagctttgatcacaccactgcattccagcctggcaacagactgagaccctgtatctcagaaaaaaaagaaaacaatctgtttttctgagttctgcaagctgtccgagcaaatgattccacccaccaatgggggtcatgaaactctgttttctaactggttggtcaaaactacatgtaacaacccaagacttgcaattggcatgtggagtgagggtagactcctgggactgagctcccatcctgcggggtctgcactaactccagggagtgtcaggatggaattgtgggatacccagttgggatccagattgtctgaaaatcagtgtagaaactccacatgcacatttggtcagaggtgtttgaccgtaactactattcacgaaaaaggtctactcattagaactaaaaatcacaaaattgtaagttctaca

SEQ ID NO: 343312 - DNA, 622 bp, Homo sapiens
ttttgtgaagttgaggtgggaggatcatgtgagctcagaaatttgagaccagcctgggcaacataacaagaccccatctctacaaaaagtaaragaacatagccagatatgctggtacaggcctataatctcagctatttgggaggctgaggtgggaggatcacttgagcccaggagtcccatgctacagtgagctttgatcacaccactgcattccagcctggcaacagactgagaccctgtatctcagaaaaaaaagaaaacaatctgtttttctgagttctgcaagctgtccgagcaaatgattccacccaccaatgggggtcatgaaactctgttttctaactggttggtcaaaactacatgtaacaacccaagacttgcaattggcatgtggagtgagggtagactcctgggactgagctcccatcctgcggggtctgcactaactccagggagtgtcaggatggaattgtgggatacccagttgggatccagattgtctgaaaatcagtgtagaaactccacatgcacatttggtcagaggtgtttgaccgtaactactattcacgaaaaaggtctactcattagaactaaaaatcacaaaattgtaagttctaca

SEQ ID NO: 343313 - DNA, 622 bp, Homo sapiens
ttttgtgaagttgaggtgggaggatcatgtgagctcagaaatttgagaccagcctgggcaacataacaagaccccatctctacaaaaagtaagagamcatagccagatatgctggtacaggcctataatctcagctatttgggaggctgaggtgggaggatcacttgagcccaggagtcccatgctacagtgagctttgatcacaccactgcattccagcctggcaacagactgagaccctgtatctcagaaaaaaaagaaaacaatctgtttttctgagttctgcaagctgtccgagcaaatgattccacccaccaatgggggtcatgaaactctgttttctaactggttggtcaaaactacatgtaacaacccaagacttgcaattggcatgtggagtgagggtagactcctgggactgagctcccatcctgcggggtctgcactaactccagggagtgtcaggatggaattgtgggatacccagttgggatccagattgtctgaaaatcagtgtagaaactccacatgcacatttggtcagaggtgtttgaccgtaactactattcacgaaaaaggtctactcattagaactaaaaatcacaaaattgtaagttctaca

SEQ ID NO: 343314 - DNA, 622 bp, Homo sapiens
ttttgtgaagttgaggtgggaggatcatgtgagctcagaaatttgagaccagcctgggcaacataacaagaccccatctctacaaaaagtaagagaacatagccagatatgctggtacaggcctataatctcagctatttgggaggctgaggtgggaggatcacttgagcccaggagtcccatgctacagtgagctttgatcacaccactgcattccagcctggcaacagactgagaccctgtatctcagaaaaaaaagaaaacaatctgtttttctgagttctgcaagctgtccragcaaatgattccacccaccaatgggggtcatgaaactctgttttctaactggttggtcaaaactacatgtaacaacccaagacttgcaattggcatgtggagtgagggtagactcctgggactgagctcccatcctgcggggtctgcactaactccagggagtgtcaggatggaattgtgggatacccagttgggatccagattgtctgaaaatcagtgtagaaactccacatgcacatttggtcagaggtgtttgaccgtaactactattcacgaaaaaggtctactcattagaactaaaaatcacaaaattgtaagttctaca

SEQ ID NO: 343315 - DNA, 527 bp, Homo sapiens
agaaaaaaaagaaaacaatctgtttttctgagttctgcaagctgtccgagcaaatgattccacccaccaatgggggtcatgaaactctgttttctaactggttggtcaaaactacatgtaacaacccaagacttgcaattggcatgtggagtgagggtagactcctgggactgagctcccatcctgcggggtctgcactaactccagggagtgtcaggatggaattgtgggatacccagttgggatccagattgtctgaaaatcagtgtagaaactccacatgcacatttggtcagaggtgtttgaccgtaactactattcaygaaaaaggtctactcattagaactaaaaatcacaaaattgtaagttctacaaaaacaaatcaaccttatctaccgcccagtcctactgaactacagaatgtgagaacagaaggtctgaccatggagtcgagagctgacaggaatgtcaccaccatcctgctctccaaggactcctcatcttcaacagactcctcatcttcaatg

SEQ ID NO: 343316 - DNA, 516 bp, Homo sapiens
ttggtcagaggtgtttgaccgtaactactattcacgaaaaaggtctactyattagaactaaaaatcacaaaattgtaagttctacaaaaacaaatcaaccttatctaccgcccagtcctactgaactacagaatgtgagaacagaaggtctgaccatggagtcgagagctgacaggaatgtcaccaccatcctgctctccaaggactcctcatcttcaacagactcctcatcttcaatgggcagggtggaaactgcaacttgtgccatgatccttgcacaagaaaagtagtaagaaaatgagtggtagaaatccagtgtcctaaactcacatccggagctgtgagagttttttactggctggataattcacagttttcttgaatcaggggaaaaataagactcagaaactaggagttttgcccaaaactctcatcagatacagaatccatccgctaactatctagtattatttccataagttagatcaattatcactcccaaaacaaatgcacatg

SEQ ID NO: 343317 - DNA, 527 bp, Homo sapiens
agaaaaaaaagaaaacaatctgtttttctgagttctgcaagctgtccgagcaaatgattccacccaccaatgggggtcatgaaactctgttttctaactggttggtcaaaactacatgtaacaacccaagacttgcaattggcatgtggagtgagggtagactcctgggactgagctcccatcctgcggggtctgcactaactccagggagtgtcaggatggaattgtgggatacccagttgggatccagattgtctgaaaatcagtgtagaaactccacatgcacatttggtcagaggtgtttgaccgtaactactattcacgaaaaaggtctactcattagaactaaaaatcacaaaattgtaagttctacaaaaacaaatcaaccttatctaccgcccagtcctactgaactacagaatgtgagaacagaaggtctgaccatggagtcgagagctgacaggaatgtcaccaycatcctgctctccaaggactcctcatcttcaacagactcctcatcttcaatg

SEQ ID NO: 343318 - DNA, 516 bp, Homo sapiens
ttggtcagaggtgtttgaccgtaactactattcacgaaaaaggtctactcattagaactaaaaatcacaaaattgtaagttctacaaaaacaaatcaaccttatctaccgcccagtcctactgaactacagaatgtgagaacagaaggtctgaccatggagtcgagagctgacaggaatgtcaccaccatcctgctctccaaggactcctcatcttcaacagactcctcatcttcaatgggcagggtggaaactgcaacttgtgccatgatccttgcacargaaaagtagtaagaaaatgagtggtagaaatccagtgtcctaaactcacatccggagctgtgagagttttttactggctggataattcacagttttcttgaatcaggggaaaaataagactcagaaactaggagttttgcccaaaactctcatcagatacagaatccatccgctaactatctagtattatttccataagttagatcaattatcactcccaaaacaaatgcacatg

SEQ ID NO: 343319 - DNA, 516 bp, Homo sapiens
ttggtcagaggtgtttgaccgtaactactattcacgaaaaaggtctactcattagaactaaaaatcacaaaattgtaagttctacaaaaacaaatcaaccttatctaccgcccagtcctactgaactacagaatgtgagaacagaaggtctgaccatggagtcgagagctgacaggaatgtcaccaccatcctgctctccaaggactcctcatcttcaacagactcctcatcttcaatgggcagggtggaaactgcaacttgtgccatgatccttgcacaagaaaagtagtaagaaaatgagtggtagaaatccagtgtcctaaactcacatccggagctgtgagagttttttactggctggataattcacagttttcttgaatcaggggaaaaataagactcagaaactaggagttttgcccaaaactctcatcagatacagaatcyatccgctaactatctagtattatttccataagttagatcaattatcactcccaaaacaaatgcacatg

SEQ ID NO: 343320 - DNA, 403 bp, Homo sapiens
gcttaatggaattttttttatcttctatgtagatcaattaaactttcttcataacagcagcaagattgtttagctttttatcattcatgtattcactggagtagtactttaaatttctttccagaacacttcytttgcattcacaacttggctaagtgtttgttgcatgaggtctagctactggcctgtcttgcttacagcatgccttcctcactaagcttaattatttcttccttttggtttaaagtgacagacatacaactcttctttcacttgaacatatagaggctattgtagggttattaattggccacattttaatattaataaaaagaagcctgagaaaaagagagagaaagagaaatggcccgttgatggggcagtcagaacaaacgcatttgtc

SEQ ID NO: 343321 - DNA, 403 bp, Homo sapiens
gcttaatggaattttttttatcttctatgtagatcaattaaactttcttcataacagcagcaagattgtttagctttttatcattcatgtattcactggagtagtactttaaatttctttccagaacacttcctttgcattcacaacttggctaagtgtttgttgcatgaggtctagctactggcctgtcttgcttacagcatgccttcctcactaagcttaattatttcttycttttggtttaaagtgacagacatacaactcttctttcacttgaacatatagaggctattgtagggttattaattggccacattttaatattaataaaaagaagcctgagaaaaagagagagaaagagaaatggcccgttgatggggcagtcagaacaaacgcatttgtc

SEQ ID NO: 343322 - DNA, 403 bp, Homo sapiens
gcttaatggaattttttttatcttctatgtagatcaattaaactttcttcataacagcagcaagattgtttagctttttatcattcatgtattcactggagtagtactttaaatttctttccagaacacttcctttgcattcacaacttggctaagtgtttgttgcatgaggtctagctactggcctgtcttgcttacagcatgccttcctcactaagcttaattatttcttccttttggtttaaagtgacagacatacaactcttctttcacttgaacatayagaggctattgtagggttattaattggccacattttaatattaataaaaagaagcctgagaaaaagagagagaaagagaaatggcccgttgatggggcagtcagaacaaacgcatttgtc

SEQ ID NO: 343323 - DNA, 403 bp, Homo sapiens
gcttaatggaattttttttatcttctatgtagatcaattaaactttcttcataacagcagcaagattgtttagctttttatcattcatgtattcactggagtagtactttaaatttctttccagaacacttcctttgcattcacaacttggctaagtgtttgttgcatgaggtctagctactggcctgtcttgcttacagcatgccttcctcactaagcttaattatttcttccttttggtttaaagtgacagacatacaactcttctttcacttgaacatatagaggctattgtrgggttattaattggccacattttaatattaataaaaagaagcctgagaaaaagagagagaaagagaaatggcccgttgatggggcagtcagaacaaacgcatttgtc

SEQ ID NO: 343324 - DNA, 285 bp, Homo sapiens
ccaagattaaatcacctcccacctgrcccacctccaacattaaggatgacacgtgagttatatagggacacatagccaacccatattattctgaccctgataccccagaacctcatgtccttctcacagagcaaaacacaaccatgctttttcaaaagtttccaaaagtcttaactcattccaaatgtaaaaatttccaagtctcatctgagacaaggttacagtcccttctgccaatgagtccctgaattataaaagggatttcttttccttcaaggtacaaca

SEQ ID NO: 343325 - DNA, 540 bp, Homo sapiens
ctgtgacacaaatgagccacacagagaaaatgagcagcacgctcaggagcagggtgtcgctgcttgggggctccagtccatgcctcaaggctcatatggcactgcgggcttcttggttgcaaagaggcagaccacaggccatcttcaggaggcttttatgttgaagtgcagaaagcagccaggattaccacccgtgrgactcggccttttgtggccctggcctgacagaatttggcccaaggcaggacaagttcactcggagcaacgtgtctgtacctggggcctgtgcatgccaggcaaggccaagctggctcaaagaacaaccagagcatccattctggtggatgagccaaccacatggccagcttctgggtgtgggcacagtgccacatcttccatcactttctgatatatcccaacaccactgaagagacagcctggagagagtgcaagaggaaggctgagaaggatgagatggtgagtgctggcttctttctgaccctcagcacacccccacgtggtgaccatcaacctttaggg

SEQ ID NO: 343326 - DNA, 540 bp, Homo sapiens
ctgtgacacaaatgagccacacagagaaaatgagcagcacgctcaggagcagggtgtcgctgcttgggggctccagtccatgcctcaaggctcatatggcactgcgggcttcttggttgcaaagaggcagaccacaggccatcttcaggaggcttttatgttgaagtgcagaaagcagccaggattaccacccgtgggactcggccttttgtggccctggcctgacagaatttggcccaaggcaggacaagttcactcggagcaacgtgtctgtacctggggcctgtgcatgccaggcaaggccaagctggctcaaagaacaaccagagcatccattctggtggatgagccaaccacatggccagcttctgggtgtgggcacagtgccacatcttccatcactttctgatatatcccamcaccactgaagagacagcctggagagagtgcaagaggaaggctgagaaggatgagatggtgagtgctggcttctttctgaccctcagcacacccccacgtggtgaccatcaacctttaggg

SEQ ID NO: 343327 - DNA, 540 bp, Homo sapiens
ctgtgacacaaatgagccacacagagaaaatgagcagcacgctcaggagcagggtgtcgctgcttgggggctccagtccatgcctcaaggctcatatggcactgcgggcttcttggttgcaaagaggcagaccacaggccatcttcaggaggcttttatgttgaagtgcagaaagcagccaggattaccacccgtgggactcggccttttgtggccctggcctgacagaatttggcccaaggcaggacaagttcactcggagcaacgtgtctgtacctggggcctgtgcatgccaggcaaggccaagctggctcaaagaacaaccagagcatccattctggtggatgagccaaccacatggccagcttctgggtgtgggcacagtgccacatcttccatcactttctgatatatcccaacaccactgaagagacagcctggagagagtgcaagaggaaggctgagaaggatgagatrgtgagtgctggcttctttctgaccctcagcacacccccacgtggtgaccatcaacctttaggg

SEQ ID NO: 343328 - DNA, 413 bp, Homo sapiens
ccccacgtggtgaccatcaacctttaggggtgggagagcaagactgatggcttcaaatacttccccaagaagatgggcacaggccactcagctcaacctcacagscaatgagttgacatgcaagcagatgacagtgacaggcttttagaaagagcttcagaaggcggccagtttttcttcagcctcagccaggccttggaacttgactaggccatccacttcaccagagatgccttcaagaacatcagtgagctccttgccaatccgtccaggaaggacctggacccagccacggacctgttagtgctgtctcagggacaccagaccaacatcctggacatcatcctcatacacaaggaagctcttaccacagtcatggagaacaggcaacatgtggcagaagggaagacaca

SEQ ID NO: 343329 - DNA, 413 bp, Homo sapiens
ccccacgtggtgaccatcaacctttaggggtgggagagcaagactgatggcttcaaatacttccccaagaagatgggcacaggccactcagctcaacctcacaggcaatgagttgacatgcaagcagatkacagtgacaggcttttagaaagagcttcagaaggcggccagtttttcttcagcctcagccaggccttggaacttgactaggccatccacttcaccagagatgccttcaagaacatcagtgagctccttgccaatccgtccaggaaggacctggacccagccacggacctgttagtgctgtctcagggacaccagaccaacatcctggacatcatcctcatacacaaggaagctcttaccacagtcatggagaacaggcaacatgtggcagaagggaagacaca

SEQ ID NO: 343330 - DNA, 382 bp, Homo sapiens
ttctttggccactttggctgaaattcaccacttccatccaatccactcaagcgagagacttgaaatcacagatggagcatttcttgcaacaggagatactattttttcaaaaagtcacctaaaatttgatagtgttggatgactagctattcgattgtggwctttttccagttcaagggtactttctacagcagaatgataacaatatcaaagagctagtgccagctatcggtggtagtacaaggatgactttgtgctcaactgaaacccagctgaatatagaattgtgtaggaaagtgttaatatggtgatagaacagaaacagtagcaaatgaactaaatcatactatgaatgcctacactaccattataactttttgaa

SEQ ID NO: 343331 - DNA, 360 bp, Homo sapiens
tttattaaattaccctgtttatttctggtgatatattttgytctgaagcctctttcatctagtgttaacatctctgttgaagctttttatgattagtgtctggatagcatatttttatgattagtgtctgcatagcatattttttctcatactttgtttgtgtctttgtgtttaaattgtgtctctgtggatgccatattgttgggtcttgccttcctctcaggtctggcagtctctgtcttaagtagagtatttgtccagttacattgtaactaatcattgctaaggttggatttaggtctgccatttttctagttattttctatttgtttgtttattatttttaagacagggtcttgc

SEQ ID NO: 343332 - DNA, 360 bp, Homo sapiens
tttattaaattaccctgtttatttctggtgatatattttgctctgaagcctctttcatctagtgttaacatctctgttgaagctttttatgattagtgtctggatagcatatttttatgwttagtgtctgcatagcatattttttctcatactttgtttgtgtctttgtgtttaaattgtgtctctgtggatgccatattgttgggtcttgccttcctctcaggtctggcagtctctgtcttaagtagagtatttgtccagttacattgtaactaatcattgctaaggttggatttaggtctgccatttttctagttattttctatttgtttgtttattatttttaagacagggtcttgc

SEQ ID NO: 343333 - DNA, 360 bp, Homo sapiens
tttattaaattaccctgtttatttctggtgatatattttgctctgaagcctctttcatctagtgttaacatctctgttgaagctttttatgattagtgtctggatagcatatttttatgattagtgtctgcatagcatattttttctcatactttgtttgtgtctttgtgtttaaattgtgtctctgtggatgccatattgttgggtcttgccttcctctcaggtctggcagtctctgtcttaagtagagtatttgtccagttacattgtaactaatcattgctaaggttggatttaggyctgccatttttctagttattttctatttgtttgtttattatttttaagacagggtcttgc

SEQ ID NO: 343334 - DNA, 360 bp, Homo sapiens
tttattaaattaccctgtttatttctggtgatatattttgctctgaagcctctttcatctagtgttaacatctctgttgaagctttttatgattagtgtctggatagcatatttttatgattagtgtctgcatagcatattttttctcatactttgtttgtgtctttgtgtttaaattgtgtctctgtggatgccatattgttgggtcttgccttcctctcaggtctggcagtctctgtcttaagtagagtatttgtccagttacattgtaactaatcattgctaaggttggatttaggtctgycatttttctagttattttctatttgtttgtttattatttttaagacagggtcttgc

SEQ ID NO: 343335 - DNA, 451 bp, Homo sapiens
attagtgtctggatagcatatttttatgattagtgtctgcatagcatattttttctcatactttgtttgtgtctttgtgtttaaattgtgtctctgtggatgccatattgttgggtcttgccttcctctcaggtctggcagtctctgtcttaagtagagtatttgtccagttacattgtaactaatcattgctaaggttggatttaggtctgccatttttctagttattttctatttgtttktttattatttttaagacagggtcttgctctgtcacccagactgtagtgcaatggtgcaatcttggctcgctgcaacctctgcctcccaggcccaaccaatcctcacttgatccccctgagtagctgggactacaggtgcatggcaccacacctggctaatttttatattttttgtagagatagagttttgccatgttgcagaggctggt

SEQ ID NO: 343336 - DNA, 451 bp, Homo sapiens
attagtgtctggatagcatatttttatgattagtgtctgcatagcatattttttctcatactttgtttgtgtctttgtgtttaaattgtgtctctgtggatgccatattgttgggtcttgccttcctctcaggtctggcagtctctgtcttaagtagagtatttgtccagttacattgtaactaatcattgctaaggttggatttaggtctgccatttttctagttattttctatttgtttgtttattatttttaagacagggtcttgctctgtcacccagactgtagtgcaatggtgcaatcttggctcrctgcaacctctgcctcccaggcccaaccaatcctcacttgatccccctgagtagctgggactacaggtgcatggcaccacacctggctaatttttatattttttgtagagatagagttttgccatgttgcagaggctggt

SEQ ID NO: 343337 - DNA, 451 bp, Homo sapiens
attagtgtctggatagcatatttttatgattagtgtctgcatagcatattttttctcatactttgtttgtgtctttgtgtttaaattgtgtctctgtggatgccatattgttgggtcttgccttcctctcaggtctggcagtctctgtcttaagtagagtatttgtccagttacattgtaactaatcattgctaaggttggatttaggtctgccatttttctagttattttctatttgtttgtttattatttttaagacagggtcttgctctgtcacccagactgtagtgcaatggtgcaatcttggctcgctgcaacctctgcctcccaggcccaaccaatcctcacttgakccccctgagtagctgggactacaggtgcatggcaccacacctggctaatttttatattttttgtagagatagagttttgccatgttgcagaggctggt

SEQ ID NO: 343338 - DNA, 451 bp, Homo sapiens
attagtgtctggatagcatatttttatgattagtgtctgcatagcatattttttctcatactttgtttgtgtctttgtgtttaaattgtgtctctgtggatgccatattgttgggtcttgccttcctctcaggtctggcagtctctgtcttaagtagagtatttgtccagttacattgtaactaatcattgctaaggttggatttaggtctgccatttttctagttattttctatttgtttgtttattatttttaagacagggtcttgctctgtcacccagactgtagtgcaatggtgcaatcttggctcgctgcaacctctgcctcccaggcccaaccaatcctcacttgatccccctgagtagctgggactacaggtgcrtggcaccacacctggctaatttttatattttttgtagagatagagttttgccatgttgcagaggctggt

SEQ ID NO: 343339 - DNA, 562 bp, Homo sapiens
ctactagttattctgtctctgtagaagttggatgcctggatcatatggtcattttattttattttttgtgaggagccagttcatatttccaccaatagtgttcaagggtttcagtttcacctgcacttgttactttctgttgggttagaagtgatgtcccattgtggtttctatttgcatttctttaatgactagtgatgttacacatcttctcatatatctcatgtatctgttggctatttttatatyatctttgcatctttggataaatgttctttgtccattttttaatcactttattttgttgttgtgttgtagtggggttttttggtcatgatcattcatttatctcacagttcattcttgttacttgggccagggtcatggtcattcattatctctcagttcatcctcattacgttgggcaaacagtcatgctgcagggtatagattatgttattctgttactttcagatagaattggggtctaggttctaattgtttctaagtttagattctgaatgagaatcagcagaggtagaccactgctgctgaggcctgg

SEQ ID NO: 343340 - DNA, 562 bp, Homo sapiens
ctactagttattctgtctctgtagaagttggatgcctggatcatatggtcattttattttattttttgtgaggagccagttcatatttccaccaatagtgttcaagggtttcagtttcacctgcacttgttactttctgttgggttagaagtgatgtcccattgtggtttctatttgcatttctttaatgactagtgatgttacacatcttctcatatatctcatgtatctgttggctatttttatatcatctttgcatctttggataaatgttctttgtccattttttaatcactttattttgttgttgtgttgtagtggggttttttggtcatgatcattcatttatctcacagttcattcttgttacttgggccagggtcatggtcattcattatctctcagttcatcctcattacgttgggcaaacagtcatgctgcagggtatagattatgttattctgttactttcagrtagaattggggtctaggttctaattgtttctaagtttagattctgaatgagaatcagcagaggtagaccactgctgctgaggcctgg

SEQ ID NO: 343341 - DNA, 488 bp, Homo sapiens
tgaagttatctggacctggaattttctttttggtggggtttttgattactggttgaatcttcttactagttacaggtctctttggattttttatttctccgtgatgcagtatggtggtttgtgtttctaggaatttataaatttattctaggttgcccagtttggtggcatatggttgctcacattagtgtcttgtaatctttttcatttctgtggmatgtgttgtactgtcaactcttttatttatgattgtagtatttgagatttctctttttttcttaatatagctgtgagttttaaaatttttattgatctttaaaaaaacaaactcagtgttttttttcctttttttctggtcttattctgcttatctctgctctaatctgttattttcttccttttgcttggtttgtcattagttttttttttccttcttcaggtgtaatgttaggttattgatttgagatctttcttctttttaatttaag

SEQ ID NO: 343342 - DNA, 488 bp, Homo sapiens
tgaagttatctggacctggaattttctttttggtggggtttttgattactggttgaatcttcttactagttacaggtctctttggattttttatttctccgtgatgcagtatggtggtttgtgtttctaggaatttataaatttattctaggttgcccagtttggtggcatatggttgctcacattagtgtcttgtaatctttttcatttctgtggcatstgttgtactgtcaactcttttatttatgattgtagtatttgagatttctctttttttcttaatatagctgtgagttttaaaatttttattgatctttaaaaaaacaaactcagtgttttttttcctttttttctggtcttattctgcttatctctgctctaatctgttattttcttccttttgcttggtttgtcattagttttttttttccttcttcaggtgtaatgttaggttattgatttgagatctttcttctttttaatttaag

SEQ ID NO: 343343 - DNA, 488 bp, Homo sapiens
tgaagttatctggacctggaattttctttttggtggggtttttgattactggttgaatcttcttactagttacaggtctctttggattttttatttctccgtgatgcagtatggtggtttgtgtttctaggaatttataaatttattctaggttgcccagtttggtggcatatggttgctcacattagtgtcttgtaatctttttcatttctgtggcatgtgttgtactgtcaactcttttatttatgattktagtatttgagatttctctttttttcttaatatagctgtgagttttaaaatttttattgatctttaaaaaaacaaactcagtgttttttttcctttttttctggtcttattctgcttatctctgctctaatctgttattttcttccttttgcttggtttgtcattagttttttttttccttcttcaggtgtaatgttaggttattgatttgagatctttcttctttttaatttaag

SEQ ID NO: 343344 - DNA, 488 bp, Homo sapiens
tgaagttatctggacctggaattttctttttggtggggtttttgattactggttgaatcttcttactagttacaggtctctttggattttttatttctccgtgatgcagtatggtggtttgtgtttctaggaatttataaatttattctaggttgcccagtttggtggcatatggttgctcacattagtgtcttgtaatctttttcatttctgtggcatgtgttgtactgtcaactcttttatttatgattgtagtatttgagatttctctttttttcttaatatagctgtgagttttaaaatttttattgatctttaaaaaaacaaactcagtgttttttttcctttttttctggtcttattctgcttatctctgytctaatctgttattttcttccttttgcttggtttgtcattagttttttttttccttcttcaggtgtaatgttaggttattgatttgagatctttcttctttttaatttaag

SEQ ID NO: 343345 - DNA, 497 bp, Homo sapiens
gtcctgcttttccagggtcagccagtggagaggccccatcctcccttccctatgtgtctcctgggctgaaacttgcagtgcactgggatagggatgaggcttccctaaggcccatttagggagaggactggctccagctgggcacaggtcctcagctctgccttggttgccttagaatgagatggatctcattctaagattggctggtctaggratggaggacttaacaggtcctcccagtctgtcaggcctgggcagcactgtcctgtctcaggactcagaaagtccattcctgggatgtgacggtgctgcccagggggggtggccagggtctgacagcagtcccccagggagtgaccacatcacccagctggggtccagggagcctggcctgagacctgcccagtgcactgagggtgaacctggagcccactccacctgatgagcccacagccctcacaggtcctgacctcccagcatgcacctgcctcgccctg

SEQ ID NO: 343346 - DNA, 562 bp, Homo sapiens
aattaacaaaaacagaatttcaatacagtggacagcttagcattttgacaattggaaataaaatgcacagttctgaactgtacaatgtaagacacaaaaacgaaacactggaaatggaaattcaattatgtcactgtagactggctactgctctacatgattgtgaccaaagtcagagagttgcaagagatttctttccagagaacaagacatgaacaggtttatttacagaaaacaatgaattctcatatatctaacctaaaagataacagattctttcagaacaagtctaatgtagacagtaaaattaacgggctaaaaattaagctccatcaaacaagaygaactctgagagaatagatggggcaggccgccatctttcctgttcaggcaacttggtcattccagcctgaaggctttggagagtacaaaccgaccaggggcagaagagatcccacagcacagcatggctgctttaccaaatcatggccagactgcttctgtaagcaggcccctgactctgttgcatgtcactggaaaggacctcccaactggggtccca

SEQ ID NO: 343347 - DNA, 569 bp, Homo sapiens
cagtagcaactcagcaattccctggacagagcttccaggagcaaatgaaattccctctgccactgtctctgcagtggaactgcccttgctaccctcagaatatcaagggagcaaagaccctaagtgccatatcgacacctccaataagctgcagttgacccaacgaacaagccagtccatctcccaygggtaccacacaccccacactgctcatcaccagagagggaaccctggcttgggcttacaacacagaccctccatcctgggctgattacgctaagtgattgctaactcacatctctccgggatggagcacccaggagacaagcagagtggtggagcagcaagtcaggtgatgtggagcccagagggcagggacagctatctctctaggctccacttgcccttgtgagacactttatcccagcactttagaaatgctaagctcagatcagccccatctcatgttcaagattgcccagcagagatcaggtcagagagttcccctcttaaaaaaggggacttgcttaaaaaagaacactggccatgtttgtgtaaagcagctatgc

SEQ ID NO: 343348 - DNA, 569 bp, Homo sapiens
cagtagcaactcagcaattccctggacagagcttccaggagcaaatgaaattccctctgccactgtctctgcagtggaactgcccttgctaccctcagaatatcaagggagcaaagaccctaagtgccatatcgacacctccaataagctgcagttgacccaacgaacaagccagtccatctcccatgggtaccacacaccccacactgctcatcaccagaragggaaccctggcttgggcttacaacacagaccctccatcctgggctgattacgctaagtgattgctaactcacatctctccgggatggagcacccaggagacaagcagagtggtggagcagcaagtcaggtgatgtggagcccagagggcagggacagctatctctctaggctccacttgcccttgtgagacactttatcccagcactttagaaatgctaagctcagatcagccccatctcatgttcaagattgcccagcagagatcaggtcagagagttcccctcttaaaaaaggggacttgcttaaaaaagaacactggccatgtttgtgtaaagcagctatgc

SEQ ID NO: 343349 - DNA, 569 bp, Homo sapiens
cagtagcaactcagcaattccctggacagagcttccaggagcaaatgaaattccctctgccactgtctctgcagtggaactgcccttgctaccctcagaatatcaagggagcaaagaccctaagtgccatatcgacacctccaataagctgcagttgacccaacgaacaagccagtccatctcccatgggtaccacacaccccacactgctcatcaccagagagggaaccctggcttgggcttacaacacagaccctccatcctgggctgattacgctaagtgattgctaactcacatctctccgggatggagcaccyaggagacaagcagagtggtggagcagcaagtcaggtgatgtggagcccagagggcagggacagctatctctctaggctccacttgcccttgtgagacactttatcccagcactttagaaatgctaagctcagatcagccccatctcatgttcaagattgcccagcagagatcaggtcagagagttcccctcttaaaaaaggggacttgcttaaaaaagaacactggccatgtttgtgtaaagcagctatgc

SEQ ID NO: 343350 - DNA, 569 bp, Homo sapiens
cagtagcaactcagcaattccctggacagagcttccaggagcaaatgaaattccctctgccactgtctctgcagtggaactgcccttgctaccctcagaatatcaagggagcaaagaccctaagtgccatatcgacacctccaataagctgcagttgacccaacgaacaagccagtccatctcccatgggtaccacacaccccacactgctcatcaccagagagggaaccctggcttgggcttacaacacagaccctccatcctgggctgattacgctaagtgattgctaactcacatctctccgggatggagcacccaggagacaagcagagtggtggagcagcaagtcaggtgatgtggagcccagagggcagggacagctatmtctctaggctccacttgcccttgtgagacactttatcccagcactttagaaatgctaagctcagatcagccccatctcatgttcaagattgcccagcagagatcaggtcagagagttcccctcttaaaaaaggggacttgcttaaaaaagaacactggccatgtttgtgtaaagcagctatgc

SEQ ID NO: 343351 - DNA, 373 bp, Homo sapiens
cagctatgctgtgctgggggttcacttttgagggagttctcctctgagacctgatctctgctgggcagtcttgcccatgagatggggcactccttagtctgcttgcctctcccaggaccccagcctggccacacctgcttacagggcactctcggatgcccacagcatagcttccgtgctagtggaccgtagctgatcagtggagagctgcagcaaggtggccccaacagccacgcaccagtctgcacattacctctccatactgcagccctttatatggaaacwtcctacatcactttgctgtgtgtgtttacacaggtgggttttgctgtacttgccctgacagcacacgggagtgcagcacacacaccaa

SEQ ID NO: 343352 - DNA, 373 bp, Homo sapiens
cagctatgctgtgctgggggttcacttttgagggagttctcctctgagacctgatctctgctgggcagtcttgcccatgagatggggcactccttagtctgcttgcctctcccaggaccccagcctggccacacctgcttacagggcactctcggatgcccacagcatagcttccgtgctagtggaccgtagctgatcagtggagagctgcagcaaggtggccccaacagccacgcaccagtctgcacattacctctccatactgcagccctttatatggaaacttcctacatcactttgctgtgtgtgtttacacakgtgggttttgctgtacttgccctgacagcacacgggagtgcagcacacacaccaa

SEQ ID NO: 343353 - DNA, 557 bp, Homo sapiens
caataaaacaaaaataccctgtccgaaggtcagcaacctcaaagatggaaggtggataagcccataaagatgagaaagaatctgtgtgagaacactgaaaactcaaaaagtcagcatgccttctttcctccaaatgactgcatcaactctccagcaagtgttcagaactgggctgaggctgagatgtctggaatgatacaagcagggttcaggatatgcgtaggaacaaagttcactgagtgaaagaagtatgttgtcatgcaatacaagtgagctaaaaatcattgtaaaacattgcaggagctaacagacaaaatagcaagtataaagaagacataaccgacctaatagagctgaaaagcacactacaagaattttcataatggagtcacatrgtgattatgtgtgattgcattatgaaaattattgtagtgtgtgtgggcacccgatattgccctgtaagcaggtgtggccaggctggggtcctgggagaggcaagcagactaaggagggctgaggtcagaacagctccatctcatgtgcaagaccacccagca

SEQ ID NO: 343354 - DNA, 610 bp, Homo sapiens
tctgccctgttcactacagaaacctgagtttggttcctaagtctagttctttcwgtttgatatttgtgttacttttaaaacgtcagcagtttgtcccagctatgatgtggtagtaaaagattcaaaagggttttctttacaagttctatgattaaaagcttaattaaaaacaaatttcttttttttttaattatactttaagttctggggtacatgtgcagaacatgcaggtttgttacataggtatacacatgccatggtggcttgctgcatccatcaacccatgatctacattagttatttctcctaatgccatccctctcctagccccccacgctgacaggccctggtgtgtgatgttccccttcctgtgtccatgtgttcccattgttcaactccaagttatgagtgagaacatgtggtgtttggttttctgttcttgtgttagtttgctgagaatgatgctttccagcttcattcatgtcccagcaaaggacgtggattcatccttttttatggctacatagtattccatggtgtatatatgccacatttactttatctagtctatcattggtgggcatttgggttggttccaagtcgttggttt

SEQ ID NO: 343355 - DNA, 400 bp, Homo sapiens
gttagacggggcctgcagggcagcacttccctcttgcctcccaccaacagcttctaaagggaaatgccgactgttttcacaccagtcccctcactgcggctgagtttgtgggctcagatgataggtcayaacaacctgattcagtcctcactgtggctgagtgtgtcaggggcagacgacaggccaccacaacctgattcagtcctcactgtggctgtgtgtgggggggtcagatgacaggtcaccacaacctgattcagtcctcactgcggctgagtgtgtgtgggtgcagatgacaggtcaccacaacctgattcaggattcagttgggctaccagccagtgccataaggaaaacctttctggggctcttgagaggggcaaagcataatttgcatgta

SEQ ID NO: 343356 - DNA, 400 bp, Homo sapiens
gttagacggggcctgcagggcagcacttccctcttgcctcccaccaacagcttctaaagggaaatgccgactgttttcacaccagtcccctcactgcggctgagtttgtgggctcagatgataggtcataacaacctgattcagtcctcactgtggctgagtgtgtcaggggcagamgacaggccaccacaacctgattcagtcctcactgtggctgtgtgtgggggggtcagatgacaggtcaccacaacctgattcagtcctcactgcggctgagtgtgtgtgggtgcagatgacaggtcaccacaacctgattcaggattcagttgggctaccagccagtgccataaggaaaacctttctggggctcttgagaggggcaaagcataatttgcatgta

SEQ ID NO: 343357 - DNA, 400 bp, Homo sapiens
gttagacggggcctgcagggcagcacttccctcttgcctcccaccaacagcttctaaagggaaatgccgactgttttcacaccagtcccctcactgcggctgagtttgtgggctcagatgataggtcataacaacctgattcagtcctcactgtggctgagtgtgtcaggggcagacgacaggccaccacaacctgattcagtcctcactgtggctgtgtgtgggggggtcagatgacaggtcaccacaacctgattcagtcctcactgcggctgagtgtgtgtgggtgcagatgacaggycaccacaacctgattcaggattcagttgggctaccagccagtgccataaggaaaacctttctggggctcttgagaggggcaaagcataatttgcatgta

SEQ ID NO: 343358 - DNA, 400 bp, Homo sapiens
gttagacggggcctgcagggcagcacttccctcttgcctcccaccaacagcttctaaagggaaatgccgactgttttcacaccagtcccctcactgcggctgagtttgtgggctcagatgataggtcataacaacctgattcagtcctcactgtggctgagtgtgtcaggggcagacgacaggccaccacaacctgattcagtcctcactgtggctgtgtgtgggggggtcagatgacaggtcaccacaacctgattcagtcctcactgcggctgagtgtgtgtgggtgcagatgacaggtcaccacaacctgattcaggrttcagttgggctaccagccagtgccataaggaaaacctttctggggctcttgagaggggcaaagcataatttgcatgta

SEQ ID NO: 343359 - DNA, 406 bp, Homo sapiens
gtccgtgctggccacgaagagagggctgggtgcytgctccatgtccccagccactagagtccttccagatgagaccaaggacatcatgaagcaaccaaccaacaccgccctgtccagtgtcttgacccagaaaattgtgacatgtaaaaagaataaattcctggtttaagccagtaaggttactggtacattgttacatctcagataattaaaaccttgaaaaactcatgagagatcacaagtagaaccttgatctgaaacggcatgtagcgatttatattgagtattaggttaaaaatgcaagaatggagcatagttaatattttacgttaaagctaaaactataattgcctacttcaaattttcagttaattagtttgtcactttttgttcttaaccaagaaat

SEQ ID NO: 343360 - DNA, 505 bp, Homo sapiens
aaacatatattgtatatgttagcatattgtatacattgcatattaacataagctagaatcattgacataaatttatataaacaaaaggtgtaaaatatgacagtgttcttcttgatttttgtctttgcatatttctttattggcctttgtcaaatgtgacccactaactcctgaatgctttctctctccccattgattcctaaggatrtcaccacagtgttggccagatgcacaggtcacaggggactgaatctcatcaccccacaaacataccattcaggttttgccaagaatgacactgtaaatgtaacaaagcttccgtgcttgttagtgaacaccaactcagctcctctcctgtattcagaaatcagcatgagatgaaaacaacaagcaggccaggcacggtggctcacgcctgtaatcccagcactttgggaggacgaagcatgtggatcacctgaggtcgggagttcgagaccaccctgatcaaaacagagaaacccca

SEQ ID NO: 343361 - DNA, 397 bp, Homo sapiens
gcctgtaataccagctactcaggagctgaggcaggagaattgcttgaacccrggaggtggaggctgcagtgagccgagatcacaccactgtgctctagcctggacaacaagagtgaaactctgtctcaaaagaaaaaaaattaaaaataaaagaacaaggaaacaaaagtaacaaggcttgacaccagatgagcctgaatctaagcaagaaaagcccagaagaaatcccattttgggtcactggttgcatggtagtaataccatacacataagggaagagaggaggatgtggctttcactttgaattttttgagcttaaggtaacttttgcgtcgtacaaagaagcattcaacagagagttaaacctatgatggaaagactgaaggggtccaagctg

SEQ ID NO: 343362 - DNA, 397 bp, Homo sapiens
gcctgtaataccagctactcaggagctgaggcaggagaattgcttgaacccgggaggtggaggctgcagtgagccgagatcacaccactgygctctagcctggacaacaagagtgaaactctgtctcaaaagaaaaaaaattaaaaataaaagaacaaggaaacaaaagtaacaaggcttgacaccagatgagcctgaatctaagcaagaaaagcccagaagaaatcccattttgggtcactggttgcatggtagtaataccatacacataagggaagagaggaggatgtggctttcactttgaattttttgagcttaaggtaacttttgcgtcgtacaaagaagcattcaacagagagttaaacctatgatggaaagactgaaggggtccaagctg

SEQ ID NO: 343363 - DNA, 397 bp, Homo sapiens
gcctgtaataccagctactcaggagctgaggcaggagaattgcttgaacccgggaggtggaggctgcagtgagccgagatcacaccactgtgctctagcctggamaacaagagtgaaactctgtctcaaaagaaaaaaaattaaaaataaaagaacaaggaaacaaaagtaacaaggcttgacaccagatgagcctgaatctaagcaagaaaagcccagaagaaatcccattttgggtcactggttgcatggtagtaataccatacacataagggaagagaggaggatgtggctttcactttgaattttttgagcttaaggtaacttttgcgtcgtacaaagaagcattcaacagagagttaaacctatgatggaaagactgaaggggtccaagctg

SEQ ID NO: 343364 - DNA, 398 bp, Homo sapiens
  misc_feature (1)...(398): n = A,T,C or G
catccacatgacagcaaaactttaaaaccttaaactttgggttcatagtctcacaactcagaaaggtccttccacacttggaaccatatacccattggaacccttaaggtaaagctaacaaggacagttccccccagaagaagatggcatccttaatgtgaacagcttttcccamgatcacagatcaagacttctctactatcatgagacacttatcttaagtatctgtgcagctgctaacacttacagcatgtggagaaaacatggggtattataaaaatttggttgtagggaattaacaaaaaaacccacttagttaagcaagtaaactctttatctaattcattctttaatctatttgattttaggtggtttgatttannnnnnnnnnnnnnnnn

SEQ ID NO: 343365 - DNA, 398 bp, Homo sapiens
  misc_feature (1)...(398): n = A,T,C or G
catccacatgacagcaaaactttaaaaccttaaactttgggttcatagtctcacaactcagaaaggtccttccacacttggaaccatatacccattggaacccttaaggtaaagctaacaaggacagttccccccagaagaagatggcatccttaatgtgaacagcttttcccacgatcacagatcaagacttctctactatcatgagacacttatcttaagtatctgtgcagctgctaacacttacagcatgtggagaaaacatggkgtattataaaaatttggttgtagggaattaacaaaaaaacccacttagttaagcaagtaaactctttatctaattcattctttaatctatttgattttaggtggtttgatttannnnnnnnnnnnnnnnn

SEQ ID NO: 343366 - DNA, 398 bp, Homo sapiens
  misc_feature (1)...(398): n = A,T,C or G
catccacatgacagcaaaactttaaaaccttaaactttgggttcatagtctcacaactcagaaaggtccttccacacttggaaccatatacccattggaacccttaaggtaaagctaacaaggacagttccccccagaagaagatggcatccttaatgtgaacagcttttcccacgatcacagatcaagacttctctactatcatgagacacttatcttaagtatctgtgcagctgctaacacttacagcatgtggagaaaacatggggtattataaaratttggttgtagggaattaacaaaaaaacccacttagttaagcaagtaaactctttatctaattcattctttaatctatttgattttaggtggtttgatttannnnnnnnnnnnnnnnn

SEQ ID NO: 343367 - DNA, 639 bp, Homo sapiens
ccgttactctgtcagcactttttaatttctggcagaagatgttctaagctcatcttgtattttctctgccccagctctggaatgagtaattttttttagaagcagaggtggagccaatgaggaagcacaggtgagccctccccagtgtgtactcactggtccccaacagaagaaccgctgccacatccactgaggtaccaggaaactagcaaakggccttctggctgtctggagagagtcctcatgtggtccctggctgagcctcagaggttctggattagtcttcctgtagcctctgtgttgtgtctttagatcggggctatatgggaagggccctgggagacccaacagcacagtgtgtctcatctgccaaacgtccctcccttcctcacactctgacactcaggaatagggtagatggtgtgtccaggcagtgtcaggccacctcactttctcctttgagacggcccagagcgtttggtgtgagtgtggagctgggaacctggagcctgaggccaactgtctctccctgtgtcttggaggaaaggccatgtctcaaaaaaacccccagggcctgacctctgggcacacatgcagggagggagggtctatgagctgagggggacattgtaatgagac

SEQ ID NO: 343368 - DNA, 639 bp, Homo sapiens
ccgttactctgtcagcactttttaatttctggcagaagatgttctaagctcatcttgtattttctctgccccagctctggaatgagtaattttttttagaagcagaggtggagccaatgaggaagcacaggtgagccctccccagtgtgtactcactggtccccaacagaagaaccgctgccacatccactgaggtaccaggaaactagcaaagggccttctggctgtctggagagagtcctcatgtggtccctggctgagcctcagaggttctggattagtcttcctgtagcctctgtgttgtgtctttagatcggggctatatgggaagggccctgggagacccaacagcacagtgtgtctcatctgccaaacgtccctcccttcctcacactctgacactcaggaatagggtagatggtgtgtccaggcagtgtcaggccacctcactttctcctttgagacggcccagagcgtttggtgtgagtgtggagctgggaacctggagcctgaggccaactgtctctccctgtgtcttggaggaaaggccatgtctcaaaaaaacccccagggcctgacctctgggyacacatgcagggagggagggtctatgagctgagggggacattgtaatgagac

SEQ ID NO: 343369 - DNA, 481 bp, Homo sapiens
  misc_feature (1)...(481): n = A,T,C or G
agctgatggagtggaggcctgaggaaaagcagatggcactggggytctacctccagggcagagtaactgatttaccctggctggcagggagtgacgttggtggctggtctatcagctcctggcacacccttgcagaggtggctggttgctctttgagccagcttggctttgctngggatgaataggactcagtgcaacaaatgtgctgcaaatggagccacatagaggaaaggagcagcaggctcaggagcggggtgtgtgccacctttggggctccagtccatgcataggggcttctacagcactgtgggcttctcaggtgccaagaggcagaacacaggccatctggaggatgactctggtaagagcttccttgggtatgtggatgatgtccagaatgttggcctggtgtccctgagacagcactaacaggtccatgactgggtccaggtcctgcctgggctgattggcaaagagctca

SEQ ID NO: 343370 - DNA, 306 bp, Homo sapiens
aacaaatgtgctgcaaatggagccacatagaggaaaggagcagcaggctcaggagcggggtgtgtgccacctttggggctccagtccatgcataggggcttctacagcactgtgggcttctcaggtgccaagaggcagaacacaggccatctggaggatgactctggtaagagcttccttgggtatgtggatgatgtccagaatgttggcctggtgtccctgagacagcactaacaggtccatgactgggtccaggtcctgcctgggctgattggcaaagagctcaytgacagtgtggaatgcatc

SEQ ID NO: 343371 - DNA, 553 bp, Homo sapiens
ctatgtcccaaccaaaactcatatggaattatattttgtaatgttagaggcggggcctaggtggaaaaagatttagtcataaaatggtgcaggtagatacttcacgaatgataaaggaccatcaccttgatgctatcctcctgatagtgagtgacttctcatgagatctggttgtttaacaggctgtggaaccyctttcctcactctgtcttcctcctactcctgctttaggagacatctcattgtcccttggctttctgatataacgaggagtcttcctgattcctcccagaaacagaagacacaatgattccttcacagcttgcagaaacatgagtcaattacacgtcttttatttacaataatacagaaaattagaactgcagagaggagctgtgaaatgtcttcaaggccttttaccctttgtcttggctattagcaaagggcttctttatatgcaaatttctgaaatcttcttgaatgtttccccttaaatgggatttttgttattgctacctagccaacctgctatacagatagctaaaaaagtaga

SEQ ID NO: 343372 - DNA, 553 bp, Homo sapiens
ctatgtcccaaccaaaactcatatggaattatattttgtaatgttagaggcggggcctaggtggaaaaagatttagtcataaaatggtgcaggtagatacttcacgaatgataaaggaccatcaccttgatgctatcctcctgatagtgagtgacttctcatgagatctggttgtttaacaggctgtggaacctctttcctcactctgtcttcctcctactcctgctttaggagacatctcattgtcccttggctttctgatataacgaggagtcttcctgattcctcccagaaacagaagacacaatgattccttcacagcttgcagaaacatgagtcaattacacgtcttttatttacaataatacagaaaattagaactgcagagaggagctgtgaaatgtcttcaaggccttttaccctttgtcttggctattagcamagggcttctttatatgcaaatttctgaaatcttcttgaatgtttccccttaaatgggatttttgttattgctacctagccaacctgctatacagatagctaaaaaagtaga

SEQ ID NO: 343373 - DNA, 594 bp, Homo sapiens
cttgtggttcctcactttatggccgattagcctagttaggcctcaccactcacacatcatccttctaccagttctcatgttcctggttggggtggcgagtcactttcaccacctccagtttccttctgagctgatttagtgagccactgtcacatgctgtgttggttgaggtrtaagtttcttctgaattggtgaaccactcttgcggcctgcagcacctctgggttggattaccggttataacctaggaggtgattaggctcccttttggtccttgtgggatgtgtcctgccttgggtcccaataccttactgtggtttctgaagtgagctgttcctggaatcgtcctataacccattaggtaccattgcactgcttggtaggggcacgaggtcacaaaatggctgatctcccctccaggctgaagttctcccagtggtgctccttgggtcacaggactcctgagacccagggcttaagccccaggggcaaaggagacaggaaacctgtcatctccactcctggctgactggccaataatgctgtgggaagcagaggaccacagagattcatatggggaaataggaggatgta

SEQ ID NO: 343374 - DNA, 636 bp, Homo sapiens
tttcttttcagtgcagacactgaagcttgagcctggaattgtggagccagttctctctgctgtggggcccatgtatgggtagaagtctcctcatgactcaaatcacagccttggtaacccactagtccagttcctaaaaacacccactccttagtgtttcaagaatcaygctctagagtccactgccacatttgaatttattgcaatgttatggaaatgagaattttatctaggcctggcactgtggcttacacctgtcatctcagcacttttggaggcagagctgggcagattaactgaggtcaggagcttgagactagcctggccaacatagtgtagtaccatttctactaaatatacaaaaattagccgagtgttgtggcctactccagtcatccaggctacctgggaggctgaggcaggagaaacacttgaactcaggaggcagaggttgcaatgagtggagatcatgtctctgcactccagtctgggtgacagagtaagactctgccctcactcaccaaaaaacaaaaacataaacaaaaacaaaaaacaaaaatgtatctgtttatatttcaatgccaaaatattttaaatgactttttaatgatgtgtataatttttccaagtttagaa

SEQ ID NO: 343375 - DNA, 610 bp, Homo sapiens
ttgagggcttattgtaccagctacagcttcatgtgtcttttgtaacacggtacaacttcagaatccattatgcacaatttccacatccccacagctctgaaaattgaaaatttattcataacttaggggcatagcctagccagacatgaactcatttggttaaatactatgacctgaaatgacgtgaacccatwtattatctttatttgccccggcatgaatattcatacagttgactggaaaataactaatgcatttcactacagcaggtcctacagaattcacatgctgtggatttcgtgtgctgtgaaatccacagcatacggcatgagtttcagacaaaaagtaagaacctgcattcacaaaaacactgtggtcaaggaattctcacagcttccgttttatagatgggagactaaagcttattgaccctgggtcacaccgttagcaggttcaagagctactgcactttcctaaggcaaagccagtgcctgtgtctcactgtcctgaaatgccttccaatgaagctgtgagaaagaagcttgccctcctcattgcatgcaagtgcaaaagttctattcccattcaactatttttattaacatgagac

SEQ ID NO: 343376 - DNA, 610 bp, Homo sapiens
ttgagggcttattgtaccagctacagcttcatgtgtcttttgtaacacggtacaacttcagaatccattatgcacaatttccacatccccacagctctgaaaattgaaaatttattcataacttaggggcatagcctagccagacatgaactcatttggttaaatactatgacctgaaatgacgtgaacccatttattatctttatttgccccggcatgaatattcatacagttgactggaaaataactaatgcatttcactacagcaggtmctacagaattcacatgctgtggatttcgtgtgctgtgaaatccacagcatacggcatgagtttcagacaaaaagtaagaacctgcattcacaaaaacactgtggtcaaggaattctcacagcttccgttttatagatgggagactaaagcttattgaccctgggtcacaccgttagcaggttcaagagctactgcactttcctaaggcaaagccagtgcctgtgtctcactgtcctgaaatgccttccaatgaagctgtgagaaagaagcttgccctcctcattgcatgcaagtgcaaaagttctattcccattcaactatttttattaacatgagac

SEQ ID NO: 343377 - DNA, 607 bp, Homo sapiens
gattcatcactgattgggcccctaggggtcacttttcagtaaattgtactggacagagcaaagactttagagagactcctttacaaacgactacccagataatgtaccaatattatatagaagaattgaaacaaattaccctattaagtaggagagaacggtatggctcctccaaagccaaaaatgattgatccaattataagtccagaacatccaaaatgtggaaattaatgatgtctcaaaccccagttgggattcagaaaggagaatataaaacagacacccagagtaaaaaacttcaatttgttgtagccatgatakctaatcagacagtcccattacagagttgtgttaaacctccttttatgttagcagcaggaaaagttaatatcctgcttgactctcaaagcatatcatgcctcagctgtcatatttttacctgcattaattctacctttaataaagataatagcattttactggttagggcccaagaaggagtttggatacctgtttccctcaatagaacttgggagtcctcttcctccatatatattatcactgcagtactaaaagaaatacttaatgatcaaagagattcatattt

SEQ ID NO: 343378 - DNA, 608 bp, Homo sapiens
ccccagttgggattcagaaaggagaatataaaacagacacccagagtaaaaaacttcaatttgttgtagccatgatagctaatcagacagtcccattacagagttgtgttaaacctccttttatgttagcagcaggaaaagttaatatcctgcttgactctcaaagcatatcatgcctcagctgtcatatttttacctgcattaattctacctttaataaagataatagcattttactggttagggcccaagaaggagtttggatacctgtttccctcaatagaacttgggagtcctcttcctccatatatattatcactgcagtactaaaagaaatacttaatgatcaaagagattcatatttactttaatagctctcatcatgggtcttaaatctgtcacagctatagctgctgctgctggctttgctttgcactcttctattcaacctgcgagcgctgtgcatagttgkcagaaaaattcttccaagctttggaattcccaaagccaaatagatcaaaaattggcaaatcaaattaatgatcatcagacagtaatctgaatgggagatcggattatgaacttggagcatagaattcaaatgcaat

SEQ ID NO: 343379 - DNA, 582 bp, Homo sapiens
ggcccaatgaagttaaggtaacatgtccaagattaaacaactaacttcaaaacagggatccaaaagaacagttgtctgattctgagagcaatgttctctttgctaaacygccttgctcctcccgtgtgtgcatatatctatcaaggaatccataaaattactgaactgctgttaacattgaggtaacaaatagaaaagaaatttctaagataaacctggagacttctatgtcaccaccacgcctttcccatttgagacacaaggctctcccaagccatgaggcacctatgaaacaagtgacttttgctgatgatccagatggtattaccaaagtggatagggagttttacttctaagatgacacatgtttctgtggcttttcctctaacataacaattacttaatattcaataaattagggtcattacattttcacaagcatcagaagctttacacacagaaaaatattcatagatttaaaatgtctctaacctgtctgagtttgcttcagttgcaatacaaaatcggtcacctgaatacttaactttttacggaagtttgtaatctagtatctgggccttc

SEQ ID NO: 343380 - DNA, 582 bp, Homo sapiens
ggcccaatgaagttaaggtaacatgtccaagattaaacaactaacttcaaaacagggatccaaaagaacagttgtctgattctgagagcaatgttctctttgctaaaccgccttgctcctccygtgtgtgcatatatctatcaaggaatccataaaattactgaactgctgttaacattgaggtaacaaatagaaaagaaatttctaagataaacctggagacttctatgtcaccaccacgcctttcccatttgagacacaaggctctcccaagccatgaggcacctatgaaacaagtgacttttgctgatgatccagatggtattaccaaagtggatagggagttttacttctaagatgacacatgtttctgtggcttttcctctaacataacaattacttaatattcaataaattagggtcattacattttcacaagcatcagaagctttacacacagaaaaatattcatagatttaaaatgtctctaacctgtctgagtttgcttcagttgcaatacaaaatcggtcacctgaatacttaactttttacggaagtttgtaatctagtatctgggccttc

SEQ ID NO: 343381 - DNA, 582 bp, Homo sapiens
ggcccaatgaagttaaggtaacatgtccaagattaaacaactaacttcaaaacagggatccaaaagaacagttgtctgattctgagagcaatgttctctttgctaaaccgccttgctcctcccgtgtgtgcatatatctatcaaggaatccataaaattactgaactgctgttaacattgaggtaacaaatagaaaagaaatttctaagataaacctggagacttctatgtcaccaccacgcctttcccatttgagacacaaggctctcccaagccatgaggcacctatgaaacaagtgacttttgctgatgatccagatggtattaccaaagtggatagggagttttacttctaagatgacacaygtttctgtggcttttcctctaacataacaattacttaatattcaataaattagggtcattacattttcacaagcatcagaagctttacacacagaaaaatattcatagatttaaaatgtctctaacctgtctgagtttgcttcagttgcaatacaaaatcggtcacctgaatacttaactttttacggaagtttgtaatctagtatctgggccttc

SEQ ID NO: 343382 - DNA, 432 bp, Homo sapiens
agtcagactaccatactttctttgttgagcatagagctggtaaaagctgcaggtgtagaactcagttctggacatatggaactcagttactggacataaacaaacaaaactatcagaactgaaggattgaaattaactgcaaaatgtatgatctgttcaagtattggtggcctctcaaaattttctgtctggtcttactgtaagctggtgatagcatctcagtctctttttcatcttaatatttaatatgtcaaaagcaaaaccctagtgttttttcctcttaatttgtatyttctaattataggtgatatcacctttataaagaagaactctacttggcaataaacattagaatattgtgattatatatatatatatatatatatcacggttactgtgtatacatatatactatatatgcatatatatagt

SEQ ID NO: 343383 - DNA, 572 bp, Homo sapiens
actctcctaattactatttacctgtattttcatatgttcctaacatcccttatgtaatatatgctacttagtgctttaaaatcyccagtcctttatctaaaaaagattttttgacaggttcctgccctattgcctaggctgtagtgcactggcgtggtcttgacccactacaacctctgcctcctggcctcaagggatcctcctacctcagccccccgagtagctgggactacaagcacacaccaccaagtccggctaattttttgtgttttttatagagatgggctttgtcaagctgcgcagactgctcttgaacctctgggttcaaatgacatgcccacctcagcctctcaaaatgctgggactgcaggcataagccaccacacctggtcccgttaactaaaaattgatgagttcttcaggaagaaccattgaacaaaatgtgcattcagcaataaaactgcaaaagaatataatcccacagtttttagtgatggtgctctctgtatgtttcagttcatgggtcattctgactcagagttagcaagctcttatgaactcctaaatgaatg

SEQ ID NO: 343384 - DNA, 452 bp, Homo sapiens
tctgcatggccaattcattgtacatgaaactgactaatgaatggactctttttaaaagaacacaataagcatgtattttctatttctcmgttactttttttaaaattggaaattaatgtgggattttattcatatccttctatttttcttttcctttagctaatattaattttttgtctcctagatgacaggcagtcatatattgtaggtatcacaatgaacaaaagacagtgagacaatttgtaagctttaatgaagcttatagtctttatcagtcagggtcttagcaaataacagatggcatactgaaaagttactactactcctaggcctaaagggtcaaggggaggaaatcctttctggaacccacagtgaaagttctatctgtatgaaagttttgaccacaggagctattaacagatagacaaatcagcccagacaacttgcagcct

SEQ ID NO: 343385 - DNA, 452 bp, Homo sapiens
tctgcatggccaattcattgtacatgaaactgactaatgaatggactctttttaaaagaacacaataagcatgtattttctatttctccgttactttttttaaaattggaaattaatgtgggattttattcatatccttctatttttcttttcctttagctaatattaattttttgwctcctagatgacaggcagtcatatattgtaggtatcacaatgaacaaaagacagtgagacaatttgtaagctttaatgaagcttatagtctttatcagtcagggtcttagcaaataacagatggcatactgaaaagttactactactcctaggcctaaagggtcaaggggaggaaatcctttctggaacccacagtgaaagttctatctgtatgaaagttttgaccacaggagctattaacagatagacaaatcagcccagacaacttgcagcct

SEQ ID NO: 343386 - DNA, 452 bp, Homo sapiens
tctgcatggccaattcattgtacatgaaactgactaatgaatggactctttttaaaagaacacaataagcatgtattttctatttctccgttactttttttaaaattggaaattaatgtgggattttattcatatccttctatttttcttttcctttagctaatattaattttttgtctcctagatgacaggcagtcatatattgtaggtatcacaatgaacaaaagacagtgagacaatttgtaagctttaatgaagcttatagtctttatcagtcagggtcttagcaaataacagatggcatactgaaaagttactactactcctaggcctaaagkgtcaaggggaggaaatcctttctggaacccacagtgaaagttctatctgtatgaaagttttgaccacaggagctattaacagatagacaaatcagcccagacaacttgcagcct

SEQ ID NO: 343387 - DNA, 312 bp, Homo sapiens
tcaattcatattcagtaattttaaaaagcattttattatgcaaatttttgaattccatatgaaagtaaagagaacagtaattagttgcgatgtatccatcacgtacagtcaacaaccatcattactttggaatattgagrcttctatcgcccaactactctttttaattttatttgagaggggtttataaaatattacagcattatgttattttaccagaaaatacttaaatacacatctctgacaataatattttaaatagattttacatatcaccatgtcactggcatacttaataacattaacctatta

SEQ ID NO: 343388 - DNA, 312 bp, Homo sapiens
tcaattcatattcagtaattttaaaaagcattttattatgcaaatttttgaattccatatgaaagtaaagagaacagtaattagttgcgatgtatccatcacgtacagtcaacaaccatcattactttggaatattgagacttctatcgcccaactactctttttaattttrtttgagaggggtttataaaatattacagcattatgttattttaccagaaaatacttaaatacacatctctgacaataatattttaaatagattttacatatcaccatgtcactggcatacttaataacattaacctatta

SEQ ID NO: 343389 - DNA, 649 bp, Homo sapiens
ctccaacagtaaatccgttcacagaggctggaacttccacagtcacaccatgggcccaggctgtatctccagcagtaattccacggacacagcctatactttccacagtcgtaccttggacccaggttgaatgtccatcagtaaatacctggagaacgtccatagctgatgccatcacactgtggataggggctgaattaaccgcaggatatcratggatactgccttgggctgctactgtcacactgtggtcacagtctgaatctccagcaggaaatctttggacacagtctgtgtatgacacagacacaccatggcctcaggctgaatctccagcagtagtttgctggacagaacatgtagctgatacacaccgtggactcagtttgaatttttaacagtaaagccttggatccaatctgtatctgatacgctcataccatggacccaggctgagtcttcagcactaaagcatttgacacaggcaatagcttatacaatcaagctgtggaaccaagtcaaatcacctgccataaatctctggaaacaatatgaaacgaatatgttcacatggtgtactgaggttgaatctccaaaagtaaaggaggggacacatcctatacctgctacagttataccactgaaccaa

SEQ ID NO: 343390 - DNA, 568 bp, Homo sapiens
ccctggctgtggtccgagtggggcttattgacctccaggatcctgcccaagctgagattgtaacctttgagcatgccatgccctatttaggtcccaagggacctctaggacctgggttgatcttcctgaagcaaccactacattttcaacccaggttccttcctatacgcctggagcaatgtctggaacaagagaaaatatacaactatatgactgttggctaygtagttggtcccttatgagggggtgactaaagaagaagacactggaatgaaagagaagcatgtttaggaagagaatagtatcctctcatgaataataaaagatttgtctttcccttcaccatacttctccctctaatgtgggctaaaatttgaagacaaacacaaacacctcttctctgttttctatcagaaagtcctggaattgtgcaaaaacggcacctgagcatcctacaagtcagcacttgtgcccaattttggctcaagctgaatgaactcactttctgggtggaggccaagaaagccatgtggatggctgactatcaggtgacaaattcatggggtat

SEQ ID NO: 343391 - DNA, 357 bp, Homo sapiens
tggatgatatattgtaaaaaaaatacatgccacattcttccatagaatgtgtgatgggttaatcttttttgtttgaggtgtttttttttttaataattgaggagttttcaaggaatttgaataatagaatttgtgtttgatcccttaatggaaggcgtgtgttcagtwaatgtctcaaatttggtattgtgaaagacgtgttcattttaggaggaaaaaaatttgctttgggagaaaatatctagaattgaactatagttgatgtagaaatgtttgtaaaatgtgcttaggtttaatcttgccaacgttattgatagtactcttaatacttttagtctttggatggaaaagaaataa

SEQ ID NO: 343392 - DNA, 357 bp, Homo sapiens
tggatgatatattgtaaaaaaaatacatgccacattcttccatagaatgtgtgatgggttaatcttttttgtttgaggtgtttttttttttaataattgaggagttttcaaggaatttgaataatagaatttgtgtttgatcccttaatggaaggcgtgtgttcagttaatgtctcaaatttggtattgtgaaagacgtgttcattttaggaggaaaaaaatttgctttgggagaaaatatctagaattgaactatagttgatgtaraaatgtttgtaaaatgtgcttaggtttaatcttgccaacgttattgatagtactcttaatacttttagtctttggatggaaaagaaataa

SEQ ID NO: 343393 - DNA, 575 bp, Homo sapiens
ggtatttatgagtgatttacacagtagaaatgaggggtcaatttctacataaaaaagaaaaacaaactatgtatttaaaaatatatatatatattggatgggggtgggcgaggtgggtcacgcctgtcatctcagcacttggggagtatggggtgggtggaccasgaggtcaggagttccagaccagcctggcaaccatggtgcaaactgtctgtcctaaaaatacaaaaaattagcttggcatggtggcacatacttctaatcttagctactcgggaggctgaggcaggagaatcactggaacctgggagggagaagctgcagtgagctgacataatgccattgtactcccacctgggcaatagggcaagagtccatctcaatcaatcaatcaatcaatcaacctattggttaacatattatctattaaccaaccttcaaaaatcgatctttaattttgtgttttaatgaccagatgtgtaattaattggagatgtgtttttaaagttgaaattgcagtgtttgctgcattttacgatgcatagcttcatggtaattttgtctccactgatctt

SEQ ID NO: 343394 - DNA, 655 bp, Homo sapiens
tatttttgagaaggagaattgttaagattgcagacagaacagaagaaagcaagacagtaaataaaagttcttagcaaagaagtttaggcagaacaaattaaaattcttacttagtcctccaccccaatatggaggaaattgaaaactgctgttttcaattttacatttcatatgtagagtatcggtgaaattagatatttattgacttcagcatacataagccaacacatttccattggaaaattagccagtgaacatatcataggtgaaagactgacctctaaggaayagcacataaagagtatattaaaggagaacattttctattttgaaatagcaacaatgtcgtaatgacccctttaacaggattgcttattgcagtaaaagtaaatcttggccatcattagaaagttttcactagtatatttcaatttgtcaacatttaaggtagagccaaccacttagagataaagaagaccttttatgtaaaaatttagcatccaatcattcaaaggtagcatcatttgtgcgtgtgaggtggattgaacaacataggaaaatttaccttcttcagctgagaagggacaatggatgtaaacttaaaaatctgtgaagagtttggtgcttttacatgtcttccctgtatcattggtag

SEQ ID NO: 343395 - DNA, 655 bp, Homo sapiens
tatttttgagaaggagaattgttaagattgcagacagaacagaagaaagcaagacagtaaataaaagttcttagcaaagaagtttaggcagaacaaattaaaattcttacttagtcctccaccccaatatggaggaaattgaaaactgctgttttcaattttacatttcatatgtagagtatcggtgaaattagatatttattgacttcagcatacataagccaacacatttccattggaaaattagccagtgaacatatcataggtgaaagactgacctctaaggaacagcacataaagagtatattaaaggagaacattttctattttgaaatagcaacaatgtcgtaatgacccctttaacaggattgcttattgcagtaaaagtaaatcttggccatcattagaaagttttcactagtatatttcaatttgtcaacatttaaggtagagccaaccacttagagataaagaagaccttttatgtaaaaatttagcatccaatcattcaaaggtagcatcatttgtgygtgtgaggtggattgaacaacataggaaaatttaccttcttcagctgagaagggacaatggatgtaaacttaaaaatctgtgaagagtttggtgcttttacatgtcttccctgtatcattggtag

SEQ ID NO: 343396 - DNA, 674 bp, Homo sapiens
gtttaaacttatgcccacagaaatcatccactttcccgagaatctagggattatgctccactgtctagagactatgcataccatgattatggtcattctagttgggatgaacatttctctagaggatataggtattacaacatttcctggayttgtcaaatagaattcttaaatggttcattctgacattaagaattttttttttcaatttagtgattgtgatggctgtggtgaggtgatgttagagatcattctgaacgtccaagtggaagttcttatagagatgcatttcagagatagggtaagggtccgggatggatttgtaaattatagaattgtgtttaatagaccagatcgttattttaatgaaattctaaggaaaattacgagggacaaatataacatgtctaaatattgagtattcttaacagaagaaagcatagggaatgatatgaaggtgagaacttcagttcacgttcagaaaatgtgactcaacttttactttagaattaaatttgttaagcttcaaaataacttctcttacacttcttattgataaaaccttctgattattgcaggcataattaatatcctgacaaagacagaggaaagtagatatttccaaatagtactttaacttaatcatgctttagtgatagcagtaataatgttta

SEQ ID NO: 343397 - DNA, 562 bp, Homo sapiens
aattcttaaatggttcattctgacattaagaattttttttttcaatttagtgattgtgatggctgtggtgaggtgatgttagagatcattctgaacgtccaagtggaagttcttatagagatgcatttcagagatagggtaagggtccgggatggatttgtaaattatagaattgtgtttaatagaccagatcgttattttaatgaaattctaaggaaaattacgagggacaaatataacatgtctaaatattgagtattcttaacagaagaaagcatagggaatgatatgaaggtgagaacttcagttcacgttcagaaaatgtgactcaacttttactttagaattaaatttgttaagcttcaaaataacttctcttacacttcttattrataaaaccttctgattattgcaggcataattaatatcctgacaaagacagaggaaagtagatatttccaaatagtactttaacttaatcatgctttagtgatagcagtaataatgtttaaatatagtccaacatattattttatcaaccctgcagggtcccctgcaggga

SEQ ID NO: 343398 - DNA, 551 bp, Homo sapiens
atcaacacttgttaccttttgacattttgataatggccattacaactagagtaaggttatatctcactgtggttgtgatttgcattttcctgatgattactaatattgagcaccttttcatatacctcttggctatttatatatattttttggagggatgtttattcaagtcttttgcccatttttaaattgtcctatttgtttgcatgctattgagttgtataaattttcaatattgactctttatcatatacatggtttgtgactattttcttccatttcgtggaagaaatattgcctttttattttgttgactgtttccttggtgtgcatatatttttagtttgatgtactttacattgttacactgaaagtctttaatccactttgagttaatttttgtgtgscccgtaaggtaaggatccagtttttctttctttttttctttcgcatttggatatccagtgttcccagcaccagttggaagagactatcctttctccattgtgtcttcttggtgccttagttaaggattaattatacgtgtgggt

SEQ ID NO: 343399 - DNA, 586 bp, Homo sapiens
cccttacatcattttttctactagtttatccccttcagacacgtatattaaccttttccacttcaagttcttgttgcatttctgataagttttatacatattttagttgctatgttgtctggtgcatttaggtttataactatcatcttccttataactatgtgccacttattacttaaaatgttcttctttatyctgtttaatgcttagtcatataagatggaaatttaaaagagtctttcttttacgaaaatgctctgtttatctattcctcacccacatcaacaagataagactttgaaaaatgttttgttctgcaatcttactaaaattatcttgtgttatgcattttctgtttcaagaagccttattttgaatttagattatacattctgagtctcccctcatagatttaactgcatctatgtttcctcgctcacctgcttctttcttttttccatcttgacctctctcctctcatacctttgctattttctcttctctcaagtattttctttaggtaggtggtatactgttttattcttatcctcaagtatctttcatttctttgataggtatagaactg

SEQ ID NO: 343400 - DNA, 578 bp, Homo sapiens
tgacatgtgttcaaggtggtcggtgcagagcttgggtttatacattctagagagacatgagacatcaatcaatatgtataagatgtacactggtttggtccagaaagtcaagacaactcgaagcaggggcttctggtcataggtagataaaagacaaacagttgcattcttttgagtctttggtcatcctttctctgaatacacaatttacatgtgagaggagtatagaataatagtcacttatgccttagactgcctcagtgaatctgcatttttccatgaacaatagggtagaggaagcaatcagatatgcatttgtcttaggtgagyagagggatgattttgagttctgtcctttgtcctgcacctgtgaaaataagctatcaatttacattgccatactgaaattcaaaagaactgttttaggggaatactttgtggacaaattgtgagggaggtatgtagcttatctttgtagctatcttatttcggaataaaatgggaggcaggtttgctgattgcaattccaagcctgactttggcttagtgatttggtggtcccaagatttattttcctt

SEQ ID NO: 343401 - DNA, 525 bp, Homo sapiens
ttatgtactcaactaatagaagatacgagacattttccagtgaaagagtggaaagtctcatatcccagtgaaagagtggctggagccaggcaagtgcaatcagagaaagggcaaagccatcattctttattcaagtcagaggctgaaggaaagytaatgcacagttgctgtgcagtggccaagttagttgaagctgggtgaagtcataacagttagagacctctccccacaacagcattttaaacttccagtaattacaaggctctcacactagagtgttcatatttacttaagaagacactaatgggaaaaatattagcttggctagtaccatctttacaatactgagtaggttaatcaactttagaacgccagcttttcaatttaaaaaatgggaacagtatccttctatgagattgtgaagctcagatggaagaagtaacctacaaactattatactaacaaaccagtctcatttctggctaaatggccaatgaagcaagctggctcaggcaatctgccaag

SEQ ID NO: 343402 - DNA, 525 bp, Homo sapiens
gagctctgtgtaggcagggattgtatcttagttgtctttggaagcttagaattttgcacagtacctgatgtgataaatagctttgggaggatataaaacccaaactgtataaaccccaaaccaccttgtaatcatacaatttactttttgtgtagcatctgctatcacatgctggtagattaggcttccaaccagggggamggattaaccagcagtgggacattagtaactccctgtaggatgcacacatcaccaggattagcccttaacacatgctacaacctggccaaggggaagaagtttaactatctactactcttgtttctgctggatggctcgataccccaaagaacgctatgatgcaaaagtctgctcagcagcaggcagtatcctattaacctaagagggagtggcatttccagatgtagatgcccataaggtcttccttcttgtacagtctacctacctttttagtttttagttttacagattaagaagaaactacagaaccaggtagaaaccaca

SEQ ID NO: 343403 - DNA, 525 bp, Homo sapiens
gagctctgtgtaggcagggattgtatcttagttgtctttggaagcttagaattttgcacagtacctgatgtgataaatagctttgggaggatataaaacccaaactgtataaaccccaaaccaccttgtaatcatacaatttactttttgtgtagcatctgctatcacatgctggtagattaggcttccaaccagggggaaggattaaccagcagtgggacattagtaactccctgtaggatgcacacatcaccaggattagcccttaacacatgctacaacctggccaaggggaagaastttaactatctactactcttgtttctgctggatggctcgataccccaaagaacgctatgatgcaaaagtctgctcagcagcaggcagtatcctattaacctaagagggagtggcatttccagatgtagatgcccataaggtcttccttcttgtacagtctacctacctttttagtttttagttttacagattaagaagaaactacagaaccaggtagaaaccaca

SEQ ID NO: 343404 - DNA, 525 bp, Homo sapiens
gagctctgtgtaggcagggattgtatcttagttgtctttggaagcttagaattttgcacagtacctgatgtgataaatagctttgggaggatataaaacccaaactgtataaaccccaaaccaccttgtaatcatacaatttactttttgtgtagcatctgctatcacatgctggtagattaggcttccaaccagggggaaggattaaccagcagtgggacattagtaactccctgtaggatgcacacatcaccaggattagcccttaacacatgctacaacctggccaaggggaagaagtttaactatctactactcytgtttctgctggatggctcgataccccaaagaacgctatgatgcaaaagtctgctcagcagcaggcagtatcctattaacctaagagggagtggcatttccagatgtagatgcccataaggtcttccttcttgtacagtctacctacctttttagtttttagttttacagattaagaagaaactacagaaccaggtagaaaccaca

SEQ ID NO: 343405 - DNA, 550 bp, Homo sapiens
gagaaaggcaggtgcaggctggcattgagggcrcagatctatgtgcagtgagcacagatgcttctccccacagctgcaggtggaaccacccccagggcatggtggattccacctgccatacacagtgaccgggcggagggcagggggtcaaaaaagtcagtcctggggtagtgagttaagaaaaaggcagagttcttaatggtgcagccactttggaagacagttgggcactttagaatctagttaaaggtgcatttacttatgatctgggaattctacatctaggtattcacccaagagaaaggaaaacacgttggatgaaaatctgtgtgcaaatgtgcacagcacttttattcatactagccccgaattagaaacactcaaatatcaatgaaatgttgaatgaagaaacaaattatgatatccatgcaacagaccactcctcagcagtgaaaaacaaatgaatgcagacacctgtcacaacacgggtgaatctcaaaagcaattatgctaaggaagccagctgcagaaggtaacacactgtacaacc

SEQ ID NO: 343406 - DNA, 632 bp, Homo sapiens
ttacatacctgttatgaacagaatgtctgtgtaccccagaattcatatgttgaaaccttaccccctgatggataaggagctgtggacttcaggaggtaatgaggattagattaagtcataagggcagagctctcatgaatgagattagtgccctcattatagtaacgagagagcttgtttctcctctctgctcttcaccacatgaggytacaacaagaagtcagaagtttgcagcctagaaggtggacctcaccagaaatggaccatgccagcacccagatcttaaactttcccctgaactgtgaaaaataaacttctgtgaagctactcagtctatggtaatttgttacagtagcccaaataagacaataagcccaataagacaagtcctattagaatgcctaaaatacaagataatgaaaacaccacatgttgatgaggacagagggaaactgagtcacatattgctggtgggaatggaaaatggcatagtctttctgggaaacagtgactgtttctttaataaactaaacttccaatcaccacgcaacccagcagttgaattcatagacaagaatcccagagaaatgaaaacttacactcacataccatacttgaatgtttatagaagc

SEQ ID NO: 343407 - DNA, 441 bp, Homo sapiens
tgatgtgtgttcgtacgtaacaagcaacatcatttatctgaactaatataggtctcctatcaaaaagattccaccttatctaaccatggtggagggtagaactgttcattgtcaaaacatgtacaagtcacatgagtcagaagacacraggtaacaagtagttttggccatcacagctataattaggccctttgcagagatggctgcatgaaaccatctataatgtaataatggacacaaattcatcacaggcaagttaccagatacactctagcacagtaaatgaatttaacaggcagccagcttggagttaaaataccatttatactgagagtgaggaaagatgattcagtgtcaatgtcttacaaaggtgagaggttagaagttggaaattacaatccaataagccaaagtctagcaccacataaaatgctgggatta

SEQ ID NO: 343408 - DNA, 441 bp, Homo sapiens
tgatgtgtgttcgtacgtaacaagcaacatcatttatctgaactaatataggtctcctatcaaaaagattccaccttatctaaccatggtggagggtagaactgttcattgtcaaaacatgtacaagtcacatgagtcagaagacacgaggtaacaagtagttttggccatcacagctataattaggccctttgcagagatggctgcatgaaaccatctataatgtaataatggacacaaattcatcacaggcaagttaccagatacactctagcacagtaaatgaatttaacaggcagccagcttggagttaaaataccatttatactgagagtgasgaaagatgattcagtgtcaatgtcttacaaaggtgagaggttagaagttggaaattacaatccaataagccaaagtctagcaccacataaaatgctgggatta

SEQ ID NO: 343409 - DNA, 568 bp, Homo sapiens
attactagtggcacttcatatgtgtcccatagttttatttaaggtttactgtattgcactacccatgaggaaaaatacgtgagagatcactttttcctgtgatccacagtttactggagaaatgagctgctcatgtggagatgattggcatcgcgtggcatttcatgcagctacttgcaatctaccacacttagctcaccataatagcagcagcaggtggctacaaaattattacaacagtacagtatgcaccacagttaatcttacgcagttgtggttgaatgctgtatctttacatttatgtacatttttctggactgtgaatgctgccatgtacagtctataagtatgtgtgtgtataaaagttttgatcaattttaactttttataatttgtgtatattttatagaagaaaataacaaaaaagactagyatctacatattatgcatttatgaccatctaacttttcttaattgttttgatatttctaggctactcagttcatctgtgagttttctcaaattgtcataagtgtccaaaaattattctaaaatattgtaaaaaatt

SEQ ID NO: 343410 - DNA, 606 bp, Homo sapiens
aattttgaacatttaaatgtaattggtaattttctaaacaaatcttagaattgactcaggaagaaatatacctgaatagaagtataaccattaaaggaagtgaaacagtagtttaaaaggaattaatgaatcatcagaggatcaagctcagatggaacagataccctcttgctcgtaaaactgactaaaaatgtacaaataaagatgaggaccctsaaagtacatctgtcaatgtatatttaaaaaagaataacatatttaaataaggtgtattttaggaatataatcaaggttggtttaatattggacatttcatttaggtaaatcattatagtagtagattaaacaaaaaggaacaatacgatcacctctatatgcaaagaaaaataaattctttgaaaacacagtgcatatttataattcaaaatatgaaaattaaaacaagggatagaagagatctatattaatcttctcaaaaaaaaaaaagagataccaaagcatacagaaaacacacttaggcatgaaaatatggaaatattcattttaaattaagaggaagactaaagtgcatgctgtcatggtttctgggctaacattggatggaaa

SEQ ID NO: 343411 - DNA, 470 bp, Homo sapiens
ataccaaggggcacaggacctttaaacttcagcaacagcaaaaacgacagcaaaaacagcagcagcactgatggctaatcacctctagccctggcagacttttgttaaagcaggcatttgagcagcttaacgaaaattcagccttctttctttctctcacytcaccacacactccgctccgactttctctctttcctaacaccccaaatgactaagcattatgtgctttggaaaatcgcagtgcacaaaactccattcttttctcctgtccttgcaccatctgaatcagaggcagcacaggctcattaggctggaaaggcaatctctccggcagcctgaaagggcccttttacatagttttcaattcatctttcagctttattttcccttaatgatggtttttccagactcagttaaatgctaccttgaaacaaaaggaagtactctatctaaaggcccagcaggtggaa

SEQ ID NO: 343412 - DNA, 609 bp, Homo sapiens
ccctgcatcaaagtgcacattcttaacagaacactcactcacaggcctcaaaatcttcatcttcagtaacatcttacgtttagtttatgaataaacaaactttaataaactttaaaaagttgtaggactctattaagctgtctttagtttttattaaaatcaaaattcgatgtaattttatgacattttcccagaagaataaaatgaagatatgcattttgcttatcaaaatcagtttgtggccaccatgagccacaggactctctttagagaatcagcaagacagatacactgagttcacagccagtgatgagttcacagccagtgctgagttcacagccagtgttgagctcacattcyggcatgtgggcgactgcttcagtaaactggagcttttcccactttgtgtgtttaaagcttaggtcaagggttggagactcccagaagcctctatggctgcccacctcttctcttcctcagtctccaatattttgcaatgtttagtatgtttaagatcctttctgggaaacaaaacaaatcaataaggcatttttctgccaacaagctatggactgcagtggctgtttcccacgtacacagcttatcttc

SEQ ID NO: 343413 - DNA, 467 bp, Homo sapiens
tttgaagatctttcacattttcctttttttgagagaaaggagtcttgctctgtcacccaggctggagtgcagtggctcagtctcagctcactgtaaacctgtttcctgggcttaagcaatcctcccactgagcctcccaagtagctgggactacagatgccagccaccactcctggctaatttttgtattttttgtagatggggttttgccatgwtgcccaggctggtctcaaactcctgagcccaagtgatccacccacctcagcctcccaaagtgctgggattacaggcataagccactgtgcctcacattctccttttgatattcagattaagatatctgaagaaaagaagatggaaggcatcaagttctgcctgtggttttgcgatgctaacccccaagaggctgagaaatcctggatgctgagatcaaatattgggtgagtgactgaatttttactttttat

SEQ ID NO: 343414 - DNA, 461 bp, Homo sapiens
aaactgtgactacaagtatttgttttttgtggaatatttgaaaaaaaaaaaaaagaaaaatgtcgttgtcttacagatcacactcacacatatacaaaataccaccttaaaataaacttcgagctgagcatggtggctcctgcctgtaatcctagcactttgggaggccaaggtgggaggattacttgaggccaggagtttgagaccagcctgtgcaacacggtaagactccatctctacaaaaacaaatagcaacgacaacaacaacaacaacaacaacaaaacattaaaaaattagctgagtgtcatagcacacgcctgtagtcctagctacttgagacacagaagcaggaggattgcttgagtccagcaggtcaagactgsagtgaactcctgcctggaccacagagtgagatcctgtctctacaaaacatacacaaatcaactttgttgtatttcat

SEQ ID NO: 343415 - DNA, 582 bp, Homo sapiens
aatgcttttcaacgttattttatttttatttattttttgagacagagtcttgctctgtcggtgaggctggactgcagtggcatgatcttggctcactgcaacctctgtctcctgggctcaagcaattctcttgcctcagcctcctgagtagctgggawtacagacatgtgccaccatgcccagctgatttttgtatttttagtagagacagggtttcaccatggtggccaggctggtctcgaactcctgacctcaggtattccgtctgtctctgcctcctaaagtgctgggattacaggcatgagccaccacacctggatgcttttccatgttattaaacattctttgagacatgcccttgaagagatatgacagtttatttaattaatcccttattatttgacatacagtcttttggtttttttatcgtaataaaatactattgtgtgcatcttggcacaaaaattttcacctgtgtctctgatatttccctgggataaattccgacaagtggaaagcatgaatcatgatcactgagctataaatatgtgtatgaaggacacaaacagatcgatcaaagaa

SEQ ID NO: 343416 - DNA, 582 bp, Homo sapiens
aatgcttttcaacgttattttatttttatttattttttgagacagagtcttgctctgtcggtgaggctggactgcagtggcatgatcttggctcactgcaacctctgtctcctgggctcaagcaattctcttgcctcagcctcctgagtagctgggattacagacatgtgccaccatgcccagctratttttgtatttttagtagagacagggtttcaccatggtggccaggctggtctcgaactcctgacctcaggtattccgtctgtctctgcctcctaaagtgctgggattacaggcatgagccaccacacctggatgcttttccatgttattaaacattctttgagacatgcccttgaagagatatgacagtttatttaattaatcccttattatttgacatacagtcttttggtttttttatcgtaataaaatactattgtgtgcatcttggcacaaaaattttcacctgtgtctctgatatttccctgggataaattccgacaagtggaaagcatgaatcatgatcactgagctataaatatgtgtatgaaggacacaaacagatcgatcaaagaa

SEQ ID NO: 343417 - DNA, 582 bp, Homo sapiens
aatgcttttcaacgttattttatttttatttattttttgagacagagtcttgctctgtcggtgaggctggactgcagtggcatgatcttggctcactgcaacctctgtctcctgggctcaagcaattctcttgcctcagcctcctgagtagctgggattacagacatgtgccaccatgcccagctgatttttgtatttttagtagagacagggtttcaccatggtggccaggctggtctcraactcctgacctcaggtattccgtctgtctctgcctcctaaagtgctgggattacaggcatgagccaccacacctggatgcttttccatgttattaaacattctttgagacatgcccttgaagagatatgacagtttatttaattaatcccttattatttgacatacagtcttttggtttttttatcgtaataaaatactattgtgtgcatcttggcacaaaaattttcacctgtgtctctgatatttccctgggataaattccgacaagtggaaagcatgaatcatgatcactgagctataaatatgtgtatgaaggacacaaacagatcgatcaaagaa

SEQ ID NO: 343418 - DNA, 474 bp, Homo sapiens
aatcccattctttagagtaatatagtctatttgtcatagtggttgcttctgtaatacaaattgattgatatgtgattggtaactatgagactgargtcaatacaatggggaagtagcattagttcagacgtaatctttcccggcatattaactttttgaaataatcagaaacaaacttctcacaacctaagggaaagctttagcactatatgaagatattaggaaaacactgagaatcctgcagaagtgtcctcttattaatgaaaatgagtggcttcaagaacagtttcacattccacagtattaatctgtcagctataacgatgtttgcagaccaagaggctgcaaaaacatttctctttgaatttttttttttttttttttttttgagacagagtctcactttgttgcccaggctggagtgcagtggcacgatctcagctcactgcaacctctgcctcccaggttcaagca

SEQ ID NO: 343419 - DNA, 526 bp, Homo sapiens
ttctgggccctccttttatcattagctttggatttaagctgtttagtgcatcagaatggctgaggctggcatgtgcttggaatatgartatctgccattttcagcttgtagagtgggaagtgactctgcctctttcaagtctcaccaagattctcctaacctaagaagtgagcttagaagctgagcagccaatggccaggtgtagtggctgacacctgtaatcccaacttttgggatgccaaggcgggcggatcacctgaggtcaggagttcgagaccagcctggacaacatgatgaaacccgtctctactgaaaaaaaagaaaaaaaaaaaaagccggatgtggtggcccgcacctgtagtcccagcttctcaggaggatgaggctggagaatcacttgaacccaggagccgcaggttgcagtgagctgagattgtaccactgcactccagcctgggtgacagagcgagactcctgtctcaaaaaaaaaaaaaaaaaaaaaaaagaagctgagcagcaaagggag

SEQ ID NO: 343420 - DNA, 263 bp, Homo sapiens
aggggctccaaatatccacttgcagattcgacagaaagagagattcaaaactgctcaatgataagtccaattctgtgggttgaatccatgcctcccaaagaagtttctcagaatgcttctctgtagtttttatgtgaagagatwtcctttttcacaataggcctcaagctttccacatatccacttgcagattcttcaaaaagagagatacaaaactgctctatcaaaagataggttcgactctgtgagttcaatgcaaacat

SEQ ID NO: 343421 - DNA, 270 bp, Homo sapiens
aatcaaaggaaaggttcaattctgtgtgaccaatgcactcatcacagagaagtttgtctgaatgcttctgtgtagaatggatttgaagataattccttttccaccacagtccgcaaagggctaaaaatatccacttgccgattccacaaaaagagagattcaatactgctcaatcacaagataggttcaacttggtaattkgaaagcacacatgacaaacaatttctgagaatgtttctgtgtagtttttaagggaagatatttgatttt

SEQ ID NO: 343422 - DNA, 270 bp, Homo sapiens
aatcaaaggaaaggttcaattctgtgtgaccaatgcactcatcacagagaagtttgtctgaatgcttctgtgtagaatggatttgaagataattccttttccaccacagtccgcaaagggctaaaaatatccacttgccgattccacaaaaagagagattcaatactgctcaatcacaagataggttcaacttggtaatttgaaagcacacatgacaaacartttctgagaatgtttctgtgtagtttttaagggaagatatttgatttt

SEQ ID NO: 343423 - DNA, 328 bp, Homo sapiens
cttttccaaaacaggcctcaaagctctccaaatatccacctggttattctgcaaaaagagggtttcaatactactcaataaaaaggaagattcaactctgtgtgaggaacgcattcgtcacaaagaagtctctctgaatgcttctgtgtagtttttatatgaagatatttccttttacaccacagggtgcaaagagctccaaacttccacttgcagattctacaaaaagagatattcaaaactgtacaatcaaaagatagtttcaamtctgcgtgttcaatgcacacatcacaaagaactttctctgaatgcctctctgtagtgtttg

SEQ ID NO: 343424 - DNA, 429 bp, Homo sapiens
gtttgtcatgtgtgctttcaaattaccaagttgaacctatcttgtgattgagcagtattgaatctctctttttrtggaatcggcaagtggatatttttagccctttgcggactgtggtggaaaaggaattatcttcaaatccattctacacagaagcattcagacaaacttctctgtgatgagtgcattggtcacacagaattgaacctttcctttgattgagcaattctgaaacactcttttagagggtctgcaagtggacattttagagctttggggcaattgtggaaaagtaaatatcttcacataaaaactacacggaagcattctgagaaacttctttggaggtgtgcattcaactcacagagttgaacctatcttttcattgagcagttttgaatctctctttttgtagactctgcttgcaga

SEQ ID NO: 343425 - DNA, 286 bp, Homo sapiens
gatgtttgcattgaactcacagagtcgaacctatcttttgatagagcagttttgtatctctcttttgaagaatctgcaagtggatatgtggaaagcttgaggcctattgtgaaaaaggaaatctcttcacataaaaactacagagaagcattctgagaaacttctttgggaggcatggattcaacccacagaattggacttatcattgagcagttttgaatctctctttctgtcgaatctgcaagtggatatttggagmcccttgcaacctatggtggaaaaggaa

SEQ ID NO: 343426 - DNA, 315 bp, Homo sapiens
gaagccttctgagaaacatctttgtgaggtttgccttcaactcacagagctggacctctcttttgagtgaccagtyttgaatctctctttttgtacaatctgcaagtggatatttggagcgatttgaggcctacatttgaaaatcaaatatcttcccttaaaaactacacagaaacattctcagaaattgtttgtcatgtgtgctttcaaattaccaagttgaacctatcttgtgattgagcagtattgaatctctctttttgtggaatcggcaagtggatatttttagccctttgcggactgtggtggaaaagg

SEQ ID NO: 343427 - DNA, 315 bp, Homo sapiens
gaagccttctgagaaacatctttgtgaggtttgccttcaactcacagagctggacctctcttttgagtgaccagtcttgaatctctctttttgtacaatmtgcaagtggatatttggagcgatttgaggcctacatttgaaaatcaaatatcttcccttaaaaactacacagaaacattctcagaaattgtttgtcatgtgtgctttcaaattaccaagttgaacctatcttgtgattgagcagtattgaatctctctttttgtggaatcggcaagtggatatttttagccctttgcggactgtggtggaaaagg

SEQ ID NO: 343428 - DNA, 315 bp, Homo sapiens
gaagccttctgagaaacatctttgtgaggtttgccttcaactcacagagctggacctctcttttgagtgaccagtcttgaatctctctttttgtacaatctgcaagtggatatttggagcgatttgaggcctacatttgaaaatcaaatatcttcccttaaaaactacacagaaacattctcagaaattgtttgtcatgtgtgctttcaaattaccaagttgaacctatcttgtgattgagcagtwttgaatctctctttttgtggaatcggcaagtggatatttttagccctttgcggactgtggtggaaaagg

SEQ ID NO: 343429 - DNA, 265 bp, Homo sapiens
gtggtctgtggtggaaaaggaactatactcaaataaaaactacacagaagtattctgagaaacttctttgtgatgtgtgcgttcatctcacagagttgaacctttggtttgattgagcaattttgagacaatctttccatagaatctggaagtgaatatttggagaactttgagatccattttggagaaggagatatcttkatataaaaaccacacagaagcattctgagaaacatctttgtgaggtggacactgaagtcacaga

SEQ ID NO: 343430 - DNA, 329 bp, Homo sapiens
cttttccaaaacaggcctcaaagctctccaaatatccacctggttattctgcaaaaagagggtttcaatactactcaataaaaaggaagattcaactctgtgtgaggaacgcattcrtcacaaagaagtctctctgaatgcttctgtgtagtttttatatgaagatatttccttttacaccacagggtgcaaagagctccaaacttccacttgcagattctacaaaaagagacattcaaaactgtacaatcaaaagagagtttcaactctgcgtgttcaatgcacacatcacaaagaactttctctgaatgcttctctgtagtgtttgt

SEQ ID NO: 343431 - DNA, 329 bp, Homo sapiens
cttttccaaaacaggcctcaaagctctccaaatatccacctggttattctgcaaaaagagggtttcaatactactcaataaaaaggaagattcaactctgtgtgaggaacgcattcatcacaaagaagtctctctgaatgcttctgtgtagtttttatatgaagatatttccttttacaccacagggtgcaaagagctccaaacttccacttgcagattctacaaaaagagayattcaaaactgtacaatcaaaagagagtttcaactctgcgtgttcaatgcacacatcacaaagaactttctctgaatgcttctctgtagtgtttgt

SEQ ID NO: 343432 - DNA, 329 bp, Homo sapiens
cttttccaaaacaggcctcaaagctctccaaatatccacctggttattctgcaaaaagagggtttcaatactactcaataaaaaggaagattcaactctgtgtgaggaacgcattcatcacaaagaagtctctctgaatgcttctgtgtagtttttatatgaagatatttccttttacaccacagggtgcaaagagctccaaacttccacttgcagattctacaaaaagagacattcaaaactgtacaatcaaaagakagtttcaactctgcgtgttcaatgcacacatcacaaagaactttctctgaatgcttctctgtagtgtttgt

SEQ ID NO: 343433 - DNA, 629 bp, Homo sapiens
ctggtgacacaggagccatggggtcatgttccgagcagcagaggcggccttccagtgcagagggaaccagggcccccttttcatgatctttacaaaatgaatgtggacagaattcacagaaggaaacagctgcactgctgcactcatcgcactgatgccacggacactcccactttcctaattcggggagatggggaggaagaaggagaagtgcccaagttagtgcctgtcttgattacccatgaaaaacccaggttccttcttctctcattggagatggaattcaattgaatacaactccaaatttcaaccaaacatagatctgggtgtacagtttaggatggatgtgagctactggccaaaacccaacgccacaggtacccacctaygggaacagtatacaagaaaccaatccttgaggaaccacaaggtatcccaaatgtgtaaggggaaagatttttgccagcgtaatttttcgctattgtttgttctattcaacatttcctatcccatggcatggaatatattgtgagttacacatagttggcaaagacacaaattagggaaagggtcctgaaggtccagcttaccatatggtggctgagtcaggttaaggcataggaggtggt

SEQ ID NO: 343434 - DNA, 629 bp, Homo sapiens
ctggtgacacaggagccatggggtcatgttccgagcagcagaggcggccttccagtgcagagggaaccagggcccccttttcatgatctttacaaaatgaatgtggacagaattcacagaaggaaacagctgcactgctgcactcatcgcactgatgccacggacactcccactttcctaattcggggagatggggaggaagaaggagaagtgcccaagttagtgcctgtcttgattacccatgaaaaacccaggttccttcttctctcattggagatggaattcaattgaatacaactccaaatttcaaccaaacatagatctgggtgtacagtttaggatggatgtgagctactggccaaaacccaacgccacaggtacccacctacgggaacagtatacaagaaaccaatccttgaggaaccacaaggtatcccaaatgtgtaaggggaaagatttttgccagcgtaatttttcgctattgtttgttctattcaacatttcctatcccatggcatggaatatattgtgagttacacatagttggcaaagacacaaattagggaaagrgtcctgaaggtccagcttaccatatggtggctgagtcaggttaaggcataggaggtggt

SEQ ID NO: 343435 - DNA, 619 bp, Homo sapiens
gttaactaacaatttggtgggagactaaataattgtactaatctatccattctaatatgtactttcaagtaaatgaaatcaccacacaaaaacatttctgataaattcatcctctgaacaatgtttctaggctaattttttaaaaaagataaatcwatcaatgaatacttctaattttgctgaaactatacagttttaaataagcaaaaaaaagttgaaaattatcaatcaaagctttagtgctcttattatttaccaacttattcatggtggtgggggatggtgggctgataatagaaaagtttatagaatccttaagccaaatcacagatacagagttgaaaaaaacaaaaacaggaaaagaaatcaagccaggcatggtggctcatgcctgcaatcccagctccttaggaggctgaagtagagggcctgtttgaggccaggcattcaagaccagcctgggtgacacagtaaaactctttctctaaaataaaaaaaagagcaagagggagaaagaaagaaatcatgttacgtgtttcagatgaacaacttgagcctataaatatcaattaagtattcataatgtgctaaatttatagtttaagtcactataacaaat

SEQ ID NO: 343436 - DNA, 599 bp, Homo sapiens
tgtcctcaccctaatctcaccttgaacaatagttcttataatccccacgtgttgtgggtgggaggtaattgaattatgggggttgttacctccatgctgttctcttgatactgagtgagttctcataagatctgatggttttataaggggctttttccccacttcacttagctctcattcttctccttcctgctgccatgtgaagaagaacacgtttgcttcccattctgccatgattgtaagtttgctgaagcctccccagccatgctgttactgtgagtcaattaaacctctttcctttataaattacccagtctcaggtatgtctttattagcagcgtgaaaatagactaatacaataccttacatcaaatsatacacaaaagcccaatgttattcaagacctaagctcaaaaatgaaactttaaaactcttagaagaaagtataggagaatatatttttcaccttgggaatacagaaagcttttcaaaagaaagcacgaaacatgcaaagtaaagaaaaagattaataattttcactatgccaaatcataacttttatctgacaattgaaatgataagccataactggtgagaat

SEQ ID NO: 343437 - DNA, 639 bp, Homo sapiens
ggagaaggtttaggtctgctagcttctgactgcctggatttcaaagccaagttatcttgcttttcaagtaggggagtctctctttctgtctctctctctctcacacacacacccccctccaatgcctcaggaaaggacaaaatcaaaacaatgagaggagaataataaaaatacatagattaggaaaagaataatggtctctatttccccatctctaattgagggctggactacaggctctgcagttgtgattttaagtacccaacgttctgaacaatgacacaacagtctgccacttttacctcacgacaggagagcagagggaagctaagagaaccttctgccaagctagaaaatgtatagccaggcagtggttggcaatggagggaaccctgacttggggatgaatgacggtccccataaggcacctgcaaacgtaagctgtaacccttagagaacccagaaaatgatatctcccctggaacgtttgcgttctgctcggctatgtctccaaagcttcagatctccttccctgaccttgcgtttcctatttcttccctctaagccaagctcagcawgtccctattgttatcaaatcacatctgccatcacttgctgtagctgtcgcactgcctgaaa

SEQ ID NO: 343438 - DNA, 634 bp, Homo sapiens
acttttctattgctagactaattttcaatctatttaaaaataaatcaaaacattattatattttctaaaggcatctggtatctatgaaaaaatatatacagtttttatatagacatgttcagatcaaaatttttattgcatttgggcaaaagtgattgaaaaaagtgaagagaaaaatagttggtataatttgatgttttttaaaaagtttaaataattgaaagatacctggaatgaatttctgagtataaaaataagtgacatgttagttaatgttataaaaggggtaatcactactcattttatctccagtatcrcaaataatttaagctctgattttttaagtaaaaaatatctgtattttttaatacagatatgaaatgctgaaaattgtataaatatgcatgttatgttgctctaaattaaatagtaattgatattattttaagaaatttaagaaatttctgagaataaaattagccagtgttgagcagcttattctctttgttcatctgtaatcaaattccttttttctaaaaaattaatcacatgtcctttttctatgttttcatccattagtgtgaattcagatgtaagctgctttcaatcttcccaagtttcaaccataatttta

SEQ ID NO: 343439 - DNA, 619 bp, Homo sapiens
tgctttggcagccattatctaaaatgtataactatttcttttcaacttcttagagaaattacaagttcaaataaagttactagatgtaaatgactactgttttcaaaactctctgtgcacagtttttttttttttcaagtagagacctttaaaaccactttgatattatcaaaagtccaagcttagccacatattttattttcacatttggactcttctcatgaatgtgtcttgcccaagacaaaatatagctgcatatatagaaactaagtttgtatctctgcttaartaaccaagatgtgttgcatttgaaacagcaaaaacaaaccaacattttcattccaattgctctttgaacaatcattattatttatttttttttaaatggagtctcgctctgtcacccaggctggagtacagtggcacaatcttgtctcactggaacctctgcctcccaggttcaagcgattctcctgcctcagactcccaagtagctgggattacaggcatgcaccaccatgcctggctaattttttaattttaggtagagacagggtttcattatgttagccagtctgatcttgaactcctaaattcaggtgatctgcctgtgtcagcc

SEQ ID NO: 343440 - DNA, 619 bp, Homo sapiens
tgctttggcagccattatctaaaatgtataactatttcttttcaacttcttagagaaattacaagttcaaataaagttactagatgtaaatgactactgttttcaaaactctctgtgcacagtttttttttttttcaagtagagacctttaaaaccactttgatattatcaaaagtccaagcttagccacatattttattttcacatttggactcttctcatgaatgtgtcttgcccaagacaaaatatagctgcatatatagaaactaagtttgtatctctgcttaaataaccaagatgtgttgcatttgaaacagcaaaaacaaaccaacattttcattccaattgctctttgaacaatcattattatttatttttttttaaawggagtctcgctctgtcacccaggctggagtacagtggcacaatcttgtctcactggaacctctgcctcccaggttcaagcgattctcctgcctcagactcccaagtagctgggattacaggcatgcaccaccatgcctggctaattttttaattttaggtagagacagggtttcattatgttagccagtctgatcttgaactcctaaattcaggtgatctgcctgtgtcagcc

SEQ ID NO: 343441 - DNA, 619 bp, Homo sapiens
tgctttggcagccattatctaaaatgtataactatttcttttcaacttcttagagaaattacaagttcaaataaagttactagatgtaaatgactactgttttcaaaactctctgtgcacagtttttttttttttcaagtagagacctttaaaaccactttgatattatcaaaagtccaagcttagccacatattttattttcacatttggactcttctcatgaatgtgtcttgcccaagacaaaatatagctgcatatatagaaactaagtttgtatctctgcttaaataaccaagatgtgttgcatttgaaacagcaaaaacaaaccaacattttcattccaattgctctttgaacaatcattattatttatttttttttaaatggagtctcgctctgtcacccaggctggagtacagtggcacratcttgtctcactggaacctctgcctcccaggttcaagcgattctcctgcctcagactcccaagtagctgggattacaggcatgcaccaccatgcctggctaattttttaattttaggtagagacagggtttcattatgttagccagtctgatcttgaactcctaaattcaggtgatctgcctgtgtcagcc

SEQ ID NO: 343442 - DNA, 608 bp, Homo sapiens
cacattccagcctcaatccttctctcctacatttgcctctgcctggaattcctcttttcactttgctttcctaagctgcctattctaagccagaaataatcaaccaccctatacctttgtaattttatataacacaaaacattacaatttattataacatataacatattattgtggttatttttgtttgcttctctatattccagcctaagacatccagctctgatgtggtttggctgtgtccacacccaaatctcatcttgaattgtagctcccataattccygtgtgtcacaggagggacctggtgggaggtaattgaatcatgggggcggctctttcccatgctgttctcatgaaagtgaataagtctcacaagatctgaaggttttataaagaggaattcccctacacatattctcttgcctgccgccatgtaagaacgtggctttgcttctccttcaccttccactatgattgtgaggcctctccaggcatgtggaactgtgagtcaattaaaccactttcctttataaattacccagtctcagatatgtctttattagcagcgtgtaagcagactaatacaagttctctcaagacacggac

SEQ ID NO: 343443 - DNA, 488 bp, Homo sapiens
ggtgggggagggaagaagccggagccgccgcaagccacacggtgagggcgcggggaaggggagggagcggggcggcgtcgtgtgtggggccgggggaagcggccaagggtggggaaggcgggagctgaagcccaagtttggcgtgtcgttctagtgtgtcttttcccgggacttcgggccgaggcccgccctgcctgagargccctctggggcagctggggttacctgcggggcaggggcgggagtggggtgcacggcggggcgggcggcttgagggcgcccggagctgcggccgattccagcagctgggaggcggggaaagacggggaccgggtgccgagagagctttcgctggggacccgctaggccttgtgacccactttattcctgtcaccactcgggcacgtttggagcagcgcccaatgccgcggggcggccagctcctccggggaacccccgccctcccggcgcccggcccgcgtgcgcag

SEQ ID NO: 343444 - DNA, 516 bp, Homo sapiens
ctttgtctggttgcagtatcaggataatacttgaaatgttcccttctcttctgttttttagaagagactatgtagattagactctgcagtgaaaccaactgggcctagagatatctttttggggagtttcagaattacaaaatcaatttgcttaatggttatgggatagtagtagyagaatgttggctttttcattactctcatacattgctggtgggagtataaattgatataaactttatagagaacattatgtcaatacccttaacaaaattacaaatgtttttaccctttggtacagaaatataggggttataaccagcattttaaaaatgaaacatggtggggggtggggagtcggatcgcaggacacctagttatggtaaagggtatttcctgaaactgttgtttcagatatgtgtgtatgagtgtactaggtcataacataaaatatatttcttactatgagttgtggtcatagaagtttgggagctattgtttcagctttaaaaggat

SEQ ID NO: 343445 - DNA, 520 bp, Homo sapiens
accgtttcataattaaaaacaaaaactcaaccggctgtgataagtccacatctaatatcgtatttcatggtcaaagactaaatgctttttcctcctttcagcttgtaaatctctttagttccactgttcttgcaccattattgagttgtgtgggggctttactaaatctgtgtatccatattttcaagagaagagaggtgagaaggtgtgttccatccttatgcccctgggagtgtttctattgcttcctgctatgaaattctttrggcctaagaaacttgcatgataaagatgatttttttcctcatatcagtaaaaaaatgtagagctgtcttaaaataaccccaaaacaaaattaaactatagaaaactccatgtataaccctgaatgtggaattaaatttgtgttatctgagctggttctacctctcctggacaaccgttaaagtttaaacctgtagttttgcaaaaactctgtatcttttgtagagcactctgtactcagctgccttgcttgtta

SEQ ID NO: 343446 - DNA, 528 bp, Homo sapiens
tttcagttcttttcctgtattaccttacttaatatttataaaactgtatgttatagaaataattactacttccattttaatgatgaggacactaaggcagagaacgtaagtaaattgtccaatgttatgctcgttgtaaaggagagagtagagattttgagtccttggtatttactaggatgctatctaactagggaaaaatttcttcctgctcccagtggatcacatcacactggtatatgttttcatattttcctattttatttcctcctggcactgagtatagttcataataatactttcatttgggagttggttcaccaatagtagtttatcaaatgatccctggagtcagacaacctgggtttgaaatatgaccccactacctactgaatgagttgggcaagttattctatgatcagcttgttatttgtaaartattgatgataatatcacctgaggcatagtgttattgttacagctaagataatatatgtctaacagtccagctatagggaccaagatcct

SEQ ID NO: 343447 - DNA, 595 bp, Homo sapiens
actattatgtaagaagtattaaaatacatcagaaattttaatccacatattcaagaaagtcaagtaaggcaatgcatctgattctttcagactcataagagacatgtagccttcttgagttcatttattttttaatacctaaaaatgaatgttcagaacatccttcctttcttttgctaatagccttcttatatgaactctttccttaatttctactttagcccatgcagaaaggagctagaatcattgtcagcatcttctctgatatgtagaagcttctgtacactgaccttgctgcatgtcacttggttctcactgctaggtgtttatcagggaagaaaaccagtgcttaaataccaycctgtagcattagtaagcccaaataagaaagtgaaggaggacactctccttccactcccacattttattttcctgaaacatgatatttctcttttgtatttttcccctggacatgcctcttacacttaatttgtttctcataattattatgtaataaggttatctgacacatttaataaattcttaagttacaaataaattatacatttaggaaaacataaacaaagacatcatt

SEQ ID NO: 343448 - DNA, 485 bp, Homo sapiens
cacagtatatggtaaatgcaataaaaacagatggacctagggacagctggagtctgagaagaaaaaatgaaaataacaacaagagcaacagaaacaataatctggcaattgttatcaatgtatttctcatctttcattggattagggagtagtatagcagggcttttcagcatcaaatcactggcagttgaattacaaataggagataaattgcacagacttctcaaattagtaacccaactaaaataacaaggagcaataatatataatcccaggtatctttataataaacaagacccaagtcttccagggccagctgccaaatttcctcaatagtcttaccttctctgaattcactttctgttgtagtctttcattaaattstatagatcctttctggaatttgattctctaattacagaattttcccatttccatggccaaaaattagcctactcattatttcaaacaagagttattacaaa

SEQ ID NO: 343449 - DNA, 523 bp, Homo sapiens
cattgctggtggaaatgcaaactagtacagccactatggaaaacagtgtagagattccttaaagaactaaaagtaaaaactaccatttgatccagcaatcccactactgggcatctacccagaggaaaagaagtcattattcaaaaaagtcacttgcaaatgcatgtttatagcagcaccattcacaattgcaaaattgtgtaaccaacccaaatccccatcaatcaacaagtggataaagaaaccgtggtatatatatacaatggaatagtatgcagccataaaaaggaatgagtggccaggagcagtggctcatgcctgtaattccagcactttgggaggccgaggcaggtggatcacgaggtcaggagatcgagaccatcctggctaacacggtgaaaccccgtctctattaaaaatacaaaaaataagccgggcrcggcagcgggtgcctgtagtctcagctacttgagaggctgaggcaggagaatggcgtgaacccgggaggcggagcttgcagtga

SEQ ID NO: 343450 - DNA, 519 bp, Homo sapiens
gttaggacttcaacatttaaattttgtagaaacacaattaaatcctttccagggaatattctgcctggcttttcttttgtttttgttttttgaagcttcagtgtggggtgacatcatggagacacaacaatagaaaatattcgtggtagaaaaggagatatctatgggaagttgatatagtttggttctgtgtccccacacaaatctcatgttgaaatgtaattcccaatgttggraaagggacctgatgagagatgattggatcatgggggtagattctgcccttgctgtctttctgatagtgagtgagttctcaccagatctgatggtttaaaagtgtgtagcacttccccctttacactctctcctgctccaccatggtaagatgtgcttccttccctttcaccttctgccatgattgagcttcccaaggcctcccagccatgcttcctgttaagactcctgaactgtgagttaattaaacctctttttttcctaaattacccagtcgcaggcagt

SEQ ID NO: 343451 - DNA, 519 bp, Homo sapiens
gttaggacttcaacatttaaattttgtagaaacacaattaaatcctttccagggaatattctgcctggcttttcttttgtttttgttttttgaagcttcagtgtggggtgacatcatggagacacaacaatagaaaatattcgtggtagaaaaggagatatctatgggaagttgatatagtttggttctgtgtccccacacaaatctcatgttgaaatgtaattcccaatgttgggaaagggacctgatgagagatgattggatcatgggggtagattctgcccttgctgtctttctgatagtgagtgagttctcaccagatctgatggtttaaaagtgtgtagcacttccccctttacactctctcctgctccaccatggtaagatgtgcttccttccctttcaccttctgccatgattgagcttcccaaggcctcccagccatrcttcctgttaagactcctgaactgtgagttaattaaacctctttttttcctaaattacccagtcgcaggcagt

SEQ ID NO: 343452 - DNA, 504 bp, Homo sapiens
gtttgccctgaagaagacaatcacaattaggtgtattaattcttgttattatatttagtgatcctaaaggagttccagaatacccacctattttaaaaagaaaattatatgaatccaagtgacaagaacattagtcagaagcaaatgtgaaatagtagtttctattggcagggattcagaaaatagatgccaatgtttctcaaccttaattgtagtgaaaaagataaataaccacgcaaaaattctagcagaaggagtagcatattgtatctgcccaatccttatgacataagctataattatttgtccaaatcatcaactttgaagatcagrtttttagggtacaagatattattagtgaacgtcccataatacatctatggcagaaacctctccatatagaatggcatactgtgctcacaaaataaaaaggtgcttctgagggtaaaacataataatgctgactggaaatgttacctaaaaattaagagttttaggattttt

SEQ ID NO: 343453 - DNA, 591 bp, Homo sapiens
ttcctacaatcctagagcttcatttcatcacactctatttaaaattctaagtcctgttttattttttaaaacattatacagtagttccctctgagccatggggaatatgctctgagaaccccagtggatgcctgaaactgttgatagtgccaaaccctatatatactatgttcttttggtagaacagaggatactagaggttgagaagagtagggggaagaaatgacagctagataggagaaataaattccagtgtcactaccactgtaggatgactataattaataataagacattatgtagtttcaaatggctagaaggagcactgtgaattttcccaacggcaaaaaaataaacgtttaggatgacggatatgctgattattgattaccctgatctaattactatagattatatgtgtcaaaatgtcactatatgtcctgttaataggtacatacagttattatcrtatgccaatttaaaacttaaatgtaaaagaagaggagaaacacagattaccacgttttaattataataggtcattctgccactgactgaagaaggaatagaggtactataaagaggaacaat

SEQ ID NO: 343454 - DNA, 569 bp, Homo sapiens
ataattgttgcaaaaacacagaggaagatrtgactgggattggaaataatgagactatgtgaatggagacagttggagataggactgaaattatagactggagtcagattgcagagaattttgaaagcctgacaacgctggtgacatgagaactttttatttgattataccttattttgtaagcaaggagaaaatgcactatttagagcatgagatttgggtttcagtcccaaccctttacttaccagctgtgtaatttgacaatctacttaatatgtatttacctattttcttcattgaaaatacagaaaatgacatcattgggatgatacaagaactaaatgaatattcaataagatgaagattaaaaatatttagcttagagattggcatataaaaccttaataaatattattaatattaataaagtcattttacatcagcatgtggaatatttatatatacagtatagagggcttaaaatcagtaattgaagccactgtagaaaataagaagtgacgagaacttgagtaatggctattggagtataaaggagggcaataatattc

SEQ ID NO: 343455 - DNA, 569 bp, Homo sapiens
ataattgttgcaaaaacacagaggaagatatgactgggattggaaataatgagactatgtgaatggagacagttggagataggactgaaattatagactggagtcagattgcagagaaytttgaaagcctgacaacgctggtgacatgagaactttttatttgattataccttattttgtaagcaaggagaaaatgcactatttagagcatgagatttgggtttcagtcccaaccctttacttaccagctgtgtaatttgacaatctacttaatatgtatttacctattttcttcattgaaaatacagaaaatgacatcattgggatgatacaagaactaaatgaatattcaataagatgaagattaaaaatatttagcttagagattggcatataaaaccttaataaatattattaatattaataaagtcattttacatcagcatgtggaatatttatatatacagtatagagggcttaaaatcagtaattgaagccactgtagaaaataagaagtgacgagaacttgagtaatggctattggagtataaaggagggcaataatattc

SEQ ID NO: 343456 - DNA, 569 bp, Homo sapiens
ataattgttgcaaaaacacagaggaagatatgactgggattggaaataatgagactatgtgaatggagacagttggagataggactgaaattatagactggagtcagattgcagagaattttgaaagcctgacaacgctggtgacatgagaactttttatttgattataccttattttgtaagcaaggagaaaatgcactatttagagcatgagatttgggtttcagtcccaaccctttacttaccagctgtgtaatttgacaatctacttaatatgtatttacctattttcttcattgaaaatacagaaaatgacatcattgggatgatacaagaactaaatgaatattcaataagatgaagattaaaaatatttagcttagagattggcatataaaamcttaataaatattattaatattaataaagtcattttacatcagcatgtggaatatttatatatacagtatagagggcttaaaatcagtaattgaagccactgtagaaaataagaagtgacgagaacttgagtaatggctattggagtataaaggagggcaataatattc

SEQ ID NO: 343457 - DNA, 527 bp, Homo sapiens
acattagtatcatacaattatttgttaagttatgggcctatatttgatacattgttattagctaaagtccatagttcagattctttatgtaattcgttattgttgttgttgttgttccaggacctcatccagaatactaccttatatttasttgtcatctccctttagattcctcttgcctgtgacagtttctgagactttccttgtttctaatgacctcggtatgcattttgtaggacgcccctctctaaaaaattcacctgatgtttttctcacgattagacagaggttatgaattggaggaaagaagatcccagaagtaaagtgccattttcacctacatgatgtatgactcttgataatgaccctcatcaccttgctgagatactgtttgttatctttctatactctgaagtgacacttcccctctccctttctacactttattctttggaaaaaagtcactgtgcacagttcacgtttaagaagagtgtattcatattacctcttctagagaggtaattatc

SEQ ID NO: 343458 - DNA, 527 bp, Homo sapiens
acattagtatcatacaattatttgttaagttatgggcctatatttgatacattgttattagctaaagtccatagttcagattctttatgtaattcgttattgttgttgttgttgttccaggacctcatccagaatactaccttatatttacttgtcatctccctttagattcctcttgcctgtgacagtttctkagactttccttgtttctaatgacctcggtatgcattttgtaggacgcccctctctaaaaaattcacctgatgtttttctcacgattagacagaggttatgaattggaggaaagaagatcccagaagtaaagtgccattttcacctacatgatgtatgactcttgataatgaccctcatcaccttgctgagatactgtttgttatctttctatactctgaagtgacacttcccctctccctttctacactttattctttggaaaaaagtcactgtgcacagttcacgtttaagaagagtgtattcatattacctcttctagagaggtaattatc

SEQ ID NO: 343459 - DNA, 609 bp, Homo sapiens
tccttgcatatcacaggtagggatgtatcaaatctgaactctttatcatagcaaaatttgtgactaatggacaaaagttatcactattggaggtaaaaatattttataaacataaaataataaaatataacaataaaaatcacaagaaagatgaactcaggaggatatttgttctagatgtctgtcttgctagtgattatccatttaggtagggtctccatatttaatcttgcacttctttgtagacttgcacatcatcaacttaatcgtatgttatgcaagaagaaattcctttttttgcttctatagcaaagtgtaccttcctrctttatttcttaagaccttagatacaaaaccttgtctgaaatattaaaagacctagccttagtagtatctctgataatagtgtatttagtattcactgaacactcagtatccaatatttaaaatcaggtagtcatataacattatcttttaaggcccttcaaggtagaaatattcgataccaagatattttttttctttctagattaagtaacatatcctaagatgaatgtatgcatacttacacaaaccttgagggtatacattaaggaagcagctattata

SEQ ID NO: 343460 - DNA, 558 bp, Homo sapiens
cagttgttgagtgatctttggcaaattatttaacctccttgtgcctcatatcccatatgtataaaatcaataatacaatgttaccaaacatatcacattgtgtacatgaaatatatacagttatttgtatatcagttgtacttcaataaagctggtaaaaaattcagccacataaaatgtgtactccaataaaaagtggtaccacctgcagagatccatgggattaaatttgcttgcctgtgtacatgggcagcatttaaatcaaaatggcattattaaatactcaatgagttttagttattagttttcctttaggatgtgttctcacttcatgcaaattgatgtgaattagatttacctcatcagttcccaagacatgcctagatatgtctaaacagtaggtttggacacatacatcactgactcttccagcacctagcagctagcatatattaaatgctcagaatatgtatgccaaataaatgataggtacagatatgcagaaggcataaataggtgtagaaagattatatgtcamtaatacactaatatgtcatt

SEQ ID NO: 343461 - DNA, 431 bp, Homo sapiens
agaaaaaattcccatctccctgctacagagcacctgggggaaggggcagctgtgggcacagcttcagcagacttaaatgattctgcgtgcctgctctgaagagagcagcagatcttccagcacagctcttgagctctgytaagggacagactgcctcctcaagtgggtccctgacctctgtatctcttaactgggagacacctctcagcagggatcaacagacacctcatacaggaaagttccggctggcatcaggagggtgcccctctgggacgaagcttccagaggaaggaacaggcagcaatctgctgttctacagcctccgctggtgatacccaggcaaacagggtttggagtggacctccagcaaataccagcagagctgtggaagaggggcctgactgttagaaggaaaactgacaaacagaaag

SEQ ID NO: 343462 - DNA, 567 bp, Homo sapiens
gtatacatatgtaagttatgttatacatttacataattatatacatagttacatacacatatatagttaaatgttttccaaaatttattttactgtcttttttcaaactttatttttctagttttgtttttctacctactgctttagaagctgtacttgagtttctttctgttcctgtagtagttactcttaaaattccattaacaacttaatgatttctaaaattatttgctatcttagcaaatttcctggaaaatacaaggacwacaaaagaatgcaaataatgccatctgcctcctcctgacctaaataggacattttttatattttagttctgcaattaatattaatgtcacaaattatatattatgattattttataaaaacataattacttttaaatttgcatacctatatgactatttctttgcttaccatttgttctttcatcttaggtcatccttctgtgatacttatttttttttctctttcttaaaatgcatctttttagttaaatttcttttgaaaagtattttggtggctaattctcttcattttcaattatca

SEQ ID NO: 343463 - DNA, 539 bp, Homo sapiens
tcacagggccgattatcagatttttccctaaggctaccctagtttgtgagtagttttctactaagttatttttctagttcactgtttcttttcttgttccatttaattttttcttttatgactggggtttcttcagaatatatactttgcaattctaggaaagaagtagaaaatatatatatatatgtttttttttttttcacatacacacacacacacacacacacatattttcagatcaggaaactgacacagagtttcagtaatttatcccacattacacagaaaatgatagagaccggaataaatgcaggtctgactcgggagcccacacacccactgaaacattttgcacactgctaaaatgcttcattgttaacttgcagtagctctttaattcctgaaagamcaccacgtgatcatgttgagaggtgaagccagctggacttcctgggtcaagtggggacttggagaacatttctgtcttacaagaggattgtaaaatgcaccaatcagcgctttgtaaaatgcaccaatca

SEQ ID NO: 343464 - DNA, 600 bp, Homo sapiens
tacccattttgactcccctttttaatttccataatttcaactgaaagacagtccaattcaggctaaaaatggaactgtagtagctgtttacttaaactttctcctcctctctcacttttaaggcatcaaactctaaataaaaacaaaaacaaaaacactacaacatgaggactaccattcatgactttctgatttttgcgaaatcacttagctcctctatggctcaatttcttcattaatgaaattagctaattttacctactctaacagtcttaaaagagaaattacaatgaaaaaatgttagctgcaataaacaataaatatgtgttactatttcctattctcatcttctccttcttaaagattgatctggccctaatgtatactgttctatagagcagtgtagtttatttaggtgatttgactgaaaaattgttatccttttttcattcatgattatttgagaattcctgctttgtmtttgtgtgtattcagaaacttctagattcttcttgagggtatataacacattcatttgaaaaagtctgaataagttatgcctgcccttaatttagatttggtatttctattactggctaa

SEQ ID NO: 343465 - DNA, 583 bp, Homo sapiens
tattttttttaataataacaaaaaatactaggactctggagcatttactaattatcagacattgtcccaaatactttcttgaattcactgtgccatttaaacctaccatccctatcagtgatcccaagaagtagctactattattattctattttatggataaagaggctgaggttcagaatgtctaatttctttgaggtagcatggccagtaaatgtcataactcaaataagcaactcctyctgtctgactccaatggttacgttcttactcattatgcaaaaataaccattttatttattagaacaataatagccagtgtttattatttcagctctgattgttattgaagatttgaaacatataaaaattgagaaaataactcattaatagaaagccacaaaagctatggtaatgctatttttgagatagaatatttttattttaataattagtgattatatgaactctagctcttacaattaattatacaggaaagtgatcattccactaccctatgttgcatctactgaatgaattaagacacatatacatgccattttctattatagtaaaaattaaa

SEQ ID NO: 343466 - DNA, 583 bp, Homo sapiens
tattttttttaataataacaaaaaatactaggactctggagcatttactaattatcagacattgtcccaaatactttcttgaattcactgtgccatttaaacctaccatccctatcagtgatcccaagaagtagctactattattattctattttatggataaagaggctgaggttcagaatgtctaatttctttgaggtagcatggccagtaaatgtcataactcaaataagcaactcctcctgtctgactccaatggttacgttcttactcattatgcaaaaataaccattttatttattagaacaataatagycagtgtttattatttcagctctgattgttattgaagatttgaaacatataaaaattgagaaaataactcattaatagaaagccacaaaagctatggtaatgctatttttgagatagaatatttttattttaataattagtgattatatgaactctagctcttacaattaattatacaggaaagtgatcattccactaccctatgttgcatctactgaatgaattaagacacatatacatgccattttctattatagtaaaaattaaa

SEQ ID NO: 343467 - DNA, 557 bp, Homo sapiens
ttaaatctccagactgaggggctagttaacaaaaccaaaactccacagagattatacacaatataactagggggcaaggtatcaaaaaccaagcaggctctcaatcgaaagggctgaatgttattaacatctatrtggaagaaaactggaaaccaaccaagtaggctgatggacctgagaataggagaattccaaaacagtgacatctggaaagagcttcaggttaatttgaaaacagcaagtattgggaggaaccttccccactccagtaacaacagagtgcaaggggctgactgtaagaaggcatgatgagaacagggaagtctaacagcttttgtgaaacttcaaaactgacttttttttcctttggtttccctaactctcaggaaaaactattggaagcagcttcaaaatttagcaagctagggataaaggagataggagaaactgttcaaaaaaaaaaaaaggagaaaaaacaaaagtggagatggaagtgaaacagagtttagaatgctcacaaagtccccacatttctaaacactacataaaaaaaagtt

SEQ ID NO: 343468 - DNA, 557 bp, Homo sapiens
ttaaatctccagactgaggggctagttaacaaaaccaaaactccacagagattatacacaatataactagggggcaaggtatcaaaaaccaagcaggctctcaatcgaaagggctgaatgttattaacatctatatggaagaaaactggaaaccaaccaagtaggctgatggacctgagaataggagaattccaaaacagtgacatctggaaagagcttcaggttaatttgaaaacagcaagtattgggaggaaccttccccactccagtaacaacagagtgcaaggggctgactgtaagaaggcatgatgagaacrgggaagtctaacagcttttgtgaaacttcaaaactgacttttttttcctttggtttccctaactctcaggaaaaactattggaagcagcttcaaaatttagcaagctagggataaaggagataggagaaactgttcaaaaaaaaaaaaaggagaaaaaacaaaagtggagatggaagtgaaacagagtttagaatgctcacaaagtccccacatttctaaacactacataaaaaaaagtt

SEQ ID NO: 343469 - DNA, 542 bp, Homo sapiens
ctagtgtatgtcaagtgctgggagaggtattgggtttgccatggtgaatgaaataggcatgatccaactctcatggagcttatagttcagtgtgaataaattcaaatattsaaacaaaaaacaaagcaaacgtcaaatgctaaaacttttattaaagctcctctgtcacgaattaaggtatctcaatggttagaacagtgcatgggtgtttccaaatatctttgaaatccatccctcattctattcatctatccttacaatgccttactctagggactccttatgtgggaactgcgtctctgattttacattcaaagataaactagcagatgggacaatactccgtaatgctggagctacacactaaagaaataagactttttatgtggatttacatttattttggaaatcagaaaattagcaagcatatttgcagagttatttcatttaaaaatttacaaatgtatactttgaatttcagataaaggggactttttaaagtaagaaaatgtttacatcggacataattaatatgtaaatat

SEQ ID NO: 343470 - DNA, 501 bp, Homo sapiens
gttcagtgtgaataaattcaaatattgaaacaaaaaacaaagcaaacgtcaaatgctaaaacttttattaaagctcctctgtcacgaattaaggtatctcaatggttagaacagtgcatgggtgtttccaaatatctttgaaatccatccctcattctattcatctatccttacaatgccttactctagggactccttatgtgggaactgcgtctctgattttacattsaaagataaactagcagatgggacaatactccgtaatgctggagctacacactaaagaaataagactttttatgtggatttacatttattttggaaatcagaaaattagcaagcatatttgcagagttatttcatttaaaaatttacaaatgtatactttgaatttcagataaaggggactttttaaagtaagaaaatgtttacatcggacataattaatatgtaaatatatcaaatttcttaaaccagtataccatcagtgaaggcaagtag

SEQ ID NO: 343471 - DNA, 621 bp, Homo sapiens
tgtttttttgtttgttttgctttttaaaactttatttcattgtaactatgcttacagaaatatactcatattggctaatagaatgcaagtttaacttatcctacacaatttggaccaaaaacttgatttgaaaaaaaggattgcaatgtgtttttttgtttgtttgtttttaatctattacaaatccataaaagatcctacatcaaattctgctaaagaaagcagcaagaactttgagaaatttacctttggtttgcctcagacaaataacatttattgcactgcataagtttataaaattggggcaacaaaacattgttgtagaagggcgtgaacccgggaggtggagattgcagtgagtggagatcttgccactgcgttccagcctgggcaacagagcgagactccatctcaaaacaaaacaaaacaaaacaaaacaaaacaaaacaaaaacattgttgtaatatttttcaatgccagtttagaaagttcaataactaatggatatggaaggggctgggagggaggctatgtaaacatgygaaatcgtaaaagctatttgatttagttaatattgtatgtagactgtaaatctacaaaaaccaggattcagataatctc

SEQ ID NO: 343472 - DNA, 614 bp, Homo sapiens
gattaggttgccttccagggtctttatagttctggttttacatttaagtctttaatccatcttgagttgattttttgtatatgattacctaatttctaaagtggcatcccattatgtttgccatattctgtcattagaagcaaatcactaagtcccacccactctcaatggggaggggattccaggaggtaagaatcattggacaccatcttttaggctgcctaccacttcctcctactagcatataagcttgatggagacagagactttattgtgttcacttccatattccagagcgtagaacaatgcctgaccacagagtagtcactcaatatttatctgttaatcatatgagctaacatttctatcccattgctttcttgcctaggactcctgtccccattaaaatgagaggatgctttctgtggtgtattagatttagtattttattcagaattagacctcctaaggagaattttctcttttcaaccttagcatgttaaggctctgtcttccattcagagctcatgttaratggtaccactgctacctccacctcctcgatgcccctactaccttctccaccttctatgaactcatgcagtacctgtgct

SEQ ID NO: 343473 - DNA, 539 bp, Homo sapiens
gagaattttctcttttcaaccttagcatgttaaggctctgtcttccattcagagctcatgttagatggtaccactgctacctccacctcctcgatgcccctactaccttctccaccttctatgaactcatgcagtacctgtgctatatagcctcatgatcgcttatctgtatgtctgatctcctacaaaccaataactcattgaaaccaaataccatgtgttcaacaaatgtaagtccagccaagttggagcagggcctgtttatatagagtagtcatagagtacctggcagagtacttgcatactgtaggtacttgacaaacattagtggtaaataagttggtaggtttcacttttttgccattcctagttctttataaatttttggtaaatayttgttaactaactgaattcaagccctgaaatcatttataaccaatgaatggcatggcatgagcccctgttacatctttcaactgaaaggttggtcagagagaaagcgggaaatatagggtggaagaaagatccagactagaaat

SEQ ID NO: 343474 - DNA, 539 bp, Homo sapiens
gagaattttctcttttcaaccttagcatgttaaggctctgtcttccattcagagctcatgttagatggtaccactgctacctccacctcctcgatgcccctactaccttctccaccttctatgaactcatgcagtacctgtgctatatagcctcatgatcgcttatctgtatgtctgatctcctacaaaccaataactcattgaaaccaaataccatgtgttcaacaaatgtaagtccagccaagttggagcagggcctgtttatatagagtagtcatagagtacctggcagagtacttgcatactgtaggtacttgacaaacattagtggtaaataagttggtaggtttcacttttttgccattcctagttctttataaatttttggtaaatacttgttaactaactgaattcaagccctgaaatcatttataaccaatgaatggcatggcatgagcccctgttacatctttcaactgaaaggttggtcagagagaaagcrggaaatatagggtggaagaaagatccagactagaaat

SEQ ID NO: 343475 - DNA, 574 bp, Homo sapiens
agtaaattcattctactacctaggagccctttatgacccagccctgcctcccacatgatttccctctgaccatccctccaccctctatggcagctggctgcaccagccctcattgtgatactgaacagagccatgtgcatttttgtctttgggtctctgcaccagcatttccctctgcttggaatgttctgcctgattcatgtggttggccttctgcttattcaaatctcaaataaatgtctttaaataaacataggaaccatagtagcagtcaacacttttacagcatctaccacawgcctggcaccatcctaaatgctttacatacatgaactcatttaatatgtttagcaaacctacaagtagattgtcatcaaccacattttacagatgaagaaactaaagcacagagaggctaagaaaactgcccaaggtcagaccctataaagtaatggagatgatttgacttcatgtctgaagtccattattttaaccacttctccattctgcctctcagaaaatcaccacccagttaccctgtatcatatcatcctattttaatattcttgatagc

SEQ ID NO: 343476 - DNA, 574 bp, Homo sapiens
agtaaattcattctactacctaggagccctttatgacccagccctgcctcccacatgatttccctctgaccatccctccaccctctatggcagctggctgcaccagccctcattgtgatactgaacagagccatgtgcatttttgtctttgggtctctgcaccagcatttccctctgcttggaatgttctgcctgattcatgtggttggccttctgcttattcaaatctcaaataaatgtctttaaataaacataggaaccatagtagcagtcaacacttttacagcatctaccacatgcctggcaccatcctaaatgctttacatacatgaactcatttaatatgtttagcaaacctacaagtagattgtyatcaaccacattttacagatgaagaaactaaagcacagagaggctaagaaaactgcccaaggtcagaccctataaagtaatggagatgatttgacttcatgtctgaagtccattattttaaccacttctccattctgcctctcagaaaatcaccacccagttaccctgtatcatatcatcctattttaatattcttgatagc

SEQ ID NO: 343477 - DNA, 495 bp, Homo sapiens
gagaaatcagagctggatacagggatgaactgcaagcattccccagtctacacacagacccatcaacacagggcgaaccgtcactggcacaagmagcttaaacaaaactgataaatcacactcatccctcacagtctggaaggctatgtacatttccaaagtagtgtcctctcatgaataaatagagaatctcccaactagtaatcatcagtaacagaaagtgaggcaaaaatacataaactccctgaagtgtgctaggaagctttaaaacagacacacacacacacacacacacacacacacacactcctaacttttgaccaatatgtggcatgccaggggcaaaacctaggtggccagatggaaacctaaaactgagggaaaacaaatctgaacaagatcatcataagctacatattgctgtggaaataaactgcatgattagctcagccaagtcactgaacaaataagcaaatatccaagcaaacagcaacc

SEQ ID NO: 343478 - DNA, 580 bp, Homo sapiens
acttacaagtagtccaggtgaagctgcatgatttacctgcaggtttaatctactggttagaaatctttggtgaaccctctggtaatctcctagacatgagcagcatgtccatttgctatcagcttaacacatggaagagttgttattgtgcaggttcatatccacttagcagtgggtttgtacctggtaacaatcaaaattaacaaaatgtgtcctggattcctatctacctcccaacctgttgctcccaagacattacatatgcctgtataggtcatcagccacaytgtgaagttattcccaacctggttgggagatagataggattaatactctttctctatgtgccaatattgctcctcaaaccatgcattttccctacttctgaatcactatttctccttccacttctcatggccttagcaatcctgtaaaactccagaaagtgtgaaataaaatggtccttgctatagtttttattttttttttctccgtgagattgcagaaaagaaagacaagtcatcaaaaccaaggccagagaacaagttaaaatgctcttggagaattgactttcaggaca

SEQ ID NO: 343479 - DNA, 580 bp, Homo sapiens
acttacaagtagtccaggtgaagctgcatgatttacctgcaggtttaatctactggttagaaatctttggtgaaccctctggtaatctcctagacatgagcagcatgtccatttgctatcagcttaacacatggaagagttgttattgtgcaggttcatatccacttagcagtgggtttgtacctggtaacaatcaaaattaacaaaatgtgtcctggattcctatctacctcccaacctgttgctcccaagacattacatatgcctgtataggtcatcagccacactgtgaagttattcccaacctggttgggagatagataggattmatactctttctctatgtgccaatattgctcctcaaaccatgcattttccctacttctgaatcactatttctccttccacttctcatggccttagcaatcctgtaaaactccagaaagtgtgaaataaaatggtccttgctatagtttttattttttttttctccgtgagattgcagaaaagaaagacaagtcatcaaaaccaaggccagagaacaagttaaaatgctcttggagaattgactttcaggaca

SEQ ID NO: 343480 - DNA, 558 bp, Homo sapiens
tcaccagacattgaacctgctggtgccttgatcttgaccttctcaacctctagaattgtgtgaaacaaatttctgttgtttataaactgcccagtttacggccttttgctatagcagcagaatcagactaagacacttggtaagcaactacagagcacagaatgtgatatgktttgtctgtgtccccaccaccagacctcatcttgtagttcccataatccccatgtgtcatgagagggacccaatggtaggtaattgaatcatggcggccactgcacccatgctgttctcctgagactgagtgagttctcatagatctgatggttttttaaggggatcttctctcctttgcttggcacttccccttcctcccgccctgagaaacatgtgtttgcttctgattccaccataattgtaagtttcctgaggcctccctagccccgaagaactgtgagtcaattaaacctctttcctttataaattcccagtctgggatatgtctttattagcagtatgagaacggactaatacagaatgtctctcacctttgttacatgc

SEQ ID NO: 343481 - DNA, 612 bp, Homo sapiens
gacctgttccaagttggacacactcaggaagcactgggtggagagacatataataggagctcagaagagagagcagatactggatctctagcatcaatctaccacttggtctcctcactcatgaaccctyacactccagaacagtgtcttgaaagcaacatccagctcttgctcctgcagctcaaaaggaggatgataaacttgttacacctaagatgggaactgtgtcaaggagaatttacctatagtcttatcagagcaaacagatattctacagtcagagctgctagattaaggacaagatgaaaataaatggcatggcaattacatacagagcatagcaaaaataattaataaattaaaataaaattttgatcaaaaaaagaaatgaagaaccaatctggaagaaaagataactcaagcaagagaagtctcaggaaatatgttgagaataaaacacacattatatattacataagttacaaacaggaaaaaatagacgcttacaaaaatcaaataaatgatgtggaaaataagttaaagtaatctcagtgatttcagaagaaaaagggaaataaattaaaatgattaaaattgctagagcagactgag

SEQ ID NO: 343482 - DNA, 604 bp, Homo sapiens
tcatctgccctacacatgcacagcctcctccattatcaacatcctccaccagagtggtacgttcttacaattgatgagattacaattgacacatcataattaccaaagtccatagttgatattagggttcactcttggagttgtacactatatgggattgtacaaacttatgctatgtatccaccattatagtatcatacagagtagttgccctactacaaaaatcctttgtgctctgcctattcatccttcccttcccctaattcttagcaaacactaatttttttaaaaaagcttttttaaatgttttaattgagaaattttaattgtatacatttatgagatacaatgtgattttttgataaatgtatgcaatgtagaataattaagtcaagttaattaacatatctaccaccttgcttacatatcattttctgatgagacattttgaaatttactctttgytattttgaaatatataatacattgttattgactttagccaccctgctatcaatagatctcaaaacttacttactctgtaaatctgaaactttgtaccctttgaccaacacctccttattccctccattacccctgccat

SEQ ID NO: 343483 - DNA, 593 bp, Homo sapiens
gaggactctgtggcaactagtcaactatctcatgtagtgcaaatgcatccatacataatatgtaaacraatgggcatgggcatgctgtgctctaacaaactttatttataagaactgttagctgacccctgatctagttgatagactgactgacttccatgtggaatactagtgtaagctcctgttgtcactaattattttctccatagtgtttctaaaagtcatggtactaaaattactgtatttctttttaaatgataattaaaagcattaaaaggtccatgcattctttttttcttttttttgattaacatgctatgtgctattgaaagggcaaacctaccttcttactatcctttagacaatccaatcacactcctgctgcagggcctttgcacttgctgatgcagatacaaaccggaacataagacactctgcctctttgtctagatttatgctcagataacagttttatcaatgacatcttcaccaccctaaatacgtagcaacccagcttcacataaatacttgtcctacacttggttctatctttagtcctctactttctccccaccccaaggtacttagtacca

SEQ ID NO: 343484 - DNA, 515 bp, Homo sapiens
ctgaagccaactctcatcttgtctgcttgataccagcccctctcacagacttaaggatactgcttttgtaatcgtcccgcttttacctccattgtcagttttttccctcttggctgagtcattcccataagcatacagatgcacaatatctcacattttaaaaaaggaagagaagaaccgccctagatttcatatcttcttctaagttcatcttgattccctgtgctttgctttagagcatatctccttgaaaaaagtttgttgccacttcctcatttcctagtctctcagacgtactctcagtttgrcttttatctgcatgactctattgaaaacttttttttttttaatagtgactttcacagtgccaacttcagtaattgattctcagtattcttttcagactcctggcagcattcgtcactgttgttcagttcttcctttttagaacactttcttcatttggcccctgggcacagctctcagattctcccactatttcacgggcctctctt

SEQ ID NO: 343485 - DNA, 558 bp, Homo sapiens
tttgtgtaagtaaaagtgatgcttatttgctggagagtggaaatcatatttattctcgctacattgagaaatacttgaaaaacatttttttttctgccagtaccctgtacattctgcaatgtttattcctaagttttggttttaaatgttgaatactgtcctaaaattttattaaagtgtgtattttycattttgtttgtagagcaacaatgtatacacataaaccatgcccttttggattttccacttttgtaattactaccatatttgtttgtttacttgctttttaattttatttctttgatgaagtggcctttagcaatgtcttgcatgctacatgagatctgcttatattcctggaattatctgttggattcttgagtttctctccctactgatttctcttttctttcctctgatattactatatgcattccccttctcatatacaatgggaacaaaaggtagtgtgaccttcacaagattatttacataattgcataaaattgtacctatgagttgtttagaatagtggacattataatagtaaaagatcaa

SEQ ID NO: 343486 - DNA, 616 bp, Homo sapiens
aagtgagtgctttggtcagaggcaatgctgtgtggaacaacatgatggtggataaggcattccgtgagtccacagatgatgtcttggcagaagcrttgcttttaggataggcaaacccatatccagagtaagtgtctattccagtaaggacaaacctctgccctttccatgatggaagaggtccagtataatcaatctgccatcaggtagctggctgatcaccccaaggaatggtgccatattgagggctcagtgttggtctctgctgctggcaaattgggcactgcagcagtagccataaccaggtcagccatggtcagtggaagtccatgttcctgggcccatgcgtaacctccatccctgcaccatggccactttattcatgggcccattggtgatgacaggggtggctggggaaagaggctgagtggtgtccacagaacggggcatcctttccacttgattattaaaatcctcctcagctgaggtcatcagttggtgagcactcacacggaatacaaatgtcttcacagtttttgaccactcagaggtgtccatccacgtacctctttcctgaatttccttgtcaccaattttccaatcgtgcttcttttaa

SEQ ID NO: 343487 - DNA, 636 bp, Homo sapiens
ttagccataaagtgagtgctttggtcagaggcaatgctgtgtggaacaacatgatggtggataaggcattccgtgagtccacagatgatgtcttggcagaagcattgcttttaggataggcaaacccatatccagagtaagygtctattccagtaaggacaaacctctgccctttccatgatggaagaggtccagtataatcaatctgccatcaggtagctggctgatcaccccaaggaatggtgccatattgagggctcagtgttggtctctgctgctggcaaattgggcactgcagcagtagccataaccaggtcagccatggtcagtggaagtccatgttcctgggcccatgcgtaacctccatccctgcaccatggccactttattcatgggcccattggtgatgacaggggtggctggggaaagaggctgagtggtgtccacagaacggggcatcctttccacttgattattaaaatcctcctcagctgaggtcatcagttggtgagcactcacacggaatacaaatgtcttcacagtttttgaccactcagaggtgtccatccacgtacctctttcctgaatttccttgtcaccaattttccaatcgtgcttcttttaagtccctgacca

SEQ ID NO: 343488 - DNA, 616 bp, Homo sapiens
aagtgagtgctttggtcagaggcaatgctgtgtggaacaacatgatggtggataaggcattccgtgagtccacagatgatgtcttggcagaagcattgcttttaggataggcaaacccatatccagagtaagtgtctattccagtaaggacaaacctctgccctttccatgatggaagaggtccartataatcaatctgccatcaggtagctggctgatcaccccaaggaatggtgccatattgagggctcagtgttggtctctgctgctggcaaattgggcactgcagcagtagccataaccaggtcagccatggtcagtggaagtccatgttcctgggcccatgcgtaacctccatccctgcaccatggccactttattcatgggcccattggtgatgacaggggtggctggggaaagaggctgagtggtgtccacagaacggggcatcctttccacttgattattaaaatcctcctcagctgaggtcatcagttggtgagcactcacacggaatacaaatgtcttcacagtttttgaccactcagaggtgtccatccacgtacctctttcctgaatttccttgtcaccaattttccaatcgtgcttcttttaa

SEQ ID NO: 343489 - DNA, 616 bp, Homo sapiens
aagtgagtgctttggtcagaggcaatgctgtgtggaacaacatgatggtggataaggcattccgtgagtccacagatgatgtcttggcagaagcattgcttttaggataggcaaacccatatccagagtaagtgtctattccagtaaggacaaacctctgccctttccatgatggaagaggtccagtataatcaatctgccatcaggtagctggctgatcaccccaaggaatggtgccatattgagggctcagtgttggtctctgctgctggcaaattgggcactgcagcagtagccataaccaggtcagccatggtcagtggaagtccatgttcctgggcccatgcgtaacctccatccctgcaccatggccactttattcatgggcccattggtgatgacaggggtggctggggaaagaggctgagtggtgtccacagaacggggcatcctwtccacttgattattaaaatcctcctcagctgaggtcatcagttggtgagcactcacacggaatacaaatgtcttcacagtttttgaccactcagaggtgtccatccacgtacctctttcctgaatttccttgtcaccaattttccaatcgtgcttcttttaa

SEQ ID NO: 343490 - DNA, 544 bp, Homo sapiens
ggaggactgctaatatctttaaactagtatgtattttcaaggaacaaatttgaaaataaatgtgttacatttgaatttttattctgttaataactagtttaattaaaaagaagtatgaaagctttactgagaaagaacaaaaacttcagaccacagtaattgtttggtttataatgcctttgcatcctataatatttcctttttaatatactgcacaaacttccttggagtggaaaaaargtgccttaatattttgacgaatgaacagcaaactatctactttccctttgaatgtgttactgaaaaaggtaaataaagaaaaccaatggagacagtaaaaataaagcaacaaccacaaaagacaacaaattttatctcctcccagcctaaatgctccgtttatgtaaaagtgaaattattttaaaaagcaaaaccagaaaggaagctgacaatggatgtactctttttatttttagttttaaagcagaaaataattacatgcaataatacagtaaagtgctattcaattttcagaagttacgag

SEQ ID NO: 343491 - DNA, 544 bp, Homo sapiens
ggaggactgctaatatctttaaactagtatgtattttcaaggaacaaatttgaaaataaatgtgttacatttgaatttttattctgttaataactagtttaattaaaaagaagtatgaaagctttactgagaaagaacaaaaacttcagaccacagtaattgtttggtttataatgcctttgcatcctataatatttcctttttaatatactgcacaaacttccttggagtggaaaaaaggtgccttaatattttgaygaatgaacagcaaactatctactttccctttgaatgtgttactgaaaaaggtaaataaagaaaaccaatggagacagtaaaaataaagcaacaaccacaaaagacaacaaattttatctcctcccagcctaaatgctccgtttatgtaaaagtgaaattattttaaaaagcaaaaccagaaaggaagctgacaatggatgtactctttttatttttagttttaaagcagaaaataattacatgcaataatacagtaaagtgctattcaattttcagaagttacgag

SEQ ID NO: 343492 - DNA, 543 bp, Homo sapiens
ttaaaccctactttgaatctaaattacttccttgatgttaattgaattaaggtctagaggtaccctcctacctgacacagacacaccctgattttcaggacttacgtatttcataaatccttatcrataactttataaattaattaggcacaagcagatgattgtaaagttttcataaaatttgtagaagaaaaatgatttgtgtttataagaatatcacaggaactttagagacagtagttgctgatgacaaactagagcaggagaaaggtttcctgagacaaggatggtacaattatgctgacagctatgacggctccaattttccctactttaactacaacctatgaaaactgacatcctatcaatattccctagcattactcttgcatttacagcacaatgttatttttaaattctttaataattccaatatccagacaaagtttacttatgtaaatctacccattcattaccattttttcatatttacctactttaaacagtcaatgctttggaatctttttttgtttttacgtagaa

SEQ ID NO: 343493 - DNA, 543 bp, Homo sapiens
ttaaaccctactttgaatctaaattacttccttgatgttaattgaattaaggtctagaggtaccctcctacctgacacagacacaccctgattttcaggacttacgtatttcataaatccttatcgataactttataaattaattaggcacaagcagatgattgtaaagttttcataaaatttgtagaagaaaaatratttgtgtttataagaatatcacaggaactttagagacagtagttgctgatgacaaactagagcaggagaaaggtttcctgagacaaggatggtacaattatgctgacagctatgacggctccaattttccctactttaactacaacctatgaaaactgacatcctatcaatattccctagcattactcttgcatttacagcacaatgttatttttaaattctttaataattccaatatccagacaaagtttacttatgtaaatctacccattcattaccattttttcatatttacctactttaaacagtcaatgctttggaatctttttttgtttttacgtagaa

SEQ ID NO: 343494 - DNA, 524 bp, Homo sapiens
  misc_feature (1)...(524): n = A,T,C or G
tttttagggtgaaagtggaatttattaaaaattcccctgtgcaaataggtgtaaatcaggattgctgtaacaaatgaggacatagagcatcctgtaacatgaaagaagataggaagatattccatccaatagaacaaagaagtgaaaagagttctgtgcctgagggacgagatgcctgagggacgaggtaacaacaggtcagacatgagtcctactttatctaccaagtgaaaaatgcaagtggggccagttggaaatgaagggcaaataaagccagatactctagggatactccaggaatataagtatacttgctgttagcttttcaggcaatagctnaggaaaattgacaaccccttaaagagtccttcatattttacattgtgctagaaaaacacactactctccaggtcatgttgaaaatggactgaaaaaggtatatctgtgtagatggaccctaactggttttcaaattgctcatggcttgtatttscaatatagagaaatcagaagcctcaaccacc

SEQ ID NO: 343495 - DNA, 514 bp, Homo sapiens
tatgggagataagcatgagaccaggaggactaaagagagtaagatgggtagcaaaagcttaagcttggcccatctggaataggaaataggaagagatctgaatctagctcctaatacctcaggatatagaataaagaaagccttttgttaggagactggggaagacagattagatgaaaagaagcaagggtatgaaattctgaaggtttgattataatgccataaaatttaaattattgttaaactcatttgtattagttcattctcacaccactatgaggaaatacccgagactgggtattttataaagaatagaggttttagggyaaaaatatattaaaaaaaaaaaaagactagaggtttaattggctcaagttccacatggctggggagtcctcatgaaatttacaaccatggtagaaacctcttcagagggtggcaggaaagagagtgagtgcaagcaaaagaaatgccagacgcttatacaaccaccagatctcttgagactcactca

SEQ ID NO: 343496 - DNA, 647 bp, Homo sapiens
ttataactctcaccctccaccatcttagatttgaggctgaggcatatagggactaagtaataaatatagcttgcccaggtctggctcacagtaagatggaatccatgaacccatctgatggtcatttaacagattccaaacaagttgaaagaacatacttggtattttgcagaacttccacattaattctygacctgtgggatatatgatactatggtgggaaatgccaagtaggagacttgaaaactgctcctttccctgtcaagttcataaaaaataatactgcatattggggagggtggtggaaaatggcacagatttaaacaaaggatgtagatgtggatgttctcatcatatttccatataattccctagtctagtttctataataaacaaagatcctggaggatgacaggagactactgcaaactcaaccaagtaacagcctaaattgcaactgttctacctgatatggtatctttgcaacagcagattaacatgtactcaggcacatcgtgtgtagtcattgatccggcaaatgtgtcttctcataaagtgagattagaagcaatgtgcattcagttgggcagacaacagtacatgtttatgttcttgccaaggttaacattccactctagtcataaaat

SEQ ID NO: 343497 - DNA, 647 bp, Homo sapiens
ttataactctcaccctccaccatcttagatttgaggctgaggcatatagggactaagtaataaatatagcttgcccaggtctggctcacagtaagatggaatccatgaacccatctgatggtcatttaacagattccaaacaagttgaaagaacatacttggtattttgcagaacttccacattaattcttgacctgtgggatatatgatactatggtgggaaatgccaagtaggagacttgaaaactgctcctttccctgtcaagttcataaaaaataatactgcatattggggagggtggtggaaaatggcacagatttaaacaaaggatgtagatgtggatgttctcatcatatttccatataattccctagtctagtttctataataaacaaagatcctggaggatgacaggagactactgcaaactcaaccaagtaacagcctaaattgcaactgttctacctgatatggtatctttgcaacagcagattaacatgtactcaggcacatcgtgtgtagtcattgatcyggcaaatgtgtcttctcataaagtgagattagaagcaatgtgcattcagttgggcagacaacagtacatgtttatgttcttgccaaggttaacattccactctagtcataaaat

SEQ ID NO: 343498 - DNA, 641 bp, Homo sapiens
attccttgcgtaaatcaatgtccagaagtatttttcctaggtctttttctagtattttaatagtatcaggtcttatatttaagactttaatccaacttgagttgatttttstatatgctgagagataggagtctagttttatccttctgcatccagctatccaattttcccagcaccatttattgaaaacagtgtcctggctgggtgaggtggctcatgtctgtaatcccagcactttgggaggccgaggcaggtggatcacctgaggtcaggagttcgagaccagcctgaccaacatggtgaaatcctgtctgtactaaaaatacaaaaaaattaaccggtcatggcgggtgcctgtaatcccagctactcaggaggctagggcaggagaatcacttgaacctgggaagcagaggttgcagtgagccaaaatagggccattgcactctagccggggtgacaagaacgagacactgtctcaaaaaaaaaaaaaaaaaaaaaaagacaaagaaaaaggaaaaaagaagagtgtcctttcccaatgctgtttgggttgccatagccttgtggtaaaatgtgaggttaggtaatgcagtacctccagttttattctttttgcttagaatttatttagctatttg

SEQ ID NO: 343499 - DNA, 641 bp, Homo sapiens
attccttgcgtaaatcaatgtccagaagtatttttcctaggtctttttctagtattttaatagtatcaggtcttatatttaagactttaatccaacttgagttgatttttgtatatgctgagagataggagtctagttttatccttctgcatccrgctatccaattttcccagcaccatttattgaaaacagtgtcctggctgggtgaggtggctcatgtctgtaatcccagcactttgggaggccgaggcaggtggatcacctgaggtcaggagttcgagaccagcctgaccaacatggtgaaatcctgtctgtactaaaaatacaaaaaaattaaccggtcatggcgggtgcctgtaatcccagctactcaggaggctagggcaggagaatcacttgaacctgggaagcagaggttgcagtgagccaaaatagggccattgcactctagccggggtgacaagaacgagacactgtctcaaaaaaaaaaaaaaaaaaaaaaagacaaagaaaaaggaaaaaagaagagtgtcctttcccaatgctgtttgggttgccatagccttgtggtaaaatgtgaggttaggtaatgcagtacctccagttttattctttttgcttagaatttatttagctatttg

SEQ ID NO: 343500 - DNA, 574 bp, Homo sapiens
catatattctctattttattaaacatgtcttataactaagaacttttgttagctttggtgtcatgatttacctgtattcctgaaaaatacttaatttaaaatttgaccttgaaaagctatttcatcttgcattgtatatgattataccaacacaaaataccatctgttcaattacatacagatacacacttttttctactatcactgaatagtaatatttctttattaatagaaaataacataatttattaattataacctatagatgagtgctcatgaaatgcctaggttaaaaaaaagtaaaagattactatctattcctagaagccraaagaattataaatttcaaaaataaactttttatttagaatagcataagattaacaggagagttgctaatgtagtactgagaattcctgttttatcccataccctttttcccccattaacatcatacattgtaatgatacatttttcacaaataatgaaccaatattgatatattattatgaactacaggccatatttttagttttattaatttttccataatatcctttttatgtttcaaaat

SEQ ID NO: 343501 - DNA, 574 bp, Homo sapiens
catatattctctattttattaaacatgtcttataactaagaacttttgttagctttggtgtcatgatttacctgtattcctgaaaaatacttaatttaaaatttgaccttgaaaagctatttcatcttgcattgtatatgattataccaacacaaaataccatctgttcaattacatacagatacacacttttttctactatcactgaatagtaatatttctttattaatagaaaataacataatttattaattataacctatagatgagtgctcatgaaatgcctaggttaaaaaaaagtaaaagattactatctattcctagaagccaaaagaattataaatttcaaaaataaactttttatttagaatagcataagattaacaggagagttgctaatgtagyactgagaattcctgttttatcccataccctttttcccccattaacatcatacattgtaatgatacatttttcacaaataatgaaccaatattgatatattattatgaactacaggccatatttttagttttattaatttttccataatatcctttttatgtttcaaaat

SEQ ID NO: 343502 - DNA, 496 bp, Homo sapiens
ctgattaacttgcatatgttgaatcatccttgcatccctggaataattcccacttggtcatgatgaattatctttttaatatattgttgaattccgctggctggtatttttgttgatttttgaatcaacatcagagatactggcctgtggttttatttttagatgtgtctttggtttgggtatcagggtaatatgggtcttgtaaatgagtttggaaaagattccctcttcctgtatttttcggaattgtttgagtaacactggtgttagttctttaaatgcttggcacgattaagcagtgaagccatcaggtcctgttattttctttactgggagacttcatattacagcttcaatcttgtttattgttattggtctattcatattttgtatttcttcatggtttaattctggtagcttgtatctaactaggaatttatccatttcccctagattttccaatttattggcaygtagttggtcatagtagctactg

SEQ ID NO: 343503 - DNA, 564 bp, Homo sapiens
tccatttgcagaatgttatttgtctccccctcataccaattggcacctcaagctctgcgccattaggccaaccaaaatgtctcaccgaggtttctggcagttgtgttctctgtagtactgtgatgggcttagggctccctggcagtttcagtgtgggtgttacattttcccattttctgaaaagatcgagaatatcaggatctggtgcaggctctgctagtgcagaaactatgagatagttcacccatggtgactaaataccaggaaactaattcatgctatgaaactcacgagtgctactaaattccttccagagcaaatgcagatttgggaggaatgggagcctcagtctgtgtctaggttatgactaggaatacagaacstggcctggacttggatggtactgtgggctgtggcttcagggcagggagaaaaggggagccatggacactaccccaggcaagaacaatctagaaaacaaggcacagtattaagtgtcaagtcaaggccaagtgtgcagataggtaagaaccagatatgaggggaacagacagggcagaaaaa

SEQ ID NO: 343504 - DNA, 537 bp, Homo sapiens
tcaccttgaattgtaataatccgtatgtgtcaagggcaggaccttgtagaggtaattggatcataggkccagtttcccccatgctgctcttgtgataatgagtgagtatcgcaagatctcatggttttgtaagtgtctggcatttccactgcttgcacccattctctctttcatggtgccctgtgaagaagtgccttccgccatgattgtaagtttcctgaggtatcctcagccatgcagaactatgagtcaattaaacctcttttccttataaattacccagtcttgggtatttcttcatagcagcatgagaatgaactaatacgcatccagtgagccccacctcctaatattcatgctcttgtgtaatcctcacacactgagtagacgtgacccatgtaaccagtgggatattgaagaaatgatgtgtgacttctgatgtttggttagaaaagctattgtggcatccacattgttttcttggactgcttattctgggggtagttagcccaccatatcttgaggatgctcaagcag

SEQ ID NO: 343505 - DNA, 537 bp, Homo sapiens
tcaccttgaattgtaataatccgtatgtgtcaagggcaggaccttgtagaggtaattggatcatagggccagtttcccccatgctgctcttgtgataatgagtgagtatcgcaagatctcatggttttgtaagtgtctggcatttccactgcttgcacccattctctctttcatggtgccctgtgaagaagtgccttccgccatgattgtaagtttcctgaggtatcctcagccatgcagaactatgagtcaattaaacctcttttccttataaattacccagtcttgggtatttcttcatagcagcatgagaatgaactaatacgcatccagtgagccccacctcctaatattcatgctcttgtgtaatcctcacacaytgagtagacgtgacccatgtaaccagtgggatattgaagaaatgatgtgtgacttctgatgtttggttagaaaagctattgtggcatccacattgttttcttggactgcttattctgggggtagttagcccaccatatcttgaggatgctcaagcag

SEQ ID NO: 343506 - DNA, 537 bp, Homo sapiens
tcaccttgaattgtaataatccgtatgtgtcaagggcaggaccttgtagaggtaattggatcatagggccagtttcccccatgctgctcttgtgataatgagtgagtatcgcaagatctcatggttttgtaagtgtctggcatttccactgcttgcacccattctctctttcatggtgccctgtgaagaagtgccttccgccatgattgtaagtttcctgaggtatcctcagccatgcagaactatgagtcaattaaacctcttttccttataaattacccagtcttgggtatttcttcatagcagcatgagaatgaactaatacgcatccagtgagccccacctcctaatattcatgctcttgtgtaatcctcacacactgagtagaygtgacccatgtaaccagtgggatattgaagaaatgatgtgtgacttctgatgtttggttagaaaagctattgtggcatccacattgttttcttggactgcttattctgggggtagttagcccaccatatcttgaggatgctcaagcag

SEQ ID NO: 343507 - DNA, 537 bp, Homo sapiens
tcaccttgaattgtaataatccgtatgtgtcaagggcaggaccttgtagaggtaattggatcatagggccagtttcccccatgctgctcttgtgataatgagtgagtatcgcaagatctcatggttttgtaagtgtctggcatttccactgcttgcacccattctctctttcatggtgccctgtgaagaagtgccttccgccatgattgtaagtttcctgaggtatcctcagccatgcagaactatgagtcaattaaacctcttttccttataaattacccagtcttgggtatttcttcatagcagcatgagaatgaactaatacgcatccagtgagccccacctcctaatattcatgctcttgtgtaatcctcacacactgagtagacgtgacccatgtaaccagtgggatattgaagaratgatgtgtgacttctgatgtttggttagaaaagctattgtggcatccacattgttttcttggactgcttattctgggggtagttagcccaccatatcttgaggatgctcaagcag

SEQ ID NO: 343508 - DNA, 511 bp, Homo sapiens
agattacattttctattatagataaaagcagttgcccacaaactaatcttgaatttattagaagtgacgtttattgacatttacaaggaagtcagaagaaagcagttattcatttttcatggatyttcagaatgacatggtattttacataaagtatttctttgatcctttgatttgtgaagcaaaattatttctgaagtgaaataaagtattttatatttctgctcactcttcctatccttctctttctctgtgatctagataccagatgacaattttagcatcccagaaggtgaagaagatctggcaaaagcaattcagatggcccaagaacaggctacagatactgaaattttggtgagaatttgaacactagtgtagtctatagtttagtggtagtgctttttatatgaagtttggaaagtcttttaaatgtaaatactagtgtagctcagtcatctgttatatcattttcatctctgtttatttgtgatcaagccttcactttaag

SEQ ID NO: 343509 - DNA, 561 bp, Homo sapiens
tcttacctctcctatccatgctccacatagcaatgaaaatgacttttcaaaaaatgtaaactaggatatgtcactttcctgcttaactcacttcagtgacttaaactccaagctctttaccacggctaccagggccttatgtgatggttcaccctgcttgcttctccagccagatcttctgttactcttccctttcatttctacactcacatcacattacttttcctttagttcctcaaaaaggtccagctcattttgcctcacggctttgacacatgctgcttactttgtctaggatgctgttttctactctccacatactggattctttctcatcctgagtcctcaaccatttcctcagtgtcctttcctagttccctaagctaggagagcagctgagaggtatagcatgaaacagtcttctkcatgtgtaaaattattacaaaagcttgtattttaaccttaaaatcccaggcaatctttgcattctagtccaaaataacattaatattttataaaatattttaattctaagattaaaataaaacttttctttctgga

SEQ ID NO: 343510 - DNA, 531 bp, Homo sapiens
aaaacaaacaaacaaacaaacaaacaaaaaatctctgtactaatcatacatgaaccataaaatccagccaatttaatttatagtcgtgtaatgctgtttaaaaacccttgcttaaatatttcacaccctaaaagtgttagtcccataccaagaagtagagtagttccttgaatgctggggttgcatcctcagtttccactatagtatttgaaaataggaggtatccagtaataaaagcagcagggagggaagagtataatgccttggtgacagtcacaacaaaytggtgactctctaagatgttattaatgaatagaaaactgaactgcagctatatcatctcaggacatgttctgggtattttgatttttttaaaaaattgcaaatagctgattatcttaccatttattgtttctcttaaaacaacttactgtctcttaaaaaaacttagtaaaaacaaaaccacaaagtaataaaaccactaaaaatccagcaggcaattggtttgcttccaattataatgcatctaga

SEQ ID NO: 343511 - DNA, 557 bp, Homo sapiens
ttaaaaatttcaatactatcaaaggggtataaaacaaaaattgaacctttcatcttggaactccagttcctcctctcagaagtagtcattgttaataacttcctgtgccttgcttcagaaatttcctcacatggacgtgtgtgtgtgtgtgtgtgtgtgtgtgtgtgtgtgtgtgtgtgtgtgtgtatgtacatacataatacataaatatgagtctgtgtcatatccaaggcacagttacactgataaataagacaacacattttttgtcaggtactaccaatactgaaattttgtttcawagaactttgaaatgagacagtttaatccaaaataactcataatatttaaaatgagtccgcaaaattttcaatgaacaaaaagaatatttttattctttaatattcaaaaagaatattaaaatattcttgtttataaaacaatgctactactttaagaatttcaataggctaataaacggctattctcgattacataaaaaatgtcaactgttctttcaaaaaagatagccacaccatacctgcttattaagccca

SEQ ID NO: 343512 - DNA, 557 bp, Homo sapiens
ttaaaaatttcaatactatcaaaggggtataaaacaaaaattgaacctttcatcttggaactccagttcctcctctcagaagtagtcattgttaataacttcctgtgccttgcttcagaaatttcctcacatggacgtgtgtgtgtgtgtgtgtgtgtgtgtgtgtgtgtgtgtgtgtgtgtgtgtatgtacatacataatacataaatatgagtctgtgtcatatccaaggcacagttacactgataaataagacaacacattttttgtcaggtactaccaatactgaaattttgtttcaaagaactttgaaatgagacagtttaatccaaaataactcataatatttaaaatgagtccgcaaaattttcaatgaacaaaaagaatatttttattctttaatattcaaaaagaatattaaaatattcttgyttataaaacaatgctactactttaagaatttcaataggctaataaacggctattctcgattacataaaaaatgtcaactgttctttcaaaaaagatagccacaccatacctgcttattaagccca

SEQ ID NO: 343513 - DNA, 592 bp, Homo sapiens
ggtgataaacatgtcagtaccaccaggatgatatatcctactggttcaaaactgcttgagctattttaatctaytcttttcctcacagctttcagatctctacatgctgggtctttctctgggctaattttctagtttcttcctgctttcacaattgtttaaaaattcttataaaatacacatcagttctcatatagtttttgttttgttttttaaaaaacaaagtgttgctctgtcaccccggctagagtgcaatgacgccatcaaagctcattgctgcttagaactcctgggctcaacaatcctctgcctcagcctctgaagtagctaggactacaggtgagccaccacgcctggctattttttttttttattaagagatggggtctcactgtgttgccccggctgcaatccttctacctggggtgtcctaaagccctggtactacaggttggagccacttcgactggcctttgttattttgatatatgttgttaccatttaactattgatatacaatatagattttcctctttagtttctagtgagcattttttttttcttttttgagaaaggtctcacttcgccatca

SEQ ID NO: 343514 - DNA, 558 bp, Homo sapiens
tgagttgagaaggtgtcacagagcacgaagktggtccccacacaggtcacaattatgtagctgtgaacaggccacatgttgcatctttcatagcatctgccacaaaataagggctcaatatattttcccttcaatttactttaaaaatcattaccattgcctaaatgaaatattactgacatggattttaaaaactgcacatgtaactaatgtctaaaattgggtcacgtgaaacctataaccttgaaactgagaatttccttttagacttcatgacaatataccaaacacttaatgcaccaggggctgaggggaacagagaacctaattaatcacggtgacctgataaatgaggtaacacccctaaagcaagtggctctcctttaacctcagttccatttccctacccccccacaccatgtcccttcagatcatttgatctgaagagttgaggtgggtacttattcaaaatgaataatcaaacttgcctcccaattcccaaaatctgcaaggtcccttagacctctagaagtgcaattttgctgacaggagaatgaa

SEQ ID NO: 343515 - DNA, 581 bp, Homo sapiens
gggaatgacacgcgcggtgcggttaccgttgtgtcccgatatctgaggccgttaaacgacgagaagagcggcagtgtctgaagcacgccttcctacctctcctccgcccggccccgcttccgggactccagttcacccgcagcaccctgactgcaggtgccaagtcacaactgcaaagaaacttccttttctcgagcgggggtgggacttggccgggtcccgaggcccctggccggcgggctcggacgttaggagcagaacyagctccaggtcccggtctgtccgggcgtcgctgccctctgaagctcaggccggacgccccagtccctggccgaacaaggtgccgcggcccacccaccccggtacccgccgtccgaccccgttgccctgcacctgaggatgttgtcagcataggtgagcagcagcttggaggcctccaaaaaggtctccggggtgttctggcagagctcagccacggccggggacgccgagcctgaggagctgcccaatgccgccgccgccatgcttgagcgccagagcgcgcgccgccgcccctcgctctccgcgtcccacactgagca

SEQ ID NO: 343516 - DNA, 581 bp, Homo sapiens
gggaatgacacgcgcggtgcggttaccgttgtgtcccgatatctgaggccgttaaacgacgagaagagcggcagtgtctgaagcacgccttcctacctctcctccgcccggccccgcttccgggactccagttcacccgcagcaccctgactgcaggtgccaagtcacaactgcaaagaaacttccttttctcgagcgggggtgggacttggccgggtcccgaggcccctggccggcgggctcggacgttaggagcagaaccagctccaggtcccggtctgtccgggcgtcgctgccctctgaagctcaggccggacgccccagtccctggccgaacaaggtgccgcggcccacccaccccggtacccgccgtccgaccccgttgccctgcacctgaggatgttgtcagcataggtgagcagcagcttggaggcctccaaaaaggtctccggggtgttctggcagagctcagccacggccggggacgccgagcctgaggagctgcccaatgccgccgccgccatgcttgagygccagagcgcgcgccgccgcccctcgctctccgcgtcccacactgagca

SEQ ID NO: 343517 - DNA, 481 bp, Homo sapiens
tttggtgcaagaagacacgatggaattgtagcaggaaatatggtaccaaatatgtaaagccattaaatatcataaaatttcccacccttttccagatcaaagaaaaggtgataagaggtagatacaaaaatgatggtctttttatttttctgaaagattttgtcacctcttagccaagacgattttgtgatattacaaaagaaatagcacattaaaactgtatgtttcwtatgagttcagcttcagagaaaatattgtaggtattttcacactattattttaaagacagcaatgaaaagagatcaagtttaggtacttactcatcaagtgttactttataaccacatgtgtttgttttaattcttcaagaaactctactttgtcactgaatgaggatcaactagaggtgactggttaggcctgggacgaaggtcaaactgagctttgctgaattattttaaacaaaatagatttccaaact

SEQ ID NO: 343518 - DNA, 549 bp, Homo sapiens
aggctcactgcagcctctacctcccgggttcaagcgattctcctgcctcagcctcccaagtaactgagactacaggtgcatgccaccatactcggctaatttttgtatttttagtagagatggggtttcaccatattggccaggctggtcttaaacccctgaccttgtgatccgcccacctcagcctcctaaagtgctaggattatagaygtgagccacaccgtgtgtggtgtgacctattattaaatggagaaaagctttgtccaggcaaaaagaaccatatccagactttaggaatttcccctacagtaagcagtctaaggcattgaaatattaacaaagaagcttatgaaattccttctgtagagatgaaaggttagaaagctgcctttcctggctagcttatgcccacccctttttagcagtaggggtggattagatgacctctcaaggttctttctagctatggttttgttttttgatgtctacttaaagattatgctaatattgctgatgtgaaatcctttgtacacaaggatggttgaaaac

SEQ ID NO: 343519 - DNA, 559 bp, Homo sapiens
ttgcaggtaaattatgccaatttctaattttaaatgcattagatagacgaagcgacttatcagataaacacactttgttggggtaaaattggcatgcatagtgcagctacagctattttctttgcttccctttaggttttaaatcttctttaggatttataaataggtctagtctatgtccacctcccatggggagtgacctgctcatttcagtgttgtctgcaaacaaagtggtaaatctgggattcagagagcaggcccagtggactttcaatcaagtagcataacccagtgtatcattgccaggatggtaggtgatattttgatctctatacccatttaatgtttctttatctaatctttttaaagatggaacatgaaaggtgagtgtattttttagggaccctcttaataatcataagaagtgagattgtattgtttgtttttttaattttcaatagcctgttcagattttgtacccattttaatagcatwgtttacctattcttatgtgtttggatttgtactcatttctaggatataatagtaaagaagataa

SEQ ID NO: 343520 - DNA, 556 bp, Homo sapiens
gaatgtcttgatcttttcttacaggcttatctcaaacattttgcctagaattcccattattcataccttcttagacttcagttactggcaagatctaatagcagcttcccctcatggcagttgagctttactttttatcctgggctaaggttccttaastttctatgtgaaagaggaagttaaaaaaaaagtcaaaactaccaccagattaaatgactcacattaagagacacttgatgaagaggatttccagaaacataatcaggaattttatatatatatatatatatacacacacacacacatactatatgttctttgcacaatggttaaaattgcgtgttttagtttcagacatttctatgttctaactgtcctgtcacttagcagctgttgattctgatcctatttgaacattagtgaaagctgccataaagagggttaacataatgcccatttcatcctcatgagatagagtttggcatatagaaataactcagtcttaagtatttactagtagttctcagcatacttcttgttttaacttctcactgct

SEQ ID NO: 343521 - DNA, 556 bp, Homo sapiens
gaatgtcttgatcttttcttacaggcttatctcaaacattttgcctagaattcccattattcataccttcttagacttcagttactggcaagatctaatagcagcttcccctcatggcagttgagctttactttttatcctgggctaaggttccttaactttctatgtgaaagaggaagttaaaaaaaaagtcaaaactaccaccagattaaatgactcayattaagagacacttgatgaagaggatttccagaaacataatcaggaattttatatatatatatatatatacacacacacacacatactatatgttctttgcacaatggttaaaattgcgtgttttagtttcagacatttctatgttctaactgtcctgtcacttagcagctgttgattctgatcctatttgaacattagtgaaagctgccataaagagggttaacataatgcccatttcatcctcatgagatagagtttggcatatagaaataactcagtcttaagtatttactagtagttctcagcatacttcttgttttaacttctcactgct

SEQ ID NO: 343522 - DNA, 506 bp, Homo sapiens
agttctgaaggacattttatatccgtcatctaatttaattttagttgaataaacaaattgaataaataaacaaaaacacatttgacaaatgagactgcagaactgacagtaaactttaaggggttaaatatgtgattgacttggaatgtagcaaagcttattacttattaccaaattgactgacccagctccaggaaaattctacaaacctcacggaaacaagtgaggatagaactattttcataatgctgtacaatcactagataaagttggaagctaccatatttttgaaaaataaatgtgggaggaaaaaaatgagaattaaatgatagtaagaaagtcacgtgggaaaaattaaaaagtgaaacaattgaatggcaaaaagagacaatctggaagcaacacaatgacaagagwacagagaagaagagaaagggtgtcattttggggtttgaacatagctaactcattcatagctcaccccaggttagttcatgcctagggtg

SEQ ID NO: 343523 - DNA, 506 bp, Homo sapiens
agttctgaaggacattttatatccgtcatctaatttaattttagttgaataaacaaattgaataaataaacaaaaacacatttgacaaatgagactgcagaactgacagtaaactttaaggggttaaatatgtgattgacttggaatgtagcaaagcttattacttattaccaaattgactgacccagctccaggaaaattctacaaacctcacggaaacaagtgaggatagaactattttcataatgctgtacaatcactagataaagttggaagctaccatatttttgaaaaataaatgtgggaggaaaaaaatgagaattaaatgatagtaagaaagtcacgtgggaaaaattaaaaagtgaaacaattgaatggcaaaaagagacaatctggaagcaacacaatgacaagagaacagagaagaagaraaagggtgtcattttggggtttgaacatagctaactcattcatagctcaccccaggttagttcatgcctagggtg

SEQ ID NO: 343524 - DNA, 566 bp, Homo sapiens
cctgtaatcccagcagtttgggaagctcagatgggcagattgcctgaacccaggagttcgagaccagcctgggcaatacagtgaaacccccatctctacaaaatttagccaggtgtggttgcgggcgcctagtctcagctacttgggaggctgacatagaaggatttcttgagcccaagaggttgaggctgcagtgagggtgactgcaccactgcactacagcctgggagacacagtgagccgctatctgggtgagagtgagtgggggaagaaaagaaaagaaaaactaatttaaaaattgyataataaactatacagcattctgcttaacacatagtagattttctttaaaggcttatttctccatttcttttgcatctgtatctttaaaatagaaataagaaataagttttactcaataagtaaatatattgaaatcaagaactcaaatatctggaaagattatttagacactttacctacaaataaaaggttgctttatttatatgcaaagtttaaatacaatgaaatgtcagagtttgcacatttttttctgtgaaaaaaat

SEQ ID NO: 343525 - DNA, 579 bp, Homo sapiens
tttttgttaatattgtggaacacaaacatttggcttcaaataaaaaagcataacactaataaatcaagcaatatgtttatcttaaatcccattctttttgtagtgactaacaaaaataagtataatttgaatctccrtaccctacatatatttgtttttaatgtttcttgattatcaataaattgttcctaaaattatagctctgagaaacatacttttgataatgttaggaagatttaaagatgacaagaagagactatatctatatttaatataaaagacataaccacgatgtgctgctattgacacagtacagaataaaatcacactaaatattaaatgatacctatgattcaaaactcattggtaagctgaccagacctcagttaaccaggttgtcaatccctcttaccgttaataaagaccaatgtatttcacctgagatccaaataaatgaaatacttttaaattcaagtgatttgctttacttattttttacataaagatgagtatgtatctaaaaggagacatatttgtaattctgtttttgcattttctgagagatctcaaatatatttg

SEQ ID NO: 343526 - DNA, 436 bp, Homo sapiens
tacttcagaaaataatagatgtactgtctattttagtaatcttctataacaaacttcagtgagtgatgccaagtatactatttcccagtaccacatatggtgtaataaaggattaaatatcggaaactccattttttttgttttgttttctgaccccagcgtaaaaaggracactaaaaggagctaaacatcctactgcaattacatttttgcttaaatgaatcttcaaaaaatgtagcttcatcgtcacataggataaatatcaatatgagcaaaattctcctactttactacattcccacactaaaaattattacaaagagactaagacttatctttcataagttatcattttatggacattaaaggcagttaatataataagctatttcacagttacagtattcatagcagaaattttgagtaagcaccaagc

SEQ ID NO: 343527 - DNA, 575 bp, Homo sapiens
attttgtcacccaggtactaagcttagtatccaatagtaatgttttctaagcctttccctaatttcatcctctgataggccccactgtttgtygttcccctctctgtgtccatacatcatttatctcccacttacatgtgagaatatttggtatttggttttcttttcctgcattagtttgctaaagataatggcctccagctgcactcatgttcctacaaaggacatgatctcattcttttttatggctgcattgcattccatgatgtatatgtaccatattttctttatccagtctatcattgatgggcatttaggttgattccataacttttctgttgtgaataatgctacaatgaacatgcacatgcatgtgtctttctgacacaatggtttataatcctttggtcatatgcccaataaggggattgttgtgttgaatggttgttatgttttaaactatttgaggaattgtcaaactgctttccacaatcattgaattaatttacactcccaccaacagtgtgtaagtgtcctttttctctgccaccttgacagcatctgttatttttctg

SEQ ID NO: 343528 - DNA, 575 bp, Homo sapiens
attttgtcacccaggtactaagcttagtatccaatagtaatgttttctaagcctttccctaatttcatcctctgataggccccactgtttgtckttcccctctctgtgtccatacatcatttatctcccacttacatgtgagaatatttggtatttggttttcttttcctgcattagtttgctaaagataatggcctccagctgcactcatgttcctacaaaggacatgatctcattcttttttatggctgcattgcattccatgatgtatatgtaccatattttctttatccagtctatcattgatgggcatttaggttgattccataacttttctgttgtgaataatgctacaatgaacatgcacatgcatgtgtctttctgacacaatggtttataatcctttggtcatatgcccaataaggggattgttgtgttgaatggttgttatgttttaaactatttgaggaattgtcaaactgctttccacaatcattgaattaatttacactcccaccaacagtgtgtaagtgtcctttttctctgccaccttgacagcatctgttatttttctg

SEQ ID NO: 343529 - DNA, 373 bp, Homo sapiens
gtgaataatgctacaatgaacatgcacatgcatgtgtctttctgacacaatggtttataatcctttggtcatatgcccaataaggggattgttgtgttgaatggttgttatgttttaaactatttgaggaattgtcaaactgctttccacaatcattgaattaatttacactcccaccaacagtgtgtaagtgtcstttttctctgccaccttgacagcatctgttatttttctgactttttaatactaaccattctgactggtgtgaggtgatatttcattgtggttttgatttgcatttctctaatgatcagggatattgagcttttttcatttgctttttggccacatgtatgtcttctgaaagtgttca

SEQ ID NO: 343530 - DNA, 616 bp, Homo sapiens
gaatattaaactattttatgagacagggtcttcctctgtcacccaggctggagttcagttgtgcaatctcagctcactgcaagcttgacctcccagtagcttggacctcagtctcccaaggagtttaaactacaggtrcacactatcacacctggctaatttttttttgtatttttgtagagatggggttttgtcgtgttgcccaggttggtctcaaactcctgggctccagtgatccacctcagtctcccaaagagctaggattgcaggcatgagccacaatgcctgggctaaacatgttttatagcatgtttgttagtataatagttaacacatttatatttttcaaaagatacaaattccaagtgtctaaacactttttcatagctctttcttctgaaaaatttattcttatattagtcatctttacgttaaaaataaaattccagtttgaaacattactcatgtatacagagtagcacagttctatgaagtatgagtcaaagagccactagtgaaagactaatcaaaatcagttacaaattcctagacacatacaatctaccagaattgaatcaagaaaaaaaaagaaagaaaatctggactgaccaataat

SEQ ID NO: 343531 - DNA, 616 bp, Homo sapiens
gaatattaaactattttatgagacagggtcttcctctgtcacccaggctggagttcagttgtgcaatctcagctcactgcaagcttgacctcccagtagcttggacctcagtctcccaaggagtttaaactacaggtacacactatcacacctggctaatttttttttgtatttttgtagagatggggttttgtcrtgttgcccaggttggtctcaaactcctgggctccagtgatccacctcagtctcccaaagagctaggattgcaggcatgagccacaatgcctgggctaaacatgttttatagcatgtttgttagtataatagttaacacatttatatttttcaaaagatacaaattccaagtgtctaaacactttttcatagctctttcttctgaaaaatttattcttatattagtcatctttacgttaaaaataaaattccagtttgaaacattactcatgtatacagagtagcacagttctatgaagtatgagtcaaagagccactagtgaaagactaatcaaaatcagttacaaattcctagacacatacaatctaccagaattgaatcaagaaaaaaaaagaaagaaaatctggactgaccaataat

SEQ ID NO: 343532 - DNA, 621 bp, Homo sapiens
tacaaattcctagacacatacaatctaccagaattgaatcaagaaaaaaaaagaaagaaaatctggactgaccaataatgagttaccaaattgaagaaataatagaaagtctcccataaaaaaagtgaaggactgttagtttaactgctgaattctacagaacatttaagaaaaaatgaatatcaattcttcaaaaaatattccgataaattgaaaataggagaatccttcaaaattcattgtgtaaggccagtattaccctcatgccaaagccagacaagggcacaacaacaacaaaagaaaattgtaggtcaaaaaaaaaaaaagaaaattataggccaaaaaagaaaattataggccaatattcccaaygaacatagatgcaatgcatcaataatacccaaaacaatctacagattcaatgcaatctctatcaactttccaatgttgttcttcacagaaatagaaaaaagcaattttataatttgtatggaaccacaaaagactgaatagccaaagcaatcttaaacaaaaagaacaaagttgaagtcattacactatctaattttaatctaaactataagtctgtagtaaccaaaacaatatagtattgacatacga

SEQ ID NO: 343533 - DNA, 615 bp, Homo sapiens
aaacaacttccataaagtttcaggatacaaaatcaatatataataatcagtagcatttctatacaccaaaaacattcaagctgacagccaaatcaagaatgcaatctaatttacaatagctacacaaaaaataaaatacctaagaatacatgtaacaaaggaggtgaaatatctttacaaagttaactacaaaagactgttgaaagaagtaatacatgggacaaacatggaaagacattctatgctcatggattaaaataattaatatcattaaaatggccatactgcccaaagcagtctacagatttaatgctatttctatcaaactaacaatgtcattcttcaaagaattagtaaaaacagttctataattcacatggagccaaaaaatattccagatagccaaagcaatcctaagaataaaraacaaagctggaggcatcttgttcctcaacttcaaactatgctataaggacataataaccaaaacagcatggcactggtgcaaaaacatacacatagaccaatggaacagattacagaacatagaaatagtcacacacctatagcatctgatttttgatgaagtcaataaaaataagcaatagggaaagg

SEQ ID NO: 343534 - DNA, 653 bp, Homo sapiens
ccacttctcagagaagacattaagtggccaatgaacatatgaaaaatttatcagcatcactaattatcagagaaatactaatcaaaactacaataatagacaatctgacaacagaatgactatattttcagataactatctattaatacaactttgcatgtttttcaacattttatttatgtgggatatatagtttttatcaactttcctctaatttttttcaactttcattttagaaacagggaaaatgtacagatttattacatgagaatactgcatggtactgaagtttgggacacaaatcctatcacccaggaagtgagcatagtaccctayaggtagtttttaaacccatctctccccattccatcccctagtagcccacattatctatttttctcatgtttatgcccatgtgtgctcaatgtttagctctgacttataaatgagaacatgtggtatttactttcctgttcctgagttaatttgcgtagggttatggcctccagctccatccatgttgccacaaaggacatgatttcattctttttttatatctgcatagtattctagaatctatatatatcacattttctttatttaatataccattgatgggcacttgggttgattctgtatctttggtattgtga

SEQ ID NO: 343535 - DNA, 653 bp, Homo sapiens
ccacttctcagagaagacattaagtggccaatgaacatatgaaaaatttatcagcatcactaattatcagagaaatactaatcaaaactacaataatagacaatctgacaacagaatgactatattttcagataactatctattaatacaactttgcatgtttttcaacattttatttatgtgggatatatagtttttatcaactttcctctaatttttttcaactttcattttagaaacagggaaaatgtacagatttattacatgagaatactgcatggtactgaagtttgggacacaaatcctatcacccaggaagtgagcatagtaccctataggtagtttttaaacccatctctccccattccatcccctagtagcccacattatctatttttctcatgtttatgcccatgtgtgctcaatgtttagctmtgacttataaatgagaacatgtggtatttactttcctgttcctgagttaatttgcgtagggttatggcctccagctccatccatgttgccacaaaggacatgatttcattctttttttatatctgcatagtattctagaatctatatatatcacattttctttatttaatataccattgatgggcacttgggttgattctgtatctttggtattgtga

SEQ ID NO: 343536 - DNA, 458 bp, Homo sapiens
agctataaaaaatgagatcatatcatttttagggacatggatggagctggaggccattattcttagcaaacgaatgcaggtagttatgtgtgggaaatgaatgatgagaacacatggacatatgcggtggtsgcgggggcggtggaacagaacacactgaggtctgttggagacagagtaggaggtaggaggagggagagcatcagaaagaatagctaatggattctaggcttaatacctgatgattggaagatgtgtacagcaaaccatcatggcacacagttacctatataacaaacctgcacatgtacccctgaatttaaaataaaagttggaaataatagcaataataataaagaaaaaaaatttcctattttttgaccaccccatccaacatcctacctgagtagactcacatacacagtaaaaaaattacattgtactaaataaatattgtt

SEQ ID NO: 343537 - DNA, 458 bp, Homo sapiens
agctataaaaaatgagatcatatcatttttagggacatggatggagctggaggccattattcttagcaaacgaatgcaggtagttatgtgtgggaaatgaatgatgagaacacatggacatatgcggtggtcgcrggggcggtggaacagaacacactgaggtctgttggagacagagtaggaggtaggaggagggagagcatcagaaagaatagctaatggattctaggcttaatacctgatgattggaagatgtgtacagcaaaccatcatggcacacagttacctatataacaaacctgcacatgtacccctgaatttaaaataaaagttggaaataatagcaataataataaagaaaaaaaatttcctattttttgaccaccccatccaacatcctacctgagtagactcacatacacagtaaaaaaattacattgtactaaataaatattgtt

SEQ ID NO: 343538 - DNA, 458 bp, Homo sapiens
agctataaaaaatgagatcatatcatttttagggacatggatggagctggaggccattattcttagcaaacgaatgcaggtagttatgtgtgggaaatgaatgatgagaacacatggacatatgcggtggtcgcgggggcggtggaacagaacacactgaggtctgttggagacagagtaggaggtaggaggagggagagcatcagaaagaatagctaatggattctaggcttaatacctgatgattggaagatgtgtacagcaaaccatcatggcacacagttacctatrtaacaaacctgcacatgtacccctgaatttaaaataaaagttggaaataatagcaataataataaagaaaaaaaatttcctattttttgaccaccccatccaacatcctacctgagtagactcacatacacagtaaaaaaattacattgtactaaataaatattgtt

SEQ ID NO: 343539 - DNA, 458 bp, Homo sapiens
agctataaaaaatgagatcatatcatttttagggacatggatggagctggaggccattattcttagcaaacgaatgcaggtagttatgtgtgggaaatgaatgatgagaacacatggacatatgcggtggtcgcgggggcggtggaacagaacacactgaggtctgttggagacagagtaggaggtaggaggagggagagcatcagaaagaatagctaatggattctaggcttaatacctgatgattggaagatgtgtacagcaaaccatcatggcacacagttacctatataacaaacctgcacatgtacccctgaatttaaaataaaagttggaaataatagcaataataataaagaaaaaaamtttcctattttttgaccaccccatccaacatcctacctgagtagactcacatacacagtaaaaaaattacattgtactaaataaatattgtt

SEQ ID NO: 343540 - DNA, 554 bp, Homo sapiens
atataaagtccttcagtatcttgcacaatatgatgggaagaagaaagtattttttccccatgtctaaaatttatttaatactttttccttataattatatgtccttctggaagaaaatgcttagaagcagttactataaaacagttattattgactcctgctattaatatgtcatggaggcaaatgtaaagaagaaagaatatttgttaggttattttttaattttattttcctaagtcagcatttttggaagtatctttaggattatttaattagaaatattatttttcttaggacctaatataaagacactggatttattctcgtgttattaaatgcrtataccaagaaacattttaatatgcaaattagaaacaatgctatatgtctagcatcgaattacacattttgtaatttttatataatttaatctttaaaaatgcaattaccacaaaagtagacagtggccatttttattccaattttctagatgaggaaattagtgttgaggggcaaatgaaaagctttatagctgtttgaactcagatcagaac

SEQ ID NO: 343541 - DNA, 554 bp, Homo sapiens
atataaagtccttcagtatcttgcacaatatgatgggaagaagaaagtattttttccccatgtctaaaatttatttaatactttttccttataattatatgtccttctggaagaaaatgcttagaagcagttactataaaacagttattattgactcctgctattaatatgtcatggaggcaaatgtaaagaagaaagaatatttgttaggttattttttaattttattttcctaagtcagcatttttggaagtatctttaggattatttaattagaaatattatttttcttaggacctaatataaagacactggatttattctcgtgttattaaatgcgtataccaagaaacattttaatatgcaaattagaaacaatgctatatgtctagcatcgaattacacattttgyaatttttatataatttaatctttaaaaatgcaattaccacaaaagtagacagtggccatttttattccaattttctagatgaggaaattagtgttgaggggcaaatgaaaagctttatagctgtttgaactcagatcagaac

SEQ ID NO: 343542 - DNA, 568 bp, Homo sapiens
ctaggagaatgatgatatccagcacgtgagtgaaagcccaacgatagaaaacagatttagcagtggcaatacaagtaaatttataggtctaatggcagaaaattggtgcctgttttctcagtaagtggaaagtgagtttatctgctgagtatagaggagagtttgtagggtcagaagtttaaagcrattggaaacttttgaaataactgttgtgataaatgagaaagggaggtgatgaaggaaatggaaggttgttctgcaatattgagggcaaacatgaagttgaacacttaaatttatggtggccacaatctaaaggttgtacaatttactacggcaatattcaggagcctcagactgggagagaggatgatcatttggagtttcccaagactagggtttatccagaagagttaaaaaaaaaaacggacgatagggaatatggttaagtttttgatgacagagcttgcgtgataacacatgcagcctagtaggaacgccaaaaaacaaagaagaaattgataaataagagaaaaacaaagcaaaactaaagtgtaagctgtaaaat

SEQ ID NO: 343543 - DNA, 568 bp, Homo sapiens
ctaggagaatgatgatatccagcacgtgagtgaaagcccaacgatagaaaacagatttagcagtggcaatacaagtaaatttataggtctaatggcagaaaattggtgcctgttttctcagtaagtggaaagtgagtttatctgctgagtatagaggagagtttgtagggtcagaagtttaaagcgattggaaacttttgaaataactgttgtgataaatgagaaagggaggtgatgaaggaaatggaaggttgttctgcaatattgagggcaaacatgaagttgaacacttaaatttatggtggccacaatctaaaggttgtacaatttactacggcaatattcaggagcctcagastgggagagaggatgatcatttggagtttcccaagactagggtttatccagaagagttaaaaaaaaaaacggacgatagggaatatggttaagtttttgatgacagagcttgcgtgataacacatgcagcctagtaggaacgccaaaaaacaaagaagaaattgataaataagagaaaaacaaagcaaaactaaagtgtaagctgtaaaat

SEQ ID NO: 343544 - DNA, 648 bp, Homo sapiens
acacttaaatttatggtggccacaatctaaaggttgtacaatttactacggcaatattcaggagcctcagactgggagagaggatgatcatttggagtttcccaagactagggtttatccagaagagttaaaaaaaaaaacggacgatagggaatatggttaagtttttgatgacagagcttgcgtgataacacatgcagcctagtaggaacgccaaaaaacaaagaagaaattgataaataagagaaaaacaaagcaaaactaaagtgtaagctgtaaaatrgatacaggtagatcagatatagagtttttaaaaaagagagaaaccaagttgtccacttcagaattggaattctcaataggccaaataagatatatagtggaggtaattaaattagaataattgggtgcaaaaacaacataatattgcagagatgtgatgtaggaattcacgctattagaagtacaaatgtaaccatgagaatggatataaagggaaattcactgaatatcatatttttcagtcactaagttgccatgtaccattggaaattccacatgaatttgaagtcagaacaaatgtggtgaaatatttaaggggagagcaagacatcatatacgttttaaattctgtagtaactggatgca

SEQ ID NO: 343545 - DNA, 545 bp, Homo sapiens
gaaacttacaatcatggtggaaggggaagcaacatgtccttcaacacatgatggcagccaagagaagtacccagaaaaggaggaaaagccccttataaaaccatcagatcttgtgagaactcactcactatcatgagaacagcagcatgggggtaactaccccyatgtgtgtgggaacacagcccaaatcatatcaatcaaaataatacaaaattaaatattaaaaacagagacaaaattgaaagacgaatagagaggttaaaatacagattattttgatcaaagttaaaataaataataaatggttagttttatatttctattttatcccctcattctcacttgttcacctagtttatttttctttttatcccacctaaaagcagaaataaaagtccaaagaatttcttcacctatatgtcagaagaaagtttaattgcatttgttctcaggataaggcttctcttctctttggtactagataaccctgaatctgggaaataggatcataattgttcatgatattaaatatcacataagtcatt

SEQ ID NO: 343546 - DNA, 545 bp, Homo sapiens
gaaacttacaatcatggtggaaggggaagcaacatgtccttcaacacatgatggcagccaagagaagtacccagaaaaggaggaaaagccccttataaaaccatcagatcttgtgagaactcactcactatcatgagaacagcagcatgggggtaactacccctatgtgtgtgggaacacagcccaaatcatatcaatcaaaatartacaaaattaaatattaaaaacagagacaaaattgaaagacgaatagagaggttaaaatacagattattttgatcaaagttaaaataaataataaatggttagttttatatttctattttatcccctcattctcacttgttcacctagtttatttttctttttatcccacctaaaagcagaaataaaagtccaaagaatttcttcacctatatgtcagaagaaagtttaattgcatttgttctcaggataaggcttctcttctctttggtactagataaccctgaatctgggaaataggatcataattgttcatgatattaaatatcacataagtcatt

SEQ ID NO: 343547 - DNA, 587 bp, Homo sapiens
ggaaccatggtcactcaactacaaaatttaaatacaatgggaataattggattccaagatggcaggggccaagtggcagcactcaaacgtcaaaggcaaggtgggtgtagctaccataatggacagcagaggcaaagcagcaatcagaatagtctgactcgtgtagaactctggccattggctgattaattacagtgttcctagaagtaaaactgataggaagcctactacattcctactaaatttacataagcagaaaatttccagattaatttccaaattaatcaggcaaagattaatttgaatataaaaacagagaatcatggcccctcaatcaatttcttgacttgagccagtttacagacccagaaagaagaggagactgagtccccttgagaaaagaccccactacactgccaacactttatgctgttaatcattcacccatccttccctttggagaactccagccttgtaccagggtaactgtgcactggggaaasggaaatgatcagacattttgaggactagtgggcactgactctgatctggaatagacacttactccggatatgggtttgcctatc

SEQ ID NO: 343548 - DNA, 493 bp, Homo sapiens
aactcactcactatcatgagaacagcagcatgggggtaactacccctatgtgtgtgggaacacagcccaaatcatatcaatcaaaataatacaaaattaaatattaaaaacagagacaaaattgaaagacgaatagagaggttaaaatacagattattttgatcaaagttaaaataaataataaatggttagttttatatttctattttatcccctcattctcacttgttcacctagtttwtttttctttttatcccacctaaaagcagaaataaaagtccaaagaatttcttcacctatatgtcagaagaaagtttaattgcatttgttctcaggataaggcttctcttctctttggtactagataaccctgaatctgggaaataggatcataattgttcatgatattaaatatcacataagtcattctcacttcacaatttcatggaaaatgaaacaaaagtttcaattcaacacttaaagatttattaat

SEQ ID NO: 343549 - DNA, 501 bp, Homo sapiens
aatgcattttggcattgtgaggtatggaaatagctaaagccatgtgccatatgtccaaaaaataattttccggaaatctttataataagagtatttcactgggactaggccaaaaatcaaatctatgaccaaagatgactrttgtgaaatatgacattataaaatattctttatcaattaatagatttatctaatatttgtgagcattttactttgtatcctaatgactcattatctctgatgcacttctccagctttttcatgttttagccttgtttactcattgtttctcttaatagtggttgaagaataacacttgttattacaggaactggggtgtttagttgtgctgcaaacctgttgctttgcttgttgctgctgaggaaataattgatactttgcatattctcctgtcctctttttcctactgtggccctttgcatggctaaaatgggagccaatgactcaattctgtattggagaaagtgaaaacaatttcta

SEQ ID NO: 343550 - DNA, 501 bp, Homo sapiens
aatgcattttggcattgtgaggtatggaaatagctaaagccatgtgccatatgtccaaaaaataattttccggaaatctttataataagagtatttcactgggactaggccaaaaatcaaatctatgaccaaagatgactgttgtgaaatatgacattataaaatattctttatcaattaatagatttatctaatatttgtgagcattttactttgtatcctaatgactcattatctctgatgcacttctccagctttttcatgttttagccttgtttactcattgtttctcttaatagtggttgaagaataacacttgttattacaggaactggggtgtttagttgtgctgcaaacctgttgctttgcttgttgctgctgaggaaataattgatactttgcatattctcctgtcctctttttcctactgtgsccctttgcatggctaaaatgggagccaatgactcaattctgtattggagaaagtgaaaacaatttcta

SEQ ID NO: 343551 - DNA, 564 bp, Homo sapiens
ggaaggcatgattggttttgaaatgtgaggacatgagatttgggaagggccaagtgtggaattatatggtttggctgtktgcttatccaaatatcatattgaatgcccacatgttgtgggatggatgcagtaggaggtaactgaatcagggtggcaggtctttctggtgttgttctcatcatagtgaatgagtctcacaagatctgatggttttaaaaatgggagtttccctgcacactctctcttctcttgtctactgcctcgtgagatgtgtctttcaccttctgccatgattgcgaggcctccccaaccatgtggaactgtaagcccattaaacctctttcttttataaattgcccggtctcaggtatgtctctattggcagtgtgaaaacgagctaatacagatggtgaaacatgtcttagtcttatactaatacagctggtgaaacaggtttcttagctttatctttaggaaaagaactaccatagttatgttagtagttggtggagctatacttgtactttttttcctctaactgatatctgctttttaatgaagtag

SEQ ID NO: 343552 - DNA, 564 bp, Homo sapiens
ggaaggcatgattggttttgaaatgtgaggacatgagatttgggaagggccaagtgtggaattatatggtttggctgtttgcttatccaaatatcatattgaatgcccacatgttgtgggatggatgcagtwggaggtaactgaatcagggtggcaggtctttctggtgttgttctcatcatagtgaatgagtctcacaagatctgatggttttaaaaatgggagtttccctgcacactctctcttctcttgtctactgcctcgtgagatgtgtctttcaccttctgccatgattgcgaggcctccccaaccatgtggaactgtaagcccattaaacctctttcttttataaattgcccggtctcaggtatgtctctattggcagtgtgaaaacgagctaatacagatggtgaaacatgtcttagtcttatactaatacagctggtgaaacaggtttcttagctttatctttaggaaaagaactaccatagttatgttagtagttggtggagctatacttgtactttttttcctctaactgatatctgctttttaatgaagtag

SEQ ID NO: 343553 - DNA, 559 bp, Homo sapiens
attgcctaactgatcacctgcttcctgttaaccaactcctcttccttacctcttgctaattcctgtttttctgcatgcagctacatttcttctctgctacataaacctctcatttcagttgatcagagagaagaatttaagactgatcccccatgtcctcaaatgcagcacccaattaaagcttttttccctggcaacatttgttgtctcagtgattgacwttctatgcagtgaatagcaggatgtagaccaaacccctggtgttttgataacaatttcatgtattttattgggaagactgggacccagggagcctctacatagaattataagaccatggtgtgtcaaaaaattatttaattcaccgatttaggtactatctaataatgattcattgtctctgccttgcactatgtttgaagtgcttcctacagacttacataggctcacaattttccttacataagcctgaaaaatagagttcccctcctgattttccactactatgccaaagctatgtggaagtttctaatttcactctggccaataagtgtgggcc

SEQ ID NO: 343554 - DNA, 498 bp, Homo sapiens
tggtatggatgtggtgaacaaggaacacttctacaatgctggtgggaatgtaaactagtacaaccactatggaaagcagtgtggagattccttaaagaactgaaagtagaactactatttgatctaacaatcccactactgctaatgcctatctacccagaggaaaagaagttatacacttgcacatgcattttttgtatatatatatatatatayacacacacacacacacacacacacacacacacatgcacaatggaatactactcagtcataaaaaggaatgaattaatggcatttgcagcaacctggatgagattggagactattattctaagtgaagtgactcaggaatggaaaaccaaacatcatatgttctcactcataagtgggagctaagctatgaggacaataagaataacacaatggactctggagactcagagggaaagagtatgaagggggtgagggataaaataatacaaattggatgcagtg

SEQ ID NO: 343555 - DNA, 498 bp, Homo sapiens
tggtatggatgtggtgaacaaggaacacttctacaatgctggtgggaatgtaaactagtacaaccactatggaaagcagtgtggagattccttaaagaactgaaagtagaactactatttgatctaacaatcccactactgctaatgcctatctacccagaggaaaagaagttatacacttgcacatgcattttttgtatatatatatatatatatacacacacacacacacacacacacacacacacaygcacaatggaatactactcagtcataaaaaggaatgaattaatggcatttgcagcaacctggatgagattggagactattattctaagtgaagtgactcaggaatggaaaaccaaacatcatatgttctcactcataagtgggagctaagctatgaggacaataagaataacacaatggactctggagactcagagggaaagagtatgaagggggtgagggataaaataatacaaattggatgcagtg

SEQ ID NO: 343556 - DNA, 571 bp, Homo sapiens
aatattgaattaaatatggttttcccaagggaaagtacagatcttgacagtggattctggtaaacatttatgttagaaataattctaaagcaaactcttcctgagtatagagagagaagatgtgctctccaacccaggagactgccataactttgacgccaaaaccccataacaacagtataaggaaagaaagaaaatacatgccaattagatacgtctataaaaattttgtaaaaagtttagaaaaataaatccatatgtatycatgtaaaaaatgatgatatatcatagccagtttgaattttttctgggaatgaataattggtttaacattagactatcaatttttaaaatgtattattttaaccacatggacagaataagggaaaaaaatataaacaatgcattacatgccaaaagtgtttgataaaattcaacatttagtcataattaaagaaaaactcctaagaaactagaaatataagggaacttctttaatctcataaatggtatctcataaagcaaactacagcagtcattatacctaatgattaaatgttataaaatctca

SEQ ID NO: 343557 - DNA, 553 bp, Homo sapiens
ttcaatcaggcaacagctcaaatactacccctttcttccttaatctacctaaaacagaacccccttcccagygttgtgctggtaaatgttcacaactgggtatctggaggaaaaatatatgcatgtgtatatatacttaggtctattataaattttactgatataaaagatgtatatcacacaatttacaaataataacatgcatcatttattttagtaaattttacatagtcagcaaattctcacagaatgcttcggttaatttttgccatacttttgtatccacagcccacttatggttgcaattgaacaagtatagacccatccacgtcactgaatgcagacttggaaagagatgtacagtatttctataatactattcagatataatagatgtaaataaccacaatagcatatataacagcaacatgtagtaaaatgagaaagtgttgttttgagtaggcgttactttttttcctaatgtgatttatttctttttaaatatttacaatttaatttttcaatattcgctctgtttagcaactgggttgca

SEQ ID NO: 343558 - DNA, 596 bp, Homo sapiens
atccagttactaaggagggaaagaaaccacataatgtgtttcaatccccaaagtcatttcccccaaattaagacttacccttctgttttctagatgtaccaacagccaatattttataaatctttccaggattcttctaagacttgaatactcagttgttgttgctggatttccctcctcttcccaaagaaatttgcctgctttctaaggctgcctttcccaaggacagggaccttatatccttagtcttttagattgtatcayctctttacactccaaccttcagaggaaaatgttggacaggatcttgaagttggaagccaccttatgaatcaaggccattttcttcatttcgtacactgtggctcaaagcggttgattgactctctgaaggcccagtactctgggcaagcagtgattaagagctccacctccagagtcccaccccctggcttagacaccagcaccaacgcctgtaagttgtgggatcttgggcaagctcctttacctctctgagcctctgtttctgcatttgttaaaagagtaataagaatagtacccttctcttggaaaagtgataaggatcaacgaaataa

SEQ ID NO: 343559 - DNA, 611 bp, Homo sapiens
ttaaatttagaatgtagcataagtagaaatcttatacgtgcttggcccttaaataggtctgccaccttcagacaccaagctatgctagccaatgttgcagctcgtactctttgctagaactccatgtttcattcaggactcaactcaaatgccatctcttaagagagactttcctgagaactctttaaatatatatagtgcccttcacagtaccttatttaattgtcttcaaggagttcacattacctttcatttattttcaccacagaaaacccagtagaaagagttttataaattttcaggttcaattgctctttaagagcaaactcaatcctttcaatatgtactctccagttgggttttcagaaaaacaacaaatatgtggccattcccaggaccatgaagcagctgcaactaaatttacaaatggtgatgaacaagcaacacagcctctcccacagmcatgtggtgagctccttctctcagtgaggccagcattcaccagcatgcatccccagagattctatccttattggagttaaactgtcctaactcttagtacttatttctctggctggcagaatagagataggatataattgttatctgat

SEQ ID NO: 343560 - DNA, 596 bp, Homo sapiens
taagtttgagtatctcatcctgtgttacttcatctacaaaataaagggcctaaacttggtgatttctcttccttaattccagcctttatatcctatgattctactattatagaatgttgaataatgttaccccaaaatcgatttcaactcagaacctaagaatgtgatcttatttggaaataggatctttgcagatgtagttagttaagaagcccaagattagatcaacctacattcagaataggccctaaatatagtcaccaaagtgaaaaagcccactcctcacctgcttcacagcaatgagttactytatgagcacagcaactagaaattaaaataaaagaagagagacactgggggaatatgctcataatccaaaccttagtgcacccacataactttttaaatgctttgttgtggtggtggtggttgtcgttatttaccttgagtattagcaaaaagtgaggctaatgaagtcctggtgtgtggaagaaccacagatgtgctctaaatcaggctctaaaggatggatgaagggaggctgtttactacaaacacctaccccttgagaggagaaactcagcacgacaactgct

SEQ ID NO: 343561 - DNA, 560 bp, Homo sapiens
taaataatctacaagtaagtcctaaaactgcaaatgattcagtagttcacattttgacttcttaagactttgcaaactrccaaagactgtctgcttcttcttgaagaatgcttttgtttctttctcttaactcaggcagctttctcctggtccccatgactgctgagtccagaaatgtgaagcattctcacaggagagctccccctcctgtctttcgtctttcacatctcgtttaaatttctaattcctcaaagcttaaagaaagagaaatgcctcaagacaagctgaactgggaaagtcaaagtgaatcgtgataaggggttcaattacagcccgtgcattctccttatctgggtgacaaacacactcatataatttgagttcccactcttgttatactttgaaagtgattagaaagccttaatatattttgaaagaacgcaacttctctactgtattctacataaattgcatactaagctagcctgaaaggagaaattttatttcaaaggaagattagaaagtgccttttttaaagctatcaaagctgataccaagat

SEQ ID NO: 343562 - DNA, 560 bp, Homo sapiens
taaataatctacaagtaagtcctaaaactgcaaatgattcagtagttcacattttgacttcttaagactttgcaaactgccaaagactgtctgcttcttcttgaagaatgcttttgtttctttctcttaactcaggcagctttctcctggtccccatgactgctgagtccagaaatgtgaagcattctcacaggagagctccccctcctgtctttcgtctttcacatctcgtttaaatttctaattcctcaaagcttaaagaaagagaaatgcctcaagacaagctgaactgggaaagtcaaagtgaatcgtgataaggggttcaattacagcccgtgcattctccttatctgggtgacaaacacaytcatataatttgagttcccactcttgttatactttgaaagtgattagaaagccttaatatattttgaaagaacgcaacttctctactgtattctacataaattgcatactaagctagcctgaaaggagaaattttatttcaaaggaagattagaaagtgccttttttaaagctatcaaagctgataccaagat

SEQ ID NO: 343563 - DNA, 560 bp, Homo sapiens
taaataatctacaagtaagtcctaaaactgcaaatgattcagtagttcacattttgacttcttaagactttgcaaactgccaaagactgtctgcttcttcttgaagaatgcttttgtttctttctcttaactcaggcagctttctcctggtccccatgactgctgagtccagaaatgtgaagcattctcacaggagagctccccctcctgtctttcgtctttcacatctcgtttaaatttctaattcctcaaagcttaaagaaagagaaatgcctcaagacaagctgaactgggaaagtcaaagtgaatcgtgataaggggttcaattacagcccgtgcattctccttatctgggtgacaaacacactcatataatttgagttcccactcttgttwtactttgaaagtgattagaaagccttaatatattttgaaagaacgcaacttctctactgtattctacataaattgcatactaagctagcctgaaaggagaaattttatttcaaaggaagattagaaagtgccttttttaaagctatcaaagctgataccaagat

SEQ ID NO: 343564 - DNA, 625 bp, Homo sapiens
agagcctactcctagctggaactttgtcttgctcatctaagcaaacctcttcaccattacttttatttctccctatccattcaaaatcactgcttcatcttattttgcttctgttgcaaaccaaaatctgccttttcatcagtacttcagtcaacacacttatcacaatattaattgtgagtatatcatgtccyaagatgtatgtcaggcaacaagggtacaatagtgctcaaggcatcagccaggcatggtggctcatgcctgtaatcccagcactttaggaggctgaggtgggtggatcacctgaggtcaggagttcgagaccagcttggccaatatggtgaaaccccatctctactaaaaatacaaaaattaaccaggcattgtggcaggcacctgtaatcccagctactcgggaggctgaggcaggagaatcgcttgaaccctggaggcggaggttgcagtgagctgagatcgtgccactgcactcagaggtgccactgcactcagggtgacagagcgagactctgtctcaaaaaaaaaaaaagtgatcaaggcatcaatagtaatcattttctaataagtatgaaggaaaacgtacatattctttataaagtcactatta

SEQ ID NO: 343565 - DNA, 554 bp, Homo sapiens
ttggttgtgaggatttggccctcaaattagggttgctagattatgcaaataaaaagagaggatgtctattaaaycttaatttcaggtgaattaacaaaggtttttggataaatatattctatgtaatatttgggacatatttatactaaaaagttatttgttgttttacctgaaatgcaaatttaactggatgctttgtatttttctgataatgtgcctcaaaatctaacaatctgtttattcttctgattcctgattgttctcctccagagaccaatagtgacacttccacgccaaaatgaaactttattgcaagcttttgagataaatggaaaacctcagtcatagagtctcaattgtataactggaatggactctctgtatgatgctgctcacttctttctgctcgctccaattttcatataaatttaaagaacgtgtcttttgttttagattattgtataattaacttctttgtcagaagaaatgagacaagcatattaaatgaaatttaatttaatttgactaatagttgttccatgctgagctaggca

SEQ ID NO: 343566 - DNA, 554 bp, Homo sapiens
ttggttgtgaggatttggccctcaaattagggttgctagattatgcaaataaaaagagaggatgtctattaaatcttaatttcaggtgaattaacaaaggtttttggataaatatattctatgtaatatttgggacatatttatactaaaaagttatttgttgttttacctgaaatgcaaatttaactggatgctttgtatttttctgataatgtgcctcraaatctaacaatctgtttattcttctgattcctgattgttctcctccagagaccaatagtgacacttccacgccaaaatgaaactttattgcaagcttttgagataaatggaaaacctcagtcatagagtctcaattgtataactggaatggactctctgtatgatgctgctcacttctttctgctcgctccaattttcatataaatttaaagaacgtgtcttttgttttagattattgtataattaacttctttgtcagaagaaatgagacaagcatattaaatgaaatttaatttaatttgactaatagttgttccatgctgagctaggca

SEQ ID NO: 343567 - DNA, 554 bp, Homo sapiens
ttggttgtgaggatttggccctcaaattagggttgctagattatgcaaataaaaagagaggatgtctattaaatcttaatttcaggtgaattaacaaaggtttttggataaatatattctatgtaatatttgggacatatttatactaaaaagttatttgttgttttacctgaaatgcaaatttaactggatgctttgtatttttctgataatgtgcctcaaaatctaacaatctgtttattcttctgattcctgattgttctcctccagagaccaatagtgacacttccacgccaaaatgaaactttattgcaagcttttgagataaatggaaaacctcagtcatagagtctcaattgtataactggaatggactctctgtatgatgctgctcacttctttctgctcgctccaattttcatataaatttaaagaacgtgtcttttgttttagattattgtataattaacytctttgtcagaagaaatgagacaagcatattaaatgaaatttaatttaatttgactaatagttgttccatgctgagctaggca

SEQ ID NO: 343568 - DNA, 497 bp, Homo sapiens
ttagcagtttccttatcagaatgaggcagttccacatccttttgcagacagacatcaaaatactggctcttcccttctttatttctgactgtctcccctgtgagtcaaaaccacagtaaaaaaggattgtcacacagtaagctcaccaccgaagagtggagagtacctggctgccttatgaaaagtcagttagagtccctctttttaaggttctcactgggatggtttttattttgcataaaatttgttttaaaaatcctctctgtcccttttgaactgsatcagcagctttcagctcctttcagaaaccccttggctgctggccttttctctctgaatacccgttaagcaggcaacactataggaaaatctttaaacatggttttgcagagttgttttctcataacaactccaattttaaattacaaaaaaaatctcattttttatcaacatgctaagtctaagacaatattcagctgacatagctgaatgggcat

SEQ ID NO: 343569 - DNA, 497 bp, Homo sapiens
ttagcagtttccttatcagaatgaggcagttccacatccttttgcagacagacatcaaaatactggctcttcccttctttatttctgactgtctcccctgtgagtcaaaaccacagtaaaaaaggattgtcacacagtaagctcaccaccgaagagtggagagtacctggctgccttatgaaaagtcagttagagtccctctttttaaggttctcactgggatggtttttattttgcataaaatttgttttaaaaatcctctctgtcccttttgaactggatcagcagctttcagctcctttcagaaaccccttggctgctggccttttctctctgaatacccgttaagcaggcaacacwataggaaaatctttaaacatggttttgcagagttgttttctcataacaactccaattttaaattacaaaaaaaatctcattttttatcaacatgctaagtctaagacaatattcagctgacatagctgaatgggcat

SEQ ID NO: 343570 - DNA, 366 bp, Homo sapiens
ataacacatcactttcctgccattatttaataacttcagtttttaaaattatgggtagattttataaaccacccaggagaaattcatattcatcttttctgtacccactaattttgaattttgcttggaaaatgagatcaaaagaaatactcttttgaaatgtttggaaggtgatgccaatgagaaatgctaatatctcttgtattatacataactaattaaacaaccaaaatgttggaaatgaagtgttaagtgagaagcagtttgacacagagtaaaaaacttgagtrtgaggtttgacttcaccatttacttgccctgtaactttgcaaaagttaacttttctgagcttgaattaaaaaaata

SEQ ID NO: 343571 - DNA, 656 bp, Homo sapiens
tgtgctcttcagttgcactttattagctgtagtaattgtagttgagtttaataatttcataagatacttagatatgataacttggtcattattcagggggcacttttatggaaactgcgggctcctgaacaagtgagaaactcatgctaatttctccttttggttacctgttaagaagttcttgaacattacacctcccagtcaattatagtcataaatgcccaacctggagaggtagaacaaggcattccatagctcagagaataccagttgtttaagaacctgagcctgaaagagggtaatacattttccttgattgccaccatccccaagcctgggaatattatgtggctatgctacagaggaagaaaataatattgttgtttgttaattatgttttatagtattttttgataagcctgtaatgacctttccccaaggttgctttttctctggaatctgcatatgcagaacagggtaatcttctaaastagaacacaaagttttagcagtgtgaggtgaagtatccttttctaccttccctttgttacactgacttgggtgaattctccctaccacccctggaccctgcactgaacttgtcccttccacctccttgagaaagagtgtggggcaagggaccaggacaaatgcca

SEQ ID NO: 343572 - DNA, 547 bp, Homo sapiens
tctgtaacttcttcagactgaataggagcaatgatattcctgcctaactgttagggtctcttgtattcagggtagggaggagctcagtcagaaagcattggtatgctgatggccattcataactcttgaattccaacaaaaggtaatatccggaagattaataagtgttaaattttaaaaatattcagtaagttatcctgcattcccaaacaaagagtatagcagcaatatattccacaacagtaaagcaaaataagcaaaattatcccaagtaaacyaaacaagaaggctttccatgaactgggcaactgctggaaccaagctcatatggggttcctaactgattccaatatgtgtccagaattagaatagtgatctggatttttacattacccatctctcttgtttctactgagctacggtgagagatcactggcttgttcacaggacaagcagtcattctaaattgcaggaaaaatcttagaaacaactgatgagactggaatccaataacaaatataccatagttcttgaagcataatttttc

SEQ ID NO: 343573 - DNA, 547 bp, Homo sapiens
tctgtaacttcttcagactgaataggagcaatgatattcctgcctaactgttagggtctcttgtattcagggtagggaggagctcagtcagaaagcattggtatgctgatggccattcataactcttgaattccaacaaaaggtaatatccggaagattaataagtgttaaattttaaaaatattcagtaagttatcctgcattcccaaacaaagagtatagcagcaatatattccacaacagtaaagcaaaataagcaaaattatcccaagtaaactaaacaagaaggctttccatgaactgggcaactgctggaaccaagctcatatggggttcctaactgattcmaatatgtgtccagaattagaatagtgatctggatttttacattacccatctctcttgtttctactgagctacggtgagagatcactggcttgttcacaggacaagcagtcattctaaattgcaggaaaaatcttagaaacaactgatgagactggaatccaataacaaatataccatagttcttgaagcataatttttc

SEQ ID NO: 343574 - DNA, 547 bp, Homo sapiens
tctgtaacttcttcagactgaataggagcaatgatattcctgcctaactgttagggtctcttgtattcagggtagggaggagctcagtcagaaagcattggtatgctgatggccattcataactcttgaattccaacaaaaggtaatatccggaagattaataagtgttaaattttaaaaatattcagtaagttatcctgcattcccaaacaaagagtatagcagcaatatattccacaacagtaaagcaaaataagcaaaattatcccaagtaaactaaacaagaaggctttccatgaactgggcaactgctggaaccaagctcatatggggttcctaactgattccaatatgtgtccagaattagaatagtgatctggatttttacattacccatctctcttgtttctactgagctacggtgagagatcactggcttgttcacaggacaagcagtcattctaaattgcaggaaaaatcttagaaacaactgatgagactggaatcyaataacaaatataccatagttcttgaagcataatttttc

SEQ ID NO: 343575 - DNA, 582 bp, Homo sapiens
gttttattatacttggcctgattatttgtataaagtgcagcaagaataattatttttcacataggattttaaaattgacttagatggaactttgttccatagaaggaatctcagataagacttttttagagccaagctcagacatggacttataccttcaaatacctatgagttacgtaaattctctcctcttgaggtcccaagataacttagagctcctgggcctgtcataaagtgacattctgtacttaccacaggttggaaaccctgcacaaggtctgtgtagacaaggtatgaggctagttttcccaagggaattttattggctctgtaagtcaagtgtaatkcattaaaggaaaacatgccattctagtcaaagccttggtaaaataaccagtttcttgaattgtgtcctgttacaaaagaaaacatccttattgtacttatccaaataactatattgacctaagaatattgataactagttttcaaattctggagaaatcaggtagagagaaacaaatatgctccaaattttgtttacaggagtgtactttacttaactgttaaaagctatacata

SEQ ID NO: 343576 - DNA, 581 bp, Homo sapiens
agccaatatgttcacacacagaatttcttttatgagcttaatttttcacaaaccttccacaacttgctcaaacattcagcttttcttacacaccttgcatgtaaaactgtctttatttcccaaagattactaatcatgtgaactaaaagacattatagttttcatttttctgataaaatagtgatttaagctcttatttttaaaccaattaataaaaggtcttttatatcacacacacacagcatatataaatacactgacagacacaagatttagtaattgtaaggtttttttatttgtcagtttcttaattggattactggctccagagtggagtccttggaggaacagggtcaggaaagsatgcagtttctacagcctaataagcaggcacagctggaaggcaaaacagagccaccaaaattaagggtcccattttataccagatcctaaatccccccacccaaacaagaaggaatcagctcatcttccatgggagtcttatgtctcagttgaagataagaaggtatttccataccttcaaggtggccaagagcatgcttctctaatccaaacatgca

SEQ ID NO: 343577 - DNA, 581 bp, Homo sapiens
agccaatatgttcacacacagaatttcttttatgagcttaatttttcacaaaccttccacaacttgctcaaacattcagcttttcttacacaccttgcatgtaaaactgtctttatttcccaaagattactaatcatgtgaactaaaagacattatagttttcatttttctgataaaatagtgatttaagctcttatttttaaaccaattaataaaaggtcttttatatcacacacacacagcatatataaatacactgacagacacaagatttagtaattgtaaggtttttttatttgtcagtttcttaattggattactggctccagagtggagtccttggaggaacagggtcaggaaaggatgcagtttctacagcctaataagcaggcacagytggaaggcaaaacagagccaccaaaattaagggtcccattttataccagatcctaaatccccccacccaaacaagaaggaatcagctcatcttccatgggagtcttatgtctcagttgaagataagaaggtatttccataccttcaaggtggccaagagcatgcttctctaatccaaacatgca

SEQ ID NO: 343578 - DNA, 574 bp, Homo sapiens
acaggcacctcaccacatacagatggcaataagcatatgaaaagatgtattacatcatatgtcatcagggaaatgcaaattaaaacaacaatgagctaccactacacatctcttagaatggccagaatctgacactgacaacagcaagtgttaccagggatgtagggcaacaggaactctcatttattgctggtgggaatgcaaaaccatacagcaacattggaagacaggtgatttttctataaaagcagacacactcttatcatatgatccagaaattttgttccttcatgtttagcaaaaggtagctgaagccttatgtccacactaagaccagcayatggatattttatatcagccttgttcataattactaaaacttgaagaaaccaagattattccattaggtgaatggctaaatgtactgtggtacatccagacaatgaaatattatttagtactaaaaattaatgaattatcaagccataaaaaaaagatggaggaaccttaaatgcatatgactaagtgaaacaaatcaatctgaaaaggctacacaccttaatttcaattattt

SEQ ID NO: 343579 - DNA, 506 bp, Homo sapiens
gttttcttactgcaaatgggttgctttttttattttaaaaaattacttgctgataatatatagagatgctactaatttttgtatgttaattttgtattatgaacctttactaaatttgtttttatcatcctaatgttttcagtgaagtcattagatttttctaaatatagaattatgtcatccataaacaaggatattttgatatctccctttccaatttgaatattctttatttctttctcttgcttaatagctctggttggtacttccagtaatttgttgaataaaagtagtgaaaatgggcattcttgttttgttccagatcttaggggaaatacttttacttttttcccattgagtatgatggtaggcatgggtttgtcatagatcgcctgtgttgttttgatgtatgttccttctgaactcagtttgttcagagtttttatcrtaatagggtgctaaatattaagtaatactttttcagcatctattgaaatgatcacata

SEQ ID NO: 343580 - DNA, 609 bp, Homo sapiens
ttcttttttgttgctgctgtatgcttgtttggttttggtatcagagtaatgctggcctcaaagaatgagtttaaaattattccctccttttcaattttactggaatagtttgaatagaattggtattagttctttcttaattgtataatagatttcagcagtgaatccatcaggtcccagtcttttctttaatgggagacttaattactgctttgatctcattactcattgttggtctgtccaagatttctacttttttataattcaatgttggtaagttgcatgtttccaaaaatgtatcgatgtcttctaggttttccaatttattggcctrtagttgttcataatagtgtctaataatcctttgttctgtcatgtctcttgtaatgtttccttttttgtctctgattttatttacttgggttttctctctttttttcttagtccagttaaaggattgatgattttgtttatcttttcaagaaaccaacttttcattttattatcttttgtgaatttttttttttttgtgggttttttttattattgtactttaagttttagggtacatgtgcacaatgtgcaggttagttaaatatgtatacatgt

SEQ ID NO: 343581 - DNA, 609 bp, Homo sapiens
ttcttttttgttgctgctgtatgcttgtttggttttggtatcagagtaatgctggcctcaaagaatgagtttaaaattattccctccttttcaattttactggaatagtttgaatagaattggtattagttctttcttaattgtataatagatttcagcagtgaatccatcaggtcccagtcttttctttaatgggagacttaattactgctttgatctcattactcattgttggtctgtccaagatttctacttttttataattcaatgttggtaagttgcatgtttccaaaaatgtatcgatgtcttctaggttttccaatttattggcctgtagttgttcataatagtgtctaataatcctttgttctgtcatgtctcttgtaatgtttccttttttgtctctgattttatttacttgggttttctctctttttttcttagtcyagttaaaggattgatgattttgtttatcttttcaagaaaccaacttttcattttattatcttttgtgaatttttttttttttgtgggttttttttattattgtactttaagttttagggtacatgtgcacaatgtgcaggttagttaaatatgtatacatgt

SEQ ID NO: 343582 - DNA, 615 bp, Homo sapiens
ttctccagtttccaacattccttctgttatcgatttctgcttgtattccactgtggtcagaaaagatatttaatatgatttccatttttaaaaatctcrtaaggcaagttttgtctcctgacatatggttaatcctgcagaatgttccatgtgctgatgaaaagaatgtgtgttctgcagctgttaggtgaaatgttctataaatacctgctaggttcattttgtctaaagtgcagtttaactccaagatttctttgttgattttcaatcagaataatctgtccattgctgacagtgggggtattgaagtcctctactattattgtattgtaatcaatctctccttttaggtctatttatacttgctttatgtaattgggtgctctggtgttgggtgcatataattacaattgttatatcctcttgttatattgacccctttgtaattatgtaacgactttattgtccttttccccccattctatacttaaagtctattttatctatcataagtatagctacttctacactttttggtttttatttgcatggaatatcattttctatccttttactattagctggtgtatgtctttataggtgaactgcatttca

SEQ ID NO: 343583 - DNA, 437 bp, Homo sapiens
atggggtatctaagttcagcatagtccaaatggaagtttactgaagggcctattacgcctgactggtcacttcgctacagccaagctgtgtaacaggttaaaccagatgcaaaccatgaatccatatatcctaaacagtgtagacaagataacatggagtgcctccaggggagttttgaactttaaactaaatgacatgttctaaatcactagctgtaacatcccattcttatcttgaccaagggtcagtagcakacttccgggtgtccccggagataagcacagagcctctcaagtccagctgtaagataaccctatccttgcatagtgttattatctccattttacagatgagcaaattaaggtgttaatttgttaagtagctagccaaggccatagaactggcaaatggcagaaatgggattcctcataggaag

SEQ ID NO: 343584 - DNA, 496 bp, Homo sapiens
ctgttgtaagtatagctactcctgctcacttttggtgtccatttgcatgaaatgtctttttccacctctttaccttaagtttatgtgagtctttatgtgttagctgaggctcttgaaggcagcagataattggttggtgaattcttatccattctacaattctgtatattttaagtggagcattcaggacatttacaatcaatgttagtattgagatatgaggtaccatttcattcattgtactattcgttgcctgtataccttggttttttgtttttgttttttaaattgcrttgttttataggtcctgtgagatttatgttttaaagagattctgttttgatgtgtttccaggatttgtttcaagagttagagcggcttttagcagttcttgaagtgcatgtttggtaggggtaaactctctcaggatttgtttgtatgaaaaagactgtatctttccttcatatatgaagcttagttttgctggatacaaaat

SEQ ID NO: 343585 - DNA, 521 bp, Homo sapiens
tgaaaatcagtatagagtttctttaaaaaaattagaaatacaattaccatataattcagtaatccctcttctgggtatatatccaaaatagttgaaagtaggatatcttgagctatttacacacccatgtttgctgtagaattattcacaatagccaagaaatagaagcaaaccaagtgtacactgatggctatatggacaaagaaaatgaggtatatacatacaaaggagtattgttcagccttatgaaagaaggaaatcctgtcacttgctaccatatggrtgaatcttgaaggcattttgctaagtaaaataagtcagtcacaaaaaggacactgtataattctgcttatattaggtatctaaagtaatcaaactcacagaaacaaagtaggattattgttgccatgggctgttgggatggggaaatggggaattattcaatacgtataatgttagttttgcatgataaaaattttctagagatctgttttgtgacaatgtgaatatagtcaacatta

SEQ ID NO: 343586 - DNA, 586 bp, Homo sapiens
actcttttcacttattttttattattattggtttagctatttggggccagtgccttttcatataaattttagagtaagcttatatatgttgacaaaaattcttgctgagattttaatagtaattttattaaacttatagatcaattaagaaagaatgacatctttattatgttgagcctttgaatccataggcatggcatgtctctccatttacttagtttttttatttctcttattatgttgtaatttttgcataaaagttctgtacatgttttatctattctgttttccttggaacaatttgaataatagtgtagttttaatttcagtttccacaaattcatcgtgtgcatatagaaatacaattcattgtttatgtattggccttgtatcctctgatcttactgaactcacttattagttctagggtttgatggtttgttaattaattaattaatttttatttatttatatacagataagartgaaatacataagtggggatagttttaattcttactttccaacctgtgtgcatttttattgtcttattgcagtggctacaatttccagtaatgtttaatac

SEQ ID NO: 343587 - DNA, 571 bp, Homo sapiens
ggtatagaattttcaagtctatatgggaagaattgttactagtgaggtaataaccgatattataattgtgccttcaaatacacagtataattttttttacagactccaaattgtgtaaagagttaagactggaagttattcaatatgatgycagaagtgtcagtttacttttgttcttcaataagttgtattacctttgcaactgtccccttactagccaccacctcaccaggggtattactttttccacttagttctatttgttacacattcttaaaaatgtcctctgacatttgaaaaaacaagaaaaatataacagtggttgataaattacaagtgtcagtttaacttaaacatactaaggttactgttagtactcatgtgaggtattatattcagtgtttggattaaaacttatgaaggccaggattattatccttagatccaataacctgggatagcttgggactagttactctgatatgctaaaacagagcaatcttatatgacattacataaaatattatttatatattttgtaatatttattaatattttaataatggaggaa

SEQ ID NO: 343588 - DNA, 623 bp, Homo sapiens
cttcatacaattaaagagagttagggtcttgctttggattaagggaatattgtgaatattttaatctattcaagccactaaaactttctttatattagcattaagactgttgcactttatcatttgtgcattcactggagtagtactttcaatttccttctataatttttcctttgaattcacaatttggctctttttggtgcaagaaacctatctcagctttcaacatgccttcctcactaagcttcatcatttctagcttttgaattaaagtgacagacatgtgactctttctttcactttaacacttagaagccattatagggttattaattggcttacttttagtattgctctgtctcagggaataggaaggtccaaggaaagaaagagagatggggaaaggcctgtcattagagcagtgagaatacccaacatttattgattaggttcaccatctacagtgggcatggttctttgtgcccaaaataattatggttgtaacatcaaagatcactgatcacagacgactatactgatgatgatratgatgatgatgatgatgataataataataatatagtttgcaatactgtgagaattaccaaaatgtgacacagaaa

SEQ ID NO: 343589 - DNA, 639 bp, Homo sapiens
gaacttgcactgaattctttcttgcacgagatccaagaaccctctcttggggtctgagtcttgatttctttctggtaacaccttcctggtgaaccccaaagggatgatactgaggagatccctgacccaaaggaaatagactgcagcatcaattggctaactttgggtaagtggtggggtacccaggaaaaagatggaattgggttagagacccaacttaggggagctagagtttttcctaagacaaagcaggttaaaggcccctcttaatgaaagagaaggatgcctgattaaacttgggttcaaggcccaacttaggaggattaaagkcctaagatttagggggttagaggcccctctcagtaaagttcctcttggctaaaaacggatttggcactatggaatgttaaccatcattatctttggattaagctgccttgcatttctttgctgatggctatgggtgacagaattaggaatgtacaggaccatggaacgtgagagctttttcctccccaaaggggaaactaaagagccaatgggactgctggaaaggttcccttcttgaccgacaagcagccgcctgaacttttgattcagtttagctgggatggttgggtctttctctggcctccctga

SEQ ID NO: 343590 - DNA, 275 bp, Homo sapiens
gttatttctagccaagtcacatactggcaacattccagaggaagaatgatcctgctgataagatcgccaaagctgccctggttcctgaccttcccaaagcctggaattttacccattccttgtatatccccagattcaccagtatcttttcaataaatacscttatttggacacaccatgtctggttggtttcggaaactttaaattaaagagacttaattagtgaaaaagaaagtaatgtttcttgaagaggtattacttggttaaatttaagg

SEQ ID NO: 343591 - DNA, 616 bp, Homo sapiens
tagcccttaagaactgaaaggaactcttccaagggaggagtgcctcttgatgtcttcttcagcacagtggaatgtggagtgcagctatgaaaaactttcatggtgctacttgtgccacagctccctccagttagacactgtaatatcaagtgggcactcttcccagggaagtcatctcagctaaattacatgtgtttctctcttagctttaagttattattatttttcagcctcctgtctctccttaaatccaacattatcttgtatccctccaaggaactcagcctttattttgcagtttgcagaaaattatggaaaaggttagatggggaattcctttataatcactttaaaagccagattgttaggatggaaaaaactgggattttcaaataaaaaccaagaagctgataggattatgtttgaggagttgttgaccagtgggtaccatggtgcagtgtagttttgaggatagaatggagtatctatgtttcctcaacctctatttttctaaaataaaggtgtcttttagtttgytgtcttcttcatataaaagcaatacatacttgaaactatgcagtgaagcagtttcccatctcacttagagtaaaagcca

SEQ ID NO: 343592 - DNA, 609 bp, Homo sapiens
tatatagtttattcatgacagtcttcagctatctgacatttgcaaaggaaaaattttaaatctcatcctgggggacctagggttattctacctaacatcataagatctatcctgcactcctctctcctgccccaagtaatacttccaaatgtgcctctagaaatgactgtctaggagtatgsgagattgctgaattctcatctctttcaattgcagaatgtatttgtgttttctttactggaactcctaagagatgattccttcaccctcccacactttctcccattccctaacaagtatgctcttcccacctgaccatgctctggggctacataaacccaggtttcagttgcttacaggtgtgactgaagccagtgggccagtggcaccatacatctgagtctccaattttcaccgatgatctagatacagcctgaggtatgtaggcaggaaggggtgttgcaccatggggcaggtttcataacaccccactgggaacagagcagacaaagtaaatattatcctgacttgctattagagaggaaatgaggcagaagaacttgccaatgatggcatggttgatgtggggctcactctctctcctggtga

SEQ ID NO: 343593 - DNA, 585 bp, Homo sapiens
tgccttgctggataaagagtagccttgctttattttgacccacagggcagaactggcactgtccaaaaacgaaaggtctgtcttttagggctttgaattccctgtctctaaaatttcaaactagagctctagggaacacttaaaagtgactccttacatttagtcattgtcaggcattggtataaacatttcacatatctgtctatcatctgtctatctatctatctatctatctatctatctatctatctatctatctaattctcacracaactcttaaagtcaggtatgagcattattcccattttagaggtaaagggactgaggctcagagagtttgttgcccaaggtcatatagctaattaggggcagagctgggatttgaatctaggcatttctttaccatctgtctctaaaaggtggtcaagattttgagttgcctttcacctctaagtctttttaatagagattattcttattacaaaagtaacagttaaaaatccatccatgcttcatctgtgatttacataccttgtaaagacttattcgaatcatgcatattttaagtactatctggtggtagag

SEQ ID NO: 343594 - DNA, 545 bp, Homo sapiens
atacttcaattaattttgcttggtatcattaacaattgagaaaactagtaaggacatgcttcttctgagaaagactagagctgacaaacatgaactgctgcatgtcacttttatgtttctgtttaatgctcattcaagctttcactcaggctgtttgactggaactttgtttcatataaaaaaaaaaaagatacataaaccagggcagtrgttttgtttctggttcataaagttgcttagtttaattataaatgcatttgtgtctcattataatttatgcatctgagatattctacactaaatctttacacggcttcaatgtaaagctcagtcttccaatttctgtctcttgttatttttcctgtgaacctaaaatgatgttggctgactatgaaccatgttgagagagaggagctgtgcaataataattagggctggtgttctatggagtacttaccatgtgaccagctcttggataaggcttcctatgccttaattcattgagtgcttgccatacacttatgggatagatgctgttattaacc

SEQ ID NO: 343595 - DNA, 570 bp, Homo sapiens
ttgttttttgttgctgcatggtgttccaaggtaacaatgtaacactgtttaaccatatattcactgaaagacatttaggtgtttctagtttttatctgttaaaaataagctgccatgaacatttgtgtataggtttttgtgtgaacaarttttcatatctctggaataaatgaccaagcatgcaattgctgggttgtatggtaatcgcatgttaattttataagaaacttccaaattactttgcagagtagctataccattttctactcccatcaggaatatatgagtggtctagtttctctgcatccttaccattatttgttgttttcactactttttgttttagccattctaatagttatatagtgatacctcattgaggttttaatttgcatttctctaatggttaatgatgttgaacatcttttcatgtgccttttgaccatctgtatattctcttcagttaaatgtatctttatgtcttttgtttttaactgttgagtattgagagttatttacgtattctatatattagttatgtaggatatgtagtttgcaaatacttccaac

SEQ ID NO: 343596 - DNA, 628 bp, Homo sapiens
aaatgaaaatgaagtcacaacatacaaaacaaaacttatgggatgcaatgaaagccataccaaaagttaagtttatagtggcaaatgcttatattaagaaaagagaaagatttaaaatcaactgcctaactttacatctcartgaactggaaaaagaactaactaaaccaaaagttagcagaaggaagagaatatcaaaaattagattggaagtgaacaaaataaaatatagaaaaacaacagacaaaaatcaacaagagtgttttctttttttctgaaatataaacaaaattgacaaatttttagctacaataagaaagaaagagcacttaaatacctgaaataggaagtgaaaaacgagacattaaaactgatgacataaatattaaaaggatcctaagagagtgctatgaacaatgatatgtgaacaaatttgatagctttgaagaaatgaataaattcctagaaatgtataacttaccaagactgactcatgaagaaataaaaatataaacagacctagcaaggtaattgaaccgttatcaaaaacctctgaacaacaaaaagcccagaatcagacagcttcactagataattctatcaaatatttaaagaaggattgacacta

SEQ ID NO: 343597 - DNA, 562 bp, Homo sapiens
tatatgcacctaacactggagctccaaaacttataaaacaattactactagaattaagaaatgagatagacagcaacacagtaatagtgtgggacttcaatactccactgacarcactaggtgggtcatcaagacagaaagtcaacaaagaaacaatggatttaaactataccctagaacaaatagacctaacagatatttacagaacattctacccaacaactgcagaatcctaaaattcatatggaatacagaaccaaaaaagagcttgcatagccaaagcaagactaagcaaaaagaccaaatctggatgcatcacactacccaacttcaaactatattataaggccatagtcaccaaaacaacatggtactggtataaaaataggcacatagaccaatggaacagaatagaaaacccagaaataaacccaaatgttgtggccaactgatcttcaacaaagcaaacaaaaacataaagtggggaaaggacaccctattcaacaaatggtgctgggataactggcaagtcacatgtggaagaataaaactggatccccat

SEQ ID NO: 343598 - DNA, 570 bp, Homo sapiens
cctaaatatatatgcacctaacactggagctccaaaacttataaaacaattactactagaattaagaaatgagatagacagcaacacagtaatagtgtgggacttcaatactccactgacaacactaggtgggtcatcaagacagaaagtcaacaaagaaacaatggatttaaactataccctagaacaaatagacctaacagatatttacagaacattctacccaacaactgcagaatcctaaaattcatatggaatacagaaccaaaaaagagcttgcatagccaaagcaagactaagcaaaaagaccaaatctggakgcatcacactacccaacttcaaactatattataaggccatagtcaccaaaacaacatggtactggtataaaaataggcacatagaccaatggaacagaatagaaaacccagaaataaacccaaatgttgtggccaactgatcttcaacaaagcaaacaaaaacataaagtggggaaaggacaccctattcaacaaatggtgctgggataactggcaagtcacatgtggaagaataaaactggatccccat

SEQ ID NO: 343599 - DNA, 513 bp, Homo sapiens
tagagtatgactccagggtagacctgttttgttgttgctgggttggttgattggttgtttggtttgttgtaattttcatatgttttgccatgttgrccaggctggtctcgaacccctagccccaagtgatcaacccaccttggcctcccagagtgttgggattacaggcgtgagccaccacgtccagcccccacactgcgtctggcctctgtggtagacctcccagacagggtggccaggcagaggcgctcctcacttcccatatggggcggccgggcagaggcgctcctcacttctcagacggggtggccaggcagaggagctcctcacttcccagatggggcggccgggcagaggcgctcctcacatcccagacaatgggcgtccaggcagaggcactcctcacgtcccagatccacaaaagaagtgaaaatagccttaactgatgacattccaccattgtgttttgtttctgcttcacactaactgatgtattttgtaatctcccccacc

SEQ ID NO: 343600 - DNA, 531 bp, Homo sapiens
catcacacctggtcaacggtgacttttaatgcacagaacttttacttttgatgaaactaatttttttgttatttttttcattccctgtacctttgatatcatatctaagaaatcattgttaaatctaacataaagaatattttctcctattttttttttctaagagtttaagggttgtagttgttacttttaagtctttgatctattttagcttatttttgtacaytatgtaagttaagggcccaaactttatattttgcctgtggatatccagtttacccagtactatttgttgttattaatcaattttgcttctttttttttttttttttttttttttgagatggagtttcactctgtcgcccaggctggagtgcagtggcgcaatctgggatcactgcaagctccgcctcctgggttcacgccattctcctacctcagcatcctgagtagctgggactacaggccaccacgcccggctaattttggttttgtatttttagtagagaccggatttcaccatgttagtca

SEQ ID NO: 343601 - DNA, 531 bp, Homo sapiens
catcacacctggtcaacggtgacttttaatgcacagaacttttacttttgatgaaactaatttttttgttatttttttcattccctgtacctttgatatcatatctaagaaatcattgttaaatctaacataaagaatattttctcctattttttttttctaagagtttaagggttgtagttgttacttttaagtctttgatctattttagcttatttttgtacactatgtaagttaagggcccaaactttatattttgcctgtggatatccagtttacccagtactatttgttgttattaatcaattttgcttctttttttttttttttttttttttttgagatggagtttcactctgtcgcccaggctggagtgcagtggcgcaatctgggatcactgcaagctccrcctcctgggttcacgccattctcctacctcagcatcctgagtagctgggactacaggccaccacgcccggctaattttggttttgtatttttagtagagaccggatttcaccatgttagtca

SEQ ID NO: 343602 - DNA, 531 bp, Homo sapiens
catcacacctggtcaacggtgacttttaatgcacagaacttttacttttgatgaaactaatttttttgttatttttttcattccctgtacctttgatatcatatctaagaaatcattgttaaatctaacataaagaatattttctcctattttttttttctaagagtttaagggttgtagttgttacttttaagtctttgatctattttagcttatttttgtacactatgtaagttaagggcccaaactttatattttgcctgtggatatccagtttacccagtactatttgttgttattaatcaattttgcttctttttttttttttttttttttttttgagatggagtttcactctgtcgcccaggctggagtgcagtggcgcaatctgggatcactgcaagctccgcctcctgggttcacgccattctcctacctcagcawcctgagtagctgggactacaggccaccacgcccggctaattttggttttgtatttttagtagagaccggatttcaccatgttagtca

SEQ ID NO: 343603 - DNA, 531 bp, Homo sapiens
catcacacctggtcaacggtgacttttaatgcacagaacttttacttttgatgaaactaatttttttgttatttttttcattccctgtacctttgatatcatatctaagaaatcattgttaaatctaacataaagaatattttctcctattttttttttctaagagtttaagggttgtagttgttacttttaagtctttgatctattttagcttatttttgtacactatgtaagttaagggcccaaactttatattttgcctgtggatatccagtttacccagtactatttgttgttattaatcaattttgcttctttttttttttttttttttttttttgagatggagtttcactctgtcgcccaggctggagtgcagtggcgcaatctgggatcactgcaagctccgcctcctgggttcacgccattctcctacctcagcatcctgagtagctgggactacaggccaccaygcccggctaattttggttttgtatttttagtagagaccggatttcaccatgttagtca

SEQ ID NO: 343604 - DNA, 580 bp, Homo sapiens
ccactatattaatagtggctacaaactagtattagctggaagggttttgaaagattatgttgatttcttagatatatttgtgtcagagaggcaactgcaagttaatctctactctcagtgaaaggcttaatgtggacacctataaaatccccagtggtcataacttgcaggaatctctccagagggacagcatcatacccagtagggcgacattaatttcctcaggatagaccaccaattaaaaaaaaatacagaactaggcatgagtcaacttctcccttaaaattgtatttctcatctaaatgaaagcacatttttaagagagaaagatgtgtaagatatagaaatattaaagtaagggctacagtacatataatacaaagcaaatgaagagaggaggctaaatatcaagttgtaggtggtgagttatactcagatacttcatttgacagtttaagaagtcagatctaagtcaaaagaagtaacttctwtctctttggaaaagtgaattgataatatgccattgtcagtaagtgaagacggtatcagtgttccctagatatttaaaatattgtaagac

SEQ ID NO: 343605 - DNA, 619 bp, Homo sapiens
ttgtggtatgttttaaaggttagagataaacctgtagtttaataattctaagatactctatttctcatattttaacatctctgacattgaaatgccacttataagtcattatttgttacaagtatattctgcagaaatttaaacaatcttttattgttacataaataaggaggcatcacacaattcayggtgccttccatgaagtggcatatggtatatacaacaggatgatggcagtcctagtcataggattaacacttaaagaaattttagcttttaagagtgctacacaaaaggagagttgaaataaaaacaaactgttaaaacaaagtacttctttaatatttttaaaacttcaagccaaagaaaacttgggattaaagtaggtatggatcattttattccatatttagatttatagaatgtatgtaaattcatatttaaatttatagaatgcatgtaaattaggtatttccaatgattaatattactatttaaagctgttataaatttccaaaatcatggttggtagttatcttttactagtttcttacttcagaagtgtttttgttttaaagatgagaggaaaagcttcaattgagattcagtcctagtactc

SEQ ID NO: 343606 - DNA, 629 bp, Homo sapiens
agataagacggtgtgtaaataattatgttattttagtaaaaatatccaacactgtacctttcaaataaaaatatagttttttaaaggtcaacaaaaagttwttgtgcttcaaattttaacatttatcctccaagtgaaattactataagaagaaacaactaacctataaataaataatctactttttggaaaagttaacaaacctctctacacacaatataattaagaaagataataagaaacatatataatttcaagattttcaattttttttttactaagccagagaagataaatgagttaatcattcatgtcagtaagtaaatacaggatcaaaaaacatacctaatggaaggaaattaataacagaaaagtaaaaattataatctagaaaatgaaagatataaatcgattcataaatggataagacttttaagactttttttgaagaaatcatttgaaactagaataagcaagaggaatagatcaaaacaaaaaggaaaacagtgaaggtgatatacacatcctcttactgaaaattaattttaaagaactgctttgtaaacactaaaattcagagtcatcaatgtgtctggatatggattcatttttatttcttctgctcagca

SEQ ID NO: 343607 - DNA, 629 bp, Homo sapiens
agataagacggtgtgtaaataattatgttattttagtaaaaatatccaacactgtacctttcaaataaaaatatagttttttaaaggtcaacaaaaagtttttgtgcttcaaattttaacatttatcctccaagtgaaattactataagaagaaacaactaacctataaataaataatytactttttggaaaagttaacaaacctctctacacacaatataattaagaaagataataagaaacatatataatttcaagattttcaattttttttttactaagccagagaagataaatgagttaatcattcatgtcagtaagtaaatacaggatcaaaaaacatacctaatggaaggaaattaataacagaaaagtaaaaattataatctagaaaatgaaagatataaatcgattcataaatggataagacttttaagactttttttgaagaaatcatttgaaactagaataagcaagaggaatagatcaaaacaaaaaggaaaacagtgaaggtgatatacacatcctcttactgaaaattaattttaaagaactgctttgtaaacactaaaattcagagtcatcaatgtgtctggatatggattcatttttatttcttctgctcagca

SEQ ID NO: 343608 - DNA, 629 bp, Homo sapiens
agataagacggtgtgtaaataattatgttattttagtaaaaatatccaacactgtacctttcaaataaaaatatagttttttaaaggtcaacaaaaagtttttgtgcttcaaattttaacatttatcctccaagtgaaattactataagaagaaacaactaacctataaataaataatctactttttggaaaagttaacaaacctctctacacacaatataattaagaaagataataagaaacatatataatttcaagattttcaattttttttttactaagccagagaagataaatgagttaatcattcatgtcagtaagtaaatacaggatcaaaaaacatacctaatggaaggaaattaataacagaaaagtaaaaattataatctagaaaatgaaagatataaatcgattcataaatggataagacttttaagactttttttgaagaaatcatttgaaactagaataagcaagaggaatagatcaaaacaaaaaggaaaacagtgaaggtgatatacacatcctcttactgaaaattaattttaaagaactgctttgtaaacactaaaaytcagagtcatcaatgtgtctggatatggattcatttttatttcttctgctcagca

SEQ ID NO: 343609 - DNA, 315 bp, Homo sapiens
catgtcaagtatacaaatagtgaaggcattgccagtgttttcttgtgtataagtattctctaccattagaatggaaacgtcatcaaagtgggcccttagtgagagtttgctgagtggatgaatactgtccttaaatatggcttctccattctctttggactccttttgraactcctatcatacatgtattggggactttcttgactggtctttctgacttttaaatccttttatctggataaattcatcattatctcccaattgactaattctttgtgtttattgcatttacacttttttttatatataattttc

SEQ ID NO: 343610 - DNA, 315 bp, Homo sapiens
catgtcaagtatacaaatagtgaaggcattgccagtgttttcttgtgtataagtattctctaccattagaatggaaacgtcatcaaagtgggcccttagtgagagtttgctgagtggatgaatactgtccttaaatatggcttctccattctctttggactccttttggaactcctatcatacatgtrttggggactttcttgactggtctttctgacttttaaatccttttatctggataaattcatcattatctcccaattgactaattctttgtgtttattgcatttacacttttttttatatataattttc

SEQ ID NO: 343611 - DNA, 425 bp, Homo sapiens
ttagtagagacggggtttcattatgttggtcagcctggtctagaactcctgatatcatgatctacccgcctcagcctaccaaagtgctgggattacamgtctgagccaccacgcctggctgcttttaattttttatatcaatctttactttgttcttttttgcctgctttttttttttccccagagtcttactctgttgccccggccagagtgcaatggcatcatctctgctcactgcaatcccccagggttctatcaattctcttacctcagcctctggagtagctgggattgcaggcacccgccaccattcccagctatggtttcaccatgttggccaggttggtcttgaagtcctgacctcaggtgatccacccaccttggcctcccaaagtgttaggattacaggtgtaagccactacgcc

SEQ ID NO: 343612 - DNA, 425 bp, Homo sapiens
ttagtagagacggggtttcattatgttggtcagcctggtctagaactcctgatatcatgatctacccgcctcagcctaccaaagtgctgggattacacgtctgagccaccacgcctggctgcttttaattttttatatcaatctttactttgttcttttttgcctgcttttttttttyccccagagtcttactctgttgccccggccagagtgcaatggcatcatctctgctcactgcaatcccccagggttctatcaattctcttacctcagcctctggagtagctgggattgcaggcacccgccaccattcccagctatggtttcaccatgttggccaggttggtcttgaagtcctgacctcaggtgatccacccaccttggcctcccaaagtgttaggattacaggtgtaagccactacgcc

SEQ ID NO: 343613 - DNA, 425 bp, Homo sapiens
ttagtagagacggggtttcattatgttggtcagcctggtctagaactcctgatatcatgatctacccgcctcagcctaccaaagtgctgggattacacgtctgagccaccacgcctggctgcttttaattttttatatcaatctttactttgttcttttttgcctgctttttttttttccccagagtcttactctgttgccccggccagagtgcaatggcatcatctctgctcactgcaatcccccagggttctatcaattmtcttacctcagcctctggagtagctgggattgcaggcacccgccaccattcccagctatggtttcaccatgttggccaggttggtcttgaagtcctgacctcaggtgatccacccaccttggcctcccaaagtgttaggattacaggtgtaagccactacgcc

SEQ ID NO: 343614 - DNA, 359 bp, Homo sapiens
cctagaatattccattcttacttactcaagagaaatgaaaacatgtgcatacaaatgaacatagcagctttacttgtaataatcaaggaatagaaacatttgtaaatggttcaccaacaggctaaaggataaacatattgtagtatttccatacaatagaataaaatagaaagaaccactgattttgcaacataggtgatcctaaaatatattgagagaatgaamcaacagtaggcatattataaaagtttattattacaaaattctagaaactgaatttatagtggtaggttgcagatcaatggctgcttggagccagaggttttggtaaggagtacaagagaacttttgaggtgata

SEQ ID NO: 343615 - DNA, 359 bp, Homo sapiens
cctagaatattccattcttacttactcaagagaaatgaaaacatgtgcatacaaatgaacatagcagctttacttgtaataatcaaggaatagaaacatttgtaaatggttcaccaacaggctaaaggataaacatattgtagtatttccatacaatagaataaaatagaaagaaccactgattttgcaacataggtgatcctaaaatatattgagagaatgaaacaacagtaggcatattataaaagtttattattacaaaattctagaaactgaatttatagtggtaggttgcagatcaatggctgcttggagccagaggttttggtaaggartacaagagaacttttgaggtgata

SEQ ID NO: 343616 - DNA, 381 bp, Homo sapiens
tgaaattccagtcatgtatagtctataatatatacctatattacacaatttgtatacttttccactttaaaggggggatttatacctgcaaagggacttgacctacaagtatcatccaattctgttccaaattttggatactatgrctctatcctggaaatgattcagtagttttgtttcatttgactcttcctacagacataatgtgttgaagtaaacctattttttatgtttggaaagtagccttttgatgggtgttttctagcttttggaaaacatgtactcgaagcagaagtaactagttgttgagggaatagaaccacaacatttctgacctaggcaaattgaaaccttgtcatccttgatgacaaacatgacatg

SEQ ID NO: 343617 - DNA, 517 bp, Homo sapiens
tacatcacttattcaactgacctcytttgcctctgtaaatatttcagttatcaattcctctctcatagtatattttggtaaagatttcaagttatcaaagacagtttataggtgtttataatatatagtttatattttacattaattcattaataatggggtagtcttctagaatttagaatattttttaaatgattatttttcttcatataaaccataaataatcatcttctattagaaggcctttaagccttcttagattaatcatggttatatttgaataggttatgcatattgcagaaaatattatatctttctccgcagaattgtcccttaaaattcaagttatttagtggcttctattttgctaagccatatacatgagttagaactttcattaataagccattttattcatgcttctgatattttgccaaaaaatagtatcaattacaatagaaaccagaataaaaatggattattgcattttaagaagtagatatgcattaggatccta

SEQ ID NO: 343618 - DNA, 464 bp, Homo sapiens
aattataaactagcttagatgccttggattacaagccacaaataatagaacatctaataatgaaaagtaggaattaataacagaaaactgcaacatttgaatattataacctataaaggaacacagttaaacaaactgttaaataaacaagtgtttgtttgtttattaaacataaacaaacatataaaatgattatttgttaaataaaaaataaattatttgtttgtttctttattgtagagacatggtctccttatgttgcccaggctggtctcgaacttctgtgctttatttaatttttacaataaatgatttgcatttagagaattagrattaattacagttgagtcttgagcaacatgagagttagggtgctgatcccctcatgcagctgaaaatctgctttatatgaaaatctgtttcttttgactcctccaaaactctactaattttctactgttgac

SEQ ID NO: 343619 - DNA, 599 bp, Homo sapiens
ttgaatgaggatgtaatgtgtcaacttctaattcaatatgttaatgataaaaatctggtttctcaagaactagattatggagacagggacctgtctttattcccttaaagacaactagggaagaacccgatccagctctcaaattgaaaagtcagatgagctgactcccacacctaaagccagcacatgggattccctataccattttgccctgctcagtgcctctgtcccttcccctcgggcagctgttgccaccccagatcccaccccagatccttctcctgctcaagctgttcctcctccttacatctaattcttgggagttatcatcccatgagcctgtcccctgtcaacctaaatacctctccctaaagggactccagcatgaggtacagcaatgtaaaaaggacattcagaacttcccttttctctccacacayaaggagtcagccccaactctcttccccttaaaagacatgccactaggaggaggaaccattgtatttgtgaatgctctcttgaccagttcagaagcctgaagtttgaaaaaggaaattaagccattgttagacgacccttatgaggtggcaaatcaggtt

SEQ ID NO: 343620 - DNA, 550 bp, Homo sapiens
gagtttataacctttttagtcaattcaggagtggctcgatcctctgtttgttttccccccatctaaattgcctgctcttcagaggaacttttggtttgtggggtaaagggagaaggatttaaagcaaaaattttagaaaacacagcagtcagataccaggctcaatcagctcatattcagtttttgttaatccctaaagcagggactaatttactagggagggatttaatgttgaagttaggcatagrcctgcagctcagcccaagaggattcctcacttcattaaagctactcaccactgcagatgaaaaatatattaatcctaatgtctgatccaaagaaggaaactgagagaaactctgagtccctccaagcacatgaagctaaaaatccccagggaagtagtaaggaggaaacaataccccattcccctagagggcaggatagggttgaaacctataattgaaggtcttattaaagatgggcttcttgagccctctatgtccccttataacacctcaatattgccagtcaagaaatcacatgggtc

SEQ ID NO: 343621 - DNA, 560 bp, Homo sapiens
ttggagtggctcatacattcggaaaaatttggactgaacgaggtctcattaatagtaaacgtcaagatctttttcataaggagatattcacccaagtattgaataaccttcagttgccagaagaaatagtgactgtccatgacccagacaccagaaaagtytttcttttgacagtctaggaaataacccagcagattacataggcaaacaggctgccatttcttttaaaacatctatttttcactgaactctttaccttcttcctcctaacataatctccattttctcttccactgaaaagagaaactaataaaaataggtgctaaggagaattcaaaagaaaaatggatattgccagaccagagggaaatgttgtccaaaccccttatgagggaaaacttgtcccaactgcatcaagggacccactggggtcaagccatgtgtgacactgttctgaaagtttttgggtgtataggaatttatactctggccaaacaggttacagagagttgcttagtatgtaagaaaactaattaacaaactataaaaagattacccct

SEQ ID NO: 343622 - DNA, 637 bp, Homo sapiens
tgggtcaaagctattcccttttcaaatgtgatggccaataatgtagttaaggccttaattgaaaatatagtgcccaggtttaggctagtagaaaacattgactcagaaaatggaacccattttgcctcaaactgttacatttgatgcttgccttgttataccttgtggagmcttgtcaggtcaaagacagctctccaattcagaaaagtacctctgtacttcctggctgtcctcagactggacattagtgaatttggatcatttagtctgggaaagtttcaatgaaggccccagtgtcaactgggagttttgcccccttgacacagagcttttatgacgtagttggtccaactacatgcaagtgagagcaaggatggctgccccaaccagtagttgtaatttctaaaaccataccttcattttactaaagatatagctccccctaactttcaggtaaactagtgcaactcaatacaggttattatttcaaaccttcaaagttcttccccttctctaagcgaattcccttctttaagctggttttatgatatgggagctgagttttcagaaacagaccctattggttctttgaaatatgcttcatttctcccctactgcttacagcttcccctaagtc

SEQ ID NO: 343623 - DNA, 637 bp, Homo sapiens
tgggtcaaagctattcccttttcaaatgtgatggccaataatgtagttaaggccttaattgaaaatatagtgcccaggtttaggctagtagaaaacattgactcagaaaatggaacccattttgcctcaaactgttacatttgatgcttgccttgttataccttgtggagacttgtcaggtcaaagacagctctccaattcagaaaagtacctctgtacttcctggctgtcctcagactggacattagtgaatttggatcatttagtctgggaaagtttcaatgaagrccccagtgtcaactgggagttttgcccccttgacacagagcttttatgacgtagttggtccaactacatgcaagtgagagcaaggatggctgccccaaccagtagttgtaatttctaaaaccataccttcattttactaaagatatagctccccctaactttcaggtaaactagtgcaactcaatacaggttattatttcaaaccttcaaagttcttccccttctctaagcgaattcccttctttaagctggttttatgatatgggagctgagttttcagaaacagaccctattggttctttgaaatatgcttcatttctcccctactgcttacagcttcccctaagtc

SEQ ID NO: 343624 - DNA, 385 bp, Homo sapiens
cttttgactcccacatttatttagatgytattggaatcccatgaggagtaccagatatatttaagcccaagttcaaatagctaccggatttgaattgatattttggtatgtgacaataaaaatgtagattggataaattaaatctataataatcaacagtggtttattaattacaccaggggtgttgtcaaaggaatagcggaacaattgaggcccactagccagatggcctgggaaaacagaatggccctagttatgatattagctgaaaatggtggtgtttgtgttatgattaaaactcagtgttgtacctttatccattgggggcaaacaacactgcccccaatgggagcataacaagggccctacaaggatttaccacttt

SEQ ID NO: 343625 - DNA, 570 bp, Homo sapiens
ggcagtgttttgtccatgtctcctttcttggttggctaattagcaacagctccaatcatcatgctaactcaagacaatatctgaaggctgggggtgctgcttttgttcacatttttttttttaaataggaagaaaacttggaagcttgcagtaatcttcctgtaacattttattggctggattataccacatgcttatttctataccaatcactaggaaagcaaatgtaattactgtgattagcttagaataatgatttttcttttaagattggatgggggtaacggaatagtaaatatctaaatgaacttgtgtttctacagcaataaagaataaataatgactatgcataggaagccagcaatgttttctgcaggaacacagtggaaaagtttgagcaggggaatcacaagattagatttgagtatcagggcattctggtcatggtataaagcagagattggcaaacttttcctgtaaagtgccagatarcgaatatgatgggccatgtggtctctattacagctattcaactctgccattgtagggtgacaggagtcatagataatg

SEQ ID NO: 343626 - DNA, 602 bp, Homo sapiens
gaacacagtggaaaagtttgagcaggggaatcacaagattagatttgagtatcagggcattctggtcatggtataaagcagagattggcaaacttttcctgtaaagtgccagatagcgaatatgwtgggccatgtggtctctattacagctattcaactctgccattgtagggtgacaggagtcatagataatggatgggcaaagaggcatgattgtactccaataaaagtttgtataaaaaaccatttagaaagctgaatttggcctgtggcctatagtttctggcccttcatatagaagatagatggaggataatcacataaaaagatttaaagatgaagtttttgtagtagttcatgcgatggtctttttttttttgtaacaaatctgtggcctagtatcaatctattatgaaagtttgatccatcaagggtaaaatgaatcaagttcagaagctcaatttacacatttaaacatgtaggtccttctttggcattattttattttgattaatttttttaacttaaaaaataagaacagtaatttgtagggtttcttttttccctgtgaaagccatcagttaaggggccacgtttaacta

SEQ ID NO: 343627 - DNA, 602 bp, Homo sapiens
gaacacagtggaaaagtttgagcaggggaatcacaagattagatttgagtatcagggcattctggtcatggtataaagcagagattggcaaacttttcctgtaaagtgccagatagcgaatatgatgggycatgtggtctctattacagctattcaactctgccattgtagggtgacaggagtcatagataatggatgggcaaagaggcatgattgtactccaataaaagtttgtataaaaaaccatttagaaagctgaatttggcctgtggcctatagtttctggcccttcatatagaagatagatggaggataatcacataaaaagatttaaagatgaagtttttgtagtagttcatgcgatggtctttttttttttgtaacaaatctgtggcctagtatcaatctattatgaaagtttgatccatcaagggtaaaatgaatcaagttcagaagctcaatttacacatttaaacatgtaggtccttctttggcattattttattttgattaatttttttaacttaaaaaataagaacagtaatttgtagggtttcttttttccctgtgaaagccatcagttaaggggccacgtttaacta

SEQ ID NO: 343628 - DNA, 454 bp, Homo sapiens
ttattttctttgttacgtcctttgaaacacaaatgtttctaattttgatgaagcccagtacattttcttttaacactgtgcttttggtgccatatctaagaaactactgccaaatccaaggccataaagatttattgttattttttattctaagagttttatagttttgcaattcagaaacataaaatcaaatactgcatgttcttacttaaaaaygggaaatacataatgcgtaaacatgaacaaagagtgtaaaatgataagacactgtagactcagaagggtgagagggtgggaaggggaagggtgatgagaaattacttagtggatacagtgtacattgttccagtgataaacacactaaaagctcagacttcactcctaccccatatacccatgtaacaaaattgcacttgcactccttaaatttatacaattttaaaaaatggtttta

SEQ ID NO: 343629 - DNA, 476 bp, Homo sapiens
attcatggtaagtgccctctacaagtgtacctttttttttttttaactgcaccttttctatgataagatgcaaaatacctaccactgtgttacagttgccgcagtatgtagtacaataacatgctgtatagatttgtagcctaggagcaacaggctacatatactctaccatatactctagcagagtagtaggctatcccrtctatgtttgtgtaagtacactctgagatatttgcacaataataaaactgcataaagacatatttctccaaatttattccatcatcaaatgattcatgcctgtatgcacacatatgcaggggcatgcagagagggcaattcctgtgtcccaggcactgctttatgcttgataaatctgttattcaccctcactacaatcttacccagagacaggcaccattattttccccatttcacgagtaaataaactgaacacaggtaatttatgtaacttg

SEQ ID NO: 343630 - DNA, 476 bp, Homo sapiens
attcatggtaagtgccctctacaagtgtacctttttttttttttaactgcaccttttctatgataagatgcaaaatacctaccactgtgttacagttgccgcagtatgtagtacaataacatgctgtatagatttgtagcctaggagcaacaggctacatatactctaccatatactctagcagagtagtaggctatcccatctatgtttgtgtaagtacactctgagatatttgcacaataayaaaactgcataaagacatatttctccaaatttattccatcatcaaatgattcatgcctgtatgcacacatatgcaggggcatgcagagagggcaattcctgtgtcccaggcactgctttatgcttgataaatctgttattcaccctcactacaatcttacccagagacaggcaccattattttccccatttcacgagtaaataaactgaacacaggtaatttatgtaacttg

SEQ ID NO: 343631 - DNA, 476 bp, Homo sapiens
attcatggtaagtgccctctacaagtgtacctttttttttttttaactgcaccttttctatgataagatgcaaaatacctaccactgtgttacagttgccgcagtatgtagtacaataacatgctgtatagatttgtagcctaggagcaacaggctacatatactctaccatatactctagcagagtagtaggctatcccatctatgtttgtgtaagtacactctgagatatttgcacaataataaaactgcwtaaagacatatttctccaaatttattccatcatcaaatgattcatgcctgtatgcacacatatgcaggggcatgcagagagggcaattcctgtgtcccaggcactgctttatgcttgataaatctgttattcaccctcactacaatcttacccagagacaggcaccattattttccccatttcacgagtaaataaactgaacacaggtaatttatgtaacttg

SEQ ID NO: 343632 - DNA, 476 bp, Homo sapiens
attcatggtaagtgccctctacaagtgtacctttttttttttttaactgcaccttttctatgataagatgcaaaatacctaccactgtgttacagttgccgcagtatgtagtacaataacatgctgtatagatttgtagcctaggagcaacaggctacatatactctaccatatactctagcagagtagtaggctatcccatctatgtttgtgtaagtacactctgagatatttgcacaataataaaactgcataaagacatatttctccaaatttattccatcatcaartgattcatgcctgtatgcacacatatgcaggggcatgcagagagggcaattcctgtgtcccaggcactgctttatgcttgataaatctgttattcaccctcactacaatcttacccagagacaggcaccattattttccccatttcacgagtaaataaactgaacacaggtaatttatgtaacttg

SEQ ID NO: 343633 - DNA, 556 bp, Homo sapiens
caggagttatggtccagagagccctggggccttaaatcatttgaagcacttgtgtgcccagaggctcctaaaaagctgtgactctycacactaggtacccgctgtgattctcacatcaatgacttgagccctgaactctcttcccgtctccagacattgccatttagctgtcctgagggtttcccgtgaacaccatttctcactggaatattgctgcagatgtttaaaatgcctattatctttagatcttgataagaagaattctgaaaaattccatattcatattttgcttgcccattttctaagccatctctcatctccaggaatatcataagctatttacccaaaaaaacagatgtccagtaactatttttatgtcaggcttagagacaccaggagctgtgaagcacagctgttgaccttctgggccacacagtctcataagaccacaattccaacacaacacattacactgctgtaaccagaactgcactgtgtgagcaatgtcactagaacatcagactacgaccacagcatggtggcaagagttggtgtt

SEQ ID NO: 343634 - DNA, 522 bp, Homo sapiens
aaggtacttgatataattttgatatttaaaaactttttgagactagttttgtgtcctaacatatggtgaattctgcaaaattttccatgtgctgatgaaaagaatgtgtgtctgcagctattgggtgaaatgttctgtaaatgtctgatatttctttgttgatttttctgtctagatgatctgtccaatgctgacagtgaagtgctgaagttgtcagctattattgtattgagttttatgtctcccttttgatctaatatttgttgtatatatctaggtgcttccatgttgggtgcatatatatttataattgttatattcttttgctgaattgattcctttattattagtatacttaattatctcattttccagcttttgacttgaagttggttttgyctgacataaatatagctattactgcttggttttggtttctgtttgtgtgaaatatctttttcaattccttcactttcagtttatgtgtgtctttacagataaggtgagtttcttgtaggcagc

SEQ ID NO: 343635 - DNA, 553 bp, Homo sapiens
agggttctttgggcaacctgaatctggatgtccatctctctctcaagacttggtaatttttcagttattattttattaaatatgttttatataccttttccartctcttcttctggaacactctaaggtgaacatctgtttacctactggtgtcccataaatcctatggattttcttcattcctttttactttttattattttttgtctgcctgtgatattttttaaagcctgttttgaagttcagaaattctttcttctgcttggcctaatgtgttgtcgaagctcttgattgtatttcttaattcattcactgtgttcttttggctctagaatttctgtttggttctttgttattatttctgtgtctttgttgaacttctcttttaaataatgaatggttttcctagttttttagaattgtctgtgttcacttgtatctcactgtgtttccttaagattcttatcttgaatttcatttctggaattttgtatatcttcttatgattagggtctgttactggagaattattttgtccttttggaggtgtcat

SEQ ID NO: 343636 - DNA, 558 bp, Homo sapiens
gccacatcacatttggaatgctacaaaccttctcctacagctggaatcccaaaggagaagaattccttgaaagactacgttatttaattgcggaaagatcttaaggaaatgaggatatagacaaggtagccattcagaaaactctgtcagtagtccctggagagacagtgaggacacctactaaggggtgacagtgggtgttaagaggcagcaagccagcactgtgtggggagggagaagttggattttttggtggtccataggcatctgacttggccattgggaggatggatggtggagccaggcaggaggataagagaagcaagagactgggagaaaaaacaggaaagccagttttagacatgttgaaattcaagtgtccaagggacacccagagggagccattgggttggcaacaaatttgttatatgagagagccacctggacatgagacagccacctggacacgagacagccacctggtatgagacagccacctggacatgagacagccamctgaacatgagacaaccacctggtatgagacagccaccgggt

SEQ ID NO: 343637 - DNA, 549 bp, Homo sapiens
tatgtgttccaggtctgtatcagcattagtgattaatttcccaggttcctggctctacatttgcaaattaatttacattttcccaagaagaacttgccctgaggaatgcggaggagatcacagctgctgtcatccactctcccttgtctcccgaatcttgtagagaagctgtcctcattgctcctatgggctttagatggtaaacagcaaatgcctgaattcttgaacaaacttggtgaagaatacaaaaagtgagatttttacccccaaaattgttgagtggtagatagtgccttgcatttccgagcacagccttctccagtacctagtgaaagggttcatttttttttttgtctttgacagacatagctacatatcccctacataatcaaaattgccttccaaaacccatctttgaaataaattttaaatggagagaggcagagagagtgagagagagmgagagagggagaggaaactgtgtggaactagatggaaatgacttctctcttctctacccctttctaataaaaaaaattaaacctcttc

SEQ ID NO: 343638 - DNA, 644 bp, Homo sapiens
tacgtaggtctgtaagtttaaatttgggaaagtttaagtcatgtattccaaataatattttctgccctatattctcctttttctctgtctggaactccagctacatgtgtatagactttttcatcttgtcccacaagtcaatctcttttcaatctattttctctttctttttcagaattgacagtgttcatgtattaacctgcaagttccctgataatttattttgtcaaacgtaatctactattaagcccagccaattaatttttcattttggatattttaattcttagttctaaaatttctgtttgcttcwtttttatggtttccattactctgctgaaatcctatgcctatttttgtattataagcatttcccctttaatttcttgaatatattataataacgattttaaagtccttgcctacttctaattaccacatttagattatttcagggttactttctattggttttccccctgattatggatcacattttcctgctcactacctgtccatcagtgtatgacctaatggtgggtattgtgaatactacattgttaagagtccatattttgatgtctttctctggaaaccatataattttgtgctgacagacaatttacaggtagataaacttaatt

SEQ ID NO: 343639 - DNA, 611 bp, Homo sapiens
cgtaatggagagattgaagttgttttaaacagtcaaacagaaattttgaaactgaagaatacaatgaatgaaatgaaaaattcaacagaacacatcagatacagaatcaatcaagtagaagaaagaatctttgaacttgaagataggttatttgaaaacatacagtcaaaggggaaaaaagaaaaaaggatacaaaggaatttgtcctttaaaaaggaaaaagcttattgaacttatgaaggaacatgaaaagagctaatatttgagttacaggacttcaagagagagaaacatactggtagaaagcttgtttaaagaaataataacagaaaacttttcaaatctagggaaagatataaatatccgggtacaggatgktcaaaagtctccaattcaattcagttcaaacacaatgacatcaagacataaactgtcaaaaatcaaagacaaagagataattctgaaagcagaaagagagaataagcaaatcacctataagggagttctagtaagactatcagcaaatttctcagcaggaaacttacaggtcaggagagagtaagataatatattcaaagtgctgaagaaaaaactacaaaccaagaatactg

SEQ ID NO: 343640 - DNA, 620 bp, Homo sapiens
aagcattttcttctagcatcaggaataagacaaggatgcccacccttgcaacttctattcaacataatagaagttttatggaatggaagttttacccagagccagtaggcaagtaaaagaaataaaaggcatccaaattggaaaggaagaagttaaattgttcttgtttgcagacgacatactcttgtatatagaaaaccctaaagacaccaccaaaaaactattcttcactaataagcaaattcagtgcagttgcagaatagcaaatcaacatacaaaacatacaaaaattagtgtccacaacatacaaaaatcagtatgtattgtatccacaatatatgttttgtatccacgaaacatatattatggatatgtttcctatccacaaaacataaattgtggatatgttttctatccacaacatacaaaaatcattatcctttctatacactcaccaaaatctaccaaaaaataaatcaagacaacaatcctattttaaatggctaccaaataattggactaaatttaaccaaggaggtaaaagatctgtatgctgaaaaccataaaacrttgattaaagaagttgaggaagacataaataaatggaaagatatctcatg

SEQ ID NO: 343641 - DNA, 566 bp, Homo sapiens
cccatgtgtgggcacagacccagcctggcatctggtggagtcaccctggttaccccacccgcccccactctccccagtggaatacacacagcaggcaggcgagcctgggagtgtccaggcttcctagagcctcagctgagcccagttagaaagtcagcayggcacacaagcatttgggaagtttactttagattcttccacagatagcagtgtgtgagttaaccaattttaaattatcctctatttaacatgttcttattacaaatatttgtatcaaaaattccaatcagatgtactttgcttcactacctttagtctacaattattgatcttaatcactttgatgccagtcttcaaccttggtggtcagcacatgacttctgggttttatgaatggccataaaaccagacacagcgtgtccagctctgtgtgtcaggaaccaagataaatcatgatcttcgcggggttcagttggctcttctgttaaatgaggggacagaccagattcgtttgccttcttagtttcataattctacaattttaattctattcaagttttaaagct

SEQ ID NO: 343642 - DNA, 566 bp, Homo sapiens
cccatgtgtgggcacagacccagcctggcatctggtggagtcaccctggttaccccacccgcccccactctccccagtggaatacacacagcaggcaggcgagcctgggagtgtccaggcttcctagagcctcagctgagcccagttagaaagtcagcatggcacacaagcatttgggaagtttactttagattcttccacagatakcagtgtgtgagttaaccaattttaaattatcctctatttaacatgttcttattacaaatatttgtatcaaaaattccaatcagatgtactttgcttcactacctttagtctacaattattgatcttaatcactttgatgccagtcttcaaccttggtggtcagcacatgacttctgggttttatgaatggccataaaaccagacacagcgtgtccagctctgtgtgtcaggaaccaagataaatcatgatcttcgcggggttcagttggctcttctgttaaatgaggggacagaccagattcgtttgccttcttagtttcataattctacaattttaattctattcaagttttaaagct

SEQ ID NO: 343643 - DNA, 566 bp, Homo sapiens
cccatgtgtgggcacagacccagcctggcatctggtggagtcaccctggttaccccacccgcccccactctccccagtggaatacacacagcaggcaggcgagcctgggagtgtccaggcttcctagagcctcagctgagcccagttagaaagtcagcatggcacacaagcatttgggaagtttactttagattcttccacagatagcagtgtgtgagttaaccaattttaaattatcctctatttaacatgttcttattacaaatatttgtatcaaaaattccaatcagatgtactttgcttcactacctttagtctacaattattgatcttaatcactttgatgccagtcttcaaccttggtggtcagcacatgacttctgggttttatgaatggccataaaaccagacacagcgtgtccagctctgtgtgtcaggaaccaagataaatcatgatcttcgcrgggttcagttggctcttctgttaaatgaggggacagaccagattcgtttgccttcttagtttcataattctacaattttaattctattcaagttttaaagct

SEQ ID NO: 343644 - DNA, 572 bp, Homo sapiens
ggttgaaattgttagtgcaaaggccgcagctcacatggtgatgtaagacctagttaggaccatagggtattcagcacaggatggcctggatgaattactctttccctgaatacctgccacagtgtgggactgagaaagtacttgaaccctggggtgaatggggcttatcatgctgaaaacttacacatagtgtgctgatgaaaagtgctacctggacctggagtcacagattccctttgtggctatcagtctgtgcctcctggattcataaaatttaaagttaacctctaactttgtttagatttccataacttccatgcattttccacaatcttcacaaatcaaaattaattcaattccctctctttgtttttcttcctgmaggtttggccgtaagctctgcctcctaactacagtcctcataaatgctgcagctggagttctcatggccatttccccaacctatacgtggatgttaatttttcgcttaatccaaggactggtcagcaaagcaggctggttaataggctacatcctgagtaagaatgtttgtgcttgcaactgtgagaaca

SEQ ID NO: 343645 - DNA, 515 bp, Homo sapiens
accacttgtatttctttcagcttytgcttgggaaatttcaagcctttgagcagggctagggccctcagctgctgttcctattagaagcagaaaaataaaatagtgtgcccatggcctagggttaaaatgtatgaatgtgggggccattccattccagcaactgaaggttaaggaaacagaaattgtaacttgataaagaaatgtattcacagccttgctagggtttaatgtcagcagagtttactgaacaagaacaggccttaaactaagacataaacttctccctaagtaggtttgggaggggtattataaccaggatccagaaaggtccctaagaaaagaacttcaaatcaatgaaattacataatattaatccttcttcaatagaaaaaggggatcatacactcattcaggagccatggtaaacatgtattaatactctctattcaagaaaaaagaaaaaatagttccacaaatacttaaactaaattagccccgggcatctattcaagtct

SEQ ID NO: 343646 - DNA, 621 bp, Homo sapiens
ttctatctagacttataccttatcatctaccttctgcttaagtcatggtctgtacgaaagacctttttttattgaaggacttgtcaccaattattcttggctggaaaccactatagtaataaagttcaagtgcactggtaaatttagagggaggtagatgaatagaattaaaacagaatattgaggaaatacagaagagaggaaaaagagaatcacattgattttttgccaagactgtgaactaggaaaggctgtcatctccctccacaaaatgactctttgataaattgttgaaacaaagtgggtgtggatatgaaagagataataaacactttgaaaaaaatctaagaagggtacttgaaatggtgttgggtgaataacatagcctggaagggagggtggttggaggtgggaagcaaaggataaattgacagaaatggatttagttatgcttttcctcttcactgaataagataaacattaatttattatccatcaaagaaattaccttctctaaagaattgcttttgtcctcaatgctttatatatcctttcttacttattttttgtcaaagaaattacatataartgacatcctaggtctaaagtgctggtaaagag

SEQ ID NO: 343647 - DNA, 517 bp, Homo sapiens
tggggcactgaccccatgtagcctaactgggagacacagcccagtaggggccaacagacacctcatataggcagatgccctctgggacgaagcttccagaggaaggatcaggcagcaatatttgctgttctgcaatatttgctgttctgcagcctctgctggtgaaacccaggcaaacagggtctggaatggaacaccagcaaactccaacagacctgcagctgagggacctgactattagaaggaaaatgaacaaacagaaaggaatagcatcaacatcaacaaaaagatcatctacaccaaaagcccatctgcaggtcaccaatattaaagaccaaaggtagataaaaccagaaagatggggagaaaccagagcaaaaagctgaaaattctaaaaatcagaatgcctcttctccaaagaattgcagctcctcrtgaggaacggaaaaaagctggactgagaatgactttgatgagctgacagaagtaggcttcagaaggtatgtaataacaaact

SEQ ID NO: 343648 - DNA, 610 bp, Homo sapiens
cacatggagaagttagctaactgcattaagctttgttaacctccaatatattacaagaaaaagagtatgcaccaaacagacaggtattgagtaggtaagaatatgtttgctccttttccttcttgtaatgtcatatgtaactttactgattgttagaaattaaaagttaggaatggtgaaattgaaacacacagcaaatagttgatgtttgatctagatcataatggattttcttcctgatggaaagggtatttcgtaaagtgaataaagcataaacaaaagcactatatgctaatttgcatgaagtacttaggtaacatcaggaaatttaaatcaaataataaagcactaaagtggaataaacattaaaatcgaatgctaatgtccaaagaaaatagaaacaatcttgttcaactttcagttctatataggaagcctatgaccyatgattcaggttgtttttcttaacttctaatgtacaagttaagtgatgactaatgatcaaatatcaaattctaagtatatgaaaatcattgtaaaatatagcaaagtaggtctaaaattattaatgtgtatggactttgttcaaaatgaacaactaaataagtaa

SEQ ID NO: 343649 - DNA, 564 bp, Homo sapiens
aacaatctgaagtataatgaatcatttaaaaaatatattttcttaagctaactgaaattttaaaaacagcaatttaaattttaccttcaaggtgaattatctaacttggacctaaattataccctgaaacttgaaagcatcaactttcatcaactttttctacttaaagagtcaattttaaagattcttcactaacaacttttgaacatgaaatattgactttattttctacttgagatgtaaaatcatcactgctgaaagtaatagtaaaagacatgaatgaatgcaggataaaaacatggaaaatgatrttgaacccaaacatagaccattagaatttcataatattgacatgacacaacataaactattaggaatataattgaaatttccaaacatctagatttgtttgacagagtctgcatattcaagaggtcaataatttatatgtataaaagatgttttcaaaagccagccacacaaaactgtaattaagtttgtttgccttgattttcttgcaattacaatgattaaagctctcaaaactgtctggcttagtttgaa

SEQ ID NO: 343650 - DNA, 518 bp, Homo sapiens
tgtcttacattttccctctttcataaaaaagtatattgcaaatagaagctactccctcatcctataaacaggaatgaaggaattatgtggcgggtacccccaggcaacttatagcacaaaacagagccacaccctaaaataaatgcagagcggagtcagaactaaaattagcgagaagtaatatttgttcttgtaagctgctgaggtttttgggtgtggtttgttatcatgacctatcacagaaaaactgattaacatgtgactcattaatatgaaaagatgtcccaaacctttggtattcagaattgtaaattwaaaaaaaaagcatcaatttcacagtgctacgttcagaatgatataaaatgctaacatggacttttgaaaagttgtaaagcataaagaactcctgtctcacatctacatctggttaatatttgtacaatcatttcagaaaagtctttactgaataatcttgaacatgttcattaacaaagattaacaatctgtttcttgatgtt

SEQ ID NO: 343651 - DNA, 471 bp, Homo sapiens
agtataatttgttctggctagagccacaatactgacttcccacttggaggaaatccccaaggtttaaaaggttatcaaacactgtcttaaccaaataacattttctagcttaaataaatatagtaagttaaatagaattttaaatattytacttttagactcttaatttccaaccgatagtgtttacaacagattaaaagatgatcataaagtataatcaaatcactacaactaaaatagggaattgtgaaataaaaaatatttttgagaacccagtagtactaaactttttagttttggggaaatttctctgtgatgtctttctaagtaatgaagtgagatgtatttcaaaacttctggttttcaattataagatctattttgatgagacaagttacatattttaaaacaaatattcacaatgtagtattttaccaaataataaagggcttaagtgaaaaaacaaagtaa

SEQ ID NO: 343652 - DNA, 471 bp, Homo sapiens
agtataatttgttctggctagagccacaatactgacttcccacttggaggaaatccccaaggtttaaaaggttatcaaacactgtcttaaccaaataacattttctagcttaaataaatatagtaagttaaatagaattttaaatattctacttttagactcttaatttccaaccratagtgtttacaacagattaaaagatgatcataaagtataatcaaatcactacaactaaaatagggaattgtgaaataaaaaatatttttgagaacccagtagtactaaactttttagttttggggaaatttctctgtgatgtctttctaagtaatgaagtgagatgtatttcaaaacttctggttttcaattataagatctattttgatgagacaagttacatattttaaaacaaatattcacaatgtagtattttaccaaataataaagggcttaagtgaaaaaacaaagtaa

SEQ ID NO: 343653 - DNA, 471 bp, Homo sapiens
agtataatttgttctggctagagccacaatactgacttcccacttggaggaaatccccaaggtttaaaaggttatcaaacactgtcttaaccaaataacattttctagcttaaataaatatagtaagttaaatagaattttaaatattctacttttagactcttaatttccaaccgatagtgtttacaacagattaaaagatgatcataaagtataatcaaatcactacaactaaaatagggaattgtgaaataaaawatatttttgagaacccagtagtactaaactttttagttttggggaaatttctctgtgatgtctttctaagtaatgaagtgagatgtatttcaaaacttctggttttcaattataagatctattttgatgagacaagttacatattttaaaacaaatattcacaatgtagtattttaccaaataataaagggcttaagtgaaaaaacaaagtaa

SEQ ID NO: 343654 - DNA, 587 bp, Homo sapiens
atctaatgctgccagtgatctgagaggatgcagagctcrggtgataatggttgctggcctgctgctcacctcctgctgtgcacccagtttctaataggccacagaccatggaagaggtgagtaaatacagcaccttcaactgaaacatccaggtaggtgcatgcattgggacaaaccaaggaaacaacttcaccaacagagaacggagaaaagcaaggcagattgacagcccacccaaaaagtgacacaaagccaggggaccctccctcactcatagaagtggtaagtgaacgagcatccccaggaacccatgcttctcccacagatctttgcagccctcatgtcaggagatccccttgtgaacccactccaccagggcattcagtctgacacaaagccacatggagtctcagcagagaagctgctcaagcatgtgcagagacctgggaaccttagatacctaggcttcccagcaaaagcagccgtaactccagcaaagtgggaggttacaccaccatacacacccctgggaaaggcactgaatcctaggggctgagcagtgactgtctgcaggtcctgcttccaca

SEQ ID NO: 343655 - DNA, 587 bp, Homo sapiens
atctaatgctgccagtgatctgagaggatgcagagctcaggtgataatggttgctggcctgctgctcacctcctgctgtgcacccagtttctaataggccacagaccatggaagaggtgagtaaatacagcaccttcaactgaaacatccaggtaggtgcatgcattgggacaaaccaaggaaacaacttcaccaacagagaacggagaaaagcaaggcagattgacagcccacccaaaaagtgacacaaagccaggggaccctccctcactcatagaagtggtaagtgaacgagcatccccaggaacccatgcttctcccacagatctttgcagccctcatgtcaggagatccccttgtgaacccactccaccagggcattcagtctgacacaaagccacatggagtctcagcagagaagctgctcaagcatgtgcagagacctgggaaccttagatacctaggcttcccagcaaaagcagcygtaactccagcaaagtgggaggttacaccaccatacacacccctgggaaaggcactgaatcctaggggctgagcagtgactgtctgcaggtcctgcttccaca

SEQ ID NO: 343656 - DNA, 587 bp, Homo sapiens
atctaatgctgccagtgatctgagaggatgcagagctcaggtgataatggttgctggcctgctgctcacctcctgctgtgcacccagtttctaataggccacagaccatggaagaggtgagtaaatacagcaccttcaactgaaacatccaggtaggtgcatgcattgggacaaaccaaggaaacaacttcaccaacagagaacggagaaaagcaaggcagattgacagcccacccaaaaagtgacacaaagccaggggaccctccctcactcatagaagtggtaagtgaacgagcatccccaggaacccatgcttctcccacagatctttgcagccctcatgtcaggagatccccttgtgaacccactccaccagggcattcagtctgacacaaagccacatggagtctcagcagagaagctgctcaagcatgtgcagagacctgggaaccttagatacctaggcttcccagcaaaagcagccgtaactccagcaaagtgggaggttacaccacmatacacacccctgggaaaggcactgaatcctaggggctgagcagtgactgtctgcaggtcctgcttccaca

SEQ ID NO: 343657 - DNA, 449 bp, Homo sapiens
acaataaaatgatacaggagctgaatgatgaaagagctggtataaaaaggaacctaatggatctgacagagctgaaaaacacacaagaatttcacaatacaatcagaatcattaacagcagaatagaccaagctgaggaaagaatctcagaatttgaagactggctctctgaaataagatagtcatgcaaaagtaaagtaaaaagaaagacaaagattgaaggaaacctctgagaaataagtgattatataagaaggccaaatctatgaatcattggcatccctaaaatgaatggggagaaaacaaacaacttggaaaacatatttcaggatatcatgaaaacttccccaaccttgctatggaagccaacagycaaattcaggaaatacagagaacccctgcaagattctacacaagaatataatccctaagacaaataatcatcagat

SEQ ID NO: 343658 - DNA, 602 bp, Homo sapiens
caaataatcatcagatttactaaagtcaaaatgaaaaaaaaagaatgttaaagtgttaaaggcagctagagagaaaaggcaggtcacctaaaaagggaaccccatcaggctaacagcagacctctcagctgaaacacaatcagccagaaaagactggaggtatattttcaacattcttaaagaaaaaatttttaaagaagaaccaaaaatttcatatccagccaaactaaactgcctaagtgaaagagaaataagacccttttcagataagcaaatgttgagggagtttgttaccagcagacatgccttccaagagatcttaaaaggagcactacacatagaaaggaaagactactaccagctaacacaaaaacacacttaaaaacacacagaccagtgactctrtaaagcaaccacacaaataatccagcataataactagctaacaacacaataacaggatcaaatttacaaatatcaatacttatcttcaatgtaaatgagctaaatgtgccacttaaaagacacaaagtggaaagctggagaaaaaagtgagacccaatgggatggtgtcttcaagggactgatctcatgtgcagtga

SEQ ID NO: 343659 - DNA, 380 bp, Homo sapiens
tctttaaggatcagtaaaacttcctagggaggagggagtattttctctgtatgaccaacttacaccacagctgagggactccagcaagcagtccaccgttttataccctcaggaccacataacatactgggctgaattattgaagaatatctggtttctaggagggacaggagtagatcctgggctgttctggccagctctcactcatctcaggatgctgcattcccagcacattctatctacagttattcttgagaattacaaatgagaaagcagggaggactgcattgattcaatatcattcattatcacctggagaattatcctgcactttattctcccaactcagytttccctcttagcaaagttagtctgtttcc

SEQ ID NO: 343660 - DNA, 605 bp, Homo sapiens
aaataaacatgttttctgaatatttcaaaataaacttaggtttacatgttttagagaagaaaacagaaaatgtctgcatcctgttgacttgcttcttatagcactgactctcattagcatgatgtaatatatcttgtagtaattaaagccagttattattagtctaattcatggctgcttgaaatggaattccagaaatccggaagcacaaatgagaaaaacagaaatctttgttcctcggctctaggtagaagagtcagagccatccatgagtcagctgcttgattttctctttgtgccactatcatctccttgcatttagggccacttagaggtgaggaaaagaaaaggattcaacatatagcatattggtttttattgtacatgttattcagaatttctttgtaaaactgtttccaaaacaataaaagcaactaaaaaattagtaagtgaaatatatcaygcttgcctgcttcctcccaaacatatcacatcaattaattactttttactgatgaaaataatctaacttccattaaggcaactctttcagttcctcagggtaaaaagaagttcttagttttttaaatgctataatttggagc

SEQ ID NO: 343661 - DNA, 619 bp, Homo sapiens
acacacacattttttaaagttattttcagtatatattccctactagcaacaagtatatatactttttattgatttcayttattgtctatgggagtatgagatggagaatttaggtgctttaacacgtcttaatgtaaatatttagccttttaaggccaagtatacaactggttttaaacatcactaccttctttctctcacattttagctcaaaacaagttccaatttctctcagctataattccaaaatcattctattctgtctggcttaagatcaccttacccattacttccaatttacttccaaatttattgaaatatgtaatatatattcactctttcatttctcatctttcagttgcttcagtatcaaggtagtccctgactctccattgaaacatcttttactgtctggcaaaatgttctgtctgctgaatcccatggccctttcctgtgtatactcttctgtatcttcaaatatcaagcatcgattcattctggatcaactcttcttttgcctcatggcaacattatctctgtcttacagttcctcattctgtctacaacatttaatatcctttacgggtttatttttgtttgttcatgtcaagtaatctag

SEQ ID NO: 343662 - DNA, 619 bp, Homo sapiens
acacacacattttttaaagttattttcagtatatattccctactagcaacaagtatatatactttttattgatttcatttattgtctatgggagtatgagatggagaatttaggtgctttaacacktcttaatgtaaatatttagccttttaaggccaagtatacaactggttttaaacatcactaccttctttctctcacattttagctcaaaacaagttccaatttctctcagctataattccaaaatcattctattctgtctggcttaagatcaccttacccattacttccaatttacttccaaatttattgaaatatgtaatatatattcactctttcatttctcatctttcagttgcttcagtatcaaggtagtccctgactctccattgaaacatcttttactgtctggcaaaatgttctgtctgctgaatcccatggccctttcctgtgtatactcttctgtatcttcaaatatcaagcatcgattcattctggatcaactcttcttttgcctcatggcaacattatctctgtcttacagttcctcattctgtctacaacatttaatatcctttacgggtttatttttgtttgttcatgtcaagtaatctag

SEQ ID NO: 343663 - DNA, 619 bp, Homo sapiens
acacacacattttttaaagttattttcagtatatattccctactagcaacaagtatatatactttttattgatttcatttattgtctatgggagtatgagatggagaatttaggtgctttaacacgtcttaatgtaaatatttagccttttaaggccaagtatacaactggttttaaacatcactaccttctttctctcacattttagctcaaaacaagttccaatttctctcagctataattccaaaatcattctattctgtctggcttaagatcaccttacccattacttccaatttacttccaaatttattgaaatatgtaatatatattcactctttcatttctcatctttcagttgcttcagtatcaaggtagtccctgactctccattgaaacatcttttactgtctgrcaaaatgttctgtctgctgaatcccatggccctttcctgtgtatactcttctgtatcttcaaatatcaagcatcgattcattctggatcaactcttcttttgcctcatggcaacattatctctgtcttacagttcctcattctgtctacaacatttaatatcctttacgggtttatttttgtttgttcatgtcaagtaatctag

SEQ ID NO: 343664 - DNA, 619 bp, Homo sapiens
acacacacattttttaaagttattttcagtatatattccctactagcaacaagtatatatactttttattgatttcatttattgtctatgggagtatgagatggagaatttaggtgctttaacacgtcttaatgtaaatatttagccttttaaggccaagtatacaactggttttaaacatcactaccttctttctctcacattttagctcaaaacaagttccaatttctctcagctataattccaaaatcattctattctgtctggcttaagatcaccttacccattacttccaatttacttccaaatttattgaaatatgtaatatatattcactctttcatttctcatctttcagttgcttcagtatcaaggtagtccctgactctccattgaaacatcttttactgtctggcaaaatgttctgtctgctgaatcccatggccctttcctgtgtatactcttctgtatcttcaaatatcaagcatcgattcattctggatcaactcttcttttgcctcatggcaacattatctctgtcttacagttcctcatwctgtctacaacatttaatatcctttacgggtttatttttgtttgttcatgtcaagtaatctag

SEQ ID NO: 343665 - DNA, 550 bp, Homo sapiens
gctataaactttcctctgagtactgcttttactgtatgtataccatgggttttggtacgttttgtttccattatcatttgtttcaagaaatgtttcagtttcttattgctggttattgagggcccaaggagtcttcagttagcaggtgatgaatgctgacgggactgagtcctttccttcaaggcagcagatcctcttctggcccagggtgtgtctagacatgtcatctgggagctagggcctggaacaagggcctcctgactctgactggtgccctatgctgctgtggctgasctggtatcctagatgtaagacacagtcctcctcactcttccctctcctctcctcaagtgggagttctcctactgagataccatctggggcagccaagggactcttggcatcaactgtctcctcaacccaggtggcacagcttagggttagaggaggggtgatgccaacacccacttcactgccccagatggtgtctcagtattttatgtatgtgtcctgtcctgaccccagttctctgtctctgtgcctatttcag

SEQ ID NO: 343666 - DNA, 472 bp, Homo sapiens
ccagttggttctattattgatgatgttgcatttgatctgttggctaatgtagcgcctgccatgtttcttttctatgaagttactattttccctttgaaatcaataattaatttataagatagattgaatctacacagttatgctgtatctcatcaaacttttgcctacttgatttagtatctattaatgattattgatatgtcactgtgtaagcatttaatatatagaaatgtgtatacaagactaaaaytatgtatccaacactgaaaagtgaggatttaaaataatggtgagtactgtaaataagaggtaataataattcctttaaaaaatgatttcatgagaaaatatgagggaaatttaagtgagacttatctaagcaggtgatataggagctgagaattaaatcaacaatgaatcaataatacattaacggaatggagatttctaagcagaaagaacagcaagaata

SEQ ID NO: 343667 - DNA, 472 bp, Homo sapiens
ccagttggttctattattgatgatgttgcatttgatctgttggctaatgtagcgcctgccatgtttcttttctatgaagttactattttccctttgaaatcaataattaatttataagatagattgaatctacacagttatgctgtatctcatcaaacttttgcctacttgatttagtatctattaatgattattgatatgtcactgtgtaagcatttaatatatagaaatgtgtatacaagactaaaattrtgtatccaacactgaaaagtgaggatttaaaataatggtgagtactgtaaataagaggtaataataattcctttaaaaaatgatttcatgagaaaatatgagggaaatttaagtgagacttatctaagcaggtgatataggagctgagaattaaatcaacaatgaatcaataatacattaacggaatggagatttctaagcagaaagaacagcaagaata

SEQ ID NO: 343668 - DNA, 472 bp, Homo sapiens
ccagttggttctattattgatgatgttgcatttgatctgttggctaatgtagcgcctgccatgtttcttttctatgaagttactattttccctttgaaatcaataattaatttataagatagattgaatctacacagttatgctgtatctcatcaaacttttgcctacttgatttagtatctattaatgattattgatatgtcactgtgtaagcatttaatatatagaaatgtgtatacaagactaaaattatgtatccaacactgaaaagtgaggatttaaaataatggtgagtactgtaaataagaggtaataataattcctttaaaaaatgatttcatgagaaaatatgaggsaaatttaagtgagacttatctaagcaggtgatataggagctgagaattaaatcaacaatgaatcaataatacattaacggaatggagatttctaagcagaaagaacagcaagaata

SEQ ID NO: 343669 - DNA, 572 bp, Homo sapiens
agttgttgaaagcagtcaaacagtaattccaccacttccagggaaggttgatgataattaaatgctaagcttaatgagatattaaatattaaagctaagcttagtgagaaattgacatgttattaataggatgcttaagtcagtttagaggtttttactacaaagaaaacaatacaattacacaattaagaaaaataagaataaacattctataagactagtttcctagtgyaaatagttttaaagagctaattcttactatttataggagggttaaataaggtcaattcaaagcacaaaaactggccaggtgcagtggttcttacctgtaattccagcactttgggaggctgaggcaggaggatcacctgagcctgggaattggaaaccagcctgggcaactacaaaaaaattaaaaattagccaggcatggtggtacctctcggtactcctagttattcgggaggctgaggtgggagcattgctcgagctcaggatgtccaggatactatgatctatggttgtgccactgcattccaccctccatgacagagcgagaccctgtctcaaaa

SEQ ID NO: 343670 - DNA, 509 bp, Homo sapiens
tataaaataagagtttttgtttcctgtttaatgcctctatcctgaatacatcttgatatttcaaatattgtgttttttcttgaattaatatacaaatagttttctgaagaatttgagagagtttaaaaggaaaaaaaactgatgagcaatttaaatgtattgaaaatacacygtgcactgtgtttaaaagtaattctatatattagaataaaaaatatatactctttcactgcaggctaactcagtggcaagaatgaataggaactgtcttactctgaatgtattaaaaaactggttgcctggttttattaatctagttatgtagcatttgcttttagaacacaaagcaaaatgtgttgtttatccttgaaacttatctgagtttcaaaacataccagaattacccccgattttctgagtttaaaagaggttgaacacttggccaaaaacacacttatttatattttatcatgttcaatttaaacttagactttatagcatagcaaagc

SEQ ID NO: 343671 - DNA, 509 bp, Homo sapiens
tataaaataagagtttttgtttcctgtttaatgcctctatcctgaatacatcttgatatttcaaatattgtgttttttcttgaattaatatacaaatagttttctgaagaatttgagagagtttaaaaggaaaaaaaactgatgagcaatttaaatgtattgaaaatacaccgtgcactgtgtttaaaagtaattctatatattagaataaaaaatatatactctttcactgcaggctaactcagtggcaagaatgaataggaactgtcttactctgaatgtattaaaaaactggttgcctggttttattaatctagttatgtagcatttgcttttagaacacaaagcaaaatgtgttgtttatccttgaaacttatctgagtttcaaaacataccagaattacccccgattttctgagtttaaaagaggttgaacacttggccmaaaacacacttatttatattttatcatgttcaatttaaacttagactttatagcatagcaaagc

SEQ ID NO: 343672 - DNA, 505 bp, Homo sapiens
gaggtattttcctcggtctgagaaccatttgccttgtgtgggaagagatagataggtggaagtttcagcgggggagtaggtgggagtgaccaacatgaaggagaaaaactggccgtgagggacagaagttggagagctagctgcttgtctagccaccttatcagcataagcgttgcytagagcaatgggatctgatgccttttgatgccccttgcagtgaacgaccccagcttcctttggaagtaaagtggccttgagtagagtttttattaaataggcattaatgatggaggacccttgtgtagtgagaaaacctctttcagcccataggaccgcatggtggtgcagaatatgaaaggcatatttagaatcagtatagatattgacatgtagtccttttgcaagagtgagggcttgagttaaggcaactagttcggcttgctgagaggtagtggaggggggcagagcagtagcctcaatgatagctgtggaagatactatagca

SEQ ID NO: 343673 - DNA, 505 bp, Homo sapiens
gaggtattttcctcggtctgagaaccatttgccttgtgtgggaagagatagataggtggaagtttcagcgggggagtaggtgggagtgaccaacatgaaggagaaaaactggccgtgagggacagaagttggagagctagctgcttgtctagccaccttatcagcataagcgttgcctagagcaatgggatctgatgccttttgatgccccttgcagtgaacgaccccagcttcctttggaagtaaagtggccttgagtagagtttttattaaataggcattaatgatggaggaccyttgtgtagtgagaaaacctctttcagcccataggaccgcatggtggtgcagaatatgaaaggcatatttagaatcagtatagatattgacatgtagtccttttgcaagagtgagggcttgagttaaggcaactagttcggcttgctgagaggtagtggaggggggcagagcagtagcctcaatgatagctgtggaagatactatagca

SEQ ID NO: 343674 - DNA, 604 bp, Homo sapiens
tctttgggcattttgatttggatgaaaagatgttaaatagtcaagacatgaggcccattgggggatgtttgttcaatggtcatttcggtagaactatgcaaataacaccaagagagtcytaggtttagcagatataattcacagaagaaatttcaacacattattttttaagtttgcagacaaggtagaaagtgaatcacctagaaatttttatgaccactttaaatttattctggaacaagaaactggagtgtatgaggataggagcaaccaaataggcaaacaaacaaaatgctctttatgcctttatttgcactgtattgataaaaacaaggtgcttaaaaagcatctattaaaataagttatctccctatatagtatgtagtaattgtacattttattggtgataataaaatgctctgctttcactgttttgtaacttgctttagtgtaagatttctcaatataaacattattgtcattttaaggcaaatgatttctggggtgagtggtgaggggctccctggtgcactgtaagttgtttagcatcttctctggtctctttccactagttgcagtcgtaacttctaagtcgtgatagcta

SEQ ID NO: 343675 - DNA, 529 bp, Homo sapiens
ccaaccctggaatctttgtccagcaggattttcatcttatgttactgggtcttggtggtggtaactgaggactttgacatgtaggctggtgttctggtaaagttttcttgaaggcctttattctcctttatctggcacagttgatgtagcaattaccatgttctctacggatgccagaaaggcctaggctcttgaagatctgcatccagtcacaccagaatcctttgaaggctcaaggaaaataccttattttgcttaatatatctggtggtaatcaaaagaaaaatggcaatctgacattgaaagcattagctgatctscatactttttgaccataaagatggtgagaaatacaaaaaatatattattcatataattctcatgatttgaagccttttcttcatgaactaacccgtctctcactactcttttaagtgacctaattgagtttgatgactaaaattatcatctctacacagatgattctaagatctatttttttactttgctttctcatctggattctttc

SEQ ID NO: 343676 - DNA, 581 bp, Homo sapiens
aaacaaatgaaaccatgaaaagaatgacagcaatgtgttattattttgtgccagtttaatagtattttggccgtataaagaaaactgtggccacttatgtttcatttccacaaagagaaagacagcatttcctgggacacgaatcctggagaaatagytccttgggataataataggtattataatgaaaaaacatatgagaagttattgtaaaggtttcaacaaaattaaatggatctcattgggacagaacttctcggagtttttaatatactaatatgcattatgacactacaagaaaagggtttagtatatagcatttccaaaattcatcttttttatggagcatgcttcaagaccagtgttcttcaaaatatgttagtgctcataacagaagatatttcattttggtataagaaatgactttacactatctcttgaatcaaagatgttacaccattgatataattgagatttactttggctgttagcatatcaaattttttcatgttcttttcataatctctatagactaatgtctcattcaaatgcagagggtagaagacatagcagctggttgt

SEQ ID NO: 343677 - DNA, 581 bp, Homo sapiens
aaacaaatgaaaccatgaaaagaatgacagcaatgtgttattattttgtgccagtttaatagtattttggccgtataaagaaaactgtggccacttatgtttcatttccacaaagagaaagacagcatttcctgggacacgaatcctggagaaatagttccttgggataataataggtattataatgaaaaaacatatgagaagttattgtaaaggtttcaacaaaattaaatggatctcattgggacagaacttctcggagtttttaatatactaatatgcattatgacactacaagaaaagkgtttagtatatagcatttccaaaattcatcttttttatggagcatgcttcaagaccagtgttcttcaaaatatgttagtgctcataacagaagatatttcattttggtataagaaatgactttacactatctcttgaatcaaagatgttacaccattgatataattgagatttactttggctgttagcatatcaaattttttcatgttcttttcataatctctatagactaatgtctcattcaaatgcagagggtagaagacatagcagctggttgt

SEQ ID NO: 343678 - DNA, 567 bp, Homo sapiens
gtaatagtttacagaggctaggagagtcaagggtaggagaggaagttgtgtctggaggagctggaacactaggatgacccaaataaaactttagctgaatccttgatttctcagtggcaggtatagctcagcaaataaagattacccttgsaaatatttaacaaaagcagcctgttctgttcttcttagtggtgttagggtgaccacagtattgagtattggacttgttgtccagaatcccgggtattctttacagctaaatctgtaacagccaggatcaacattctgcctggccttttcataggaaatctgagtgacagtggtggcacttttcttacctgccacacatttgaagatcaaatgatggaacccagcatttaacgaagaatagacagcaaaaaaaatttgccaagtgaataatgaatgttgaccattaaatctgaccacccatgggtattattaaatacagtcttcactaaatcagaaacacagagctaggtattctctgagactttttcacttcttacctttttgtccgttgtttcttgtgattacataaacattgtg

SEQ ID NO: 343679 - DNA, 630 bp, Homo sapiens
aatagtttacagaggctaggagagtcaagggtaggagaggaagttgtgtctggaggagctggaacactaggatgacccaaataaaactttagctgaatccttgatttctcagtggcaggtatagctcagcaaataaagattacccttgcaaatatttaacaaaagcagcctgttctgttcttcttagtggtgttagggtgaccacagtattgagtattggacttgttgtccagaatcccgggtattctttacagctaaatctgtaacagccaggatcaacattctgcctggccttttcayaggaaatctgagtgacagtggtggcacttttcttacctgccacacatttgaagatcaaatgatggaacccagcatttaacgaagaatagacagcaaaaaaaatttgccaagtgaataatgaatgttgaccattaaatctgaccacccatgggtattattaaatacagtcttcactaaatcagaaacacagagctaggtattctctgagactttttcacttcttacctttttgtccgttgtttcttgtgattacataaacattgtgattgcacacgtgatttaaaaagaaacatatgtggatactgccccctcaaggagatgcagcataac

SEQ ID NO: 343680 - DNA, 567 bp, Homo sapiens
gtaatagtttacagaggctaggagagtcaagggtaggagaggaagttgtgtctggaggagctggaacactaggatgacccaaataaaactttagctgaatccttgatttctcagtggcaggtatagctcagcaaataaagattacccttgcaaatatttaacaaaagcagcctgttctgttcttcttagtggtgttagggtgaccacagtattgagtattggacttgttgtccagaatcccgggtattctttacagctaaatctgtaacagccaggatcaacattctgcctggccttttcataggaaatctgagtracagtggtggcacttttcttacctgccacacatttgaagatcaaatgatggaacccagcatttaacgaagaatagacagcaaaaaaaatttgccaagtgaataatgaatgttgaccattaaatctgaccacccatgggtattattaaatacagtcttcactaaatcagaaacacagagctaggtattctctgagactttttcacttcttacctttttgtccgttgtttcttgtgattacataaacattgtg

SEQ ID NO: 343681 - DNA, 630 bp, Homo sapiens
aatagtttacagaggctaggagagtcaagggtaggagaggaagttgtgtctggaggagctggaacactaggatgacccaaataaaactttagctgaatccttgatttctcagtggcaggtatagctcagcaaataaagattacccttgcaaatatttaacaaaagcagcctgttctgttcttcttagtggtgttagggtgaccacagtattgagtattggacttgttgtccagaatcccgggtattctttacagctaaatctgtaacagccaggatcaacattctgcctggccttttcataggaaatctgagtgacagtggtggcacttttcttacctgccacacatttgaagatcaaatgatggaacccagcatttaacgaagaatagacagcaaaaaaaatttgccaagtgaataatgaatgttgaccattaaatctgaccacccatgggtattattaaatacagtcttcactaaatcagaaacacagagctaggtattctctgagactttttcacttcttacctttytgtccgttgtttcttgtgattacataaacattgtgattgcacacgtgatttaaaaagaaacatatgtggatactgccccctcaaggagatgcagcataac

SEQ ID NO: 343682 - DNA, 592 bp, Homo sapiens
atgcctctacatggaatggttacattgtggtgatggaggccttttcctgggtctgtgttccatcagttttgaggagagcatccaaaatatttctgtcgttccacacctcacctgcatgggcggagtgagaatctgatattgtgggcatatgtgtactcctgccgcgcacacctgcacctgcagagatcccacctcatttatatgggtgaatgaaacccagggcagtttgtgtctattatttcactatcatggagatyggcactgtaacttaaaaaccttggcactctcaagtgtgaatagattcatgtaacattagtcagtctcctttttgtttataaatcatgatagtatctatttcaatctcttccacttgcatactgccaagacttattcaactgatacgcgttagtcaggccgagtactaaatgaattaacattgtagtaactttaggacattcaatgcggtgtgttttattttagataaacaaacttgcctataaacatcccaaagttaaaacatgtttttaaaactaaaatttgctaattagatgctcttttgtctgtaggtaatttcttctgagtaaatatgcat

SEQ ID NO: 343683 - DNA, 592 bp, Homo sapiens
atgcctctacatggaatggttacattgtggtgatggaggccttttcctgggtctgtgttccatcagttttgaggagagcatccaaaatatttctgtcgttccacacctcacctgcatgggcggagtgagaatctgatattgtgggcatatgtgtactcctgccgcgcacacctgcacctgcagagatcccacctcatttatatgggtgaatgaaacccagggcagtttgtgtctattatttcactatcatggagattggcactgtaacttaaaaaccttggcactctcaagtgtgaatagattcatgtaacattagtcagtctcctttttgtttataaatcatgatagtatctatttcaatctcttccacttgcatactgccaagacttattcaactgatacgcgttagtcaggccgagtactaaatgaattaacattgtagtaactttaggacattcaatgcggtgtgwtttattttagataaacaaacttgcctataaacatcccaaagttaaaacatgtttttaaaactaaaatttgctaattagatgctcttttgtctgtaggtaatttcttctgagtaaatatgcat

SEQ ID NO: 343684 - DNA, 617 bp, Homo sapiens
gatctgtgcccatctgtagtttttgctgttattgtattgcttttgcaaagaaaaacctgttgataatgacttaggcaataaaaccttctaccactctgtagaaatacaaagaataaaatggttctcatatttgatcagcagcatctttaggtatgattaatccgtcagcctgaagagttaagatagaaagtgatgcttttgctttttacaaggagaycaacatgccattctactaaggtgctcaaatgttttctgtttttccaaagaaaggttttctgctaaacagatccctgacttagctctactctccaacagttttcaattttataactttctacttgttcttccttgagggtatttttttatacaaatgtttgatatgtgtgttccattatcaatagccttttcgttgttcaaggagttagttccttctccagtttttatatcatttcaaagtttccctcttttcctttgtttataaagtaaagaatatccaagtaaatcttattttcttctccataatgctatcctctgctatagtgcatactgaattctgcttctgcacaaacagaatataataatatatccctgccttccctccgcattaaataagtgga

SEQ ID NO: 343685 - DNA, 578 bp, Homo sapiens
  misc_feature (1)...(578): n = A,T,C or G
acccaaaaccaaggcagataaaaattttgttggatgactgatatggtttggctgtgtccccgcccaaacctcaccttgaactgtaataaaccccacttgtcaagggcagggccaggtggagataattgaatcatggggtcagtttcccccayactgttctcatggtagtgaataattctcacaagatctgatggttttataaatgggagttcctctacacaagctatctcctgcctgccgccatgtaaagcatctctttgcgcttccttcatgttccgccatgattgtgaggcttccccagccatatggaactgagtccattaaacctctttcctttataaattacccattctcaggtatgactttattagcagcatgagaatggactaatacaatgacaaagtgtggtctcaacagacattggagactgatagatcaaatccattaagctaaaatatagtaaggggaaatttaaagtcctttnctaaagccctcaagctataagctgaagatgaagaagatatgaccaactagctcatatgaaaaatattgagtgtctttaattgactacaagttca

SEQ ID NO: 343686 - DNA, 541 bp, Homo sapiens
ttgtaagactgaaaatagccatataaaagctatatgtatatatgtatacatacttgctaaggagtatataggtggaagtggagcacatgaccagatttgccttttagaatatcattccttaagaagtatgaggtaaaattgaaagaagttatgtctcagagtagaatgaccagtcagaaggctgttgcaattttctaagcaagagctacaagagccaaaactaagttaaaaaattttgaattagaaagaaagagaaaattcaggcaatatttgggaggcagaagacatggcttgattatcaattaaatatagtgtgtggaaagaagatttgagctcataccaagaattctgtcttaagatgtttactagattgsagaacatctaaggagaagaaatgtggatagaaggagaattcagtttgtattagatttgtggtgctggagttgcccctgggatattcaggtggagctagctatacagattagaagtccaagggaaaattcaagacagtgataaaagttgaaaatataattgcatttgc

SEQ ID NO: 343687 - DNA, 419 bp, Homo sapiens
tcaaaactaatatacaagttattagctcttagatggtagttgaacaagatcatgactgtaaatgcccaaggcactgaaccaaatatttgggagatattaacttacttgtgacattctacatatgttgagttgccatatgtrttggtctatagccttctgactggtcattctactttgagatataacttctttcaattttacttcatacttcttaaggaatgatattctaaaaggcaaatctgatcatatgctccacctccacctatatattccttagcaagtatgtatacatatataatatagcttttatatggctattttcagtcttacaaaatatttgcaatttttatgcataccaaatgctcccgtgtcactgtaagtagttgattaaaggcattgactcagtaaattataagcag

SEQ ID NO: 343688 - DNA, 472 bp, Homo sapiens
cgtcatcaatgtaccccagaaatcagcattattcctgttttccaggttgtatggatgcatttaagaccacagttgaagttataatgtggcatccaacacttttctcatcagctccagatccctcawgggtttgtatttttaaagcttgaatagtccacaaaatcacaagtactgattacagctaatccttgctaatcaccagtgctttcatggaagtagtgctgctacccatccttggatgtattcactaccatagttatttttttcatgtcatggagcattaaatgctccatatttcctgtcaaaacaaagtgaacatctctttgccccttttggatttagctatgaaatgggttccaaaacaactccagcttatcacctaatattgaacagatattttggtgaaaacagtgcttattgatttcacttcatatgcccattgcattggactcaagcaaaagtttggtagagg

SEQ ID NO: 343689 - DNA, 472 bp, Homo sapiens
cgtcatcaatgtaccccagaaatcagcattattcctgttttccaggttgtatggatgcatttaagaccacagttgaagttataatgtggcatccaacacttttctcatcagctccagatccctcaagggtttgtatttttaaagcttgaatagtccacaaaatcacaagtactgattacagctaatccttgctaatcaccagtgcyttcatggaagtagtgctgctacccatccttggatgtattcactaccatagttatttttttcatgtcatggagcattaaatgctccatatttcctgtcaaaacaaagtgaacatctctttgccccttttggatttagctatgaaatgggttccaaaacaactccagcttatcacctaatattgaacagatattttggtgaaaacagtgcttattgatttcacttcatatgcccattgcattggactcaagcaaaagtttggtagagg

SEQ ID NO: 343690 - DNA, 582 bp, Homo sapiens
tctaccattctggggtctagaggaaagtggctgtcttctcacagcttcactacgcagtgccccagtggagattttatgtgggggctccaactccacatttcccctcctcactgccctagtagaggttctccacgagggctccagtcctgcagaagacttctgcctggacatccatatgttttcacacatcctctgaaatctaggcaaagcctgccaagcctcaactcttgccctctgtgcacccacatgcttaacaccatgtggaagctgccaaggtttttggcttgcaccatctggagcagtggcctgagacatatctggggcctttttagctacagctggagctggaagggctgggatgcagggctccacgttttgagactatacagaacagcaaggcgctgggcctggcccacaaaaccattttcccccaatttcctccccagaaaataggttattcttttctaccatgaggtcaggctgaaaattttccaaacttgtatgctttgmtttccttttaaatataagttctagtctcagataatctatctatacacacatatgaatgcatgctgttagaag

SEQ ID NO: 343691 - DNA, 618 bp, Homo sapiens
cgtgtggtgctacttttgatctttttctctaaactgaacaactcaattgccataagcatttacccataattcttatctttgatttcttctgtcttttggtagttttcctctaagtcatctttaacttctccatctttaagtggaaatcaaatctgcacttactacattagtaaagcactggctatttctgagtaaatttttaaagagtccatttttttcatctctctcagttcaatcctatgcratcagctatctcactgtttcctttttcttttcctgtcttttttgaaaaggtaatacaacatatgctttacttaccaagacatttttcagttagcttgtgtcaattggtctttacttattttacagtttattccttgggttaagttcttgtattttttcctattaaccatcattccactattaaccatgtatttctcttttttaaaaaacaatctttcaagatattatgataattgtcttaatacagcatgatccagatgtcttttgagctaatctctatgttcattattcatgtcactggaaagaatatggaataacaacagcccctaaggtccacagtgataagcccctgttccatcttccccagtcacagac

SEQ ID NO: 343692 - DNA, 575 bp, Homo sapiens
aaagtgaccacaaatctggagcattaactggggtcccaagggcctcattgctctgtgcagaggacagtatttctgtaatttatcagttcttccctaatggatgttgtcctaatcaggagtaattcccacagaggcttttacaggcaaactggctgagaatgaaaatccaaacgggttttaaaaaaaaagcacacaagcttatatcttttctgaagtcagatatgaccaaggggaatgtcatgatacatgcagagrgtttgagtgatgaggaaatatgccaaaactaatgccgtggttctttctccatcacttcctaattaatctctgaggcagaacagtcagccagttggagtgctgaaatatactagaggtccctgagtataccctaaaatcatcactattggaagaacatcatcaacatatggaaacatcttttacatccatcttctgtctttaatcctgttcttgtttgaaagaagccttcattctatactccatgaaaaacattactgaaagaaaactgatgcatgactttaaagcaaatgaaaatgaatactatgctgggagttttaaaa

SEQ ID NO: 343693 - DNA, 542 bp, Homo sapiens
tcttcttctgagctcttcaaactgttcaacctctgcctattactcagttccacagttgcttctatattttcaggtatctttatagcaatgccccacttctctggtatcagttttctgtatgagtttattctcatattgctctaaaaacatacctgagaatgggtaatttataaagaaaagaagtttaattggcttatgcttctatgggctgtataggcttctgcttctggggaggccttaggaaacttataatcatggttgaaggtgaacaggaagaaagtacatcttcacatggctggcaggagagagagagcaaagatggggaagtgctacacactttcaaacaaccagatctcttgagaactcactatcacmagaaaaacaatcagaaatttgaccccaagattcatcatctcccacctggtccctccccgaacattggagattacaattcatcctggaatttgggtggggacagagtcaaaccatattaccatgtaagccaaaaaatatcagtgttgtgtcatgatggagcaaatgaa

SEQ ID NO: 343694 - DNA, 508 bp, Homo sapiens
gatcataaattgaatgtggccagaaccagttttaagaatttttctgtacttattttctattatttctagctttaggattttagaaaaatatttaagaaagcaaaaaaatgcatcaggttgcttacttccatttatcaaatgacttgcttgttctatccataatattattttagacagaacatgagcacatctttactatttttaatcttttatttgttacagccataatatataatgatatcttaagaattaccttttcttakttagatgctatttactcagagtagtctttgcttattaaactatttaaggaactcctttctgagtcattctcagtactacatcttcaagctgtatcctttgaagcaattcagaatctgtaaaataatcttactcatttattatccgtttatgtgcttctctccccattagcatatcaatttcattaaagtagacttcattgtccttttcattatgtcctaaatgcctaaaacaattttgacacaca

SEQ ID NO: 343695 - DNA, 508 bp, Homo sapiens
gatcataaattgaatgtggccagaaccagttttaagaatttttctgtacttattttctattatttctagctttaggattttagaaaaatatttaagaaagcaaaaaaatgcatcaggttgcttacttccatttatcaaatgacttgcttgttctatccataatattattttagacagaacatgagcacatctttactatttttaatcttttatttgttacagccataatatataatgatatcttaagaattaccttttcttagttagatgctatttactcagagtagtctttgcttattaaactatwtaaggaactcctttctgagtcattctcagtactacatcttcaagctgtatcctttgaagcaattcagaatctgtaaaataatcttactcatttattatccgtttatgtgcttctctccccattagcatatcaatttcattaaagtagacttcattgtccttttcattatgtcctaaatgcctaaaacaattttgacacaca

SEQ ID NO: 343696 - DNA, 576 bp, Homo sapiens
caacatataaaaatacaatcgagtttacattgatcattgatcttctatcctgaacccctgcataatagttcaaataagttcataaattccatagtgttttctacatagaaaaaattatcatttgtgaataaagatagtgttacatatattcctttctaatcctataagaggtcttcaaaaagtttatgaaagtgtgtattatgaaaaactatgcatgggttttttgtatgaaaataaattcatactaacttgttataacatgtctgaacaggatctagttttagrcattaaagaggataagatatcactttgaaaacagcccttaacagagcaacatgaattctgctataatggacgcaggaacaaacaaaatttatggtgaagcttaaatgaaagaatggtgaaattattgatactttatggaaagtttatgggaataatgccccaccaaaatcagaagtttacaaatagataacttgttaagaagggaaaaaatgatgttgaagatgaagcctgcagtggcagaccatccacatcagtttttgaggaaaaaattatcttgttcaagtcctaatt

SEQ ID NO: 343697 - DNA, 588 bp, Homo sapiens
tctgcctcctctggtggcaaaactgcaggttttgaggtcaattacaagctattaaaattatagtcatcaccaactaaattatagaggagaagtatgaacaaccccacagccccccagcaaataggccacagactaccatatttttacctgatactctaagaatgtttcaacaataaattattctcagyttattgtctgtctataatcaacaatgaatattggttttgccaattttgtccaatttggtttttttggtttttggttttgatttttattggtgaggaaaagatgaccagtcttatcacagtaccagaaacaagccccagctgcactcttcattttcaaccttatttttgctcatctttaatcatgactgtcaagtattcatgcttattatgtagtggtgggaaaaaatccactccagaaatgaagctgccacataccccttaccctaagatgtgaagacaccactgtgagtgggtctgcccactctagtggaagaagcactgcatgatccagccaagggcctgaagattggcctactcagaggccaacaccactggaaaccctgccccctgacaatcagag

SEQ ID NO: 343698 - DNA, 588 bp, Homo sapiens
tctgcctcctctggtggcaaaactgcaggttttgaggtcaattacaagctattaaaattatagtcatcaccaactaaattatagaggagaagtatgaacaaccccacagccccccagcaaataggccacagactaccatatttttacctgatactctaagaatgtttcaacaataaattattctcagtttattgtctgtctataatcaacaatgaatattggttttgccaattttgtccaatttggtttttttggtttttggttttgatttttattggtgaggaaaagatgaccagtcttatcacagtaccagaaacaagccccagctgcactcttcattttcaaccttatttttgctcatctttaatcatgactgtcaagtattcatgcttattatgtagtggtgggaaaaaatccactccagaaatgaagctgccacataccccttaccctargatgtgaagacaccactgtgagtgggtctgcccactctagtggaagaagcactgcatgatccagccaagggcctgaagattggcctactcagaggccaacaccactggaaaccctgccccctgacaatcagag

SEQ ID NO: 343699 - DNA, 568 bp, Homo sapiens
aaacctacatcatgtatggaacatgattaagtgaaaatatgttttccttatgggatttataaaagaagaagatatgaggaaaggcatagaaaacctatttaatgaaatagtagcttaaaacttcccatgtcttggaagctacaagtgcattcagatccaggaagctgaaagatttccaagtagattcaaccccaaaaggtcctttctgagccacattatggtcaaactgtcaaaagtcaaagacaaccagagaattctaaaagaagtcaagtcacatataaaagaatcctcatcactaatagcagatttctcagcagaaaccttccaggttaggagtgaatgggatgatatatttaaagtgctgacagataaaaaaaaaaaaaaacctgtcagtcaagaatactataaccagcaaagctaattttcaaaaaaacaaatgacgcggggattgaccaamtagacaaaggcaggaaaagcttcttccaccagcagaaaccaaaatatcaagtaaatcaccacactttgaacagatcttttgagaaaaacactgaaaggcagtaagagacaa

SEQ ID NO: 343700 - DNA, 573 bp, Homo sapiens
acagaaataaattcattcagcacttatcacatgtgaaaaccagtgcaggaaactaaccacaattaaggaaactacagagacttggttctctcaaagcacccagaaacaaagccaagtgactatctacagtatacaccatagtcaaacsctcaagggataaaataaaatgaaaacaaaaagcttcatccaaatggcagcaacttcaaaaagataaagaaacaccagccctctgagatgaaaaggaattagcagaagaactgcagcaattcaaaaagacagagtttccttacctcccaaggatcacactagtttccaaaaaaaaaatggatcttaagcagattgaaatgtctgaaatgacagacatagaattcagaatctagatgacaagaaagttcaacaagattcaagaaaaagttgaaatcaatgaattcaatgaagccagtaaaacaatccaatagctgtaagatggaatagtcattttaggaaaacccaaactgaacttctggaatgaaaaaatttactacaggaatttcaaaatagttagaagtcatagcagcagactagaccaagctg

SEQ ID NO: 343701 - DNA, 505 bp, Homo sapiens
atcctctgctgtcttcaagagacctatctcacacgttacaacacccatatcctcaaagtaaggggagactttactttgacactatgggtgttgtaacatgtgaaaacaaaaaacaaaaacgagcagaggttgctattcttatatcggggaaaaaaatactttaaaccaacaacagtaaaaacgggtaaagaagggaaattacataatgataaagtgttcaattcaacaagaagacataaatatcccacatgtatatgcacccaacaatggagcactcagattaataaaacaagtatctagacctatgaaaargtttagacagccacacaatattggtgggggacttcaatacccatctgacagcataagatagattgttgtagcagaaaaattaaactaaatatctacagagtaatccacccaacaaccatagaatatacattattttcatctacgaatggaacaatctgtaagattgaccacatgctcagccataaagcaagtc

SEQ ID NO: 343702 - DNA, 505 bp, Homo sapiens
atcctctgctgtcttcaagagacctatctcacacgttacaacacccatatcctcaaagtaaggggagactttactttgacactatgggtgttgtaacatgtgaaaacaaaaaacaaaaacgagcagaggttgctattcttatatcggggaaaaaaatactttaaaccaacaacagtaaaaacgggtaaagaagggaaattacataatgataaagtgttcaattcaacaagaagacataaatatcccacatgtatatgcacccaacaatggagcactcagattaataaaacaagtatctagacctatgaaaaggtttagacagccacacaatattggtgggggacttcaatacccatctgacagcataagatagattgttgtagcagaaaaattaaactaaatatctacagagtaatccacccaacaaccatagaatatacattattttcatctacraatggaacaatctgtaagattgaccacatgctcagccataaagcaagtc

SEQ ID NO: 343703 - DNA, 534 bp, Homo sapiens
gcttgtgcagggaaagacccctttttaaaaccatcagatctcatgagacttgttcattatcacattaacagcacaggaaagacctgctcccatgactcagttacctcccaccgggtcactgtcccacaacacgtgggaattcaagatgagatttgggtggggacacagccaaaccatatcaccaaggaatgtaatagaattccagaaaaacaccaggagctaggggagagacatgaaaaaacttcccctcacagccctcagaaggaagctacctgtagatactatgatcataggcttctggtctccatatccatgagcaaataaatttctgtcgtccaagccattcagtttgtgatactttgttatagcaactctaacaaactaataattaggggcccatgttgcattgcgtttatatttcaaaactgaaatcattaatggttttcctcttgatgactgggttggraaggttgatttaatcctttctttaaagtgtagttcaacattcatttatctctttactcattctactgg

SEQ ID NO: 343704 - DNA, 536 bp, Homo sapiens
gatattctgtcctctttagagaacagtatgactgaaagaggggttcagccagtggtcatctgcatcagagcaataccaaaaacaacctggatttaaacacactgtacagggcccagccagaccacagaaccatcttcgcctgttttcatatggatgcctacaccatgcacagagccatattaaagaaaaataaatgacaatctatctctgctgtaatttaacacaattcaagccacatttattaatgcttccrtatggcatgtatggtgccagttgtatgaatatgaataagtcttgggccatgctttattcggttcacagtctggttaggaagatcaaaaagtcttcatgaaatatgtcagacttgacaatatatcaagaacatgaatcaaatcttattggtctttatattcccaatacttacaataatgctgtggggggagtattattacgccaagtactcagatgagaacataagggtcacacagctgccaaatgtcagagatgagatttgagctattggcccatcactatat

SEQ ID NO: 343705 - DNA, 606 bp, Homo sapiens
aagccactcaggagaagaggcagcctttggaaatgagacgaaggagttcaggttacaaggcctgcaggtgagagaggaagagaacaccccattgtcacacgggcattcagagagaataatgactgcagtagtgtctcctttctaatttttaacagcaccaatctcttcagaatccatcctttttattaacggaagggctcctcagtgagagctgtcttcactgaggtagctaagacatgyctcagtgtgtctggtgacttggtggccaggcctgccagaatttgtatgagtaactatggagagaaattgttcatccattcaaaacagtcagtgttcattgggcatctctgaactaagtactgcacaaagccaccatatacagagatgtagacagacagtgtagcacaagagagcactgggcagaggagcctggcccagtagtgaagacttagttgagagatgagagggctgagttggtcatgtgaattgggctttgctatgagttccccagtgatgtccccgaagggacagtgcctttcttcctgcatgctgcacaagttatagcagccttgatctccaaagcacttccaggattactgtgttggt

SEQ ID NO: 343706 - DNA, 601 bp, Homo sapiens
ctttttaaaacattctaatgtagagtagaaatataggtaggtgttaatggtgttggaatgaattcctaaaccatataaagaagctccacaggtaagatgtgttgtcagaacacatttcatgtagagtgaaatgcattctggaaaatatctgcttgttcatagcttcatttgtcatgataatattgccacactattttctcatccattattgtggctattttcacaaacagtgaagctgaaggaactgattaaattgacctcttttaagtctgaccttaatctatttgagaatatataaaatctatttaactcaactcaaataaaacctatacagtgattaacagattgtttatagttactgtttccaacagaaattatgagacaccaagtttaacaagaatgtctctgtgtatgtcaatgaaaatcaatcagtaatgattaatatacttacgtaaactcctctgagggacaagcacttggttccaatatcacatcagttcttacttcatgtggagaattttagaatctrtagttgaggtattttgttttcctcttctgatagtttcataatagtcatcatttaacaaatataaatactgtg

SEQ ID NO: 343707 - DNA, 568 bp, Homo sapiens
aatgaactggtattgcactatttataatggtgtgttttctgttcaattcaaacaaaaacagtagaacattatgttcactgtgaataactttcgtaatttttttttaccatagctcacttagttaacaaaaaactcttgattttatggccagaataccagtragattatgactcacccgaaggtatcatgtcagaattacattaattaataacatattataattatttagtggtccaataaaatattaatggttttatataattattgatttgatattctcaggaattcagaggcatgcttagggttaactttcttacaagaagttgtactttttcttatacttctagggcacatgtaccctagaacttaatatataataaaaataaataaataaaaaagaagttgtacttttaacatttgtgaaatgtcatattatcataggaaaaaaatgacattcaaaataggaacctactttattttacgcacatacactctgagaatcttgagcaggtctcatcagtcatagagtattagaacagagagttttcaaagactgaccacacatgac

SEQ ID NO: 343708 - DNA, 585 bp, Homo sapiens
tttcttgtggaacactgaaaaattattatgtgccaaagtgtaagaatgctttatatccatcacatcatttgtcctgggaggtactttctattattgatttcatttgacaaatgaggaaacagaggtctgaataggcagagaaacaactgtcaactttgtacttcttagtacaactttactgcctctgaggcctgcctacattcctgcactggggtttcgtgaacatcgcttgaggccattggccctatgtctgtcatctcttatgtttcattaataaacaccctcagctcttgatctgtgaggrtcttaataaatatggttgtattaaattgttgcactttaaagaataatatatgatattaagaaatactatttctgataacagcttaagccataatatgaagtgtgctgatacaagaggagtttgtaggtcttaaaaacaaaaaaacaaaaaaactaagctttaatttagtataagtttctgacttttctgctaaaatttatctaggagtatatataaagaaaaggccttattggataaactggtaaatgcatctctcaagttttattttatattcaacataa

SEQ ID NO: 343709 - DNA, 553 bp, Homo sapiens
cctgcctacattcctgcactggggtttcgtgaacatcgcttgaggccattggccctatgtctgtcatctcttatgtttcattaataaacaccctcagctcttgatctgtgaggatcttaataaatatggttgtattaaattgttgcactttaaagaataatatatgatattaagaaatactatttctgataacagcttaagccataatatgaagtgtgctgatacaagaggagtttgtaggtcttaaaaacaaaaaaacaaaaaaactaagctttaatttagtataagtttctgacttttctgctaaaatttatctaggagtatatataaagaaaaggccttattgrataaactggtaaatgcatctctcaagttttattttatattcaacataatatgaagtaaaaataaaatacaactaagaaatatatagcattggctactttttgaaacatttctccacaaaatagcaggtaaaatatgaaaaagtttcgacacaatgttttgaatctctatttctttatatcctaaaggaaataagaatttgatatgc

SEQ ID NO: 343710 - DNA, 553 bp, Homo sapiens
cctgcctacattcctgcactggggtttcgtgaacatcgcttgaggccattggccctatgtctgtcatctcttatgtttcattaataaacaccctcagctcttgatctgtgaggatcttaataaatatggttgtattaaattgttgcactttaaagaataatatatgatattaagaaatactatttctgataacagcttaagccataatatgaagtgtgctgatacaagaggagtttgtaggtcttaaaaacaaaaaaacaaaaaaactaagctttaatttagtataagtttctgacttttctgctaaaatttatctaggagtatatataaagaaaaggccttattggataaactggtaaatgcatctctcaagttttattttatattcaacataatatgaagtaaaaataaaatacaactaagaaatatatagcattggctactttttgaaacatttctccacaaaatagcrggtaaaatatgaaaaagtttcgacacaatgttttgaatctctatttctttatatcctaaaggaaataagaatttgatatgc

SEQ ID NO: 343711 - DNA, 541 bp, Homo sapiens
gacaggcataagaaattacaaaagtattaatttggggaaccaataaatgtccataaaatcttcacaatccacgttcttctrccatggcttcagccggtcccttcgttcagggtccctgacttcccgcaacacctcttctctctgagtttagcttagactttcccttagctaacgtgtctgaacgtgttctttgttcttgagcaagagttcaccattaaaactcacacagaaagaacttgtcaagactttactaaatacagtttaggatgtttctaattttcattaaaaaaaaagtgtaggtatttttaatgagattacataatttctaagtcagttatttaagacccaccaaattacaataatttatttctttcaggaaaaaaaaaaaaactagcaataagcctgctgtctggcttcatcagctctagatgcaaataggaaactaaggcaatattccattgagagctgatggtggattataccagtgtagtgtcagtgtaaattacttcaactggtattcaatttaaaagcagacttgcag

SEQ ID NO: 343712 - DNA, 541 bp, Homo sapiens
gacaggcataagaaattacaaaagtattaatttggggaaccaataaatgtccataaaatcttcacaatccacgttcttctaccatggcttcagccggtcccttcgttcrgggtccctgacttcccgcaacacctcttctctctgagtttagcttagactttcccttagctaacgtgtctgaacgtgttctttgttcttgagcaagagttcaccattaaaactcacacagaaagaacttgtcaagactttactaaatacagtttaggatgtttctaattttcattaaaaaaaaagtgtaggtatttttaatgagattacataatttctaagtcagttatttaagacccaccaaattacaataatttatttctttcaggaaaaaaaaaaaaactagcaataagcctgctgtctggcttcatcagctctagatgcaaataggaaactaaggcaatattccattgagagctgatggtggattataccagtgtagtgtcagtgtaaattacttcaactggtattcaatttaaaagcagacttgcag

SEQ ID NO: 343713 - DNA, 578 bp, Homo sapiens
ttatcatttattgagctggccaacttgcaggagaaccaggtttagggagaaaatcagaaagtcaattttgcaaataataaccttgagttacttattagatttcaagaagtaatatcaactaggtggctyaatgtacaattccagagttctacagcacaatgaaggctggggattaaaaacttgaaaattggcagtataggcataggagttaaagcatgacaccatctgagataaaaagaaaatgcatttaaatagaggaaataaatgccagaatcatcccttctgtgctgtaattgagaaatcaggaagatggtggtcaacgaagcaacctaggaagcagcagctaataaggtaaacagaattgacaatattgtgtcctggaacccaagtgacaaatatgttttaaggagaagtcaatgattacctatgtcaaattctgtgaaaaggactaaaagttgaagaatatggagatcaatgttggccttggcaacaacaaattttggaaagtagaaaaggagaaggcagattggggtggaatctttaaaaaccaagatgaaagcatttgggtacaatggatg

SEQ ID NO: 343714 - DNA, 578 bp, Homo sapiens
ttatcatttattgagctggccaacttgcaggagaaccaggtttagggagaaaatcagaaagtcaattttgcaaataataaccttgagttacttattagatttcaagaagtaatatcaactaggtggctcaatgtacaattccagagttctacagcacaatraaggctggggattaaaaacttgaaaattggcagtataggcataggagttaaagcatgacaccatctgagataaaaagaaaatgcatttaaatagaggaaataaatgccagaatcatcccttctgtgctgtaattgagaaatcaggaagatggtggtcaacgaagcaacctaggaagcagcagctaataaggtaaacagaattgacaatattgtgtcctggaacccaagtgacaaatatgttttaaggagaagtcaatgattacctatgtcaaattctgtgaaaaggactaaaagttgaagaatatggagatcaatgttggccttggcaacaacaaattttggaaagtagaaaaggagaaggcagattggggtggaatctttaaaaaccaagatgaaagcatttgggtacaatggatg

SEQ ID NO: 343715 - DNA, 578 bp, Homo sapiens
ttatcatttattgagctggccaacttgcaggagaaccaggtttagggagaaaatcagaaagtcaattttgcaaataataaccttgagttacttattagatttcaagaagtaatatcaactaggtggctcaatgtacaattccagagttctacagcacaatgaaggctggggattaaaaacttgaaaattggcagtataggcataggagttaaagcatgacaccatctgagataaaaagaaaatgcatttaaatagaggaaataaatgccagaatcatcccttctgtgctgtaattgagaaatcaggaagatggtggtcaacgaagcaacctaggaagcagcagctaataaggtaaacagaattgacaatattgtgtcctggaacccaagtgacaaataygttttaaggagaagtcaatgattacctatgtcaaattctgtgaaaaggactaaaagttgaagaatatggagatcaatgttggccttggcaacaacaaattttggaaagtagaaaaggagaaggcagattggggtggaatctttaaaaaccaagatgaaagcatttgggtacaatggatg

SEQ ID NO: 343716 - DNA, 579 bp, Homo sapiens
tctgttcctttgcgtctttgctcacatttcacctgcttaatgaagtctttcctgaccttgtaaccgtccaccctccatgtgtatttcttcyccttagcacttaccaatacatgacatattaagagttttaaatattttctttgataattgtcttacccctctaaataatagattttaagagaacacaaattttcgcccgttgttcactgctatatatccagcagctaaattactatctatcacatattacatgctcagtaagtttgccagataaatgaagaaatgatattttagggcttaacctcaaatttttactgctttgcataaaaatcctaaagcaacattaatgtttaaacaatatgcaatcacatacactagagggtattgtagttttcaatgagatttctcatattggtaactagagcattggtgaaagtttacaaaaaaaatacatttcctacttcgtaattggaagaaaccaggccctctcggaaatgtttctgatatgacaccaagtacagataaatgctacaggataagaataatataaaaaagagattccttttctacttaattgta

SEQ ID NO: 343717 - DNA, 579 bp, Homo sapiens
tctgttcctttgcgtctttgctcacatttcacctgcttaatgaagtctttcctgaccttgtaaccgtccaccctccatgtgtatttcttctccttagcacttaccaatacatgacatattaagagttttaaatattttctttgataattgtcttacccctctaaataatagattttaagagaacacaaattttcgcccgttgttcactgctatatatccagcagctaaattactatctatcacatattacatgctcagtaagtttgccagataaatgaagaaatgatattttagggcttaacctcaaatttttactgctttgcataaaaatcctaaarcaacattaatgtttaaacaatatgcaatcacatacactagagggtattgtagttttcaatgagatttctcatattggtaactagagcattggtgaaagtttacaaaaaaaatacatttcctacttcgtaattggaagaaaccaggccctctcggaaatgtttctgatatgacaccaagtacagataaatgctacaggataagaataatataaaaaagagattccttttctacttaattgta

SEQ ID NO: 343718 - DNA, 597 bp, Homo sapiens
caagtataaaagtcatatgaatagtgggcataaggatataaatactgcaaagtttagagcatttggaaaagtattaagatcaggaaataaaatgataatatttttaaaatgagagttaaggttgacaaaaattctgttattccaaagttgcaytgggagtctttgagattgaccactgttcatcatgagaactagataagtttttgtttttgttttgttttttagcaacagcatgggaaggaaaaaaaatacactttttgctagactagtttgtgatttttgcattttaaatttaagtgtagaaacttactaagcttttagatttcaaaaatatgtaggtcaacatctgagtttagattcatagagcactttttgtctttcaccaattccctgatagaaccagcatctgaaatgttccctcctgtcccaaaattctacacctcctatggcttgttctatgtacttatttcccgtttgaatgtctttccttttattctgtatgttacaaagcagaaataattgaatagcgtgtagactttctcaggtgcacacccttttctctctcctctaaattggtcaccaaaattccattatggc

SEQ ID NO: 343719 - DNA, 519 bp, Homo sapiens
aaataaaaaactcaccaagctagaattctgtaccctgcaaaattatcctccaaaagtgaaagagaaagaaagacattctcaaacataaattgagagaatgttttgtcagtagacctgccttgcaagaaatgttaaaaaaaaaagttatgtagaaagaaggaaaatgatacaggtyacaaagtcatatctacataaataagtgaatagaatcagaaaaggaataagtgaagataaatcttttatttttgttattttaatttatctaataacagtttattcaaaataatagcaataatgaattagattgtttatacttctgttcatatatatggctaagtgtaaataaaatgagtgacactaatgatacaagagacaggagtgagtaattagagttattgtgttataaagttcacacactacccatgaggcagtaaagcattgttttaaagtgcatttggattacatgtaaaggtatattgcaacctgtagggcaatcaattttaattctaattaatatgg

SEQ ID NO: 343720 - DNA, 519 bp, Homo sapiens
aaataaaaaactcaccaagctagaattctgtaccctgcaaaattatcctccaaaagtgaaagagaaagaaagacattctcaaacataaattgagagaatgttttgtcagtagacctgccttgcaagaaatgttaaaaaaaaaagttatgtagaaagaaggaaaatgatacaggttacaaagtcatatctacataaataagtgaatagaatcagaaaaggaataagtgaagataaatcttttatttttgttattttaatttatctaataacagtttattcaaaataatagcaataatgaattagattgtttatacttctgttcatatatatggctaagtgtaaataaaatgagtgacactaatgatacaagagacaggagtgagtaattagagttattgtgttataaagttcacacactacccatgaggcagtaaagcattgttttaaagtgcatttggattacatgtaaaggtatattgcaacctgtagggcaakcaattttaattctaattaatatgg

SEQ ID NO: 343721 - DNA, 622 bp, Homo sapiens
cctgtaattttctcagattacagtctgggtgaggcctgcaaggctgctagttcagcgctctctgttgtatcttcctttggtctctgatttcttttactctcccacctcccagaaaacttggtccaagaacagtgcttctctctttaaccttcgctcaatactgtatctgatgtgaatcttctttataatcgcctcctcttacatagaagtgactgttttatcccatgtgtgctaatttctagaccttcatatgttttatctttgaagctatagtatactcctgcatttaattacttacctatctttttctatggctggactacatgtaaatatatctttttttttttttttctaaatcctctcttcctaggacaatgtctggcacatatttggtatttaagaaataaggcttgctgaattaatgcgcatatgccaaaatcccttttgatactgagtcttcctagtaacaaatattctagacatgttctaagacagatgcataagtattatctcagcatggrttatcccagtatgattcagaacagaactcatgtatgattctctgtttgtttgtttgtttttttaattaagactggaagcatgattagaaggtgactgtgat

SEQ ID NO: 343722 - DNA, 554 bp, Homo sapiens
tctgagtatgaagaagtcatgcaaaatatttaacaattttacaaatgaagaagatgaggctaagagagaattcattgcttgccttattggacatcacagtccttactaattattttagtttgtgttttctttcacacatcttgaaacttgcatcatcctataatagccactagaatttagtacttaatttttctcttgtttctgtgcatctgtgcatggagagggatacgcctgctgcatgctgatagaaactgacattgtttgaaaacaccttttattttctaaatatgtgacttcaaatataacaaaattaaacatataaatacttaggatatatttctctctcttaaaatttatcttagctttgcaggccatatgctcagaaatatgtgttccytgtaaaagccaccatcttgacctcttattctccaaccattagcacagtaagtgtgcatttaaacagtaactagctatgaaagtgttggtagaggagttctacaaaaactgcagtctattaaaaccctgattggtcacaactttctgagggagggaag

SEQ ID NO: 343723 - DNA, 596 bp, Homo sapiens
ctgtactaacttctgcctattactcagttccaaagctgcttccacattttcaggtatccttatagcagtacgtgactcctggtgccaatttactgtattagtccatttttacattgctataaggaaatacctgacactggataatttgtaaagaaaagatatttcattaactatacatggctgaggaagcctcaggaaacttacaatcatggtggaagccacttcttcaaagggtgaagagagaaaatgagtgccagcaggggaaatgccaaatgcttataaaaccgtcagaacttgtgagaactcactcattatcatgagaacagcatggtggaaaaccaccctcctgattcagttacctcccactgggtccctcccatgacatgggattctgggaattaaaatacaagttgacatttggatggcgccacagccaaaccrtatcaatttttttgtttaagtgttgaaaaagtctgcagggtgatgacaattttgaaattacaagaatgaaataaggcaccttcaaaggtggagtctgaataaatgaagcaaaaagcccatctcaggaaaaagctgctctgatgaaactccagatt

SEQ ID NO: 343724 - DNA, 362 bp, Homo sapiens
accaaaatcacaaatgaaagtgagaacattattacttactctgcataaataaaaagtattataagagtactatgaacaattatatgtcaaaagttgaatgaaccagatgaaatcgacaaattcctagaaatatgcaacatacgaagactaaatcatgaaaaaatagaaaatctgaatagatctataattagttaggattatrgatctgtaataaaaaatctagcaacaaagaaaatccctggacctgacagcttcactgctgaattatactaaacatttaaagaagaactataataacgccagtccttcataaacatttccaaaaagttaaagaggaggaatacttcatatgaggccagcat

SEQ ID NO: 343725 - DNA, 546 bp, Homo sapiens
aagtatctctcccaattatagccagatgggattttgttgtttagttattttatgctaataaattatagatcacagatacacacataatcttggatttaattgtcacacactatttctatatggttatgttagcatctcctgtttactgagaagtaatcagagcaggtaattttcttaaggcttccatcaaccacattgttgattaaatgtcataattgttgatatcaaggatcatattacttgaaaaaataaacattggtaactagtgatagccaaataatgggaaaaaaagagttgtctgaaaacttgagaaatgctaataaaaatcatttcaaaatgatctaaacagagacyaactgaaatatattaatatatataaataaagagtagatgaaattgatctaaacagaggctaccgaaatatattagtacatataaataaagcgtagacaaaattgctcttcaaatattcaaatatcttagtcatttataaaaattattcatttttatataaataatttgacaaagaatttggccttgcaaaag

SEQ ID NO: 343726 - DNA, 546 bp, Homo sapiens
aagtatctctcccaattatagccagatgggattttgttgtttagttattttatgctaataaattatagatcacagatacacacataatcttggatttaattgtcacacactatttctatatggttatgttagcatctcctgtttactgagaagtaatcagagcaggtaattttcttaaggcttccatcaaccacattgttgattaaatgtcataattgttgatatcaaggatcatattacttgaaaaaataaacattggtaactagtgatagccaaataatgggaaaaaaagagttgtctgaaaacttgagaaatgctaataaaaatcatttcaaaatgatctaaacagagactaamtgaaatatattaatatatataaataaagagtagatgaaattgatctaaacagaggctaccgaaatatattagtacatataaataaagcgtagacaaaattgctcttcaaatattcaaatatcttagtcatttataaaaattattcatttttatataaataatttgacaaagaatttggccttgcaaaag

SEQ ID NO: 343727 - DNA, 590 bp, Homo sapiens
tttcaaaacttaagactaaaagaaactcagaaaactgtcaattacattttgctctgatttttctcttttatatagtatgatgaaatgttacatcaacctgccatttttaaaagtaaaaatcagatggatttagctgggcacaataccaactgtattgagaatttctaatgtcactcaggtgaaagacctgaaggaaaggagacagatttagaaggaatgatcgttaatgagatcagtcattcaaataatctacctactggtaaagttagacaaacaaacggcaacaacaacaacaaaaccctacccatcatctgtagagaaaaatcatagtctcccacttgaaataacacatctgtctggcagcttaaataaaagcacacgtattttcacacagcacraaagaattatttttatatttggaaaacaattgctacagaattatgaaaagaaaaaaatacagactgtagagaacaaaataagacaagcttccatcaagaaggaaacataaaatatactaacttgaaataacagatatacacaatatttggagtccaagcttttagtgttgacgccagcccagttatatcgga

SEQ ID NO: 343728 - DNA, 503 bp, Homo sapiens
tggggagttgtgtgtagagaggaggacaaagacaaaagacaaccatttatcccaagttactttccaaagatgaaaaaaaaaaaccctsttagtaatgtttttcaaaatctaactactttcaagaacgcatcaataacatgtagagagataacaatcaagttggacattaacttaaaagtcagatgactttttaagcataagtaacttagaactgtaaagtaaaaaacactaaatgtcattgactttaaagtggatactgaagtaaaaaaaaaaaaccttctattaaaaactaaactatatgcgggaacttatgtagaaagcttagcataaatatttatacaaaattgccctaccatattttattaaaatattacattaaaaattaagagaaaatcattttaaaaatgagttatattttaggcctttttttctcaaaatgagtttcataaattgatatggttattagcataggaatttcaataataggaacaaagaaaccaaat

SEQ ID NO: 343729 - DNA, 417 bp, Homo sapiens
tgtttgttttgtggctattgtaaaaggggttgagttcttaatttgattctcagtttggttgctgctggtgtatagcagagctactgatttgtatacattaattttgtatcttaaaactttgctgaatttatttataagttctaggagctttctggatgagtttttagggttttctaggcatatgatcatatcatcagcaaacagcgacagtttsactctttaccaatttggatgccctttatttccttctcttgtctgattgctctggctaggacttccagtactatgttgaatagaagtggtgagagtgggcatccttgtcttgttccagttctcagagggaatgctttccacttttccccattcagtattatgttggctgtgagtttgtcatagatggcttttattacattgagg

SEQ ID NO: 343730 - DNA, 472 bp, Homo sapiens
tttagagccaagatccaggagcattcactatgtatttagccacattagaaatagctgatgtcgccaggcgtggtggttcacgcctgtaatcccagcactttgggtggccgaggctggtggatcacctcaggtcaggagtttgagaccagactggccaacatggtgaaacctgcctctactaaaaatacaaaaattagctaggagtggtggcggacccagctactcgggaggctgaggcaggagaatcgcttgaacccgggaggcagaggttgcaatgagccaagatcatgccattgcactcctgcctgggtgacagagcgagactctgtctcaaaaaaaaaaaagaaagaaagaaagaaagagggaggaagggagggagggagagagagacagaaaaagaaagaaagaaaaagaaagaaagaarcaaagcaaagcaatagctgatgtagctgaggaaagaactggtaaagtg

SEQ ID NO: 343731 - DNA, 500 bp, Homo sapiens
attacaaataaactatgtgaactaatgaatttagcactgtctaatgataaagatcaacatataaaatcaactgcaattgcatatactagcaacaaagaattagaaaatgatattttaaaaatataatttccagtggcatgaggaatcataagatacttagaataaacttaacaaaatataaaagccctctacactaaaaattrcaaattggtaagagaattaagactacctaaataaatggagagatatatcatgtttatagtttggagagttcaatattgttaacatgtcaaatcttttcaacttgatctataaattcaaatgcaatactaatcaaaattctaacaggtatttttttttcgggggggaagcagatagaaattcacaagcttactataaaacttatctgcaaagacctagaatagccaaaatagttttggaaaagaataatagcagggggcctgacatcataaaaatggcagaataggactttccagtgt

SEQ ID NO: 343732 - DNA, 620 bp, Homo sapiens
tgggactgtaatgagtgaagctactatggaaaacaatatgaggattcctcccaaaattaaaaatagaactaccatatgatctgggaatttcacttctgtatatatatacaaaggaattgaaatcaggatcttaaagagatatctgcactcccatgtccattgcagcattattcacaatagccaagacatggaagtaacttaaatgtctattaactaacaaatgaccaaagagaatactatgtgtgtgtgtgcgtgtgtgtgtgtgcacaatagaatattcagcctgtgaaaagaaggaaatcctgacattttcaataacatacatgaacctgggggacattatgctaagtgaaataagacagacacagarcgacaaataccacatacactcactacacaaggaatctaaaatagtgaaactcatagaagcagagattggaaagatggttgtaatggtctaggtgatgggggaaacggacctattagccaaagggtagaaagttttagttatacaggatgaataagtcctagagatctactgtacagcattatgactataaataatattatattgcataccttaaaatttactaagaggatagatcttaagtgtccttata

SEQ ID NO: 343733 - DNA, 467 bp, Homo sapiens
gatattaacccttgacagtagagggcaatggagggatagtggtgaatgatagggttttcttcctggttcaggtgtgctcctctaggcaggctcctgcagtgtgtgtggcttttgtagcttcaggctcttgcagccttcatggctttttaagtgccaggctcattcagygcacatggctatacattgcctgacactattaactccatgacttttgcagtgcctggttatagcaatgctcagctgagcaactcctactcctatgaatggcttctcttggcactcacttgtgtgtctttgcagtggagtgatgccaagttgccacttccctgttaatggcctcccctggcacccactcagatgcctttgcagccttggtgtacttctctaccattctgtgaaccacgggtattccctttctaattaagtgtagatatttgccctggttggttgtgaaggtggggaaggag

SEQ ID NO: 343734 - DNA, 467 bp, Homo sapiens
gatattaacccttgacagtagagggcaatggagggatagtggtgaatgatagggttttcttcctggttcaggtgtgctcctctaggcaggctcctgcagtgtgtgtggcttttgtagcttcaggctcttgcagccttcatggctttttaagtgccaggctcattcagtgcacatggctatacattgcctgacactattaactccatgacttttgcagtgcctggttatagcaatgctcagctgagcaactcctactcctatgaatggcttctcttggcactcacttgtgtgtctttgcagtggagtgatgccaagttgccacttccctgttaatggcctcccctggcacccactcagatgcctttgcagccttggtgtacttctctaccattctgtgaaccmcgggtattccctttctaattaagtgtagatatttgccctggttggttgtgaaggtggggaaggag

SEQ ID NO: 343735 - DNA, 565 bp, Homo sapiens
cattttccttaaaaaacagctgctgacagaagatgctacattttgtttcagggcctggtaaccatcaaggatgtgtcactgtgcttctctcaggaggagtggcggagcctggacccctctcagacagacttttatggagaatatgtcatgcaggaaaactgtgggatagtagtctctctgagtaagcatgaccttctccagccactagaagattggactctgggaggacggagccatctgcttcagggctattggatagtgtctgtctaggactctttatgtggcagggaatctgtytatgcttccgctggagaaagaacactagggccaatcccaagagaatgagagtaaatatcattaaaaaaaaaaaagtaaaaaagcaaatgatgcttaattgtggagtagaacttgaggttcttcttggttgggaattaggaggttctcataaagcagagagaactggaactgggtccttgtaaacttgggaaccatgtagaggaagatagggatgcagggagtaggactgtcgtagtaggactaaagtgaagttacgcccagaaaggcc

SEQ ID NO: 343736 - DNA, 565 bp, Homo sapiens
cattttccttaaaaaacagctgctgacagaagatgctacattttgtttcagggcctggtaaccatcaaggatgtgtcactgtgcttctctcaggaggagtggcggagcctggacccctctcagacagacttttatggagaatatgtcatgcaggaaaactgtgggatagtagtctctctgagtaagcatgaccttctccagccactagaagattggactctgggaggacggagccatctgcttcagggctattggatagtgtctgtctaggactctttatgtggcagggaatctgtctatgcttccgctggagaaagaacactagggccaatcccaagagaatgagagtaaatatcattaaaaaaaaaaaagtaaaaaagcaaatgatgcttaattgtggagtagaacttgaggttcttcttggttgggaattaggaggttctcataaagcagagagaactggaactgggtccttgtaaacttgggaaccatgtagaggaagatagggatgcagggagtaggactgtygtagtaggactaaagtgaagttacgcccagaaaggcc

SEQ ID NO: 343737 - DNA, 565 bp, Homo sapiens
cattttccttaaaaaacagctgctgacagaagatgctacattttgtttcagggcctggtaaccatcaaggatgtgtcactgtgcttctctcaggaggagtggcggagcctggacccctctcagacagacttttatggagaatatgtcatgcaggaaaactgtgggatagtagtctctctgagtaagcatgaccttctccagccactagaagattggactctgggaggacggagccatctgcttcagggctattggatagtgtctgtctaggactctttatgtggcagggaatctgtctatgcttccgctggagaaagaacactagggccaatcccaagagaatgagagtaaatatcattaaaaaaaaaaaagtaaaaaagcaaatgatgcttaattgtggagtagaacttgaggttcttcttggttgggaattaggaggttctcataaagcagagagaactggaactgggtccttgtaaacttgggaaccatgtagaggaagatagggatgcagggagtaggactgtcktagtaggactaaagtgaagttacgcccagaaaggcc

SEQ ID NO: 343738 - DNA, 506 bp, Homo sapiens
agaagactaacgtggcttataaaaaggaatgcaaaaataaaataacaatgtttcttaaaagcatggggatagtttggcaattgtgcattcatccttttaatcctcagcacaattgtttggaagtgagtctggggagcctagacccaagggatctcactagaggagcaggaaaatctctcagcaagtagcctgaaaatatgaagatctggtctccctggccctttccattgaagaatactaaggatctctaaataccccacataacataaacatacataaaatctatacctgtaccccmacccccaaatgacagcaagggagaagtgttggcttttagtgttatcaaattcctacccaagttctttttcttacccaaacacaagtgtgctacataaattaagcccctcatccaagcattactaatagttaggtctttgcacgagcccacaatatgaggtctctaagaaccattctactatgatcagttaatctcaaactgaaaaccc

SEQ ID NO: 343739 - DNA, 622 bp, Homo sapiens
acagtttacaaatgccatggcagtgacaggaagttaccacccctttccatggcaatgacctggaagttaccacccctttggtagagagttctaaataatctactcctcaatttgcattaaaccaccccttaatttgcatgtaattgaaagtgagtataagtgagtaaaagtatagttgccaagagcccatgcattgctgattctgggcacatggcctgtgagttagccctgctttgctagaagtagtaccatttaataaaatattgttgtctaacaccaccagctcatccttgaattcttccctgggtgaagccaagaaccctcctgggctaaactgcaattttagagctcccctgtcctgcctcaaagccactggcaccactgaattcctctttctcgatctactaggaccttggggatttggtggrgtgctcccataatttcatccaaagctcattacctcattgcccctattttcccatggggtcaggtaactccagcaagcctctcacattcagacatttcaagacaaaagcaagcacacatttttaggttcagttttggggtgactctagtcacctcagtaaaataaaagtagtgatgtctacctgcagaaaaaaat

SEQ ID NO: 343740 - DNA, 494 bp, Homo sapiens
tgcttgggcagcgggatttctgatttccttgatggacagtcttttcacccacaagttacatttctgtgggcctgacatcatccttatttcaggtgtaagctgcctccattcttccctctgtcctacattgatcccactgtcaatgagattcttctagctgtgtcacaggcattctgggggctactgacactttccctaatcttcttctcttactctagaatcacatctgtcatactgagcatctgctcctctgagggccaaggcaaagccttctccgcatgcccttctcatctcgctgtggttctctcattctatgggacagcttttttcagatacccaggctctacttcaggttcggtgttggggcaagtggtctctgttcagtayagtgaactctcttttctccttgctgcttcaagtaccattttcatccttcctctctaaataatgtccagctgcattgaagcacatgtcatcaaactattccacacaca

SEQ ID NO: 343741 - DNA, 546 bp, Homo sapiens
atggtttcaggatgattcaagcatttattgtgccctttatttctattattattctattaatatcctattagtattacactttaatatataatgaaataattatacagctcgccataatgtagaatcaatcagtggaagccctgagcttgttttyctgcaaatagatggtcccatctggggggtgatgggagatagcaacagatcatctggcattagattctcataaggagtgtgcaacctagatccctcacacgtgcagttcacaacagggttcatgctcctgtgagaatcaaatgccactgttgatctgacaggggtcacagctcaggtggtaatgtgagtaatggggagcagctgtaaatacagatgaagttttacttgcttgcccaccactcaccttctgctgtgtggcccagctcctaataggccactgaccagtaccagtctgtgacctgggggctgggaacccctatagtagctaatctgtatgttctacatcagcgagctcctttgtcctctggcttccatttgggttctaccaagggg

SEQ ID NO: 343742 - DNA, 540 bp, Homo sapiens
tattattctattaatatcctattagtattacactttaatatataatgaaataattatacagctcgccataatgtagaatcaatcagtggaagccctgagcttgttttcctgcaaatagatggtcccatctggggggtgatgggagatagcaacagatcatctggcattagattctcataaggagtgtgcaacctagatccctcacacgtgcagttcacaacagggttcatgctcctgtgagaatcaaatgccactgttgatctgacaggggtcacagctcaggtggtaatgtgagtaatggggagcagctgtaaatacagatgaagttttacttgcttgcccaccactcaccttctgctgtgtggcccagctcctaataggccactgaccagtaccagtctgtgacctgggggctgggaacccctmtagtagctaatctgtatgttctacatcagcgagctcctttgtcctctggcttccatttgggttctaccaagggggacactggagtgagatctaggaattattctgccagcaaac

SEQ ID NO: 343743 - DNA, 609 bp, Homo sapiens
attccagtggatttaattttgaatgaattttttgtcaaaattttcactttatctatcttctatcctttaaaaattgttttgttctgttaaaattgaatttacatatttattgaaaatatttacattatgtattttttactataagtactcttcaatatagttcaaaatatttatttttctgaattatttattaattttaattgacatataaaattatttatctttattgtacacaggacgatgttctgaaatatgtgtacactatgaaatggcttcatatccagtaaatggtcttgatactaaattcagaccaatacaaaaccataacaggaaactaytgaccaatatccccaatgaacataaatgctaaatttctcaacaaaatacgagcaaactgaacccaacagcacttccaaaagatgatacactatgatcaagtgggttttataccagggatgcaaggatggttcaataatgcaaatcaataaatgtgatgcaccacataaacagaattaaagacaaaaactatataatcccaatagatacataaagttgataaaattcagcacttattcatcataaaaaatccctcaacaaactggcatagaa

SEQ ID NO: 343744 - DNA, 560 bp, Homo sapiens
caaataataaagaaggaaatatttccaamcaaattctatgaggccagtattactctgataacaaaaccagacaaagacacatcaatagaaaatactacatgttaatgttcctggtgaactttgatgtacaaatcctcaacacaatgctagtagcaaagcaaattcaacaacacattaaaaagatcattcatcaacaccaagtggcattcatctcagtgatgcaaggatagttcaacataggcaaatcaatgtgatacatcatatcaacagaatgaagaagaaagtccatatgatcatttcaactgatgctgaaaattcatttgataaaatttaacatcccttcactataaaatccctcgaaattggcatagaaggaacatacctcaagataagaagtcatatattatatacccacagctagtatcatactgaatggggaaaacctgaatatttttttctaaaacctgaaaaatgacaaggatgcccacgttcaccactgttattcaaaacagtgctggaagtcctagctagagcaatcaaaaaagagaaagaaaacaagg

SEQ ID NO: 343745 - DNA, 589 bp, Homo sapiens
ctggtgttctctgcattttctgaatttgaatattgatctctgtagctaggctggggaagttctcatggatgatatccatcaatgttttccaagttggttccattctctccctctctttcaggacactaatcaaccacatattcagtctcttcacataattccatatttcgctgaggttttgctcattcctttttaatttttttctctattcttgtcttcttgtcaaatttcagaaagccagtyttctgcctctgagattgtttcctctgcttgtactctctgctattaatacttgtgattgcattataaaatttttgtagtgtgtttttcagttctattaggtcagttatgttatttttctctactggctattttgtctgtcatacctgcattgttttattatcatttttagccaccttgcattgggtttcaacagactcctgaaactcaacgatcttctttcctataactattctgatttctatttctttttcgaattagataatttcagtctttgaggttgctgacctctgggtggttttttattttcatttattctacttgatgccttcagtgttttgttgtggta

SEQ ID NO: 343746 - DNA, 608 bp, Homo sapiens
ttttgctcattcctttttaatttttttctctattcttgtcttcttgtcaaatttcagaaagccagttttctrcctctgagattgtttcctctgcttgtactctctgctattaatacttgtgattgcattataaaatttttgtagtgtgtttttcagttctattaggtcagttatgttatttttctctactggctattttgtctgtcatacctgcattgttttattatcatttttagccaccttgcattgggtttcaacagactcctgaaactcaacgatcttctttcctataactattctgatttctatttctttttcgaattagataatttcagtctttgaggttgctgacctctgggtggttttttattttcatttattctacttgatgccttcagtgttttgttgtggtataaggtggattcagccatctggctttgtttctgggagattttaggtgtccagcgcttggatcccaactcctgaactgcatgctgtaaatctgggggacttgtattgagccctaactatgttctctggctttggtaggtttggagtccactgcactgtgggggctgagatgcaatagctgcagtagagtgctagca

SEQ ID NO: 343747 - DNA, 549 bp, Homo sapiens
cctactttttaaaaagatagcaaaatataactcaaaggacagatatacaaaaggtgtaaacatgaactttatgaaagagaaaatataatgaccaataaacaaagatgctcaaaattgaaagttgtcatgagaaggcaaaaacaaggatgaacctcctggacattatgcttagtgaaataagccaggcaaagaaaaacaaatactgcatgatctcacatgtatgtgggatatattawaaaacgaattaatagaagcagagagtaaaatggtgataaccaaaggttaggtgaaggggatgggagcaaaggggagcaattggtgaaagtgcataaagtttcagttagacaggataaataacctctggatatatgctgtacagcatggttactatagttaataataatgtgtagtatacttgcaaatagctgaaagactagattttaaatgttctcagtaaaaagacaataagtatgtgaggtgatggatttgttaataagcttgatttaatcacttcaaaacgtatacatatatcaaaacatcatgttgtat

SEQ ID NO: 343748 - DNA, 592 bp, Homo sapiens
tctggttgaacctgaggattttatgggccacagaggggaggaagtgcatgccaattggtccatgggtggrcctggataagggaccacaagttcccactctggtgtacaggtcctgcagccttgccccagccttcaggccctacctggcatgaaggtggggcttcaccggggacccatccacttctgcccaggaatctatctgcctcctgctgcttttcatggcagcagggctcagccccaactttgcttcaagatcggtgtggatgcccacagtagggagaagccaggcagcaggagcagacaattctgatcctgtgagggtagcgggggcttccgataaccctaagagtgcagggatgcccgagtttgggtggctgcagctgcacccaggagagcaagactcctgcctgctcccagtaccccaagaacacagggaggttcagatctgaagccacaacttgggcagctgcagccccaccaaggagggcagagctcctccctgctcgatcgagtgagaagtccaggtccacagccatgttttgggtggcttcagtggcacctgaaagctctcacctcatcttggaaggggtgg

SEQ ID NO: 343749 - DNA, 574 bp, Homo sapiens
ttatcttctgtattatttcagtacctttctaacatgtctccacaatctcatattgttattatacactttgttctctasaaaacaaccaaaatgatgctgttaagccataatccaggtatgattcttctgtttacaaaggaatcactgttccttagctacttgaaatctaaaatgtgatctaataacattataatattttagtgtactatctaacatctcttcttccctaaaaagcaattgatgtagtggccaagattaattaaaaataatttgataaagtatatccaagccttcttgttaaattgcctggaaaggagtaactcaaaaatcctcaaatttctgatagaaaaaactaaaagttattacagatgtctgttaatcttatatgttgcctttaagacactgaacaaattagcaaaatattaaaccttaaagaatgttctaatattctgaattttgattagtttaattgctacttgaaattacatttttaaaaagaatatgatattagaatatttaatgctggagtattattgttaagtgtatcttcttttctttaaaaaaagttagtatt

SEQ ID NO: 343750 - DNA, 590 bp, Homo sapiens
catgtgggcttacctgaaggggaggggaaatttgttttctttatgaatgttacctagttagcttttccaaactagaactttccaagttaatgcctgccaacacaataattgtataaactttggggtgtgggcaatgacagacttgtcagtttgggtctgaggtgtttagagatgcaatgccaggaggaattaagttgactgaaatcatgtagctaatatcataaattttttatctgagaataaaggttgaatattacatttaagttaagcatcaggcaggagtaaaaccagatgatagaatcagttggaaatyagatgaccagcaacaaaatcacttgctacttaaggtgcaagcaggaactaattctgacatcgcagcccatgtgtcctctctgccatctctctttgatattaataattgtcagccaaagaacaagggggacatatttttgaggaccaaaatatctatacacaaaatgactctatgaattgaggtaaattgagaattcatctcaaagttttaacataaagccaaattaagttccacattttaaatcacttagactatttttaagcatttacatatttgt

SEQ ID NO: 343751 - DNA, 596 bp, Homo sapiens
aaggaatgttttaaattgatttatttgttctttttcattccttctatttttccttcaacccatgtcttgtatccctccactccataggtaccaattttaatgcatgtgtttgtttatttttgtttatatgtsttcttagaatgtatgttctctcagtctgtgtacaccatatattaattttcataattttatgctataattatgactatatttcttattctttgtttttgtttgtactcagcactgtattttcaagtgacatccatgttcctatgtctattgcttatcctttcctttatctgctgttagcactccatggtaatttgcatcaatgacgtttaatatctagtagaaactaaaatcccaggttgtctccaaacctcctcttccccagtatttcacttggtttctttgaaatatacctttgagcagaatttctgatacttcaggactaagtttatgagttttgactctgtaaatccagattgctctccaaaatgtttgcacacatagaaatttctatcagcagtgcacaaagatttccaaatcctcatacctggacaacagttcatagcataccgctacctaataattca

SEQ ID NO: 343752 - DNA, 609 bp, Homo sapiens
gtaaatgtctgtatatgtctgtacatatatacatatatattgaaaccatatatgcacatggataagaaaagaatagcatctttggaataaaaaagatccatagctataaacatttatgaaatgggctgcacattagacactcaaagggaaactcatgaaccattatctttgagattctagtacatagtcagtttcatgaaactttgtagccagttactgaaatacttttgttataatttaatcatattcactttataaaaatgcaaagggagttkgtgggactctactgaataatagtttgtttcaattgaaatctaaacttatttatgtgcaaaataacaaatagttcctccctaaaaatacacagtgtatatagcctccatagcacagcatgagccaaatagatttatatttacaggtttatcccagaatatttcaaatgaaggggaaacttcagggcagcatgaacactatgtgaatcaggtatacatggtactccatgtagtaaaaattaaaaaaagctagtgaacaataatattaataagatttatcaaattattcatttttaacacagagcagctaaatgtcattgttttgggaatacatttt

SEQ ID NO: 343753 - DNA, 609 bp, Homo sapiens
gtaaatgtctgtatatgtctgtacatatatacatatatattgaaaccatatatgcacatggataagaaaagaatagcatctttggaataaaaaagatccatagctataaacatttatgaaatgggctgcacattagacactcaaagggaaactcatgaaccattatctttgagattctagtacatagtcagtttcatgaaactttgtagccagttactgaaatacttttgttataatttaatcatattcactttataaaaatgcaaagggagtttgtgggactctactgaataatagtttgtttcaattgaaatctaaacttatttatgtgcaaaataacaaatagttcctccctaaaaatacacagtgtatatagcctccatagcacagcatgagccaaatagatttatatttacaggtttatcccagaatatttcaaatgaaggggaaacttcagggcagcatgaacactatgtgaatcaggtatacatggtactccatgtagtaaaaattaaaaaaarctagtgaacaataatattaataagatttatcaaattattcatttttaacacagagcagctaaatgtcattgttttgggaatacatttt

SEQ ID NO: 343754 - DNA, 542 bp, Homo sapiens
gcatgtgggtgtttcctgacatgcaattactggtcaaattgtttatgttgataagagaaaccacattcagaactactgcatgttgtggtgagaggagaaagctaactacgaatcctgggtgctgactctgctgtcttaccttggtaaacacrtggcctcagacagtgagctagatttctccaggaatcaggaggttactatgtctaaaaacatttttttaatgaagaattaggcttatagattgtttgactgtatcttttatgaataattatttaggccctaaaaatcaaagaatgtaatgaaccataaaatgatgcttctcagaactctctaggccccatcttgcaaggaaagtgtcagtggtagctgtgagctcctgttctggacttggtggcttctaaggagagtgtggtgtaattggcttcacctatttctgcacagtgtggccactcgctccagccagatttatgtacactttgttaaatgaatgcagaacattacctaactttacagtgtggcacatacaagtgtatgtgtggaag

SEQ ID NO: 343755 - DNA, 619 bp, Homo sapiens
aacatttttttaatgaagaattaggcttatagattgtttgactgtatcttttatgaataattatttaggccctaaaaatcaaagaatgtaatgaaccataaaatgatgcttctyagaactctctaggccccatcttgcaaggaaagtgtcagtggtagctgtgagctcctgttctggacttggtggcttctaaggagagtgtggtgtaattggcttcacctatttctgcacagtgtggccactcgctccagccagatttatgtacactttgttaaatgaatgcagaacattacctaactttacagtgtggcacatacaagtgtatgtgtggaagggatctcttcccaacaagccatagtccttcccccaagtcactgcagtgaaatagaggtactcttcgttctattacaggatagggtttagggagaacttggagtaaatcagtgagcaagtgagcatcataattagttatcatagtttcaggcctattacatttatgcatatggatgttacatagcatctgtaatgattctgctggccctttgaactttgtttacttggggatgcacacatctgagggaacaacaacaaaaactaatgaggaaaattacaaccaaca

SEQ ID NO: 343756 - DNA, 536 bp, Homo sapiens
atgaaatgatgtagtcaacgtgttgagggaaatagaactgcaaagtaagcatactataaataaaaatgttatttagaaatggaaaataaaggctttttcagacaaataaaagctgagggggtccattaccatcagaccttctttacgagaaatgctacagagagttgttcaagctgaaataaacaagaaaatagtaattccttatcaattaataattaccatgaatgtaaatggattaaattatgcaatcaaaaggtaaggaataacttaatcaattaaaaaataataataatgcagccaagacccaactatatgccaccgttaagggaagcacatagactgaaagtgaaggaatggaaaaaataatctgtacaaatgaagacaaaaagagagcaggaakagctatatttatatcagataaaacagatttgaagtccaaaactataagaaaggaggagaaggtcattcattatattatgttaatggggttaatcaagggaatatatcatttataaatatatatatatataatccaa

SEQ ID NO: 343757 - DNA, 497 bp, Homo sapiens
caggcaaaataaaagcagagatcagagtgttaaattacaagtcaaagaacaccacagattgctggaaaagcaccagcagttagaagagaggcatgaaacagactctccatcacaacctgatttggtttggatgtgcgtcccctccaaatcaaatgttgatgtgtgatccctactgttaaaggtggcacctgggggaaagtgtttaggtcatgggggaagagccctcatgaatgtcttggtgccttccccatggtctgagtgaatttttgctcagttcacatgmaatctgatcgtttaaaagaatcaaatttaaacaattgggatctctctttctccctctctcaccatgtgacacacctgctgctccttcaacttccaccatgagtaaaacgtttttgaggcctcagtcgaagcctagcaaatgctggtagcatgcttatacgccctgcagaagcctgaaccaaataaacttattttctttctaaatcacctagcct

SEQ ID NO: 343758 - DNA, 497 bp, Homo sapiens
caggcaaaataaaagcagagatcagagtgttaaattacaagtcaaagaacaccacagattgctggaaaagcaccagcagttagaagagaggcatgaaacagactctccatcacaacctgatttggtttggatgtgcgtcccctccaaatcaaatgttgatgtgtgatccctactgttaaaggtggcacctgggggaaagtgtttaggtcatgggggaagagccctcatgaatgtcttggtgccttccccatggtctgagtgaatttttgctcagttcacatgcaatctgatcgtttaaaagaatcaaatttaaacaattgggatctctctttctccctctctcaccatgtgacacacctgctgctccttcaacttccaccatgagtaaaacrtttttgaggcctcagtcgaagcctagcaaatgctggtagcatgcttatacgccctgcagaagcctgaaccaaataaacttattttctttctaaatcacctagcct

SEQ ID NO: 343759 - DNA, 497 bp, Homo sapiens
caggcaaaataaaagcagagatcagagtgttaaattacaagtcaaagaacaccacagattgctggaaaagcaccagcagttagaagagaggcatgaaacagactctccatcacaacctgatttggtttggatgtgcgtcccctccaaatcaaatgttgatgtgtgatccctactgttaaaggtggcacctgggggaaagtgtttaggtcatgggggaagagccctcatgaatgtcttggtgccttccccatggtctgagtgaatttttgctcagttcacatgcaatctgatcgtttaaaagaatcaaatttaaacaattgggatctctctttctccctctctcaccatgtgacacacctgctgctccttcaacttccaccatgagtaaaacgtttytgaggcctcagtcgaagcctagcaaatgctggtagcatgcttatacgccctgcagaagcctgaaccaaataaacttattttctttctaaatcacctagcct

SEQ ID NO: 343760 - DNA, 538 bp, Homo sapiens
gttccatggattagaatatggaaataatttttatggcaccaccaatttacaccactacataatgttactaaatatatttggattaatagatactggaaaattagcaattaggctgacatactcatatctgatactgcagggtgtacagattaaggattgaatgtattcccttgatcttagttgtttatctttggccactggcttataaatgcattataagttctaaatattataagtgttttttgcaatgcatcattcaaatgtgagttcttcaaagtctttaattatgctattttagctttggacctccaagctaatccagtaaaagatgattgaacacaacgactatctaaagctggttgaaacatatggccatagataattttaccagtagtgcttatctgaactaaacattgccaataaaatgcagtgtattttccagccatggcttaccaatgatcaatggggacaacaagaaagctaaaraaatgcaatgaggaaaggatctcctattcagtaaatggtgctgggaaaacta

SEQ ID NO: 343761 - DNA, 538 bp, Homo sapiens
gttccatggattagaatatggaaataatttttatggcaccaccaatttacaccactacataatgttactaaatatatttggattaatagatactggaaaattagcaattaggctgacatactcatatctgatactgcagggtgtacagattaaggattgaatgtattcccttgatcttagttgtttatctttggccactggcttataaatgcattataagttctaaatattataagtgttttttgcaatgcatcattcaaatgtgagttcttcaaagtctttaattatgctattttagctttggacctccaagctaatccagtaaaagatgattgaacacaacgactatctaaagctggttgaaacatatggccatagataattttaccagtagtgcttatctgaactaaacattgccaataaaatgcagtgtattttccagccatggcttaccaatgatcaatggggacaacaagaaagctaaagaaatgcaatgrggaaaggatctcctattcagtaaatggtgctgggaaaacta

SEQ ID NO: 343762 - DNA, 582 bp, Homo sapiens
gatataattgataaatgaataaaatttttacatcaaaacaaaatttttgtcacttttctaattaccatgtcaaatgaaaactgctgtacatattcttaaaatatgcaaaggatgagtttgagattcaatgtattcaaattaagactctagtatatacatgaaaawttgcattaaaggatcttgagaagggatgcagttctaagacacaccccaggccagctgaaactcagttgcaatgacagatttcacatctatagagacttgccatgtgtactaacaaactatggggacaacaaaaataaaacagagcaaaaatcaaaccaaaaaaaccctacagttaaaacatgagcttacaaacaacagttacaagaacatacaaaattgcaggcatgacgtgtgatggtgcttacttgtcagatgggcaactttaagaagtaggttgcaggatgagttacgatttatgtatcaaacaaaagctaacatttctccagggcaaagtttcaaatgccatgggataggtaaattaattagtaagcaaacaaatgtgctatatatgaaatcagtgtatattggcctggctcc

SEQ ID NO: 343763 - DNA, 582 bp, Homo sapiens
gatataattgataaatgaataaaatttttacatcaaaacaaaatttttgtcacttttctaattaccatgtcaaatgaaaactgctgtacatattcttaaaatatgcaaaggatgagtttgagattcaatgtattcaaattaagactctagtatatacatgaaaaattgcattaaaggatcttgagaagggatgcagttctaagacacaccccaggccagctgaaactcagttgcaatgacagatttcacatctatagagacttgccatgtgtactaacaaactatggggacaacaaaaataaaacagagcaaaaatcaaaccaaaaaaaccctacagttaaaacatgagcttacaaacaacagttacaagarcatacaaaattgcaggcatgacgtgtgatggtgcttacttgtcagatgggcaactttaagaagtaggttgcaggatgagttacgatttatgtatcaaacaaaagctaacatttctccagggcaaagtttcaaatgccatgggataggtaaattaattagtaagcaaacaaatgtgctatatatgaaatcagtgtatattggcctggctcc

SEQ ID NO: 343764 - DNA, 492 bp, Homo sapiens
ttttctctttaaaggcaggctttggccagaaaaaaaggaaaaaaaaaaaaaagaaaaagccccaaacttctctctttttctcttttggctttccccaatctcccaccctactttcagcagctttgtttttgtttgtttttgctgtgaaaaataagccctgcttggggagtgaagagtgggtctccagtgaagaacttcaacaggacttctaaagtattaccttaaaggccattgtacatgagaagtaaatatgttttattaagcagaaattttgcaacatgcatatacttgactctttgtgaaaagctggaaaarctgaaaagaaaaggaaaaatcctaataagtaaaacttcaaatggctccagagagtcattccacagacatttctctatggcatttctgatacatgtaaggaaaagataaatagtaattacttgggcttgaaagcttggctttttctttttttgagatggagtctcactctgtcgccca

SEQ ID NO: 343765 - DNA, 559 bp, Homo sapiens
catatgtgtaagactgcagtcagcaggggccaccagagaatcttccacttgaatggccggtgatgctttcccaaagtttgtgctgctgagcaggaggaggcctggtttgctgggcagagagggtggcaagaacaggaactaacagagagggtggcaacaacagaacagttgcagatccaggagctgggatcaagaggctcctgtgggggctgtttccaatcattggggaatgaatgtggggagggagatggcttcccaaatcagatacactacatttctcataagagcagcttgtaaggctttgtcccatgttcaggggyggctgcgaaggcctcttgggtggcagcctcattgtgactgatggctgcatgtggggagagaaggggagactggccttggcatccaggctgtggaaggggaagggaggagagagctgtttctggaattggagtgaggaggaaggtagaggaagaaagccatacggtttggagggcctagggctccttgaaaaggacttctaggccagccccagcagggacttgtggagtaggattacaga

SEQ ID NO: 343766 - DNA, 520 bp, Homo sapiens
tgaaagaagagtgggaaggaagcagaaaattaagaatagcctttaagaagacacaggtggctccrggcgggaagtgctgctgctgtgatgcccccggaaatgctgtcctgccaacactgagggtcttttgggccagtgggcctcatggggtcctctgcctggcagggggaaggtgggcaaaggctggtgcccaggtctgtgcaggctactgtgcttgttttggggagaggggccgtgccagctccacccgggagcaggatccacccttctgtttctttgccacgtgcaggcttctccctgcccattctcttctcagcagagctgccacatggatcctgggctcatcctccattagcccttcaatcttgtaaatgacaaggaaaagagaataggtgggtggaaatgagattcagagaggacagctatggagagggatgtggcctcagccctgtgcacacctagcctgtcctccctgaggctctgctgggagcaaaacctccctacacagcagagcagccag

SEQ ID NO: 343767 - DNA, 481 bp, Homo sapiens
tacagaaactagctgggcgtggtggtggttgtggtgctagtagctgtaatcccagctacttgggaggctgaggcaggagaaacacttgaacctgggaggcagaggttgcaatgagccaagattgctccattgcactccagcctgggcaacaagagtgaaactccatctcaaagaaaacaaaagaaaagaaataggttttcagcaggagacagcaggcacatcgatggcaccagaggaagatgccgtgaccttgaaggatcaktgttggagtggttatcccaaggatggggccagtgctgcacctcctgccctcaatttctccatttataaaatggagataatacagtcatccctacctcacagagttgtcatgagggttttatatattagttgatatatttaataactagagcagccagacacatcccaaatgctagtcagtattatcatgatttcatcaggcattgcccatttacatgaa

SEQ ID NO: 343768 - DNA, 601 bp, Homo sapiens
acttatatacatccatattctcttaatcaaattctatttaaactattttactcaataagcacctgggtgtcgtgggcactcagatgcagtttccactgtcctcagttaccagatgagatgtgttttggtttgaggctcatgaaaagatcatgtgagtacaagccacatcagtacatgcatgaaaagccactggcatagtttggcagggatggcggagggtaggggaatggcttggagtctcccctcagtttaaatactrttctggtatataactcttacaaaagtaagtgattggttcccattctgtagtggagctcaggtcaataaaatgaaagtgattctctggacaatcctaaaagccaagtttgtgagtgagctcagaacattcttggatcagaaatgagtacatgggaggccttgaaaacccctcatctatttcagggttgattttgccaacacctaggtgttctccagtcagggttctccagagtaacagaaccaataggatcaataagatatatttaggaattggcttgtgcaatcatgaaggctgagaagtctcaaaatctgccatccacaagcagaaaaaccaggaaggccc

SEQ ID NO: 343769 - DNA, 596 bp, Homo sapiens
agagtccttgtcttaaacacaatgtactcaatgattcaacagctgtgttgtttttaaagtttttttcatatmctaatatttcataattctctgtactttctgtctctgaaggaatttcttgccattttttggttggtttgggacctttccaggattatagaaagaatggatttcaaaaaccaagtttctgctttttctgttgcaagcaatgtccaggaagctaatgtttataatatttccctctcttgatcttttcattcctcaaacctgggttagatttgaggtcaggaccattgtcctattggggaaaaggctgtttctaagggtgtcacctctgctgccagcctcagggctttgcaaccaggtccacaggtgttcccacacccatgttacaagctgaaatgtgagtttgacaactttggttgctatgtctgtcatggtgagcacaaaatacatagtatttggtgagattacttggccaaatgaccaccaaatttcctgtacaccaaggaatacttctcctttcactttcttcattttgaacagctctggttccctagactcatccccactgatatttttgcttgtttttttaa

SEQ ID NO: 343770 - DNA, 596 bp, Homo sapiens
agagtccttgtcttaaacacaatgtactcaatgattcaacagctgtgttgtttttaaagtttttttcatatcctaatatttcataattctctgtactttctgtctctgaaggaatttcttgccattttttggttggtttgggacctttccaggattatagaaagaatggatttcaaaaaccaagtttctgctttttctsttgcaagcaatgtccaggaagctaatgtttataatatttccctctcttgatcttttcattcctcaaacctgggttagatttgaggtcaggaccattgtcctattggggaaaaggctgtttctaagggtgtcacctctgctgccagcctcagggctttgcaaccaggtccacaggtgttcccacacccatgttacaagctgaaatgtgagtttgacaactttggttgctatgtctgtcatggtgagcacaaaatacatagtatttggtgagattacttggccaaatgaccaccaaatttcctgtacaccaaggaatacttctcctttcactttcttcattttgaacagctctggttccctagactcatccccactgatatttttgcttgtttttttaa

SEQ ID NO: 343771 - DNA, 551 bp, Homo sapiens
gagattcagtatttttaatctttaaaatgggggcaaaataacacttacctgttaagagtttttgtaagaattagatggaatgcacatggagagtctagcccagtaggtggcttgtattattacttattagtgacaactaaggctcaaagcattgaaagaacttttggatgtagtcactgagccaggaagtggtggagcaatgacaggatcccatgggagctgatgccagggactagctgtactccttccctcagatcgcagctgccaagccttaggacacaaaggcaccaagcaaattggaatagtgtgatgcgaataaggactcatgtcctagaatgaggctcctgcatcccccacccattacctgtatgtaccatcattgatagcttgctttttgcagatcataagcgcctggtaaggtagcaccttatatggcggctgctgagggctggagagttgaaagttatttcttccattgaactctaagaagcatactcargttggggccgtgagtgaggggtaggagagccttagctctcctcatcaagcct

SEQ ID NO: 343772 - DNA, 588 bp, Homo sapiens
ctgacccacaatctgactttcacatgcrtttgaggatagaatttacactacccaagaattccaaaagatcccaagcaaaaactgagttaaaaggagtaatgatttggcaatgccttctgccattttgccaaagtaattacaaatcctctttgaagaaaaaataacctcttaactcaggcttcaaagaacttctacagcccaagttcctcaaaagtcaagagaggtaaaacagaacttagaacttcacacaagtagaggaagaatatggaataagacaatcaaggaaggcaaacagagaaaaagtaatataaaaaaagcaacttatagaaagcacaaagactaaaatggactcaaatatatcggcattcaaaataaatataagtgatttaaacttgccagttgagacaggttgtcagaacagatgaaaaagaaacagaacccagtaacatgctttttacttgaaacatgaggacccagaaagttttaaaacatataaatggaaaaaagtttttagcatgtagaccgtgagtgctcatttgtgaagctttattaatttcaggcaaaatatgctttagggcaaaaaagtct

SEQ ID NO: 343773 - DNA, 498 bp, Homo sapiens
catttttcctttcctcttccacttaggaacatctgtccagtccctgggatggtgaggctataaccacaaaggwataagagaagacgactagttttgtaatgggtaaatgatatttatttttattttttaaattaatttttttacttcagtacgtttttggggaacaggtggtatttggttacatgaataagttatttagcagtgatgtctgagattttgatgtacccgcccatcacccaagcagtgtacacagtacccaatgtgtagtcttttatccctcaccaccccccgacccttcctttgagtccccagagtctaatgtgtcattcttactcctttgggtcctcatagattagctctgacatataagtgagaacacacgatgtttggttttccattcctggttctatcacttagaataatggtctccaattccatccaggttgctgtgaatgccattatttgaaatttgtctggtaggctgggaggtaaagtagt

SEQ ID NO: 343774 - DNA, 498 bp, Homo sapiens
catttttcctttcctcttccacttaggaacatctgtccagtccctgggatggtgaggctataaccacaaaggaataagagaagacgactagttttgtaatgggtaaatgatatttatttttattttttaaattaatttttttacttcagtacgtttttggggaacaggtggtatttggttacatgaataagttatttagcagtgatgtctgagattttgatgtacccgcccatcacccaagcagtgtacacagtacccaatgtgtagtcttttatccctcaccaccccccgacccttcmtttgagtccccagagtctaatgtgtcattcttactcctttgggtcctcatagattagctctgacatataagtgagaacacacgatgtttggttttccattcctggttctatcacttagaataatggtctccaattccatccaggttgctgtgaatgccattatttgaaatttgtctggtaggctgggaggtaaagtagt

SEQ ID NO: 343775 - DNA, 595 bp, Homo sapiens
tctctcttaaaattataacctgtggtagaaccagaacaggaatctcagtttttcactcatgttagtatatcaccctgacttcccaagatattcgaacgggatcatcttgaaaactgttctatttttttaccttaagttgcagattaactycttcaaagcaagaaaaacgtaaggaaagatgagtgggaattcagaaaaaagaaaatgggtgaagtctttgaaattggccaagcagagaaaattggacatttgagctaaactcaccaaaatcttcaggatacagagtggctccaatagtatcagaattacatttggagcttttccagtaattctgaaccgagacatactaccaggctactacccaagagtaaatcctcagcccagaactgagccaagagtgtacccttgttacagctgcccaacagcacaggacaggctgatcatttgtggccggtgctggccctcgaaattccttttcatgcttagtggaaatcatggaaacaacactaagattagcattatggtctttagagatgcactatttgaaactggagaaatcagagggagatcaaacacgtgcatcattagtactata

SEQ ID NO: 343776 - DNA, 575 bp, Homo sapiens
gttggcaccccttgtttcttagatatacctgtgatatgatttctagtwaaaaaaaaaaaaatcccaatgactgtttttctccataggttcttaccatggaaaatcaaaatgactggctccttcaaataaatcttacctgcagccttgccaagtcttcatcttggaaacaatgagcctgctttatatactcaacactagatagacttttatataactatgctgattgtgaagctgatgttgcagcatacggtaaagcttagtagataacgttggataaggaaaggagagtaatctgtaaatgtgaagaaaaaagactggaaggaagtacaccaaaacattaataagtattgcacaaatgctggagggaagagctgccttttaccttttatctgtactttataaattacttcaagataaataaatcatgaattttattaacttgcattgaaaaccatttacaacctagtctcaaactctattcagtatattttttaagcctttccccagatcggctccactatcaaactaccattgttaattcccaggtctcacaggttctttctatttttatgcct

SEQ ID NO: 343777 - DNA, 590 bp, Homo sapiens
tctctgaaatcacttgtagatttgcttcaatatgctgccacttactaatcacctgaggtcacgagttcgagataagcctggccaacatggtgaaaccccatctctactaaaaatacaaaaattagctgggtgtagtggcacgcatcggtaatcccagctactcgggaggctgaggtragagaattgctcaaacccgggaggtggaggtttcagtgagctgagttcgtgccactgcactccagcctgggagacagagcaagactccagctcaaaaaaaaagaaaaaagaaaaaagaaagaaaagaaaataccctgccacttagaaagtaataaatactggaattttatttcctcttctgtgaatcattttcctcatctataaaaaggggcaatgccctaccacactcagctatcaagaagcttaaagaaaattttctatgtgataatgaccatattcacactaacgtatgacttttttctgctttcttgactctgatttttatagtccaatttaattgaccttatttttcaaattactcaaggaaatgtgtagggaatgattgaacaggtaaatatgccttcctgtaactg

SEQ ID NO: 343778 - DNA, 537 bp, Homo sapiens
gcctttatcattatttgccattttccccttatttctctggctttggaatggtagtttgcacttaattgattaccagtttcttatttccatttgaaacatatggtcacctaatcacccaatgaagagcttttcttggaatttgaccacagaagtaaaatatatatatatatatatatacacacacacacacacacacacayatatatatacacacacacatatatatattagagatatatagagagaaatgtgtgtgcaattatatacagtacttacatatactttatacacacacattgcatatgtatacacattacacaaacacacaaacatatatacacacacagcaaaagcatgagtgattcttaaaacctaaggaaaactgtgtattcctagttccctttcaaaaaaaaattgtgtttgtctgtgtgtatgtgcaatgtgtgtgtataatctttcttttaatagactttattttttagagtagtttcaggttcacagaaaagttaagcagaaggttcagatagttctcatata

SEQ ID NO: 343779 - DNA, 537 bp, Homo sapiens
gcctttatcattatttgccattttccccttatttctctggctttggaatggtagtttgcacttaattgattaccagtttcttatttccatttgaaacatatggtcacctaatcacccaatgaagagcttttcttggaatttgaccacagaagtaaaatatatatatatatatatatacacacacacacacacacacacatatatatatacacacacacatatatatattagagatatatagagagaaatgtgtgtgcaattatatacagtayttacatatactttatacacacacattgcatatgtatacacattacacaaacacacaaacatatatacacacacagcaaaagcatgagtgattcttaaaacctaaggaaaactgtgtattcctagttccctttcaaaaaaaaattgtgtttgtctgtgtgtatgtgcaatgtgtgtgtataatctttcttttaatagactttattttttagagtagtttcaggttcacagaaaagttaagcagaaggttcagatagttctcatata

SEQ ID NO: 343780 - DNA, 536 bp, Homo sapiens
tttaacctcaggaagatttaaaggtaaaagataaactttccaaagccaggggggaatgtgccatataatcctttaagcaaggcatcttcttctagctctggtgtttttttttttttttttttttctgataaattgaragctgattctgcatgcccagtgatttgcaaaatcagacagtagacataatggaaatcatgcagtgtacctaaaagcaattcaatgaaaatgctcctattctctttatgtttggtttttatgtgaatctgtatttgaggagaaattaagtgtgtttgttgtaagcagatgttcatgtgctctcaggtaagtaataatgggtaacagtagaaggaggtggtgctgggtatgaggcagtgggactgagccctgtggatgatgccaatacactttatagaagaaaaagaggattattgcctcctggcgaatttcttttgaatagtgtgtggttgtgtgtatcagaaaaactgagataaatctggaagaatacatcaaagtaagggcttataaggatcatgcgc

SEQ ID NO: 343781 - DNA, 536 bp, Homo sapiens
tttaacctcaggaagatttaaaggtaaaagataaactttccaaagccaggggggaatgtgccatataatcctttaagcaaggcatcttcttctagctctggtgtttttttttttttttttttttctgataaattgaaagctgattctgcatgcccagtgatttgcaaaatcagacagtagacataatggaaatcatgcagtgtacctaaaagcaatycaatgaaaatgctcctattctctttatgtttggtttttatgtgaatctgtatttgaggagaaattaagtgtgtttgttgtaagcagatgttcatgtgctctcaggtaagtaataatgggtaacagtagaaggaggtggtgctgggtatgaggcagtgggactgagccctgtggatgatgccaatacactttatagaagaaaaagaggattattgcctcctggcgaatttcttttgaatagtgtgtggttgtgtgtatcagaaaaactgagataaatctggaagaatacatcaaagtaagggcttataaggatcatgcgc

SEQ ID NO: 343782 - DNA, 583 bp, Homo sapiens
ttttcttctcccttgtataatcttttctttccgaataaaagtgcacaaatggctatataggacaaatgattttgccttgtgatctactttgatttattagtaaaactacaatgatgaatcatatttaattatgatcattaagagtgataaatcaaaacatgcaaattgcctgttcatcacagagatcatgaaaaatgtgcatttttgaattctgatgctgagagaagtaaccaagttttctgtctgatccaaaacagcttgcattccctattgaaacgtcagagaatgtcgagaatctgagygttagatgaactttagagggtccatcttccagccttcaggcagctggataggaaacattccaggaccagttatcaagtctcttgaagtcaatcagcaaaatattttagctctaataatatcaatctttcacatgtttttcattctctccatgtttacacagtacctaaaacagctcttagattattttgtgaattgtacagccttctgtagccagctttgaagcaattttttaaaccaggaacaggctaatcaacagtctttggttgcccatagtgagttt

SEQ ID NO: 343783 - DNA, 658 bp, Homo sapiens
actttaacctcctacatcaaagcttttcttgatcattcatatattgtataagtggtaaatatggtcaagtccacatgaaaaccaacttctgctactgaagtggcacagttattagatttagaactctcttcagtgaaatattatgtctaattcattaccgtgtcctgaatatcaccagaccctggaacatattagatgatgaacacctatttttgattgaggcaatgcagtttcaacagaagcaaaaatacatatataatcaaaggtcaaaacatgttttgactacagtacaaggtaaactaagctaagatcctagaagacaggttgtcctattatttccaaactattcctgactcattaagggcaatattttaatttataatatcaggcttatacatgctttttactttctgtgtatatttacacattgcctaaaaatcattacactaaattgttttacagaattgtacaaatgtgtagacaaacaaaataagaaaaataaacttttaagcattttttaaatctaaagggaaataatatgattcttttacaaatcraatgtgatgtttactacaaaagaaaaatgatgatggtggtgatgatgatggtgatgatgatgatgatgatgatgatgatagcagctaacatttattgagca

SEQ ID NO: 343784 - DNA, 625 bp, Homo sapiens
caccacaggatagctgctctataaaacatggtcaggctgctttttaaagcaggttcccaatcctgttcctcctcactgggtgggacctcccaactagggtcttcaaccacctcctacagatatcttcaaaccagcaacaggtccatacctccctgggacagacctcccagagcgaggaasaggctgccatctttgctgttttgtagccttcactggtgacacctttgggtactagaaaatttgaggctactagggacaggagcaggcccccagcatactgtagcaaccctatggaaaaggggccagactgttacgtgggtgcacattttcatatctccttaccaggtagggcctccaggcaccccccaccagagctactgagccagtatcaactccctgaacagagtctccagggacatctgaaagcctctctgccacttcctctgcagtggaattgcccttgctagcctcggactaatgaaggagcaaagaaactaagtgccttatccacaccttcaacaagcttcagttggcccaaggagaggaggccagtccatctcccataggtcccacacaccacccactgctcatcacagacagggaacaccctggcttgtgcccacag

SEQ ID NO: 343785 - DNA, 540 bp, Homo sapiens
actaaaaaaattgctcaaaaacagacaattacgtggaaattaaacagcatgctcctgaatgactttggggtaaataataaaatgaagaaagaaatcaagaagttctttgaaactaatgagaacaaagatacaacataccagaatctctgggaaacagctaaggcagtgttaggagggaaattcatagcrctaaatgcccaaatcagaaagttagaataagtctcaaattgacaacctaaaatcacaactgaaagaattagagaagcaaaaacaatccaaccccaaagctagcagaacacaagaaataaccaaaatcagagttcaattgaagaaaatcaagacatgaaaaaccattcaaaagatcaacacatccaggaggtagttttttgaaaacatgaataaaataggccactagcaggacaaataaagagtagatacacataaacacaattagaaatgacaaaggcagtgttaccaccgattccacagaactaaaaataaacatttgaaactactaagtacacctctatgcacacaaac

SEQ ID NO: 343786 - DNA, 593 bp, Homo sapiens
agggaacacttatacgacattggtaggagtgttcaactgttgcagaaagcaattttggagattcctcaaagagctaaaagcagaactaccattcgacccagcaatcccattactgggtatatacccagaggaatataaattrttctgcaataaagatacaaaaatgctgacgttcattgcagcactattcacaagatcaaagacatggaatcaacctaaatgcccatcaatgacagattagataaagacaatgtggtacatatactccatggaatgctatgcgccataaaaaagaacaagatcatgtctttggtgagaacatggatggagctggaggctattatcctgagcaaactaacacaggaacagaaaaacaaatgctgtatattctcacttataagtgggagctaaatgatgagaacttatgtagagaaagaaggaaaacacatccactggggtctacttgggggtggaaggtgggaggagggagaggatcagaaaagacaactattaggtactgggattaatacctgggtgatgaaataatctgtacaacaaactccaatgacttgtgtttacctatgtaacaaacc

SEQ ID NO: 343787 - DNA, 581 bp, Homo sapiens
aacttaaaagtttaaagaaaagaaaaaagatttttaaaagatactaccatattttaccatttattatatcactgattggtggttgtgtttttggcagtggtatttggattttcttagttggtaaggtaatttttttgactgattccacaagtgattacacaagtgaaaaaacatttaataaaaatttgtttactgaatagacaaatgtataaacagccttgacacatttgttgtattggtcaactcaattaattgctgccagatgaatgaatgaatgaacatttgctgagtgtctagcattcatgtaggtactcttctactttgtcctatcaagttctccacttacccaagcaacccactttacaggtagattatttaaaataaggggacccaggtcattgcaaagagggcttgtggggctgtgaaaccgggggcttttaacgtactgaccaaagayggatgttctccatgagaagctatagtcacaatcatgacacaattgatgactggtgatgtgggaaggtaaataagtgtttcgaaatttaaaaaaaaaaaaaaaaaggagacctgatccaaactaa

SEQ ID NO: 343788 - DNA, 604 bp, Homo sapiens
tgtatttgtagaatattttccttcccaggatctcaaagcactttgcaaacattaattacctatcagtatctgcctgtggtatractattatcattgcctactagatgatgaaacaagaacagagaaaggttaagaaacttgcccaaagccacatggggcaaactctgaacaagaaccatttgttgtttctgtgtttgcaataatgagcaaattaaaagtgcaataattttctttgtaattcagaaaacaacacttttttaacagtcatccctaaccataaaaaaggaagtctttttaacttcccttaatgtggatactttttttcagatagtacctaattatggtaaattgcttcattccctaattattactgcaaggcaactaaacattgttatgctgactactcaagagtggattgttaatggccttaatcatcagataatctggcaatataatcaatgtaactgggagataccttgtggaaacaacaagtaaatcaagtataaaacataaatttacaagggagtgttcagttctattgttttatgttttgtatgataagttgaaaaatctaatttcacaaagaggcagaaggaaatgttaa

SEQ ID NO: 343789 - DNA, 604 bp, Homo sapiens
tgtatttgtagaatattttccttcccaggatctcaaagcactttgcaaacattaattacctatcagtatctgcctgtggtatgactattatcattgcctactagatgatgaaacaagaacagagaaaggttaagaaacttgcccaaagccacatggggcaaactctgaacaagaaccatttgttgtttctgtgtttgcaataatgagcaaattaaaagtgcaataattttctttgtaattcagaaaacaacacttttttaacagtcatccctaaccataaaaaaggaagtctttttaacttcccttaatgtggatactttttttcagatagtacctaattatggtaaattgcttcattccctaattrttactgcaaggcaactaaacattgttatgctgactactcaagagtggattgttaatggccttaatcatcagataatctggcaatataatcaatgtaactgggagataccttgtggaaacaacaagtaaatcaagtataaaacataaatttacaagggagtgttcagttctattgttttatgttttgtatgataagttgaaaaatctaatttcacaaagaggcagaaggaaatgttaa

SEQ ID NO: 343790 - DNA, 539 bp, Homo sapiens
gtcaaatcactgaaaggggagagattgcaggacccttttggactaagacaaaaagattgtcattactgtggaaattttgcatttttgtaccccgtcttgcttttcttacctttgatgcctaataataatcaaaggttacagaaagaggctttatctatcttagactgaatacatacagtaggtaagctaaaacagacgagtctttagaactagtgcaactcccgtgaattttttttttatgaacaggacatctgcagtttataaagaactctgtttctgccaccagaagtttggcctatagtcacacaggattttataataataacagagatgaaaatgracttttattttctccctgtttggtgttcttggtgggtttgtagccacttttctgttactttatggttctcatttcaacaggaatggccagcaaaagttgttttatttttcctgttaagggtcataaactttttacatttttgacctgtattagattagaatttcattatgcattctttttagttgaggtattttatagt

SEQ ID NO: 343791 - DNA, 592 bp, Homo sapiens
ataatttttgatatgtctaccattttatgttttctctgttccttctgtcttgtagtcccgtttctcattttcatccctcttttgaattatttatataatttttagtattccattttaatttatctattaaaattctgactatgtctttgtataataattttagtggtttatctagggattacaaaatacacacttaacttttaagtctatttaatatcaatattttactacttttattggaatgtagaaaccaccatataagtacattttcccttcctcctctacactgtaggcatcttttctacataacatctatatacatcttcagatctcttcagagaatgctatatattttggtttgaactatcaaacatgttttaaagaactgaaaaggagaaaagtagtattttactcataaaacttgtatcttgtatctcgctgctaaaaaatcgtatcttaatggtgaaaatagttatttaccatttctattrctctccttcattccttatgttccaattttctttctggtattatttccctttgctttaataacttactttaataagtctttagaccatacctgatagtaatg

SEQ ID NO: 343792 - DNA, 563 bp, Homo sapiens
atgagaaccagaatgcttatattttattagtatccaagactggggagagggatggggtgggagagatcaagaattggggagcagatgggaggcgctacctcactcaggagacacgagttcttatccaagttcaaggtgaaagaagtgagggcaggaagagaaatctccctgctagcaacagcgactcagggagaaactctgggcccatagctagctggaggcagggtgacattgctcccaccaatgggccatcttcttagctacacctttgtagctgtggtgccaggcagargaaccacctggaaactgagctaaggcaggttccttcttccaacagaagacacagctgggcagggactgtgcagactcaacagggccaggccagctagtggccagtcagtgttcatgtctctcaccagtgcctggagggtccccagccaaggacagaactggtcagttcctgccagcagcttgagctggaatgccctgggagggtcagtagagggtggtcacttgaggagcttcacagagaggcggatgtcaacatcgcagaggaagatgtc

SEQ ID NO: 343793 - DNA, 563 bp, Homo sapiens
atgagaaccagaatgcttatattttattagtatccaagactggggagagggatggggtgggagagatcaagaattggggagcagatgggaggcgctacctcactcaggagacacgagttcttatccaagttcaaggtgaaagaagtgagggcaggaagagaaatctccctgctagcaacagcgactcagggagaaactctgggcccatagctagctggaggcagggtgacattgctcccaccaatgggccatcttcttagctacacctttgtagctgtggtgccaggcagaggaaccacctggaaactgagctaaggcaggttccttcttccaacagaagacacagctgggcagggactgtgcagactcaacagggccaggccagctagtggccagtcagtgttcatgtctctcaccagtgcctggagggtccccagccaaggamagaactggtcagttcctgccagcagcttgagctggaatgccctgggagggtcagtagagggtggtcacttgaggagcttcacagagaggcggatgtcaacatcgcagaggaagatgtc

SEQ ID NO: 343794 - DNA, 528 bp, Homo sapiens
tatagaccaacagcaagtttgctttctgcttgctacaacatggtggatttccaaagcccactgttcctcaagtgtgaggcaaatccactgcatgcttgacattcatctgatctgtggagaggcttgggggaaaggggaagcactgcaaattgtgctgcttgctgtgctgtgaataataaagttctttgcctctgacccacgagtcttgtgtcttttgccagcatccatgaaacagtaataagctaatttactaacttgtaagttgagaaaattaaatcctakacctgtcaatatcctatgtcaaattattaattcatcagattcttggtttgctcatctgtagaacatatacaatagtagtgttatttaaggattggtatgggcatttaataagtaattaaatgtgaaaaacctggctcaattcttgttgagtgggtggatcttttccaaagccccaagctgtgtggatgttgctgagccattgctacggcatggtcagagccacagcacttgacaaagcattgattt

SEQ ID NO: 343795 - DNA, 528 bp, Homo sapiens
tatagaccaacagcaagtttgctttctgcttgctacaacatggtggatttccaaagcccactgttcctcaagtgtgaggcaaatccactgcatgcttgacattcatctgatctgtggagaggcttgggggaaaggggaagcactgcaaattgtgctgcttgctgtgctgtgaataataaagttctttgcctctgacccacgagtcttgtgtcttttgccagcatccatgaaacagtaataagctaatttactaacttgtaagttgagaaaattaaatcctatacctgtcaatatcctatgtcaaattattaattcatcagattcttggtttgctcatctgtagaacatakacaatagtagtgttatttaaggattggtatgggcatttaataagtaattaaatgtgaaaaacctggctcaattcttgttgagtgggtggatcttttccaaagccccaagctgtgtggatgttgctgagccattgctacggcatggtcagagccacagcacttgacaaagcattgattt

SEQ ID NO: 343796 - DNA, 528 bp, Homo sapiens
tatagaccaacagcaagtttgctttctgcttgctacaacatggtggatttccaaagcccactgttcctcaagtgtgaggcaaatccactgcatgcttgacattcatctgatctgtggagaggcttgggggaaaggggaagcactgcaaattgtgctgcttgctgtgctgtgaataataaagttctttgcctctgacccacgagtcttgtgtcttttgccagcatccatgaaacagtaataagctaatttactaacttgtaagttgagaaaattaaatcctatacctgtcaatatcctatgtcaaattattaattcatcagattcttggtttgctcatctgtagaacatatacaatagtagtgttatttaaggattggtatgggcatttaataagtaattaaatgtgaaaaacctggctcaattcttgttgagtggktggatcttttccaaagccccaagctgtgtggatgttgctgagccattgctacggcatggtcagagccacagcacttgacaaagcattgattt

SEQ ID NO: 343797 - DNA, 571 bp, Homo sapiens
attaacatgacaactgtgataaggtgatattttatgtctccctccacaaaaggcaattatggaattcacagttattatttagctttgttctatgcactaacagatttaacatggaaaataattcccccatamacatattataataccacaatattcagtgttttaaacagcctgattctgtttagactcatttgagcacagagaaagagggaaaatccacacatttttagtattgcctaaaattagtcccccccgaatatatgccgccaggtgtggttatgctcttatttctttgtttttttttttttccttcatgaactttccacgtgttcctccagataatgttgccctttttactagccttttcaccaaatgtgggtaaaatgttaagttttcactccaatagagggggcttgtggaaggtgtcccaggatctcctagggcaccaatatgcttcatgctcaacagtaaggctttgttaaaatgcttcatgtttgtgcgtcaaagacaaaatacacaggaaccacgagaaaatgggcactcaactcgggggaaaaaggtgtgtgccttt

SEQ ID NO: 343798 - DNA, 571 bp, Homo sapiens
attaacatgacaactgtgataaggtgatattttatgtctccctccacaaaaggcaattatggaattcacagttattatttagctttgttctatgcactaacagatttaacatggaaaataattcccccatacacatattataatacmacaatattcagtgttttaaacagcctgattctgtttagactcatttgagcacagagaaagagggaaaatccacacatttttagtattgcctaaaattagtcccccccgaatatatgccgccaggtgtggttatgctcttatttctttgtttttttttttttccttcatgaactttccacgtgttcctccagataatgttgccctttttactagccttttcaccaaatgtgggtaaaatgttaagttttcactccaatagagggggcttgtggaaggtgtcccaggatctcctagggcaccaatatgcttcatgctcaacagtaaggctttgttaaaatgcttcatgtttgtgcgtcaaagacaaaatacacaggaaccacgagaaaatgggcactcaactcgggggaaaaaggtgtgtgccttt

SEQ ID NO: 343799 - DNA, 571 bp, Homo sapiens
attaacatgacaactgtgataaggtgatattttatgtctccctccacaaaaggcaattatggaattcacagttattatttagctttgttctatgcactaacagatttaacatggaaaataattcccccatacacatattataataccacaatattcagtgttttaaacagcctgattctgtttagactcatttgagcacagagaaagagggaaaatccasacatttttagtattgcctaaaattagtcccccccgaatatatgccgccaggtgtggttatgctcttatttctttgtttttttttttttccttcatgaactttccacgtgttcctccagataatgttgccctttttactagccttttcaccaaatgtgggtaaaatgttaagttttcactccaatagagggggcttgtggaaggtgtcccaggatctcctagggcaccaatatgcttcatgctcaacagtaaggctttgttaaaatgcttcatgtttgtgcgtcaaagacaaaatacacaggaaccacgagaaaatgggcactcaactcgggggaaaaaggtgtgtgccttt

SEQ ID NO: 343800 - DNA, 569 bp, Homo sapiens
tctgtacctcctctttcacatctagtgctcaggtataaagggcgcttttgtgctttctgtcatttcttgaaaagcagatctgggaagagtctcacaaaagggcagtctctcctgctgtatctctgctctgcgtagaattggtagtaaactggtctgccaggtcccctgtgagcagcaacttgttcatgtgatattgttcccccagtctgcttttggtgctcacaggcattctggcctccggatttagatgtggggaggaagtacaaaaacccacttacacctaagacctataacatttaaggcagatgattagactcctaaaagccattttcctcctacttcttactgactgaatctttttcctattgtagaaactgwtaatgccatttattctctcagcttctttgcacttaggggttgccatggaattcagttctgatcaatgagtcatattacaaagcttctggaaaccatattcttcctaaataaaaataaacaggtgtttgaagaaagccccttttatttgctctttttaggcttttttttttttaacacaattgtgttgggat

SEQ ID NO: 343801 - DNA, 567 bp, Homo sapiens
taacctactataatttggcattgattttcatactaataatagagcctggactctaagaaataccctagtactagtaagcaatacatttatattaatagtcaaagaaagacagatatatttttatagcccactgatttttggttgttgcttattgttgtatttttcccatatcttatagttgattcttgatgatacttctatacttctcccaaagtatttcaaattcctatatatggattgtgcacatctgtattattggatttctgcttagtttgaatgtggktttagtttttctcaatttattaatctgttttttttttcctagcctgggtaatttgaagcaacatattcataaaaaccaaaaatgtgctccttaatttagagattctctaatctgaagcacggaaaataggtaactactaatttgaatgatttataactgggaagggcatgtgttcctccaaactgctatctcctacatcatccaatgcatattcttcttgcaaaatttaattcataaaatgtggccactactccttcacttttcaatactcattaacaccacca

SEQ ID NO: 343802 - DNA, 603 bp, Homo sapiens
attcagtgagcaggaagccagctgtgggcacattcctactcaaggaaaagagtcctggactagaagttagaaggatgagtcctatgtaattcagcctctgacactaacttaacacatggttgccttcatttgattaacctactataatttggcattgattttcatactaataatagagcctggactctaagaaataccctagtactagtaagcaatacatttatattaatagtcaaagaaagacagatatatttttatagcccactgatttttggttgttgcttattgttgtatttttcccatatcttatagttgattcttgatgatacttctatacttctcccaaagtatttcaaattcctatatatggattgtgcacatctgtattattggatttctgcttagtttgaatgtgggtttagtttttctcaatttattaatctgttttttttttcctagcctgggtaatttgaagcaacataktcataaaaaccaaaaatgtgctccttaatttagagattctctaatctgaagcacggaaaataggtaactactaatttgaatgatttataactgggaagggcatgtgttcctccaaactgc

SEQ ID NO: 343803 - DNA, 603 bp, Homo sapiens
attcagtgagcaggaagccagctgtgggcacattcctactcaaggaaaagagtcctggactagaagttagaaggatgagtcctatgtaattcagcctctgacactaacttaacacatggttgccttcatttgattaacctactataatttggcattgattttcatactaataatagagcctggactctaagaaataccctagtactagtaagcaatacatttatattaatagtcaaagaaagacagatatatttttatagcccactgatttttggttgttgcttattgttgtatttttcccatatcttatagttgattcttgatgatacttctatacttctcccaaagtatttcaaattcctatatatggattgtgcacatctgtattattggatttctgcttagtttgaatgtgggtttagtttttctcaatttattaatctgttttttttttcctagcctgggtaatttgaagcaacatattcataaaaaccaaraatgtgctccttaatttagagattctctaatctgaagcacggaaaataggtaactactaatttgaatgatttataactgggaagggcatgtgttcctccaaactgc

SEQ ID NO: 343804 - DNA, 603 bp, Homo sapiens
attcagtgagcaggaagccagctgtgggcacattcctactcaaggaaaagagtcctggactagaagttagaaggatgagtcctatgtaattcagcctctgacactaacttaacacatggttgccttcatttgattaacctactataatttggcattgattttcatactaataatagagcctggactctaagaaataccctagtactagtaagcaatacatttatattaatagtcaaagaaagacagatatatttttatagcccactgatttttggttgttgcttattgttgtatttttcccatatcttatagttgattcttgatgatacttctatacttctcccaaagtatttcaaattcctatatatggattgtgcacatctgtattattggatttctgcttagtttgaatgtgggtttagtttttctcaatttattaatctgttttttttttcctagcctgggtaatttgaagcaacatattcataaaaaccaaaaatgtgctccttaatttagagattctctaatctgaagcamggaaaataggtaactactaatttgaatgatttataactgggaagggcatgtgttcctccaaactgc

SEQ ID NO: 343805 - DNA, 585 bp, Homo sapiens
cacacctgtaatcccagcactttgagagaccgaggtagggggggaatcacaaggtcaggagtttgagaccagcctggccaacatggtgaaaccccgtctctactaaaaatacaaaaaattagctgggcgtggtggcgcacacctgtaattccagctactcgggaggctgaggcagagaattgcttgaacccagaggcagaggttgcagtgagcagagatcacgccactgcactccagcctgggtgacagagtgagactccatctcaaaaaaaccttattgaaaagttatagtaatgaagacaatgtactacataaggacaaagaaatgggccatggaatakaacagtgtatttctgaatacacgtgtttcaggtgttttttttttaagtgctaaaatatcaattgacattatttatttccttgctcttacaatagcaaagtaattcaatgggaatgagataatctctttttaaaaaatgatgctcgaacaactagataaaaatatgtaaaaataagaacctttattcttgcatcacaccatacataaaaattaattcaaaatggatcatatactaaagtagaatt

SEQ ID NO: 343806 - DNA, 431 bp, Homo sapiens
taaacccaaggcatctaattctagagctagtgaaacaaagctctgaattagggtgaaacaaagtgaattttaagcatgtcataaatctatggagtttgagagcctaaagaggcatcagataacatttagctcagttcctttatgttatagataatgatcataatttcaagagaagtgaaattacttataagtgtttcttagtgacaaagccaaggccagaattctattgatttccaaattaattttttttccactttatccagttgactcaagacagtctcttcycactttagtccagcaattttaagatgtgtacaatttccatatacagaatgactattcaagttccctgaaggaatactgcagtcccaattggttacctaattaatctattacttcaaaactttgtggtttaaaacaacgaacattta

SEQ ID NO: 343807 - DNA, 591 bp, Homo sapiens
  misc_feature (1)...(591): n = A,T,C or G
aacccttcacaccacccccaacctttttttttttttttgtcatatccacaatctctttcatgattttctcaattggctccgttgcaaatcctgtgaagtcatgcacaacacctggacacagttttctctggcaggaatttgttgttttgggcttgatggctttcacagctttcctatagcaatgctggtatctttaatgatgtagtccttccagactttcatgttattctatcagagttttctttcatagcgttggcaatcgtttccatacrgtaccttgtgtaataggccttaaagatccttatgacccctggtatagaggttaaattagagacgttgtgtttgggggcaagtagactattttttcaccttcagtgttgaattcatggggtggccaaggacattgtccaatatcaaaagaactttaaaaggcagtcccctactggcaaggtatttcctgacttcagggacaaagcaacgatggaaccaatccagaaaaagggttctcattgtgtgcgaccttcttgttatacaaccaaaagactggcagctggtgtttattttttcccttnnnnnnnnnnnnnnnnnnnn

SEQ ID NO: 343808 - DNA, 591 bp, Homo sapiens
  misc_feature (1)...(591): n = A,T,C or G
aacccttcacaccacccccaacctttttttttttttttgtcatatccacaatctctttcatgattttctcaattggctccgttgcaaatcctgtgaagtcatgcacaacacctggacacagttttctctggcaggaatttgttgttttgggcttgatggctttcacagctttcctatagcaatgctggtatctttaatgatgtagtccttccagactttcatgttattctatcagagttttctttcatagcgttggcaatcgtttccatacggtaccttgtgtaataggccttaaagatccttatgacccctggtmtagaggttaaattagagacgttgtgtttgggggcaagtagactattttttcaccttcagtgttgaattcatggggtggccaaggacattgtccaatatcaaaagaactttaaaaggcagtcccctactggcaaggtatttcctgacttcagggacaaagcaacgatggaaccaatccagaaaaagggttctcattgtgtgcgaccttcttgttatacaaccaaaagactggcagctggtgtttattttttcccttnnnnnnnnnnnnnnnnnnnn

SEQ ID NO: 343809 - DNA, 591 bp, Homo sapiens
  misc_feature (1)...(591): n = A,T,C or G
aacccttcacaccacccccaacctttttttttttttttgtcatatccacaatctctttcatgattttctcaattggctccgttgcaaatcctgtgaagtcatgcacaacacctggacacagttttctctggcaggaatttgttgttttgggcttgatggctttcacagctttcctatagcaatgctggtatctttaatgatgtagtccttccagactttcatgttattctatcagagttttctttcatagcgttggcaatcgtttccatacggtaccttgtgtaataggccttaaagatccttatgacccctggtatagaggttaaattagagacgttgtgtttgggggcaagtagactaytttttcaccttcagtgttgaattcatggggtggccaaggacattgtccaatatcaaaagaactttaaaaggcagtcccctactggcaaggtatttcctgacttcagggacaaagcaacgatggaaccaatccagaaaaagggttctcattgtgtgcgaccttcttgttatacaaccaaaagactggcagctggtgtttattttttcccttnnnnnnnnnnnnnnnnnnnn

SEQ ID NO: 343810 - DNA, 591 bp, Homo sapiens
  misc_feature (1)...(591): n = A,T,C or G
aacccttcacaccacccccaacctttttttttttttttgtcatatccacaatctctttcatgattttctcaattggctccgttgcaaatcctgtgaagtcatgcacaacacctggacacagttttctctggcaggaatttgttgttttgggcttgatggctttcacagctttcctatagcaatgctggtatctttaatgatgtagtccttccagactttcatgttattctatcagagttttctttcatagcgttggcaatcgtttccatacggtaccttgtgtaataggccttaaagatccttatgacccctggtatagaggttaaattagagacgttgtgtttgggggcaagtagactatttyttcaccttcagtgttgaattcatggggtggccaaggacattgtccaatatcaaaagaactttaaaaggcagtcccctactggcaaggtatttcctgacttcagggacaaagcaacgatggaaccaatccagaaaaagggttctcattgtgtgcgaccttcttgttatacaaccaaaagactggcagctggtgtttattttttcccttnnnnnnnnnnnnnnnnnnnn

SEQ ID NO: 343811 - DNA, 517 bp, Homo sapiens
cctcacagttcaaacctgtgttgctcaggagtcaactggtttctcctggctgcatggtatttcatactctgcatccacaatattttatgtattattctcctagcaatggacacctactttggctgcaatctcttgctactgtaaacaatactggcatgaaagccttttatttattacctctcagactctagmcaacccttctgaaggccaggttccacaaactgcacttcccagacttccttgtcagctcacttccagttatgttcttccagtagaaggtactggcagaagatcacaagacatgaggtggggaaaagggactcttcctgctaacagcctctactggcattcttccatcagcagtggggagctagggctgcagcctagagcttctttcagtgtgcgtagcaccagcagcatcacacctgcttggagataacagcagatgagctgtgcccctcagcagtctgagcaccagctgtatacactttcagtggttcatgtaccaccagcctta

SEQ ID NO: 343812 - DNA, 556 bp, Homo sapiens
aagtacaaaacatgctgctgggaacaattctttattgctggatttcctggctttatggggctgggaattggctcttacagagaacgaggtaaaaactatgtttgataaagagaataggatcaagtgttgagaataagaactgtgttccagagcaggattcagatattcagatacggcactggagaacatgaccattctcccttctgaggttctccaacatacccagtaattcccactaccaagatattgtcacaacaataaatgggaccatagactcacatcaacaaaagcccattttaagaagcaaaaattgggttgatgtaaccatctccccacctctcccacatttcccttttytaagggaaagggacaatattcaagtttatgggaagacaatgttctataacaaagaaaccaaagaagatatgagatatccacaagtaactaaaatattaataacaaagttacatgtgacatctgcattgagactatgacagattgttctaagaattttacatcattacttgttagagtaagtagggaaagctttacaaaa

SEQ ID NO: 343813 - DNA, 534 bp, Homo sapiens
ataaaaggcagtagggttgaaatacattttaacaatgcacacaaagaaatcaaatgcaaaattaaacataaaagatgcattgtccttttcgattcttaacacatacagccctcaaatagcaaactcctggttactttttaaagtaagtagattaaaaacaagattaaccaaatgtccaactcatgtcaaatcatagcstctactagttaaaaattctgttggttgtaaaactctgttggtggccatattggcctaggatttttaatataaatgagagtagaaatgacagggggtgggggaagggacattctttctcgaataaagggggaaatttttatctagaatgagttatttgaaagatgaaaaagaacattaaaagtcaggctctacaaaaatctgaaaatgtagcagaaatgaaaatacaagaagttatattttagctatattattaaacatttaaaagcattctaaacatttttgaaggaggtaaaaatattaactatttgaggaaattatgtacttgttaagtaaaaa

SEQ ID NO: 343814 - DNA, 548 bp, Homo sapiens
aaattttagcggattgcatgtagattataccaacacattttaaaatgttaatcattttatttaatactaatttaatacaaataagcagttatgatttccttatttggcagccaaatatttggaatgatattggatgctmtatgcacctacccctataacaaaagccagttcattatttattcagattattattcagatgggagaaaaaatactaatggaaatctgagaaaatatcagcatcactaagataaaccaaaacctattttaacagaaaaaaatggtgcaatgtttcaagaagaactggaattatatattgtgaatgatcctaagctgatgagccactactgacttaggggataaacattttattacagcagtcaatttggaagttataaaattcctcttttgggagttatttggggggttagaatagggatgcagctagaaaaatcagtgaaatctccagaatgaacagcctggcactttagtatctcagtgggcactcaggaaagctatactatagaaagcaggtccccatttatgatagt

SEQ ID NO: 343815 - DNA, 500 bp, Homo sapiens
tgtactctatgtagatagtgcttttgaacttctttctgatagtacatattcctgtattaatacaataaagccaagctgacaggatgacatagtgaagctcttattaaaaatgtgttctaattgttgctgagatactawtggaaatctagagcttgctgcctcaagttattttaaattgtgtattttatatttacattttacatttacatattttatctattaagaattgcttttaaattaaaagctttacatacgcttaaacaaaagtatgaaagtatatttgaacttcaggaagcaattctttgtatcagcaccctgaatggttttgtattaaggaaagccagattcagtgacaagtttgaccctcacatctggaattgccattagagaaaagcaatcatctgagtcatatgtgtatacttacctatgacataagaagcacatttatttttcttctttttttaaaagcatatttctttcattttagaaaaccaaaatgc

SEQ ID NO: 343816 - DNA, 580 bp, Homo sapiens
tgacaatgtatataattccagtaatgagagaaaattagaatcagaaattcagtactagaaggtgccaccatggatgccatttattctaacccattgtcatacagacccagagatcttaagtatcctgcccaacaccacacagcaaattagcggcacagttaactctagaagccagatttctatcaagtaccatacccagaatttaacaagttggagaatttgctgtttgtggaagttctgaggagttgccctagacaaagctttccttggggtgagattttgagtttagacacamtaggtaaagatcaagggcaggaagctgctgtcattactaggttcaaatcaaaactggaaccttggagccatggcagggacaagaattgccttatgtgttcctggtgatgtctttgcttcatataccacttgagaaatactgacttgatctattgttgaaacttagtttgtatacttgttgatgaattttctatagtaagaatatgaatatgctataactttttgaggagttgttagtacagttgacccttaaacaacacgggttcgaacttcataggtctgccta

SEQ ID NO: 343817 - DNA, 492 bp, Homo sapiens
attcactctttctcggaaaataacccgggagttccccaaaagggacagagcagtgagactattaccctctgagaacatttaggtcatggtgttcatgttctaaatcatatcagggcagccacgattcttacaaactaatgacgaagaaattgccctgcttttcagtgactttccagtgttgtcttccaggcaagtgcatagaggtaatcacaagcagatgggaaccccaggcctgattgtgcattcctcatttattatagagctctgtgcaaggagaggcggaagagcgagtgtggggaacggggcagcgttcrtgtcctcattctgctacccacaaatgggatagaattgcagttaggacacttggaaattgaacaaaaggaactcatcctctaatattaaattttgaggtgattttatcacatgtggcgggataaaagaaggacattttgaagatgtggtcaggtaggaatattggtatgagttcttcta

SEQ ID NO: 343818 - DNA, 482 bp, Homo sapiens
cacattgaaaatgatctaatttcactttatatctcttcactatgcagggtgtaacagaacaaataaagataagatggtttattctttgttaaatgactgactaaattatacttctttatatttacaaataactcatgtgtgtgcgtgtgtgtgtgtgtgtgtgtgtgtgtgtgtgtgcctatgacatttctctccccccaccaccaaattactctataagatggattttctgtttataacaacttcagttctaatggaaagaagygcttgtctgttaaaccatggaatattaggatggctaaatgagtaacagggatttgtagaaaatcagaaattgtggattcaaattccagctctagtattaattattgctaacgtttcacaagttaccaagatccttgaacctcaatttcttcatctgcaaaggagtggtagtaacatttcttgtatatgctcttcctaatccaattggttcaggctct

SEQ ID NO: 343819 - DNA, 539 bp, Homo sapiens
ggtcagatcatagttgttagattaattataaatctacataagaattggataataataatttagactgccctcaaaaggatactctgcagatcatctaaacaaaactatttttataataagatgcataggttattaggcgacattaaacattttatgttgccataagttactttccaaaaagactgtatggtaacatacaaatttttcatatttcactaacctatggtttatttgatatagctggkggtaacagtgccatttctttaaaggaattgcaaatgatttatgcttaactagaatgtcaagggtctggcaaaactcagaaaataaaaatgtttttgtgtgcattattacaactcatcatgtgcaaaaagactctctgaacccaggttctatcactgtgtcatcagcatctctggaggctgtcatcttctgattgtccctctatagcctcctccacctgtattgtgctctgtgtggctgaccttatggattgcatcagtgagccctcttgttctctggattctatttggttggct

SEQ ID NO: 343820 - DNA, 611 bp, Homo sapiens
ttctcgtgctaatccttgttacatctataaaggatagccctgaaatagttgtactatatgccccccttgaaaagatattcagcttggcttctgaaggaaacagaacttattgcatataaaaagaccttaggaaatttgggagaatgggtagtctggaacaggaacaggttgtacctcacagttttacatactcatttaggagggcttacataagcatttcagggtaggatgactagggctaaagtctctcatttccaggaattctcaagaatctagatgcagcctatataacttatgtcccataactaagttttcttcaatgtgaatataacgttttgatatggctcttgggaagagtgaatgcctagtattccatgtatttccataagtactgatgcagggattaggacactccaggaataacctataaaacaaaaaattacatgcacatatttattgagacagtgacctctgttaatagcaractggataatttaaaccaactttcccccttggaataattaaaactactagcacattagagagctaacgaaatagtgaacaactgtcagaacttgatatggaggagtgtagatacatagaaaggtgag

SEQ ID NO: 343821 - DNA, 547 bp, Homo sapiens
ctagaaaccctgagaacttcaagcaagataaaataaaataaaacaaagcaaaacaaaactacacataggcaccttatattaaaactactaatactaaaagaaaactaaagaacttaaaaacaggttaaaaaagagagattatcttttaaggatcagccattacagtaacctctgamtcgttaacaaaaactgtaaaattcagaagacctgggatatcttcaaaatactgagggaaaagctcagataatgtaaaattatattccaagtggaaaatatcatttaaaaattaagataaccataaatagattttcagaaaagcaaatatgataaaatgtattatcatcagacccacattaaagtaaatagtaaagggtactttttagtgaagggtacattaaagtaagtagtgaaagataattatctcagatgaggactcttcaataaataaaggaaaagaaagcattgaaattcaggaaaatataaattgatagtgattgagtacatcaatattagtaatgtcttgaaattaaaatatacattaaaatga

SEQ ID NO: 343822 - DNA, 614 bp, Homo sapiens
ccatatgtcaatgtaaaacattgccatttaaatcagaaaaaaaatattttaaactaaattatgactatggtctgaatgtttgtgtcctcctcagaattcatgctgaaattctaatttgaaggtgatgatattaaaaggtggggctttttgggaggtgagtaggtcacaagggtagagctcttgtgaataggtttagtgtccttatagaagagaccccagagagctgtcttgcccgtccaccaggtgaggacatagctagaggctccatctataaatcagaaagcagacctcagcaaataccaaatctgacgggttgtttacagatacacaatggaatcttggtcaaccataaaaacgaatgaaatcttatcattcgaagaaacattgatgaaatagaggacattatgttaagtgtttttaaatccatcacagaaagacaaatatcacatgttctcactcatgtggatgctttaaaaaacaattgaactcagagagagactgaatgatggttagcagattctgsgaaaggtagtgggacgtggggaataaagaagggttggttaatgggtacaaaaatacagttagatggaataagatctagtgtttgatagcac

SEQ ID NO: 343823 - DNA, 345 bp, Homo sapiens
ttatctgtttaaatgtattgggcttctctataagtctagatttaaagggattgggttttttaaagcattaattttataaacaaggaaaacaactctgaaaggatggagtcactaccccaaggtcgtagagacactggcagagtcatctggctaaaccaggtcttttgagtcctcaatatatgctttttccactacaacagagatgacgcaaaycatcatgttctctaggggtatgaaagtagccctaaaacaaagcaaacaagccaacaaaggaaagaaaatatggctctgttatttgccgtgacctgtgcctattttagtatgttacactttttgtcagcaaga

SEQ ID NO: 343824 - DNA, 597 bp, Homo sapiens
tgatcttaagcatcaatgaaaactcattgatagatagaggaacacttgaagccaggagttggagatcagcctgggcaacatagtgagacccctgtctctacaaaaataaaaaaattagccaagcatggtggcatgtccctgtagtcccagctactcakgaagtgaaggtgggagagttacttgagcccaggagtttgaggttacagtgagctatgattgtgccctgcactcctctggtgcatatagcctctcatcactaattccactgataaatcctgcagggaatataaacagcctctcatctcactatttgatggcgtaaaaaggcctatgcctgacacctagagctttagcctgccctttctgaaccacatgggcttgcatatagacagaaaggagaagggctctgtgtctgggttaacagagtgacaccatgtctccaagaaacacataataataataataataataagatttatcaatggcagttatagtatgatggcactggatgcttaattctaagtaaaaagcagtaaaaactgcaaaaaccattttaaaaaagcttcttctcaagaatgtcattcctgaagatgagtt

SEQ ID NO: 343825 - DNA, 569 bp, Homo sapiens
ggtgcatatagcctctcatcactaattccactgataaatcctgcagggaatataaacagcctctcatctcactatttgatggcgtaaaaaggcctatgcctgacacctagagctttagcctgccctttctgaaccacatgggcttgcatakagacagaaaggagaagggctctgtgtctgggttaacagagtgacaccatgtctccaagaaacacataataataataataataataagatttatcaatggcagttatagtatgatggcactggatgcttaattctaagtaaaaagcagtaaaaactgcaaaaaccattttaaaaaagcttcttctcaagaatgtcattcctgaagatgagtttacaaatgcaacagctcatctgcaccatcaggtacttaaagcattagttacacaaactctatagaagcttactgacattggggctcagtagttgacacgctaagctcataaacaagtttctagtgcaaaatcttaggggaaatcaagaaactctcagtaatccagataaataaaacaatgtaaagattaatagcaaaactaaaagac

SEQ ID NO: 343826 - DNA, 569 bp, Homo sapiens
ggtgcatatagcctctcatcactaattccactgataaatcctgcagggaatataaacagcctctcatctcactatttgatggcgtaaaaaggcctatgcctgacacctagagctttagcctgccctttctgaaccacatgggcttgcatatagacagaaaggagaagggctctgtgtctgggttaacagagtgacaccatgtctccaagaaacacataataataataataataataakatttatcaatggcagttatagtatgatggcactggatgcttaattctaagtaaaaagcagtaaaaactgcaaaaaccattttaaaaaagcttcttctcaagaatgtcattcctgaagatgagtttacaaatgcaacagctcatctgcaccatcaggtacttaaagcattagttacacaaactctatagaagcttactgacattggggctcagtagttgacacgctaagctcataaacaagtttctagtgcaaaatcttaggggaaatcaagaaactctcagtaatccagataaataaaacaatgtaaagattaatagcaaaactaaaagac

SEQ ID NO: 343827 - DNA, 574 bp, Homo sapiens
tgggacacatgtctggaaggataatgatgcagcacggtgtctgggtattctctaatccatcaggaataaaattgactggattagagctttcctagggaggagaggtcagggaacaaagcccttttcctttctgtctctaggcaagtctatctggttcagaaagggtgggctaaagctctaggtgtcagatgtaggcccttttatgccatcaaatagtgagatgagaggctctttattctccctatagggtatcagtggaattggtgatgagaggcaacrtgcatcaatgaaaactcattatgactcatccctttgcaattatctaagggtctccctctgtgataaagaaatcatcaaagaaatagaacttaactgatttaaaacggtttttttaagtcataaagaattgaaggttccataaaatggaatcacatcaaaagtgagtcatttgcctgcatcattgacaagctttttttcctgccaatgaagtcagagaaccacatttattcagctctaaaatggtagcttcaaactctactactttcctaaccacaggcagaacatcaataatcac

SEQ ID NO: 343828 - DNA, 583 bp, Homo sapiens
ttgtgttcttattttcaagactctctagctttctatggagagggtctgtaaagcagatgttctggtataaatccatgtgcctggaattattttactccctctggtaagtcatccttctccaatccctttccaggatgtactcctttycagaaatgtgaacacatttgaacactatatattggggaaagcagaaggcaccagcagtagagcatttccatgcagtctccaatgcccatatccttaatctttaaaatgaacaagtcttcaaactgagctaataaaaaattgagttcacagaaaattatctcacagtgaaagaaaggaaaagtaaagaaagtccttgagttgcaaagtaacatataaggtactttaggacaacatctagaactggtctgttttcaaggagctgctgtgacctccctgatactctctgtgccttccaggcactttcagcagaaggggcatgagatgacagctgccatcatttgctcctctctggcggattgatgagaaaagtatgtcctgcctatccctggttttgccataccagcagccttgccattcctcggctcacactaccatt

SEQ ID NO: 343829 - DNA, 583 bp, Homo sapiens
ttgtgttcttattttcaagactctctagctttctatggagagggtctgtaaagcagatgttctggtataaatccatgtgcctggaattattttactccctctggtaagtcatccttctccaatccctttccaggatgtactcctttccagaaatgtgaacacatttgaacactatatattggggaaagcagaaggcaccagcagtagagcatttccatgcagtctccaatgcccatatccttaatctttaaaatgaacaagtcttcaaactgagctaataaaaaawtgagttcacagaaaattatctcacagtgaaagaaaggaaaagtaaagaaagtccttgagttgcaaagtaacatataaggtactttaggacaacatctagaactggtctgttttcaaggagctgctgtgacctccctgatactctctgtgccttccaggcactttcagcagaaggggcatgagatgacagctgccatcatttgctcctctctggcggattgatgagaaaagtatgtcctgcctatccctggttttgccataccagcagccttgccattcctcggctcacactaccatt

SEQ ID NO: 343830 - DNA, 583 bp, Homo sapiens
ttgtgttcttattttcaagactctctagctttctatggagagggtctgtaaagcagatgttctggtataaatccatgtgcctggaattattttactccctctggtaagtcatccttctccaatccctttccaggatgtactcctttccagaaatgtgaacacatttgaacactatatattggggaaagcagaaggcaccagcagtagagcatttccatgcagtctccaatgcccatatccttaatctttaaaatgaacaagtcttcaaactgagctaataaaaaattgagttcacagaaaattatctcacagtgaaagaaaggaaaagtaargaaagtccttgagttgcaaagtaacatataaggtactttaggacaacatctagaactggtctgttttcaaggagctgctgtgacctccctgatactctctgtgccttccaggcactttcagcagaaggggcatgagatgacagctgccatcatttgctcctctctggcggattgatgagaaaagtatgtcctgcctatccctggttttgccataccagcagccttgccattcctcggctcacactaccatt

SEQ ID NO: 343831 - DNA, 379 bp, Homo sapiens
atcacagtggaggtaagaaaagtagattctcacttcatatctcttacttaataattggggatcttaggcacacaacgacaggtccttcacccccagggctggcctccttagcagcaaacaggcttcctgtctaattgacttaccttctttggggggagtgacaaacatgatgattttgttttgtgatactattcaggcaatgttagaacatgggtatattataagttaaaagacttttacaggggacctaaggaatattgcttctcgagttctaccractgatgtacaaaccaagacactcataacacaaggattttgtgatgagcattgctggtaggcagctgactgatcatttaatgttcctcaagtgccataacaa

SEQ ID NO: 343832 - DNA, 550 bp, Homo sapiens
gctttgctaaaggggagatgttggtcaaatggcatacacttgcagttataaatttataagatgaatcagtcctggagacctaatgtacagcatagtgattgtagttgataacaattaattatatacttgaaatttgctaagatatctttaggtttcttttttttttgagatggagtctcacactgtcaccccggctggagtgcaatggtgtgatctcggttcactaaaacctccacctcccaggttcacgcgattctcctgcctcagccttccgagtagctgggattacaggtgcccgccaccacgcctagctaattttttgaatttttagtagagactgggtttcactctgttggccagactgttcgcaaacttttaacctcgtgatctgccaccttggcctcccgaagtgctgggattacgggcatgagccaccgtgcccaggccatctttagtttttatctaatgtcttttttgtcttttagcagccyatccaggataacacacagcatttagtcatcatgtctccttaggctcctcttgaatctga

SEQ ID NO: 343833 - DNA, 617 bp, Homo sapiens
agactgtaagaatatgcacaggttatgcatgatttatgatacacatgtgatttgggagaaagccaggagcctggataaacatttcctagttcatgaattwggggctttctaaacaatttagggcatactattagtaaaatgtctagtttctccaattcctggttactgcagattagtagaatatgtcttccattttaaaaaatttgtattgatacataatatttgtacatatttatggtatacatgtgatactctgatacatatgtacaatgtgtaatcatcaaatcaggatattcaggatatctatcacctcgaacatttattgtgttaagaatgtttcaaatcttctcttctagctattttgaaatacataacatattgttgttaaccatagtcaccctactgtgctatcaaacactagaaattattccttctatgtaactatatgtttgtacccattcaccaacctgtcttcatgtctccagtccccacatccttcccagcccctgggagctataattctactttctacctctacaagataaacatttttagctcccacaaatgagtgggaaacatgagatacttgtctttctgtgcctagcttatttcactta

SEQ ID NO: 343834 - DNA, 617 bp, Homo sapiens
agactgtaagaatatgcacaggttatgcatgatttatgatacacatgtgatttgggagaaagccaggagcctggataaacatttcctagttcatgaatttggggctttctaaacaatttagggcatactattagtaaaatgtctagtttctccaattcctggttactgcagattagtagaatatgtcttccattttaaaaaatttgtattgatacataatatttgtacatatttatggtatacatgtgatactctgatacatatgtacaatgtgtaatmatcaaatcaggatattcaggatatctatcacctcgaacatttattgtgttaagaatgtttcaaatcttctcttctagctattttgaaatacataacatattgttgttaaccatagtcaccctactgtgctatcaaacactagaaattattccttctatgtaactatatgtttgtacccattcaccaacctgtcttcatgtctccagtccccacatccttcccagcccctgggagctataattctactttctacctctacaagataaacatttttagctcccacaaatgagtgggaaacatgagatacttgtctttctgtgcctagcttatttcactta

SEQ ID NO: 343835 - DNA, 562 bp, Homo sapiens
tccctgaaaactttatttgaaatgtattgaaagaccatcaactaacactgaagaaaagcacattgttttctcaaggcaaaagagaaaacatggtattaaagactaatctcctctaaatgttagcaaataggatgaaatttctagactttcatccttttctcaaagacaatacatctgaaactcaagtmaatttaaaaggaataaatttagttctattcttatttgagggcagatgatgacattaagatgcataaccatgcttacagatttataaggatcagtacttttgaaattcttttgaatatttcttaaaatacacttttttaaagatcaaccctcagaattttttaaaacccactggcaagtgactagcctggaaaaaaaatgtatctaggtatttgttcaaccatccagactgccctccatgctttcccacaacacacacacaaagaaagattccccagatccatacggtccactacagttgccactatacacaggtggctatttaaatttaaattaactaaacataattaaaatacaaaattcagttcctcactca

SEQ ID NO: 343836 - DNA, 562 bp, Homo sapiens
tccctgaaaactttatttgaaatgtattgaaagaccatcaactaacactgaagaaaagcacattgttttctcaaggcaaaagagaaaacatggtattaaagactaatctcctctaaatgttagcaaataggatgaaatttctagactttcatccttttctcaaagacaatacatctgaaactcaagtaaatttaaaaggaataaatttagttctattcttatttgagggcagatgatgacattaagatgcataaccatgcttacaratttataaggatcagtacttttgaaattcttttgaatatttcttaaaatacacttttttaaagatcaaccctcagaattttttaaaacccactggcaagtgactagcctggaaaaaaaatgtatctaggtatttgttcaaccatccagactgccctccatgctttcccacaacacacacacaaagaaagattccccagatccatacggtccactacagttgccactatacacaggtggctatttaaatttaaattaactaaacataattaaaatacaaaattcagttcctcactca

SEQ ID NO: 343837 - DNA, 483 bp, Homo sapiens
ggaatgactgaacactttggttttaaatctatttggggatatatgacaagtttgggaattatccttggtatatgttaaaacagagtttaaatggcattctctttttttaaaaaaatttattttatcttgagggagtgcacgtgcaagtttgttacctggatatattgtacgaaattgaggtttagggtattaatgatcccatcacccaggtactgagcatagtactcagtagttagtttttcaacccttgccctctctcttccttcccccctttagtartccccagtttctatttttgccatctttatatctatgtgtacccaatgattagctcctacctgtaagtgagaacatgtggtatttggttttctgttcatgtattaattcacttaggataatggcctccagcagcatctatgttgctgcaaagaatgtgatttcatccttttcatggctgtgtagtatttcatggtgtatatgtac

SEQ ID NO: 343838 - DNA, 623 bp, Homo sapiens
acaagttcctgcaaagacagagctgctgacaatgctgtcatctctttatgtcccagtcacggaggctttcttcactcaggcttccttactagtgatcttggggatgcaaatggaaacaataattagtcacatttttcaccagtcagagtatcacaaaatgaaaagtactgaaacagtaagtgaggtataaatgatacagccattttgtagagtgatttggaagtttcaaaacaaattaacagacacgagaaagtgcacatgtgttttacttctgtgtcctaaagaaactcttctttctaaaaaagatatttttattctttaatcactgaagaaactcttctaatgcatgagtgggtcttcrcaaagctgcttctcattcagaagtgtttgtgaaagtacatctttgaaaccacctaaatgaaaacaataataaaatatcctaagagaataaatatcgtagagtttgcttctcattcagaagtgtttgtgaaagtaaatctttgaaaccacctaaatgaaaacaataataaaatatcctaagagaataaataccatagagtttgttcatacactgcaatacaatccagtggtaaaaaggaatgaatacaacctctccacctaaa

SEQ ID NO: 343839 - DNA, 433 bp, Homo sapiens
acactgatatagccactatccaaacgaagaaataaaacctgctccaatcgctaaccacccttcactccccaaatgtaaccatcacctttactgctaacagtagagattagttttcttatttttcmacattatattaatggaatcagaggcatgcattaggttggatctcatttatttcatttaatattatgtgtatatgacgcattcatgattatatatatacctatagtttgttaatttcattgttgtatatttcatagtgtgaatatacttcacatagccttaaatttcatcctggtctgctttatgctctcttccaatgtgttaagatactttcagtttgtgtggcttattttagatcaaacatcaatgacctcagggcaaatagaaataaaaaaactaaggtagcattttcatgttagggctatcatca

SEQ ID NO: 343840 - DNA, 433 bp, Homo sapiens
acactgatatagccactatccaaacgaagaaataaaacctgctccaatcgctaaccacccttcactccccaaatgtaaccatcacctttactgctaacagtagagattagttttcttatttttccacattatattaatggaatcagaggcatgcattaggttggatctcatttatttcatttaatattatgtgtatatgaygcattcatgattatatatatacctatagtttgttaatttcattgttgtatatttcatagtgtgaatatacttcacatagccttaaatttcatcctggtctgctttatgctctcttccaatgtgttaagatactttcagtttgtgtggcttattttagatcaaacatcaatgacctcagggcaaatagaaataaaaaaactaaggtagcattttcatgttagggctatcatca

SEQ ID NO: 343841 - DNA, 566 bp, Homo sapiens
atatactttaggttcatctccaccacatttcgacctttggttatctcaatttacatatttttatattgcctgtctcttaacatgttcctgtagctattgttttctatagatttgctttttaggctttatactggagttatgagtagattacacagcacaattgcaatattagattattcttaggttgtctacttaattttaccagtgggttttatgtttccaaatgtttcctccttgcatgttagttttgctttctttaagattgaataactccctttagcattccttgtaagaagggtctggtgtggtaaattatcttagcttttgtttgtctgggaaatactttatcttgtyttcataactgaagaataggtttgttggataaagcattcttgggtgacaggtttttttttttttcttttctttcagcagtttggaaatgtttttcctccctcctgacccacatagttttcattgaaaagtctgttgccagacaaattggagttcttttatatgttacttgctttttttcttgatgcttttagaatcaactgtttgtccctttg

SEQ ID NO: 343842 - DNA, 493 bp, Homo sapiens
aaaaaaaaaaaaccactcaaaaaaaatatattactacattctcactgaaaaaaaccacaaatttttttgcaaaaactgaaaaagctgaatttaatgaaccactggaacttgcccccaccaataatggaaaawaagttagtataattaccttgaaaaacgtattggcaggaacacttatagttaaaaaaatgcttatctagtgacctaacaattccacttgtatgtaaatatccaaatgaaatgaaagttattgttcgcactgaaaacatataaagacatattcaaagtaacttcatgtactgtagctaaaatgcataaacaatacaaatattcatcaaaaataaaatgtgccctgcacagtggctctcgtctgtaattccagctattcaagagactgagatgggaggattgcctgaagcccggagcttgagaccagcctaggcaacatagtgagactcccctatcatctttaaaaatagttttaaaaattagt

SEQ ID NO: 343843 - DNA, 641 bp, Homo sapiens
tttgttatatggtgtgttcttcaatctaccatgactcatgaaccatattttataatgtctgctttataaacgtgtttcaagttgtgaaaataatatgtacctcatcaaaaagtaaagaagagcagcattccatggaaaggcagcattgtagaacactgaccttttcacatttatcatgtagctctcttgcctctctaatggatatcttgacattttcatttgaaacgatagttgtgttccctgacatttttgtctccgccattgaaatcataagggctagcagcaattgtttgcaattacctggcatgtgaatcatttgcagttataagaarcataaatatatattttagcacaaaatgctttgggatatatctcagatcacagagattttgcatttgtttatgcaagtgattcagtagcttacctgatttgataagattacagctataaatgttaattgtacatagcattcttttgagtctaaatatttttcaaatataaattgaactgaatgctcatattctcaaagttttttgaagatttgtttttataagctaattaattcgtttatacttttcattttgagtttaaatataacatgaaaaatataaatatacttttcaataagtaagcatgtatat

SEQ ID NO: 343844 - DNA, 488 bp, Homo sapiens
tttactactttaataaatatttttaaaaatcagtatatgagacattcttgagctttmtatgagctttaaataactgaaatgtctagataagttcatattatcactgacacagtgactatttttacctccagaatggaattttttacctcaatgtaagtcaattactgagattcaaattctgttagggaatggtatagacatccaatattttcgtttcagatcataagaatatcttgacatgaatacattcctgtattttatataataattattcacaaagataatatattcccctattttggtgtttctgaacaaattaaagtagaaaaaaaattcttaatgtatctaagttagagaaatttcctctgctccctctttatcctctcttttctcctgactgaagtcacatggaatatccaaattttggaaacatagtattttttaaggttgtttcttgtcctacccaagaacatttcactatttccttc

SEQ ID NO: 343845 - DNA, 488 bp, Homo sapiens
tttactactttaataaatatttttaaaaatcagtatatgagacattcttgagctttatatgagctttaaataactgaaatgtctagataagttcatattatcactgayacagtgactatttttacctccagaatggaattttttacctcaatgtaagtcaattactgagattcaaattctgttagggaatggtatagacatccaatattttcgtttcagatcataagaatatcttgacatgaatacattcctgtattttatataataattattcacaaagataatatattcccctattttggtgtttctgaacaaattaaagtagaaaaaaaattcttaatgtatctaagttagagaaatttcctctgctccctctttatcctctcttttctcctgactgaagtcacatggaatatccaaattttggaaacatagtattttttaaggttgtttcttgtcctacccaagaacatttcactatttccttc

SEQ ID NO: 343846 - DNA, 575 bp, Homo sapiens
cctacatgaccaacacataccatttgccacaccaagttgtcctctgttcctagacttggctaaattgctacacttagatcatggcctctagctttctgagtacctgctatggagcaaaataatgtaagataagagtgttagcacccgctaagaaatggaagacaaaatagagctacaaaataaatgtctcttcatttctcccttctgtggataactctgagaactggcttctccttgaaattctagagaaaatccaccatgcagcaygaacacacatgccaattgaatcacatgcctcctcatggttaatcatgaagcagtggccagcacagtaacacactgcattgttttacatgtatctttgcctcacttcccttttttttccacgcttatttccctgttcttatgccttgcaaatacagtgtcagcactttaatccttgcttaaagctctgcatccaagagtgattctagaaaacaattatcaggatggaattatgagttgaatgtcccatttgtcttaaagtaataggtattccattgctggtagtacatggccagtaacaactccttggc

SEQ ID NO: 343847 - DNA, 575 bp, Homo sapiens
cctacatgaccaacacataccatttgccacaccaagttgtcctctgttcctagacttggctaaattgctacacttagatcatggcctctagctttctgagtacctgctatggagcaaaataatgtaagataagagtgttagcacccgctaagaaatggaagacaaaatagagctacaaaataaatgtctcttcatttctcccttctgtggataactctgagaactggcttctccttgaaattctagagaaaatccaccatgcagcatgaacacacatgccaattgaatcacatgcctcctcatggttaatcaygaagcagtggccagcacagtaacacactgcattgttttacatgtatctttgcctcacttcccttttttttccacgcttatttccctgttcttatgccttgcaaatacagtgtcagcactttaatccttgcttaaagctctgcatccaagagtgattctagaaaacaattatcaggatggaattatgagttgaatgtcccatttgtcttaaagtaataggtattccattgctggtagtacatggccagtaacaactccttggc

SEQ ID NO: 343848 - DNA, 560 bp, Homo sapiens
cttgtccaacccacagcctgtgggctacatgcgctttgaatgcagccctacacaaattcgtaaactttcttaaaaygtgattttatttttgcaattttttttttagcttatcagctatcattagtgtttagtgttttttggtttgtgtgtgtgttttttgagattgagtctcgctctgtcacccaggctggagtgcagtggcaccatcttggctcactgcaacctctgcctccttggttcaggcaattctcacgcctcagcctcccgaatagccaggtttacaggcatgcgccaccatgcccggctaatttttgtatttttagtagagacgaggcttcaccaccttggccaggctggtctcaaactcctggactctagtgatccacctgcctcagcctcccaaagtgctgggattacaggcatgagccaccacgcccagccagtgttagtgtattttatgtgtggcccaagacaattcttccagtgtggcacagggaagccaaatgattggacacccctaagcagcagaaggtcatgtgagatgatgactcatggtgcta

SEQ ID NO: 343849 - DNA, 327 bp, Homo sapiens
tgtcaggcaatgtcatcattgtacacaaacctagataatggctaatgaagtggctgattgcttccagactattaacctgtatagcatgttactgtactgaataccgtagactattttaacacaatgataaatatttgtataactaaacatatctaaacatagtcaaaatagaatattaaaatattatgggattatcatcatatatgtggtccataatkgaccaaaacatcattatattctacataactatatttgcaaatcatatatcacaaacccagttttggctattatgaataaagttgctatgaacatttgattacagatatt

SEQ ID NO: 343850 - DNA, 585 bp, Homo sapiens
ggttgtttcccctggcaaccagcccccatcctgaggccatccaagagcccttcaagagttgcctcattagaacaaaagatgctcctatcacccaagaaatttcaaaggatttaggagctctatgtygatactcctgtcactcaggaaattacaaaggtcttaggagttctatgtcagaaatcatggtcaaagaccaattattagaacaaatatttttctagtgccccatctacaagggttttaggagctgtgtgccaggaatcaggggcagagaataaatgtatatttcttattatatcacaatatcaaattttgcttttctgtttttacttatgtcttagtctgtccaggctgctatgccaaaatactataaaccaggtggctcatatattaacaggtagaagcattattggatttatttctcagttttggaggacgggcggtctaagatcaagacactagcagatttggtgtctggtgaagtcccacttcctggctccttgccttcttgctgtgtccttacatggtggaagggagtaaccagctcttgggggcctctgttgtaagggcactgatcccaatcat

SEQ ID NO: 343851 - DNA, 592 bp, Homo sapiens
aaagccctgagggacagatgggaggcatggaagctgggggaggggcaaggaggtggcagaagagcacagtaggggccacagggtcaagggggctttaatgcagccctaggcatggtgctggctggctggtggctggcaggacctattagcagctwgctcagtggctccttcaaattgaaaggtcacagcatcctggccatacccatcaggggagggaggactaaaggaggaaaacatttttcccctcagtatattttccaatatgaaatgggcatggatgaaagaaatgtcagagaagagcaatgataaattttctctttacatcaagaagaccaagttcaagtctgcatctttttttgattagtttcttgcatattgcctaatgcccacctagcaccaccagatgcaaactatagaggctgcatatgtgttttagggagtccctataatatgttctgtcctgttgagatgacacattgacaaatgaataaagcagatccctacataagggggcgtgtggtcttgtgagaggaggctgggcacacagctccaaaggcagagaccctgagtcacccaatcttggagtgatgct

SEQ ID NO: 343852 - DNA, 592 bp, Homo sapiens
aaagccctgagggacagatgggaggcatggaagctgggggaggggcaaggaggtggcagaagagcacagtaggggccacagggtcaagggggctttaatgcagccctaggcatggtgctggctggctggtggctggcaggacctattagcagcttgctcagtggctccttcaaattgaaaggtcacagcatcctggccatacccatcaggggagggaggactaaaggaggaaaacatttttcccctcagtatattttccaatatgaaatgggcatggatgaaagaaatgtcagagaaragcaatgataaattttctctttacatcaagaagaccaagttcaagtctgcatctttttttgattagtttcttgcatattgcctaatgcccacctagcaccaccagatgcaaactatagaggctgcatatgtgttttagggagtccctataatatgttctgtcctgttgagatgacacattgacaaatgaataaagcagatccctacataagggggcgtgtggtcttgtgagaggaggctgggcacacagctccaaaggcagagaccctgagtcacccaatcttggagtgatgct

SEQ ID NO: 343853 - DNA, 547 bp, Homo sapiens
tcatttgtacctctccttttaagctaaatattaaaactttttaatggagattatttactaagccaaccttgtgggaattgctttactcactctactatttgcagtaggactatgtactgtagcaccctcagggtggaatattggacagagaatctcaattactgtagtattttgcttaattattatcttcatagcaagaataatggttactaacagaaaataacacatgggcctttccaaacatgtgtatctgcctctcatcgggtaaggaatattgtttytatctcaaccaatcaggcctagttagagacactgctgaaagacttgaaagggctatgaagctaagggaataccaaaacaatgaaatagattatttgtttgggaacaaaatcatagcgtgggtcatcccattcctgggccctctcctaataatatgcctagggctaatgttcttacccttcctaattaacctttctcaaagattattaactgtcagaatcatggccatttcacagacaactaccccaaaacatctacagaaggcatt

SEQ ID NO: 343854 - DNA, 506 bp, Homo sapiens
gataggctgagtggaaaatatttccaaggccaatattaaggctccaccttcaactctctgagtgctagtaaatccaaaacgagtgagggaattatgcagtctccaccaaacagccaatattccacatttaccagagccatcagtaaacagttttaaagtgttwggtatgggggattgaactattttagtaggcaaaaaccacagaagtatgagataaggactgaaggagtttgtcagcagaaagggcattctctatatggcctgtgtaactggagagtgctatttgcagttccatagataagggcaatactgcttcgagttgctttttacttaaaggaattctgataatatcagggtcacaacctagcaactgattgcatcatctgcagtctgaatagatgactttattgactaactggatatagggagagagtgttttagtcctagcatgtgagcaaaaaaccattctaggaagtgcagacctagggtcatctgtcctattaacc

SEQ ID NO: 343855 - DNA, 483 bp, Homo sapiens
taaagttggtaaaaatgggcatgcttatggttgtaattcttccattgcttaactcaaatgatgctaaaatttttctcctaagcasttttttctcttgaatttgacctagagtcaccagccttcccaattcaaagtcagtcaacagaaaattataatcagtagtacaggcactctgccatatgtatggccttgccaagatgttgctatagtcaccagatttgtgtcaaatggtaaacaaaattgaaggctggcaactatagcttatttctgtgtattagcaggtttattttcagagttatagaagtcctcatgtaaaagctctcaagttattataatttcagggacaaatattaaggtaagcagcaacgtcaatattataaaatcaatttttcctatgaagttctttttcagtggggagatgaaacagtagtcagaaacaatgtctacaacttgacctgtgtatttccaggcatttgagcaagg

SEQ ID NO: 343856 - DNA, 558 bp, Homo sapiens
agtagaaattaggattatttaataattatgcatctgatacctctttataacacctaagaattaaattatcctctgcttcatttgggaccattataaatttacattagttccttaaagatgcttcaccaggattcacttaatttcacgtggcagaaccttgaccagtttatttcaggagattgtaaaacaaagagwtcatgtaaactgcataaatgtctcctgactcacaggtaacctgtctatcattgaatactgtagatcatgacacatttatttgtttaaaatgtcagccttgcatttgcttgggtggctggcctggtacagtttgagagtcacttaactaatgctgagccatttgttattgttttatttttgtttttgtttgagccatctgggaatttagattaaatctagctactattagagaacctaagggaaatttttagatttatgtgctttttttctgaatgaatggattttacagaaatttacctctccaagatttggaattacaagataatttagttagacttgagcttttaaaaaagtccaaaaata

SEQ ID NO: 343857 - DNA, 605 bp, Homo sapiens
aatttttagatttatgtgctttttttctgaatgaatggattttacagaaatttacctctccaagatttggaattacaagataatttagttagacttgagcttttaaaaaagtccaaaaataaatcaaaaccctctaaaatccacaaagtttctctagatgactcctatcctgtgctagctcttcagacttaccctgattatcacctcatatttcaaaacatatttgaaaaagaagaacaactttgaaagactgtcattatctggtttcatggcttactgtaaagcaaagctatgacagtcaagactatacacaaaacaagacatttcattactattatgagaggtattttgttactataatttggtattaatgtaaagatagacaatagatcaaacaataaactggatttaatcaaaatgaaaaatttctgcttatcaaaaacactgataaaaaatgacaagtgaagccacagrtagggagaaaatattttcagatcgtacatcttatattggatttatatccaaaacttatagacaaccctcaaaatcaataagaaaataatccaataaataagtgggaaattgatttgaacagacactttacc

SEQ ID NO: 343858 - DNA, 548 bp, Homo sapiens
tgcagaagaatgaaatagaccgccaccyttcatcctatgcaaaaatcagcttaagctccatcaaagacttaaatgtaagacctcaaactttaaaacgactaaaagaaaacacaggggaaatgcttcagaatattgggaatttggggaaaaggggttgttttaaaaccctttaaagaacaggtaacaacagcaaaaataaacaaatgagattgtatcaaatcagaaatctgcacagcagagaaaataatcaatagagtgaaaaggcaacctacagaatgaaaaaaagaattatttgcaaacttctcatccaatgggattaatatgcagaatatacaaggagcttaaacatctcagcagcaaaaacacaatgtgattaaaaaatgggcaaatgatttgaacagatatccctcaaaagatatagaattttccatcaaatgtattttaaaaatattcaacaacataaatcattagagaaatgcaaatcaaaaccacaatgaggtatcattttgaggtaagacacctatagaacttgcttctagaaccagatg

SEQ ID NO: 343859 - DNA, 548 bp, Homo sapiens
tgcagaagaatgaaatagaccgccacccttcatcctatgcaaaaatcagcttaagctccatcaaagacttaaatgtaagacctcaaactttaaaacgactaaaagaaaacacaggggaaatgcttcagaatattgggaatttggggaaaaggkgttgttttaaaaccctttaaagaacaggtaacaacagcaaaaataaacaaatgagattgtatcaaatcagaaatctgcacagcagagaaaataatcaatagagtgaaaaggcaacctacagaatgaaaaaaagaattatttgcaaacttctcatccaatgggattaatatgcagaatatacaaggagcttaaacatctcagcagcaaaaacacaatgtgattaaaaaatgggcaaatgatttgaacagatatccctcaaaagatatagaattttccatcaaatgtattttaaaaatattcaacaacataaatcattagagaaatgcaaatcaaaaccacaatgaggtatcattttgaggtaagacacctatagaacttgcttctagaaccagatg

SEQ ID NO: 343860 - DNA, 622 bp, Homo sapiens
tatgccttttaacttccattatcatctgcctatggatccctctgatccagttctctttcctagggcttccacctgaaacttggaattgagtttgggaccaaaaacatgtctcagggagggggttgcatggactctttattataagctgaatgctaagatgaagctggggaattcagttctcctccaacaagggmgagaaaaggatgtcctgtgacatgtgcagatgactggtgactataattatgcttgctaagatttgggtgcatggggcttggctttgactagctccctgggtcttactttcctaaaaaggaaacctccaggtgatgggcatcctatttagacccatcactagacaggatttgcagataattgctcagaactagaatattgatctcaatttttacattacccatcattttttattccttataagctgctgttggagatcactggatggttcacagggataagcagagttagtttaaactgtaggcaagaacttaaaaacaaccaatgagtctagaatttaatgacaaatgtataagatttgtagcataatttctctctctccagtcttcatttctgttaaaaacaaatcatcatagtattgagttattgg

SEQ ID NO: 343861 - DNA, 622 bp, Homo sapiens
tatgccttttaacttccattatcatctgcctatggatccctctgatccagttctctttcctagggcttccacctgaaacttggaattgagtttgggaccaaaaacatgtctcagggagggggttgcatggactctttattataagctgaatgctaagatgaagctggggaattcagttctcctccaacaagggakagaaaaggatgtcctgtgacatgtgcagatgactggtgactataattatgcttgctaagatttgggtgcatggggcttggctttgactagctccctgggtcttactttcctaaaaaggaaacctccaggtgatgggcatcctatttagacccatcactagacaggatttgcagataattgctcagaactagaatattgatctcaatttttacattacccatcattttttattccttataagctgctgttggagatcactggatggttcacagggataagcagagttagtttaaactgtaggcaagaacttaaaaacaaccaatgagtctagaatttaatgacaaatgtataagatttgtagcataatttctctctctccagtcttcatttctgttaaaaacaaatcatcatagtattgagttattgg

SEQ ID NO: 343862 - DNA, 509 bp, Homo sapiens
tggggttcactcagcaggcaattgccatggtgcccttctttcttccttcctgcctggaatataaatgtaataactgaagcagactatcttatagtaatgatgtaaccttgagcatggaaattactaaataagatgtacagagcagaacataggagtctgaaattctagtaatgtctttgaacttccacgacaaacctggtctgcctttctaatacaattcacatatgacagaaaaataaaacaattgaaaaatactagggctaccatgaatctgggtctctgttaccagaagctgaacacaggtcatatctcattcaaggtaattagtacagtttgtaaggcctgtttcttactaactgtaccaattamcctaacccacccagtgacttctcttcagggaaaagactgaagagaagtcaccaggaaggttagaaacattaatttattcagccactgctaaatgcataatatggaattatattagtcattgacaatatagtggcagaaag

SEQ ID NO: 343863 - DNA, 648 bp, Homo sapiens
gccctgtgttttagggtggtttgttatgcagcaaacagcgactagaagttttgtctgtgtgtgtgtgtgtgtgttgtttgtgtgtgtgtgtgtgtgtgtgtgtaatgcaaacccataagcatgtacataagtggcttcttcctacacatctacacatcagttgaattttttggaaaaaagcaagaaattactaatttaccactcaaactcaaaatattttttaatataattatcttgatggagacatgttttcctaatagtgaaagttttaactgtatttgtatttmcaatggtgtacacttagagcataataaaatgaggtgtgtcttagcatcacatgctgttgctatatttgaaataaattcatttgaacttcatacgtaaagaatatattgaaaaatcccataatacaggcatccatactgaatgcctgcctttttttcttttcaacatatgaaagttgaaaccattgaccaaagtgatgtattatttctggagacatttaccaaatggatgaataaataaattattcaaaatataagcataaaaagtatatttaatgttgttgttatgtaagtaaatattttatttttccaaaggaaattgtaagatattctgtatagccaaatagatgtattaaagaaaatc

SEQ ID NO: 343864 - DNA, 471 bp, Homo sapiens
gtcttgtccacattatatagaaggaactgaatcttagcaagtttaaatggcttcctatttcactacattggtgctagctctgattttggaacctgatattttgattttaaatcactaatgtttaaatgttttattaaactaaaagctcaatattttctgaattgtttggctcttcaagaacattactgaaacgtgcctacaaaagaaatgcaactctattatacaaataaagtaattggaaagaaggaatctsaccatataatgagtgaggttcaatagaacatagaattcaaattatttacatgcaattgaaataacaaacttttacaaagtaaaagggcaaaggtagtcattgaaaaaggatacaattaggcattgtgaaattgttccccatgtcaggtaaccaaaagcaaacatcctatgacaaaattctgagccattgtgatgtagaatttctgattatcacaaagt

SEQ ID NO: 343865 - DNA, 501 bp, Homo sapiens
aaggtatttctatgtttggttttgctcccttatctgtgcagctgcagcttgatttttcaggctgtttctatgtttaaaagaattctaccaagaacctgtcttaactgtctgtcaactgttttgttccccgcctccaccctccgccattccccatttcccaggaatgaaaaccctaagtgcragtagggacattgtgcattgatcgttcagactacttcatgctggagagggcatcatatgggggacagcagctgggatttctcctgtgatcaatctaagggtcctcttaagaagagcacatccatgcgtggttctatttgtatcactatttggagcatgataggctctaggcaaaaagaaacaatttaggttataagagaacatgtgttaaaacaagactggggttaatgacgttttaaaaattccgaggctgctgacacagttggataactgatgattgtagttatgtctgttaagatttgggtgcatgggctgggcttt

SEQ ID NO: 343866 - DNA, 592 bp, Homo sapiens
cttgggtgtttagataaatgaaaacttatgcaaccacaaatatctatatgtaaatatttatactggctttattttttaataaccaataatcagaatgtaaatgttgtttagctggtaaatgagtgtgcaatcaatgatatgttcattatacaatgaatgctgcttagcagtaaaaaaatactactaatagatgcaacatgtggattaatctcaaatgtattatgtgaagtaaagaaagcaggattcaaaaggcagcgttccatttatatgacattttgtaaaaggcaaatttttatgaaaagaaatagatragtcattcccaaagttggttgtgtatgtggaaaagtgggaagagctgactgtataaagtggcttcaagactaaatttctttgatgtggtgtaggttttctttttttcatcttgagtatgtggtgattagacaattgtaggtgtttataaaaactcgcagaaatatacactgatataagctacttttactttctctaaataaaaattaaatttaaaaagtgcattgaagaacatgacagaaaatgtatttcagacttaggttttgagcttaaatagtttaca

SEQ ID NO: 343867 - DNA, 432 bp, Homo sapiens
acccaataataaactcttacataagyagtcaattgaataacccagacatggtggctcacacttgcaatcccagcactttgggaggccatggtaggagcatcacttgaacccagaagtttaagaccagcctggtcaacgtggtgagaccctatctctacaaaaaatttaaaatttgccaggcatcgtggtgcatgcctgtagtcccagttactcaggaggctaaggcaggaggatcacctgagcctgggaggtcaagactgcagtgagccatggattgtgccactgtactccagcctggataacagagcgagactctatcgctacaatttaaattaaaaaaaattaaagatcagttgaatttcgcaagggtaccaagataatttaatggaaaaagaaaagtttctgcaacaagtagtactagaaaaactgaat

SEQ ID NO: 343868 - DNA, 572 bp, Homo sapiens
  misc_feature (1)...(572): n = A,T,C or G
ataaagctggaagccattatcctgagcaaactaacacaggaacaaaaaaacaaatactgcatattctcacttataagtgggagatcaacaatgagaacacatggaaactgggaggggaacaatactggggcctgttgtggggagggtgggggtggnggaaagcactaggaaagagagttaattcatgctgggctttataccttgatgatgggttgttaggttcagcaaactgccatgacacatgtttacctatgtaacaaacctgcatatcctgcgcatgtacccaagaactttaaaaaatggaataattaaaacaaaaataaaaaagcggggacttcaagggatatttgtagacctggattcatagaaacattatttgaaaaagctaaaacatagaagcaacccaagtatccgtcatcagatgaattgataagcaaaatgtggcatatacatacaatgsaatgtttttcatccttaaaaaggaaggagattatgttatattttacatcataaatgaatcttgaatacattttgctgaaagaaataagccaatcccacaaagacaatactgt

SEQ ID NO: 343869 - DNA, 582 bp, Homo sapiens
gtcactggcccactgtgagaaaggtacaaaaattcagaggaagtatttagaaactttggtagaaatttgacattattgaggtatccaaagtctttgttagcagactcatgccatttagtaagatatagaccagttcaactgatgtcaaatatgaatagtttatcacttggggcatggtctgttagcaagttatgcacagaagtaccaggtattagctcacaatggattacaaacaaaaagtaaaaaagatatactaacatagctagcttgataagcattggccttcctagacctaatgaggttagagtatttataataaaaaaatactttaaatggcttcacwattatagaactctactctaaaaaagagtaatattatatcaatggagatacggagtaccaaacattgggcaggatatgcaatggggggaaataagtagtagaaagaacgtattccacgtattaaaatatatatgttcatgtatttaatataaataaattaaaagccaaataataaaaataccaaatgacagtaaatgataaattatagagctaaataaatgaaaatcaaactagcatttt

SEQ ID NO: 343870 - DNA, 537 bp, Homo sapiens
tggattagaagagtttctagtggaaaaagccttggtaatacattctgaaaacattaaaattttagtgtttaatcagtgccctcattagttggagttagtgtgtgatgcataaaatgcctttttacaaatagtttgttgatacatgagataaaggcacatataagtctacttaatagttctttctatctgtttaatagtattaatattttctccatatgagcttaatgtgtttatatttcattaactaccatgtaagcaataactttgattctagaaatcctggaaatttatagatggtttgagttgagaacttcagtatttttattctttttgaaaaataatttcattgactatttaaggtacttttccccagttgtattgattacttttcagtayctattcacatagcatcagtctgaatcctggtatgtgtcagaagtgcatgaaaccatactgttaaatttgtatttcaaaaattgaaatattctacattggtaaattagtaggtacaattattgttaatgttataatttaaca

SEQ ID NO: 343871 - DNA, 594 bp, Homo sapiens
atgagttagatagttgaagttcagtattataaattggcttgaaaacttttgccactgctgatcatgcttaaaactaaatgaccaaatgtaagttgaatcctaactatgaatttcactaatagattttagtgctgggcagccacatatsctaaaattataatataattacagctggattctaaaggtcaaagatataaaatattaaagtttgaatgagaaatattatatgggttttaatattcaggtttcaaaagtaaattataagaactggaatatcaaaattagcattgtcagttatacatacctgcaaatatttgaatttattacacatgtcttagtttctttttgttccctatagaacatttgttcttaaaagaaatcaatacaattttcagcttgatatccccttctgtttaataaatagttttattaggtaaactattacattttaaaaatccttacatcatctccatctgtatcaccaacaagagttaaatttataaccgggacaactttccataaatagtcatagtttcattttttttcttttgcttattttgttttatttgttgtcaattctccaaagttagtgtt

SEQ ID NO: 343872 - DNA, 594 bp, Homo sapiens
atgagttagatagttgaagttcagtattataaattggcttgaaaacttttgccactgctgatcatgcttaaaactaaatgaccaaatgtaagttgaatcctaactatgaatttcactaatagattttagtgctgggcagccacatatgctaaaattataatataattacagctggattctaaaggtcaaagatataaaatattaaagtttgaatgagaaatattatatgggttttaatattcaggtttcaaaagtaaattataagaactggaatatcaaaattagcattgtcagttatacatayctgcaaatatttgaatttattacacatgtcttagtttctttttgttccctatagaacatttgttcttaaaagaaatcaatacaattttcagcttgatatccccttctgtttaataaatagttttattaggtaaactattacattttaaaaatccttacatcatctccatctgtatcaccaacaagagttaaatttataaccgggacaactttccataaatagtcatagtttcattttttttcttttgcttattttgttttatttgttgtcaattctccaaagttagtgtt

SEQ ID NO: 343873 - DNA, 631 bp, Homo sapiens
tattggtctattcagattttcgcggtcttcctgaattaatcttggaaggtgttgtgttcccaggtacttactcattttctctagattctctatttgcaaagaagtgttaatttcataatagcttattggaatcttctatgtttttctgggattggytgtattatctttgtcagttctaattacacttatttggttattcttttttttgttctctttttaaatctagctagcagtctattaatcattcttattctctttaagaacacttttggttttattgatcttttgtttggacttgtgtgtcctaaattcattcagttttactctgattttagttatcaattttcttctgctagatttggggctgtttttatctttttctagttcctctaggtgcaatgttacattgttatttgtaatttttctaagttcttgatataggtgttcagcactataaactttcctcttaacactcctttaactgcataccagatattttggtaagttgtgttcctatattcattaatttcaaataattttatatttctgccttaatttcattgctcactcaagagttattcagaagcaagttgttcaatttccattttcgtgtgtgtgtgtgtagttcaag

SEQ ID NO: 343874 - DNA, 550 bp, Homo sapiens
cgtgtttggaatgactcttatttttttttaacttagacttgctttatgaatgagyacatggttgatcttagaatatattccatatgtggatgagaggaatgtatattctgtagttgttggatggattattctgtaaatctttattagatccagttggtcaagtgttggatttaagtccagaatttctttgtaagttttctgccttgatgatctttccaacagtgtcagtgaggattgaagtctcccactattattgtgtggctatccaagtctttttgtggctctctaagaacttgttttatgaatctgggtgctccaatgttggctgagtatatatttagaatagttaagtcttcttgttgtaatgaacactttatcattatgtaatggtcttcttcgttctttctgattgtttttggtctaaatctgtttttatctgatataagattcatgactccttctattttttttttttttgttctccatttgcatggtagatctttttccatccctttactttgagcctgtggctgccattacatatgagctg

SEQ ID NO: 343875 - DNA, 545 bp, Homo sapiens
tctttcttgtttgctgaagcatttattatagttaattctaagaacatgagactgaaaagtaaattggtctagtcgtaaaagcccgaaaatatctttactgcctctgtacaattgatggctagtttaactttgtatataatgcaacgaaagtatattctaggacaactcgtttcagcattttgggccctttgtttcaatttattcttattatccagtactattgagattccaaataatgtgtacatgatctccaaatatcagtgactcatttcttcaagaattatcctcaaatagtttacctgcatgttaaaattgagactcatgaaattgtaaagaggagacagcggatatgacttaacattcagtatagaattttggtattatctttgtttyctttttttacctctttcccaccctactctgcctaataaccttagttttctatctttaacttcaacagggacagacattgattatcctttggtaatctcttctacaggtggaagaaattaggtacaggctacgaaaaataaaggaatggagtc

SEQ ID NO: 343876 - DNA, 405 bp, Homo sapiens
ctgattggtgcatttacaattctttatccagacacagagtgttgattggtgtgtttttacagagtgctgattggtgcatttacaatcctttagctagacacagagtgctgattggtgcgtttacaatcctctagccagacagaaatgttctccaagtcctcactcaacccagaaagtccagctggcttcacctctcactggtaccaaaaagaatggggaccactggtttagaccatttacattcaaagttagtattaatgtgcaagattttgaaccagtcaccatcttgttagctggttgttttatagacttgattgtgcagtytctttatattttttctgtactatgtgcttaaggatgcttctggggtagcaggtatcagttctttgtgtccatatttaatat

SEQ ID NO: 343877 - DNA, 601 bp, Homo sapiens
acataccatttcaggacatatgaatttcttcattgtgtgaccttctgttcactaactaaaatgggtgagagaagaaaacaaaaatgamcctatttacagtggaaatgggaaccaaagcaactaatcttaagtttgaacagctcctacttcctctccatctcagaggcacagaaacaaatgggtcagatctggttgccatgtgtgtagacagccagtagcaattctctgccagcactcagctgacaaagtagacctagagaacagagatgggtggaaaggggtgggaagagaggttgtttctctctccagtttttcagaaaacactaatgacctgttgagaaagaaaacagagcttgtcaacatgtatgtggccctacgacacacttcaagtaagatatatgtgatagccaggtacattttataaagtgtatctggtgcatgattctcctgataaactgagatttttggcttaaagagtaaattgatcttggggctaaagcggggctgaggaggtcctctgtggaagctatcataacatttctgagctacaaggatatatgatcagctcctatgatctagagttggcaaaattgtgcacgtg

SEQ ID NO: 343878 - DNA, 601 bp, Homo sapiens
acataccatttcaggacatatgaatttcttcattgtgtgaccttctgttcactaactaaaatgggtgagagaagaaaacaaaaatgacccwatttacagtggaaatgggaaccaaagcaactaatcttaagtttgaacagctcctacttcctctccatctcagaggcacagaaacaaatgggtcagatctggttgccatgtgtgtagacagccagtagcaattctctgccagcactcagctgacaaagtagacctagagaacagagatgggtggaaaggggtgggaagagaggttgtttctctctccagtttttcagaaaacactaatgacctgttgagaaagaaaacagagcttgtcaacatgtatgtggccctacgacacacttcaagtaagatatatgtgatagccaggtacattttataaagtgtatctggtgcatgattctcctgataaactgagatttttggcttaaagagtaaattgatcttggggctaaagcggggctgaggaggtcctctgtggaagctatcataacatttctgagctacaaggatatatgatcagctcctatgatctagagttggcaaaattgtgcacgtg

SEQ ID NO: 343879 - DNA, 323 bp, Homo sapiens
cagtgtggtttacgatgaacaatactttccttacaggaatctggaacttgggtataataccaagcagagggtgcttacatgatcagcccccagtaagaaccctggacactaagtctctaatgttggtaacgtttcacatgtgttgttacaactcatggctgggggaattaagggaatcatgtgtgactaccctggcagaggacccttggaagtttgtgcctggtctacatggactttgtcccatgcactttttccctctgctgtgcttgtcctttcactgtaataaatcatakccatgagtaccattatatgctgtgtcctgt

SEQ ID NO: 343880 - DNA, 599 bp, Homo sapiens
ctaaaaacctgccccaggcacacttgactcaataattctactagaaactttatcctacagaaatacataaggttacaaagatatatataagaaagttcatttgcaacattgtcagcattagtgaaaaactgggaagcaacccaaatgcccagcaacaaattaaataaattattaatatatccatacaaagaaacaccatgtagcaattaaagagaataaactattcctatatactcacaaggaaagtcctctaaaataaaatcttaagtgggagaaaaattgaagaatggtctgtatacactaatacrtatactaaaatatgttgctgttactaggcaaaaaaaactataagggaacaacacagcaatcctaatgaggattcctgggacttttgtattttatatacttccataatgtttgaatataaaaggaaaagggcatagattttcggttttttaatggaaatcagaaaaaaattgattaagaacagaaataggaatagttatatccaaatggtacaaaaagtgttggcaactatcttgcaaagaggtcctcagtaagtctaccaacccaggtcacagtcaactgcagtcaactgc

SEQ ID NO: 343881 - DNA, 599 bp, Homo sapiens
ctaaaaacctgccccaggcacacttgactcaataattctactagaaactttatcctacagaaatacataaggttacaaagatatatataagaaagttcatttgcaacattgtcagcattagtgaaaaactgggaagcaacccaaatgcccagcaacaaattaaataaattattaatatatccatacaaagaaacaccatgtagcaattaaagagaataaactattcctatatactcacaaggaaagtcctctaaaataaaatcttaagtgggagaaaaattgaagaatggtctgtatacactaatacgtatactaaaatatgttgctgttactaggcaaaaaaaactataagggaacaacacagcaatcctaatgaggattcctgggacttttgtattttatatacttccataatgtttgaatataaaaggaaaagggcatagattttcggttttttaatggaaatcagaaaaaaattgattaagaacagaaayaggaatagttatatccaaatggtacaaaaagtgttggcaactatcttgcaaagaggtcctcagtaagtctaccaacccaggtcacagtcaactgcagtcaactgc

SEQ ID NO: 343882 - DNA, 599 bp, Homo sapiens
ctaaaaacctgccccaggcacacttgactcaataattctactagaaactttatcctacagaaatacataaggttacaaagatatatataagaaagttcatttgcaacattgtcagcattagtgaaaaactgggaagcaacccaaatgcccagcaacaaattaaataaattattaatatatccatacaaagaaacaccatgtagcaattaaagagaataaactattcctatatactcacaaggaaagtcctctaaaataaaatcttaagtgggagaaaaattgaagaatggtctgtatacactaatacgtatactaaaatatgttgctgttactaggcaaaaaaaactataagggaacaacacagcaatcctaatgaggattcctgggacttttgtattttatatacttccataatgtttgaatataaaaggaaaagggcatagattttcggttttttaatggaaatcagaaaaaaattgattaagaacagaaataggaatagttatatccaaatggtacaaaaagtrttggcaactatcttgcaaagaggtcctcagtaagtctaccaacccaggtcacagtcaactgcagtcaactgc

SEQ ID NO: 343883 - DNA, 602 bp, Homo sapiens
attttaccattgtccctctctgtctagtaatattttttgtcttaaagtcaattttttcttatattaatatagctactgcagttcttttatggttgttgattacatgagatatcattttccatccttttactttcagcctgtttagctctttgaatctgaaatgtgtatctggtagaaagcatatgattggagcttgttttttatctagtctgacaatctctgctttttgattgtttagtccattcacatttaatattatcattgatatagttgggtttttgtctgccrttttactgtttgttttttgtatttctgatgtttttattcctctgttccttctttactgacttcatttgtattaaatgggtatcatctaatgtgtcttttaaattccttttttgatttttgaatgtattttatcaggatcagtttccaatttattcagacttaattctggtaagatatagaaacatttttcactatctgttgttcccctgtggctccattcccttctacctcttttgtgctgttatatatatattaatattacatctatatgtattacaaacccaacaatgtggtgttaacttattgattaatac

SEQ ID NO: 343884 - DNA, 568 bp, Homo sapiens
tctgacttggactattcgactgtcagctccttaagagtagggactaccttaaatccctctgagagacttaagtacctccgaatccttgcacttaactaaagagtaccttgcacaaaagcacagaattacaactcaatttgttaactaggactcaaagtatctttggctttgagaagatacccactcaaycgtcagaatggcacttccaaaattcctaaaaatcttttgtctgatttctgcaactccaggaaagcacccaacttctggaagtctacatagcacagtactcggggccctaagaaattgatggtttcatgcaggggaaatataactgcagccaaaacaaagccggggtgggcgggcttccctctgcaagttggtaaaacgtaacaaaaaaattcctgctctggcctgtggaagatccaagtgggtgcaggccttctcctttgttagcctctgcaaggctcttgccttggggccaacaggattagcacagccatttcatgctctgaaaagtcagaaaaggagagatagggagcttttcactctaggaaatgcctagtagtca

SEQ ID NO: 343885 - DNA, 591 bp, Homo sapiens
tctagtcaataaatggtgctgggataactggctaaccataactgaagctggacctctttcttacaccatatcccaaaataaactcaagatggattaaagactgaagtgtaaaaccccaagactataaaaaccctgaaagacaatctaggcagtaccatcctggacagagaaacaggtaaaaattttgacaaagacactgaaagcaatcagaagaagagcaaaaattgacaagtggaaytgaattaaacttaagagcttctgcaccacaaaagaaactatcaacagagttagcagacaacctacagaatgggagaaaatatttgcaaattatgcattggacaaaggtctaatatccaacatctattaatataaggaacttaagcaaatttataagagaaaaacaaccccattaaaaagtaggcaaaggatatgaacacttttcagaagacatatatgcgaccaataaacatatgaaaaaacctcaatatcactgatcattagataaaatgcaaatcagaactacaatgagataccatctcacaccagtcagaaatgccactattaaaaagtcaaaaaataacagatgctggc

SEQ ID NO: 343886 - DNA, 670 bp, Homo sapiens
ctggcagttacttatatccactcacttggaagctagcagctcttgattcagtttcaatagatcaaattctattcgagaaagttatgagaacaatgattatttcttttgggagtttgggagtctttatctctacacaagtgggtctaaaaagttcattgctctgtgagtaccagttttcttctggggaatgtcatgtgagttttgaatggtactctatcttataaaactttagcaaagtatttttagtcattatgtaatgacccaaaggcatgccaaaaattgatctgccccatrtttccttatttggaactgtgagagcacagttctcacatcatgatttcacctcctgaagttcattcaccccacactcactgactaccttctgtatgcaagacaccaggtccagtgatgagtgtacaaaataaataagatgttttcttcacatttgagcatgtctaacaggtaaccaagagtcaattcttttcttcaggaaataaccagtgtttttatgtatgatgctatactcccagaaatcttgtgttaatatttggctgcttatcaatgcctttaagtcgtttttaagtatccagacagaatgatgctagattgtgtctgtttgtgtgccatctgggtatagctattgaatctagaggcctgcaatgagtagttg

SEQ ID NO: 343887 - DNA, 670 bp, Homo sapiens
ctggcagttacttatatccactcacttggaagctagcagctcttgattcagtttcaatagatcaaattctattcgagaaagttatgagaacaatgattatttcttttgggagtttgggagtctttatctctacacaagtgggtctaaaaagttcattgctctgtgagtaccagttttcttctggggaatgtcatgtgagttttgaatggtactctatcttataaaactttagcaaagtatttttagtcattatgtaatgacccaaaggcatgccaaaaattgatctgccccatatttccttatttggaactgtgagagcacagttctcacatcatgatttcacctccygaagttcattcaccccacactcactgactaccttctgtatgcaagacaccaggtccagtgatgagtgtacaaaataaataagatgttttcttcacatttgagcatgtctaacaggtaaccaagagtcaattcttttcttcaggaaataaccagtgtttttatgtatgatgctatactcccagaaatcttgtgttaatatttggctgcttatcaatgcctttaagtcgtttttaagtatccagacagaatgatgctagattgtgtctgtttgtgtgccatctgggtatagctattgaatctagaggcctgcaatgagtagttg

SEQ ID NO: 343888 - DNA, 670 bp, Homo sapiens
ctggcagttacttatatccactcacttggaagctagcagctcttgattcagtttcaatagatcaaattctattcgagaaagttatgagaacaatgattatttcttttgggagtttgggagtctttatctctacacaagtgggtctaaaaagttcattgctctgtgagtaccagttttcttctggggaatgtcatgtgagttttgaatggtactctatcttataaaactttagcaaagtatttttagtcattatgtaatgacccaaaggcatgccaaaaattgatctgccccatatttccttatttggaactgtgagagcacagttctcacatcatgatttcacctcctgaagttcattcaccccacactcactgactaccttctgtatgcaagacaccaggtccagtgatgagtgtacaaaataaataagatgttttcttcacatttgagcatgtctaacaggtaaccaagagtcaattcttttcttcaggaaataaccagtgtttttatgtatgaygctatactcccagaaatcttgtgttaatatttggctgcttatcaatgcctttaagtcgtttttaagtatccagacagaatgatgctagattgtgtctgtttgtgtgccatctgggtatagctattgaatctagaggcctgcaatgagtagttg

SEQ ID NO: 343889 - DNA, 662 bp, Homo sapiens
actcaacatgcatgtgggcaagttagataaaacatcttcataattgaattgtactgaataagaagagacaaagaagaaacatttataagatagctagttccactctcttgatgtcttagttcattttttgctgctgtaacagaatagcacagactgggcaatttatttaaaacaaaaacaaaaaacaaaaaaaacccagaagtttaattggttcacggttctggagrctgagaagtccaagagtgtaacagtggaatctggtgagggtcattccatgttggaagggcagaagggcagaagggcaagtgatctcacaagacagagagaaaatgggggctgaacttattttcttatcaggagcctactcccataataagtaacctactcctgagatactggcataattcattcatgagggtaaaaccctcataacttgataatcttttaaggaccccaaaacactgttccattgggaattaaatttccaacacatgagcttttgagggacatattcaaactatagcatactgcttctggtctccaaaattcatgcccttcttacatgcaaaatacatttattccataccaatagccccaaaagtcttaacacatttcagcatcaactcaaaagtccaaagtccagattctcatctgaatcaaat

SEQ ID NO: 343890 - DNA, 613 bp, Homo sapiens
ctaaaaggtgagttatatttttccaagtaaaaatgtggataaaggtatccagggacaaacagcctgtgtgaaagtacagaagggtgagagtatagcacatttgtgcatttccatagttgatgtagctgtaacataggatagtgggaggagctggcactggttgagtaggctgggccagtttgtggagaggatgctatttctatattaatctgtcactgtcttattcaatctattcatacctttttggttgatgagcaaattaaggaatttttatgatcttgttcaaattcctcttctggtattgyaacttaaaacaaacatggttctaagtttcagtgtgtttgaaatttcagatagaacctgacttccccactctgttttccaccctccacctcaataccatagaaactctttttacaatgcctgtcacatgctattcaaaattgttttcatttactcatgggcactgcttttgtcaggaatcacagttcaagttaaaattgtatcctataaattaaagtaccaaagcaggaaaaattaataaacttaccaaattctttacttacagccttttctacttaatgaccataagttgaaataaaagttatcaaaa

SEQ ID NO: 343891 - DNA, 586 bp, Homo sapiens
agctacatttcccagactgtcaggatggccaccctgcaagccgtaactttgtataagaaatagcatcttctttccaaagttatagatctcatgattcttcagttgacactgttatgtgcattaaagtttgagacacacaaaaaaaaaattaaatgagtttcaatggaagaagataaaaatagtcaaaagaagaagcaatgactctcaactaaggagttgtactctacatgaagagaatttatcagaacaacctgaggggttctctcaacctatttgtacagaatgcagagatttcaggaggcargaatcactgccactgatgaaaatatgttgtattcctcagtgtggtagatgaaaattaggtttataaaacagaaattgaaagaggctgggagggaaagcatgatgggcatggcaatgtgaagatatagaacagcagaggaagatgggtataaaaagaactacatagacaagcagaaagaggctgaccccatgaggaagagagagcaaatgagtaaatgatcactagaattgtgtctcccaccttcccactttgggttccagttcagcagtaccctcacaataa

SEQ ID NO: 343892 - DNA, 647 bp, Homo sapiens
acctctataattttcagttgccttccaaagaaattacaaatgaaacctatctttgtcattgatgttaatttttaaaagaccaaaacaggtgggttaatttattaagtaaaaatagaccacactgtttcaagtatagcatcctctttgtatttaatagatacacttaaccaaaaccttcacatacgtatcttcacatatgtatcttcacatacgtatcttttcacatacgtatcttcacataygtatcttcacacgtatcttttcacatacgtatcttcacatacgtatcttttcacatacgaaaatctttcaccctttgttagttcttattgtctatcctagctcaggaagaaaaaaaaatgtcattttccttcgagggtttgtgtgtagatctttggctccactagctggtagtaatttaaacataaacgaaagcaaagtggtgctggggagaaacgcagctggggatggagaggtatccagaagcatactgctgtgtgatgagatccctctttcaaaagactgagtccgtgtgcttaagaaaaactgcatgttgagttactgtttagggactttgcaactggtgctgtgattggcttaagcccccatctggagtgtatatgtctcttgtcccaatccctagtgag

SEQ ID NO: 343893 - DNA, 647 bp, Homo sapiens
acctctataattttcagttgccttccaaagaaattacaaatgaaacctatctttgtcattgatgttaatttttaaaagaccaaaacaggtgggttaatttattaagtaaaaatagaccacactgtttcaagtatagcatcctctttgtatttaatagatacacttaaccaaaaccttcacatacgtatcttcacatatgtatcttcacatacgtatcttttcacatacgtatcttcacatatgtatcttcacacgtatcttttcacatacgtatcttcacatacgtatcttttcacatacgaaaatctttcaccctttgttagttcttattgtctatcctagctcaggaagaaaaaaaaatgtcattttccttcgagggtttgtgtgtagatctttggctccactagctggtagtaatttaaacataaacgaaagcaaagtggtgctggggagaaacgcrgctggggatggagaggtatccagaagcatactgctgtgtgatgagatccctctttcaaaagactgagtccgtgtgcttaagaaaaactgcatgttgagttactgtttagggactttgcaactggtgctgtgattggcttaagcccccatctggagtgtatatgtctcttgtcccaatccctagtgag

SEQ ID NO: 343894 - DNA, 423 bp, Homo sapiens
ggaaaaaaaaatccagagcctgtactattactgcttatgatcaatagccagccctaccttataattgaagaactgtgtataatatggacatgtatggccacaagactaaacaaaatagcaaaaccatcactgaaacccctgaagactcatgggtttcacatctggacaaatgaccacattaagattttacccaaagcagaatagaagatgatgtctctgattgttaaagtgaaacatttttaawttggccttgaccagctgctggatattatcatctgaaacaagaagtgtttagggaaggaacaggacagaacttcctcacaacaaagagattatttcaggattgttgtgtaatagcaaaacagggaagaagggaggaaactcaaaacaaaagaaaataagagaccagataaataaaccact

SEQ ID NO: 343895 - DNA, 612 bp, Homo sapiens
tgctttgttaatctgaatgtgttctgtctcatgcagcatttaaatcattggcctttctttatttttaattcccctccccccacactcttttctacccagttcaattatctcattaattaaaaacacaggtcctgcccttttttttttttgaaatggagtttcactcttgttgaccaggctggagttcaatggcataatctcagttcaccgcaagctccgcctcccaggttcacgccgttctcctggctcagcctcccgagtagctgggactacaggcacccaccaccacgcccggctaattttttttgtatttttagtagagacgggttatcaccgtgtttgccaggrtggtctcgatctcatgacatcatgatccgcccacctcggcctcccaaagtgctgggattacaggcgtgaaccaccgcgcccggccaggtcctgcctttttagggaggcaaaaatctgcactgtgggatctcagggactgactcctcgccatagccactttcgaaatgctggccctactgatgctgagaattcctttatcagaggaaaacatgctgcattgccctgcttgaggggcagttaaggtgcacagtgtcttgagagagc

SEQ ID NO: 343896 - DNA, 573 bp, Homo sapiens
gttcctatttggccatcttggctcctccacctatttattcttttatttgttgtttgtttatcaagagaaagtatttcttagcttacatattcaggtttttttttttttattattttactttacgttctgggatacatgtgcagaatgtgcgcatttgttacatacatatacatgtgccatggtggtttgctgcacctatcaacccatcatctaggttttaagcccctcatgcattaggtatatgtcctaacgctctccctacccttgcccctaccccatattcaggttttataatttagaaacacaggccagtgactaacttctaagtaagccaacccaaataaattctttatattccaaaatcactttgcatcctgaaagctatcagtcttcctcatctcctcaaaatctttaacggaatcataatttctgtagaaatctgcgyatgcctttattcttggttcagctacacaaaacttatagagagctgcaagcccgggaatacagtgagtgttccaacagtgcgaaatcatagatgcttggccagaaggccacatatgtgaggtttcgtta

SEQ ID NO: 343897 - DNA, 576 bp, Homo sapiens
taattcttccaactgctgtataggcctccacagtgcatacctaccaaattctactgaggtccccagggataagcctttccagtccagcagctcctcacagtgcactggctgattgaagatttcttcatcctgtctttgcaaagagtgcatttcttctgtttctctgcattcttcttacaggcccattttatctcatccctacttagttttgaaaatgycatgcccctactttgtccatcaactttcaacacttagactacaggttgcaactaaaatattgatagtatgctcatgtacttattcacaaaacaaatatgtgttcattgcttctatgtgccagggcactatcctagaaaatggggatttagcagtgaacagtacaagtacagttcctgttctcgtggagcttagattttagagggggcagatggataatacactataaatgtacaaataaataagcaatatctttccagggaggttccccatttaagaggtcgatctgatatgagctccaaatgatacgaaagagtcagctttgcaaacatctgggatctgagaggatactcagctgga

SEQ ID NO: 343898 - DNA, 576 bp, Homo sapiens
taattcttccaactgctgtataggcctccacagtgcatacctaccaaattctactgaggtccccagggataagcctttccagtccagcagctcctcacagtgcactggctgattgaagatttcttcatcctgtctttgcaaagagtgcatttcttctgtttctctgcattcttcttacaggcccattttatctcatccctacttagttttgaaaatgtcatgcccctactttgtccatcaactttcaacacttagactacaggttgcaactaaartattgatagtatgctcatgtacttattcacaaaacaaatatgtgttcattgcttctatgtgccagggcactatcctagaaaatggggatttagcagtgaacagtacaagtacagttcctgttctcgtggagcttagattttagagggggcagatggataatacactataaatgtacaaataaataagcaatatctttccagggaggttccccatttaagaggtcgatctgatatgagctccaaatgatacgaaagagtcagctttgcaaacatctgggatctgagaggatactcagctgga

SEQ ID NO: 343899 - DNA, 576 bp, Homo sapiens
taattcttccaactgctgtataggcctccacagtgcatacctaccaaattctactgaggtccccagggataagcctttccagtccagcagctcctcacagtgcactggctgattgaagatttcttcatcctgtctttgcaaagagtgcatttcttctgtttctctgcattcttcttacaggcccattttatctcatccctacttagttttgaaaatgtcatgcccctactttgtccatcaactttcaacacttagactacaggttgcaactaaaatattgatagtatgctcatgtacttattcacaaaacaaatatgtgttcattgcttctatgtgccagggcactatcctagaaaatggggatttagcagtgaacagtacaagtacagttcctgttctcgtggagcttagattttagagggggcagatggataatamactataaatgtacaaataaataagcaatatctttccagggaggttccccatttaagaggtcgatctgatatgagctccaaatgatacgaaagagtcagctttgcaaacatctgggatctgagaggatactcagctgga

SEQ ID NO: 343900 - DNA, 400 bp, Homo sapiens
cagcgactggcccttaaagccattcagagtacagtgaagacaaagggtgatgctctagaatctgaagattcaccatcattggggcataccactggcccatcakgagaagatgatgaacccagcctgagcagggtcacagcacagaacactcaggtggagatgtgtagagatacgattgttcatatgatacttcaggccaaagttcccatagtttagtcagttaagctaaagcttcaaatcatcacagatcatcccgctaaatagtctcagcatttccttcagggcataacagcttacttctacacctgtttttaagccttagtatccaccttgaattcagccccaaatacacctttatgctgatgttgtaagttgtgttgttattgtggactctctcttc

SEQ ID NO: 343901 - DNA, 596 bp, Homo sapiens
ctttagctgttggcaaaaactttattggccatgcttttccacttcaggatctacattaaatagggtttgcttttggctgtgcatcatagcaaccccaaacatcagcagttttatctcaaggagtttatttctccttcttataaaaaatacttaattcagttgatccataaagttgtgaaagtccattctctctctttttttgctttcctctttaaattgtttttgacaaacaaaaattgtatatatttatagtatacaacatttttgatatatgtatacattgtagaatggmtaaatcaaactaatgcacatatttattacctcacacacttatcttttttttttgtggtgagaacattctaccacatccctggtgcggttttcattttcaagatcacaagatagatcctctatcttctaggcaacacactcacattccagacagggaaaagggggtaggaaaacagaggaaaaattcagtagactctgtctcaacatctcaaatgactctatcctttaaaaacaaaaaacaaaaaacaaaaacattactctttcagtggtcaggaaagtgacacagggtcatttcaatctgggag

SEQ ID NO: 343902 - DNA, 592 bp, Homo sapiens
tgtgaaagtccattctctctctttttttgctttcctctttaaattgtttttgacaaacaaaaattgtatatatttatagtatacaacatttttgatatatgtatacattgtagaatggctaaatcaaactaatgcacatatttattacctcacacacttatcttttttttttgtggtgagaacattctaccacatccctggtgcggttttcattttsaagatcacaagatagatcctctatcttctaggcaacacactcacattccagacagggaaaagggggtaggaaaacagaggaaaaattcagtagactctgtctcaacatctcaaatgactctatcctttaaaaacaaaaaacaaaaaacaaaaacattactctttcagtggtcaggaaagtgacacagggtcatttcaatctgggagactgaatattttaactggacaccttgattcttcatacaaaatagatttttgtaatgaaggaagaacaggagagaggataatgcatatgcagtgactggcgcttgtcccacactacccttgggtaagcaacattgatacctacccttcttttcaggcataggctgacatc

SEQ ID NO: 343903 - DNA, 592 bp, Homo sapiens
tgtgaaagtccattctctctctttttttgctttcctctttaaattgtttttgacaaacaaaaattgtatatatttatagtatacaacatttttgatatatgtatacattgtagaatggctaaatcaaactaatgcacatatttattacctcacacacttatcttttttttttgtggtgagaacattctaccacatccctggtgcggttttcattttcaagatcacaagatagatcctctatcttctaggcaacacactcacattccagacagggaaaagggggtaggaaaacagaggaaaaattcagtagactctgtctcaacatctcaaatgactctatcctttaaaaacaaaaamcaaaaaacaaaaacattactctttcagtggtcaggaaagtgacacagggtcatttcaatctgggagactgaatattttaactggacaccttgattcttcatacaaaatagatttttgtaatgaaggaagaacaggagagaggataatgcatatgcagtgactggcgcttgtcccacactacccttgggtaagcaacattgatacctacccttcttttcaggcataggctgacatc

SEQ ID NO: 343904 - DNA, 556 bp, Homo sapiens
tttttgtttgttcgttgttttgtttgcttgtttaatcatgagtgagtgttggttttttggcaaatacccttgctgtttctaataagactataatatggcttctcatcttcaatgtttgtagtacagtgaattatgttagattttcaattgcttagcattttcgcatttctgggttaaattcatattggacatgatatatttaaatgcattgctcatttggtttgctgatagtgcttaggattatatcataagtgagatttyctatgtttttctttttcttctgctaccttatcaggttttggtattaatattttacatgctaagctcacaaaatggactcaggaatgtttcccctctccaccctgctctgaagaagtttgtatagatcaaaattatctattctttatattttgatagaacttacctctaaatgctcataggccaggtatttgagtgtgtgtttgtgtaggtactgatttcattactatagtgcaataagtagtacatctttaaaatttctctttgagtcagtttcagatcatttctctaaaatttt

SEQ ID NO: 343905 - DNA, 539 bp, Homo sapiens
ttgctacatcatccattaagagcactgacaattgagtggttactctgtgccatgcacacttctaaatgctttacaagggctacctcatttaatctgcagaataactctgaagaaaaactgttattctctctattttatagatgcgaacatggagataagagagatggatcaaatatttttttggccaatggaactgacattgaagagctgaccttagggagacagcatgagaataatggaaagagattaggctttgatrttgggtagagactagtttaattttgattcgttttgcacatgaggaagataatcttcagggtattattacacacctcataggttattatgagggtgaagtgcaataacatatgtagaggttctagtagaattcctagaacatagtaggcactcaataaatgtcttttcttctcttttgctctttcctccctgttctttctctttccttcccttccattcgcctaccccatggcactctcgtgctagctaactctggtccaacatttatgtcctaaggactg

SEQ ID NO: 343906 - DNA, 565 bp, Homo sapiens
accctgttggggtattaaacactagatcttattcactcattctactttttgtaccattaaccatctccactccccctctatacccctaatatgctttccagcctctggtaaccatcattttattctctagctccatgagttcaattgttttaatttttagattytacaataagtgagagtatgcaaactttgtctttctgtgcttggcttatttcacttaacgtaatgacctccagtttcatctatgtttttgcaaacgacaggatctacttcttatcaatggctgaatagtacttcattaggtatatgtgccacattttctttctttattcatctgtcgatggacacttagattgtttccaaatcttagctactgtgaatagagctgctataaacataagtgtgcagatctctctttgacatactgatttcctttctcttgggtgtatacctagcattggaattgctggatctcatgatagctctatttgtagttttttgaggaactgttctccaaactggtctccatagtggttgttggttgtactaatttacattcccacta

SEQ ID NO: 343907 - DNA, 503 bp, Homo sapiens
ttccaaatcttagctactgtgaatagagctgctataaacataagtgtgcagatctctctttgacatactgatttcctttctcttgggtgtatacctagcattggaattgctggatctcatgatagctctatttgtagttttttgaggaactgttctccaaactggtctccatagtggttgttggttgtactaatttacattcccactatcagtgtatgagggtttccttttctccacatcttcaccagcatgtgttattgcctgtcttttggataaaagccattttaatgggggatgagatgatatctcattgtagttttgatttgcatttctctgatgatcagttatgatgagcaccttttcatacaactattttccatttgtatgtcttctttkgagaaatgtgtattcagatcttttgcccattttaaaatcagattattagattgtttcctgtagagttgtttgagctacttatatattctggttattaatctcttgtc

SEQ ID NO: 343908 - DNA, 558 bp, Homo sapiens
tagtttaatctattaagtgtgcgatagcattatgtctaaaaatgtacatacgttaattaaaaacattttattgctaaaagatgctgaccatcatctgcgttttcagcaagtcataatctttttgtggccatagggtcttgcctcgatatgagtggctcctgactgaccaggtgatggttgcaacagattggagtagctgtggcaatttttaaaaakaagatgataatgaaatttgctgcaacaattgatactacctttcatgaaagctttctctgtagcatgtgatgctgtttgatagaacttttttaaaaaaattgaagtcaatcctcccaaatcctgccaatgctttatcaactaagtttatataatattctaaatcccttgttgtcatttcaacaatattcacagcatcttcaccaggaatagtttccatctcaagaaactactttcattgctcatccataagaagcagctcctcatctatccatgtttcatcacaagattacagcaattcaatcacatcttcaggcttcacttctagttttcttggtttttcca

SEQ ID NO: 343909 - DNA, 558 bp, Homo sapiens
tagtttaatctattaagtgtgcgatagcattatgtctaaaaatgtacatacgttaattaaaaacattttattgctaaaagatgctgaccatcatctgcgttttcagcaagtcataatctttttgtggccatagggtcttgcctcgatatgagtggctcctgactgaccaggtgatggttgcaacagattggagtagctgtggcaatttttaaaaagaagatgataatgaartttgctgcaacaattgatactacctttcatgaaagctttctctgtagcatgtgatgctgtttgatagaacttttttaaaaaaattgaagtcaatcctcccaaatcctgccaatgctttatcaactaagtttatataatattctaaatcccttgttgtcatttcaacaatattcacagcatcttcaccaggaatagtttccatctcaagaaactactttcattgctcatccataagaagcagctcctcatctatccatgtttcatcacaagattacagcaattcaatcacatcttcaggcttcacttctagttttcttggtttttcca

SEQ ID NO: 343910 - DNA, 425 bp, Homo sapiens
acctatataagaaaactgcacatgtaccccaaccctaaaataaaagttaataataaataaataaatacttttcatatggcaatttaaaaaaaagaagggatgtgagcaggttaactttcatgggtaggtgagaaggagctgaaacaagaaacctaaaggcagatttggaataccaactataccaggagaccctggggacccagaaaatatatttcttcaaaatcacacccaattcaacatttttttctagaaagatattctcccttgggaatttacacattcttgtttgtgatctgagtgctttactgggcggtgcaaacacygagcatattatttcacctttctaatcttgggtttcctcatctataatacagcaacacctaccatccatttgtccccactgatgctgggcaccatagtaataa

SEQ ID NO: 343911 - DNA, 615 bp, Homo sapiens
ctgtgtcaaggtaggtagacatttaaatgagcaaatcacttcatgggtaagggtaataatagtagctcaaagcaggtgcaaataaccgggtcttgagtgaatggatgaggttgactgagggaatcttctaagagaaagtgacatttaagccgaaccaacagaatgaccaggaaatactcaggggaagaaaagaggaaaaagtgtttcaatcaaagacaatccaaccatcgatcttgacctacgcttcaagcacagctagggttactacagcccagcaagagctattmatcactgccattgatcctccctacccactagaaaactttgaaattttagagctcacatcttgttaaaatctcttcccctctcaagaactaaagcttctccagcacaacctcaattcactcagagaaggagagaaaaagaaaaataagttgtattcagaaaaactcaaaagctctccatctgtgaactgtagaggacacttgttgatcagattgccagagaaagccaacagaaaggcagagccaccttctttcctccctttcaagagcagagctcaaaactgccttcacgtctaaacacatatgacctggttgacaaggtcatgccatt

SEQ ID NO: 343912 - DNA, 423 bp, Homo sapiens
agtcagtaatcccaacccactttctcttgggtcaaattaactgcagcacacagcaattagatgatgagacaaaggaaaaacaggaggtggcaaagaggggaaagaagactgatcatgatgagatgtggagaaggccaaaggtgtggtcaaacaggtggagagatcccactggaattaaatcctgctccaaacctgatataggagaaaagttagctacatgggaagatggtctcaatgtgttgtcaagtaaaaatacatagtttacaaggcaggaggtgagcctaatatcatttttgtaagagagaaaaaggtggggagcactaatagtgattatctctgcmacaggaatagatatatatatatatatatattttttttttttttttcttgaaatggtgtctcacactgttgtctgggctggag

SEQ ID NO: 343913 - DNA, 582 bp, Homo sapiens
ttctaactagtcagaagtgattccaaatttatgaaacttggagatggaggcaatgcaagggaaattacatttagcaacagaatagttatttgtataagcaggcttcaaagtattttggacaaaccataacttttgytgaagttgacaataaaataatttggaaaagaatgtatggtcctcatgcactaacaacaattgcataggtgttatttttaattcatttttccagctgccttattgtaaaagactctgagccagtgaaaaaagctgtttactgccttttgttgttctttctgcatatgataagagaatagtatctagctcccaacagtgcccaaaaggaagaagaaagcaaggaatttctgtaatgaagtgtaagaagctaactccttcttccacaaacctgtgtttctttaggttattttcctggctgctagtttcccaaagatggagagtcaacttttgtctgggcctcaataatttggtatttgaacatgtttgttgtatgatgccttattggagtcatcttactaccatctattccatacaccaggtctattctgaggtatagtaacccaggaa

SEQ ID NO: 343914 - DNA, 447 bp, Homo sapiens
cgtaagaatcaagagaagctaagcatgaactgagaatcctgatcaagacgaaaagaatgatccgactggttggtttcaccatcataaggagggattcctctggctatgtgttgcattcatttcttrgcacatcgagaggcaacctaggacactattaataacatgagctcaagggacaaactgcctgggtgtgagttgtggctctgccacttatgagatgtgtgacctgcggcacattttttcacttctttgtgtctgtttcctcctttgtaaaatgaaggtaataataatacctaactcataaagctgttgagaggatgagtcaatacttatgaatgcacacacatacacagaaaaggaactggcacatataaacactaaataaatgtttgttaaataaaataaatacaatattgtatggttatattgctgatagcagaaaatgcc

SEQ ID NO: 343915 - DNA, 576 bp, Homo sapiens
tgacaagaaaagcaaattatgcacatttaaggcctctgcttacatcatgtctgctcacattccagtggctagggaagtcacattgccaagctcaaagtmaagagggcacaagaagtatactccatatcaaggaggaaaaaatgaagataaatttttactgaaaacaatctaatctatcatttaatattcattaggctgtctggtagattttggaaatactaggattattaagtcataatttctgtcctcaaggaactcatatttggggtgggcagatggtactaaaaagataatgctaaaaaacactaaataaggagacacccaggatattatgtgagtaggaagtggcaaatcagagaatctaatataataattcttgagcttagggaatcatcaaaggctttacatttgagtgtctgaggtggtccttgaagataaatatgagtttccagggaaaaaatataagcaaagatgcagaagtatgggagtaaatggtctcttcaataaatgacagggcatacagtgtgactaaagcctagtatatgtgacaatggctgagaacacattttactccac

SEQ ID NO: 343916 - DNA, 662 bp, Homo sapiens
tgagtgttgttgcacatagatctctgaatgtccaggaaatgggaaatagagctstcttcagggcaatttgccattttcacaggtcttttgtcagagtctgcaagcagatcagtccttgcaaagagcggagtgttttgatttttaattcctttttcttgtaattagaatacattttttattaagagctgctagaaaccacactttttcatccataaatttagcatctcatgacagtgagaattacaatggtaggaagaaaggggactgtgcaaacaaaacaaagacataaaatgtaatgagggaaaagcagccagcatgccgcaactgcaaagaagaaaaaacttcaagggggtctgatttatagggaataattattattaactgatttagaagactggggcaaagataggaagtcactgaagtggctgtttttgcaaactgatttgaagaatccttttcttctaagtcattataaaataataattcttggtgaatgtgccctctttcacttaaggatttgcaaggacttgaaaaatactgcttcaataaatttatgatacctaagaagcacattcagaccactatttaaatgcaaaaacaaaggccaggagcaatacatggatttgtcaaaagttgtctaagtgaacagaacaggagaaaca

SEQ ID NO: 343917 - DNA, 662 bp, Homo sapiens
tgagtgttgttgcacatagatctctgaatgtccaggaaatgggaaatagagctctcttcagggcaatttgccattttcacaggtcttttgtcagagtctgcaagcagatcagtccttgcaaagagcggagtgttttgatttttaattcctttttcttgtaattagaatacattttttattaagagctgctagaaaccacactttttcatccataaatttagcatctcatgacagtgagaattacaatggtaggaagaaaggggactgtgcaaacaaaacaaagacataaaatgtaatgagggaaargcagccagcatgccgcaactgcaaagaagaaaaaacttcaagggggtctgatttatagggaataattattattaactgatttagaagactggggcaaagataggaagtcactgaagtggctgtttttgcaaactgatttgaagaatccttttcttctaagtcattataaaataataattcttggtgaatgtgccctctttcacttaaggatttgcaaggacttgaaaaatactgcttcaataaatttatgatacctaagaagcacattcagaccactatttaaatgcaaaaacaaaggccaggagcaatacatggatttgtcaaaagttgtctaagtgaacagaacaggagaaaca

SEQ ID NO: 343918 - DNA, 570 bp, Homo sapiens
ataggctgacatccccaaagtctcattcaattataggattcagctcaaagtcaccaagtatttgtcagtttcttgagytcccataatgaataaatttaatctttttttgtctgtctcctacacatgccaatatacagtggtggaggaggaagaggataacagcaataaaactacaattcagaacagaggtgaattagagacacatcagtccagaacaatcatcaaatcttctgggcagtaagaaagacaccttcttgccctagcggtggactccatgccttggtagctgactggcagccctggctctgctctctgggcctgtagttcttatatattattccccaaggctgaatatgagaagggcattgagaaagatgtaaccctgtgggactgccgtgattccacaacctgcttcttgttggtggaaatcaagaccctggagttcttagggcttgaaaatcttataccattggtggccgggcctggagttattttgggcaaaatttctctctaaattctgggcaggcatccagcctatttattacctgtgagagtgatgccagcacacat

SEQ ID NO: 343919 - DNA, 570 bp, Homo sapiens
ataggctgacatccccaaagtctcattcaattataggattcagctcaaagtcaccaagtatttgtcagtttcttgagctcccataatgaataaatttaatmtttttttgtctgtctcctacacatgccaatatacagtggtggaggaggaagaggataacagcaataaaactacaattcagaacagaggtgaattagagacacatcagtccagaacaatcatcaaatcttctgggcagtaagaaagacaccttcttgccctagcggtggactccatgccttggtagctgactggcagccctggctctgctctctgggcctgtagttcttatatattattccccaaggctgaatatgagaagggcattgagaaagatgtaaccctgtgggactgccgtgattccacaacctgcttcttgttggtggaaatcaagaccctggagttcttagggcttgaaaatcttataccattggtggccgggcctggagttattttgggcaaaatttctctctaaattctgggcaggcatccagcctatttattacctgtgagagtgatgccagcacacat

SEQ ID NO: 343920 - DNA, 570 bp, Homo sapiens
ataggctgacatccccaaagtctcattcaattataggattcagctcaaagtcaccaagtatttgtcagtttcttgagctcccataatgaataaatttaatctttttttgtctgtctcctacacatgccaatatacagtggtggaggaggaagaggataacagcaataaaactacaattcagaacagaggtgaattagagacacatcagtccagaacaatcatcaaatcttctgggcagtaagaaagacaccttcttgccctagcggtggactccatgccttggtagctgactggcagccctggctctgctctctgggcctgtagttcttatatattattccccaaggctgaatatgagaagggcattgagaaagatgtaaccctgtgggactgccgtgattccacaacctgcttcttgttggtggaaatcaagaccctggagttcttagggcttgaaaatcttakaccattggtggccgggcctggagttattttgggcaaaatttctctctaaattctgggcaggcatccagcctatttattacctgtgagagtgatgccagcacacat

SEQ ID NO: 343921 - DNA, 482 bp, Homo sapiens
cctgcctcttcacttcactgcttctgttttgagacaattctgaatagtgggcttcagtggcaggacaacctcctaatcttattggcaccaggttagcctgctctccctgcagagaatttttaatgggaggtgtttggtgtttkggaaaggcttgcagctttgtggctgcctctttaatcagttttactttgaggttataagcctggctttttttttttttctcctcaaatgagtcttgctctgtcaccaggctagagtgcagtgtcatgatctcagctcactgcaacctccgactccctggttcaagcaattctgcctcagcctcctgagtagctgggattacagggatgtgccaccatgcgcagctaatttttgtatttttagtggagatgaggtttcaccatgttggccagagcctggctttttaaactgcaagactgcaaactgtgggaatcctcccacttaaattgcaagatgttggc

SEQ ID NO: 343922 - DNA, 482 bp, Homo sapiens
cctgcctcttcacttcactgcttctgttttgagacaattctgaatagtgggcttcagtggcaggacaacctcctaatcttattggcaccaggttagcctgctctccctgcagagaatttttaatgggaggtgtttggtgttttggaaaggcttgcagctttgtggctgcctctttaatcagttttactttgaggtwataagcctggctttttttttttttctcctcaaatgagtcttgctctgtcaccaggctagagtgcagtgtcatgatctcagctcactgcaacctccgactccctggttcaagcaattctgcctcagcctcctgagtagctgggattacagggatgtgccaccatgcgcagctaatttttgtatttttagtggagatgaggtttcaccatgttggccagagcctggctttttaaactgcaagactgcaaactgtgggaatcctcccacttaaattgcaagatgttggc

SEQ ID NO: 343923 - DNA, 482 bp, Homo sapiens
cctgcctcttcacttcactgcttctgttttgagacaattctgaatagtgggcttcagtggcaggacaacctcctaatcttattggcaccaggttagcctgctctccctgcagagaatttttaatgggaggtgtttggtgttttggaaaggcttgcagctttgtggctgcctctttaatcagttttactttgaggttataagcctggctttttttttttttctcctcaaatgagtcttgctctgtcaccaggctagagtgcagtgtcaygatctcagctcactgcaacctccgactccctggttcaagcaattctgcctcagcctcctgagtagctgggattacagggatgtgccaccatgcgcagctaatttttgtatttttagtggagatgaggtttcaccatgttggccagagcctggctttttaaactgcaagactgcaaactgtgggaatcctcccacttaaattgcaagatgttggc

SEQ ID NO: 343924 - DNA, 482 bp, Homo sapiens
cctgcctcttcacttcactgcttctgttttgagacaattctgaatagtgggcttcagtggcaggacaacctcctaatcttattggcaccaggttagcctgctctccctgcagagaatttttaatgggaggtgtttggtgttttggaaaggcttgcagctttgtggctgcctctttaatcagttttactttgaggttataagcctggctttttttttttttctcctcaaatgagtcttgctctgtcaccaggctagagtgcagtgtcatgatctcagctcactgcaacctccgactccctggttcaagyaattctgcctcagcctcctgagtagctgggattacagggatgtgccaccatgcgcagctaatttttgtatttttagtggagatgaggtttcaccatgttggccagagcctggctttttaaactgcaagactgcaaactgtgggaatcctcccacttaaattgcaagatgttggc

SEQ ID NO: 343925 - DNA, 600 bp, Homo sapiens
tttgtctttcctttcccttgaaatcaatggtcaagttattacttactcttttctccttcttcagatgccattagtgattctctgaagcaacacatgcttgacccaatggtgaccgttccaaccagctttctgaccttgcttgagaagtatakagatttttcaaatagtgtgagataagtcaccagggtggcactggaaaggaaaaagaaaggtagaaaataaattgagtttgaacgatggcaaaacaaatgtcatgttaactcaggcattcaatatatagaagaagttgtctgattctttggtaattaaactttaaagagagtcttgtctggcccgaagtaaacaaacataatgatctttcacccacaataggactagtgcatgtgatttctcactgagacttttagttttaagctgtcattaagtcctgagcagggaaatttggttcctgtttaattcatcttgtattggaagagagtgggagtgatttggaagggaatgttagtgtttgcagtaataagggatgggtctgagctaggttgggatactgctaaaaggaagataaatcatagaattagagctgttaacaatcttagatag

SEQ ID NO: 343926 - DNA, 574 bp, Homo sapiens
catctgtcatttgctctattctctccagatgccactttcccatacctgactgatctccttttaggactggcttttcctgactgtcagaaaataggagcagggagtgtaaaaagaaccacatagcttaagacctggagtctgcaaaaaataactaggtgaccagaagcagagcacagaatttatctctgggaaataatgacagcataatgtctcaacttccccaatttagcacaccacagcctgcatgctgctactccccatccctttcaaaatactccacaacccaaagaattatcaattgtttggacctggggcaaactcactgcaattagcactgcaagggatctaggggttctatgtttgttttcaggcagaccataagcctcgaaagggtaaggactaagtttgcataacctcatgacctagcagagtactttacacctgaaaagtgtttaayaaatattagctgaatgtgcacctgtaaaaagctggctacaatttccagccagttagagtataagaagcagtaagtcctcctggggaaagaattgctttctcatttcagaaaaaaaca

SEQ ID NO: 343927 - DNA, 507 bp, Homo sapiens
ctataagttccaggaagggtatacttcccaacacccattttgcatgtggtcatggagagtaatggacaatgaagaacctcccagaaggtggcctggactacacagaayaaagaacaaagaatttcttccaagatagcaaaccagggtccaaagaaggaatgtgccctattgccaggacagggggcctttaacaatatccaacaggacttcttccatgttatgcgtcaatgactggtttatgtctcccattgttcatttttccaaatggaaattttaaaggcaatcattccaaacttcatccatcattatacaagcatacctcagagatattacaggtttagttccagaccacggcaaaaaagcaaatacctcaataaggcaagttacagaaatatttggtttcccagtgcatgtaaaggtaatgtttataaaatactgtagtattttatattatttcgattaaaaatgttcataccttaattaaaatgctctattggggaaaaaagc

SEQ ID NO: 343928 - DNA, 526 bp, Homo sapiens
gacattatcttagttgtattccttgaaagactcctaactagtctccaaagtatcaatcttttctcytgttaaagttgatcctattcacattagctcagagattgttgccaaaaataaagtggattacaccactttttaaaaattttccattgaccctctctcccccaacaacctgcctttcaggataaaatccaaatgatgtaggatggcataaacacctttcacatctaatcctcaaccttcttcagcctcgtctcccatcacttccccacaactgccaatgctgaccttcagtcaccagccaagcccttttttatgacattgctttgcaaatgctgttccttctgcctagaatgctctccatctacctccttttccacttggggaatgcttactcatcttttaaaaatgaacttagatgtcacttcatctgtgaagtcctgtctgactatcccacgtagaaaatgatactcttcacagtgataattaaatcatcaaattgtgcccactaataggatgtccctaa

SEQ ID NO: 343929 - DNA, 625 bp, Homo sapiens
cttgaattttaaaagtagctaaactatcagttagtaattagacagatagatagatagacagatagatagatagatagaaagatagttaatacatagacaaagatatatataatatacatatatctttatataatatgaaaaacaaaaaaaagaattagacaagaataaatacattttaaggtaaatgatttttaaaaatatgactggatgtgttttagaaataagtaaattgaacatggaaggaaggaggaggatataagaaacgggtgaacgaaggcattggaaaacatctgcataaatctaaataaacattgactgtaaaaacaacaaaaagaaagactaatttagggtgaaatgattcgaaaagaaggttaaattaaagtacttcacagccacagcatggaagataagaagagaagygcagtaatttgaattcaagtgttgcaagttgctcttattattcaagatgaagtcaggcctattgattatattagttctttagagttaagtatgcatgttaaaaatgtaagaataattactaaataaataagaaaacagaaaaaataccaaaccagtcaaagggttaaaaggtgggggacagagaaaaccttccaaaagaaatggc

SEQ ID NO: 343930 - DNA, 575 bp, Homo sapiens
acatagcctctgcttgtttgatatttttggtccctcaaaagtatttcagcatttagccacctagctcacatgggccattgtgtggttatatgtaagttatggcatctctgagtctccaaggaaatcatgtctcctctaaacttttctstcagaatggagtggggacaggaaattatttaagaagtgaaataagacgttttcagaaaggacagaaccaacggaagggagacaaagactttgagcacctagccacaagatgacagatttaaagcatcctgaagcaatgcttattagaaaagtcctataagagcaggagccgttataaacacctactcttcagcacagagaacaagagcaattgtgtccactaacaacaacagtcagagactggcatctatgctgctgcgctcaatcccccatttcactgtgcgatctcattttactgtaagaacaatatgctcaggtgaggaggattcctttaacagcacaagaaattgagtttccaatttaaaaaccttgtctacctttacagggctattagagtagagctaggatttgaacccaagtcctctctg

SEQ ID NO: 343931 - DNA, 600 bp, Homo sapiens
gctttcctttcagtggtcaaaggaagcattgtgttgcaataagaaggggacaagacaagtaataaataggatatgtaatatgagcatctttcaatatcatagctgtctccaaatttataaataaactattttgtttagaccccgtaatataatttttcttcatcaggataattatttaaagaactaggccctaaacatatatgttcactaaaattacagaataaaacaccagatttgtctttagaaaaatggccttttataaaacatagctgaccagaaaaaaaacctttctttattctgaaaaatataatattgaattataaagcatcttggaccttttatagactacaaggtatagtgatggctggaaatttttagtgtgcttcaaaatgcacacagaaaagggctcaaatttttatatctacattcagctattcagctagtgggttttctattatgayggtaaaagtgccctttacactggcgtccaaggtgtgtccttctaaatctttccttttgcaagtcttcccagactcacagtgtaatgaaggcgataaagatgaaaggtgatgaaaaaaataaggaaggcaaccaacagag

SEQ ID NO: 343932 - DNA, 536 bp, Homo sapiens
cctacactctaatttagttggaataggggactagttctcaaggagttatcaacagggcaaccaaacaggtaccagcatctaagaaactcataatttggacccctggctctgtggagagctgaatttccaagcacagactgcccatctgccacyagcagctcccgacttgatccaaggatggctaaggtctcctggcccttcaggtgccgcgctgcaccatgccaacgacaatggacctgtggatatatgcagggagtaagatgcaggcaggaaacgcggtcatctccttccctccgtcccatgcattttcaaggggagaaaactggtgctagtgagaaggaataaaaaaacttacgtagtaccatcatttgtggccctctgaactccatttttcaatttaacttaatttttctccttagggagctattgatgaaaaaaagtgttgaaatctttctctagtcaatcattccccccttttcttaagctaaaataaaaccagttcctgaggggcacaagatatgcctgtgtgtgtgtgt

SEQ ID NO: 343933 - DNA, 574 bp, Homo sapiens
atgtacccatacaataaagtaaatagtgagggctagaatatcaccctactgcagctgtaatattactactttttcttaagttgtgaaaatactatccacacatacctgaattaccacttctctcaccaagaattactccagaaagaaaaaaaaaacaagttataggactcgtgaagagtacaggaaaaggtagtggtttatataagacatcacacagagccattttaaaaggctctaaacctcagacaaatgaacaataatttcactaaactactatataatcaaatgtaaatactttccataatatttcactattcaaacagagaggaaaatgtagacatataaataaacataaatcctgtatggaaatttagtaaagaatcaacttatagtgaagatttacttagcttgattaacaatgggaaacaaatataccatttataactacmtaaaattttccaaaaccaatggtctttggctgctgggtagagtttgtaggcagatttcttgtctatacatacagacataatttgaagcaaatttaaataatatgttggatacatatgtaaaggtc

SEQ ID NO: 343934 - DNA, 555 bp, Homo sapiens
tgggtctcagtttccttatctttacaaatgaaagaggtgttagaccataacctctcatacttcttctcattctaatcctctatgaaacaattctactccccactacatcacttgtgcctaagattatacttcatcatagaaaattacttgttatacataattgcactaaattgttatcaagtaaaatcacttgtttgaacatcttaactcctccttgtaaccatccttttatgatctttggatggttgacatcaatatgataactggtgaagcccaaacttcacaagttgggccaagttgtgaagctatgtactcttaactactagtttcgagttaattcatgtgcccagtggtggcctaaatgtggctgaactgatgtctcatcccttgctttctgagacattcttatctctcatcttggagagactccattgtaatttctattytttatcagtttcctttgatggccctctccccctgctggatacctcaccattggtggtaccccgaggctagctccttcccttgtgtcttctctctagcttccaggagcac

SEQ ID NO: 343935 - DNA, 486 bp, Homo sapiens
atatgctaattataattgaataatggactcaaaatttagattaaccctacctgatcacactaacaagatactgtgagtctgcattcatttgtttggtcaacacatcatattgagcattgcagtaggcagattgatatgggcggtccccatgacccccacctcctggtgttcaaatgtggatggggcctgtgacttccttaaaaacaacagagtagggcaaaggcagtgggatgtacttggttatatcacataacatcgcagtgcccctcctgctggagcctctccttgctggctttgaagatgccagctgccatgctgtgggctgcccgtgttgggagcccacctagccaggagctgagggtggcctcttrgagctgagggaagcctccagccaacagctagtgagaaatagaagtcctcaagatcacatacattaggaactgaattccaccaacaaaagcagatcctttcccagtcaagccccat

SEQ ID NO: 343936 - DNA, 608 bp, Homo sapiens
tggagaagaggatgcaaaaacttgaggattgcaaatgctgaatcttctttagagaaggaggtcactaggagtgaagaaaagggcaggtgatatttagcctaatggctatcagagatattaagaacactttctggaggtctcaaatttgatttttttctgtataactaatcatattttctatcatagacaaccttgtgtataacctagaaatgatagaaagtatatgatccaaaagcaaggtaccatcagttctgctctgtacttcttttgaaaattggaaattgtcccaacacattttgatacattagagaacaatttgagcataatgaaaatgtcttgttttttttatgcatgatttttatccrtgataacactaggtgaatgcagaaaactgcatccagatgaacagagctgtgtaggaatgtgcaaattgcacacaggctcacacctcaaacatctgccagctacctctgctcaccatgtgctttgagccgcacccatccacatctggtgttagaactttccttctgacttcagataactctccttccatacttcataatgacttactaactgcagccttttgacactcacttctgcaagcaaac

SEQ ID NO: 343937 - DNA, 565 bp, Homo sapiens
ttgacaggaaaggccccaaaggaactccatgtgattctgctggggaatatgaagcccagtgtcgaatgaagagtgccccgtctctgctgctgagattgcactgtggtttagtgggaaatgttcctaggcttcagttttatattctcacctctagtattgtcagggacagccactttctgttttcataggatggaggtcctctgcaaatgctggtaaatgcactgcagtgtttaattaggaagaaggatgtagaaactttgtttggtgtgtggcatataaagaagagaaggtaaagcatctctgtcaacaaagaattcaaagtgtaagaactcctggctgccttcagcctgacagaaagtgtcttatcatctgtgtctgctctgcggcttggtggccaacagtgcaggctttagagagaatyggtctgatttctgatacctgccctactacctactcgttgtgttactgagcaaattttaattcctttgtgcctcagtttcctcatcgacacattgggaagagtagtactgtactttatagggttttcatgagattaaataagttt

SEQ ID NO: 343938 - DNA, 574 bp, Homo sapiens
cctataaagctccctccttctacctccagtgatggcaygggctgataatatgaattggtctttacaatttcagatacttctatggttacaaaaatccattttgataataaaggaagctagaactattgggagtaggtccctgaccttggaaactgatgaacacatcttccccagcttgatctttgttgcatctgagaaaaaccctgggctgcataactcctggatctgacccagcatgttctaccacccacagcaaaagcacagaaatataaccagcaggacgcctattgattagacatccacaagttatattactgattacctactcctcaaccttcaggcaggcaaacacgttttcagctctcatgaagtcatttattttcatacgtcttaatatttcacattttcttcccttggttttagacttttctacctctggctgtgaggtttgccttgtgtattatttgcccaacagggcctccttaatctggtttcttttctgcctctcacccagatactctgctgaattactctcccggataggagcatgctctttcctaaggagggaggtgca

SEQ ID NO: 343939 - DNA, 580 bp, Homo sapiens
gatttggtctcttcacataatcccatatttcttggaggctttgttcattctttattgcttttgctttatttttgtctgactgagatatttcatgtaactgttctgcaatctctgaggttctttcctcagcttggttgattttgctgttaatacttgcagttgtattctgaaattcttgaagtgagattttcagctctatcaattcagtttggttctttcttaatatgacccttttgtctttatctcctatattgttttcttatattccttagagtgctaagattgggttttgactttctcttgaatgctgatgaccttcattccttatccatgttctgaattctatttctgacatttcagccatctcagcgtagttaagaaccattgctgggaaactagtgtagttgtttgaagacaagaagatactctggccttttcggttgtcagagttcttgagatggttctttctcatctgtgtggactgatgttcctaaagtctttgacaytgctatcctttagatgggcttttttcctttcatcttctttgatgcccttgctttcatcttctttgatgcccttg

SEQ ID NO: 343940 - DNA, 536 bp, Homo sapiens
tcagttcccagatataaaactcacagaagcatggctcccagctgaatgtatccccctggagttttcagctctcagatgtgcccacactgagcaattcgttcattaaagttcaggttttcctactccagcactatttcctgtggaggtttctgcctcagtatgttgtgattctctgtatccacctgccttttgctcgaatttgaggggcctgtgacatcacttctctcagggatgtagaataattatcaatttttcagttcrtttctattttcactaattaggatggagtggttgattccaagattcttacatgagaaaccagaaactagaagtcacatccatttacttttaatttgcatatgtctttatgtttaaaagaggtttcttgtagacaacacatagttggttattgtgttttgatccactctgacaatctctcttttgctgtgtttaagcctttgatatttaaagttattatctataaagctggattaatatctactatgtttgttactatgtgcttattttaaataaaa

SEQ ID NO: 343941 - DNA, 607 bp, Homo sapiens
acatagttggttattgtgttttgatccactctgacaatctctcttttgctgtgtttaagcctttgatatttaaagttattatctataaagctggattaatatctactatgtttgttactatgtgmttattttaaataaaaattttaggattagccctaagaaaatagtcacaagtaagattttggcacatgactaatataaaccaattttgggttaaattctaaggaaaagaggcttttccatttctagacaaagtgtttttctaagcctatgtaatgtatctgttaagtaatgccatatgataaatggtgtcttggtacattctggatgatacaaaaggttatgtctttcaccctgagaaagaaatgctctgtgttcaaggtctaggtctaaaacagattttgtagtatgtgacctagggctgcagtaaagatagatagcaatgaaagcaaaatacctaatgcgtaggtgtctacaaatggatggactaacagatttaacataaggaacacaacagtaaatcaatttaatgccctttattttctgatgggtgccaagtcacttactacataaactacaacaataccaagttttcagctaattgttt

SEQ ID NO: 343942 - DNA, 630 bp, Homo sapiens
ctgttttcagacaagatcttatatacaggaaaccctaaagacttaatgaaaaactgctagaactgatcaacaaayaatataaatttgcaggatacaaaattaacacacaaaaatcagtagtgtttctatgcaataatagcaaactgtctgaaaataaaaagtttttttaaaacaaattcatttacaatagctacaaaaaattagataataaataaacaagaaggtaaaagatctctacactgaaaactgtaaaacattgatgaaagaaattaaagaggacactaagaaatgaaaagatattccacgttcagggaatgaaaaaaatagtattgttaaaatggccacactacccaaaatgatctataaatttaatacaatctccattaaaataccaatgacattttttacaaaaataggaaaaaaaatcctaaaatttgtaggaaaccacaaaaagtcccaaatatgcaaagcaatcctcagcaaaaagaatgcagctagaggcatcacactgacttcaacacactatatactacaaagctatcataaacaaaacagtatgattccatcataaaaaccacatactttgaccaatgaaacagtagaaaacccagaaataaatccacacattta

SEQ ID NO: 343943 - DNA, 524 bp, Homo sapiens
tcacattctttacctgtgaattctgaccattttggactaggtcacgttaggttttaaaaatcagcccaaatgttaaccctttcaaactcactgtaggtcaagccacagtaggtgacattcatctcatcagaatgaaaactgattgagatatggtgcataaagtcattaacacagcttggcacagagtaatcattcaatccatgttgactattaacttattatcattactcttttttatyacctgttatttttgcctatgaactcagatataacctcagacccctcctagacatgatgttcaggcagctcctaccagtggatttggagctggcataagagataaaacagaggttctgtccagcgagtaccatctcgctggacttggaaggcaccaagtcatgcactcaggtgtggctcgtttttcccatcacgacacaatcacacactcccatcattttttctgtgcaatactttccttgcttccaccattattgtgtgcatttgctcatggtgtgtcatacatc

SEQ ID NO: 343944 - DNA, 522 bp, Homo sapiens
caggtgttcgacaccagcctgaccaatatgatgaaaccctgtctctactaaaaatacaaaaattagctgagcatggtggcacgcgcctgtaatcccagctacttgggaggctgagagagtagaatcacttgaacctaggaggtggaggttgcagtgagccgagatcacggcattgcacttcagcctgtgcaaaaagagcgaaactccatctaaaaaaaaaaaaagaaagttctacaacaggcaaaactcaagaaggcaatagaaaggatttaaacagtggttgcttctaggggatgggatgaggatggactgggcaggggcatgagaagacgtattgtggaacaagagtttgggttacacgtgcatgcgtgtgtcaaaactcaatgtactggtaaatactatgcaygtgccaaagatcgttaaatggcattaggttggagcaaaactttttgtaacacatttaagatctgtgcattttatttcatgtaaattttaccatcaaaaaaacctgcaaataagtac

SEQ ID NO: 343945 - DNA, 481 bp, Homo sapiens
tgcctctaattttaagaactaacagagaatagcgagaggagacaaagagtcagagatgaagaaagagagagagaaagagggaatcctatagattaaaaagcaagacatttatacaccaactgtaatgtgaagactttcttttggattctgatggaagttaaaaaaaattgaaaaaaaaatcatatgcatcggatcagaggtatcaactatccactaaaattcatgctcctccttccacatttaagaattatcactgagaagcagtgatctggccaatgactacattttccccattcttttgcatctggagatagccatgaaattagtcttaccaatggaacgtgagtggaagtgatagccagactttcgagaartaggtataccttctctattcttctcttttaaaaagttaggtgcaaagaacattaagactccagggaacagtggaaccactatatgaaagaaactgggtccctgaatc

SEQ ID NO: 343946 - DNA, 660 bp, Homo sapiens
ataatctgaactcaataaagcattgacgctactactgctacactaacttgttacttgctctctaaatatgtccctcaagtctctgaaatatacctaagtttaagatcagtgtaggacatgtttctattaaattggtggttttggctaagtggagtcaaaataacttttttraggaaagatacttacatttataaatgttggttgaaatcaaaaggaaattttaccttaatctcacaggtgagtaaagtaatcaagggttttgatgaatgagcatcaatctacagaactatgctgcaatcttatcaccaagcagtttaattttttaaataaaagtaaagagatctttctgaaatgtatttcgcccataggtgatccttgccgaactcccggaggattttaaagctgctttatatgagtataacctggcagtaatgaaggattttgcctccttcctgctgattgcttccaagtcggtgaacatgaaaaaagagcatcaactccctttgtcaagaatcagtaagcagattttagttccattccggaacaatttaaagagtaaacaatcttggttaagaaagcctctggatattggatgcttcaaagctggtaaaggagcttattacagggcagctgtactaacccaagtgttttatccccaga

SEQ ID NO: 343947 - DNA, 660 bp, Homo sapiens
ataatctgaactcaataaagcattgacgctactactgctacactaacttgttacttgctctctaaatatgtccctcaagtctctgaaatatacctaagtttaagatcagtgtaggacatgtttctattaaattggtggttttggctaagtggagtcaaaataacttttttaaggaaagatacttacatttataaatgttggttgaaatcaaaaggaaattttaccttaatctcacaggtgartaaagtaatcaagggttttgatgaatgagcatcaatctacagaactatgctgcaatcttatcaccaagcagtttaattttttaaataaaagtaaagagatctttctgaaatgtatttcgcccataggtgatccttgccgaactcccggaggattttaaagctgctttatatgagtataacctggcagtaatgaaggattttgcctccttcctgctgattgcttccaagtcggtgaacatgaaaaaagagcatcaactccctttgtcaagaatcagtaagcagattttagttccattccggaacaatttaaagagtaaacaatcttggttaagaaagcctctggatattggatgcttcaaagctggtaaaggagcttattacagggcagctgtactaacccaagtgttttatccccaga

SEQ ID NO: 343948 - DNA, 554 bp, Homo sapiens
catctatttgccacattgtaactttaataagagctctttgaactgcctgttaggcctcttaaattaaactgactggtaccgatatataggcaaggtggaagttccactgaatgctttcttcaagagcccactgttatatattctgagaagtraaatgcacctttctcacattcattaatgtctagaactccaaaggggataagaaatgtcctcgtgagggcttgtattatggccttagtatgtatagaggtatctattaccttaatttatattttgggtatcagtaagaaaggagatttccagagttttttaccccaaaggaaggaactcataggccatggcccgagaatggcccaagattatgtaacagtggacagatgggaccagttctcaatgagggcatctaatgcggagatgactttcaaagtttagccaacagtgctgatgcttgggttccatcctctttcagagacaccctggttaaaggatggaaagtcgccacattccattgagctctagcacatatcgtggtggtgattccattcattaaatct

SEQ ID NO: 343949 - DNA, 554 bp, Homo sapiens
catctatttgccacattgtaactttaataagagctctttgaactgcctgttaggcctcttaaattaaactgactggtaccgatatataggcaaggtggaagttccactgaatgctttcttcaagagcccactgttatatattctgagaagtgaaatgcacctttctcacattcattaatgtctagaactccaaaggggataagaaatgtcctcgtgagggcttgtattatggccttagtatgtatagaggtatctattaccttaatttatattttgggtatcagtaagaaaggagatttccagagttttttaccccaaaggaaggaactcataggccatggcccgagaatggcccaagattatgtaacagtggacagatgggaccagttctcaatgagggcatctaatgcggagatgactttcaaagtttagccaacagtgctgatgcttgggttccatcctctttcagagacaccctggttaaaggatggaaagtcgccacattccaytgagctctagcacatatcgtggtggtgattccattcattaaatct

SEQ ID NO: 343950 - DNA, 544 bp, Homo sapiens
ggcaacacgctcaaagacacacctaggatcaatactttgaatgcttcaatccaatcaagttgacactcagtgttaaccatcacacctgccttggcctcccaraatgttgagattacaggtgtgaaccagtgcacttggccaagaaactttttatctgaggaatgtgagtgccctttaattatcaggcccagagaggcattggagtgtgacagggtgtgacagcagtcatgtctcactcccctcgtgagctaaataattacctcttgaagccacttcctatgtgaactctaggctaactgacatgaagtagccataaaacaccatacattggacaccatacctcattccttgtagttcaacaatgtatagccaatcacaaatcaatgttatttctgtaaaactgtgagaactcctgtcaaaaaactttgtatcagcccacttcttgtccccttttgcctttaaaaatctacttgtagcaaaggctgagcagaatactttttgggacaacttggaagtgtgtctgtcccagacagctgtcttcaac

SEQ ID NO: 343951 - DNA, 599 bp, Homo sapiens
cttgctaactttttcattctttttatatgttgatttttactttttcctttataaaggaagtcaagtatgagtgaaaactgataatataacttgtttttgactgtctatatattttttgtggaaaaatagatttgcttctaccttaaattctgttatgttgtcagcatttgccacttaattaattagatcaatatgaaatttttacattaaagaattattagaagaattataagtgaaatgaaagattgaatgtattctcaaatgtgtcactcttaattccagataaaaatgaggaaaacagtattgctgtattaaaaataaaaattatattttaaatataaaataacctgtttataaaagtttatttggaaccatakaaaagctgaaagaaggaaaaatcacccatacctagttccactactcacttgatcttagccaaaaggccaagaagcgatagttccactactcaaaggaaactgctttattattttggtatatttcttccagtcttttctacctaaatgtgggtaagtgtttgctttttaaagaatggatgcagttatgttgaactagatgtcagaatttggtaaatttgcctg

SEQ ID NO: 343952 - DNA, 661 bp, Homo sapiens
aaaatcacccatacctagttccactactcacttgatcttagccaaaaggccaagaagcgatagttccactactcaaaggaaactgctttattattttggtatatttcttccagtcttttctacctaaatgtgggtaagtgtttgctttttaaagaatggatgcagttatgttgaactagatgtcagaatttggtaaatttgcctgaggttttcaatcagaacaattttgggggrtgtaaccccatgttgagtaatatataattcacattaaaatttaaatttaataaaatatcattgtaaggttaccaagttttccatattcttatatattcattatcatggccagttacgtcagattccacttgccaagacaaagagtcttcccagaaccctgtaatgagtcaggtgtgtgccttttgatagtcacagagaacagcgacacccagttctatgtaaaagtggccccattcttggttttgattactctcccaggaagagagagtagtacactttaaaggtttttgttattgtttttcatataataacgtttgtgagggtggcatattttctgggctcctgcgtatttgaggagattttttcttttgtagtaaggacaatttaacctggcataaattttttggatttgagccattagtcttca

SEQ ID NO: 343953 - DNA, 661 bp, Homo sapiens
aaaatcacccatacctagttccactactcacttgatcttagccaaaaggccaagaagcgatagttccactactcaaaggaaactgctttattattttggtatatttcttccagtcttttctacctaaatgtgggtaagtgtttgctttttaaagaatggatgcagttatgttgaactagatgtcagaatttggtaaatttgcctgaggttttcaatcagaacaattttgggggatgtaaccccatgttgagtaatatataattcacattaaaatttaaatttaataaaatatcattgtaaggttaccaagttttccatattcttatatattcattatcatggccagttacgtcagattccacttgccaagacaaagagtcttcccagaaccctgtaatgagtcaggtgtgtgccttttgatagtcacagagaacagcgacacccagttctatgtaaaagtggccccattcttggttttgattactctcccaggaagagagagtagtacactttaaaggtttttgttattgtttttcatataataacgtttgtgagggtggcatattttctgggctcctgcrtatttgaggagattttttcttttgtagtaaggacaatttaacctggcataaattttttggatttgagccattagtcttca

SEQ ID NO: 343954 - DNA, 570 bp, Homo sapiens
actattggtcaccactgtttcagggatttagcagattatttgccagtctgggttatgtataacagttctgctttatatgatgtatttaattcaaggaagcatgtgccatgtgaagatacaatcaaagagataatatgaaatcaaatgaaatttactttcacgtaagatctggtaaccttatctatatagtatgtrtgtgtactatttattacatatcagtatttacaaatactgtttaaaactagataaattaaagtactcttcttttataggtgttgtcagtgctaaagcattcattgctgtcttttaagagacgaagagccatggagactttgaaactttactttttgttttccttgcagctccttatcaaagaggtatcatcgtgctttggctttttgttctctgtaactagtaccgtgtaaacttctttctatgctaaaccaactgaaatttctataatctgcattcaatgataatgttacttatcatttattaataaatgaagtcaggtaatatttgtcagtcactcacactggtattttatggtatttgagtacatgacaagtt

SEQ ID NO: 343955 - DNA, 566 bp, Homo sapiens
tgttaatattttcatttatagttactgcaattatacttatttttagaaaatatttcactatcatgaatataaaaatgatgactatagtatttttaaggattaattttttaaaaatttacattttaagttrtttccctttctttctttctctctcccctttccttttttattttccctccctcccttggagtggtatgctatgattataattatgaagatttatgtttttcttttaattaatattgtttcaattaaaaaatacagccaggtatatatgacttccatttccagcaatatggccatataggtcaacagaaaaatctctttgtgtaaaatacctgaaatgctggataagagacaccaaacatctttttatataattatagttaagctcagaacaatagaaggggaatcctaggggctgaaaattttaagagaaggccacatgggctctttgcctcttttaggcagcaagttgcaggggcttaaataagaaaggatcccgacaaacacaggcagagagagcactaggaggatcccaggcagagcaatggtggtttacctgg

SEQ ID NO: 343956 - DNA, 625 bp, Homo sapiens
atctgtgtaatagattaagcatcaaaagcaaaggagagaaaagcattaaagatgactccggagtgaaaaagtgggcacggcaaatgaagaaggaaatgtttattaaggacctttaatgtgtctctttcctatttcacttaatcctcacatgggctgtggggtagtgattatcacagccattctggagacagtgaaggaagatccagcagttcagatatctcatctgaagtctcacatctgtttggcaataatcacctcatgtccacagattttccattatcatggtttccattataccacaactgaaaatgacagcctggcatagatggaygcacattgtacagaagaaatcatcagttccacaaataccttcagcatctcttgtcatccccatgctaattgctatttgagatacaaattccttaatggaatttacaagagcacataacaagaacagtgaaagaacaagcgcaatcacatttccccaaagctggagtaatcaaagaagacttcaaagaaaacatataaggacagttcaatcagacccttgtaaagggctaggatttcaatcaggggaaagaaggaaaagtctctaagaggaagaaggagagcaaatgtcctgatg

SEQ ID NO: 343957 - DNA, 694 bp, Homo sapiens
taacagccagtgctgccactgatgcccaaggatcactgtcttaatccaakacatgaacgttctgttaaaataattgatatgcaggaaaaatattgggcagccagacaaatatggcaaatgcccactacaaattcttttgagaatctcatgaaattcttgtactctgtcaacagaaaaaagcaaaaatactcattctcaacttttgttgttgctgttgttaaatatggacatatagaacttactcttgcaatctcagagcagtagatacataaaaagcacattctaagatataattttcttaaacatttagtgagtaaatagtctgaagcaactctagtgaaaatatcctttgtcctccttttctctggcaccttgaagttctgggaggcattcttactttcttttctcaaaagatttcttagatcaatttgacttcttttcctgccattttagcaccttaatccctctatcctttacagattaaactcttttctataagctctcttgattcattgaccctcccacaacgctactatttcagtaatattcctttaaaaattgtggcttattccttttattcacaagacaaagaagtggagaggaggcaaagatgaaacactgcaatgctctagcaagagatcagagagatagcattcatggaattttaaaaatatattgatcagtgtgtgtacct

SEQ ID NO: 343958 - DNA, 635 bp, Homo sapiens
tagtgaatttgtaatttcagttattgtacttttcatctacataatttgcatttttaaaatcatattgtctgtcccggtattgatattctttacttgaagtgacatcttcatgccttcttttacttccataagactggttttctttagttctttgaacaaacttataatgactactttgaaggctttgttaaaactgatataaggtccttttcacmggcagtttcagttgcctgatggaactttcttacctttttgggtgtctcataatttttggttgagcactgggcacttaatacaatatattatagtaactctggatactgatcccctttatcctctctgaggtttgctttgttttattgtttgcttgtttacttgtttgcgacttggccaaactatttgtagataaggtattttaaagaagtttgtcttgcagcgttttgggaagttttccttagcgtgtgaatgaatactttatgtagttccatgaagagtagggcttgggagtgctcacagtcactctcttatcagtggttttactggttgtctccttaattgtctttttccctaatgtctgttcagttgtctgcctagttagtattaggcttttactaattactagtggattgctgtat

SEQ ID NO: 343959 - DNA, 635 bp, Homo sapiens
tagtgaatttgtaatttcagttattgtacttttcatctacataatttgcatttttaaaatcatattgtctgtcccggtattgatattctttacttgaagtgacatcttcatgccttcttttacttccataagactggttttctttagttctttgaacaaacttataatgactactttgaaggctttgttaaaactgatataaggtccttttcacaggcagtttcagttgcctgatggaactttcttacctttttgggtgtctcataatttttggttgagcactgggcacttaatacaatatattatagtaactctggatactgatcccctttatcctctctgaggtttgctttgttttattgtttgcttgtttacttgtttgcgacttggcyaaactatttgtagataaggtattttaaagaagtttgtcttgcagcgttttgggaagttttccttagcgtgtgaatgaatactttatgtagttccatgaagagtagggcttgggagtgctcacagtcactctcttatcagtggttttactggttgtctccttaattgtctttttccctaatgtctgttcagttgtctgcctagttagtattaggcttttactaattactagtggattgctgtat

SEQ ID NO: 343960 - DNA, 635 bp, Homo sapiens
tagtgaatttgtaatttcagttattgtacttttcatctacataatttgcatttttaaaatcatattgtctgtcccggtattgatattctttacttgaagtgacatcttcatgccttcttttacttccataagactggttttctttagttctttgaacaaacttataatgactactttgaaggctttgttaaaactgatataaggtccttttcacaggcagtttcagttgcctgatggaactttcttacctttttgggtgtctcataatttttggttgagcactgggcacttaatacaatatattatagtaactctggatactgatcccctttatcctctctgaggtttgctttgttttattgtttgcttgtttacttgtttgcgacttggccaaactatttgtagataaggtattttaaagaagtttgtcttgcagcgttttgggaagttttccttagcgtgtgaatraatactttatgtagttccatgaagagtagggcttgggagtgctcacagtcactctcttatcagtggttttactggttgtctccttaattgtctttttccctaatgtctgttcagttgtctgcctagttagtattaggcttttactaattactagtggattgctgtat

SEQ ID NO: 343961 - DNA, 539 bp, Homo sapiens
aatcatttgttaaaaaaagtgttaacttttaattgttctaatatattatagttaatatacatgtaccagaagtgtaatgtaaaaaaagtaatttgccaataatctactttttcwttagagcatattttctattaacttcaaatattattttgcaagttacttaactacataatgtactaacttttgtttttattaatgaactgcagctttaaatgttatagcaagtgttgatctcttcattgttctcagtggaaatagttactatgttagccccactaaacattgttttctttttcttcaaagttacaactggcttacacaggagaaaactggcttttatttaaagataggcaaaaaccttcgcagtaagttatactctgacacatatttccaatttagaattcaacctggccttcagttaattttttccatagttgctatcttttcatcgtgctgcataatttattactggtattattctaaattacctataggatataaaactaaacttttagtcatttaaaacaacactttttttt

SEQ ID NO: 343962 - DNA, 539 bp, Homo sapiens
aatcatttgttaaaaaaagtgttaacttttaattgttctaatatattatagttaatatacatgtaccagaagtgtaatgtaaaaaaagtaatttgccaataatctactttttctttagagcatattttctaytaacttcaaatattattttgcaagttacttaactacataatgtactaacttttgtttttattaatgaactgcagctttaaatgttatagcaagtgttgatctcttcattgttctcagtggaaatagttactatgttagccccactaaacattgttttctttttcttcaaagttacaactggcttacacaggagaaaactggcttttatttaaagataggcaaaaaccttcgcagtaagttatactctgacacatatttccaatttagaattcaacctggccttcagttaattttttccatagttgctatcttttcatcgtgctgcataatttattactggtattattctaaattacctataggatataaaactaaacttttagtcatttaaaacaacactttttttt

SEQ ID NO: 343963 - DNA, 624 bp, Homo sapiens
caaagtgtattagattgcagaatggggacaagagagataatctaacaaagttcccagtttcccatctaaatatttttggttattgacatagacatcagtgaagtcccatggaagatatacataaccatcacttgtgatcactgtggaagagcttcctccagagatgcctaatggcagatgattgtagaggacaactcattggagttactgtagttctctagtgatgatgttggtggttttggtaagaatgacagtcctggttatttcttaaggcagaacactgaaaatattggcattctagtgaccttgagttgaccatggggcagctgctccaggaaagaatacacgatctgctgtaatartcaagtcctttaagtttactctcactcgtttaacctttcattctaaggctaatcgagaatcttgtgagaaagtaaggttacaacctccttctggggctggaattgtgcaccaaagtctgtagtcgtatacattttttgtagacttttggatcatctggtacctataaaactcaaaccttatgcactatagagggtaaggtgagaaaataagacattgtgattaaagatttgataagaactactaaagttagctgaataacac

SEQ ID NO: 343964 - DNA, 572 bp, Homo sapiens
gaataatagcacatgaatgatgtgataaaaagataaactgagataaagtgtattgagctaatatatgctaaccaagacaagagacctcacagtccttgtggcacatatacaacctctagagctctaatgatttctacaaatctacaaatgtaatttaatgagtggaaatattaaccatatattttagatttattaaatgtgaaatcaatgtttgagttcctattttctttttactctggtagttaaagattgcctcaggattactttacaaactgcaagaccccacyagtatcccagactctatttgttaatctctatttgttaaacactgcttactggtcatgcttcacaaatcacttgtatttcaaagatgtagaatttaccaaggtctcttcctgtttaaacatttaggcagcaaaaaagatcatgaatgtcagtgtcttaacccttaatccaatttgttttaatcttaaaatgttaaagtagagaacaaatcttttatagttgagatagtaactacgttcatgattagaattgaacactcaatgagtgcctctgcttcaacagagttg

SEQ ID NO: 343965 - DNA, 617 bp, Homo sapiens
acaaatcttttatagttgagatagtaactacgttcatgattagaattgaacactcaatgagtgcctctgcttcaacagagttggtttactttccctgtcttattgggggactcttttgctgacagagcagtgatttttgttatttgtttgtggattgataatcatttttaatgataatctaggttttattacaatatctagtacttgaaagacatttttaaataaataaaaatcataataattattctgaaatagattaacaattaaatatcacatcaataaaattattttaattttatttttgctttccccatggttttgtttattaaatatttactaatctttatgtcaagaagcattttatgaaaatgagaaataaacacacaagagataaaatggaatttagtagtggaaatacttattctcctataccaatgtggttgggcaaaacctcacaatttgtaatgaatctgttctggatttgattcgatgtattktatcacctaagagaaaaaaattgcattatcaaaaacattttaaaacaagctacattctaggataccagactttttttacgttttagctattgttggctttccattagtgaaaataatatg

SEQ ID NO: 343966 - DNA, 606 bp, Homo sapiens
cagatttatatagaaatgtttacatagtggtttgaccctggacaagcttcttaacctttctgatactcaatttattcatctgtaaaataaggataagaatacaacatgaaaaatccacaaatttttgatgagaattaaattagctaattaaaaagcacataaaacaagatcaggcatatagttaagtgtaatcatcaaagctgtctttggcaacacgactaatagaatggtagtctacccacattaatataacttagttgtttctttgaggaartttataccaaagacatataagagcatgaaccaataaataacttcgctatttactggaattataagaggtcagtttatcagatgataacaattggctcgtttatcaaacagcagtgtgctcatcaacattcacttcaagatccttgcttcagtctgtccaatcctaatagcatgaataatgccaaatcaaatatcatcaaatgccaaatgccaaatctaaagcaattccccatcatgagaaatccaccttaaattactttacccagaccacagagtccgcatcttatcccgcctttgactttcccttctgagatgatgctaagaatgagacag

SEQ ID NO: 343967 - DNA, 561 bp, Homo sapiens
tgtttccagaaactttttgttatttttgaatgacaaaacatgaatctaaaatgaagtgggaattagtaattaactactattcataatttcagaraagaaaaatagtgagatataatcaaattaagagattcaatgacctcattaccaattcatttattttactattcttcctcttttgtatgaaaagatctaactaaaatatattataaaaagcattcttccaaattcctgttaacattaaaaaaaaagaagagaagaaaaaagtgaattcatagattcactatggaattgaaaaattgagtggtttgtaagttttaagcagctaaaggagctcaaatagaatcagcagaagagtttctctagctatgtctctcaggtcttgttccatctggatctgatgtggaatgtaagagttatcgtctggtgtctatgcaactattattaacaataagtgaaggactttgttttatatttcttgagtttatactaccttgcttataatttaaatgttcaatacatttctcataaatgaatgaactggttcactttctataagttagg

SEQ ID NO: 343968 - DNA, 561 bp, Homo sapiens
tgtttccagaaactttttgttatttttgaatgacaaaacatgaatctaaaatgaagtgggaattagtaattaactactattcataatttcagaaaagaaaaatagtgagatataatcaaattaagagattcaatgayctcattaccaattcatttattttactattcttcctcttttgtatgaaaagatctaactaaaatatattataaaaagcattcttccaaattcctgttaacattaaaaaaaaagaagagaagaaaaaagtgaattcatagattcactatggaattgaaaaattgagtggtttgtaagttttaagcagctaaaggagctcaaatagaatcagcagaagagtttctctagctatgtctctcaggtcttgttccatctggatctgatgtggaatgtaagagttatcgtctggtgtctatgcaactattattaacaataagtgaaggactttgttttatatttcttgagtttatactaccttgcttataatttaaatgttcaatacatttctcataaatgaatgaactggttcactttctataagttagg

SEQ ID NO: 343969 - DNA, 565 bp, Homo sapiens
cagcatctgctcaaatatgccttttattctatatcctgtacctttataatgaaaattatatatagctagctagatagatagataaatcaatagcacttgctttttaagtctactgaaaaaaatcaatgtataggctgtaacttgaacagggttgatgaattgtctctgaatgtaatcaatataataaactctaacatgactgagctttcagaagttttttttgtaatggattttaaaaagtctttttaaaatttagtatatttagtattccaacgaaatctacaagtatgtattagagaaacactaatagtctcaataattacacataattgtgtaacttttcatttttcatatttgttgatttcttattaatagcaatagaactgagttatttttccattactacagtgtgataaaaacctatcacactatatgcttcagaagcccagtcaattttgaatggktaatttttttatattgatagatattattctacaactgaagaatgaaaactctcagtgggttttacatactgtgtgttgaaaaactagcttttttactatac

SEQ ID NO: 343970 - DNA, 568 bp, Homo sapiens
tctaatgatatactgagtgttttgaaggactgatgtggctaagacaatggtctgggattggcaataagggttaaggaatgtagctgcctgattgcaagctcattcccatgtaagagtggtggggacgcggaaaacaaaacaaaatacagccacttgggaggtcttcaccaaaagcaatattctcaagagagatttggatttcagttagtggcagcagttgaaaggaacagtgagaaaaaaggttaagatatagtacattttaatcatattggcattgagtataattgaacttgaaacaggacgcatgtagcagattaggaatgtgcagagctacttaggaaggggastgatgggcaatgagtaatatcttggcagttttgtatttcttgtggtagttgatagaacaaggatggaagtgatgatgggatctgtcttgattgtttcttaggcagactggggtatttgtggctgagagtgtttgcctatttgcaagtagagtgatacacatagtgagtgctcttttcccctctcctcaggagaagccatgtagcaagggacacacagagtt

SEQ ID NO: 343971 - DNA, 568 bp, Homo sapiens
tctaatgatatactgagtgttttgaaggactgatgtggctaagacaatggtctgggattggcaataagggttaaggaatgtagctgcctgattgcaagctcattcccatgtaagagtggtggggacgcggaaaacaaaacaaaatacagccacttgggaggtcttcaccaaaagcaatattctcaagagagatttggatttcagttagtggcagcagttgaaaggaacagtgagaaaaaaggttaagatatagtacattttaatcatattggcattgagtataattgaacttgaaacaggacgcatgtagcagattaggaatgtgcagagctacttaggaaggggactgatgggcaatgagtratatcttggcagttttgtatttcttgtggtagttgatagaacaaggatggaagtgatgatgggatctgtcttgattgtttcttaggcagactggggtatttgtggctgagagtgtttgcctatttgcaagtagagtgatacacatagtgagtgctcttttcccctctcctcaggagaagccatgtagcaagggacacacagagtt

SEQ ID NO: 343972 - DNA, 628 bp, Homo sapiens
cacaaaacctttttctgataaaagacttgtgtctgtgtttctaaaatataacaagaatggacaatatatatttaaaaaaataataaatgagcaaaatatataaacagacacctcaaaaaagatatacagttagcaaataagcatatcaaaagatgctaaacattatatgccattattgaattacagattaaaactttaggctattactacagacctattagaatgtttaaaaaccaaaacatttgacaaacccaaatgctgrccagaatgtgcagcaacaagaattcttatctattgctggtagaaatgcaaaagagtacagtaactttgaaacatattttggcagttttttaaaagctaaaccttaccatataagtataggaaccatgtgtctaggtattcacctaaatgagttaaaaattacactcacacaaaaccttacacactaatatttataggagctttatccataatcatcaaaacgtggaaaccatcaagatgttcttcagaaactgaatggataaagattctgtgggacattcatataattaaacattattaagggatataaagaactaagctgccaattcataaaaagatatgaagggacctaaatgaacattgctaa

SEQ ID NO: 343973 - DNA, 628 bp, Homo sapiens
cacaaaacctttttctgataaaagacttgtgtctgtgtttctaaaatataacaagaatggacaatatatatttaaaaaaataataaatgagcaaaatatataaacagacacctcaaaaaagatatacagttagcaaataagcatatcaaaagatgctaaacattatatgccattattgaattacagattaaaactttaggctattactacagacctattagaatgtttaaaaaccaaaacatttgacaaacccaaatgctggccagaatgtgcagcaacaagaattcttatctattgctggtagaaatgcaaaagagtacagtaactttgaaacatattttggcagttttttaaaagctaaaccttaccatataagtataggaaccatgtgtctaggtattcacctaaatgagttaaaaattacactcacacaaaaccttacacactaatatttataggagctttatccataatcatcaaaacgtggaaaccatcaagatgttcttcagaaastgaatggataaagattctgtgggacattcatataattaaacattattaagggatataaagaactaagctgccaattcataaaaagatatgaagggacctaaatgaacattgctaa

SEQ ID NO: 343974 - DNA, 609 bp, Homo sapiens
agcctactgcacatccaggctataggctatagactgtttctcctaggctacaaacctgtgcagctttttactgtattgaatgctgtaggcaactgtaaaataatggtaaatacttgtgtatctaaacatatctacacatagaaagagtagagtaaaaatgcaatataaatggtcaaaaatggtacatttgtataggtcccttaccatgaaaagagcatatagcactagtagctsctttgggtgaatcagtgagtgagtggtgagtgaatgtgaagaccttggatattactgaacagtattgtagactataaatactgtatagctatgctatactaaattaatacaaaatatttatatttctccactagtaaattaacctttgctaacttttttagtgtataaacttttgtttttttaactgtaacacagcttaacacacaaacattttcacagctgtgcaaacatattttctttatatccctattctataaactcttaattttttaaacttttaaatttttgttaaaaaagacacaaacacacacattagtctaggtctacacagagtcatgatcatcactgtcttccacatctagttccacaggaagg

SEQ ID NO: 343975 - DNA, 609 bp, Homo sapiens
agcctactgcacatccaggctataggctatagactgtttctcctaggctacaaacctgtgcagctttttactgtattgaatgctgtaggcaactgtaaaataatggtaaatacttgtgtatctaaacatatctacacatagaaagagtagagtaaaaatgcaatataaatggtcaaaaatggtacatttgtataggtcccttaccatgaaaagagcatatagcactagtagctgctttgggtgaatcagtgagtgagtggtgagtgaatgtgaagaccttggatattactgaacagtattgtagactataaatactgtatagctatgctatactaaattaatacaaaatatttatatttctycactagtaaattaacctttgctaacttttttagtgtataaacttttgtttttttaactgtaacacagcttaacacacaaacattttcacagctgtgcaaacatattttctttatatccctattctataaactcttaattttttaaacttttaaatttttgttaaaaaagacacaaacacacacattagtctaggtctacacagagtcatgatcatcactgtcttccacatctagttccacaggaagg

SEQ ID NO: 343976 - DNA, 633 bp, Homo sapiens
aaacaatatggccactatgctgttctggatattaaatagaaagagtagttgtataaaaaagttaatgagttcttaaaatcttatgataaaatcatgacgtttactgaaatagagtctgacctcactttgtacaaagttcgactactcacagatttcaagacccaaaaactttaatttccccttctgccccacatcagagcaagctgctaagaaaatttagacgtgttccactgagagcaaaaggaagttcaaactatgtaagcccagcaagtgtgcaagaatggtccctccagccctgcctcctaatcacwatcaccacacccctccacccccagccagtctcctttcacgtctctcccatgttgctttctgacctgtttgagaccgtgcctttctccatccagaaagcctcattatgtgactaataaatatctttatttttttgatgtgtgtaacatggtcatgacatctgaactgaattttaggtggtgggagggtatcttgtatcaattacatgataaagatgtttacacaggctatttgggctgttttgtcctataatagggaaagaatggctaggagaaagttcataaggcaatgttaactcaatagagattcatttatatagaattt

SEQ ID NO: 343977 - DNA, 609 bp, Homo sapiens
agcctactgcacatccaggctataggctatagactgtttctcctaggctacaaacctgtgcagctttttactgtattgaatgctgtaggcaactgtaaaataatggtaaatacttgtgtatctaaacatatctacacatagaaagagtagagtaaaaatgcaatataaatggtcaaaaatggtacatttgtataggtcccttaccatgaaaagagcatatagcactagtagctgctttgggtgaatcagtgagtgagtggtgagtgaatgtgaagaccttggatattactgaacagtattgtagactataaatactgtatagctatgctatactaaattaatacaaaatatttatatttctccactagtaaattaacctttgctaacttttttagtgtataaacttttgtttttttaactgyaacacagcttaacacacaaacattttcacagctgtgcaaacatattttctttatatccctattctataaactcttaattttttaaacttttaaatttttgttaaaaaagacacaaacacacacattagtctaggtctacacagagtcatgatcatcactgtcttccacatctagttccacaggaagg

SEQ ID NO: 343978 - DNA, 594 bp, Homo sapiens
taattttttaaacttttaaatttttgttaaaaaagacacaaacacacacattagtctaggtctacacagagtcatgatcatcactgtcttccacatctagttccacaggaaggtattaaggggcacaaacacaaatggagctgtcatcttctaagataacagtgcctttttctggaatacctcctgaaggtcctgcttgaggctgttttacaagtaacttcctttttttttctatatagaagaagtacatgctaaaataacaatgaaaagcataaactagtgaacatataaaccagtaacatactaatttatcatcattatcaaatactatatactgtacaaagttagacgtgctatacttttatacaactgrcagcacggtaggtttacttataccaacatcacagacatgtgagtaatgcattttactgtcacatcacgaaggctaaaatatcactaaacagcaggaatttttcagctccattacaaacttagggaaccatagtcatatatatggtcagttataatcttaaggaaacatagtcatatatgtggtcagttattgactgaaacatcattacatggcacatgact

SEQ ID NO: 343979 - DNA, 633 bp, Homo sapiens
aaacaatatggccactatgctgttctggatattaaatagaaagagtagttgtataaaaaagttaatgagttcttaaaatcttatgataaaatcatgacgtttactgaaatagagtctgacctcactttgtacaaagttcgactactcacagatttcaagacccaaaaactttaatttccccttctgccccacatcagagcaagctgctaagaaaatttagacgtgttccactgagagcaaaaggaagttcaaactatgtaagcccagcaagtgtgcaagaatggtccctccagccctgcctcctaatcacaatcaccacacccctccacccccagccagtctcctttcacgtctctcccatgttrctttctgacctgtttgagaccgtgcctttctccatccagaaagcctcattatgtgactaataaatatctttatttttttgatgtgtgtaacatggtcatgacatctgaactgaattttaggtggtgggagggtatcttgtatcaattacatgataaagatgtttacacaggctatttgggctgttttgtcctataatagggaaagaatggctaggagaaagttcataaggcaatgttaactcaatagagattcatttatatagaattt

SEQ ID NO: 343980 - DNA, 579 bp, Homo sapiens
ccccttctgccccacatcagagcaagctgctaagaaaatttagacgtgttccactgagagcaaaaggaagttcaaactatgtaagcccagcaagtgtgcaagaatggtccctccagccctgcctcctaatcacaatcaccacacccctccacccccagccagtctcctttcacgtctctcccatgttgctttctgacctgtttgagaccktgcctttctccatccagaaagcctcattatgtgactaataaatatctttatttttttgatgtgtgtaacatggtcatgacatctgaactgaattttaggtggtgggagggtatcttgtatcaattacatgataaagatgtttacacaggctatttgggctgttttgtcctataatagggaaagaatggctaggagaaagttcataaggcaatgttaactcaatagagattcatttatatagaatttcacaatttctgaggaactgctaatattataatttgtctgtattcctttggtgtagtataaaatattccttgcttttaatgatgatatcatttttatcatgtggctggagtccagtaagtagaa

SEQ ID NO: 343981 - DNA, 633 bp, Homo sapiens
aaacaatatggccactatgctgttctggatattaaatagaaagagtagttgtataaaaaagttaatgagttcttaaaatcttatgataaaatcatgacgtttactgaaatagagtctgacctcactttgtacaaagttcgactactcacagatttcaagacccaaaaactttaatttccccttctgccccacatcagagcaagctgctaagaaaatttagacgtgttccactgagagcaaaaggaagttcaaactatgtaagcccagcaagtgtgcaagaatggtccctccagccctgcctcctaatcacaatcaccacacccctccacccccagccagtctcctttcacgtctctcccatgttgctttctgacctgtttgagaccgtgcctttctccatccagaaagcctcattatgtgactaataaatatctttatttttttgatgtgtgtaacatggtcatgacatctgaactgaattttaggtggtgggagggtatcttgtatcaattacatgataaagatgtttacacaggctatttgggctgttttgtcctawaatagggaaagaatggctaggagaaagttcataaggcaatgttaactcaatagagattcatttatatagaattt

SEQ ID NO: 343982 - DNA, 547 bp, Homo sapiens
atcatggagataagaatataataatttgtattagtctattctcacattgctataaagacctgaaactgggtaacatataaaagaggctyactaggctcacagttctgcaggctgtagataaagcatagtggcttttgcttctagggagccctgaggaagcttccagtcatgatgaaaaacaagggggaatgagcggtctcacacagaggaagtaggagcaagagagagttggggggagatgctgcacacttttaaacaaccagatcttacaagaattcactcactatcatgagaacagcaccaaggggatggtgttaaatcattcatgagaaatccatccccatgatccatccacctaccaccaggctccacttccaacactggggactacaattaattcaacatgagatttggtgaggacacagatccaaaccatatcactctgcttctggccccctaaatctcatgtccttctgacattctaaacgcaatagtctcttcccaacagtcctcaaatgtcttaagtcattttagcattaagtcaaaa

SEQ ID NO: 343983 - DNA, 423 bp, Homo sapiens
ggctccacttccaacactggggactacaattaattcaacatgagatttggtgaggacacagatccaaaccatatcactctgcttctggccccctaaatctcatgtccttctgacattctaaaygcaatagtctcttcccaacagtcctcaaatgtcttaagtcattttagcattaagtcaaaagtccaaagtctcatctgagacaaggctagtatattttgcccattagcctgtaaaataaaaaacatgttagttactcccaaaacaaaatgggggtataggcattgtgtaaatactcccattacaaaagagagaaatcaaccaaaagaaagaggctattagccccatgtctaaaatccagcagggctgtcattaaatcccagtctaaaacccagcaggactgtcattaaatcttaagcctcc

SEQ ID NO: 343984 - DNA, 423 bp, Homo sapiens
ggctccacttccaacactggggactacaattaattcaacatgagatttggtgaggacacagatccaaaccatatcactctgcttctggccccctaaatctcatgtccttctgacattctaaacgcaatartctcttcccaacagtcctcaaatgtcttaagtcattttagcattaagtcaaaagtccaaagtctcatctgagacaaggctagtatattttgcccattagcctgtaaaataaaaaacatgttagttactcccaaaacaaaatgggggtataggcattgtgtaaatactcccattacaaaagagagaaatcaaccaaaagaaagaggctattagccccatgtctaaaatccagcagggctgtcattaaatcccagtctaaaacccagcaggactgtcattaaatcttaagcctcc

SEQ ID NO: 343985 - DNA, 650 bp, Homo sapiens
attacatgataaagatgtttacacaggctatttgggctgttttgtcctataatagggaaagaatggctaggagaaagttcataaggcaatgttaactcaatagagattcatttatatagaatttcacaatttctgaggaactgctaatattataatttgtctgtattcctttggtgtagtataaaatattccttgcttttaatgatgataycatttttatcatgtggctggagtccagtaagtagaaaaagatgcaatacaaatattactgtacaatcattaactacattataaacaagagcactgtctcctaatgtctagaaatctagaaaagtgtatgatttataatacacagtacagaagaagaaaaagaagaagaggaggaggaggaacaagaggaaggagaaagaaaaaaataacataagcagaatagaaagagtgcaatattagaagtaccataaatgttatgcttatttagcacgttaaggactatcctatggatggaacggaggtaaaggaagaagagtgatggggactgtatcatggaagaagaagcttttgaactaggccttaagaaacattcaggaattctaatagtggggttagtaatggaatagtaatggaattggggctggaacacagcatttaaa

SEQ ID NO: 343986 - DNA, 550 bp, Homo sapiens
ccatcccattactgggtatatacccaaaggactatgagaccctgtcttgaaaaaaaaaaaagttatctacttggtggcaactttaccagtgcttataacattgtatctctcaatctgaactactatccaaaaactatcaaatgttttcaagtaaacagagatttagagtgttttagctattttaattaaatgaaaaaattctgtaattttagtattgatattgaygtttattattgaccactctcgataaaagatgaagaggtggatactccaatctatcaaatagttatgacaccaatttcactatggtgagaatttattaagctagcgaatgaattcagctaaataaaggaaaacttagaatacatttgtgcatatctgtctttaaaaagattatttgacaacttctcctttgacagtccattgcaatttgcaggtgtaaatgaactaaggtaatattttgctgcattatgtcattgtaatctgtattttttcttgaaaataaattgagatgctattcaattctacttaattttccttagtatgttaa

SEQ ID NO: 343987 - DNA, 546 bp, Homo sapiens
taatattaatgtatttaattttgcttggccaactaaactttgtgttgttatttatggggacatcaaaagtccactgagacttccttgagcctcccacacaggtctctgtccatttgtgatagtgaggaaagtccaggactaagtctgagctctaatttcttttctcagactcctgttttkttgtcaaaaactgaagatctttcttttaggaattttttgattacgagcaaatgtgaaatagcttatccttggtgaaaaactgccttgttattaatgacaatctgtttctcctttcccactccgttgggaatgtataaaaagaagtccttgggaaaaaagacaaacccagtttcaatatgttcatgtctttatgcagatgcaagtgatacagggtattttcttgactcctttgagggactcatgacaggagtgccccatttactcagcctgccccactcaacctctcgtaggagggaatgcatgagtgaatgagtatggcaacaggagagagccattgcaggaacctgccagcagaggcaaactcca

SEQ ID NO: 343988 - DNA, 546 bp, Homo sapiens
taatattaatgtatttaattttgcttggccaactaaactttgtgttgttatttatggggacatcaaaagtccactgagacttccttgagcctcccacacaggtctctgtccatttgtgatagtgaggaaagtccaggactaagtctgagctctaatttcttttctcagactcctgtttttttgtcaaaaactgaagatctttcttttaggaattttttgattacgagcaaatgtgaaatagcttatccttggtgaaaaactgccttgttattaatgacaatctgtttctcctttcccactccrttgggaatgtataaaaagaagtccttgggaaaaaagacaaacccagtttcaatatgttcatgtctttatgcagatgcaagtgatacagggtattttcttgactcctttgagggactcatgacaggagtgccccatttactcagcctgccccactcaacctctcgtaggagggaatgcatgagtgaatgagtatggcaacaggagagagccattgcaggaacctgccagcagaggcaaactcca

SEQ ID NO: 343989 - DNA, 592 bp, Homo sapiens
gaatgcatgagtgaatgagtatggcaacaggagagagccattgcaggaacctgccagcagaggcaaactccattcactctgggccagcatgctccaycccttgagtgtgtagaaaggcgagtgcaggaagcagtcaacttattcagtgttggcaggagcaaactctatgtaggccctgtggcagggttcaagaggggacaagtgtaaccataggcagagagaagacccagagtgtgtagctcctatctgtaggcaggttgtcctgatgagtttccagctctcagcaaagaggagacccatagtgggtagctcttttttttttgcaggcaggttgtcccaacaagtgtccagctttctcagtggacagaaagcccgtagcatgtagctcctttcttcagccaagtcatctcaacaagtatgtgagtctagctgagtatgggttttttatgtgcttagaatggaggaagtgcttgctaattggttcatgggtgaccacagacaggcctggaaaaagcaccatccaattggctgaatggtcattaatgaagttctcagtatgggctgcagacttcatctggaactggcagcccag

SEQ ID NO: 343990 - DNA, 561 bp, Homo sapiens
tctctgtccatttgtgatagtgaggaaagtccaggactaagtctgagctctaatttcttttctcagactcctgtttttttgtcaaaaactgaagatctttcttttaggaattttttgattacgagcaaatgtgaaatagcttatccttggtgaaaaactgccttgttattaatgacaatctgtttctcctttcccactccgttgggaatgtataaaaagaagtccttgggaaaaaagacaaacccagtttcaatatgttcatgtctttatgcagatgcaagtgatacagggtattttcttgactcctttgagggactcatgacaggagtgccccatttactcagcctgccccactcaacctctcgtaggagggaatgcatgagtgaatgagtatggcaacaggagagagccattgcaggaacctgccagcagaggcaaactccattcactctgggccagcatgctccaccccttgagtgtgtagaaaggcgagtgcaggaagcagtcaacttattcagtgttggcaggagcaaactctrtgtaggccctgtggcagggttc

SEQ ID NO: 343991 - DNA, 592 bp, Homo sapiens
gaatgcatgagtgaatgagtatggcaacaggagagagccattgcaggaacctgccagcagaggcaaactccattcactctgggccagcatgctccaccccttgagtgtgtagaaaggcgagtgcaggaagcagtcaacttattcagtgttggcaggagcaaactctatgtaggccctgtggcagggttcaagaggggacaagtgtaaccataggcagagagaagacccagagtgtgtagctcctatctgtaggcaggttgtcctgatgagtttccagctctcagcaaagaggagacccatagtgggtagctcttttttttttgcaggcaggttgtcccaacaagwgtccagctttctcagtggacagaaagcccgtagcatgtagctcctttcttcagccaagtcatctcaacaagtatgtgagtctagctgagtatgggttttttatgtgcttagaatggaggaagtgcttgctaattggttcatgggtgaccacagacaggcctggaaaaagcaccatccaattggctgaatggtcattaatgaagttctcagtatgggctgcagacttcatctggaactggcagcccag

SEQ ID NO: 343992 - DNA, 556 bp, Homo sapiens
ccacttgattcctaataaattttaatcagagacatattacttacccaagctttgtttatttgaactatttagctgtataaaattagcayaagaaaagataaatttgagtaacttaaaaatagcatactagggattaggataactaacttttgagcattgtgccaaggactttgctaagaggatcacacaaattattttatataaccttaaaagccactgttatctcctttttagagacctgtaaacttagatttggtgaggtcaggtattaatatttccagagctatgcagctaattagaccaatgtcaacattgtgtctctagattgatattcttaatgccattctcttcttgtgtcttactgaatcaccctgtgttgcacatctgggcctttcattcaacatccattgataacacttattccaaaagctattacaattaggtgggccagtataatacaactattataactttccttgccttcatgctttccccacactgatcttctaaaattgcatagcattacatcatcccttacacaaaaatcttaaatgat

SEQ ID NO: 343993 - DNA, 556 bp, Homo sapiens
ccacttgattcctaataaattttaatcagagacatattacttacccaagctttgtttatttgaactatttagctgtataaaattagcacaagaaaagataaatttgagtaacttaaaaatagcatactagggattaggataactaacttttgagcattgtgccaaggactttgctragaggatcacacaaattattttatataaccttaaaagccactgttatctcctttttagagacctgtaaacttagatttggtgaggtcaggtattaatatttccagagctatgcagctaattagaccaatgtcaacattgtgtctctagattgatattcttaatgccattctcttcttgtgtcttactgaatcaccctgtgttgcacatctgggcctttcattcaacatccattgataacacttattccaaaagctattacaattaggtgggccagtataatacaactattataactttccttgccttcatgctttccccacactgatcttctaaaattgcatagcattacatcatcccttacacaaaaatcttaaatgat

SEQ ID NO: 343994 - DNA, 556 bp, Homo sapiens
ccacttgattcctaataaattttaatcagagacatattacttacccaagctttgtttatttgaactatttagctgtataaaattagcacaagaaaagataaatttgagtaacttaaaaatagcatactagggattaggataactaacttttgagcattgtgccaaggactttgctaagaggatcacacaaattattttatataaccttaaaagccactgttatctcctttttagagacctgtaaacttagatttggtgaggtcaggtattaatatttccagagctatgcagctaattagaccaawgtcaacattgtgtctctagattgatattcttaatgccattctcttcttgtgtcttactgaatcaccctgtgttgcacatctgggcctttcattcaacatccattgataacacttattccaaaagctattacaattaggtgggccagtataatacaactattataactttccttgccttcatgctttccccacactgatcttctaaaattgcatagcattacatcatcccttacacaaaaatcttaaatgat

SEQ ID NO: 343995 - DNA, 579 bp, Homo sapiens
tctaaactataatatgtaaattcaggattgacatatcattccctttaattatgcatttctgacctttatatccacttgattcctaataaattttaatcagagacatattacttacccaagctttgtttatttgaactatttagctgtataaaattagcacaagaaaagataaatttgagtaacttaaaaatagcatactagggattaggataactaacttttgagcattgtgccaaggactttgctaagaggatcacacaaattattttatataaccttaaaagccactgttatctcctttttagagacctgtaaacttagatttggtgaggtcaggtattaatatttccagagctatgcagctaattagaccaatgtcaacattgtgtctctagattgatattcttaatgccattctcttcttgtgtcttactgaatcaccctgtgttgcacatctgggcctttcattcaacatccattgataacacttattccaaaakctattacaattaggtgggccagtataatacaactattataactttccttgccttcatgctttccccacactgatcttct

SEQ ID NO: 343996 - DNA, 521 bp, Homo sapiens
attgaaagctaatgaaggtattcattttaaggtcagggagttttagcagaatggaaagtgcaagaggtcaggagttgggaggccaggtactccattaaactattgactakatagctttgctgaccttcctgattagaggatgagagcaagaacctttagaaattagttgaaggagactagtttcttcctgaattttttttcattcttataaaaaataaagataaagaataatgaatgtaagcaaaaaacttaagagttcttaaataaatctaaagataagagataaagagcaacttataatgaggcaaaagaactccatatcaaagagtaaaatgggttggttaaaattctcaatgaattattgttctgtggacaaaaaatggcaaggaactctaatcttaataaatagaaaaatcatatacaactgcacaacagccttattacggccagttgatttttatgtcaacataatataagaagcaaccaccaatgcttctcaccagtgaaataaaatttgctca

SEQ ID NO: 343997 - DNA, 603 bp, Homo sapiens
cagagatacagatttaattttaggaattggcacatgcaatgtggagactggaaaatttgatatctgaaggataggccaagaaactgaaggagacccarggaagagttgatgttgcagctccagttttcaagcagtctggagtggaatcccctcttcctcagaagatgtcagtctttttcttcttaaggccttcagctgattggaggaggtccgcccatattatggaaaggtataagcttacctgaaagtccacagatttaaatgttatcctcatctaaaaattactttcacagaatatctagactggtatttgaccaaatatttggataccttggcctagccaagctgacttataaaataaaccatcaaaagaagcaaccttaatttttctctgccatacagtctaacaggtctgcaggtttcatggttttaggagattggcaattattgttgatcattactctgcacatcacagacaatgcacatgtgtgtgcacatatgtaggtgcatgcctctgtgcatttgtccttctcatttgcccaaaattccttgtgcaatgcctatgcacagaaacttagggcataaatatgttaagtatgtcat

SEQ ID NO: 343998 - DNA, 431 bp, Homo sapiens
tgtgctattatgtcattaggtgatagaatattttcagttccaataaaatcttatagaaccacagtcatatatgtggtttgtcattgaccaatatggtgttacgaagagactttgtgtatagatacccccactttacgtctgaaggcaggaatattggmatttcctaagagcgtatcaaagtaaagcactcaaaacctcacacgtctaaatgggaacatgtctagtcactgtatataaatgttcttttctcctattagatgtcgagtatatagttcttagctaatatgtgatcatctatttatgtttgttttaatcctgtcactctggatccatattctgatggattgcattgaaactagagtacttcctagctgatagaagagattaaacttaagaatgtataaccatggtgttaatgccaagtcagaggt

SEQ ID NO: 343999 - DNA, 431 bp, Homo sapiens
tgtgctattatgtcattaggtgatagaatattttcagttccaataaaatcttatagaaccacagtcatatatgtggtttgtcattgaccaatatggtgttacgaagagactttgtgtatagatacccccactttacgtctgaaggcaggaatattggcatttcctaagagcgtatcaaagtaaagcactcaaaacctcacacgtctaaatgggaacatgtctagtcactgtatataaatgttcttttctcctattagatgtcgagtatatagttcttagctaatatgtgatcatctatttatgtttgttttaatcctgtcactctggatccatattctgatgsattgcattgaaactagagtacttcctagctgatagaagagattaaacttaagaatgtataaccatggtgttaatgccaagtcagaggt

SEQ ID NO: 344000 - DNA, 603 bp, Homo sapiens
cagagatacagatttaattttaggaattggcacatgcaatgtggagactggaaaatttgatatctgaaggataggccaagaaactgaaggagacccagggaagagttgatgttgcagctccagttttcaagcagtctggagtggaatcccctcttcctcagaagatgtcagtctttttcttcttaaggccttcagctgattggaggaggtcygcccatattatggaaaggtataagcttacctgaaagtccacagatttaaatgttatcctcatctaaaaattactttcacagaatatctagactggtatttgaccaaatatttggataccttggcctagccaagctgacttataaaataaaccatcaaaagaagcaaccttaatttttctctgccatacagtctaacaggtctgcaggtttcatggttttaggagattggcaattattgttgatcattactctgcacatcacagacaatgcacatgtgtgtgcacatatgtaggtgcatgcctctgtgcatttgtccttctcatttgcccaaaattccttgtgcaatgcctatgcacagaaacttagggcataaatatgttaagtatgtcat

SEQ ID NO: 344001 - DNA, 603 bp, Homo sapiens
cagagatacagatttaattttaggaattggcacatgcaatgtggagactggaaaatttgatatctgaaggataggccaagaaactgaaggagacccagggaagagttgatgttgcagctccagttttcaagcagtctggagtggaatcccctcttcctcagaagatgtcagtctttttcttcttaaggccttcagctgattggaggaggtccgcccatattatggaaaggtataagcttacctgaaagtccacagatttaaatgttatcctcatctaaaaattactttcacagaatatctagactggtatttgaccaaatatttggataccttggcctagccaagctgacttataaaataaaccatcaaaagaagcaaccttaatttttctctgccatacagtctaacaggtctgcaggtttcatggttttaggagattggcaattattgttgatcattactctgcacatcacagacaatgcacrtgtgtgtgcacatatgtaggtgcatgcctctgtgcatttgtccttctcatttgcccaaaattccttgtgcaatgcctatgcacagaaacttagggcataaatatgttaagtatgtcat

SEQ ID NO: 344002 - DNA, 595 bp, Homo sapiens
aagttctctgaaatgctttcaaggccttttttcccattgtcttggctagtaacactttgcctccttttacttatgcaaatgtgtgyagcttgcttgaattcttcccattcaaatatgtttttctttttttaccacatggcaagtcttcatttttttttaagcttttacactctgcttcccttttaaatgtaagtttcagtttcaagtaatttctttgcttactcatataagcacaggttgttagaaacagccaggccatatcttgaacactttgctgattaaaaattgtttctaccagataccttaaatcatcactgtcaggttcaaagttctatggatccctagggcaggggctcagtgcagccagaatctttgctaaatcctagcaaaggtgacctctactacagttcccaataagttcctgatttccatctgagacctccacagcctggccttcactgtccatatcactatcagcattttggtcacaaccatcgaacaagtctctaggaagttccaaactttccctcatcttcctgtctttttctgagttctccaaactgttccaagctctgcctgctacccagttccaaag

SEQ ID NO: 344003 - DNA, 595 bp, Homo sapiens
aagttctctgaaatgctttcaaggccttttttcccattgtcttggctagtaacactttgcctccttttacttatgcaaatgtgtgtagcttgcttgaattcttcccattcaaatatrtttttctttttttaccacatggcaagtcttcatttttttttaagcttttacactctgcttcccttttaaatgtaagtttcagtttcaagtaatttctttgcttactcatataagcacaggttgttagaaacagccaggccatatcttgaacactttgctgattaaaaattgtttctaccagataccttaaatcatcactgtcaggttcaaagttctatggatccctagggcaggggctcagtgcagccagaatctttgctaaatcctagcaaaggtgacctctactacagttcccaataagttcctgatttccatctgagacctccacagcctggccttcactgtccatatcactatcagcattttggtcacaaccatcgaacaagtctctaggaagttccaaactttccctcatcttcctgtctttttctgagttctccaaactgttccaagctctgcctgctacccagttccaaag

SEQ ID NO: 344004 - DNA, 595 bp, Homo sapiens
aagttctctgaaatgctttcaaggccttttttcccattgtcttggctagtaacactttgcctccttttacttatgcaaatgtgtgtagcttgcttgaattcttcccattcaaatatgtttttctttttttaccacatggcaagtcttcatttttttttaagcttttacactctgcttcccttttaaatgtaagtttcagtttcaagtaatttctttgcttactcatataagcacaggttgttagaaacagccaggccatatcttgaacactttgctgattaaaaattgtttctaccagataccttaaatcatcactgtcargttcaaagttctatggatccctagggcaggggctcagtgcagccagaatctttgctaaatcctagcaaaggtgacctctactacagttcccaataagttcctgatttccatctgagacctccacagcctggccttcactgtccatatcactatcagcattttggtcacaaccatcgaacaagtctctaggaagttccaaactttccctcatcttcctgtctttttctgagttctccaaactgttccaagctctgcctgctacccagttccaaag

SEQ ID NO: 344005 - DNA, 603 bp, Homo sapiens
cagagatacagatttaattttaggaattggcacatgcaatgtggagactggaaaatttgatatctgaaggataggccaagaaactgaaggagacccagggaagagttgatgttgcagctccagttttcaagcagtctggagtggaatcccctcttcctcagaagatgtcagtctttttcttcttaaggccttcagctgattggaggaggtccgcccatattatggaaaggtataagcttacctgaaagtccacagatttaaatgttatcctcatctaaaaattactttcacagaatatctagactggtatttgaccaaatatttggataccttggcctagccaagctgacttataaaataaaccatcaaaagaagcaaccttaatttttctctgccatacagtctaacaggtctgcaggtttcatggttttaggagattggcaattattgttgatcattactctgcacatcacagacaatgcacatgtgtgtgcacatatgtaggtgcatgcctctgtgcatttgtccttctcatttgcccaaaattccttgtgcaatgcctatgcacagaaacttaggrcataaatatgttaagtatgtcat

SEQ ID NO: 344006 - DNA, 541 bp, Homo sapiens
attggatttaaactgcactttagaccaaatagacctaattcacatttataggacattgcatccttcagctgcagaatgaaaattattttaacctgtgcgtgaaacagtttccagaataagcctcattttgggccacaaaataagggtcaacaaatttaagagaactraaattatatcaagtgtcctttctgaccacatagaataaacatgaagaactctcaaaattgtacaaatacatgaaaattaaacaatgtgctcctgaataagcaatgggccattacaaaaaaagaatgaaatactaaaataattttgaaacaaaggaaaataagaacataacataccaaaatatgggcaacagcaaaaggagtggtaagaggaaagtttatagcaataaacacctatatcaagaaagtagaaatattttaaataaacaacctaataatgttctcaaggaattagaaaagcaagaacaaactaaactcaaaatcacaaaaaggaaagaaataacataaatcagagcagaaataaataaaattgagac

SEQ ID NO: 344007 - DNA, 589 bp, Homo sapiens
accatcatgttgcaatgtgaaacgaattcaacctgcccttgctgtctttggacatggaatgagaagactaaaactcaaggaatgcgagtaacttccagaagcaaaaaaagacaagagaacacattttcctatagggcttccagaaaaaaaaaaaaaaaaaaacctgctaacacttttattttaccccaataaaacttgtgttgaacttytaacttacagaattgtaaaacagtaaatttgtcttttaagccacaacgtttgtggtaatttgttttagcagcgatagtcttactcctatacaaatctagagatatgcagctatattaaaaataccatcacttgtgaagtactcttttgtgaattctgaaggttccttctgtatgtattgaaagtattcgatcatttattttgccataaataatatatctctctgtacattacaattatttcaaggataagggaccatataggatgaagtttgcagaatattttgttaccgaaaccaaatacatctgcaatataagcatggcttaatagtagacaaaatttatatatgatatccttatatttaaattaattttactgatag

SEQ ID NO: 344008 - DNA, 589 bp, Homo sapiens
accatcatgttgcaatgtgaaacgaattcaacctgcccttgctgtctttggacatggaatgagaagactaaaactcaaggaatgcgagtaacttccagaagcaaaaaaagacaagagaacacattttcctatagggcttccagaaaaaaaaaaaaaaaaaaacctgctaacacttttattttaccccaataaaacttgtgttgaacttttaacttacagaattgtaaracagtaaatttgtcttttaagccacaacgtttgtggtaatttgttttagcagcgatagtcttactcctatacaaatctagagatatgcagctatattaaaaataccatcacttgtgaagtactcttttgtgaattctgaaggttccttctgtatgtattgaaagtattcgatcatttattttgccataaataatatatctctctgtacattacaattatttcaaggataagggaccatataggatgaagtttgcagaatattttgttaccgaaaccaaatacatctgcaatataagcatggcttaatagtagacaaaatttatatatgatatccttatatttaaattaattttactgatag

SEQ ID NO: 344009 - DNA, 589 bp, Homo sapiens
accatcatgttgcaatgtgaaacgaattcaacctgcccttgctgtctttggacatggaatgagaagactaaaactcaaggaatgcgagtaacttccagaagcaaaaaaagacaagagaacacattttcctatagggcttccagaaaaaaaaaaaaaaaaaaacctgctaacacttttattttaccccaataaaacttgtgttgaacttttaacttacagaattgtaaaacagtaaatttgtcttttaagccacracgtttgtggtaatttgttttagcagcgatagtcttactcctatacaaatctagagatatgcagctatattaaaaataccatcacttgtgaagtactcttttgtgaattctgaaggttccttctgtatgtattgaaagtattcgatcatttattttgccataaataatatatctctctgtacattacaattatttcaaggataagggaccatataggatgaagtttgcagaatattttgttaccgaaaccaaatacatctgcaatataagcatggcttaatagtagacaaaatttatatatgatatccttatatttaaattaattttactgatag

SEQ ID NO: 344010 - DNA, 589 bp, Homo sapiens
accatcatgttgcaatgtgaaacgaattcaacctgcccttgctgtctttggacatggaatgagaagactaaaactcaaggaatgcgagtaacttccagaagcaaaaaaagacaagagaacacattttcctatagggcttccagaaaaaaaaaaaaaaaaaaacctgctaacacttttattttaccccaataaaacttgtgttgaacttttaacttacagaattgtaaaacagtaaatttgtcttttaagccacaacgtttgtggtaatttgttttagcagcgatagtcttactcctatacaaatctagagatatgcagctatattaraaataccatcacttgtgaagtactcttttgtgaattctgaaggttccttctgtatgtattgaaagtattcgatcatttattttgccataaataatatatctctctgtacattacaattatttcaaggataagggaccatataggatgaagtttgcagaatattttgttaccgaaaccaaatacatctgcaatataagcatggcttaatagtagacaaaatttatatatgatatccttatatttaaattaattttactgatag

SEQ ID NO: 344011 - DNA, 565 bp, Homo sapiens
ttttacaggcacttgataaaaacattagcactcattcattaagtatatgtgttaaatttaaataaaatactcacagtagacttttctcaacaaaaaaatcaatatatatagactaacggaatgccaaaatacattttatactgggaaaaagccaaggttataacctgtaaccactattttcaacataattttgagagctttgtcttataagaaataaaaataaaacaatatttttctgatgctgtgctcattaagtagctcattgtaccatggtgtgactttgaaacatgattaagtctcaatgtgctcatatgtaaaataaaggtaataagaaaacatacctgttttgctgtgaagattaaattaattaaaatactcgaagcatttagaagagggtccagcacatagtaattaccgtagatgtgcttgatggtgttcactgttaccagacctaaaagcaaaaacggtaagataagtatccacatttacaattggtaaaagattaataactacccmcaaatgtcttatgaattttaacaggtatgttatatgttgcttctctcag

SEQ ID NO: 344012 - DNA, 622 bp, Homo sapiens
agcctttaggcagctccctcatctgggcttagtgactgtgaagactgcgaggaacctgaatgtggggtctgttggtgtccaaggagttgacaagggccttattgcttaactctttgtcataggaaaaagttcctccttgctcccagttgatcccagttgtaaaacgggtcggtggacagagctctcttccattcyctatgcggtcatccagagtttctgtacttactagggtctctgatacatttctgtcaagctccagaactctccttcagttattttcattaaaatgtagtttcttcattgttctggctttctttgtgagggtgacaagtgctagaggcttccagtcagccatcttgctgacatcactctgattttctaatatggagtttaagatttcatcgtatatattatatatatgttctttttcagatatgaggtttccaagtattctcgcaattatcggaagcttgccttttctttcttttaaagcagtcttttgtatgtcaagagactcatataaatcatgttttctttataaatcatagacataatctcatttcgagaaatttgtgtaaacttaagtcacttttttgttttcttttataaattcttaaaattt

SEQ ID NO: 344013 - DNA, 622 bp, Homo sapiens
agcctttaggcagctccctcatctgggcttagtgactgtgaagactgcgaggaacctgaatgtggggtctgttggtgtccaaggagttgacaagggccttattgcttaactctttgtcataggaaaaagttcctccttgctcccagttgatcccagttgtaaaacgggtcggtggacagagctctcttccattctctatgcrgtcatccagagtttctgtacttactagggtctctgatacatttctgtcaagctccagaactctccttcagttattttcattaaaatgtagtttcttcattgttctggctttctttgtgagggtgacaagtgctagaggcttccagtcagccatcttgctgacatcactctgattttctaatatggagtttaagatttcatcgtatatattatatatatgttctttttcagatatgaggtttccaagtattctcgcaattatcggaagcttgccttttctttcttttaaagcagtcttttgtatgtcaagagactcatataaatcatgttttctttataaatcatagacataatctcatttcgagaaatttgtgtaaacttaagtcacttttttgttttcttttataaattcttaaaattt

SEQ ID NO: 344014 - DNA, 622 bp, Homo sapiens
agcctttaggcagctccctcatctgggcttagtgactgtgaagactgcgaggaacctgaatgtggggtctgttggtgtccaaggagttgacaagggccttattgcttaactctttgtcataggaaaaagttcctccttgctcccagttgatcccagttgtaaaacgggtcggtggacagagctctcttccattctctatgcggtcatccagagtttctgtacttactagggtctctgatacatttctgtcaagctccagaactctccttcagttattttcattaaaatgtagtttcttcattgttctggctttctttgtgagggtgacaagtgctagaggcttccagtcagccatcttgctgacatcactctgattttctaatatggagtttaagatttcatcgtatatattatatatatgttctttttcagatatgaggtttccaagtattctcgcaattatyggaagcttgccttttctttcttttaaagcagtcttttgtatgtcaagagactcatataaatcatgttttctttataaatcatagacataatctcatttcgagaaatttgtgtaaacttaagtcacttttttgttttcttttataaattcttaaaattt

SEQ ID NO: 344015 - DNA, 618 bp, Homo sapiens
taaatcattattggtctaattaaaatacagcatttctgttttcctccatcacctacctattttttctaatttcccttccaactaagattgatttattctggtcaatggtgcatgttggaaaacctgagacaatttcaagaggaaagaaaagaatagtggcttcaattctttctttctgcttgacatgtaggagtaagggaatgaagtatgtaacaaactcagcattcttctgacattgagaatgtaaacaggaatgaaaagccagtagcctggagattaaatggactttcagaactcagtggcagaagagtaagagggctgtgagggataaaagagtacatattgggtacaatgtacaacgcttaggtgatgggtgcaccacaatctcagaaatcaccactaaaacatgtatctgtgtaaccaaaaactacytgtacctcccccactattgaaattaaaagtagtatagaaagagatctgatatcttgttagagcccattagccaaaattcagcaacagtatacctgtagtcaacaacagtatagtttattagcttgctgtgatatgagaaaggtgcatcgtgaaaaactttgtggggagggtacctttggagggagt

SEQ ID NO: 344016 - DNA, 653 bp, Homo sapiens
caaggaggagaaaattaactcttcttgagctgctaagggaagtcgtcattgtagtttttccttgaaaagtgaactgagtttcattatttaggaatgagcaaagatgattagagatgatatatgtaaaaaatggaagggcaatgaaacttaagcggtgaggtgttttaagaatagtgaacagttctgtgaaactgtgctaaaaaataggtgtttgaaatacaggaagtgtgaaaagaaattgaggctgtaacatagttgcccaagcatttatcaggcatctgttaagtaagaatgctgaatattttggatatgtttattattatttataatgtttttttaaaatattctataattttagtgaagtacattacgcttgaacataaaatgaaagattgattgtcacattaaaaaaaaaaagacaagtcaaacatttgcacatctgggagcaagttaccttaactaccatgcaaataagcttagaaagttgagacaacatccagttaccaatgtgccaatcaataatggaatgatggtgaaatagcttactcacacacacatatatatatgtatatatatacacatacgtaatcgtggagtatttatttcataggtgyaataagtatacaaaccaaagatttgaaaaggcattgctt

SEQ ID NO: 344017 - DNA, 581 bp, Homo sapiens
gagacaacatccagttaccaatgtgccaatcaataatggaatgatggtgaaatagcttactcacacacacatatatatatgtatatatatacacatacgtaatcgtggagtatttatttcataggtgcaataagtatacaaaccaaagatttgaaaaggcattgcttcagaagcagtaatagtctatgtggaatggattgaatatatgttcaatatagagttagcaagatagtaaaaattatcatgaggcccaaattaaaggaaaatcaggatccctaatagggytcatgcatgataaaatatgtgtttcttcagctttttaaacaagagatttgcattttgaaatatacaaaataatgatttgcctcactcaaaattacactgtagatgcagctttaattgaatataatttacattaaatcctaatttgttatattaattgtcaggatgattgcattgattacttcaggcatttatatttgagctataaaaattattagttaaaataaaaattaatttgcttaagcagtatatattttgagatttaatatgtatgcttaaaatattttaggaagcttcag

SEQ ID NO: 344018 - DNA, 581 bp, Homo sapiens
gagacaacatccagttaccaatgtgccaatcaataatggaatgatggtgaaatagcttactcacacacacatatatatatgtatatatatacacatacgtaatcgtggagtatttatttcataggtgcaataagtatacaaaccaaagatttgaaaaggcattgcttcagaagcagtaatagtctatgtggaatggattgaatatatgttcaatatagagttagcaagatagtaaaaattatcatgaggcccaaattaaaggaaaatcaggatccctaatagggctcatgcatgataaaatatgtgtttcttcagctttttaaacaagagatttgcattttgaaatatacaaaataatgatttgcctcactcaaaattacactgtagatgcagctttaattgaatataatttacrttaaatcctaatttgttatattaattgtcaggatgattgcattgattacttcaggcatttatatttgagctataaaaattattagttaaaataaaaattaatttgcttaagcagtatatattttgagatttaatatgtatgcttaaaatattttaggaagcttcag

SEQ ID NO: 344019 - DNA, 572 bp, Homo sapiens
caatttcagaattgtaatggccagattacttcaacatgcctctcatttctcctctttctgaatggtaatggctattgcagtattgtgttgggtgtgggggcagttgtaaaaggacagatgacttgktttttagttcataggactttgatttttggagaaactactcccaaattgttgtgttggagaaactgcagacaaggtgccttatctgcatcatcttaatttagaagatgggatcctggacttcaagtctgtcaaaggttgcaattggatgaacattttacaatcctagaatgaaggtgggtgggtatattttgtatgtagaaaaaaatgaatcattaaggccctaaggaatgactctagtagaagttaaataatgtaacttctcccctagaactactctttcctgtatttataccttgaccgtgaacatcaataactgtgatggaagtagaggcttgaaaaactcttgcttacttcccaacatttataagaaaataaaacacatttgtacagtcttaaactacagtcatggcagttatattttatatagacatacctaaaatatacat

SEQ ID NO: 344020 - DNA, 456 bp, Homo sapiens
taaatcacatcagttcaaaccccaaattaaccgtttttagctatgcagttgtagaaaaatcatttatactttttagggctcagttttcttatctgtaagatgaaaatagtaataatgytttgtggggttcttgtgaggattaaatgacataatatgtataaaaagtttatcacagagcctacagctacactgtccaatattgtagctgactacatgtgactatttaaattcaaattaattaaaataaggtaaaattgatgattcagttagtctcacagcaagcgctagtatcaccatctatagatatagaatatttccatcgttgcaaaaaattatgttcggatagtgctgtcttagagcgtagaagatgttaagtaaataaattttagcaattattattattactacaattaagagaaaaagactccccttaaagatttagtattttattaaaga

SEQ ID NO: 344021 - DNA, 456 bp, Homo sapiens
taaatcacatcagttcaaaccccaaattaaccgtttttagctatgcagttgtagaaaaatcatttatactttttagggctcagttttcttatctgtaagatgaaaatagtaataatgtyttgtggggttcttgtgaggattaaatgacataatatgtataaaaagtttatcacagagcctacagctacactgtccaatattgtagctgactacatgtgactatttaaattcaaattaattaaaataaggtaaaattgatgattcagttagtctcacagcaagcgctagtatcaccatctatagatatagaatatttccatcgttgcaaaaaattatgttcggatagtgctgtcttagagcgtagaagatgttaagtaaataaattttagcaattattattattactacaattaagagaaaaagactccccttaaagatttagtattttattaaaga

SEQ ID NO: 344022 - DNA, 456 bp, Homo sapiens
taaatcacatcagttcaaaccccaaattaaccgtttttagctatgcagttgtagaaaaatcatttatactttttagggctcagttttcttatctgtaagatgaaaatagtaataatgttttgtggggttctygtgaggattaaatgacataatatgtataaaaagtttatcacagagcctacagctacactgtccaatattgtagctgactacatgtgactatttaaattcaaattaattaaaataaggtaaaattgatgattcagttagtctcacagcaagcgctagtatcaccatctatagatatagaatatttccatcgttgcaaaaaattatgttcggatagtgctgtcttagagcgtagaagatgttaagtaaataaattttagcaattattattattactacaattaagagaaaaagactccccttaaagatttagtattttattaaaga

SEQ ID NO: 344023 - DNA, 586 bp, Homo sapiens
actacatgtgactatttaaattcaaattaattaaaataaggtaaaattgatgattcagttagtctcacagcaagcgctagtatcaccatctatagatatagaatatttccatcgttgcaaaaaattatgttcggatagtgctgtcttagagcgtagaagatgttaagtaaataaattttarcaattattattattactacaattaagagaaaaagactccccttaaagatttagtattttattaaagaaactagatacaaaaagttagaaaacaatacaattaaaggctacagctttgaggagtattatgggaagtgagaaaaggaccctataagtgacaggcaggtaagcattacttggagcacccccgaactgtgtaagacacaacttaggagttgactgaggctgatgaaaattagtacatataaaaagtgtggtgctagagcaaattcaggggatactgagcatatgctggcatgcgccctttactggaagcaaatctttaaggaggccatgcaggctgtgctggggtggtggagtgatagagaggagaatcaggaggtattctgaatagaaaaaaaaaaac

SEQ ID NO: 344024 - DNA, 566 bp, Homo sapiens
taggacgtgagctaaagaggtagacagggcataaatgaagaagaaacatttatgtcatgctaaagcatgtttttaaaataaatgtatttaattatttggatatataatatattcatgtggtctaataataaaaaagtgtaaaaataaatacagtgagaagtacacacacagcataggtgacaacttctttttgtttcttagctaaactgccagagttcattttaacgtatctaagcaaaacaaatacatgcatgtacatttatgtgtatgtgtgtttcccatctttaatataaatgagtttggtaaacttttctattttcgtttttctttttttttttttttttgctttttaaaagcagcttcatagaatttcattatgtgggtgtataacaggttatttaatcagcttcctattaaaatttrtttctaatcttttgctattacaaaaaatgctgtaatcaacaactttgtatataaataatttctcaaatgtgagtgcatgtgtatagaatacatttttagaaatgtgactgtaggtttatgtgttatgattttgagagatattg

SEQ ID NO: 344025 - DNA, 531 bp, Homo sapiens
acattgagtttttcatcgctttgcttgctattttctctatttctattgcagtattatatgtatatgtgtgtgtgtgtgtatatatatatatatkcatagctcgttaatatacagcttagtgaattttcacaaagcaaacacccccatgtgaacactgacacagatcaagaaatagaacacaacaagcatccccaggagcttcttccagtgcccctctcccagtctttaactcttcttcccccaaaggtaaccatagccactgtcttgattatagcactataaatcttgccttttggaaggtaatgtaaatggttacatatattgtgtatgacatgacatatttgcttttatgtctggtttcttttgctcaaagttatacatgtgagattcatccacgttgttgcatttactggttgttcattacagaatggtattatatgaatatgccaattcagtatatcagtttttctgatgatagacatttgggttgtttggagtttttggccactgtgagttgtgctgatattaaca

SEQ ID NO: 344026 - DNA, 557 bp, Homo sapiens
ttttaattgattaggctggattggtgaatgtgacagaaccttctgtttttggtacaaatgaatgcacccacccagatcataggcagagaaattggagatgagcaggcccacaccacaggaatgagatccagccactgagagctaaccgcttagtatcagaaaataaagaaaagctcatttcactgcaggccaggttgatattgagggatatagagcaagagacagtggaacttgctttgtatktttatattgttactttcctgctcttggactggcaggcactccccatgctgaataaccatttctctgataatcatgctgatgatggagagatccggaatgagaggatcacaatgttaactcaagttgctctccttcctggaggagacaccctatcctttctatggaaccttgagagaaggcagagaagataagatcaaaagtaagagtcataatgagcatagaagattgagagaaaagctggagcattttccccctaaaatgtaaaaatcaaaacagttgagaaatgtaaaaaggtataacagaactgtagaaaa

SEQ ID NO: 344027 - DNA, 557 bp, Homo sapiens
ttttaattgattaggctggattggtgaatgtgacagaaccttctgtttttggtacaaatgaatgcacccacccagatcataggcagagaaattggagatgagcaggcccacaccacaggaatgagatccagccactgagagctaaccgcttagtatcagaaaataaagaaaagctcatttcactgcaggccaggttgatattgagggatatagagcaagagacagtggaacttgctttgtatgtttatattgttactttcctgctcttggactggcaggcactccccatgctgaataaccatttctctgataatcatgctgrtgatggagagatccggaatgagaggatcacaatgttaactcaagttgctctccttcctggaggagacaccctatcctttctatggaaccttgagagaaggcagagaagataagatcaaaagtaagagtcataatgagcatagaagattgagagaaaagctggagcattttccccctaaaatgtaaaaatcaaaacagttgagaaatgtaaaaaggtataacagaactgtagaaaa

SEQ ID NO: 344028 - DNA, 586 bp, Homo sapiens
tatcagaaaataaagaaaagctcatttcactgcaggccaggttgatattgagggatatagagcaagagacagtggaacttgctttgtatgtttatattgttactttcctgctcttggactggcaggcactccccatgctgaataaccatttctctgataatcatgctgatgatggagagatccggartgagaggatcacaatgttaactcaagttgctctccttcctggaggagacaccctatcctttctatggaaccttgagagaaggcagagaagataagatcaaaagtaagagtcataatgagcatagaagattgagagaaaagctggagcattttccccctaaaatgtaaaaatcaaaacagttgagaaatgtaaaaaggtataacagaactgtagaaaaaaattttagtgcgaatttcaggccaaattttgaaagagacacagaagttaatttgtaggtaaataggaaaagaaagagaaatgacaggagatccatatcattacactattttggttgatacctaccatccataaaatgtgaattgataactgaggtattactggaaagaccacagttgcaaa

SEQ ID NO: 344029 - DNA, 587 bp, Homo sapiens
aggaaaagaaagagaaatgacaggagatccatatcattacactattttggttgatacctaccatccataaaatgtgaattgataactgaggtattactggaaagaccacagttgcaaataatatctgcctagctttgcaatggattttaaggagaagagaaagaaagaagaattctgcacacatttagtgggaacaatggctgatgtagtgaactgtttcagttcattcctgctgctataacaaaataccttagactgggtaatttataagcaacagaaatttatttcacagttatcaaagctgggaggtccaagttcaaggtgccagcagacttcgtgtcttaggagggccttctctctcttctttgatgggtgcaaagcaagggtgctgcatcctcacaaggtagaaggggagggcagctcccttcaatctcttttataagggtgcyaatcccattcatgagagcgaagccttcatgacctaatcaccttcctaaagtcctcacctcttaattccattacgttaaagattgagttttaacatatatttcaggggcacactaatatttagaccatagcatttcacc

SEQ ID NO: 344030 - DNA, 470 bp, Homo sapiens
acacagggaaattataagtcattattggaaccaaagtgcaagtgactcagtaaaagaaatccattgctaggcctgatgcagaggctcatgcctgtaatcccagtactttgggaggccraggcaggtggatcacctgagatcaagagttcgagaccagcctggccaacatggtgaaaccttgtctctactaaaaatacaaaaattagctgggtgcagtggcgggcacctgtaatcccagctactgaggaggctgagtcaggagaatcactcgatcccaggagatggagtttgcactgagctgagatcacaccattgcactccagcctgggcaacagagcaaaaactccatctcaaaaaacaaaaagaaaaagaaaaggaaaaagaaaagaaaagaaatccattgctaggaaagaggtaggcctagaaggtttcatgcttaatattttattatacagctcaagtaatagtgg

SEQ ID NO: 344031 - DNA, 611 bp, Homo sapiens
attacagttttctaatgaaatcaacaacttcaacttcttaccatggaaaattcagagaagtctgaagtggttctccttgcttgtggttcttttaatcctatcaccaacatgcacctcaggttgtttgagctggccaaggactacaagtggaacaggaagatacagagttgtcaaagacataatctctcctgttggcaataccaggagaatggactcattcctgcccgtcactgggtcatcaggtcaaaacttcccaccaagaatgccaaatgggtggaagttgatacataaaaagtcttcaaaaggagcagatagaaactgttaaggtgcttatacaccatcaggagaaactggaggctagtaactgtgataaccagcagaacttgcatacgctagaaaggcctggacaaaagaggaagtggactgaacaaagacaggattctagttgaaagaaatccctggagtccaaaacaaaaggtacaacraaggtcaagctgttgtgtgggacagattattggggtcctttggtattcccaatttgtggaaggcagaagacatcacccagattgtggcagactatgagttcacatgtatactcaggctggaaatga

SEQ ID NO: 344032 - DNA, 628 bp, Homo sapiens
tggccaaggactacaagtggaacaggaagatacagagttgtcaaagacataatctctcctgttggcaataccaggagaatggactcattcctgcccgtcactgggtcatcaggtcaaaacttcccaccaagaatgccaaatgggtggaagttgatacataaaaagtcttcaaaaggagcagatagaaactgttaaggtgcttatacaccatcaggagaaactggaggctagtaactgtgataaccagcagaacttgcatacgctagaaaggcctggacaaaagaggaagtggactgaacaaagacaggattctagttgaaagaaatccctggagtccaaaacaaaaggtacaacgaaggtcaagctgttgtgtgggacagattattggrgtcctttggtattcccaatttgtggaaggcagaagacatcacccagattgtggcagactatgagttcacatgtatactcaggctggaaatgatgctcagaaattcatccataatctgacgtgctgtgaaaacactggagcatcattcacatagtgaatgaatggatcactaatgatatctcatctacaacaatctggagagccctcagaaggggacagagcattcgctacttgttatga

SEQ ID NO: 344033 - DNA, 497 bp, Homo sapiens
aaccattcacttagccttgttatggatcatgctctagccctggccatccaccctctctttatcttcaggaacaacttgagagatgacaccatgctaccttgaatcgagagaaccacagggaacgaggggtctcatgcaaggattttataagtctgaatgctcttagcctttattggtagcttaatcaaaagacctgagtgaggcatattggcgcatgctctgtaatcccatctgctttggaggcacgaacacgaggaaagcttgagcctatgagtttgaaaccagcctgggcaaaatagtgagaacatgtctttaaaaatcctggagattctgaagagccctgttgtttctgttccagcccactgtgaatctgccatttgtgagtttaagcacaaaaagggkctgttttcctatactttttctcttcttttttttttttgtgtgacgtttaaccaaagtagtattctcaaatagtcatagctttatgttaaaacaca

SEQ ID NO: 344034 - DNA, 504 bp, Homo sapiens
ttgcagtgaggtctgattgtgccactgcactctaatctgggtgatagtcagaacttgtctcaaaaaacaaaaaaagagttgaaggagccctgaaaaattagaacaatgaacttcacagggaaataaatattaatgactgatgtgacttyctttaaggaagaagcaaatgtgccattgtttattccctaccacatcatttccataatttgcttttgtactgtgaatttagaggaaatgtgtgatgctggtgttttgtttcacttgtttgtttgatgctggggattttgtgtattgtacactttactccttacattgtataatttgaatgcaacaaacaaacctgcagtgaaagtccttctttggcatcttcattcagatgaatggagagcctttgtggtagtgtttatctatgtgaacagcagaacttttagataagagaagtgggttctctttggtgatgaagttgtagagattgagccatggggataatttaggttaaagaat

SEQ ID NO: 344035 - DNA, 589 bp, Homo sapiens
gacaaaatagccctttaagaaagaaccaagctgatcttctgcagctgaaaaactcactcaaggattttcacaatacaatcagaagtattaaaagcagaatagaccaagctaagaaaagaatttcagagcttgaagaccattttgaatcaattcagtcagtcaaaaacaaacaaacaaaaagaataaaaaagaatgaacaaaaactttgagaaagatgggattatgtaaagaaacaaaacctactactcattggtatgtctgaaagagagggagagagagcaacaacttggaaaacatatttgaggatattgttcacaaaaatttccccaacctcactagaaaggttgacattcaaattcagagaattcagagaacctctgcaggatactatataagacaaccatccccaagacacatagttatcaggttgtccaagatcaaaatgaaagaaaaaaatattaaagactgctacactgaaggggaakgtcacccaaaatggaaacaccatcaggctaacaacagacctttcagaagaaaccctacaacccaaaagaaattggggacctatattcagcatccttaaagaaaa

SEQ ID NO: 344036 - DNA, 589 bp, Homo sapiens
gacaaaatagccctttaagaaagaaccaagctgatcttctgcagctgaaaaactcactcaaggattttcacaatacaatcagaagtattaaaagcagaatagaccaagctaagaaaagaatttcagagcttgaagaccattttgaatcaattcagtcagtcaaaaacaaacaaacaaaaagaataaaaaagaatgaacaaaaactttgagaaagatgggattatgtaaagaaacaaaacctactactcattggtatgtctgaaagagagggagagagagcaacaacttggaaaacatatttgaggatattgttcacaaaaatttccccaacctcactagaaaggttgacattcaaattcagagaattcagagaacctctgcaggatactatataagacaaccatccccaagacacatagttatcaggttgtccaagatcaaaatgaaagaaaaaaatattaaagactgctacactgaaggggaaggtcacccaaaatggaaacaccatcaggctaacaayagacctttcagaagaaaccctacaacccaaaagaaattggggacctatattcagcatccttaaagaaaa

SEQ ID NO: 344037 - DNA, 580 bp, Homo sapiens
tatttcatttcacaaaaaacagactttaaaccaataatgatcaaacaggtcaaagaagggcatttcataatgggaaagggttcaattcgaaaagaagacttaactatcctaatatataagcacccaacaccagagcacccagattcataaaacaagttattagagacctagaaagagacttagataaccacacgataatgatgggagacttcaacaccccactgacagtattagacagataattgagacagaaaactaacaatgacatttggtacctaaactcaacatttgaccaaatcaacctaacagacatctacagaacacactacccaacaacagcagaatatacattyttctcatctgcacatggcacatactctaaaattgaccatatgctcagccataaagcaattctcaacaaattttttaaaaatcaaaatcatgccaatcacacccttggaccacagcacaataaaaatagaagttaatataagaaaatctctcaaaaccatacaattacatggaaatttaacaacctgctcctgaatgacttttgggtaaacaatgaaattaaggcaga

SEQ ID NO: 344038 - DNA, 584 bp, Homo sapiens
agactgcaagtccctcaggtcttaggactattttactgaatcaaaaccttgcctctaatcacctgtgtagacttagacaacttgcttaacttctctgagccttggttgccttatttgaaatggaaataataatagctattttatattgtaaggatcaaaggagataaatcttataaaatatactatcatagtacttgggacatcataaatgcttattataagaaggaaaataggcatcgggcctaaaacagtggttaaaagctaacaatggaatgaaatgtctccaataatcttgggttctccagacgagggaattattaaggctgtcccarataagctctaacttttatttattgttgtgtcctctggacaagggcaggattttggctaggtgattgaagcaatcatggtagagctaacagaactaagagacttgggaggaggaaccagttttggatggtaaaatggaattaatattataccaaccgagtcacatgctcagtgagttttgtgcacaagtgatattagagaacatataaattcatccaataattagtgtgaacccattaagtgtctctaagtgt

SEQ ID NO: 344039 - DNA, 584 bp, Homo sapiens
agactgcaagtccctcaggtcttaggactattttactgaatcaaaaccttgcctctaatcacctgtgtagacttagacaacttgcttaacttctctgagccttggttgccttatttgaaatggaaataataatagctattttatattgtaaggatcaaaggagataaatcttataaaatatactatcatagtacttgggacatcataaatgcttattataagaaggaaaataggcatcgggcctaaaacagtggttaaaagctaacaatggaatgaaatgtctccaataatcttgggttctccagacgagggaattattaaggctgtcccagataagctctaacttttatttattgttgtgtcctctggacaagggcaggattttggctaggtgattgaagcaatcatggtagagctaacagaactaagagactygggaggaggaaccagttttggatggtaaaatggaattaatattataccaaccgagtcacatgctcagtgagttttgtgcacaagtgatattagagaacatataaattcatccaataattagtgtgaacccattaagtgtctctaagtgt

SEQ ID NO: 344040 - DNA, 491 bp, Homo sapiens
ctttgtttcttcagagagtgaaataatctgccattatatggtagataactagtccagtgctataatttaatttattaccatctcagcacacaccacacataaccttctttaagtgtgtctgggagaaacytaggaaatcagtaaaggctccttgcagccagcctggtattgcctgccagcagtttgggagcacatctctttcaaaaggtcaccaagttagggactgtgtccaactctctgttcagtgcagcactgttgggggctctctatgggtgctagtttccctctgctggccagagagcttagttactgccctgctgggcacagagggtagttggatactttcacactctcccttctctttctcactcccctctcaaaattcttttcataccaaaaaatgcctggtagaagaaagaatatatgacagttggaggaagccagtgctcccacactgtctgccaggaggtatatttctggggcaaagcata

SEQ ID NO: 344041 - DNA, 600 bp, Homo sapiens
gatttcacttagatacaagagagactggcagatgtggtccctagttgggaagccacatcctaattaaaaatctgtaatatggaaagaaaactccagttttgaatgaacaattggccatcaacaccacaggattgaagcctcacatragatgactttaagatcccaagaaacttggaattctttgattcaattaggtcctgatttcctccctaattacttttgtgattttggacaagttgcttatcttcttccagcctcggttgattcatctataaaatgacatgaacaattctgctttaataaaaaatgactcggggcattgtgaaatttaaatgaaataatgtgtgtgaaactgttttctaagttaaaaagtattcaaagatatgaagcattattttagatagttgattcaacttagcttttacttggacccatagttgagcttggatctttttttcacatgtccttgaaagattattataatgctctgataccagaacatattgaatgacttatgtttctatagttttagttttcaccattcattcacttcttgaaagatcttaaagtatttcttttactcaagaaaataaatagtac

SEQ ID NO: 344042 - DNA, 586 bp, Homo sapiens
actctatcactcagcaattctactcataggtgtttactcaagagaaatgaaaacacatgtccacaaaagactaccagaatatgatagccactttgttcataattaccaagactggaaaaaaaccaaatgtccaacaataaataaatcagtaaacaaactgatacattcatataacagaataccacgtagcaattaaaagaaatgaattattggtgtatacaacaacttggatgaatctccaagatttttctaagcaaaatyccagacacaaaggagtacctatttgatgtttccatttgtataaaactctaggacagggaaaactaatctatagtgacaaaaagtagttcagtgattgtggacaaagatgtgtagattgacacctaagtgacaaaaaacatctatttgggttgatggaaatattttctatcttgattaggatggtgattttaaaggcatatatattgttaaaactcaaggaataatgtatacattttaaatttgttgattttatgtaaactacacttcagtatagttaatttatacaataaaattatatatgttgtctcattgatccatgccagac

SEQ ID NO: 344043 - DNA, 484 bp, Homo sapiens
taccatcaatattaacttaaaaaaattaatcatatctatagacatatacattttgaattatgcaaagattgtttggaataaaaaccccaaatccccgtgttttatgactttttttaatgtggttcaatgtagacaaagaagtaaagtttcccatgcatgcatgctttgtttcacaatttcataaattgcatgaagatctgtgcttttggaaatttatagaggcaaaaagggttcaaggctataaacctatgacaagwaagcagtggataactgagggaataagttactgaggaaagacgtcattacggggtcagagttacagacctattgtgaaatgaggcatgggacactacgactgccagagttttaagttaattgctggcacttctctgtgcatttgatcagacatgaggggagaaattcttcttgcccttcataaactgtcaacaagccaaatgaaatatgtgttgagagtaaatgcaaa

SEQ ID NO: 344044 - DNA, 570 bp, Homo sapiens
cagctaaagaaaagactcaaaaygaaagaaggaaacaattaggaaagcaaattcaagaacacatatgaaagcttttcctgtaaagagaaaaaagtgtgggttttcaagtatgacaaaagaaccagctctccagttaatgtgacgaaaagaataacaaagaatgagaggaaatttatggttcttttaagaaatgtttagtctggtcacagcagtagaaatggttaatctttcatgtattcaaattcctgataattattaataacttgtcgagatgggagaggaatgctatggaaaaaaagtgacaaaatctcaaaaatatggacaaaataagcataagaaaagagaatgtaaacagaatagtttttatggacatttgaaaaacatatttgtatgaaaggaattagttatggattagttatggtcataaggggctttatttccattcgtgttcaattttttcttttcttttttttttttttaactcttgcagcattttagttcctcctccaaaataaaaaccaaatctaaaaaggcaattcttagctgagattgacttatatagatgacttg

SEQ ID NO: 344045 - DNA, 578 bp, Homo sapiens
tatttctttgtaatactttttatttctatagaatcagtagtaatgccccactcttatttttctttcttgtaatttgagtcttccttctttttttcttgattaatctgcctaaaggtttatcaaaatttgttgagcttttcaaagaatcaggttttggtttctctattgttyttctatttcactaatttctactctaattcttagtattaccttctttctgcttcttttactttgctccacttttttagtgtcttaaggtgaaaggttaggatactgattagagattgctcttcttttttaatacatgcatttatagctataaatgttcttgtaagtacaatttaagctatttctcataagttttttatataacctgttttcattttcattcatctcaaaatattttctaatttttcttctgatttcctctttgacccattggtccctattgttaattcttacatgacataactttctccatactcttcttttaacttacatttgtccttatagtcaaacttcatttcttatagaatgtttatggttggatcttgcttcaatcagataatatattccta

SEQ ID NO: 344046 - DNA, 578 bp, Homo sapiens
tatttctttgtaatactttttatttctatagaatcagtagtaatgccccactcttatttttctttcttgtaatttgagtcttccttctttttttcttgattaatctgcctaaaggtttatcaaaatttgttgagcttttcaaagaatcaggttttggtttctctattgtttttctatttcactaatttctactctaattcttagtattaccttctttctgcttcttttactttgctccacttttttagtgtcttaaggtgaaaggttaggatactgattagagattgctcttcttttttaatacatgcatttatagctataaatgttcttgtaagtacaatttaagctatttctcataagttttttatataaccygttttcattttcattcatctcaaaatattttctaatttttcttctgatttcctctttgacccattggtccctattgttaattcttacatgacataactttctccatactcttcttttaacttacatttgtccttatagtcaaacttcatttcttatagaatgtttatggttggatcttgcttcaatcagataatatattccta

SEQ ID NO: 344047 - DNA, 527 bp, Homo sapiens
tttttcatatgtttgttggttgcttrtacatctttttttgagatttgtctattaatgaactttgcccatttttgataagattattattattttttcttactaatttgagtttcttgtagtttctggatattagtcttttgccagacacatagtttgcaaatattttctcccactctgtggattgcctgtttactcaactggttatttcttttgctgtacaaaagcattttagtttaattaggccctatttatttttggttttgctgcatttgtttttgaggtcttagtcatgaattctttgtccaagccaatatccagaagagtttttccaatgttttctagaatttttatagtttcaggtcttatttaagtctttgatacatcttgagttgatttttgtttaaggtgagagatggagatccagttccattcttctacatgtggcttgccagttttcccagcaccatttattgaataggttgtcctttctccaatgtatttttttttttgaatatcagttggctgta

SEQ ID NO: 344048 - DNA, 612 bp, Homo sapiens
ccagtttagtattcaggcagactcaaagtgatctttaaggagatcacaggatctgcgtgtgtgtgtttacaaagtgtagctccctcttctcaaatgttctgtccacaaattctagctttttcaggggctttgatatctactttctgtcttttaagttcattaagatcattattttaaactctaggtcctcctctttgtgccwtaacctggaaaatatatcctacaagaaactatgtgaatacaaggaggaacatcatatttagtgtgtaatgaccttaccaggcattatctcacttgagccattattatcatgttgtaagtaacattttttcccatctaaatatgaggaaatggagattctgacaatttacggaacttgaacttgaaaacaaattcatacatgtattcaatgagcattatatttactgaacatctactacgttttggtcttttgaaggtagctattatacattgataagccaaagaagtatgcatcttatcttgtgagggttttggtttggagagaagactgatagtaaacaagaaagtataaaaggaaatatacatgtatatattgtaaaaagagttgtgaaagacataaagaagccatgg

SEQ ID NO: 344049 - DNA, 477 bp, Homo sapiens
caaggtttcttctacctttctgctgcctcgtctttactatgtaatatgtagctttcattgtcaagtacacctcctagacaaaagtttcttctagagctacaaccattattccaacattcaaagcaggaaacacacaaaagacacaaaaagcaaaaaaaaaaattaatacaattgtttattccccatttaaggagatatctgaaaagaccaactcaatatcattcacttatacctcatcggtcagaacttcattatgtgatcgggccacaactgactgaaagagaagctgggaaatgtgatctctttttaattgagcacaatataatcctaagtaaatytgaattctgttactaaaaaaagaagaacacacggtattgaatatacaatttacaacctctgtcataggttgctaagaagttgtttagaatatgaatttttgttaatcaaattttgtgtttaaaatttctgggttatgat

SEQ ID NO: 344050 - DNA, 571 bp, Homo sapiens
catggtggtgtgcacctgtaatcccagctactcaagaggctgaggcaggaaaactacttgaactcaggaggcagaggttgcagtgagcagagatgacaccactgcactccagcttgggtgacagagtgagactctgtctcaaaaaaaaaaaaaaaaaaaagaaagaaaaagaaaagatggtacaaaagcttattttcctaaatccttaaactggaaggagtttccagaggtcattgcctcgtcttcaggaagtaaatactgttgtttccttcagatgaaaccaaaataatgaacagaacactttgccagtgagcagatcagagaagaccacaaagcaagtcttctacatctatccctggcaacgttaggaaggttcaatgggcttttccagcctctcttttattcacaaaactttgccctggatctgkttctggagcaatccatccaccatggttgcaagaactgggtaggggatggggatggaggtaagaatgaaaggcagcagagccctttcaatggtggtctaggccagtctcactctccctcattcccttttcttactatttcctac

SEQ ID NO: 344051 - DNA, 614 bp, Homo sapiens
attctggcagccttaacgattgctacttaaatgtttgaacactgaatgatatttagagagtaaagtgatttaataaactagcaattgctcatgcaagggcaatcacccccatttcagtttaattattaagatgaaatttttaaaatattcccaactttagcaagcaatcttgcaatgaaaaagaaattataaaatgttacatgatattatgatataaaatgctcatttyatcaactattatgagcacctaggaagattcagctgataccatatcttgaggtcctaaaattctctgtctttatccaaagggaagaccagagttggaaaagtcaagttaatacaagcagagttaagttaccttaagaggcaccagaggctctatgaccacatatgtcttttcagatactttgtatgaattttgggttttttttctttcccaataagctttttgcactcttagctttgtatgatttttaaagttccattgttaaagggaatttgtgcaagaaagaaaacattcctaaaccacagagtgttacatgagagggtgaagcctgaagaagttcagttgtcggaaactagaaagagcaatatctgtaggttggagtgtgagg

SEQ ID NO: 344052 - DNA, 584 bp, Homo sapiens
gttcttaaagctgcttctcagtaatggctagtgtcacttctgttcacattctattgactaaaccaagccacatggccaagcctgactcaataaagcagaaaagtatgtttctttcacagggaagcactgctaggcacacataagagaaagtaatgtataacactggtacagggaagacattacataattaagaacaatagtacaatctgccacactatccctctttcaaaacatattttatcatcagaaaaattatcttcacccctgaaatcatgaatggtaatctccagctctcatacaacagtttcttgtcccatcaccttttttgttctattactattactataacaatttgacattttcattacctacataccattattccactactctctcactatccatcagccctctttcaaatttatttcctttcttgttctgctcagaagccattgcccataataaaaacaacattaagaaagtagtaagaagaaacatatactgagcatttacatgggctaagcgctagtccaagcattttatacatattcatacatytaatacttataacaaccacaaaattt

SEQ ID NO: 344053 - DNA, 592 bp, Homo sapiens
cctaaaacacgttgtttaaaaaagtgtcaccatcacttatgactcctaagttggttgggtgaccccagcaacgtagagattcgatctcgcctttcccgtctgtgaaatggagttaatggtacttgccatctctgtttgcagagaggctgtcaagataagtgatcctatggatgcatggctccttggagtagggaarttgtataaatccaaaatattatcatcaagacgctgactgatatttacatagctctcttctccagggcatagcagacttttattgctttacagagctccaggaaatagaacagtaatgctctccccagactggaagctgaccaatagagtggataggtggctgacctccacatggcacagtgaggtgatagccttattgtcgagtgatgttgattaatatttgtctattcaacaattagtccggtgagtccagcttgctgctgcctatcactaccgtaatgaaagaccttctgttatagaaaagttcatagcttccagaacgaaatttaaactaaacttttttatttttcttgctgctcttaaattttcagataactttctcctacacttactttct

SEQ ID NO: 344054 - DNA, 572 bp, Homo sapiens
caagactcccaaaatctttcctgataaaaaatttatygggtggttataaactaagcaattataatgaaatatgacaagtacatggacaggagaagaacaggaagcaataggagtacataggaggaatgtcagtcccagaatatggagggtcaaggaagccttttcagaaaaaatggaaagaggcattcaattcggattagacctaggtttgaaaccctgtccagtcatttcatagttgtaagaccaaagttgtttaatccatcaaagcttcagttttcccatctataaagcagagaaaattaaaattaaccattcatatttatttcaatgatcatgtgaattgaagcacttaaaataccaagcatggtgattgacacaaaacagatgctccagaaaatattcatcctttccccttttcctcatccctgttgtaatactaacatgcagtagtggccaggctggcatatagtacacattcaacaaatgtttcttgaattgatttgaatttcagcaaaaccacataacagtcaccttgtgccaacttttctggaatacttgtatttgtaacatca

SEQ ID NO: 344055 - DNA, 572 bp, Homo sapiens
caagactcccaaaatctttcctgataaaaaatttatcgggtggttataaactaagcaattataatgaaatatgacaagtacatggacaggagaagaacaggaagcaataggagtacataggaggaatgtcagtcccagaatatggagggtcaaggaagccttttcagaaaaaatggaaagaggcattcaattyggattagacctaggtttgaaaccctgtccagtcatttcatagttgtaagaccaaagttgtttaatccatcaaagcttcagttttcccatctataaagcagagaaaattaaaattaaccattcatatttatttcaatgatcatgtgaattgaagcacttaaaataccaagcatggtgattgacacaaaacagatgctccagaaaatattcatcctttccccttttcctcatccctgttgtaatactaacatgcagtagtggccaggctggcatatagtacacattcaacaaatgtttcttgaattgatttgaatttcagcaaaaccacataacagtcaccttgtgccaacttttctggaatacttgtatttgtaacatca

SEQ ID NO: 344056 - DNA, 572 bp, Homo sapiens
caagactcccaaaatctttcctgataaaaaatttatcgggtggttataaactaagcaattataatgaaatatgacaagtacatggacaggagaagaacaggaagcaataggagtacataggaggaatgtcagtcccagaatatggagggtcaaggaagccttttcagaaaaaatggaaagaggcattcaattcggattagacctaggtttgaaaccctgtcyagtcatttcatagttgtaagaccaaagttgtttaatccatcaaagcttcagttttcccatctataaagcagagaaaattaaaattaaccattcatatttatttcaatgatcatgtgaattgaagcacttaaaataccaagcatggtgattgacacaaaacagatgctccagaaaatattcatcctttccccttttcctcatccctgttgtaatactaacatgcagtagtggccaggctggcatatagtacacattcaacaaatgtttcttgaattgatttgaatttcagcaaaaccacataacagtcaccttgtgccaacttttctggaatacttgtatttgtaacatca

SEQ ID NO: 344057 - DNA, 554 bp, Homo sapiens
aaacagaccttaagtaaattaacattacagtttattatataaatttcaaaagaaatgcagatcaccttgaaaaaaaattatagggaagacttcatttggattgaggcattagtgtaatctttgagtatgtgacctttcatctgaaacctgaaggaaagcaattagatgtagacagagaataggttcaatcttcaaggcagacagaatggcaaatgtaaaagctctgaggtgagataatgcttggagagtttaagtagctaagaaagcaaatgtcagtggtatatttaccggaatggctgaatttttgaccacagaatggtaggcgggagtctgaccaagacagggtcttaacaatcctatttctgagtcagcattttacccaaagatgttggaaaaccactaacaaccttctaagtagaaaaaaatgacaaaattttaygttcatttgaaaaagatataaatgactactctgctaaaaattacctgaagctctattgtagaaggagaaaaaccattctgacagatatttgtataattacgatggtttaagccag

SEQ ID NO: 344058 - DNA, 632 bp, Homo sapiens
gatagaaacagaaaaaagtgaataataatttaaaaaatatttccataaaattaaatagaaacaagggtagtgtggtaatatatgcaccttagatggaatttaaaacttgcaacataggacatacattttgtctttttttgaagatacaaaaaaaatgagacctaatgacaagaaatgaattactaagaattataggcataaaggctgaaaaaatgttcacctcccatcatgattacctttaggaaataacatacttgtgccaacacacacaaaaaatatatttttagttagctggatttaaaattatacttttctatcaacattgaccaagaatctataagtttattcagaaatgaaccacaatctctacaattactcacttaaaaatttttaggatggtatagttttaggtgatctttatttagaagttaatgtttaccaagataaagaggttcccatatacacctgctttgatttaaaagttgctattgaattttatyacaatttcttccctgcattatttgaaataatcatacatttttttcttcctatttcctcagagattgtatactcatgtcctacctccaaccatgaaaaaaagaatgattttattttctgtataaaacaaacta

SEQ ID NO: 344059 - DNA, 553 bp, Homo sapiens
ttacaggtgggaactctgatacagtggagtaaatcgttcagcaaatcctctttcttaaaacaactatatcaatgttcttaaaattgaccaagagcatatgaaaacttaaaagcatttattcaggaaaaacacttaaatgtgagtaactgcttttttattactgtgtaacaaattattctgcttattagctgaaaacaaaatgcccttattctcttgccatttctgtggctcagcyatccaggcccagcttagcaggctccagtgctcaatgtcagacaaggctgcagcaatgtgctggccaggctgcattctcatctgaaggcttatttggagaatagtccaattccaagttgattcaagttgttggaaaaaccattttatttgtggtttgtgacagcatcttttatttttatttttttttcttggatgtaagctggaatcttcaatcaggtcctagataatgttgaaaattcctagaggctacccatagctctttgccatttaagctttttcatcagggctgctgacttccttaagctactacaaagggtgt

SEQ ID NO: 344060 - DNA, 553 bp, Homo sapiens
ttacaggtgggaactctgatacagtggagtaaatcgttcagcaaatcctctttcttaaaacaactatatcaatgttcttaaaattgaccaagagcatatgaaaacttaaaagcatttattcaggaaaaacacttaaatgtgagtaactgcttttttattactgtgtaacaaattattctgcttattagctgaaaacaaaatgcccttattctcttgccatttctgtggctcagccatccaggcccagcttagcaggctccagtgctcaatgtcagacaaggctgcagcaatgtgctggccaggctgcattctcatctgaaggcttatttggagaatagtccaattccaagttgattcaagttgttggaaaaaccattttatttgtggtttgtgacagcatcttttatttttwtttttttttcttggatgtaagctggaatcttcaatcaggtcctagataatgttgaaaattcctagaggctacccatagctctttgccatttaagctttttcatcagggctgctgacttccttaagctactacaaagggtgt

SEQ ID NO: 344061 - DNA, 635 bp, Homo sapiens
aaaattaaaaaaaaaaatcatgttaatgagaaaaggtaagtttattagatttaccacactatggaagaaaactaccttcatagagtcttctagtatctccaaatgtggaaattatggaaaggttattttatagtttaagagcctatggtgggtgattttaaggtaggtcttgcaaaccaagggattaactgggattggacactgtttataacatattatttttagattgaggcaagtctttaaagtaaatcttaattaagcaaggggttctagttcaatcagagtcttatcttctaggaagtagttcgtagagcaagactgttatactttaatccctggacttaaacatatgaacataaaattatgcctggtctcagtattgtttgagagagaaatagaaaatraagttggttactcactattgagtatggaatattcaatatatacatatgaaggagctaataggcattattaaatcattttggccaacagaaattacatattccattgaaagaatcattgaacattcaaaaatatacattttaatattgttcagaatgaaaatacctatacattcaaaaaattctgtggatattattgtactaacatgggaagttgaataataatgtatatat

SEQ ID NO: 344062 - DNA, 548 bp, Homo sapiens
gttgaaaactgcaacagatcataaagtcacaagatagtgctgagtcaaatagattcaatccaatttattcctgttcttttgtgtgaagagcttataggaaatgacttaaaccattctttacccttggcagctgctaaactccatgtggcttaaatgagagatattcatgttgrtttcattttctctcagctatttcatggaacacctacattctttctttgctgtcatagtttgtgaaaaaacattaatggttaggaaaaatgcttaccattgcacattttttgggaatttaacaaggagcacagaaaagcacagaaatagaagaaaacaaaatgtgttgaatattagtaaaaaatggaacaggaaattaaaaatggtgaaatgacagtgtataaaaatgtgcaaggtaaagagggatataaaagaaggaagaagaatgcacactatttgtttgtgctttgtatctgtaacatcatacagataatacaagtaaataaaattaacagttccaagattaaacttgcttctcaaaatggtcaacattctga

SEQ ID NO: 344063 - DNA, 604 bp, Homo sapiens
gtattaattattgatttggactccataaggcttaattacacaaggggaaacctgcttataaaataatatttaacaaattgttcttaagaatctacacattacctgtgtaatttaaaattagtgagcaatttctttcagctttggtgtttaacttgcttagagttgatcatgttaacactgaattcaagtaaagacagttctaacattgcaaagattgtaggtaatttaaatatctacatagaacaytttaactttgccttgtttcaaccctgcataaaaatttaaactccaagtgtatgtcaacattttttttccttcagctatgcaaagtgttacaagactaagcaaagaatctttaaaaaggtgatgctaggtagcatttgtacaacaaataggcatttcagtgactgtcaataaagtaatggaaaaatgcctctatcctcagctatgtgtaacccccttagaaatagtgtaacatatttgataaaataaaatttataaaaaatttaaataattctaaaccagagagtgaatgataaccaattcataaacttaaactttgtcagagattttgactgcagttgggctttgaactgataaagac

SEQ ID NO: 344064 - DNA, 622 bp, Homo sapiens
gaaaaacacaaaggccttttaaatatagatataacttggatatccacttttaataagctggacactgtttaagaaattccttttaaatcccttattacctgactttagtcattccaagcattcaatattgctggctttgaactttatcaaacatgacctagcaggtgaacccaacaagcctcaattaagagacacaaagcacaccagattggctaaagcttaataccaaactcatagattatttttcattaatcagaattttagggccaggtgtgatggttcatkcctgtaatctcagcactttgggatgccaaggcgggtggatcacttgaggtcaggagttcaagaccagcctggccaacaaggtgaaacgccatctctactaaaaatacaaaaattagcagaggtggtggcatgcacctgtaattccagctactcaggaggctgaggcaggagaattgcttgaaccaaggaagtggaggtttcactatactccaacctgggtgacagactaagacttcatctcaaaaaatatatattatatatatatatatatatttacagataaaataaacaattatctttatcattccttttactgctttgcataaggagagggagg

SEQ ID NO: 344065 - DNA, 622 bp, Homo sapiens
gaaaaacacaaaggccttttaaatatagatataacttggatatccacttttaataagctggacactgtttaagaaattccttttaaatcccttattacctgactttagtcattccaagcattcaatattgctggctttgaactttatcaaacatgacctagcaggtgaacccaacaagcctcaattaagagacacaaagcacaccagattggctaaagcttaataccaaactcatagattatttttcattaatcagaattttagggccaggtgtgatggttcatgcctgtaatctcagcactttgggatgccaaggcgggtggatcacttgaggtcaggagttcaagaccagcctggccaacaaggtgaaacgccatctctactaaaaatacaaaaattagcagaggtggtggcatgcacctgtaattccagctactcaggaggctgaggcaggagaattgcttgaaccaaggaagtggaggtttcactatactccaacctgggtgacagactaagacttcatctcaaaaaatatatattwtatatatatatatatatttacagataaaataaacaattatctttatcattccttttactgctttgcataaggagagggagg

SEQ ID NO: 344066 - DNA, 593 bp, Homo sapiens
aattaccctcacatcctgcatttctcacttaaaaccaagattgagaattatcccttctaactgtggccattttactaggctaaaatttaattttatcctgttagtggcacaaaagttatgttcacaaaaggttaccttcccaagctcataatctcctaaccactcaattctcagtaaatgatctcatttcctactttatcctttgaagaaaaaattataagaacaaaatttatttaattattgcaccaaaattacctcagctccagtcatcctttctttcttctctaaatggaatagataattgctcctgttcccatttcttccggccttctcaggtagagtgatcatctctttcacctttatctttacggaatcagctctaatgctactttgataccaaataaaacaaaaatttacccatattgrtagccccagtgtctagtatcaattccattcagttgcctcctattcttggctgctttgagtctctggtctgctaatgttgtctgctttcactgtcagttcaataaacaaaccacagtgacttatccaatgttgcaaaagtgctccaaatattatccaagaatccccac

SEQ ID NO: 344067 - DNA, 616 bp, Homo sapiens
gcttatgacattaccctaaggtttccacatattttcagaaataaactcaggcatatctaaagtgatggcttaaattagttctaaatgtacactctcctcaatacttctgtaaaatggtatttacataactgataaatttatatgtggcattttcaaagtttactgtgattgctttccccaatatgtcaagtaatgaaactttggatttaattaaaatcattttgattaaattcatcaggtatttattgagtataaaactcgtggtcagtattaaactaagtgtgaggtaggattaaaaacatatgaaacttaaaagtcaaaaagttcctatgacttggaaacaggcrgaggcgtaagatataaacaaatataatgtgtaataaagcactaagaattgaaagtcaaaataggcagtattaatttaggaaacatattttttgcacattttgaaagaacagaatgaatgtatatttgaaaaagtaattttttatttgaaattttaaactatttttcaggaattatgtttaattatttactctggcaacacctaactttatctttgaagaaaaaaagttataaaaagaaaaattgtcaactagccaccatgtttctccag

SEQ ID NO: 344068 - DNA, 616 bp, Homo sapiens
gcttatgacattaccctaaggtttccacatattttcagaaataaactcaggcatatctaaagtgatggcttaaattagttctaaatgtacactctcctcaatacttctgtaaaatggtatttacataactgataaatttatatgtggcattttcaaagtttactgtgattgctttccccaatatgtcaagtaatgaaactttggatttaattaaaatcattttgattaaattcatcaggtatttattgagtataaaactcgtggtcagtattaaactaagtgtgaggtaggattaaaaacatatgaaacttaaaagtcaaaaagttcctatgacttggaaacaggcggaggcrtaagatataaacaaatataatgtgtaataaagcactaagaattgaaagtcaaaataggcagtattaatttaggaaacatattttttgcacattttgaaagaacagaatgaatgtatatttgaaaaagtaattttttatttgaaattttaaactatttttcaggaattatgtttaattatttactctggcaacacctaactttatctttgaagaaaaaaagttataaaaagaaaaattgtcaactagccaccatgtttctccag

SEQ ID NO: 344069 - DNA, 616 bp, Homo sapiens
gcttatgacattaccctaaggtttccacatattttcagaaataaactcaggcatatctaaagtgatggcttaaattagttctaaatgtacactctcctcaatacttctgtaaaatggtatttacataactgataaatttatatgtggcattttcaaagtttactgtgattgctttccccaatatgtcaagtaatgaaactttggatttaattaaaatcattttgattaaattcatcaggtatttattgagtataaaactcgtggtcagtattaaactaagtgtgaggtaggattaaaaacatatgaaacttaaaagtcaaaaagttcctatgacttggaaacaggcggaggcgtaagatataaacaaatataatgtrtaataaagcactaagaattgaaagtcaaaataggcagtattaatttaggaaacatattttttgcacattttgaaagaacagaatgaatgtatatttgaaaaagtaattttttatttgaaattttaaactatttttcaggaattatgtttaattatttactctggcaacacctaactttatctttgaagaaaaaaagttataaaaagaaaaattgtcaactagccaccatgtttctccag

SEQ ID NO: 344070 - DNA, 513 bp, Homo sapiens
tgatatcgatatagacatatagatacacatctatgaacactctcttgattcatgttggtaaaaattaacattctgtgtctatttctctctaaatgattttggaatttacattaaaacattgaaaaacttagctatgcttttataataaagtctcaagtgtcctcaacttttctttaagtcaaatgtgawccccagggaaaattgttgcagagatttgcttaaacatctcaagccaataataattaattctttgcaattttgatctttgtatggcccagaggccacatttcaaagttcaggaagattgcaagtgtactggcccattctcacgctgctatgaaggaataccacagactggacaatttattaaaaaagaggtttcattgactcacagttccacatggctgaggaagcctcaggaaacttacaatcagagcagaagacacctcttcacagggtggcaagagagagattgagcgcccagcaaagggggaagcaccttataaaaccatc

SEQ ID NO: 344071 - DNA, 433 bp, Homo sapiens
cattctaatttattgcatttgtcacttcatttgtcttgttaaaataggtttaaatttgaaaaatatgctcagagtaaaccaaagtgaatatagtcagatgtctgctgctattgataagaacacaaactggtgataaagtctatcaactagtacaggattttcatgtctgtgcatttaaatttcatttttattaactgatttcctacaggatcacagggttctgggcaactgtttttctatttgtaatgacatttatattcgaaaaatttttaagtgattatgttttcttggttctgtttctaagtggtatagttgcagcaggcatatttatcttattttgtaaaggtacagtcccaggaaagaaatagcatctttamtaagaaaataaatgttttttgttcttctcaggaaaagtaagaaattgtagagaaca

SEQ ID NO: 344072 - DNA, 332 bp, Homo sapiens
gtacgtggttcaagtttgctttaataaagggcattcacgatcaccattgtgcaaagccagactgcagggcagtagccaatatccattgattaaaacaggctaatcaggacagaagaacccaggtggaaccaggcaggtgggactcagcatgtgggaatgggacaacagmaatagattagcccttttgttttgttaatcaaaccttaataataatgtttactccagtgaattgcagagttatttcaaacaaatcacttcaattcatgtctgtcattttaaatgagagattctttgctgtattttatctcaaagagatgcaattataattttaa

SEQ ID NO: 344073 - DNA, 485 bp, Homo sapiens
gtgggttggggtagtggattaagaaataaatgtgaaataaggaagtaagagtgagtttagtaaactcaagaagcttgagagaaaaagatagggccatttgctrgaggattaagggtttttcttttctttcttgtccccttcctaccctccttctctctctttcttagactggagagactagactctgggaaagtttaagtgaataagagaagattgaagaagcagacgagattgataaattggggaatgggaaagagaatagagtctaaactctggtccataatgtcaacatttaggggtagattattaaaattgtctgggaaaaattattataaatgattaggaagaaataaaatggtttggaagccttgcacatgtgttttaagtgaaagaggactgaaaaaaagtagaaaatagaaaaatctaatgctcgtggctttctaaatacatggtctttcttaaaagataatttaatttcttataaa

SEQ ID NO: 344074 - DNA, 665 bp, Homo sapiens
cacactcttttcacaaaattgctcctaactggaagatctcactttctcctgtggggtaggaactgacaccagtgggagggatgtgcccctgaccattaatgactgctttcttttttttccttaaagaatggagctgttggggagggacatgcacacaatgtaaaacagacaaaatgcattacaactgtggtgtaatgtggccactatgaatccctatgtataagaggaaagaggctggctgcagcttyagccacaggatggggactggggaagacagagcaggagctcatttcctctgcacattttggctgttagatttgtgtgtgtgtttaaaaaaagagaagccagtgctcattttttgtatttaaatattaaaagtgattccaactgaaaaaaaaaaaggcttttccccaaaataaacacagaatacagtaaaataattattgtgtaaaatataatcaatatcaatatataatcaaatatatataatatatgcagaaaatataatcaagttattaactgattatatttctaaagactataaatgtaatttctattcatactaaattggaatgtattcttagaaagggacttagacgtacatatggtataggaagtacgtgcttgtggtcagtttgtatctggcaatctgtgacttaattttg

SEQ ID NO: 344075 - DNA, 612 bp, Homo sapiens
gttatgtacaatagtgtttgttcattcccaacacaagctagcatrcagacaaatctaatattgttttgtttggttgtaatactttataaattgtttgattttaccatttaccaaacctctgttgagctattcaaacaaacttctgccaagaacagcgaatttggtgatagtacttcttttaggagaaaaacaacccctttcctcagaaaattaaaagtgtttattttggcacttaaaccttgtattgagccttctggaaagtattttaaactgttgtttttaacctagacttgtgactgaaacaggaaaaggttccgtagctctgcaccaaaacacatatttatagggttgattttctttctacaccaaaaatactgggttgatggcagcagttttcaaaacataatttcctagacccatgctataaattgggtctttattggtgtatttaacaaatgatttatttttaaacctcaaaaacttctgatgactaagaaatgctacacgttaatcacatatgtctttaagtgccacaatgggaaagattttaaatacctgttctgttaggaattttcacgaaaaagaaaatttacttgagattggactttcttc

SEQ ID NO: 344076 - DNA, 540 bp, Homo sapiens
ttttggctaatataatggatcctctaataatatttaaacataaagcgacatttagtttaaaagtaaattcaaataagtttataacttcaaaacctcattttaaaagacatccattaaaaggttgtcctaacatggagacagggagtaatctaccccttagggtaataggcaggtcttgaggtcaatgtttttaatagatccctgaaacatcaatgtatttcattataaagttaaaaagttattcccagttttgtaacttaccaaccagatgatatactagcaaattctgggaaaataatgtcttatagctacattgaagatacacacaaaatgaatatatatcctttaaatataaaaggctaytctagataaatactgaagacctcctcttacctcactgcttctagcaaccatttcctcttaaccctcccttctcttcaccttcacttcctctcttacaggcagggagagaaacagtcaactataaagaaagaaggccaactgcatggcagctctttggctatgataattttttaaatt

SEQ ID NO: 344077 - DNA, 590 bp, Homo sapiens
ttataataatcatgtatttcttcattctgtattctcataatgaacaccaaatacttattaaatgcaacagtcagtgaaaaaataacaagaaatgaagggtttcaactgtcttaagagcattccattagatatacagaactctatcaaaattagcaatgataaatgaggttaaaaatctcacaagtaggatgtaggatgtaggtaggatggattaggtccacattttgtggaaaatattttaaaatgaaagggcgaggcaatggtaaagtgctttcaattggggcaatctggagttagccaatgycctatgtgctctcattagtctcagagattttacggtcaactgtgattctgcctattaaatgttctttcacttgatgattttacaatccattactgaaaattatatcaaaaggactgctagcatgtatattatattaatattaaagccagatttgcactcagcactggctaatgggacactttaaacaataagaaaagaaagttgttatatgcatgggatgcactgttttttaacccctgagctttccctcttgatactgtcctttaattctcttcttgaaaacacc

SEQ ID NO: 344078 - DNA, 532 bp, Homo sapiens
accaatcaaacataggtttggtcttttcatgtagtcccatatttcttggaggcttccttcgttcctttttagtctttttttttctaatcttgtcttcacacgttattttattaagttgatcttcagtctctgatatcctttttccacttgatcagtttggctattgatatgtgtttatgcttcacaaagttctcatgctgtgtttttcagctccatcasgtcatttattttcttctctaaactggttattctagttagcaattcctctaaccttttttcatggttcttagcttccttgcattgggttagaacatgcttctttacctcagaggagtttgttattacccaccttctgaagcctatttctgtcattcctcaaacttattctctgtccagttttgtttccttcctggccaggagttgtgatcctttggaggagaagaggcattctggtttttggaattttcagcctttttgcactggtttttccttatctttgtgaatttatctacctttgttctttgatgttggt

SEQ ID NO: 344079 - DNA, 532 bp, Homo sapiens
accaatcaaacataggtttggtcttttcatgtagtcccatatttcttggaggcttccttcgttcctttttagtctttttttttctaatcttgtcttcacacgttattttattaagttgatcttcagtctctgatatcctttttccacttgatcagtttggctattgatatgtgtttatgcttcacaaagttctcatgctgtgtttttcagctccatcacgtcatttattttcttctctaaactggttattctagttagcaattcctctaaccttttttcatggttyttagcttccttgcattgggttagaacatgcttctttacctcagaggagtttgttattacccaccttctgaagcctatttctgtcattcctcaaacttattctctgtccagttttgtttccttcctggccaggagttgtgatcctttggaggagaagaggcattctggtttttggaattttcagcctttttgcactggtttttccttatctttgtgaatttatctacctttgttctttgatgttggt

SEQ ID NO: 344080 - DNA, 532 bp, Homo sapiens
accaatcaaacataggtttggtcttttcatgtagtcccatatttcttggaggcttccttcgttcctttttagtctttttttttctaatcttgtcttcacacgttattttattaagttgatcttcagtctctgatatcctttttccacttgatcagtttggctattgatatgtgtttatgcttcacaaagttctcatgctgtgtttttcagctccatcacgtcatttattttcttctctaaactggttattctagttagcaattcctctaaccttttttcatggttcttagcttccttgcattgggttagaacatgcttctttacctcagaggagtttgttattacccaccttctgaagcctatttctgtcattcctcaaacttattctctgtccagttttgtttccttcctggccaggagttgtgatcctttggaggagaagaggcattctggtttttggaattttcagcctttttgcactggtttttccttatctttgtgaatktatctacctttgttctttgatgttggt

SEQ ID NO: 344081 - DNA, 640 bp, Homo sapiens
attctataacaagcatgtggagtgttggattatgtcaatgattgataagggtgtcagataatgggtctccctcccatgcagctgatataaagggaaactggtatrtccattgtcaaggaccattgggcagcaaagagtaaaaacaatgccttcgcctccttggcatctactttcagaaacaactgcacgtgtccgcaagggatctgtgcaaataaatttctagctgaattatctgtcaaggtgaaaaatttggaaacagcctagctgttcatcaacaggggaattgccaaaatgatagtattctcacactgagatattttgcagcagcttaaaaagactgtagatctaatgggttctaatgtgggaaactcttcaagatatattaattagtaaaaatgttaggttgaggaatgtttggggttcagcaccagaagagaacattcctggcccatgcagcccccttgcctttggatggcagcaggaacaacatggttctgtttcccattgaccttgtcatggaatcagcgttctcaaacagtggtctaggtagcaacttgaagtatacagaaactgatgtgaaatgtggcacgttttaactttccttacccacagggggatagtgataccatttttgtgaaca

SEQ ID NO: 344082 - DNA, 640 bp, Homo sapiens
attctataacaagcatgtggagtgttggattatgtcaatgattgataagggtgtcagataatgggtctccctcccatgcagctgatataaagggaaactggtatatccattgtcaaggaccaytgggcagcaaagagtaaaaacaatgccttcgcctccttggcatctactttcagaaacaactgcacgtgtccgcaagggatctgtgcaaataaatttctagctgaattatctgtcaaggtgaaaaatttggaaacagcctagctgttcatcaacaggggaattgccaaaatgatagtattctcacactgagatattttgcagcagcttaaaaagactgtagatctaatgggttctaatgtgggaaactcttcaagatatattaattagtaaaaatgttaggttgaggaatgtttggggttcagcaccagaagagaacattcctggcccatgcagcccccttgcctttggatggcagcaggaacaacatggttctgtttcccattgaccttgtcatggaatcagcgttctcaaacagtggtctaggtagcaacttgaagtatacagaaactgatgtgaaatgtggcacgttttaactttccttacccacagggggatagtgataccatttttgtgaaca

SEQ ID NO: 344083 - DNA, 638 bp, Homo sapiens
acaactttaaaaagtggtacatccatgggaaacattttgcccttcytcctcccacctccctgtttggaacagaaaaattcatcatctgtccgagaatgatctggctcagagagatctcaccctgtgggagagcagcactgactaaacgggcacgagatatatatactcctgatacaggtttgaggtgaggaagtgccatcccataggaacacaactgtgctctttaaaatgagaatgccttaaattttgggacagttgctgacttcatttaaaaacagtcctaagtgtctccatgcagctgaaattaccacaggcttgaattgaaatgcaacaggcttcgcttctcctctccactttgctttgcctccctggagctagttggttttttaagtacaaattgacagccaaatatgtaataagttatgacaagttgagcaatgactgtctccatctgttttcaaaggttgtttatttttatactgataaagagatgatggcaacaggaccaccttgtgattatttcaggttttcattcgctgcagttcagcctccagtgtctgcccttctttctggtaagctattctttaatgaagctgaagaactgtttatgacatattaggtgacacatggccaaaact

SEQ ID NO: 344084 - DNA, 638 bp, Homo sapiens
acaactttaaaaagtggtacatccatgggaaacattttgcccttcctcctcccacctccctgtttggaacagaaaaattcatcatctgtccgagaatgatctggctcagagagatctcaccctgtgggagagcagcactgactaaacgggcacgagatatatatactcctgatacaggtttgaggtgaggaagtgccatcccataggaacacaactgtgctctttaaaatgagaatgccttaaattttgggacagttgctgacttcatttaaaaacagtcctaagtgtctccatgcagctgaaattaccacaggcttgaaytgaaatgcaacaggcttcgcttctcctctccactttgctttgcctccctggagctagttggttttttaagtacaaattgacagccaaatatgtaataagttatgacaagttgagcaatgactgtctccatctgttttcaaaggttgtttatttttatactgataaagagatgatggcaacaggaccaccttgtgattatttcaggttttcattcgctgcagttcagcctccagtgtctgcccttctttctggtaagctattctttaatgaagctgaagaactgtttatgacatattaggtgacacatggccaaaact

SEQ ID NO: 344085 - DNA, 596 bp, Homo sapiens
gggtctcagtgggctaaaatcaaggtgtgggcagagctgcaatccttctgaatttctctccttgcctttttttttccttttttgttttagatgccagaagctctgtccacagcccttgcatggtgggcccttgctccatcttcaaagccagcactagagcatctttaaatctccaacccagccattcccacctcccccttattaagaccctgtgattrtatcaggcccatctggataattcagaataatcttccaatctcaatatatttgacttaatcacttctacaaagtcccatttgccctgtaaggtaacatatttacaagttctgggaattaggatgaggacttctttgaaggggaggagccattattctgtcttccacacaggccgtgctatgagttccattttacagccaaagaaacctaggctcaggtaggtgaggtgacttgcccaaggccacacaagtaataagatgcagagctcagattcacagattcacatttgtgaattcctaagcccaagctctgagccactgtaccacatgggctttctaatggaagagctgagggaaactcaatcaagctccccaaatatg

SEQ ID NO: 344086 - DNA, 596 bp, Homo sapiens
gggtctcagtgggctaaaatcaaggtgtgggcagagctgcaatccttctgaatttctctccttgcctttttttttccttttttgttttagatgccagaagctctgtccacagcccttgcatggtgggcccttgctccatcttcaaagccagcactagagcatctttaaatctccaacccagccattcccacctcccccttattaagaccctgtgattatatcaggcccatctggataattcagaataatcttccaatctcaatatatttgacttaatcacttctacaaagtcccatttgccctgtaaggtaacatatttacaagttctgggaattaggatgaggacttctttgaaggggaggagccattattctgtcttccacacaggccgtgctatgagttccattttacagccaaagaaacctaggctcaggtaggtgaggtgacttgcccaaggccacacaagtaataagatgcagagctcagattcacagattcacatttgtgaattcctaagcccaagctctgagccactgtaccacatgggctttctaatggaagagctgagggraactcaatcaagctccccaaatatg

SEQ ID NO: 344087 - DNA, 560 bp, Homo sapiens
gtccctgttggatttccctcttctagactgttcagtacgtgttggatttccctcttctagactgttcagtccatgttggatttccctcttctagactgktttcccaggtgaagttcttattcacgtttcttacttgtagatgtcttaaagtttagttatagtgtacagccacgtcccagactgccataggacggagggaaatgggggtagaaagtaagaattatctttccccacaactctggcattctctgaagttccaaagattggcaggaatgctcaagggccaccagaacagggacaaggggacttgcacatcttgcagtccccacaaccagaaacacatgttttgatcctacatatttattagggtttaatatacaataatttatactaaagaattccactgcaacagacatatgatcatgattgctgcagttgcctctgggagtatttacaaccccattcttcaagtattcatttaggtgtgcctaggtaataataggaaacctgaaaatcagttataaacttttatttcagacttttagaaaaattctacccat

SEQ ID NO: 344088 - DNA, 630 bp, Homo sapiens
tctccatatgacacttcatttaccaaatgggcctgcaactccccaaagaaggaaaacaaccttcacagagagaaaagaaggaaagggaaggctttcagtactccaagttgaactctaggtcttctcctrtctttcctgctgtcccctggtggtcacacttaaaagagccttgacaatgtcctagcactcatcaccatgatattctctgtctctctctctctctctttgctaaaactaattcccagcaggcagagctcataggccaagttctagcaacacttcctcatcaaaggagttcttggacagaatcctggtttgtacagatccaagcaaatgtccaagacatcggatcaaaccctaacttgtaacttgaagtctgcctcataccctcactatattgtccccatagctataggaacaacctactgacctatgagaatgtaagaaagtctgacattttatttttcctttaagaggaagagaaactactccaagactactatatcttttttcttaatttggaaaaaaaatctcatgcttcctatgggtattataattttctaggatgcttgtatttattttatggctataaaattcagctggtaacagttactgggtactgacaagtgc

SEQ ID NO: 344089 - DNA, 621 bp, Homo sapiens
tgtgcagtcacacagcggggattcacactcaggttcagctgactccaacactcccacactttcagtgacgctgccatgaatctccatggaagggaactaacactattggccccctcccctgcttgaccagttctgtcaagcactgggtaattggggatgtagtaataaatcaagccatacttcccgggggatacaaatcacattgctgcttccactttttaaagtcaatttcatcttaggcttcttgggactgccaccaatgcctagccacagagagggccagggtccatggaaagtgctgagatgctgatgtgtacacatgtgctctattgcgkcctcatggaccgtgctctacttcatccaacagtcatgctgattaccttcatattaatgggacaatgtatggttgggcaccccccttcctccctgcttccttctcactcatcggctttcagcctggagcacatacctgtggttaaattattaaaccttacaacaggatagaaatgatgacagctgtaatccctacacacacacacacacacacacacacacacacacacacactttcacgccactaacaatttgctgaaaatgctgacttaatagtattaacctaat

SEQ ID NO: 344090 - DNA, 591 bp, Homo sapiens
agtaaacagaacccttaaagccctccaaaattaaattggtcataatctgaatgaattctgtcaactctttttaataacatctccaaatcagccacttactgtgttgggaatgcattctcttctcccatttgatacttagctggagcccgttaataagcagacaaaaagaactgtaattcttgctactatctctgcaaattgattttcagctatttgttctttcttcaaacagcttccaatctgctttgattgtctccctctggaaagggtctgacggcccagattagagagggggaggaacatagggccacatggtcactggctataggagagcaaggacagaagcttctgaagctgtattaatattcagtgtcagtcgcaggatggatgggagagggaacaagcttcgggagcctttgatgaggtcacccacagaggaggcaggtgctatgaataagattacccacaatcccacaagctcccgatgaattcccattgcagtaaacaatgtccagtggaatgrtaatcctggggttggatgtcctgctgattttgcaggggtacaggtgcatctttgtctgaaagggcggt

SEQ ID NO: 344091 - DNA, 426 bp, Homo sapiens
tgtgcctgggcagtgtgtgctgtgctgaggcgtgtgggctgtggaggcagagggctctggattccctcctgacttttccacttgccaagtggccttgtgcaagttatatacttaccttcgctagctgtaatgtctggaatggagatggtaactcctgtwttcctttagaaactccacttgccccttaattgagattttctaaaacactcgtgggggattcaagtttgggtcagagaaaaaggaggaagaaaaagggaaaacataaatagccttagagcaataatttgccctgtcagacccaaagagactttgttaaattctataatttctggaatggcagtcctagaggtggtggccaggccagtcatttgagagttgggggccggtgaaaaggagacacctaggatcctgcttcaggctccaagg

SEQ ID NO: 344092 - DNA, 426 bp, Homo sapiens
tgtgcctgggcagtgtgtgctgtgctgaggcgtgtgggctgtggaggcagagggctctggattccctcctgacttttccacttgccaagtggccttgtgcaagttatatacttaccttcgctagctgtaatgtctggaatggagatggtaactcctgttttcctttagaaactccacttgcccctkaattgagattttctaaaacactcgtgggggattcaagtttgggtcagagaaaaaggaggaagaaaaagggaaaacataaatagccttagagcaataatttgccctgtcagacccaaagagactttgttaaattctataatttctggaatggcagtcctagaggtggtggccaggccagtcatttgagagttgggggccggtgaaaaggagacacctaggatcctgcttcaggctccaagg

SEQ ID NO: 344093 - DNA, 436 bp, Homo sapiens
ttctactgacagatttcttagggttccatggacctttgcaaggaatccctgaagtaggtgatatgtgaagttccttctggatttgccattttgtggccacataaaaaaatttctccaaattgttcatgcatgtatggaatattagtgtgccaaggctgatgtccctaaccataatcccccttcttcaagagcatctcatgcagttgaggagatgtggttgggagtggtggagaggggagcacagaatgaagaaaggggtcagaagaaggctagagaaatctgccacctctgtcactttctgtggggcagatagggaggggaggggctcactgtcactgctgaccgcagccraccacaaagggcattccttccacagtgaactcaaaattagtgccatgaactccacggacgaagcgagaaaaccaaatggtcagca

SEQ ID NO: 344094 - DNA, 565 bp, Homo sapiens
tcagtgttgcagctttgttttcacgcaaatcttaaactctctttgttctcacctctgtcatccctttacttttatttacctgatgctaggaaagagttaggtctaatggctgagacatgaaaaatgtcaaagaccagcatgagaactaggcccaggggtgcctcttccagtctctttctcaagtagctttctcagttttgggggacattgacgaagtctcccacaatatcttacactaagtagttgtttgataaatatgtattgaagtaaggtctttatctcccccaataccgcatgtgagaggccacgmataaacctgcctgcttcactcacatgtcagcacgggcttgtttatctggttaactcacagacctatccatctgttagaatagctgggcgttgtggcgggtgcctgtaatcccagctacttgggaggctgaagcaggagaatcgcttgaacccaggaggcagaggttgcagtgagccgagatcatgccactgcactccagcccgggcaacaaagcaagactccatctcaaaaaaagagaaaagtcccctttcattc

SEQ ID NO: 344095 - DNA, 568 bp, Homo sapiens
tagcttaatggagaatagagaaggctcaaattatgaaaatctggaataacactgaaagaaatatcactatagaccctacagaaatacaaaggattgtaaaagaatactstgaacaatggtgtgccaaaaaatccaataacctgaacgaaacaaaaatttctaaaagtatacaaactaccacaactgactaaacgagaaaaaatcgaagagaacctgtaagagattgaattagtaatacattctttttcccccacaaagaaagcccagacccagatgccttcactggtgaattctaccaagtacttaggaagaattaacaccaatccttcccaaactcttccaaaaactagaagaggaggcaatacttcccaactcattctatgaggccagtattatccggataccaaaagcatgcaaagacatttattataatatatcttgcaaatataagcacaagctcctcaacaaaatactagcaaaccagatcgagcaacatatcaaaatgattgtatcccatgatcaagtaaggagttagcccagaaaaacaagtttgatttgaaatacaaaa

SEQ ID NO: 344096 - DNA, 568 bp, Homo sapiens
tagcttaatggagaatagagaaggctcaaattatgaaaatctggaataacactgaaagaaatatcactatagaccctacagaaatacaaaggattgtaaaagaatactgtgaacaatggtgtgccaaaaaatccaataacctgaacgaaacaaaaatttctaaaagtatacaaactaccamaactgactaaacgagaaaaaatcgaagagaacctgtaagagattgaattagtaatacattctttttcccccacaaagaaagcccagacccagatgccttcactggtgaattctaccaagtacttaggaagaattaacaccaatccttcccaaactcttccaaaaactagaagaggaggcaatacttcccaactcattctatgaggccagtattatccggataccaaaagcatgcaaagacatttattataatatatcttgcaaatataagcacaagctcctcaacaaaatactagcaaaccagatcgagcaacatatcaaaatgattgtatcccatgatcaagtaaggagttagcccagaaaaacaagtttgatttgaaatacaaaa

SEQ ID NO: 344097 - DNA, 596 bp, Homo sapiens
cacacctcagctagaggtacctttggaaggcaacagtgtgaattcctcttccacgacaaccccgcttctgagaaagacccaggatgccaggctggagagggagttctccactctgaccttctctggctccctccaagggcacatacctcaatgagacacttgaagtgctccacaatttgacccttattcttaactcctacatcttctttaggccccttttccattctcctggctgtcttctccagccccaacaacctacatccccttcctagaagacaccttgaaatcttgtgccttctttctccactctcatgtctgccaacatttcagggtccagctcaaattctacctcctcaggaagccttcccagatttccctgtcagaatgaatctttcctagcaacaggacccaccatttgcgtttctgttttagcatttcccacaagctgcttttgttcatyggccggttatacacatttttttgccaaacagtttatgagcttctgggagttgaagaccgtgccatattcatctctgtgtttggggatgctgcatatggttgtttaggttggacactgcacaagagcacccagctga

SEQ ID NO: 344098 - DNA, 616 bp, Homo sapiens
caccatttccctgcctaatagaactggcagctttcctttctttctcctctgtcttcctgtaggtgatcaagcatcaaactttctgtatacactgtaaagtgcttcttccaataatctttgcagcctagacttacagtttgtccttcccaggtctgtttccttataaatattccaaggtgaggctgccagtgggtgatttatttacaagaggtatcacttcttgcggctgtgcatggtgtccaagcaaatggcttactgcagctctcaccaaactcagctttgttatctactttagatgagaccaggtgattcactctctctctaatttcaactcttggtgagctaaaatgatttctgctttaaaaatgtccagaatgtgaaaaataaaatgaaaaactacagaaacaacaagmcttgttattcagatagagagggagacagagacagagactactcatcttatctgaatgctgtcacagggaaagcacaccctgacagtccacagccctggagcctcctcaaagtttcccacccaaagaggaagccctacaaaagaaatggaagagaaccccctgtaccctgccaggtctgtcttaccaaaggaatgtatcattca

SEQ ID NO: 344099 - DNA, 616 bp, Homo sapiens
caccatttccctgcctaatagaactggcagctttcctttctttctcctctgtcttcctgtaggtgatcaagcatcaaactttctgtatacactgtaaagtgcttcttccaataatctttgcagcctagacttacagtttgtccttcccaggtctgtttccttataaatattccaaggtgaggctgccagtgggtgatttatttacaagaggtatcacttcttgcggctgtgcatggtgtccaagcaaatggcttactgcagctctcaccaaactcagctttgttatctactttagatgagaccaggtgattcactctctctctaatttcaactcttggtgagctaaaatgatttctgctttaaaaatgtccagaatgtgaaaaataaaatgaaaaactacagaaacaacaagccttgttattcagatagagagggagacagagacagagactactcatcttatctgaatgctgtcwcagggaaagcacaccctgacagtccacagccctggagcctcctcaaagtttcccacccaaagaggaagccctacaaaagaaatggaagagaaccccctgtaccctgccaggtctgtcttaccaaaggaatgtatcattca

SEQ ID NO: 344100 - DNA, 545 bp, Homo sapiens
atcgtgacttaaacttgccttgaatctctatagtgctgggtacttggggctggatacagagtactcgttacatgaatactttcttattcaaatgtacgaagaattgcataagcatagttctgcttctagaagaaagccacagacttagactcaaagtctaaggcagggccacaaaacatctcaatagaaagaataactaaaccaggattgacttaaaagcttgagagcagaggtcatggctcatcaatctttgcatccttcacagtgcccaacacaatgtcttatacatagtaggtgctcagtaaatatttgcccccaaaaatggaatcaataaagaaatgattgtgaattgcttctatcacatctggctcaaagtcaagtgctttttgagatagaaaaacaagatkaatatagaattgggtaaaagttggaagaaaacatgcgttaatcctactcatgaaaaatatttcatataaggaaagcaacttcattgttttaatttttcagccactcttcccagaaagagaattcctgaacctgtcact

SEQ ID NO: 344101 - DNA, 335 bp, Homo sapiens
tgctcatcagctccagaatcatgaatccaacagccaacaagtaagtattatggagcaccaactatatgatyggtacccatggcagttcctcaaccaaatgaagattgtcaggcaacaaatatcagtctgtagtgatatgagaccaaaggtggaattatcttcctttacccttttggaagaattatgtaatgaaatatattagttatatattgctgcatagcaacttacctcaaaatgtagtggcttatacactttatgtataagaataaatatttattacctcttacatttctatgggtcagacacgaagaagtgatttagctggcaactgaggc

SEQ ID NO: 344102 - DNA, 569 bp, Homo sapiens
tgtgtctctggacctgaatttagctgggtgcatttgcaactataaaaacaaggagggtaggaggagacaaaatatgtatggggakgggaaggaggcagacatgcaggttttgctggtgttatagacagaccatgagacctcctcacacaggactgaggctggcccagaagtcagtccacttgcccaggatgagtctcgttgtttgcaccatcagcaaggcctggagttcgagtgcaatggccctattgactatgcccttcatcatccaaggcagccgccaggtgtggctctccttccacacttggaacctgaccttcaactggagccctagcagccacagtggtgccagcctgggagtgcgaatggggtgggcctgggaatggggtgagccctgggggctgtgtctttctccagggctcctggtgccctaaagagacggaggatcctatagcatttaacgttaagacagttcagccaaggccttccatgccagaaggtggctctgcttctatgctctggtgcaaagtgggtgcaggtctggagctcctgcctcttctgtgagggaccca

SEQ ID NO: 344103 - DNA, 569 bp, Homo sapiens
tgtgtctctggacctgaatttagctgggtgcatttgcaactataaaaacaaggagggtaggaggagacaaaatatgtatggggatgggaaggaggcagacatgcaggttttgctggtgttatagacagaccatgagacctcctcacacaggactgaggctggcccagaagtcagtccacttgcccaggatgagtctcrttgtttgcaccatcagcaaggcctggagttcgagtgcaatggccctattgactatgcccttcatcatccaaggcagccgccaggtgtggctctccttccacacttggaacctgaccttcaactggagccctagcagccacagtggtgccagcctgggagtgcgaatggggtgggcctgggaatggggtgagccctgggggctgtgtctttctccagggctcctggtgccctaaagagacggaggatcctatagcatttaacgttaagacagttcagccaaggccttccatgccagaaggtggctctgcttctatgctctggtgcaaagtgggtgcaggtctggagctcctgcctcttctgtgagggaccca

SEQ ID NO: 344104 - DNA, 569 bp, Homo sapiens
tgtgtctctggacctgaatttagctgggtgcatttgcaactataaaaacaaggagggtaggaggagacaaaatatgtatggggatgggaaggaggcagacatgcaggttttgctggtgttatagacagaccatgagacctcctcacacaggactgaggctggcccagaagtcagtccacttgcccaggatgagtctcgttgtttgcrccatcagcaaggcctggagttcgagtgcaatggccctattgactatgcccttcatcatccaaggcagccgccaggtgtggctctccttccacacttggaacctgaccttcaactggagccctagcagccacagtggtgccagcctgggagtgcgaatggggtgggcctgggaatggggtgagccctgggggctgtgtctttctccagggctcctggtgccctaaagagacggaggatcctatagcatttaacgttaagacagttcagccaaggccttccatgccagaaggtggctctgcttctatgctctggtgcaaagtgggtgcaggtctggagctcctgcctcttctgtgagggaccca

SEQ ID NO: 344105 - DNA, 566 bp, Homo sapiens
taagcctgtgattgttgtcaagcatttgtgttcatctgtgtccctagagtcagagcagtgcctcgcacaggtaggtagttataaacgttgaccaaatctcctgacccagtctacataacaaccagctaacaacaggatgacaggaccaaatctgcatatgtcattattaacgttgaatgtaaatgggttaaacgccccacttaaaaggcacagagtgggaagttggataaagaagcwagacccaactatatgctgtcttcgagaaacccatctcaaatgcggggacacccccaggctcaaagtaaagagatggagaaagatatatgaagcaaatggaaaataaagaagagcagaggtccctattcttatttcagacaaaaccaactttaaacccacaatgatcacaaaggacaaagaagggctttaaataatgataaagtgttcaattccaagaagacttaactgtcctgaatatatgcgcacccaacactggagccccagattcatagaataagttcttagagacttaagaaaagacttagataaccacacagcaaaagtggtag

SEQ ID NO: 344106 - DNA, 403 bp, Homo sapiens
ttataaaatttaacaataatgtgtatatatataacaatgtacaataatatatcatataacagtaataatatataacacagtaatcattatgatagctgaattatgatgtgaatattatatgccagatactatactaatatttattcctatttacaggattatccctgttttacaggtaagaaaactgagtcttgggaaaataagccacttatccagcgtcatataggtcatcagggttgtagccagaatttgaatccagtgcaattttatgtgataacttcccatacatcttccttaaacagctctgagggtttctgctgtttaataggataaattcaaaatcttcactggtacagttaagggttttyagtggatctttcctatccctagtgcctcatttccc

SEQ ID NO: 344107 - DNA, 455 bp, Homo sapiens
ttttttcccatgattttaccacagtaaaatgtaagaatatgacttctagtataaaacacactacaccaccctttttcccaaagttaacagccaaagagagtttggggtcaaatgtatcatgtgctttctgccttgctcattatttctgatataggagtacttccaaatactcaattttagaatgcataaatagccaaaagagtttaaatggaattatggaattaaaagmtttgataactcttctgggagatttctcatccacctatttctgtttcaagttttattataagaacttcctctcctgttctggccttctgaagatccactatgtctataacacaaagggaatctgtccccaggggtcttacagaaacagcatcaaaacatgattgagaggattcaggaactatccctgcagaaataaaaattctcaggttataaactagcatatcatc

SEQ ID NO: 344108 - DNA, 572 bp, Homo sapiens
gttgcagtgaacagagatcgtgccggtgcactctagcctgggtgacagagtgagaccccatctcaaaaaaaaaaaaaaaaaaaagaaaggaaaaaaaaaagaaaagaaaggtaaggaaagcaaaggaaagaaaagaagaaacgaaaaaaaagaaaagaaaagaaaagctaatgattcamtgagagtagggtaatggagaacttcaatataatgttgcatcccaagagataacaacaaacttatctgctatctaaatgaaaggctgctgttaaaggactcctgataaagtagcatgcttacactaaccagaggaactagcattgctatatgatgtgtgtatgtgttgtggggaggatgggatgggggttctctattagagaggggctctgttataatcgggagaccctacatgtactgctttgtagttaacagcctttcttgccctttcctttatataagttttatggtccttcacatccgtgactccaaatccacagatctgtgccatacatcagctttcagaattgagtatgcagaacactgagtcccacaaaccatctgtggagtgcccg

SEQ ID NO: 344109 - DNA, 616 bp, Homo sapiens
tggcccagggaagccaaaagagtggccaagggaagcctggctagagaagtcatttgtattttctgtttgtatgacatacatatatgagagagggagaaagagaaagagcacttacgggtgagaaatccatgggcctggaagctcagtagagttcctgaatgtttggatttgacttacgaccttttgaactgcagaagcaacggttctgatggcacgttctgcaggacctccatgcaacaaagacttgtaacccagtatcacattttctgttcaaacaacattcttttggggccagggaagggtaaatcaaaatcaattaaaatgcttttgaacttctaagaaagtcattccaggttttagttgaaagaaccttgtttctggtaagcatacgtgttcaggtagacccacagactacccctaaccygcatgcagattatattatttggaaatagaagctgagttcagtaaacactccccacacttcagctccttccaggctgtgggctctggcccttcttctcatctgcacagttcaaattaattatacactttaatttcatgaattattaatttgattctgactcggcagcttatgattatccagcgctacagacta

SEQ ID NO: 344110 - DNA, 616 bp, Homo sapiens
tggcccagggaagccaaaagagtggccaagggaagcctggctagagaagtcatttgtattttctgtttgtatgacatacatatatgagagagggagaaagagaaagagcacttacgggtgagaaatccatgggcctggaagctcagtagagttcctgaatgtttggatttgacttacgaccttttgaactgcagaagcaacggttctgatggcacgttctgcaggacctccatgcaacaaagacttgtaacccagtatcacattttctgttcaaacaacattcttttggggccagggaagggtaaatcaaaatcaattaaaatgcttttgaacttctaagaaagtcattccaggttttagttgaaagaaccttgtttctggtaagcatacgtgttcaggtagacccacagactacccctaacctrcatgcagattatattatttggaaatagaagctgagttcagtaaacactccccacacttcagctccttccaggctgtgggctctggcccttcttctcatctgcacagttcaaattaattatacactttaatttcatgaattattaatttgattctgactcggcagcttatgattatccagcgctacagacta

SEQ ID NO: 344111 - DNA, 566 bp, Homo sapiens
gactgaatcctcactgtgaggtgtagctatccatcatttttgagcaagaaagccaagatggataaataagtgacttkcccaagacaactagagtggttggcaccatgatgggattggttgtcttatttttcagttggtacatggagtcttcgatgaccccaggatttggaaatgaaatttaaccaccttagagcttctggaattttcttctcttgtgttcaactgaaagtttctgactgccctgggtgaattagatgttatcttactggaaaagtgttatactgcctggtttcttctataaccattttaaccttaaaagcttaatctgtttttaacaaaattaaaaataatttgtagctatagtggaatgatcagagtttgtgcccagtgtttacctgtgagcattttctttttgcatacaaacgttttggtcaacccacggttgcctcctccaggaacagaatcttttgattcaaatacattgattaaaatttacagagactatggtctttccctgccatgggtttagtgtagagaaaatgggacaggatgaggatgatgattcc

SEQ ID NO: 344112 - DNA, 450 bp, Homo sapiens
aaattccagaaatgggagtagacagtttccgatgaaccctagaatgcttacagactcgcaggattagaagaaacctttatagacacgtacacttatccttgcttgctcggccatcttctcactggttcaagtaaacagaacatgatgcctaccaaagatatcctgacatgcttctgaagagagaggctccttccccctgctcaagaggatgaacctaaaatttgytgcaatgaaggcacagtcactgtaaatatacctcaggaaggaaaccgcagaaaccctaagtcaaccacagttccagtacagaggaagccctcccttggacagaggtcataaggctaaacaagcaatgttccattggacacctctgttaccttaataggcatctcatcacctccctgcccaaacgccactgctattcatactgaataagacattagctagacctgg

SEQ ID NO: 344113 - DNA, 585 bp, Homo sapiens
ttgggcaagatacttacttactttgaacctcagttttgaatctacgcaaatggggataatgtcatttgccctgatattctttttgagaattaaatcaacaaatatggtgtctgacacagtacatgcttaataaaagattgctagtatattaacagttgttattattatgttattatagattatcttctcrctgaagttatgctaggtactacttcttagtgaagaacaagtcctggacagggagcaggtaatattaataccacttactgctctgaaaccaccatcttcccctagacaatgactattaacttgtttttgagctctacctctgacgccttcagccaaggcacacctgtttccaggtaagactagatgaaataaatgctttgtttcatttctccattggaaatgaggtcttggtccatgttgaggatgtgtcaggggtgtgtctgttctaagtttctggagccactgcacacctgctcgagtagctgaaatgcatactccgaccatctcagagctacagaagtcccagttgctgctggaagtatttttagctgcattatttatttgaacacctgcctg

SEQ ID NO: 344114 - DNA, 557 bp, Homo sapiens
gctagaaggtagaatatcctagctccagtcctggttcagactcactggtcaagtccatcccctttcttgggttctaataccctttacaaaatgagtgggtagtcttcagagtgggttcttccagctctaggacgacataattctaacacttgtgaacagtaaggtttggtggtcagaactaaagaactcagtctcttgacaaagggaatgacgtttaatatgaattgttattgagagaatttaaagtcccacctaaaggaatatggaagctattccattccactggctattattgcatttgttcttagaagatgctcaggcctaaatatcttcttcagtggactttctaattggtatctctcctatcttaaaataatgatayaaggaaggctgcagcctttccctacatctcccttcagcccctgctaagtatctataacacagggtaataagtgtttgcaagaactacattgctccctgtaagaataactgttccaacgataatgtaactcacctatgtgtgatgtgacaaacgggggcttagcctacatgtaaag

SEQ ID NO: 344115 - DNA, 598 bp, Homo sapiens
tacataaatttgctcatttaattctcaaaacaattctatgattcacacccaggtgggctgctcactgctgcatctatgcaattctagggactcctgggcctcacacccagggagcaccctttcccagcagcctgaagaggcctgtgtcagcttggccacccaccccatctccatgctttccttctgcagattaacagggactggatgcagacagcactccggacccgagacgacttctggtatttcactgtcaagtgaaaattgagtccgtggtaatgttcctgcaataatatcaaattcaaaagggaaagatgacggaaattctgctgccagctgaaaggagcctgaggcacatttttgttttaattctttttttcatggcttttcaacacctgccttcrctcttccactctcccaacaaaatatagcttaggttgccttgcagtattaataagagactggccagcagacctatgcaagaaattgcagtgggtggtctgcgtgaaatgtcttggtggtcttaaactcggtcctctgacaaagttcaaggttacagtggtctttcccgagttgccatcagaatctgaaaatatcctgg

SEQ ID NO: 344116 - DNA, 602 bp, Homo sapiens
acacagggcagcccccataatgaaggatcatctggcctcaaaaagtcaatagtgctgaggttgagaaacctttttatagattatcacaaatgttacaaaatttctcaaatgatttccctcaaaacctttaagaaatgaaaaatgagaagytggggaaaacaagaactccttttggtagtattttgattatcaaagttatagttgcttttgtgaatgcaacaatatattacttcaccataaaatatgctcttaaaacctaacacttgtacttgcattatacccacacactgagaaatgctggaaaatcagcaaggattttaggaaaaaacatctacctgagacatccttcaatgaacagaggaataccctgaccaactgtgttaaaagcaaataaagtaagatataacgaaagctaactttttagccagtgaaaaataaacacatctggtacatagtcctatgtgtgtgtatccatccaattctatagtatcagagctctgacattcagtaatataataatattatttttgagatcagttaaggtataaaatgtgcgtactctcagtctttaatattaataagtcttgtaactagcagtttct

SEQ ID NO: 344117 - DNA, 539 bp, Homo sapiens
agtcatatggatgtcttgacctgtccagcacacacctcagtagtaggagatatgggtctttggaatgctttatgtgtgatgaggatgaaacagttaagtgctactttctcatcctcggccttatgacattagttagttgkgtaagattttgcagggaggtattccctcctctaccctttcgtcacaagcccctctcattcctctgaaaaggttccatactccagtccctaccctcaaagaaagattttactaagcaaaagtatctatggctctctctgttctccttgctttagctagcacagctaaactgggatctcaccagtctgacagggcaacctccaagattcacaacccaggaaaagtactgctttgcgtaagtttaatcaagaccagagcagagacaggacacaaagtcaaaagaactcagtcagctctgtccccttggtgctaaagaagcaactagaataattattcttttacagtattttgccatattttttgtctttttaagatttgccatcacccatctgtagatggtg

SEQ ID NO: 344118 - DNA, 595 bp, Homo sapiens
ggtggttgaagaacatcaaagaggagcaattatttcagtcattagggcagttccacctgttctaattgaacatttttaggatgtagaagatgcatcatacattggtatctattcagaaggtggggacatctgctgtctgtcatgtatctgggagatgtttatctcaacaggaggcaataataatatggtaaaccaaacctaatattatcatgatgcattaaaactgggttaattgaagcaataaaatcaaagtaacagtaaatgcttatacaacatgttaagtaatatttacttcaatcttagaaatgaaatgataattttacattctagcagatgtatttcttgatacctgttctgagaggacagaaacaaggctcaaaattcatgcaagaggctaataacaacttagttgatagtaaaatatggagcattggatgtagagtgcattaaccttcttgtttaatctgagttgacctataagtgggcatattgttttttggggaatygggagttttctcaagtagaaagaagccccacttttcctttgatagggtaccagtcaaggaaataaatgctcttttttctacctgagtta

SEQ ID NO: 344119 - DNA, 589 bp, Homo sapiens
gagaagtattcccattctagtcttctccttccttcctttttgcctggaacattgatgtgatgggtagaaaatccccttcataaaggcctttggctccctaatgacccacctctggaattctattccatgactttgtttaagccaccattttttaattttattttaatgtgcttggctgagagacttaactttaactgatacagtgttagtaagctgtctgacaaaattttggattcccttagmatcaattttggaaacatatataaaagatgatgcaccttctcttaaataccacttaataaattctaaggggtgcagcatagtgccatgcaaaagtgagcactggaaacacatcgcttccaacagcagcagtagaatgtaaatttcaagtaataagatcaaactagtggatccaagggctaggagtattatatccttgagtcctgaggatgccttatttaaaaagatataaagaaaaaaatttaaaaaacacacaattcaacatgtcagagtcaaccaaaattctaagattgcaatgagaaaaggagatgaacaaaacaggccaatagagtcattagcaattctgtta

SEQ ID NO: 344120 - DNA, 568 bp, Homo sapiens
tataagttcttcggaaagaactcagaactaagtgccagaagccaatgctggttatgttactaactgtatggctggtccacctcgtattgccaataagacatcaaatactcttaaaaccttgcgtatgtttttggcttcattcagatgtgcaacgaaaatccctgtagccacataagctgggctgatacatagtcaacaccagtacaagtggaccagaagctagacactaaactatttcctttttttttttttttttttttttagacaaggtctcactttatcacccagctggagtgcagtggtgcaatcatgacttgctacagcctcgacccccaagggctcaggtggatcctcccatctcagcctccccagtagctgggaccataggcgtgccccaccacacctggctaatttttgtattttttgtagagacagggtttcaccatgttgcccagaccggtcttgaactcctagactcaagcaatcctcctggctcarcctcccaaagtgctgggattagaggtgtgagccacgtgtctggcctgaaatacttagataccagttgata

SEQ ID NO: 344121 - DNA, 441 bp, Homo sapiens
tttctacaatgctttcacaaagtgtccagaaacagggaaaacatgatgataatgttacctgccagagataggtaagatctctctacagatatacctacaaaatgcaaacaagacccttgagcttaaggaattcacaaggatattcataaggctgctttaaaggtaagcatagctgttagatattctgtacataaacaggaaagaaatctttagaataattacaggctgggcgcagtggctcatgcttgtaatcccagtatttgggaaggccaatgcaggaggatcatttgaggctaggagttcaagaccagcctgagcaacatactgagaccccttcatctctatgaaaatctaaaaaatacataaaattagcctggtgtgttggcacatgcctrtattcccagctactcaggaggattgctggtgcccaggagttagagg

SEQ ID NO: 344122 - DNA, 397 bp, Homo sapiens
tgtttcagttgagacatctatgtccttctcttgaacagacagacacttcccttggttatgtagattaatattaggtaattcaacaaactcaccaaatgcaaagtggctgctcagtctctgactgacaatccagcctttttgctctttcaggatttacctgtcacaaatggggwgactgtttgaaaccccctgacaaaataatcaggcaccattcagcaggtgcttggattcccacacaaaggaccaccatctttcactttctttaatacttggcttctgggaagagttattaacttaaacaccatctgattagtcatagctctactatgaaagttggcctggggttcacccctaacgtacctggcaattgatattttatttaaggcgccaacacact

SEQ ID NO: 344123 - DNA, 595 bp, Homo sapiens
cttacagttctggaggctgggaagtccaagatcaagtaaccagcagatttagtgtttggtgagagtcagttgctctaaacagcacctcacatggcagaagggcaaaaggtctccctcaatcctcttttattagggaagaaatcatattcaggagggaagagccctcctgacccaatcacctcttaaaagcttaatttattaatactgtcacttgaggattaagtgttaatctataaattttaggggataagcattaaaatcacagcattctgtccctggtcccccaaagttaacttccttcttatttgcaaaatacatttacttcattcaaatactccaaaagtcttatcttattccagcatcaactttaaagtctaagtccaaakatgcatctaaatatcatctaaataagatatgagtgaaacttaaggttgtgattcattctgaagcaaatttcttcccagctgtgagcttgagaaatcaaacaagtgatatgtttctaaaatacaatggtgaagcagacataaatagacattcccatttcaaaagtgagaaatagtaagaaagcaagaggtacctggtctcatgaaagtcc

SEQ ID NO: 344124 - DNA, 574 bp, Homo sapiens
aaaacaggtagtgggccagatttgccaattattgtactataatggatacactttctctcacaagagaattctaccataggtaataattttatatttgtatatttgtgcaatgatgccaaaacgtaaatgaacagaaatgtttaaaaaacatgatgttttttaaacattgttaaaaaacaagaccaaagcataatgtttaagaaatgtgaatgtatatttccatctttaaaggcatttgaatacagtacatgaaattcgaaacctcagttgtgaattcgctatttaccaatgacaaggtttaagttcttcagtggccatgagtaagttaagtttgtcatcactttttgccctggtgtagtattttccaaatagtaaatgctcaattcacatgtacattaaagtaaatactaagaaaaccctcacatgtaactagacacaattctattyatgtatctttgaaatcaactggagacattatcaattaatgcaaagatcctgggctttcaatccaaagaagcttacctctctgctccagatgctcatcttgctggctgtgtgtctccaggtaagttct

SEQ ID NO: 344125 - DNA, 304 bp, Homo sapiens
atcatgcagaccacagcaggattgttstggaatcccacgtaaggcacaaacacccagaccacaacaggagtgttctggaatcctatgtaagggtcaacctttcagaacacagcagcagtgttctggaatcctataggagggacaaacattcagaccacagcaagagagttctggaatcctatgtgaggaacaaacattcaggccacagcagcagtgttctggaattctatgtaagggacaatcattcagaacacagctggggtgttctggaatcctacgtgtgggacaaacattcagaccctcg

SEQ ID NO: 344126 - DNA, 583 bp, Homo sapiens
ctagcaacagcagttatcttggtcctccagttcctgtgtcgcacaactcactacttcttggtagtatacccaaaatacattttcatgacaataaggtktgtcaattgtgttaagcttgtttgaatgtgcttttagtttcattgtgtttctctgttgcttttctattctctgtgtcattgggttctgctatgatctttattatttccttccttccgcttactttagcttccatttgctcttctttttccagtgtccttatgtcaaaagttatgttattgatttgaaatagttctcttttttattatctatatttacagcaataaatttccctgcaagcatgtctttaattgtctttcattaagttttgtatgttgtgacttcattttcattcctctaagtatattttcaaatttctgtttggatttcttctttgattagtaatttggatgtgtgtggtttaatttcaacatatttcagtttccctactttcttgttattaatttctaggttcactctattgtgataggagtacatgctgttcagttcctttaatggcctatagtatagtctatgatggacaatg

SEQ ID NO: 344127 - DNA, 583 bp, Homo sapiens
ctagcaacagcagttatcttggtcctccagttcctgtgtcgcacaactcactacttcttggtagtatacccaaaatacattttcatgacaataaggtgtgtcaattgtgttaagcttgtttgaatgtgcttttagtttcattgtgtttctctgttgcttttctattctctgtgtcattggkttctgctatgatctttattatttccttccttccgcttactttagcttccatttgctcttctttttccagtgtccttatgtcaaaagttatgttattgatttgaaatagttctcttttttattatctatatttacagcaataaatttccctgcaagcatgtctttaattgtctttcattaagttttgtatgttgtgacttcattttcattcctctaagtatattttcaaatttctgtttggatttcttctttgattagtaatttggatgtgtgtggtttaatttcaacatatttcagtttccctactttcttgttattaatttctaggttcactctattgtgataggagtacatgctgttcagttcctttaatggcctatagtatagtctatgatggacaatg

SEQ ID NO: 344128 - DNA, 578 bp, Homo sapiens
atctctactagttaatatacttgtgggtacatcttcagtgggatatttgttgtcccttattgaggcatgaatgactattctgtcacagggaggtttttttgttgttttagtcttttccagctattgtgtagaacattttgggcaggagaatctaggaccaagccacatcagttctctccttaacccactccattcgactgttatcacagctatgcttccagagtgctstgtgcattttcacgatcagcaaacaatgaataaatctctggtgagtcatttgtttatatattcctcactttgttttacattgtatttttcgcctttatggagtccatggattaaaatgaaaagatagaaataagtaaaattcaggttaaaggaaatacacattaataaaataatgctggcatgtagacatatgcaggttataagctatagaacttgagtacaaatgtgtctctggtctttccgatgctgcaacaaagaggcagtcacatttgttacatgattggaatggaacctggaaagagtgtatgttccattctcatgggacaggaagacttgctgtcaccaaagtc

SEQ ID NO: 344129 - DNA, 578 bp, Homo sapiens
atctctactagttaatatacttgtgggtacatcttcagtgggatatttgttgtcccttattgaggcatgaatgactattctgtcacagggaggtttttttgttgttttagtcttttccagctattgtgtagaacattttgggcaggagaatctaggaccaagccacatcagttctctccttaacccactccattcgactgttatcacagctatgcttccagagtgctgtgtgcattttcacgatcagcaaacaatgaataaatctctggtgagtcatttgtttatatattcctcactttgttttacattgtatttttygcctttatggagtccatggattaaaatgaaaagatagaaataagtaaaattcaggttaaaggaaatacacattaataaaataatgctggcatgtagacatatgcaggttataagctatagaacttgagtacaaatgtgtctctggtctttccgatgctgcaacaaagaggcagtcacatttgttacatgattggaatggaacctggaaagagtgtatgttccattctcatgggacaggaagacttgctgtcaccaaagtc

SEQ ID NO: 344130 - DNA, 582 bp, Homo sapiens
tctactccagcactggttcctaaggtggtttcagtagtgagtctctgttcatgtaagccataaattcctatattcacttctctatctctccaatcttgggggcagtggcttgccctatgtcctctcttcacwttcaaatccaaaaaggattgtagatttttcagtctcttcagcttttatttgttttattaaaaaaattttttaagagttgggggtctcactatgttgcccaggctggtctcaaactcctagactcaagggatcctcctgctttggcctcccaaagtgctaggattataggcatgagccaccacacctgatcttttcagcttttcatgtgttgttaagatggactgattactcgcattcttttttttttttcctttttttgagatggagtctcactttgttgctcaggctggagtgcagtggtgcaatctcaactcactgcaatatctggctcccaggttcaagtgattctccctgcctcagcctcctgagtatctgggattacaggcacccaccaccatgctggctaacttttatattattattattttattttttaattttttgaggcag

SEQ ID NO: 344131 - DNA, 582 bp, Homo sapiens
tctactccagcactggttcctaaggtggtttcagtagtgagtctctgttcatgtaagccataaattcctatattcacttctctatctctccaatcttgggggcagtggcttgccctatgtcctctcttcacattcaaatccaaaaaggattgtagatttttcagtctcttcagcttttatttgttttattaaaaaaattttttaagagttgggggtctcactatgttgcccaggctggtctcaaactcctagactcaagggatcctcctgctttggcctcccaaagtgctaggattataggcatgagccaccacacctgatcttttcagcttttcatgtgttgttaagatggactgattactcgcattcttttttttttttcctttttttgagatggagtctcactttgttgctcargctggagtgcagtggtgcaatctcaactcactgcaatatctggctcccaggttcaagtgattctccctgcctcagcctcctgagtatctgggattacaggcacccaccaccatgctggctaacttttatattattattattttattttttaattttttgaggcag

SEQ ID NO: 344132 - DNA, 578 bp, Homo sapiens
ctaaatgtttgtttctcacgtaggattccagaacactgctgctgtggtctgagtgtttgttcctcacataggattccaggacactccagttgtggtctgaaagttttttcctcctattgggttccagaacatgactattgtggtctgaatgtttgaccatcacaaaggattccagaaccctccttctgtggtctgggtgtttgtgcctcatatgggattccagaataatcctgctgtcgtctgaatgtttctccctcacataggattccaaaacattcttgttgtggtctgagtgtttatccctcacgtgggattccagaacactgctactgcggtctgaatgtttgtccctaacataggattccagaacacttctacgagggtctgaattattctccttctcataggatttcagaacactcctgttgtggtctgaatgtttgttcctcacttaggattccasaacactgctgttggattctgagtgtttctccctcaagtacgattccagaatactgctacatgtgtctaaatgtttgtccctcacaaactattccagaacactgttgcgagggtct

SEQ ID NO: 344133 - DNA, 503 bp, Homo sapiens
ttggtcactcacatagggttgcagaacactgctacgagggtatgaatgtttctcccgctcataggactccagaacaatcctgatgtgttctgaatgtattttcttcacataggattccaaaacagtgctatgagggtctgaatgtttgtctcacacgtaggattccasaacacccgagctgtggtctgaatgattatccttcccataggattccagaacactgctgctgggttctgagtgtttctccctcacatagtattccataacactgctactggggtctcaatgtttatctctcacataggatttcagaacactgctacaagtgtctgaatgtatgtcaagctcttatgactccagaatactcctgcagtgtcctgaatattttttccatacgtaggattccagaagaatactacgaggctatgaatgtttgtcccacaagtaggattgcagaacaccccagctgtgatctgaatgattgtccctcacataggattcca

SEQ ID NO: 344134 - DNA, 577 bp, Homo sapiens
gatcaagtagggaaagtgactgatattcaatgatggtgttagaacatatgatttctcataagaaaaaatataaacatatataccatctaggattatgtaagcacactttatgatgttcacaaaacaaaaatgttgcttagtaatgcatgtctcagaacatacacatgtcattaagccatgcatgagtgtactttatatcatctctggaacacttcggtcaatcakgaaacatgaccgagacaaatctcaatcattttaagaggtttatttgccaacattaaggatgcacacccaggagacaagtctatgcctttctttaaaaatgattatgagggctccaaatttaaaggggaaagggggaaacactgagaaatacagttttcatgtaagactggggtagggggaaaacattcattgatatggtttggctctgtgtccccacccaaatttcaccataaattgtaataatccccatgtgtcaagggtggggccgggtggaagtaattggatcatcaaagcagtttcctctatgctgttctcatgataatgagtcacatgagatctgatggttttgtaa

SEQ ID NO: 344135 - DNA, 577 bp, Homo sapiens
gatcaagtagggaaagtgactgatattcaatgatggtgttagaacatatgatttctcataagaaaaaatataaacatatataccatctaggattatgtaagcacactttatgatgttcacaaaacaaaaatgttgcttagtaatgcatgtctcagaacatacacatgtcattaagccatgcatgagtgtactttatatcatctctggaacacttcggtcaatcatgaaacatgaccgagacaaatctcaatcattttaagaggtttatttgccaacattaaggatgcacacccaggagacaagtctatgcctttctttaaaaatgattatgagggctccaaatttaaaggggaaagggkgaaacactgagaaatacagttttcatgtaagactggggtagggggaaaacattcattgatatggtttggctctgtgtccccacccaaatttcaccataaattgtaataatccccatgtgtcaagggtggggccgggtggaagtaattggatcatcaaagcagtttcctctatgctgttctcatgataatgagtcacatgagatctgatggttttgtaa

SEQ ID NO: 344136 - DNA, 530 bp, Homo sapiens
ggagaacaggaggattgtttatttaaggtatgcactggctcagatttttttttttttttttttttttgkgatggagtctggctctgttgcccacgctggagcacagaggggcaatctcagctcactgcaacctccgcctcctgggttcaagtgattcttgtgcctcaccctcccaagtagctgggtttacaggagtgcaccatcacacctggctaatttttgtgattttggtagagacaggttctctttatgttggccaggctggccttgaacgcctgacctcaaaggatccacccacattggactcccaaaatgctaggattacaggcttgtgacaccatgcctggcctactttttttctaatctagatggcttgcatttatttctgttgccaaattgtcctggctagcacctccagcataatgatgaaaggatgtagtgagagtggatttatctatcttgttcctgatctcaggatataagtatacaggcttccaatattaagtatgctattgggctgtggggttaaa

SEQ ID NO: 344137 - DNA, 530 bp, Homo sapiens
ggagaacaggaggattgtttatttaaggtatgcactggctcagatttttttttttttttttttttttgggatggagtctggctctgttgcccacgctggagcacagaggggcaatctcagctcactgcaacctccgcctcctgggttcaagtgattcttgtgcctcaccctcccaagtagctgggtttacaggagtgcaccatcacacctggctaatttttgtgattttggtagagacaggttctcttyatgttggccaggctggccttgaacgcctgacctcaaaggatccacccacattggactcccaaaatgctaggattacaggcttgtgacaccatgcctggcctactttttttctaatctagatggcttgcatttatttctgttgccaaattgtcctggctagcacctccagcataatgatgaaaggatgtagtgagagtggatttatctatcttgttcctgatctcaggatataagtatacaggcttccaatattaagtatgctattgggctgtggggttaaa

SEQ ID NO: 344138 - DNA, 348 bp, Homo sapiens
catccccaaaacttggcagcttaaaacaactcattattacttgttttttggcttagagagtcttggtggycagctcatctcacacacagttgcagccaagctggattgtgtgaaagcacagcggggtggtgtgcagggtggctcactagtggttcggagtggatgttgctggaggatcactagtggttgggagtcggtgttgctggagggtcagtgggggatgtcaatgcaatgcgtgtagctagtcatggactggccgtgtggtttccatcatggggtctcaggggagtgggatttcctgcctggtgactggctttctcctggataagtgttctgttttctcagcct

SEQ ID NO: 344139 - DNA, 348 bp, Homo sapiens
catccccaaaacttggcagcttaaaacaactcattattacttgttttttggcttagagagtcttggtggccagctcatctcacacacagttgcagccaagctggattgtgtgaaagcacagyggggtggtgtgcagggtggctcactagtggttcggagtggatgttgctggaggatcactagtggttgggagtcggtgttgctggagggtcagtgggggatgtcaatgcaatgcgtgtagctagtcatggactggccgtgtggtttccatcatggggtctcaggggagtgggatttcctgcctggtgactggctttctcctggataagtgttctgttttctcagcct

SEQ ID NO: 344140 - DNA, 348 bp, Homo sapiens
catccccaaaacttggcagcttaaaacaactcattattacttgttttttggcttagagagtcttggtggccagctcatctcacacacagttgcagccaagctggattgtgtgaaagcacagcggggtggtgtgcagggtggctcactagtggttcggagtggatgttgctggaggatcactagtggttggragtcggtgttgctggagggtcagtgggggatgtcaatgcaatgcgtgtagctagtcatggactggccgtgtggtttccatcatggggtctcaggggagtgggatttcctgcctggtgactggctttctcctggataagtgttctgttttctcagcct

SEQ ID NO: 344141 - DNA, 296 bp, Homo sapiens
ttgaatgccgttcttatctttgtgtctctgtaggtaaggtgttttctgccccacctctggtttctttcagagttttcctttatcttttatttcatatagtttgaaaattatatgtccaagtgtaggttgttggcatttattctgcatggtgttctcggagcttcctggatytttggtttggtgtctgacattaatactggaagttctcagacatggtagttgcagaactttcttctatttcttctcctcctggtattctcactactctgtttcaccttttgtagttgtcccacagt

SEQ ID NO: 344142 - DNA, 657 bp, Homo sapiens
cagcctgggtgatagagtgtcaccctgtctcaaaaaaaaatattaaaacagatactgtggtttctatctttttggtcctstcatagcaaaaatcaacaaaagaaactaatgtataagctagcaaaatacagcaagcactaggagttttctatttcagtgccttaggcaatctgacagataatgtagttcaaaaaaagtgtttgctgtactgtgaaatgtacatttagatattcagacagcctcttgacacagacattgctatagtggtttctggcataatttaaggctttttattcttgattaacagtgagatgccatccgcctcagtgtgtgccctaagaaatcaaagagatgccaggaaggaaatgtattaatgaggagtataaaattctacttttaaaaaacatcttggccgcatgcagtggctcatgcctgtaatcccagcactgtgggaggctgaggcgggtggatagcctgaagtcaggagttcgagaccatcctggccaacatgatgaaaccccgtctctactaaaaatacaaaaaattagctgggcatggtggtgcatgtctgtaatcccagctactcgggaggctgaggcaggataatcgcttgaacccgggagaaggaggttgcggtgagctgagatcgtgccattg

SEQ ID NO: 344143 - DNA, 596 bp, Homo sapiens
aattttaacgtggtgtaaggtaagagtccaacttcattgttttgcatgtagatatacaattttcccaacaccatttgttgaagaaactgtcctttgccattgagtggtcttggcatccttgtggaagatcatcaaaccatatatgccagggttggcttctgaggtctctgttgtgttggtccataagtgtgtcaagtatgtctttatgccatgaccacatttttttttggcttattgcagtttggtaattgttttgagacctttaattttgttctgtttcwagattgatttgcctattcatgggccctggagattccatatgaattttaatataggtttttctgtttatcaaaaatgtcattggaatctttataaggattgtattgaatctaggtcacttcgagtagtgttgacatcattccaagatgaaatcatctaatctgcaaacccagcttttctttttcatttatttgtgtttaatttctttcaacagtgttttgtagttttctgtgttcaaatcttttgccctttttgttaagcttatttttaatttttataatgctgttttaaatgtaattctttttttttttttttga

SEQ ID NO: 344144 - DNA, 428 bp, Homo sapiens
tcaggtgattacctaagaaccttaagatacatggttattttaccaataatttaagatttagctgttttcattaaaccgcaacattaacatcttattggtttaaaaaccacaaaagcagagatgattctgtttggtggctggctttatagttttataacttttcattttttgagayggagtctcactgagccacccaggctggagtgcagtggcaccactctgctcactgcaacctctgccccctgggttcaagagattctcctgcctcggcctcctaagtagctgggaatacaggtgaccgccaccacagctagattttgtatttttagtagagacgggtttcaccatattggccagactggtctcgaactgacttcatgatccaaccgcctaggcctcccaaagtgttggaattacaggggtgagcc

SEQ ID NO: 344145 - DNA, 428 bp, Homo sapiens
tcaggtgattacctaagaaccttaagatacatggttattttaccaataatttaagatttagctgttttcattaaaccgcaacattaacatcttattggtttaaaaaccacaaaagcagagatgattctgtttggtggctggctttatagttttataacttttcattttttgagacggagtctcactgagccacccaggctggagtgcagtggcaccactctgctcactgcaacctctgccccctgggttcaagagattctcctgcctcggcctcctaagtagctgggaatacaggtgacygccaccacagctagattttgtatttttagtagagacgggtttcaccatattggccagactggtctcgaactgacttcatgatccaaccgcctaggcctcccaaagtgttggaattacaggggtgagcc

SEQ ID NO: 344146 - DNA, 551 bp, Homo sapiens
tcaaattatatgtttgcagatgatatgatcttctatttggaaaaacctaaagactccaccaaaaaaaaaaaaaaaacaaaaaactattagaagtgataacaaattcagtggcaggatacaaaatcaacatacaaaaatcagttgtgtttctatataccaacagtgaaaaatctgaaaatgaaattgaaaaagtaataacattrtgggggagaactacacatactgggccctgctggtgggggtgatgtggggaaggagggcatcaggaaaaatagctaatggatgcaaggcttaatacctaggtgatgggatgatctgtacagctaaccaccatggcacatgtttacctatgtaacaaatctgcacatcctgcacatgtatgtaccactgaacttaaaaataaaagttgaagattaaaacagtaatctcattttcaataatcataaaaaaataagtacctaggaatcaacttaaccaaagaagtgaaggctctctacaatgaaaattataaaacactgatgaaataaattgaagaagatacaataaaatga

SEQ ID NO: 344147 - DNA, 551 bp, Homo sapiens
tcaaattatatgtttgcagatgatatgatcttctatttggaaaaacctaaagactccaccaaaaaaaaaaaaaaaacaaaaaactattagaagtgataacaaattcagtggcaggatacaaaatcaacatacaaaaatcagttgtgtttctatataccaacagtgaaaaatctgaaaatgaaattgaaaaagtaataacattgtgggggagaactacacatactgggccctgctggtgggggtgatgtggggaaggagggcatcaggaaraatagctaatggatgcaaggcttaatacctaggtgatgggatgatctgtacagctaaccaccatggcacatgtttacctatgtaacaaatctgcacatcctgcacatgtatgtaccactgaacttaaaaataaaagttgaagattaaaacagtaatctcattttcaataatcataaaaaaataagtacctaggaatcaacttaaccaaagaagtgaaggctctctacaatgaaaattataaaacactgatgaaataaattgaagaagatacaataaaatga

SEQ ID NO: 344148 - DNA, 582 bp, Homo sapiens
ctacaatgaaaattataaaacactgatgaaataaattgaagaagatacaataaaatgaaaatattccatgttcacgagttggaagaatcaatattgttaaaatgtccatactaaccaaggcagtctacagatttaatgtaattcctatcaaaataccaatgacattcttaacagacatagaaaaaaagaatcytaaaatttatatggaaccataaaagacccagaatagccaaacttctcctaagcaaaatgtacaaaactggaggaatcacattaccttacttcaaattatgctacaaaggtataataaccaaaaacagcacagtactggcataaaaacagacacatagaccaagggaacagaatagagaacccagaaacaaattcacacacctatagtgagctcattttcaacaaggtgccaagaacatacactggggaaaatacagtctcatcaacaaatggtactgggaaaactgaatagccatatgcagaagaatgaaactagacccctatctctggccatataaaaaataaagtcagaatgaattaaaggctaaatcaaattatgaaactaccaca

SEQ ID NO: 344149 - DNA, 582 bp, Homo sapiens
ctacaatgaaaattataaaacactgatgaaataaattgaagaagatacaataaaatgaaaatattccatgttcacgagttggaagaatcaatattgttaaaatgtccatactaaccaaggcagtctacagatttaatgtaattcctatcaaaataccaatgacattcttaacagacatagaaaaaaagaatcctaaaatttatatggaaccataaaagacccagaatagccaaacttctcytaagcaaaatgtacaaaactggaggaatcacattaccttacttcaaattatgctacaaaggtataataaccaaaaacagcacagtactggcataaaaacagacacatagaccaagggaacagaatagagaacccagaaacaaattcacacacctatagtgagctcattttcaacaaggtgccaagaacatacactggggaaaatacagtctcatcaacaaatggtactgggaaaactgaatagccatatgcagaagaatgaaactagacccctatctctggccatataaaaaataaagtcagaatgaattaaaggctaaatcaaattatgaaactaccaca

SEQ ID NO: 344150 - DNA, 556 bp, Homo sapiens
ggaaatcagtacatcaaagagttatctgcactcctgtgtttattgcagcactcttcacaatagtgaagacttataagtaaccaagctaagtgtccatcaacagatgaatggataaagcaaatgaggtacatataaacaatggagtactattcagctataaaaagacaagatcatttcatttgtaacaacatggatggaactggaggttattatgttaagtaaaataagccaagcacaaaacaacaaacatcacatgttctcacttatttgtgggatctaaaaatcaaaacaattgaactcatggagatagagagcagaaggaaagttagcggaggctgggaagggtgagggtggggagtgggaggagctgaggacagttactgggcacaaaaaatagaaagagtaaataagatttagtatttgacagcactacatggtgaatacagtcaataatcatttaattgtagcrtttaaaataactagaagagtataattggattgtttgtaacacaaaggataaatgcttaaggagacagacatcccattttccatgatg

SEQ ID NO: 344151 - DNA, 437 bp, Homo sapiens
tatttttgcagtctctagcttgccctttcattttcttcaaagagtaaaagtttttaaacttcattaaaatcattaattttttttatttgggggattgttcttttttatatagtgtttgaaaatctttgcctaacacaaattcacaatgattttcttctatattttcttctttaagtgtcgtaattttaattcatgcacttacgtcaatgtctactttgaatttcttatgatataaaatatgtattgagattcatttttccagmtatatgaagttgttaatagaaagttattatctaactgaattatcatggcagtttgtcaaaccaattaaccagtgaagtatgggtctatatgtgtactctctattgtgttccttgaatctatcttctttctaatatcagtgtacctttaaagtaagacttgaaattaggtggtgt

SEQ ID NO: 344152 - DNA, 576 bp, Homo sapiens
cctcttttccttatgttattacattagatctctaacaaaatgttcaataaaaatggtgagagcaggcacctttgcyttttttttttagaggaaaacattgtctttcatcattaagtataatattaagttttccatagatgttctttaagtcgttgcagaattttcacaagacagatttgctattgtatgctattatatgcctttgaaaattttactttggaagtcatttatactacactgattaggatggcatggcggatgcacaagtggaaagggaaatccaattaagaaatgaatagagtggtcaagataagaaaagtatctcctgctagtctaaaataaatagttggggaggtgaagagacaagaattggtttgaagaatttaaataggtaaaatcaataaaatttggtgactgagaatatgagaaagggggagaaataattattaagagtatttttaatgtaacaatttgaatggttgcaccagcaactgagcataatgctggaggatgattatggttttgagtgaatgatggatagcataattatggttttgtatatatgaagtagatatt

SEQ ID NO: 344153 - DNA, 519 bp, Homo sapiens
aataattttgcatttctacacaaggctttgtgctttttaaaatattagcttttatctccagagataatctccagagatagcccagttttcttacattctacatacagaatttgacaactgataacaaatatatataatagatacatttatataatttttctttctctttttctctctctccacacacacacaaacgtrtgcacacattcataatatctaaaaccacacacatctttaacaatgctgatggctgtatagcatcagcatttcaatatatcctcattaataatttaccttttgacacatttatttttaaaataaattttattgtgaatatttaaggggcacacatgtgttactatatatgtgtgtatataaatgagatatatatatatcaatcatatatatacacacacacatatatatatataaatgatgactataatagaaacaagtcaacacatcatctcatatagttactcattccacccctcccctgcactgtggggagggcgacct

SEQ ID NO: 344154 - DNA, 626 bp, Homo sapiens
aatcaatggagatgatcctcagtcttaccatatttggttaaaagaattaaaaataaagtgttctaaaagttcaatgagtagctttttaaaaaaagtgcaaagagtttttgttttgttttgttttttgctaaaaagaatgtgattatatttaaacagaaactacattttgctttaagtctaagaccaatgtctatatacattctcctttaaaaatattaccttttcctttctatcttttttaaaaaaagaaaaaggggaggaaggaagaaaaaaagtratatggtttggctctgtgttcccactcaaatctcatcttgaattgtaatccccacatgtcgagggagggacttgtaatctggacgtgttgagggaaagaggtgattggatcatggggacagtttcccacctgctgttctcgtgacactgagtgagttctcatgagagctgatggtttttagaaggggctcttccccctttgctcacaatctgtctctcttgccgccatgtgaagaaggtgcctacatccccttcaccttccaccctgacagtaagtttcttcaggcctccccagccatgtggaactgtgagtcaattaaatctcttttcattataaattacccagtctc

SEQ ID NO: 344155 - DNA, 441 bp, Homo sapiens
ctgggtaataggcagaggctggaataggtggagacaggttcagaagaagataggaagatttgggaaagtttggaacttcctagaggcttgtcaaagggttttgatcaaaatkctgatagtgatgtaaacaacaaaaaccaggctgagttggtctcacatgcagatgagaaacttattgggaattggagcaaagatcactctttctatgctttaacaaagagactggcagaattatgctgctgccctagagatctgtggaatttggaacctgagagagatgatttagggtgtctggtggaagaaatttctaagcagcaaagcattcaagaggtgacaaagcataaaagtttggaaaatttgcagcctaaccatgtggtagaaaaaaatctattttccggggctaaattcaagccagctgcagaaatttgcatatgtaatgag

SEQ ID NO: 344156 - DNA, 335 bp, Homo sapiens
tgcttgtgtgacagctggctctcaccagcaaacgccatacactggcctgtaggtcaaactgcacagcctaatacaaaaccttccatcaaaagtgcataggactatagaagccaagacaaaagacactacctaaaacaacctccagatgagaaagaaccagcawaataattctgccatcataaaaaatctgaatgttgtgataccaccaaaggctcactccaggtctctagcaatctaggtctctagctgaaatggaggcaaagagatgactgatggataattcaaagcatggattgcagaaaattcaaacaagatccaagtcaaagctgaaaatc

SEQ ID NO: 344157 - DNA, 579 bp, Homo sapiens
aattggaaacctcacttaaggaattttaaaacacaactgaaagatttatccatagtctagactgagcaggagaaagaattgtagagcttaaagaccagtcttttgaactaatccagtcagataaaaataaagaaaaaaatttttaaatgaacaaagtctctgagaaatataagattatgtaaagcaacccaaactatgaattgttgacatttctgagagagarggagacaaagtgaacaacccgaaaaatgtatttgaggaaataatccaagaacattttcctaaccttgctagagaagtagacattcaaaacaaaaacgcccgagaacactggccagatgctatacaaaatgaacaccaccaaggtaagtggtcaccagaatgtctaaggcgaacactaaagaaaaaatcttaaaggcagctagagaaaaaggccagattgcacacaaaggaaacctgtcaagttaacagcagacatctcagtagaactcctgtaagccagaagagactgggggccgattttcagcattctcaaagaaaggggactacagccaagaatttcataacttgccaaaccaa

SEQ ID NO: 344158 - DNA, 512 bp, Homo sapiens
ctagtactctggtgtcaccccaattgatctgaagtaggctcttagcactattgccaatcacagtaactgtccttatactacagtctcttttggagaaaattattttattctctytcctttttaaatctccaagaccccttattttcatgtgtttcttgttttagtcagaggagatattttttatttcacctccaaatatataaatttatgttcacttgcatcagccaaggggcactgtagtatcacactgttgtatgctggtaaaaagcttagtttctagagccagtgatgataagtttaaatctagctccatcatttactagaactatatattttatgtctttaaatattctgtcaatgacctagataagtaaaattaaatattcttcattaatgtgtttccatttttccttgtatttcctacaaatgtatctgtgtatatcgaagctcttatgtgatatatagccattactattttgtcttcaatgttattggtacccattaatgttata

SEQ ID NO: 344159 - DNA, 595 bp, Homo sapiens
tttaaaaaatattagaagaaataaatgttgaaagatgaatacatgaaagttgtgcgaatgctgaacttaaagactattaatcaataaaatataaatacaaataaaacaattcaatattagattgtgaaagcaagaggtacctatgaaaacaaatataattgttgaatactgagactagagaacctgggaggtcactaagctttgatttgtaagcaaacactcccttaagagcttaacttcgttcaagtgttatcatttcattaaaatcttgaaataatctttccatttgatttgagattctgraaaataaaattttaatgttttttcctgtggttgtttttaacaagtattttttaacataaagttgaacttaacatatttcctatttttgttggacttgtagtcctgatagagaagttttctccctccctagttagaaattcactcacagcttcttttaatagcttttttttgtttgttttacttggtacatttacataattaatccaaaaaaagataaatttggaagttaactcgttgcatatggcaggataaaacttctcttttagtattgcttcttcactttttagttttc

SEQ ID NO: 344160 - DNA, 602 bp, Homo sapiens
cctggctttttcaattctgagacacaattgctagaattcctctagtgttctatttacatgagggccctactttgatgtttaattttggtagagattgaacttttatctggttcatgagtggagtatggtgatagtattttsctcagctttacgaggtatacaaatctctatttcctggtaacatgtcctactttcctaaagcacagattatttttttttattatttgtaaatttttaatcaacaaataaaaattatatatatttagtatgtacaacatgttattgtgaaatatgtatgcattgtagaatggctaaattgagctaattaacaggtgaatttcttagattctcttttttagcattggagctgtttttccactgtcttcctctctctctatgacatagcaccccctactgcatggtccctcaactgggtacatttcttcacactttggcaatagtctgcttatgggttgcttgcaaaattcaaggagtgagactgtcagaacagaagcttacagcttagtaaacattaggatgggtcagctagtaattagatctgttaataagggtgaggcaggtacttatacacaatataagta

SEQ ID NO: 344161 - DNA, 547 bp, Homo sapiens
ctattgcttgcctatgagcacatagactattgtcacatattaatatataggcatataacatgcaatgtaagatacaattgcaattgcaaratgtttgcctcaaaattcaaaattttatataattagattcatttagtttacaagagcatctgaataaaagcacttttaacactaataattatcatgtaatcatattactattaaagtgagatttatatccataattttcctttagacatggaaagatattttaacttcaagagatattagagtttcaattatatacaattactcattgtatttttgaaacgtgtgattattctcattcatatatgttggttatagatatctagtagaaaatctcctaacattcacttttttattttttagtgaagtagcctgaaagatgtaggcttggctgagaatgctctataaaaaatgaatagatttggggctagaagtctgatgtgggctgtaaagagattaccagaaatggaaacaggataaatcagatggaccaacacattatttgaggaagctgctatgt

SEQ ID NO: 344162 - DNA, 547 bp, Homo sapiens
ctattgcttgcctatgagcacatagactattgtcacatattaatatataggcatataacatgcaatgtaagatacaattgcaattgcaagatgtttgcctcaaaattcaaaattttatataattagattcatttagtttacaagagcatctgaataaaagcacttttaacactaataattatcatgtaatcatattactattaaagtgagatttatatccataattttcctttagacatggaaagatattttaacttcaagagatattagagtttcaattatatacaattactcattgtatttttgaaacgtgtgattattctcattcatatatgttggttatagatatctagtagaaaatctcctaacattcacttttttattttttagtgaagtagcctgaaagatgtaggcttggctgagaatgctctataaaaaatgaatagatttggggctagaagtctgaygtgggctgtaaagagattaccagaaatggaaacaggataaatcagatggaccaacacattatttgaggaagctgctatgt

SEQ ID NO: 344163 - DNA, 511 bp, Homo sapiens
atttctttagaattcattaaaaacatagtcagggatgaatactaaagtcaaaggctgatttcaattgattacataattatgtatgtgtatatgtacatgtctacacatatgcatatgtatgtgtatttgatagtccctacacatatgtatatgtatgtgtatttgatacatatgtgaggggtatgtgcatacccaactgcrtagacatatttatagttactatcgttcatgcaagtaatatacaattctgtataacacaagcttttaataactaaaatatattacttagtaaaattataattattatctagaatgtaaccttaaaacttaagaaatttcataatcctgtgagctgtgaaaaattttcacataaagttataatcttataaaactaaacttgatatgctcaaatatattttatcaaaaaaactttttaaaatatacatgtttaaatgacacatagtaattgtacgtatttatggagtacagtgtgatattttgaggcatatat

SEQ ID NO: 344164 - DNA, 603 bp, Homo sapiens
tggataaaaaaaaattttgatcttcagttagtcagattagtggatgtggaacctgtgaatataaaggacaaactctatatccagaatccaacctcttcccaccaattaatattatcacatactttcatcactaccactctgttagcatgctaaagatcctaagctgagcaaaaccttacagataggaaggagcggagctgtgaatttaaaaacaagagacctgactatagcaggatataaaagtaaagtctaatttttaagactattcagactatgaagagttgactcagttgttaaatttattatggtttttattgctatattttaagtaagataataaatgaaactcgtaatatctctttttcacgtttgtataagcacttgactgatttgcatttgatatgtgctcagtgcatgttactagatatgttttagctcaatttcttgataaatatctataaaatatttaaatgtgtgctaatattagcactaggatgcttamacataatgtttcttctgattcacacaaaaattgcctaagaattgccagtgctccatcccccgattgcatgcaaagatactgagaaaggtaaagagaacttg

SEQ ID NO: 344165 - DNA, 576 bp, Homo sapiens
taagtaatataaatatcttacagttatttgacagattacagctttcaaacttcaaggacacagaattgacgtatgtgtcttcattttgcatataacaaaatgagagtctttgagagtttgattcaaattctatataaaaatagaacaaataagcatggaaaatgaaattcatagcttattttttttttttgatattccaacaaatgtttaattacttgatgctgatacagtatttttttaatttaaaatgagacaaatcctttgtgtcttttgaggtttccttttaagctacatgcctattattatytaaagaataacttcttaaaaataaaaataaaagaataatttaacaactatacacacagggacaagccataagctgcaccaactggatcctagatccttttttcccaagggcagcccaatcatagcttattttttacttgcactttatttattaatttatctcctctactcctgctttgactgcccccacccccaaaaaagtagggctggtaaattgaagcaaaaaaaaagatattaggcattgatttcattattttggtgtgtgggtga

SEQ ID NO: 344166 - DNA, 576 bp, Homo sapiens
taagtaatataaatatcttacagttatttgacagattacagctttcaaacttcaaggacacagaattgacgtatgtgtcttcattttgcatataacaaaatgagagtctttgagagtttgattcaaattctatataaaaatagaacaaataagcatggaaaatgaaattcatagcttattttttttttttgatattccaacaaatgtttaattacttgatgctgatacagtatttttttaatttaaaatgagacaaatcctttgtgtcttttgaggtttccttttaagctacatgcctattattatttaaagaataacttcttaaaaataaaaataaaagaataatttaacaactatacacacagggacaagccataagctgcaccaactggatcctagatccttttttcccaagggcagcccaatcatagcttaytttttacttgcactttatttattaatttatctcctctactcctgctttgactgcccccacccccaaaaaagtagggctggtaaattgaagcaaaaaaaaagatattaggcattgatttcattattttggtgtgtgggtga

SEQ ID NO: 344167 - DNA, 607 bp, Homo sapiens
tgaatataattcatgttcttaggtgctatgcttattatttatctaaataaagattaaawctgagaatcttaaggaaaacacatctcaaggtcatagtggttggagatgcacagaaaataatttgctacatatggagaaataagcacacagattactatttaagcaaaaaaaaaaatatcttgccacaactcctttgtgagttaaaactaaaatttgattctgaattgattattgaattgagcttcttatataaatgtacacttaagtcaatgtctactatgtatgtaaaatttacaactcattaatatgttttgaattcactatgaattaactttatttgtgtatttctcttcacacacatagtgaaaggacagtcctagagactgttttattcataaaaattgtctttccactgaaattaaacccgaaattattattttctagttgtttagagctgtggggttctatttcctgtaagcaacttgtggtctacatttggttcatggggtaatatattatcctttttgattggaaaattgcttagaagacgagtaaagcatccattgaacagaaagtggatgaattgtccttctatagccagtagcaa

SEQ ID NO: 344168 - DNA, 607 bp, Homo sapiens
tgaatataattcatgttcttaggtgctatgcttattatttatctaaataaagattaaatctgagaatcttaaggaaaacacatctcaaggtcatagtggttggagatgcacagaaaataatttgctacatatggagaaataagcacacagattactatttaagcaaaaaaaaaaatatcttgccacaaytcctttgtgagttaaaactaaaatttgattctgaattgattattgaattgagcttcttatataaatgtacacttaagtcaatgtctactatgtatgtaaaatttacaactcattaatatgttttgaattcactatgaattaactttatttgtgtatttctcttcacacacatagtgaaaggacagtcctagagactgttttattcataaaaattgtctttccactgaaattaaacccgaaattattattttctagttgtttagagctgtggggttctatttcctgtaagcaacttgtggtctacatttggttcatggggtaatatattatcctttttgattggaaaattgcttagaagacgagtaaagcatccattgaacagaaagtggatgaattgtccttctatagccagtagcaa

SEQ ID NO: 344169 - DNA, 607 bp, Homo sapiens
tgaatataattcatgttcttaggtgctatgcttattatttatctaaataaagattaaatctgagaatcttaaggaaaacacatctcaaggtcatagtggttggagatgcacagaaaataatttgctacatatggagaaataagcacacagattactatttaagcaaaaaaaaaaatatcttgccacaactcctttgtgagttaaaactaaaatttgattctgaattgattattgaattgagcttcttatataaatgtacacttaagtcaatgtctactatgtatgtaaaatttacaactcattaatatgttttgaattcactatgaattaactttatttgtgtatttctcttcamacacatagtgaaaggacagtcctagagactgttttattcataaaaattgtctttccactgaaattaaacccgaaattattattttctagttgtttagagctgtggggttctatttcctgtaagcaacttgtggtctacatttggttcatggggtaatatattatcctttttgattggaaaattgcttagaagacgagtaaagcatccattgaacagaaagtggatgaattgtccttctatagccagtagcaa

SEQ ID NO: 344170 - DNA, 588 bp, Homo sapiens
atagaaaaatgagccaaacactgccttttcctatggttggagtggggtgggagacagatcattgttctgttcttagagagagagagagagagagagagagcatatactcatttttacttcaatgttattttggaatatcatatatgtktttagcttttcttcttctttttcctttttactctaagacacacagtggactagcttaaaaggagagctaaattaagactaaaagattgcccaaatcattaaagttcattacttatattttctgacaaatctttttagtttgtggatttactctagtatttttgtcatcactgcttaaacttttcgaattttttttactacttagtaacagttaaagaacaaaatgcagtaaaatacacaaagaatttcatagtaactcactactctaccaacaatgtcaaaacacatacgttactgacttgcagtaccataaagataatacgcaaaatgtttttcagttgattccataataatcattgtgtatatgaacaattgataagtgaatgttcatattttgcatttgacatatgatttaaaggattatagtacatgtacaaagta

SEQ ID NO: 344171 - DNA, 588 bp, Homo sapiens
atagaaaaatgagccaaacactgccttttcctatggttggagtggggtgggagacagatcattgttctgttcttagagagagagagagagagagagagagcatatactcatttttacttcaatgttattttggaatatcatatatgtgtttagcttttcttcttctttttcctttttactytaagacacacagtggactagcttaaaaggagagctaaattaagactaaaagattgcccaaatcattaaagttcattacttatattttctgacaaatctttttagtttgtggatttactctagtatttttgtcatcactgcttaaacttttcgaattttttttactacttagtaacagttaaagaacaaaatgcagtaaaatacacaaagaatttcatagtaactcactactctaccaacaatgtcaaaacacatacgttactgacttgcagtaccataaagataatacgcaaaatgtttttcagttgattccataataatcattgtgtatatgaacaattgataagtgaatgttcatattttgcatttgacatatgatttaaaggattatagtacatgtacaaagta

SEQ ID NO: 344172 - DNA, 588 bp, Homo sapiens
atagaaaaatgagccaaacactgccttttcctatggttggagtggggtgggagacagatcattgttctgttcttagagagagagagagagagagagagagcatatactcatttttacttcaatgttattttggaatatcatatatgtgtttagcttttcttcttctttttcctttttactctaagacacacagtggactagcttaaaaggaragctaaattaagactaaaagattgcccaaatcattaaagttcattacttatattttctgacaaatctttttagtttgtggatttactctagtatttttgtcatcactgcttaaacttttcgaattttttttactacttagtaacagttaaagaacaaaatgcagtaaaatacacaaagaatttcatagtaactcactactctaccaacaatgtcaaaacacatacgttactgacttgcagtaccataaagataatacgcaaaatgtttttcagttgattccataataatcattgtgtatatgaacaattgataagtgaatgttcatattttgcatttgacatatgatttaaaggattatagtacatgtacaaagta

SEQ ID NO: 344173 - DNA, 522 bp, Homo sapiens
acatttctctaaatgatttctaattataattccattattccataataaagtatgtaagtcccaataatgcaggttacttcattactacagaactgcaatagtgatatcatgttcatagaaataaggtatacatataaacttgttttcaatcttacatttcttttagtccctgtatttgctatggttttaatgtgytccccaaattttacatattgaaaacttaatcttcaaatttatatgtttgtgctatttagaagtggagtctttgggaggtagataatgtcatcaggctagggccctcatgatgggacttgtggctttataagaagagaaagagaaacctcagctggcaagctcttaccctctcattatgtgatgttttcttctgtgttatgtatgacacagcaagaaagccctcaccaaatgccagtgccatgttcttagacttcccagtctccagaactgtacactaaaataaacttctgtctttataaattacccagcctattgtgttctgttata

SEQ ID NO: 344174 - DNA, 497 bp, Homo sapiens
ggcagaggctgagggagggggtggtggtcgacagaggaatggagagatggccaaagggcacaaagcctcagaaaggaggaatactttggattttttttttttttgagatctattgcacagcatggtgaatatcataaataacagtctgttgtacatttcaaaataactaacacagtaaatttcaaatgttctcaccattaaaaaatggtacrtatttgaggtgatggatatgttaattagcttgatatattctacattgcattcgtaaattttaatatcactttgtaccccataaatatatgcaatgtacatttgtcaattacaagaaaaaagaataatctctttgcaacgattcctcacaaaactgaataagaattaactccctttccaaagagaaggaaggaaggaaggaaggagaggaagggagggaggaaggaaggaaagagaagcaatcaaacaaacagtatacaaatatgtatcttgctgcattcaggttg

SEQ ID NO: 344175 - DNA, 552 bp, Homo sapiens
tgtgttgaatatggaagttttgatttttcagcaattataaacctttagaggtcaaacttgtataaaattaaagttaactttcattaggagattcctatgttatatttcttttcctccctttgttgtataaaaacaactttatttgctttagatgattaagatcaatcaccccagtcaaaaactataacctccattgatttcttctcactcagagatggaagggaaccaaaagtctgggaggtagttttatttccatttaaatggaattattgtatatctctggacwgggcatttctcttttgaatatcgtatcttcacaaatgcagaatgcagaattttaggaaaaggaaacaaaatgttcatgaaaggctcaatgggtgcaatagtaagagattccattctaatttctgtctcttgatatatgaatacatatattctagttatataaggaagctcactattgataaatagtgggagtgctttaatctcaattttgaaaacaaaaactgaggcatataatctcaattttgaaaaaaaatccatctaaaacca

SEQ ID NO: 344176 - DNA, 552 bp, Homo sapiens
tgtgttgaatatggaagttttgatttttcagcaattataaacctttagaggtcaaacttgtataaaattaaagttaactttcattaggagattcctatgttatatttcttttcctccctttgttgtataaaaacaactttatttgctttagatgattaagatcaatcaccccagtcaaaaactataacctccattgatttcttctcactcagagatggaagggaaccaaaagtctgggaggtagttttatttccatttaaatggaattattgtatatctctggactgggcatttctcttttgaatatygtatcttcacaaatgcagaatgcagaattttaggaaaaggaaacaaaatgttcatgaaaggctcaatgggtgcaatagtaagagattccattctaatttctgtctcttgatatatgaatacatatattctagttatataaggaagctcactattgataaatagtgggagtgctttaatctcaattttgaaaacaaaaactgaggcatataatctcaattttgaaaaaaaatccatctaaaacca

SEQ ID NO: 344177 - DNA, 542 bp, Homo sapiens
aaaaaaaatccatctaaaaccatagctgtgtcttcaataagccatttctcttttcaataaggttatcttctgcatattttgtacataataaaaatagtattttttcactgatggattgtgtgggtactgttatgttgaatcacatatgctattgttggcagaaaaaagaggttatggtagctcatctgtaagacagccacaaataatttcttcccttctggtatgtggatgcaattttgcaattgagagaacgggtttatcctttccttccactttttgtccataggaacttgattctccaggagaatcagctgaagttatatcttgcatgcctgagacttgttcataatgagcctcatggcttytgcttagaattcacggagtgtatgcttttggaacactaaaacaatttatctaggaaatcaaccacctttaagaagattgaaaaccctaaaactgttgaactgtgaaaagcccaaagcatgtagaaaggatctagagaatagatgcctctctccatatggcatctattctctagattg

SEQ ID NO: 344178 - DNA, 488 bp, Homo sapiens
agtgttttcatatgccaaaattgaactatctgtaaaagaaatcaataaattaatcccattcccaatagctacaaaaattaaaatwtttagtaataaatttacccaagtaagtaagaatctcaacactcaaaactataaaacgttgataaaaggaagtgaggaaggtacaaatgagtgggaagctacctcatgttcatgtgttagaggaatgaatattgttaaaatattcataccatactacccaaagcaatttataagtcaaatgcaatcgttatgtaaatactaatgacattattcacaaaaaaaaaaaatcttaaaacttgtatggaacccataaaaggcccaaacagctgaagcaatcacaaacaaaaacaattaaagctgaaggtatcaccctacctggctcctaagtatacttcaaagctgtaataagcaaaacagcatggtactggcataaaagcagacaaacagcccaatggaacagaata

SEQ ID NO: 344179 - DNA, 488 bp, Homo sapiens
agtgttttcatatgccaaaattgaactatctgtaaaagaaatcaataaattaatcccattcccaatagctacaaaaattaaaatatttagtaataaatttacccaagtaagtaagaatctcaacactcaaaactataaaacgttgataaaaggaagtgaggaaggtacaaatgagtgggaagctacctcatgttcatgtgttagaggaatgaatattgttaaaatattcataccatactacccaaagcaatttataagtcaaatgcaatcgttatgtaaatactaatgacattattcacaaaaaaaaaaaatcttaaaacttgtatggaacccataaaaggcccaaacagctraagcaatcacaaacaaaaacaattaaagctgaaggtatcaccctacctggctcctaagtatacttcaaagctgtaataagcaaaacagcatggtactggcataaaagcagacaaacagcccaatggaacagaata

SEQ ID NO: 344180 - DNA, 488 bp, Homo sapiens
ctttgttttaaaataaatatttatctctcagctttttgaaaatttttaaaaatatatttttagattttgaagaaaatactaaaaatgtagaaaatttaaatgagcttattaaaatataaattttggctagttaacaatgtaaatcaatcatttacaaacacttgttcaagtatcactttctatgttaaacttattctctaatttgtcagtttgcattctaaactacagtttgatttgaaatatttaattcatgcttaaataaaacagacattatagatataagtacatctcttaaatcagtgtcagaaatataattmttaatagttacgtatctaaattaatccttatttttctgtagaacctaatttgtaatgaaagtctttcttcagactggtatgctctaatgtttctgttacatttctcagagccatcacagctagataattccctatgtatcagtgaatgacaataatcctgtgttgaatttc

SEQ ID NO: 344181 - DNA, 552 bp, Homo sapiens
gactggtatgctctaatgtttctgttacatttctcagagccatcacagctagataattccctatgtatcagtgaatgacaataatcctgtgttgaatttcaatatcttcagttctaagtaaatcagtggagagtaaagatctatcctagatgtactttccttcaagcaatgccttacactacagtcattcaaaacctcagagacaaatggctcagcagtatctggcgcaaactggcagtatgcctgcagcagcagtaacttttgatttttgctggtgcttgttttttatttttaatattacacatgactgtcagaattcagactgtcatgtaaatggtaatamccaaacgtgatgagatccatgagtcttcatttcccctacccctcattaagcatacaacttatctttaagattcatgatggacaaatcatcccttcataatttttacgcattttaaggggatggtgaaactaaagggggaaacacctttaaaagatttgaacctgtggctttttcctgtgtttcccaacagaattgagttttaatactcc

SEQ ID NO: 344182 - DNA, 598 bp, Homo sapiens
attttatgatatgaattaacactggcattttggattctataagctattgctatacaaaaataaatttaaaagaaaatatatcacattaattctgtgggtcatgaaaacagcaatagtactttttctaaaaaatgaaccaataattttgagagatggatatagaaagaaaagggattaccaattgttcctgtgttttttatkactgtatccaaccattcaatagctccaacaaagtaagaaacttggacatatatttcacagcaatcataatgaacaattttacttgtattatccactgctactatggtaaaatctcagttccccttctacctctgctttcacttgcttctcttttcgtcaactattctttcttttctgtaactctaaattcaagagtgccccaggaattttttactccctaggacctatgacacttcctaatacactaatgattcaaaaatgtattaatatatctccagaccagattttgcttctgaataatctcatctccattttattatctccaactgaaatccttattccctacccccaaaatcctgcctttactgcgtatatatcactcatatataattgagta

SEQ ID NO: 344183 - DNA, 592 bp, Homo sapiens
atggtatagtatataatatttaaagtataaaagagttggattttaaaaccactgaagaagtgtagagtattgaaataaatgattgagcaagttacccttccttagaataaaataatataagccaggtcgttacatcatgtaaaatctcaaaaaacgccagaaaagtattgtgtgggaaaaaaaataattagaaccatacaggaatatattcgtaacactggggatggagcagaatgttctaaaactaccaattgttggatgaattataaagggaaaagttatagaatgtataagaaagaaacttagacaaccatattcatactcaaaattaaaaggcacaaatcaccatgggaagcagagtttaaccaaatatgacagataagatattgaaaccttcaatttacaaaggattcttgaaatcagtacaaaaacaaagaaatacataccaaaaattatagaaaactaaaatttaaaaattaactgaatatgtgcattataattgyattagtttgttttcacactgctataaagaactacgtgagattgggtagtttacgaagaaaagaggcttaattgactcacagttccacag

SEQ ID NO: 344184 - DNA, 587 bp, Homo sapiens
tcctacattaactgtgcacctcaatctttccctttcctgggctttttcttaatctgggcaagagcccagatcagctcaagaaattttcaaagcactagttatatgatagatgcaagataaacatccttggaaagtaatgtcttatggatccagggcagtcttatcaacaccttcctcacaagtgacttgttaatgtttctgactgagaaaggtgccagtgaacattgatttttgcttataaatacagaagatttcaattttattattccaaaaacaacttagttattttttacattttttttcatattacacagacacacaaaatcagccatttaagaaaacgcactgacaagtgttttcacatatactgtkctttgtctaaaaagtgctttataggtagtacagataatgatcagagagtttgatttctgcacactccctgggtgactgcttcctgatgttcaggaggttgtgacactcctaaccaattgatcccaaggcactcaacttgtgaaccagcagctctcctctcattagccttctaccctgcaggcttttcaccccccacccaaccattcaaaaggggt

SEQ ID NO: 344185 - DNA, 659 bp, Homo sapiens
agtataataagaaatcctctcacaattcctcaaataagaaataataatttccctatatttctgcccttattccataggtgtatgactattcgttgtgttttaaagataatgatagctctgcaactgattttatatatgtatttagtattttagtttagaaagatcgtaagattttttttaaatcctaatttttctaagtaaagtttataacctaggcatgatttattctaaggaggtaagtcagtttcttagactataagctattcataacttcctcaagccaataacagggatggttaaacaaatcctagattttattttctacagcagggagtgggtctaaatttttctcagtcaccaaaacctatgtgacttatccaagtccttggtatctgagattcttccttgaaaatctaaagagagactgattgtatatatatgaaagagagctaaaatyagttcttcaaaacattggatatggacttacctaatcattgtaaactattctatctattcctacatgagagtttctttggatgagcccttagtgttctggattaatgatttgggaatgaccaaaagcaaactatatagtctctttcttgactctgtggcaaaagccaaccaattgtgtttaagggtaataatcatggcagaca

SEQ ID NO: 344186 - DNA, 659 bp, Homo sapiens
agtataataagaaatcctctcacaattcctcaaataagaaataataatttccctatatttctgcccttattccataggtgtatgactattcgttgtgttttaaagataatgatagctctgcaactgattttatatatgtatttagtattttagtttagaaagatcgtaagattttttttaaatcctaatttttctaagtaaagtttataacctaggcatgatttattctaaggaggtaagtcagtttcttagactataagctattcataacttcctcaagccaataacagggatggttaaacaaatcctagattttattttctacagcagggagtgggtctaaatttttctcagtcaccaaaacctatgtgacttatccaagtccttggtatctgagattcttccttgaaaatctaaagagagactgattgtatatatatgaaagagagctaaaattagttcttcaaaacattggatatggacttacctaatcattgtaaactattctatctattcmtacatgagagtttctttggatgagcccttagtgttctggattaatgatttgggaatgaccaaaagcaaactatatagtctctttcttgactctgtggcaaaagccaaccaattgtgtttaagggtaataatcatggcagaca

SEQ ID NO: 344187 - DNA, 565 bp, Homo sapiens
tatattttacatttgttgattgctgaaaatacgcatttatcaacaagtaggcttacctcctctaaaattygattattttattttctcacacattttcattccttattgtaatactcaaagctcctgctacttttattccattataagaagaaaaggaaactcaagattatctaacctttatccatgaactatgattcaggtagatttattagaaaagtctttacaatgtttatattattggttaatcataagacttaaaaaaaaaatcagtgggtacattctttgacagaatgactccttcatccctaaaatatgactctctgccagaggcaaaatctgctcagaaagctgaaatcgacacattcaccaaagcttgtcaattagctggagacagaatggttactgtacacaaaaataatagatcaactttttggttggacaataattttagaattgctttaaaatcaaggcaggttgttgatctcatgtaagaacagtcaatgcattaaaggactttgtgtgctctaatgcttcattaagagatgagtataagaaaataacatga

SEQ ID NO: 344188 - DNA, 565 bp, Homo sapiens
tatattttacatttgttgattgctgaaaatacgcatttatcaacaagtaggcttacctcctctaaaattcgattattttattttctcacacattttcattccttattgtaatactcaaagctcctgctacttttattccattataagaagaaaaggaaactcaagattatctaacctttatccatgaactatgattcaggtagatttattagaaaartctttacaatgtttatattattggttaatcataagacttaaaaaaaaaatcagtgggtacattctttgacagaatgactccttcatccctaaaatatgactctctgccagaggcaaaatctgctcagaaagctgaaatcgacacattcaccaaagcttgtcaattagctggagacagaatggttactgtacacaaaaataatagatcaactttttggttggacaataattttagaattgctttaaaatcaaggcaggttgttgatctcatgtaagaacagtcaatgcattaaaggactttgtgtgctctaatgcttcattaagagatgagtataagaaaataacatga

SEQ ID NO: 344189 - DNA, 460 bp, Homo sapiens
tcctgtacagaattcagaaccatgagctaattaatatcttttctttataaattacctggcttcrggtatttctttgtagcaagtcaagaacagcctgacatagaaaattgatactgaggagtgggacattgctataagatacctgaaaatgtggaagcaactttggacctgggtaatgggtacaggttagaagagtgtggcaggttcaggagatagaaagatgagggaaaatttaaaacttcttatagactggttaaataatcatgaccaaaatgctgatagtgatattcagagtgaaggcaaggttgatgaggtttaagatggaaatgaggaacttatgggaaactagagcaaaggtcatgtgtattatgctttagtaaagaattctgctgcattgtgttcatgccttagggatctgtgaacgtttcaacttaagagcaattacttagggtattgggag

SEQ ID NO: 344190 - DNA, 549 bp, Homo sapiens
aggcatcatctctcaatataaacaagcaaataaacaaaaagacactaacatctagttctttgaatataacactctgatgttcactccatgttgtaacatatttactgtttcatattcatcattactaagttttgttcacctactgggataatgtacctctttattttctatctgttattgataataattttgttgtactcctggacatgtgattctccttgaattagacattcgttaatccattacctgggggtgttcaacaaactccaggcttaatttcctccatgtctgttaaatcacgttttaataaatgatgtttatgacttccaaataatgaaattttttggtgtggcaatttcattagttaataaaatatgctatacatattagttatcaaagaaaaataggtgttattatcccagaaagttttaagggtcagtgagaaaaaatatggttggatttgaaatgatttgcttcagwttaaaaaacaaaaagaaatgaagaaaggaggagtcaaggcatttgatattagcttattatcagggtcga

SEQ ID NO: 344191 - DNA, 564 bp, Homo sapiens
atataacatgccacaaaacaaatcttaacaaatttgaaaagatggaaataatataaaatctctttyatgaccacaatggtataaaaataataatcaacaacaggaagaacttcagaaactttacaaatacttcaaaattaaacaatacacttctgaataaccaatgatttaatgaagaaattaaaagagaaatttaaaattattgagacaaatagaaaagacacatcacagatccaaacctgcaggatacagcaaaagcagttctaaaagggaagtttatagcagtattagcaaagttatggaatcaatgtaagtgtccatcaatggatgattgaatttaaaaaaaatgtggtgtatatacacaatggaatactattcagtcataagaaataataaaatcatgtcgtttgcagcaacatggatagaacaaacgacctttatcttaagtgaaacaagtcagtaacaaaaagacaaatatgggtggatcatttgaggtcaggagttctagaccagcctggccaacatggtgaaacctcatctctactagaaatacaaaaattagcc

SEQ ID NO: 344192 - DNA, 583 bp, Homo sapiens
tagattatataacatgccacaaaacaaatcttaacaaatttgaaaagatggaaataatataaaatctcttttatgaccacaatggtataaaaataataatcaacaacaggaagaacttcagaaactttacaaatacttcaaaattaaacaatacacttctgaataaccaatgatttaatgaagaaattaaaagagaaatttaaaattattgagacaaatagaaaagacacatcacagatccaaacctgcaggatacagcaaaagcagttctaaaagggaagtttatagcagtattagcaaagttatggaatcaatgtaagtgtccatcaatggatgattgaatttaaaaaaaatgtggtgtatatacacaatggaatactattcagtcataagaaataataaaatcatgtcktttgcagcaacatggatagaacaaacgacctttatcttaagtgaaacaagtcagtaacaaaaagacaaatatgggtggatcatttgaggtcaggagttctagaccagcctggccaacatggtgaaacctcatctctactagaaatacaaaaattagccgggtggtagtggc

SEQ ID NO: 344193 - DNA, 505 bp, Homo sapiens
catctgctattctactactcctcagggattattcaggccccctcccttccctacacatcaagctccaggatttgcccccacccaggcctggcaaattagctttactcaacatgcccgagtcaggaaactaaaatacctgttagtctaaatagacaytttcactgaataagtaaaggcctttcctacagggtctgagaaggccaccacagtcatttcttcacttctgtcagacataattcctcagtttacccctcccacctcaatacagtctgataacagacgagcctttattagtcaaatcagccaagcagtttttcaggctcttagtattcagtgaaatctttatatcccttatggtcctccgtcttcaagaaaagtagaatggactaaaggtcttttaaaaacacacctcaccaagctcagccaccaacttaaaaaggaccaatacttttaccactttcccttcccagaattcaggcctgtcctcggaatgctacagggtaca

SEQ ID NO: 344194 - DNA, 533 bp, Homo sapiens
attacacattatatgcttatatcaaaacatcacatgccmccccattaatatatacatctattgcgtaccaattataattagaaaaatttgaaaattaaaatgcaaaaaaaagtaattgctgaacttaaaaaaatgtatcaacaaatacatactggaattctcagaaggagaaaagaaagggggacataaaacatatttgaaaaaaattgatgaaaattttctaaatatgacgacaaatattaatgtacacataaaacaaactcatcaacgtcatagtaaactaaactgaggccaggtacaatagttcatgcctgtaattgagacagccaaggcaggaggattgcttcagtccaggaattcaagacaagcctgggcaacacaatgagatcctatctctagtgaaaaaagcaaacaaaaaacaaacaaacaaaaactgacagagtgtttcacatagtgtcataatactcgcagtaacaataaagacaaaggaaagtcttgcaagctgtaaaaagaatgatttttcatgaataaga

SEQ ID NO: 344195 - DNA, 533 bp, Homo sapiens
attacacattatatgcttatatcaaaacatcacatgcccccccattaatatatacatctattgcgtaccaattataattagaaaaatttgaaaattaaaatgcaaaaaaaagtaattgctgaacttaaaaaaatgtatcaacaaatacatactggaattctcagaaggagaaaagaaagggggacataaaacatatttgaaaaaaattgatgaaaattttctaaatatgacgacaaatattaatgtacacataaaacaaactcatcaacstcatagtaaactaaactgaggccaggtacaatagttcatgcctgtaattgagacagccaaggcaggaggattgcttcagtccaggaattcaagacaagcctgggcaacacaatgagatcctatctctagtgaaaaaagcaaacaaaaaacaaacaaacaaaaactgacagagtgtttcacatagtgtcataatactcgcagtaacaataaagacaaaggaaagtcttgcaagctgtaaaaagaatgatttttcatgaataaga

SEQ ID NO: 344196 - DNA, 578 bp, Homo sapiens
  misc_feature (1)...(578): n = A,T,C or G
ggcatagtcacagtcacaatatgttgtactcgaccctgataataagctaatatcaaatgccttgactcctcctttcttcatttctttttgttttttaatctgaagcaaatcatttcaaatccaaccatattttttctcactgacccttaaaacttcctgggataataacacctatttttctttgataactaatatgtatagcatattttattaactaatgaaattgccacaccaaaaaatttcattatttggaagtcataaacatcatttattaaaacgtgatttaacagacatggaggaaattaagcctggagtttgttgaacacccccaggtaatggattaacgaatgtctaattcaaggagaatcacatgtccaggagtacaacaaaattattatcaataacagatagaaaataaagaggtacattatcccagtaggtgaacaaaacttagtaatgatgaatatgamacagtaaatatgttacaacatggagtgaacatcagagtgttatattcaaagaactagatgttagtgtctttgttgtttatttgcttgtttatattgagagantgatgc

SEQ ID NO: 344197 - DNA, 563 bp, Homo sapiens
tttccacataaggtccgtcaaaatcaagaaactttatataagtcatttacagtctatttagtctatccctaaagaactcagtggcctgggaattaaactatgccaatgtggtcacttctgcattattaattgaagaaaaataggtttatagatgttttaagtttaggaaacaaaaatcaatcagaatgagccaaatcagtactataaagtgaatgcttaatgatttttatataaactctggaaaaattactcctgattgataaaaagaatgagcaggatcattgtcatggtaaagaaggactctctgatgaagctttcccagcatttttctactaaagttttggctttctcaaaacactctgataataaacagatattatcactctttgggccttcaggaagtcaaaagacaaasttgggcatccaaaaaaaactattgccatgacttttgctcttgaccagtctacttctgttttgaatgggccacttccacctctttgtaaatttttcttgaaagacgttcattttaacatgcacgtaagaaggatcactttgaagaatgt

SEQ ID NO: 344198 - DNA, 600 bp, Homo sapiens
ccaatagtatcattaatgctaagatgattaaatggaaatctatccaaatctaacaaatayatttcaattatgaacaaataattccaacagtgtatactagagttatgggacaacatgtgagttgctatgaaggtagaatgtatgtgtctggatgtgctgtttagtgaagtcactattaaggagctggtctttggaataattcttcaaaactaagcctttatcatcagaaaatgaagttatcacaggcattctagtcatagacttttgatagaataatgtgggctgtttttagtataagttgtgtgtaaaataggtacaaagttggcaaaaaaattttttttgaagaacagttacttcattgtaactggctaaatagtaaaaaaatgatctgctcattgaaatatgcttagacataattggtatcatttccaggacacaaaataaaataagaaaagctcaatacatttaaaacatcagattccctttgatatacaaagtaagtaacccagaggcataacttttctgtccgacctatacaccccaagagacactattcctctgccttaatcatcccagggccaggtacaaggcaactggaga

SEQ ID NO: 344199 - DNA, 600 bp, Homo sapiens
ccaatagtatcattaatgctaagatgattaaatggaaatctatccaaatctaacaaatacatttcaattatgaacaaataattccaacagtgtatactagagttatgggacaacatgtgagttgctatgaaggtagaatgtatgtgtctggatgtgctgtttagtgaagtcactattaaggagctggtctttggaataattcttcaaaactaagcctttatcatcagaaaatgaagttatcacaggcattctagtcatagacttttgatagaataatgtgggctgtttttagtataagttgtgtgtaaaataggtacaaagttggcaaaaaaattttttttgaagaacarttacttcattgtaactggctaaatagtaaaaaaatgatctgctcattgaaatatgcttagacataattggtatcatttccaggacacaaaataaaataagaaaagctcaatacatttaaaacatcagattccctttgatatacaaagtaagtaacccagaggcataacttttctgtccgacctatacaccccaagagacactattcctctgccttaatcatcccagggccaggtacaaggcaactggaga

SEQ ID NO: 344200 - DNA, 500 bp, Homo sapiens
cagattttaaaaacttattctgtaagttcctgacattgtcttaattattaaaataatcacataacttaaaaagtaacatttttttccaagtaccttaaaaaataaaagtatattttctcaaaaaacacagatttaagataattctcttgtagataaccttaaacccatacrtacaagatatggagatacaatagttcaccttataatttcttagaaatttgacagaattaaacattattttcaaagattttatgttaaaacactctatcttatgtacatcatgcatttctatgcaaataactcatcagcaaaatgaactgcatttcaaattaagcatagcatgaacctctcttgtaaaaaaaacacttttatataaaaaagttaaaatctaatgctgctaaaataagtttctgtttaactcacaatatgtctaaagtcaaagcaatccatattatctactaaatcagttttttccattcagcatgaaccttcataatcac

SEQ ID NO: 344201 - DNA, 351 bp, Homo sapiens
ttgcaagaacagcagcagactttgtccttcagtccttcyccagtacaaatgaccagacagagtagccaacaaccacacaaaatctgagttcacaaaccaacatgattagatacctgaggaatacaactactgaaaaaaaaatacaacaagctgaacaacagcataccaactgtagcaaaactactggaacacactgaccaagattttaaagtaagcatgacaaatattcttaaggataagaggacacaaaggaagatgttgaaacatgaaatgagaatgggagtcgtaagaaaaaataaaagagaaagccttaactgtaaaagtatgactgtcaaaaaatataaattgttg

SEQ ID NO: 344202 - DNA, 351 bp, Homo sapiens
ttgcaagaacagcagcagactttgtccttcagtccttctccagtacaaatgaccagacagagtagccaacaaccacacaaaatytgagttcacaaaccaacatgattagatacctgaggaatacaactactgaaaaaaaaatacaacaagctgaacaacagcataccaactgtagcaaaactactggaacacactgaccaagattttaaagtaagcatgacaaatattcttaaggataagaggacacaaaggaagatgttgaaacatgaaatgagaatgggagtcgtaagaaaaaataaaagagaaagccttaactgtaaaagtatgactgtcaaaaaatataaattgttg

SEQ ID NO: 344203 - DNA, 612 bp, Homo sapiens
gattgctaatctggagaatgtgttagtggtctggataaatgatcaaaccagccacagcattcccttaagccaaagcctaatccaggacaaggccctcactctcttcgattcaatgaagcctgggagaggtaaggaagctgcasaagaaaagcttgaagctaaaagcttggttcatgaggtataaggaaagaagccatctctataacataaaagtgcaaggcaaacagcaagtgctgatgcacaagcagcagcaagttatccagaagatctagctgagataattgatgaaggtggccaaactaaacaacagattttcaatgtagacaagatagtcttttattggaagaagatgccatctaggacttttatatttagagaggagaagtcaacgcatgctttcaaatcttcaaagcagaggccaattctcttgttaggggctaatgaagctggtgactttaagttgaagccagcaatcattgactattccgaaaatcctagggcccttacgaattatgctaaatcaagcaagatgggtgaatagagatgcctggtgctcatctcccctacgagaaaaaaccgaggcaacaaatacacgtctaagatttgattaga

SEQ ID NO: 344204 - DNA, 612 bp, Homo sapiens
gattgctaatctggagaatgtgttagtggtctggataaatgatcaaaccagccacagcattcccttaagccaaagcctaatccaggacaaggccctcactctcttcgattcaatgaagcctgggagaggtaaggaagctgcacaagaaaagcttgaagctaaaagcttggttcatgaggtwtaaggaaagaagccatctctataacataaaagtgcaaggcaaacagcaagtgctgatgcacaagcagcagcaagttatccagaagatctagctgagataattgatgaaggtggccaaactaaacaacagattttcaatgtagacaagatagtcttttattggaagaagatgccatctaggacttttatatttagagaggagaagtcaacgcatgctttcaaatcttcaaagcagaggccaattctcttgttaggggctaatgaagctggtgactttaagttgaagccagcaatcattgactattccgaaaatcctagggcccttacgaattatgctaaatcaagcaagatgggtgaatagagatgcctggtgctcatctcccctacgagaaaaaaccgaggcaacaaatacacgtctaagatttgattaga

SEQ ID NO: 344205 - DNA, 612 bp, Homo sapiens
gattgctaatctggagaatgtgttagtggtctggataaatgatcaaaccagccacagcattcccttaagccaaagcctaatccaggacaaggccctcactctcttcgattcaatgaagcctgggagaggtaaggaagctgcacaagaaaagcttgaagctaaaagcttggttcatgaggtataaggaaagaagccatctctataacataaaagtgcaaggcaaacagcaagtgctgatgcasaagcagcagcaagttatccagaagatctagctgagataattgatgaaggtggccaaactaaacaacagattttcaatgtagacaagatagtcttttattggaagaagatgccatctaggacttttatatttagagaggagaagtcaacgcatgctttcaaatcttcaaagcagaggccaattctcttgttaggggctaatgaagctggtgactttaagttgaagccagcaatcattgactattccgaaaatcctagggcccttacgaattatgctaaatcaagcaagatgggtgaatagagatgcctggtgctcatctcccctacgagaaaaaaccgaggcaacaaatacacgtctaagatttgattaga

SEQ ID NO: 344206 - DNA, 639 bp, Homo sapiens
cttaagacctaactttttagaaagaattttagaatcagtgtccagaaaactattttcccatgaataattctgagactgaatttcacaaacctgaattcctcccatctccagtatmtattatgtcatcccctttcattgttgactccagcacagatttctgatgtcaattcattggggtcagtgcaaaggattgaaaggtaaatagcaagaaacaacataaatgcatacacgactttttttgttgttgttgttcaaattggctatgattgcgctacaaattacaatgtgttgtccctaaaaattctcatgtaaatctattatttggcacctggtacttcatttttatgctggaaagaagtctttatgtgttggtaataaaaattgtttagtactctcaaaaaagtttaatgaatcaggatttaaatacaattctttattactgaaccagatcatgtgtggcagcaaatttaacttaaatttgcttcaaattcattcccatttgtaggcacacgttattcttgcccattttgatttcctaattatcaagtccctccaccaccttcatgctcttcatgagtcacagatatctttgcttcccctcaaataggatcaagtgactaaacctgaggcaggggctcc

SEQ ID NO: 344207 - DNA, 546 bp, Homo sapiens
ggtatctttctctacaaataatttttcatggctcagtatacctgaggaaagaaagtttttaggactgatcccagagtggctatttgagggcagaaaatgcaacataacaagagtgtaatggcccttagatagctggaaagaggaagattaygtggttgatcataaaatacaaatgaaataaaagagaaaattcgatcagtagcatcagataaagtgattcttactggagaataaacgtacaaaactctttgatgagaaagcaaagtgacacataaacgacagatatgaatatggagctctgactgaagatacagatattaagatttattatttctgagggtgattacaaggctcacttctggccaaggaattgagaagttgaatttgagagcaggtgaagtcatttaatttgaagagacaaaagtttattttatggtgcttattattctatttgatactgagaccttacatgatgctaaggaatgaaaggtagagaagaatatgagcctagtgccaaagtcttcaataaatgtggaaggggaccaa

SEQ ID NO: 344208 - DNA, 575 bp, Homo sapiens
atctctaagaatcaattctaaattaatgttcaaacaagtagaaaagaataccttaaatatttatttattctgtcatgtcagaagaatatatgtcaggtagactctaaggtagacactgaggagcaaccaataaacataacgtgtgcagatcttggctgataatgctacatgttcgtacaacaagagccaataataaatcacattatttgatgtgcaagagtaaagtaaaacatataaaaacttgaaataaaataggctgttctattttactaaacaaggctgtatttataacatttgatatttaggtctttttgtatttatttagagatgatgtctcactgtcatccaggttggaatgcagtagtttgataacagctcagtgcagcctcraacttctgagtgcaagtggtccaatcacctcagtctcctgagtagtgggggctacaggtatgtgccaccatgcctcactaattttttaagctttctgtatatacaaggtcttcccatgttgtccatcatggtctcaagagattttcctgcctcagcctccagagtagctgggattgcagtactga

SEQ ID NO: 344209 - DNA, 537 bp, Homo sapiens
aaggagggagtgagggaggaagggagggagggaggaagggaggaagggaggaaggaaggaaggaaaaaagtaagagagaaaagagagagagagaaaggaaggaagggaaagagaagaaaagaaagaaagaagaaaaaaataaaaataaaaagaaaagaaacgaaaagaaagatagaaggaaagagaagaaagaaaggaaggaagaaaggaaagagaaaagagacaaaaaagagagaaagaaagagaaaggaaagaaggaaggaaaagggaaacaaatgaaggaasataaaaaagaaaggaattgagagagaaagaaagcaagcaagaaagaaagagagagaaaggaaggaagaaaagaagacagaaaataaagaaaaaagagagaaggtagtaagaaagaaaggaagagagagaaagaagggtggagagaaaggaaggtagaatgaaagaaagagaaaaaagaaagaaggaaggaaaagaaaggaaggaagaaagtaaagaaagggaaggaagtagagagagaatgggaaggaagga

SEQ ID NO: 344210 - DNA, 589 bp, Homo sapiens
aattatgtatattaagattatatccagcaaccttgttgaaatcttattaattcaaataaatttctctggtgattctctagagttttctctgtgtataatcacattatctaaaaataatgtaatttttttccctttctaaagtttatattttattgtgtcttactatacctctttgaaatattggtatattatcataaaggaagacataactttagcaagcatcactgtgttgtttcctgttttttatttgaaatggtgtgtactaattttacactattatgaatgacctgagctttgatggataaatrtctattcctgtagaatgtgcagaaagtttcttctctatctggtattatgagttttttgttttatttctaataataaatgcacataagaatttatcaaaaggttttgttatacaatgggcttgggtaatctttagaaaatgtcatttcttttgaatgactggaacttgtgggcagcatccttagtagaaagagttcagaagaacataaaaatgcactggttatatgcttcatgtcacattttatttaaacatgtatgcatatatctatataaagtctaaaat

SEQ ID NO: 344211 - DNA, 634 bp, Homo sapiens
agaagatttgaaatgttcccaacgcaagaaatgataagtgctccaggtaatagatatcctaaatactgagacttaataattacatattttatgtatttatcaaaatatcacacataccccataagtatgtataaatattayatattaataaaaaattttaaaattaccacccacaaatatgtatttttataattattaaaatatataaaattaattttaaaatttcaatgtgtttacccttgcctcaaaatcaaagttcctaggtcataagacaatactctttgtatttgttactggtttattttccattccaaatcactacttctgtttttaaaattttcatctcaaaaatactaatttattatttaggtatttggagaactataaaaacttaaacctctatcaaatgagatactaagtcttaaaaagaaaaaaatcaataaagttttaactatgaaataaaagtaagtttgcagcctttggcattgtgttgtagtagaaaaattttaagtctgcagtagagttgtgtcctggttcaggtttacatgatttttgaaaagtctttgaaatacattgctgtgaagtatagtttcctatacatgaaataatagtgttagctgaaaagattaagttt

SEQ ID NO: 344212 - DNA, 634 bp, Homo sapiens
agaagatttgaaatgttcccaacgcaagaaatgataagtgctccaggtaatagatatcctaaatactgagacttaataattacatattttatgtatttatcaaaatatcacacataccccataagtatgtataaatattatatattaataaaaaatttwaaaattaccacccacaaatatgtatttttataattattaaaatatataaaattaattttaaaatttcaatgtgtttacccttgcctcaaaatcaaagttcctaggtcataagacaatactctttgtatttgttactggtttattttccattccaaatcactacttctgtttttaaaattttcatctcaaaaatactaatttattatttaggtatttggagaactataaaaacttaaacctctatcaaatgagatactaagtcttaaaaagaaaaaaatcaataaagttttaactatgaaataaaagtaagtttgcagcctttggcattgtgttgtagtagaaaaattttaagtctgcagtagagttgtgtcctggttcaggtttacatgatttttgaaaagtctttgaaatacattgctgtgaagtatagtttcctatacatgaaataatagtgttagctgaaaagattaagttt

SEQ ID NO: 344213 - DNA, 554 bp, Homo sapiens
ggtacatgtgcactagggtattgcagcactattcacaatagcaaagacttgaaaccaagccaaatgtccaacaatgatagactggattaagaaaatctggcacayatacaccatggaatactatgcagccataaaaaatgatgagttcatgtcctttgtagggacatggatgaagctggaaaccatcattctgagcaaactatcgcaaggaatatttctgattcttacactgtatcccattctactagaagaggaaaggacaagtctctttcctgattgagaagaatatgttgcagtattagtgaggacaagggaggtaccatgggttcctcagaaaagaagacataatgtacagaaactaaagcagagcattgtaagaagaccttataccattgaaagaaaaggtgtcagtactctaaattgcttgagtcatggaccactgagataataatacttaataaaaagttttcttgggtcctaaaatctgatagcagagaataccagaaaccagggtgatgcatttctgcatgtaggaggcacatctcttatgggca

SEQ ID NO: 344214 - DNA, 554 bp, Homo sapiens
ggtacatgtgcactagggtattgcagcactattcacaatagcaaagacttgaaaccaagccaaatgtccaacaatgatagactggattaagaaaatctggcacatatacaccatggaatactatgcagccataaaaaatgatgagttcatgtcctttgtagggacatggatgaagctggaaaccatcattctgagcaaactatygcaaggaatatttctgattcttacactgtatcccattctactagaagaggaaaggacaagtctctttcctgattgagaagaatatgttgcagtattagtgaggacaagggaggtaccatgggttcctcagaaaagaagacataatgtacagaaactaaagcagagcattgtaagaagaccttataccattgaaagaaaaggtgtcagtactctaaattgcttgagtcatggaccactgagataataatacttaataaaaagttttcttgggtcctaaaatctgatagcagagaataccagaaaccagggtgatgcatttctgcatgtaggaggcacatctcttatgggca

SEQ ID NO: 344215 - DNA, 554 bp, Homo sapiens
ggtacatgtgcactagggtattgcagcactattcacaatagcaaagacttgaaaccaagccaaatgtccaacaatgatagactggattaagaaaatctggcacatatacaccatggaatactatgcagccataaaaaatgatgagttcatgtcctttgtagggacatggatgaagctggaaaccatcattctgagcaaactatcgcaaggaatatttctgattcttacactgtatcccattctactagaagaggaaaggacaagtctctttcctgattgagaagaatatgttgcagtattagtgaggacaagggaggtaccatgggttcctcagaaaagaagacataatgtacagaaactaargcagagcattgtaagaagaccttataccattgaaagaaaaggtgtcagtactctaaattgcttgagtcatggaccactgagataataatacttaataaaaagttttcttgggtcctaaaatctgatagcagagaataccagaaaccagggtgatgcatttctgcatgtaggaggcacatctcttatgggca

SEQ ID NO: 344216 - DNA, 538 bp, Homo sapiens
tgtatctaacactgaatataattattaagacaccaagacttcagacttttaagaggctcttagctagcggtttactaaaaattatgtcacaattacgctcttcaatttttttaatttttgctcacataaccatatgacaaggcaacacattaggaaaatagaaattacattatgaggataggctgctactcaaaagtgtctatttaattatgattcatataaatgcccatacattttaacacttacagcagagattctgagggtcatttgataaraagagatagggaaatgaataatcagagcttcaattcattaagaatattttatgtaacaaacctcacattatgaatagttgttctctaccttctgtgtgtgacagaattacctacagaaattttgaaacaatactgataccctagcactatgaagattctgattcaattggttaggaatggggtccagcccatcttttctctctttcttgctctctctgtgtctctctctcacacttgctcgctacctccctggtaatttaggt

SEQ ID NO: 344217 - DNA, 628 bp, Homo sapiens
catcttctgctttgacaaggtccatcactggacattctttgggactgcagtaattcaaataagatgttgctctcacaagaatactttcccaataatggcatctccrtcaataaactgacaactctatctttgagtctctggaaccagttaacttagtttcttgcttatgtgaaactttcccattttgctaataaaagcgtctatttattattcttctccagatgtactgctggtaattccatgcattccagattataatccttatttctcatttgtgagtaaacttaacatatttggatataattttctctgatgttccttttttaggttgacaggttgacagtatgggtgccagtttcattcattctacaagtacacactatatatttatattccagtctctaataatacctagatgaataatacatgatgtatacttaggagagaaaagatttttttttaaaagctgtttcccttcagattatcatatacttgagataaacaacatcagtaacagaaaaaaaaaataacattgtagtaaggacagggaatctatccaagtttgacagtgagtcaagtcacagtaaacttcttggaggcgctgaaataattttagtttactatgtaa

SEQ ID NO: 344218 - DNA, 628 bp, Homo sapiens
catcttctgctttgacaaggtccatcactggacattctttgggactgcagtaattcaaataagatgttgctctcacaagaatactttcccaataatggcatctccatcaataaactgacaactctatctttgagtctctggaaccagttaacttagtttcttgcttatgtgaaactttcccattttgctaataaaagcgtctatttattattcttctccagatgtactgctggtaattccatgcattccagattataatccttatttctcatttgtgagtaaacttaacatatttggatataattttctctgatgttccttttttaggttgacaggttgacagtatgggtgccagtttcattcattctacaagtacacactatatatttatattccagtctctaataatacctagatgaataatacatgatgtatacttaggagagaamagatttttttttaaaagctgtttcccttcagattatcatatacttgagataaacaacatcagtaacagaaaaaaaaaataacattgtagtaaggacagggaatctatccaagtttgacagtgagtcaagtcacagtaaacttcttggaggcgctgaaataattttagtttactatgtaa

SEQ ID NO: 344219 - DNA, 584 bp, Homo sapiens
actattgctttataatatcttttttaattagtgtgagaactccagttttgctttcttttgcaagattgttttggcaatttgggatccttttaagtccacattatgattgttaaatttaygtgtcaccgtgactgaattaagtgttacccagatagttgattgatgttacttctgggtgtatctgtgagagtgtttctggaaaagattagtgtgaatcagtagactggtaaagaagatatgcactcaccaatttgggtgagcatcatccaatgccttgagagccttaatagaataaacatttagggaaaaggcaaacctttcttttttctcttgagctgggacatgcatcttcacaggctctcagacatcagaatttattatttttcaaaataagctttcttcttcatttttttttctctgctccttgtgagataccaataatggatacatttatcagcatgctggtgttccatgagtcctttggacctctttatgttttttattttcattgttgttgttcctctgactcgatatttttaaatgaccttttaagtttaatgacttattcatctgtttgatcaagt

SEQ ID NO: 344220 - DNA, 584 bp, Homo sapiens
actattgctttataatatcttttttaattagtgtgagaactccagttttgctttcttttgcaagattgttttggcaatttgggatccttttaagtccacattatgattgttaaatttatgtgtcaccgtgactgaattaagtgttacccagatagttgattgatgttacttctgggtgtatctgtgagagtgtttctggaaaagattagtgtgaatcagtagactggtaaagaagatatgcactcaccaatttgggtgagcatcatccaatgccttgagagccttaatagaataaacatttagggaaaaggcaaacctttcttttttctcttgagctgggacatgcatcttcacaggctctcagacatcagaatttattatttttcaaaataagctttcttcttcatttttttttctctgctccttgtgagataccaataatggatacatttatcagcatgctggtgttccatgagtcctttggacctctttatgttttttattttcattgttgttkttcctctgactcgatatttttaaatgaccttttaagtttaatgacttattcatctgtttgatcaagt

SEQ ID NO: 344221 - DNA, 511 bp, Homo sapiens
cctgtctcagtcctcatgaaccagttgtatacagggaaacacttccataaatcagccaagctggaawttctggggacctctcaatttttcatggagattcttcttctctgggcttggaatgtaatttttgaattagagaggtttgcagggttttttctcttcttccttttttttttttctttttgaggctttgtcgtttcttacttcccctgttgtctaactgtggcattgtagattctctggtgctacaacaaatccagtgagctctcttttgtgctcagcaaccacaggcattcaaagtatgtgttttttcccatcagtgccatgaaatagatgagacagaaatcagctcctcaggcatctaacccccaaagctaaaacatttgaagcatactccactctttcctttcccttctgaggaagcagccacaagttgggcttatcctcctcaaatgtgagctgttctgctttgagggagaaacagttgaactggaacaattttcttgttcct

SEQ ID NO: 344222 - DNA, 607 bp, Homo sapiens
tagggtgagaaggcccagtctttttgtgggctatgtagatggcacacctggtcaagccaatcccctgagccctaagtaaatcaattactgccttctcaagcctctgtacaaaatcaattgtgttccatccaaaaccctgagatgtcctcttgggcaacttgctttctcagcatgaggaagatttctctctttctccttctttgtcaattaaacttccttctcctaaacccactcctcatgtgtgtctgtgtactgaattatttctaggtgtgagacaacaaaccacaggtaattccmcagacaacaaagccatttcatctggggactcttttgggatctggatcagaagggagatagaaacattggagtggtgagtatggagtgaacctcaaatctgtcctttagtctcaagactctcttcaaacaaattttctttcatagagaaccttgacatcatgtgcgggtgggagaaatactagagcaactgaggatttttggccaaagcacaacatggcattattcaaaggcctccaacaacccatctggttgttggtaatggatctccagctatcctgtcacaaaattttccttcttttctaaccacagt

SEQ ID NO: 344223 - DNA, 516 bp, Homo sapiens
tatcctctctgtttatgcaatgtgcaggaagttttacagttcatgtaaacagttctgttgggaaaatgccatagtactggtgagcacatgatatttctcagccaataccaccacctaatggaaatagaaaccctcttgattgggcacattgtaggtcctttgctgttaatacagcagcttcccaattctctctttttgtgcctctagaaaagccccttttgtgaatrggaaagctctgccttcaacagttaggagtaaaatgtcctttgtagccaaattttagttccaatactgtcccatctacagaagaaattgccattaggcctctacattcatttcaggcacctattctgtctcccaattaaaatagtacttgattaggtaaggggattttaagtttagaatgtaaccggaaccattttccttaagggtgaatgttttagcacggggccgtaatagcaggcaactagcacattccctccgttaaagaagccttgctcaaaagtgactattaca

SEQ ID NO: 344224 - DNA, 516 bp, Homo sapiens
tatcctctctgtttatgcaatgtgcaggaagttttacagttcatgtaaacagttctgttgggaaaatgccatagtactggtgagcacatgatatttctcagccaataccaccacctaatggaaatagaaaccctcttgattgggcacattgtaggtcctttgctgttaatacagcagcttcccaattctctctttttgtgcctctagaaaagccccttttgtgaataggawagctctgccttcaacagttaggagtaaaatgtcctttgtagccaaattttagttccaatactgtcccatctacagaagaaattgccattaggcctctacattcatttcaggcacctattctgtctcccaattaaaatagtacttgattaggtaaggggattttaagtttagaatgtaaccggaaccattttccttaagggtgaatgttttagcacggggccgtaatagcaggcaactagcacattccctccgttaaagaagccttgctcaaaagtgactattaca

SEQ ID NO: 344225 - DNA, 516 bp, Homo sapiens
tatcctctctgtttatgcaatgtgcaggaagttttacagttcatgtaaacagttctgttgggaaaatgccatagtactggtgagcacatgatatttctcagccaataccaccacctaatggaaatagaaaccctcttgattgggcacattgtaggtcctttgctgttaatacagcagcttcccaattctctctttttgtgcctctagaaaagccccttttgtgaataggaaagctctgccttcaacagttaggagtaaaatgtcctttgtagccaaattttagttccaatactgtcccatctacagaagaaattgccattaggcctctacrttcatttcaggcacctattctgtctcccaattaaaatagtacttgattaggtaaggggattttaagtttagaatgtaaccggaaccattttccttaagggtgaatgttttagcacggggccgtaatagcaggcaactagcacattccctccgttaaagaagccttgctcaaaagtgactattaca

SEQ ID NO: 344226 - DNA, 591 bp, Homo sapiens
aggcatatcaggcaggcctacagagaataatcccccagaattaaaaaagcaacttccaagggattcatctgagawtcccccttatttggggccacctcaagctcccttctcattacaggcccttaggcaaataaagacttagaccaattttctgacaactccaataggtacatagcttttcagaatttaactcagatgttttacctcagatagaaggatgttatgctgctcctaatccaaaccttaaccacaaataaaaagcagtcagctctgcaggcagtagagaatttcagagataagcaacgtgtctcctataatacactaaaagggaagaaaggagatagggaaagtgaagaaatagcagaaactccattcccaatagggagtgaagcagttcctcttgacaaccttgattggaacctcaatggctctgcagataaatggaaaagaaaggactttttaaaatgcatattaaagggcgtacgaagaactaaggccaaatctctcaattattctaaactgtgtatgatacaccaaaattctgatgagaatcctgcagcctttatggaaagactgaaagaggcatgaata

SEQ ID NO: 344227 - DNA, 599 bp, Homo sapiens
tcatctgagattcccccttatttggggccacctcaagctcccttctcattacagkcccttaggcaaataaagacttagaccaattttctgacaactccaataggtacatagcttttcagaatttaactcagatgttttacctcagatagaaggatgttatgctgctcctaatccaaaccttaaccacaaataaaaagcagtcagctctgcaggcagtagagaatttcagagataagcaacgtgtctcctataatacactaaaagggaagaaaggagatagggaaagtgaagaaatagcagaaactccattcccaatagggagtgaagcagttcctcttgacaaccttgattggaacctcaatggctctgcagataaatggaaaagaaaggactttttaaaatgcatattaaagggcgtacgaagaactaaggccaaatctctcaattattctaaactgtgtatgatacaccaaaattctgatgagaatcctgcagcctttatggaaagactgaaagaggcatgaatagtgcccacctccttatcccccgattcagtcaagggacagctcattctaaaggacaaatttatggcacaggca

SEQ ID NO: 344228 - DNA, 591 bp, Homo sapiens
aggcatatcaggcaggcctacagagaataatcccccagaattaaaaaagcaacttccaagggattcatctgagattcccccttatttggggccacctcaagctcccttctcattacaggcccttaggcaaataaagacttagaccaattttctgacaactccaataggtacatagcttttcagaatttaactcagatgttttacctcagatagaaggatgttatgctgctcctaatccaaaccttaaccacaaataaaaagcagkcagctctgcaggcagtagagaatttcagagataagcaacgtgtctcctataatacactaaaagggaagaaaggagatagggaaagtgaagaaatagcagaaactccattcccaatagggagtgaagcagttcctcttgacaaccttgattggaacctcaatggctctgcagataaatggaaaagaaaggactttttaaaatgcatattaaagggcgtacgaagaactaaggccaaatctctcaattattctaaactgtgtatgatacaccaaaattctgatgagaatcctgcagcctttatggaaagactgaaagaggcatgaata

SEQ ID NO: 344229 - DNA, 591 bp, Homo sapiens
aggcatatcaggcaggcctacagagaataatcccccagaattaaaaaagcaacttccaagggattcatctgagattcccccttatttggggccacctcaagctcccttctcattacaggcccttaggcaaataaagacttagaccaattttctgacaactccaataggtacatagcttttcagaatttaactcagatgttttacctcagatagaaggatgttatgctgctcctaatccaaaccttaaccacaaataaaaagcagtcagctctgcaggcagtagagaatttcagagataagcaacgtgtctcctataatacactaaaagggaagaaaggagatagggaaagtgaagaaatagcagaaactccattcccaatagggagtgaagcagttcctcttgacaaccttgattggaacctcaatggctctgcagataaatggaaaagaaaggactttttaaaatgcatattaaagggcgtacgaagaactaaggccaratctctcaattattctaaactgtgtatgatacaccaaaattctgatgagaatcctgcagcctttatggaaagactgaaagaggcatgaata

SEQ ID NO: 344230 - DNA, 644 bp, Homo sapiens
tataaaattacaagaaagtaaagtttttcagagtactaaaaatgcacaacagactaaaatcgaaatcattcatttgttaatctttgcttcatttagctagtcttccagggtctcatttttttctgatatacaagctttaagcatattagtaatattcttaaatyagtgaaaaattctaaaggttaatcttgtagactaataatccaaaggaagatcaatatatttttcacatggtcaaattatcggactagcaatttggattcaaaaatagttactacatttttatttaaacacagaccaggaagaaagacaaaaaataagtggagcatgaggaccagtggaaggaaacacgaaaaggggaaaatgaaagaggccagaaaaagagctgaatttgtaggttgcactaagctgtttgagatttttttcacacaagcctgcccatatgagtatgatatgtagatcaaacataaatgctgcatagtgcttacattattaagccttctacaaaagtgtcatgtagcagtagacccttgattttattttaaaacaatctgaacatcagacctgtagattattaggataaaacaccagaccttcacagtgaatatattagtaaatggagaaataggtctccatagccagtg

SEQ ID NO: 344231 - DNA, 644 bp, Homo sapiens
tataaaattacaagaaagtaaagtttttcagagtactaaaaatgcacaacagactaaaatcgaaatcattcatttgttaatctttgcttcatttagctagtcttccagggtctcatttttttctgatatacaagctttaagcatattagtaatattcttaaatcagtgaaaaattctaaaggttaatcttgtagactaataatccaaaggaagatcaatatatttttcacatggtcaaattatcggactagcaatttggattcaaaaatagttactacatttttatttaaacacagaccaggaagaaagacaaaaaataagtggagcatgaggaccagtggaaggaaayacgaaaaggggaaaatgaaagaggccagaaaaagagctgaatttgtaggttgcactaagctgtttgagatttttttcacacaagcctgcccatatgagtatgatatgtagatcaaacataaatgctgcatagtgcttacattattaagccttctacaaaagtgtcatgtagcagtagacccttgattttattttaaaacaatctgaacatcagacctgtagattattaggataaaacaccagaccttcacagtgaatatattagtaaatggagaaataggtctccatagccagtg

SEQ ID NO: 344232 - DNA, 639 bp, Homo sapiens
tttagcctggtaaacttctaatgatttttttttcttgcttaatgaatctcaagtttgtttcttggaacaaacaaataaaaaaaaatttgactttataacttattttgatcactacttacttttaataagtattaattgtgctagggaaaattaataaacttaagttgttttgtaagctgcttttcaaaatttcaaaaacaacatatttcatgttcagatgcatctgagcaaatactctcatatgcaaatacacataattaagaaaatggctgttaattaaatgcaggatcacatgtaaaacacaatcatttgtcctgacaatagaggtataaataggaatttaactaccatcattaaaatttctgcttcaggatttatataaatggaaatgtattcagatcttgcctaagctgaacaaataayaatgtttcaacctattcacttacaaaataggtttattcatgtgtttgttttaagggggtaattggacattaaggggggatttttttttcctgttaggcagccaaggtaataatttatttaacaagagaaatattatttgactaacttagaattacctttcaaatgcctgagattccagactgagatggagccatcaagcagaatgttccaaatgac

SEQ ID NO: 344233 - DNA, 359 bp, Homo sapiens
taaagagaatgttacagaaagyataaaatttctttaacaacgcatacttaatggctttaaaaagaactttttctttatttctttttatttttctttttatttaaaattctggtataattttaaagacattaaacattttctagtcatactaattaatatcatactccccctgaagacattctctctttcttagctgtctaaattccactataggaaatttatttaaatttactccacataaatattataatacttttagtgtgtttttatgttacttctcttagttaattgtgaaatttagagcacttaaataattttaagaatgtttaaatattactcttcattgcatgagaaaaaac

SEQ ID NO: 344234 - DNA, 359 bp, Homo sapiens
taaagagaatgttacagaaagtayaaaatttctttaacaacgcatacttaatggctttaaaaagaactttttctttatttctttttatttttctttttatttaaaattctggtataattttaaagacattaaacattttctagtcatactaattaatatcatactccccctgaagacattctctctttcttagctgtctaaattccactataggaaatttatttaaatttactccacataaatattataatacttttagtgtgtttttatgttacttctcttagttaattgtgaaatttagagcacttaaataattttaagaatgtttaaatattactcttcattgcatgagaaaaaac

SEQ ID NO: 344235 - DNA, 632 bp, Homo sapiens
tctgtactccatattatcttgtttgttattttttcatttgtcaacataatagatgaaatgcaatatagcttattgtttgtttttcctgtccaagataactaccagaattaaaaatatttatatactgactttcaacaacatagtagaataacttgtgggtccctatcacaatatgaattaatttaaaaattgttcctaagctattgtccctaaaattatttctaatccaggtgggttagtgtcttgtggttgccctatgaaaggcaggataaaatcttcacccaaaatatggtttcattattcagagtgataatgttactcaagcatcaagaggatatagaatattaattactcacactgtwcagttttcttgggaaagaaaagaaagctttggagtggctatgcagttacagttcttacaggcatgactggattatgcatggtttgaactttccaccagagccaagggagagagactgtggacttttaaattatcttgctgagatgtgagacaagaggtgtgtagggaggccttgggcttggaagatgttagaggtcgaatatacataatggaattagattctgtattacagttaggaataaagagagtgaagtaccaccaagtgctagaa

SEQ ID NO: 344236 - DNA, 583 bp, Homo sapiens
aatgtcacagaggtttgggatacagtttattttatcaccctagtaataagcagagtatctgataggtagttttttgaccctcactctccttccaccctctgccctcatgtaggcyctttgtgtctattgttccctatttaaaaagaatactctagagacagtatgatattggcatccaaataagacaactagatcaaaataacaaaatagagagtacagaaatagatatacatatatattttgatttttgacaaactgatatttggcaaagaacaaagccattctgtagagaaaggatagtatttttaacagattatgttggaaaaattaggtaaatatatgcaaaaaatgatccatacctcacaccatataaaaaacatacacaagtttgtccagcatataaatgttaaatttgaaactacaaaactttaacattcaatgtgatttaccactactgaagattatttacagtggtacttaacactttaatatctccaaaaagtggacattagttttgatttactatattggtagatacaggcaattctaggggcttctactaggtctttcatgtaacgataac

SEQ ID NO: 344237 - DNA, 558 bp, Homo sapiens
gtaagaacatgcatgccatggtgaaagagtataaattttactttggacttaacagggagtcattgaagggatgtaagcaaaggaaagaaatgactagaatctagtcatagccttgcttctcagtgacttaaattcaggtcaatttatttgatgaaattcctgtccaactgttttagccaaggcaaacagatgaacaaacaaacaaaaaacctacaaacttttttcaaaaacaaaaggtattcagaaccaacacatacacatacatcaaataaaacagaacactctggctgaagagttgcctgcttggccctcttactctttgcagcaatctgagactcttccacaaaatccccagagctccatggattacagtgtaaaaaaccactggctttacctatctgcttcctcacctgtgccaaattccataatctctaaaaggcttaacatacayttttttctatagagccttacacagttgatttccccctatagacattttaaagcaccctcttgatcatttaattgtgtaaagttgtcaaaattgtacttcatcttgct

SEQ ID NO: 344238 - DNA, 587 bp, Homo sapiens
cctattttaaatgtcttatattagtatactacttttgttacaataaactggtattgacacataattaactgaattctgyagtttatttaactctttaacatttacctaatgtcctttttctatttgaggatcccatccaggataccacatcacatttagttgtcatgtcttcttaagctcctcttggctgtgacagtttctcagacttcccttatttttgatgaccttgatagatttgaggagtaatggtcagatacattgcaggatgcccctttcatagaaatcatgcttttctcgtgattagattagggttatggatttactggaggaagaccacagaggtagagtacaattttcatcaaattatgtcaagtttacgcactatcaacataatttgtaactgttgatgttgaccttgataacatcattgcctgaagtcttgcttttcttatttctccaccacaaagtcactactttttcccctttcccatgttttactctttataataaagtcattatgcataccgcacacttaaggagtgggaatttatgctccccctcctttagggtagagtatataaacaact

SEQ ID NO: 344239 - DNA, 587 bp, Homo sapiens
cctattttaaatgtcttatattagtatactacttttgttacaataaactggtattgacacataattaactgaattctgtagtttatttaactctttaacatttacctaatgtcctttttctatttgaggatcccatccaggataccacatcacatttagttgtcatgtcttcttaagctcctcttggctgtgacagtttctcagacttcccttatttttgatgaccttgatagatttgaggagtaatggtcagatacattgcaggatgcccctttcatagaaatcatgcttttctcgtgattagattagggttatggatttactggaggaagaccacagaggtagagtacmattttcatcaaattatgtcaagtttacgcactatcaacataatttgtaactgttgatgttgaccttgataacatcattgcctgaagtcttgcttttcttatttctccaccacaaagtcactactttttcccctttcccatgttttactctttataataaagtcattatgcataccgcacacttaaggagtgggaatttatgctccccctcctttagggtagagtatataaacaact

SEQ ID NO: 344240 - DNA, 587 bp, Homo sapiens
cctattttaaatgtcttatattagtatactacttttgttacaataaactggtattgacacataattaactgaattctgtagtttatttaactctttaacatttacctaatgtcctttttctatttgaggatcccatccaggataccacatcacatttagttgtcatgtcttcttaagctcctcttggctgtgacagtttctcagacttcccttatttttgatgaccttgatagatttgaggagtaatggtcagatacattgcaggatgcccctttcatagaaatcatgcttttctcgtgattagattagggttatggatttactggaggaagaccacagaggtagagtacaattttcatcaaattatgtcaagtttacgcactatcaacataatttgtaactgttgatgttgaccttgataacatcattgcctgaagtcttgcttttcttatttctccaccacaaagtcactactttttcccctttcccatgttttactctttataataaagtcattatgcatacygcacacttaaggagtgggaatttatgctccccctcctttagggtagagtatataaacaact

SEQ ID NO: 344241 - DNA, 548 bp, Homo sapiens
cagtgctatcttaatcctagtttttttttttttaactcatttttttctttctcttcaaacaatttatgaatttaatattttcttgagctgtgatatactgcaccattttmtatacactttcaaaacaaaaatcctgttatttcaaactcttcctttttgtctcttctcctcaagcctatcaaccaataagtcctatccactcacaccttcagaaaacaactttctaagacccaatttgcatgtcagcagagttctaggtattaggatacagtgataagcagtgtgaaaattccatatattctgtatatattccatattggatgataggccataaaataaataaataagaaattgagtgataagtcccctgatggagaacaaggagagagggagtcaataacaggaaaccttggatttacactcattattctgttcctgtgactcttctaatatattctcattgtacttagaaaaaaatccaaatttaataacattttagcccacaagatgccatcatcttgcccatacaaactcttcaaagtcatctc

SEQ ID NO: 344242 - DNA, 555 bp, Homo sapiens
aaaaacatctgttactatttatttcactgtaattttgaacctccctatgttgttctgaagccattcaacttttgtaagaaaaccattaatttatttttataatttcacatctttctaaaaggactgtcatctcatcataactattctgtttattagccatatggccttgggaaaattacttaacctctctaatcctgttcacctctcaagactccagtaagtttccaatgaaatggcagacatagacatacttcataaattataaagtaccagataatatacataatgtcttaggaaatacaactatcaattttgtaaacaaatatcttccttagggttgacctatttgctaaaacatgtcattgtactcctttttyagtcagttatatcctgtaattgagacaaataagtgcataattttacatagtataagcagccctagccttcttacaactcacacttacaccgcttgacaaactgctcccaagactgatatttaaccagaaaccatttgtaggccctaacagttatttgtggttggtatttattatgact

SEQ ID NO: 344243 - DNA, 555 bp, Homo sapiens
aaaaacatctgttactatttatttcactgtaattttgaacctccctatgttgttctgaagccattcaacttttgtaagaaaaccattaatttatttttataatttcacatctttctaaaaggactgtcatctcatcataactattctgtttattagccatatggccttgggaaaattacttaacctctctaatcctgttcacctctcaagactccagtaagtttccaatgaaatggcagacatagacatacttcataaattataaagtaccagataatatacataatgtcttaggaaatacaactatcaattttgtaaacaaatatcttccttagggttgacctatttgctaaaacatgtcattgtactcctttttcagtcagttatatcctgtaattgagacaaataagtgcataattttacatagtataagcagccctagccttcttacaactcacacttacacygcttgacaaactgctcccaagactgatatttaaccagaaaccatttgtaggccctaacagttatttgtggttggtatttattatgact

SEQ ID NO: 344244 - DNA, 659 bp, Homo sapiens
tctggccagctattctctgagactcttctctagcctgtgagggaaatgcaattttcaccactttcttcacatttggggatgaaggtggaaagatccatccggattcagtgcattctgttctatcaaggcagaggacaggaaagaggatcctagttaagccatgccattgcatcgaaagtactagctcatgtatgaaaaatattatgtctattcatatctcgatgtccaaaaagcaatatagccaagcccaaagtctaggcagggaagcatccaagggcagaaaaggaataagtaattgtgaaagaatatataattcagcacacttggtgagctccacaacattggtctctgtttctttcctcatgtgttagtgtcttgctttaagttcttgccacatgcagtctgcmtagaatgttttctttcctgctcttcatcttctacaaatatacacaaatttccatctgttagattttccctcatagcacttttcagaatggcaagtgcaaaaataattgattcactgattctttaatgtcttcctccccaccaccaaatctaagtttgaataaaagtgaaagctgtttggggacagaaaatgtgttaaatctcttctgaaagatcaccatttaacacatttaaatgtgttaaatctcttctga

SEQ ID NO: 344245 - DNA, 579 bp, Homo sapiens
acaggagtcttctccttcatctaggcccagtactcattgacccttgagtgcccctgctctttttcagccttcctttctgttgtttcctataccccttcattaattacatggacccatcaagatccatttaagactacacgtatttaccatttcactgaactattgtaccttccttctttctatgaccaatgatggcatttcttcatatactacagtgcattgttactcaattggttcatagccatatatcagcagcctctgttaaactatattctcagatgatgtaaaagttctgatttttatctttgctgtacccattatacctattgatgctgaacataataatatatgcataactaaatctcaagtaktttttaaagtatatatgtaagcaaagttaaatatgtataagtatagtataagagaggcttataggtctgaaatttcccttcttcctctttcttagaaaggtgtattttggtatatttctcaaagaaagggtataagttaccctatgtgtgatcaatataagtgagaaccacgatgtgcctttgagtgcatgcccaaggcacatgctag

SEQ ID NO: 344246 - DNA, 639 bp, Homo sapiens
aagtatgtggccagcggagctggacctattttgttttacttggaagattcacactaccaatcccatggttttggataaaatgttaaaatgtttgcctaagaatttttgactggcaagttgatgactgatttataaatgaaatcaggtcaagaagacacttgattgctaagtatgtgctagttgctgtgcttattaaaagttagagagacactcaaaatgagagccggttggaaagattaactacaaattacaactttgtagaacttacatcctggggagctcagattaaactaggattggccttatttatatagcctaaatttttcccaaattaaacatattatttaatcacatattttactttgaaagcatcttagaatagtttaagggtatttttttctatwaatgctattccactgactagaattcttttccagaaccgaccctatttctgaaataaaagtggctttcctcagcatttagaatttctttccaaagttcaaaaggcaggtgccacctggtggaaatttactagaattcattttgattcctgctgggccatgtaaaagctgtacacttttctcttttaaaaatgcttgtgagaggggtggtttcaagacggccaaataggaaaagctc

SEQ ID NO: 344247 - DNA, 604 bp, Homo sapiens
ttcaattgtactggctcttgatatttttagtaagagttttcatgtgaggaagtactcaagtttgaaaaaacctctttataaatccaaagacttagaaggagtttctaatrcataatacaaatgccaacaattaagcaattcgaggaattttcttactgaccttcctatttatttaaaattaatataaaaattagtcttcctgatttcttcatggctgtgcttgattgcataaagttgcttttacctggccatcttttaacattttgttttttatttggagttgctaaattaaaggaaggaagctgtcacaaattgctaaaaataatacattgaactataaatatgaatcatttagattccagtatatttatttatataccaccctttttctgaaataatttgaagaagcttattactttatgtacagaattttttttatgaagaccataatgagtacagtgaacacagctgtaattactattccagccctgaaagccactgtgatgaagtcatggaattatgatctcttctaagcttataattgtgagcaaacatatgtacaagtttatattactgcagtgggatcctcagaaagaatcacatt

SEQ ID NO: 344248 - DNA, 661 bp, Homo sapiens
cattttaaaggaaacgtgaaagtataatttgtgttaaattgttaaagggttttaaaacattaaaattcatttattaaaataacttgcattttacatgtattgtagaaaacctgaaaactctagaaaaatataaagtaaaacaaaagcatccatacttttgttatccaaaaaatgctattaatcttttagtgtttttcctaaatatatataataacaggcactacatttaaacataatttttatacattcaatagttttgtctatggccatgataatcttagaatatccgaaagagccagcataatctgtaaagttgctgagtgtctataataatatagaataaatgacatcaagaaatatattggctcaggggatatctgcattatttaaaactccttcraacaaccatgtgaatgagcttggaagctgattccccctcagtccagccttcagatgaggcctcagccttggctagctgcttgactgtaaccttatgaaagacccccaagctggaggcatccagctaagccacatctggaattctcaacacacagaaacagtgacataatgtttgtcattttcaaccactgagctttgaaataatttgttatggaacaataggtaattaggttatagcatacaataattaaatggactttgg

SEQ ID NO: 344249 - DNA, 623 bp, Homo sapiens
gttaaaatgtgagaaaaaagtgtgtgctttaagattaaagaaataagatattagcaactaagcaccaaaatatgtcatcatccattctattcagtacttttgaagttacacttttgacctaaggacacgagccctagcaagaaagtttactccaagaggggtatcccacwgttctgatgccagaaacagccgtctttgtaatgagatcaggctataatgttctccatgcaatggaagaatgggggaagaattggctctcatcttaagtgctcctgatcttgtgtgctacacttggcttctcagggtttatgcaagggtggtggagtcttcacagtattcccaactcacctattttaaagaacacacatttaagccaataaagattatttctaacataccttatgctaattagcaaagcctttggtacagctttgattatggacatgctatcttttaagtgtagttctccttagatgttgagtcctgattagtacttcaaatattaattaatcattcctgatatgtagattagaaacaagtacttcaaaatacacatcctgctgtttataatgaagcattttaaactaaatgatcacatctagtataaaaacacttattttttc

SEQ ID NO: 344250 - DNA, 552 bp, Homo sapiens
atgtcatttcagaaaatagtgcataggtcattggcatcttacacagatttgttgctgtgaatccttgaaccaggaaagtatttatttttctaattagctcattaataaatgagaacattataaacaattgtgtattttttcctcatggtgctcatattatgcacttataatatgaaagacttttaggcaatattaaaatgtagactcaagccttcttgttttagaatcagtaacaacaatacaacaacaaataacttatttgtctgacaggcaccaggctttaataagcattttccacccccgcattctacctgccagtgatgatactgcagcatctgstatgatttgatttttggtaccactttgtctttatttctggatatagagcttacattcttcattggataagtacttccaagtggaccttacaaagcaatcacaatgtcagataagctaaaaaagcctgttctgataaccaatagtttggttttctatcatcttggaaacattctttggcagggtatctgcattctttttgacttattgcagaag

SEQ ID NO: 344251 - DNA, 552 bp, Homo sapiens
atgtcatttcagaaaatagtgcataggtcattggcatcttacacagatttgttgctgtgaatccttgaaccaggaaagtatttatttttctaattagctcattaataaatgagaacattataaacaattgtgtattttttcctcatggtgctcatattatgcacttataatatgaaagacttttaggcaatattaaaatgtagactcaagccttcttgttttagaatcagtaacaacaatacaacaacaaataacttatttgtctgacaggcaccaggctttaataagcattttccacccccgcattctacctgccagtgatgatactgcagcatctggtatgatttgatttttggtaccactttgtctttatttctggatatagagcttacattcttcattggataagtacttccaagtggaccttacawagcaatcacaatgtcagataagctaaaaaagcctgttctgataaccaatagtttggttttctatcatcttggaaacattctttggcagggtatctgcattctttttgacttattgcagaag

SEQ ID NO: 344252 - DNA, 620 bp, Homo sapiens
gttagaacagatgctgtaaagatctagttagcaacatggatcctacagtcaagcaacctaactctgtctccactattctcttatgagagtcatttgacttcagcaggcttagcttataaactgggattataaaagacctgactgtgataatcagatacrtaaagcaaataacactgtgtctggcatatagaaggtgcacaactaatgctaagttttacatagtttttaatcttagggaattaaattgtccaggagatgttcaggattggagggatggtggttagtatagtgctagataaaattaatggtaataatttgttgtattgacatgaattctgtatatattttcttaggccgatttactctttcagaaatgttttattattttagcaagaccggattaaggtatagtgatgcagtggaaagagcactgggccttagaataaggggatttcctttctagccttggctttgccatttattttctggaaatgagagtggcccagtgaaaggtccatggggacatttgacataggatgggacaactgacctagtgagcttatctgtttacctctctttttcacctctgttggtctgtatctttcagtgtcagaaaaata

SEQ ID NO: 344253 - DNA, 592 bp, Homo sapiens
gacccacaacgaacagagggcagatcacagaactccacactcatactcatgttmtagccattaggcctcttggcctctctttgttctatttgccaaggtatgaccagagcagaaaacatcctcaaccaattaggcaagctccccatctggtgattagtcttgctatgaagacatcttgtgtattaccacatttacgactgcaattggagctttatttaccattgggggtatagctctttccgaggaaatgaccttctaactgagccaggaggggctgggctaagtttgtttcagctggaaattacacattacatatttagtatgtttggtcactttagatctctgtgaggcagggaaggagaattttatgcattacaaagttcctaaaaatatttacaatcttgtaaatcaaagtgggtttctactggatttagctttatgcaaatctttatattatgtctgggctttcagtctgattttagaagagtactattacagtattttaacttttattgaaaatccaggctttttaatttttttaatttttaatttttgtgggtacgtaataggtgtatacatttatggggtacat

SEQ ID NO: 344254 - DNA, 610 bp, Homo sapiens
aacaagtttatggtagaagaaattaattttctttttttcttttttgagatggagcctcggcatgttgcccaggctggagtgcagtggcacgatctcggctcaccacaacctctgcctcccgggttcaagcaattctcctgcctcaacctcccaagtagctgggactacaggcgggtgccaccacacctggctaatttttgtatttttagtaaagacagggttttaccatattggccaggctggtatcaaactcctgagctcaagcaatccacctgtctcagcctcccaaagtgctgggattacaggcgtgagccaccacgcccagccagaaattaattttctatatgaaaaatgtctgcttcatttgatgcctactaaaaataatggggacaatattaagaaaagagaaaggaaataatagaaaggaagaggaggaagatagraagggaaagcaaggggaaaaggaacatgaagaagagacaatggaatcataaaatgtaggaaacaggggaaaggagttataacaaagataatcagtattgctttaaaataaggttaatttgggacatacttattatttttaactaaaattattaccaagaaacacaat

SEQ ID NO: 344255 - DNA, 560 bp, Homo sapiens
attctttcccaaaatattgagctcattatttattaatcctgtgtaaggcaagaagccaggaaaaaagcatttgtcaccatcacacttgggatctctgataaatatgatcagtgctgagatgcagcccaggctggatatgagctcaactttgtttttctttttgttacttcctccacatcctgcctttcagcctgtccttactcctccatcaatgagattgtgtcaaagggagatgaaatgaggacagggccagaataatmtgcaagtttctactttggttgatccaatcagtctattttcaaatatgccatttagtcccattaatgccattgctttaaaattagttaaattacctggtcatggttaaaagaattacttccctgcaattgctcagtagttccaaaagtgacttttattaaagcaagtgagcaaacaaaaaagaactagatagtgtgctatttctctgagggcaaagaggtaatctaaaattgattaattaagaatagtatcagggactatgaatgatacaaacagttttctattttctgttcttatttgtg

SEQ ID NO: 344256 - DNA, 579 bp, Homo sapiens
cattaaacccagagggtatttaagctcctaaatttgggaaagaatggtccttaactggaggatattaaytgttgttgatttgttttgaaactgggtaatttataaaaaatgaaatttatttcttacagttctggaatctgggaagtccaaggttgagagcgtttatctggcaagagctttcttgttggtggggatcctctgcagaatcctgaggcagcacaggacattacatggtgaggtggggctagatgtgctagctcagatccttctttctcttcttataaagccaccaatcctatttccatgataaattttaaacgagtttgaaggggacaagtattcaaatcatagcattctgtccctgccccacccccaagcctatgccctgctcacatgccactcagaattattccagtgagggctctctgcagtggcttcctcctgaaacaagtctctgcctgggccactaggagttcaacaacatcctttgaaatctggatggagctgccaaatcttcacagctctttctttctgcaagcttgcagaattagcaccacatggatgttaccaaggtttaca

SEQ ID NO: 344257 - DNA, 508 bp, Homo sapiens
gcttgccctattagtgcttcctggaattatctttttatcaaattttaatctccaggtgtgcttctagggaaacacaacaaagacaatggtgacagaaaaagaatctgtgtgtattcaatcttcttatcacacagtctgctaaaaactttttaaccatattctcattgcatttgttgaaataattcctggatttaatagttttggggttgccattcagaattttattaagaaaaaataaaacttataggtatcaagttgaaaggggtttaatatagggaattagtgggtcataccatgagaagggctgagggagcaaaagtcagggaaactgctgatagaattcaggaaattaagacgtgcccactgtagcctcctttataggagctgccagagaacagcttcttctctttcaatttccaaattgagtcctactgcttcccaytaggagaatttaacctgaaacgctcttggtaagggaaactgggaaatggtttcccaggctttcccc

SEQ ID NO: 344258 - DNA, 579 bp, Homo sapiens
cattaaacccagagggtatttaagctcctaaatttgggaaagaatggtccttaactggaggatattaattgttgttgatttgttttgaaactgggtaatttataaaaaatgaaatttatttcttacagttctggaatctgggaagtccaaggttgagagcgtttatctggcaagagctttcttgttggtggggatcctctgcagaatcctgaggcagcasaggacattacatggtgaggtggggctagatgtgctagctcagatccttctttctcttcttataaagccaccaatcctatttccatgataaattttaaacgagtttgaaggggacaagtattcaaatcatagcattctgtccctgccccacccccaagcctatgccctgctcacatgccactcagaattattccagtgagggctctctgcagtggcttcctcctgaaacaagtctctgcctgggccactaggagttcaacaacatcctttgaaatctggatggagctgccaaatcttcacagctctttctttctgcaagcttgcagaattagcaccacatggatgttaccaaggtttaca

SEQ ID NO: 344259 - DNA, 420 bp, Homo sapiens
agatacaatatagttagcataaagaacaccaatgccttcttcctcactttaatgagaatgcttctagactttcccattaggttttgtggtggctattgtgttaataaagtattaatttattcctactttattaaaggttttatttgtagtagaaattaatgttgaagtttatcaaatttttccacatatatggagactgtcatatatttttctttttcatccagcaatatactgaattatattacataacatgtattttctaatagtttctaatattgaaactatgcttgkgttcctgatatgactctttgcagatatccttccttaaagggtcaaaaatttaaaataattaaaatcagattctttagaaagataaattaaggtcaagtagtcctgattgtttaggagacaggtttacat

SEQ ID NO: 344260 - DNA, 431 bp, Homo sapiens
gacaaaagaagtactcaggggtccagtattaggctacactgcacaaatgtctggtagtttctaacataagggagactaacctgttagtttcaggcttcatcagtgatcgtgcaacagcagacaggtttacactctagcattagaaatttcggttacatttagggaaagattttcaggatgaaaggtgtgaagtgctggaatcagttacaaagagaagttgtcatatctactttctgcaggtttttataaatagtgyagtttctcatctctgtgggatgatttaaacatgagagatgaacctcgtgacctctctggttcatttccagccttgcgattctgtgaggaaataaagtatttcttcagaactgctcataaattccattagactacagctagtactctcagtggtaaactagtggctaaagatttct

SEQ ID NO: 344261 - DNA, 568 bp, Homo sapiens
ttagtgttcttcttttgtttaaattttatttcaatagttttggggggcactgatgttttctsattccgtggatacgttctttagcagtgatttctgagattttggtgcacctgtgattcaagcagtgtaccctgtacccaatatgtaatattttatcatctctccctcctacccttcccctcaagttcctaaagtccattcttatgcctttgcgtcctcatagcttatctctcatttataagtgagagcatgatatttgcttttctattcctaagttacttcacttagaataacggcctcctgctccatccaagtcactgcaaaagacattatttcatttcttttttatggctaagtagtattccatggtgtatacattctacattttctttatccactcattggctgatgggcacttagattggttctatatctctgcaatttcaaattgtgttgtgataaacatgtgtgtgcgtgtgtctttttcatattatgacatcttttcctttgggcagatacccagtcgtgggattgctggatgaaatggtagttctgtttttagcttaaa

SEQ ID NO: 344262 - DNA, 648 bp, Homo sapiens
tgattccgtggatacgttctttagcagtgatttctgagattttggtgcacctgtgattcaagcagtgtaccctgtacccaatatgtaatattttatcatctctccctcctacccttcccctcaagttcctaaagtccattcttatgcctttgcgtcctcatagcttatctctcatttataagtgagagcatgatatttgcttttctattcctaagttacttcacttagaataacggcctcctgctccatccaagtcactgcaaaagacattatttcatttcttttttatggctaagtagtattccatggtgtatacattctacattttctttatccactcattggctgatgggcacttagattggttctatatctctgcaatttcaaattgtgttktgataaacatgtgtgtgcgtgtgtctttttcatattatgacatcttttcctttgggcagatacccagtcgtgggattgctggatgaaatggtagttctgtttttagcttaaatattagtattctttattaaagcaaggttaagggagaatatgtcagaagcaatacgtttaatggcttggcaaattagagccataagatgtttgaaaatcttcaagtacttcataggtttgaaatactgactacagggtgcg

SEQ ID NO: 344263 - DNA, 568 bp, Homo sapiens
ttagtgttcttcttttgtttaaattttatttcaatagttttggggggcactgatgttttctgattccgtggatacgttctttagcagtgatttctgagattttggtgcacctgtgattcaagcagtgtaccctgtacccaatatgtaatattttatcatctctccctcctacccttcccctcaagttcctaaagtccattcttatgcctttgcgtcctcatagcttatctctcatttataagtgagagcatgatatttgcttttctattcctaagttacttcacttagaataacggcctcctgctccatccaagtcactgcaaaagacattatttcatttcttttttatggctaagtagtattccatggtgtatacattctacattttctttatccactcattggctgatgggcacttagattggttctatatctctgcaatttcaaattgtgttgtgataaacatgtgtgtgygtgtgtctttttcatattatgacatcttttcctttgggcagatacccagtcgtgggattgctggatgaaatggtagttctgtttttagcttaaa

SEQ ID NO: 344264 - DNA, 528 bp, Homo sapiens
tattccttatttgaaactttaartgcagtcttaagaatatcttttaaaactacatatgcttatgtgaaacgttttaaaataatatttaaaattataagtagaacattcacaaataatcattcaattatttagaactgaaggcagtctctctttatatacagtagtatagcttatatataatgcttatacatatatatgaagggaatcaccagacatttactctgttatatggagtaaaaataaactcattttaaaaaaacacacaaatttgaaagtaagagtagttcttggtttaattctaaaatatgaaccaaattaagaatctatttttaaaaatgccttgaaactagttcctaaggaaaaaagactaaaactggaaggaaaacaaaggagttaaaggaggaaatgatatttgagagaaaatgctaatgctaacagcctaagggtaccacctgtctggcttcctttaaaactacagaagtatgtgctttgcaaccgaaatcagtcctatgttcatagctgagaggc

SEQ ID NO: 344265 - DNA, 613 bp, Homo sapiens
caatcaaaagtcaaaaagattgcttcagctttctgagttcagtcaatttagttcttgatttgcttgatattcttgaacatttcagctcctcataagtcctgtacacttttcctttattccaatattaaaatcaacaaagttatcagaaacttgtatttgagagcatctgtcaaaattctgtagcttattataagccatcttttgaaaaggattaaaaccagataacaatcgtctgtgaataacaaattttcatgggagttacagttggatgcaggatccatcctgcagaccctgacccaatgacagatgaataaagtacactgacacagatattttccctatcagtccagctagcaacccgggctcctcacagacaccaaagaaggtgctataaagagtagcagctgcagccctgttcagccagtgaagtttgcatttattcagtatagattaaatgacaaaggtcttgagtaaataccactagagggtaaytgaactgattgccgacccccgtctcccccccacccccccaccgccctccaccccagtagagagcgattatgcatccctggttgatcaaaggttggttttaggaccgcatgagtaaacaagc

SEQ ID NO: 344266 - DNA, 613 bp, Homo sapiens
caatcaaaagtcaaaaagattgcttcagctttctgagttcagtcaatttagttcttgatttgcttgatattcttgaacatttcagctcctcataagtcctgtacacttttcctttattccaatattaaaatcaacaaagttatcagaaacttgtatttgagagcatctgtcaaaattctgtagcttattataagccatcttttgaaaaggattaaaaccagataacaatcgtctgtgaataacaaattttcatgggagttacagttggatgcaggatccatcctgcagaccctgacccaatgacagatgaataaagtacactgacacagatattttccctatcagtccagctagcaacccgggctcctcacagacaccaaagaaggtgctataaagagtagcagctgcagccctgttcagccagtgaagtttgcatttattcagtatagattaaatgacaaaggtcttgagtaaataccactagagggtaattgaactgattgccgacccccgtctcccccccacmcccccaccgccctccaccccagtagagagcgattatgcatccctggttgatcaaaggttggttttaggaccgcatgagtaaacaagc

SEQ ID NO: 344267 - DNA, 613 bp, Homo sapiens
caatcaaaagtcaaaaagattgcttcagctttctgagttcagtcaatttagttcttgatttgcttgatattcttgaacatttcagctcctcataagtcctgtacacttttcctttattccaatattaaaatcaacaaagttatcagaaacttgtatttgagagcatctgtcaaaattctgtagcttattataagccatcttttgaaaaggattaaaaccagataacaatcgtctgtgaataacaaattttcatgggagttacagttggatgcaggatccatcctgcagaccctgacccaatgacagatgaataaagtacactgacacagatattttccctatcagtccagctagcaacccgggctcctcacagacaccaaagaaggtgctataaagagtagcagctgcagccctgttcagccagtgaagtttgcatttattcagtatagattaaatgacaaaggtcttgagtaaataccactagagggtaattgaactgattgccgacccccgtctcccccccacccccccmccgccctccaccccagtagagagcgattatgcatccctggttgatcaaaggttggttttaggaccgcatgagtaaacaagc

SEQ ID NO: 344268 - DNA, 548 bp, Homo sapiens
tgtgttttttgggctgtttcacttcttaaactgcagatattatctattgttaatgagtattcttcaaaatgttattttgaatrgcgtacacttttagcttattcaaaatatttgtgttgggcatttaggctttggcttattctttatattatattacttctgtgaatattcttgtatataacttttgatagaactctgaaccttagacttaatatctatcaagaaggttcatgggaaaatatatggccacctttggtgatcttgatgtaaaagtgtctatccttgagagagcaaggtacgtgaatgctctgattatactgactctggttcagtatacttttatcaacagttttaagaaagtaaaatgttagaataaatgagtccagaccaataaaatacaaggaaatacaaattgaatttcatcacttctataaggtgcttgctattaaaaaagaaaacaagattatgagatcaggcagtccaccagtccatgcaatgttctgacattttgcctaggaggtaaacacacacacaggtcagactggaga

SEQ ID NO: 344269 - DNA, 555 bp, Homo sapiens
ggcagtccaccagtccatgcaatgttctgacattttgcctaggaggtaaacacacacacaggtcagactggagacatgactaactgaagatgttaaggatgctatgaatgtgtttttgctatttcagcccaatgactgagtccggtttaaaaactattggcctggcaaatggtggtattgagtgtgtgatggtgtcataaccaatttgcctacttattaatcactgcctaaaaaactgattgcagttwctaaatatactttgccaattttgtagctgataattgggctttcattttctattttaattttagtttctttgattattagtaaagataaatatttatgtagagcaatgagctatttctgttttcttcaatgaattacataaaggcatacctcagagatattgtaaatttggttctgactagtgccataaagcgagtatcacaataaagtaagtcacacaatatttttagtttcccagtgcacataagttatgtttacattacattatacagtagtaagtgtgtagtagcattatgtctaaagaaaaca

SEQ ID NO: 344270 - DNA, 523 bp, Homo sapiens
atttgcctacttattaatcactgcctaaaaaactgattgcagtttctaaatatactttgccaattttgtagctgataattgggctttcattttctattttaattttagtttctttgattattagtaaagataaatatttatgtagagcaatgagctatttctgttttcttcaatgaattacataaaggcatacctcagagatattgtaaatttggttctgactagtgccataaagcgagtatcacaataaagtaagtcacacaatatttttagtttcccagtgcacataagttatgtttacattacattatacagtagtaagtgtgtagtagcattatgtctaaagaaaacratgtatgtactttaatttaaaatactttgttgctgaaaaatgccaccaattatctgaaccttcagcaagtcataaacgtgttgctggtggaaggtcttgctttgatgttggctgctgacggatcagggtggtggttgccaaagactgtggtaactgcaacaatttcttaaa

SEQ ID NO: 344271 - DNA, 523 bp, Homo sapiens
atttgcctacttattaatcactgcctaaaaaactgattgcagtttctaaatatactttgccaattttgtagctgataattgggctttcattttctattttaattttagtttctttgattattagtaaagataaatatttatgtagagcaatgagctatttctgttttcttcaatgaattacataaaggcatacctcagagatattgtaaatttggttctgactagtgccataaagcgagtatcacaataaagtaagtcacacaatatttttagtttcccagtgcacataagttatgtttacattacattatacagtagtaagtgtgtagtagcattatgtctaaagaaaacaatgtatgtactttaatttaaaatactttgttgctgaaaaatgccaccaattatctgaaccttcagcaagtcataaacrtgttgctggtggaaggtcttgctttgatgttggctgctgacggatcagggtggtggttgccaaagactgtggtaactgcaacaatttcttaaa

SEQ ID NO: 344272 - DNA, 545 bp, Homo sapiens
tgctgtcataaaaggattgtttctttatagagcacaagcagagtagatttagcataattctaaaggctccaggatatttggaatggtaaatgagcactggcatcaacttaaaatcaacagctgcatcagtccctaacaagagcatcagcctgtgctttgaagctttggagccaggcattgacttctcctctctagctatgaaagtctcacagggcatcttcttccaatagaaggctgtttcatctacactgaaaatctattgtttcctgtagccacttttaacaattatcttagccagatttctggataacttgctgcagcttctacatcagcacctcctgcctcctcttgcacttttatattatggagacagcttctttccttaaacctcatgaaccracctctgctagctttcaaatattcttctgcaacttcctcacctccttcagcctttatggaattgatgggagttacagtcttattctggattagactttgtcttaaggaaatgctgtggctggtttgttcttatatgcagacaacta

SEQ ID NO: 344273 - DNA, 612 bp, Homo sapiens
attaaacatttttataatgttaggagtataaatggtttataaktgcgatacaagatcataaacaagaaaggaaaagaatgcaagacatgattacaaaaaatctctgcagcttgggaagcaaacaagtaaataaaacaaactatgccacaaataaagttaaaaacaattttaagtttaacatttatgtcatatcagtgagaggcaatagttgataattgttaaaagcctcttgcaaatctacaagaaaattaataatgcccaagcaaaagctatgaagagccagataacaaaagcaagaacacaaaataaatgtcatgtaaatatacaagagggttctgtactcagtaatatttaaatacataatctcaacatgattatagaaatgagatcttatattttgtctatcaaattgaaattgaatgcaaaggaattgagaaatatgcacatctcttacattactaaatatctacacatttcctgaagattagtttggccatgctgatcaaagtttcacgatttagaataatatttatgttgtttttgttaagtagccattactacattgaaaaaacttttcccctatctgatgaattttattaattacatttttgg

SEQ ID NO: 344274 - DNA, 588 bp, Homo sapiens
tcaaactcctgacctcagatgattgcctttcttggcctcccaacgtgcagggattacaggcctgagcaacctagcctggccggtgcagaccatttattagtttctcctatcaacatgtatcctatgagagtcataattagcacttgtgttatgtgttcatgatcacacagtcatcatctatttgaatttatgtattgcagagcttattgtccaccatttttacctctccatctaatcttcccctatataaagttctgtctcctgaattcattggtatttggttagaatgctgtcttgaatattttcttcacacacagtgcatgattgatctactctctgaatccatgtatttctacaaatgtatttcattctgttcagagaacggtttctctagcaggttagaraattataaagacacactcattttatctcagtgacataacgtgttactctattgtctttcagtgatgttagcaagaatctgatactattctaatagtttttcgtttgtgaactagcagctttttttttgcaactgagagcttgtaagatttttctaccaatgatttaattttccccattgaatat

SEQ ID NO: 344275 - DNA, 590 bp, Homo sapiens
atcacttcctttcctaatacttctctgtcaataatcttcacctttttatcttgcaaatgacctaaggaagccattttcttccagttgccactgtactactaaatacctcttttatttttgacacactctacaatctgataatttgggtgttggtacatcttctccagtagctatggataccttaaagttaggagctgtgtgtatgcctgtgttcttgccgtgcttaactcagcgtatcagaggtgaacgaggaagaattttttatcagagaataccaaatatttttccytattaaaacattttaataacattttaaaatatatctacaatataattgtattttaaagaatttttcaagggacatcttaatctaaatagttattttacaatctaccaaaattatagagttagttacagggattaggtagtataactggtgaattgatttgaacattagaaataagagtgcccaagaagcagacttttatttttctatactatactcatccagagaaactttctccttgaagattaattattatgaagttggacactggaaagtttaaggcaatttaaataattcatattta

SEQ ID NO: 344276 - DNA, 556 bp, Homo sapiens
tatcatatatccagcccagaagatagggagatagataaggaaatatttttctttccaaattcttgataagaaagcaaagaggtcaagcgctcaaaaccatacagcaggaagagacacaaaaattaatatcaacttttgtttttttctacctattaatgtattacccaagactagtaacaatatttcagggttaagcaacatattggcaagttaatctatttttacaaacaatcagttaggtgatataaagtggttcattttcttgtactccaaccaatacctcagacctcatgtgttctttttctytatatttttgcatatcatttttacagctatagcccacaagggatacaatcctcatcgtcctctatattaccaataactgatctgagagccaatttcttttaaagtttaatataaacttctcccagtatgccatgaagggagtcaaatttaaagataaaaatgaaaacttttattttaataaaaactcaattatatgcttctgtgttaacttgcctttagaatgtgaactctgacagcagggcacagatcc

SEQ ID NO: 344277 - DNA, 583 bp, Homo sapiens
tcaattatataaaaataatcttttaaattcatatgccaacagatgataatgaatgtggaaatttaactcagtcctgtggcgaaaatgctaattgcactaacacagaaggaagttattattgtatgtgtgtacctggcttcagatccagcagtaaccaagacaggtttatcactaatgatggaaccgtctgtataggtaagttcggttatctaagttagaatttgtatatatctcttattgtttgttacctccagaggttaaacatrttcaaaccaaattctgccagaccttgatcgtaccctacgtgttaagtactttcagaaatgtaattaatgtccttatttctccagtgttttaaagtctgtgggatagttatccaaggatacaggaagaaggtttaatttttgagagaataagtttgcaaaaataaataaataaaagaaagtgagagaaatgttcatggagtcatgagatctagtatagtggcaaacaacagaataaatgtttacactttagaataataaaatactccaagaaaattgtcatttgcattaaaagatactgaggcctttgtaaatatgca

SEQ ID NO: 344278 - DNA, 592 bp, Homo sapiens
gactgttgcacatttaaaaaaaaaaggggggattgaaattgagagaaaaaaccaccttgtttactgttacctatagaaggcatctcaactacaaaacaagggtattcaaagaacatagtagttttcttgctcatgaaataaattttttttggtgttgtttatgatacttcatgggtttattcacactttcattggggtgttttcccagttggagtataacatttcatacttcagcagttctgctctaaaaaagactcatctttgctttagtcctatatagctttctcacttcattgatttcatgacaagtgataaccctagtctgcactaccatctgagtgcttctgtctttagcccagcctagaatgctttccttgatggttctccatatcccaaggtcacttgtcattacttctcccctactttattttctgttmattcatttctgtggagtggtagttcctgaatacacttagaaatagaggatgaggggtgagggtgctacaggagcatttgtgtttctttggaagtggtgtgctcatatttctgggtagtacagattttgaatatatatacttgtcagaagaacaag

SEQ ID NO: 344279 - DNA, 592 bp, Homo sapiens
gactgttgcacatttaaaaaaaaaaggggggattgaaattgagagaaaaaaccaccttgtttactgttacctatagaaggcatctcaactacaaaacaagggtattcaaagaacatagtagttttcttgctcatgaaataaattttttttggtgttgtttatgatacttcatgggtttattcacactttcattggggtgttttcccagttggagtataacatttcatacttcagcagttctgctctaaaaaagactcatctttgctttagtcctatatagctttctcacttcattgatttcatgacaagtgataaccctagtctgcactaccatctgagtgcttctgtctttagcccagcctagaatgctttccttgatggttctccatatcccaaggtcacttgtcattacttctcccctactttattttctgttaattcatttctgtggagtggtagttcctgaatacacttagaaatagaggatgaggggtgagggtgctacaggagcatttgtstttctttggaagtggtgtgctcatatttctgggtagtacagattttgaatatatatacttgtcagaagaacaag

SEQ ID NO: 344280 - DNA, 594 bp, Homo sapiens
aggattcatcgtttactctaaatcaaagtttcaagcattatgactaatatataggtgctctatatttttataatgtttctgcatgaaaatggtgataatacagcaggtcaaaggaattatcactcaaacgtttaattaaatcactcattagtaagttgtagacactattctgtaagccattgtagttgcttatctttgctttagtaattataattttatagcttgcttggttacatacacatattatattttatttaatgcaaaaaaagttaaaccatgagtgccatagtgaaattaaaaaattaaaacttgagtcagatttttaacatatayattacattgtccaaacacattaagaatgttcactctacttgttataaataatttaaaacacaataatgatggatgaaattgtctctaagctaatatatttatgatgtatattgattaaagtaatttcactttttttattttcatggttttgtttcagctctcaaagttttcttttttgattcatataacatgaaacatattcatcctcatatgaatatggatggagactacataaatatatttccaaagagaaaagctgca

SEQ ID NO: 344281 - DNA, 536 bp, Homo sapiens
cagcacgcatttaggagaacagtaagaaattgacatgattgaaatatatgaaagagactagagataaatttcaaaagagggggcactttatttggccctcgatgctctgttaataagtttccatttagataaggactaataggagggtgctaagttttattctttctgaaagttatatatcaaatatatatcaaatatggtaagaaagattgtcattttaacyatgtttaaaatgactaagagtgaggagtccagaaaagcggcaaaagtaacaaccccatcacacagtgactagaacatctggcagaaaacatgatgggcattgggtacacttagaaaaggtagaagaaaaacaagtttgtgcccaattgtaattagggattaattataacctcctgtttctttcagatgctgaatttccataataatcccatagcatgactatagttggtagtgagggacaattgggaaaagaagcttattttgagggaatttgaagtgttagtagtaagagatgtggttttgtaaagtagcag

SEQ ID NO: 344282 - DNA, 585 bp, Homo sapiens
agcatgactatagttggtagtgagggacaattgggaaaagaagcttattttgagggaatttgaagtgttagtagtaagagatgtggttttgtaaagtagcrgtagaaacaaagatgctttctcatggcatatttgtgatcttagattttccacacctctctgttcatcatggctttcaaatgagactaagggaatgtgttgtacttgatgtagtgagctcttgccttaggacttcaaaatcccagttactagctatgtgatctagagcaagtaatgttcctggaacttagttttaatattgggaactatgaattgactgtttatggaagaatctgatgaatacatgtttcatgtattgtaaaatgtacaaatcggcacatttcatgaatatcttttatacagataaaagattgttaatatgaaactatatagttagttttggaggactcaaaaaatacattagaaaatttcagttgtatcaaaaaagtgtttttagggtagagccctgagatatgtataacctgggctggtatatggatcttatgtggggctatcaagagaggggtggttcagctcatatggaaa

SEQ ID NO: 344283 - DNA, 585 bp, Homo sapiens
agcatgactatagttggtagtgagggacaattgggaaaagaagcttattttgagggaatttgaagtgttagtagtaagagatgtggttttgtaaagtagcagtagaaacaaagatgctttctcatggcatatttgtgatcttagattttccacacctctctgttcatcatggctttcaaatgagactaagggaatgtgttgtacttgatgtagtgagctcttgccttaggacttcaaaatcccagttactagctatgtgatctagagcaagtaatgttcctggaacttagttttaatattgggaactatgaattgactgtttatggaagaatctgatgaatacatgtttcatgtattgtaaaatgtacaaatcggcacatttcaygaatatcttttatacagataaaagattgttaatatgaaactatatagttagttttggaggactcaaaaaatacattagaaaatttcagttgtatcaaaaaagtgtttttagggtagagccctgagatatgtataacctgggctggtatatggatcttatgtggggctatcaagagaggggtggttcagctcatatggaaa

SEQ ID NO: 344284 - DNA, 523 bp, Homo sapiens
tagtgtatattggtatatcattttattttccaattctctagtgacatatgatgttgagcatcttttcatatatgtttatttgccatacgtacatcttctttggtaaagtgtttgtatagatctttgcacatttttaaagggggttgttgagctttaagtgtcttttgtatactacactttggataacagtcctttatcagatatgtcttttacaattattttcttccaatctgtggcttgtcttatctcgacagtgtctttaaaagagaakaagtttttaaatttaatgaagtctagtttatcaatttttttcccatggatcatgtttttggtgttgtatctaaaaattcatcatcaaagccacacttacctagattttcttctatgttatattctgagagttttaaagttttgcattttacatttaggtctatgatccattttgagttaatttttgtgaaggatgtaaggaatatatatatattcctttttttttgcctatgatgtccaattgttccagcac

SEQ ID NO: 344285 - DNA, 401 bp, Homo sapiens
tttattggagagtaagtatctgaagctaagagctgagtgcttggtgtgctcactgctactgggttgtcattgttttaggtcctctcagatgacagagcaaggaaatagataagtgtctactaacctatgtatgtatacacacacatgtaaatatagtttttttctctgagtaaccatgtatatctacattaagcgaatttgttcataataatgtctcccactctagtgcattaccatattgtatttttctctaattttgtcatgaagtctctctctggagagtggctataaactctaattctgtttgatggggctccatagwtgttcacttgtgtctttcacagaatacttatttattctcgtggatggtctaatgcctaggtgtccaacatgtgaccagt

SEQ ID NO: 344286 - DNA, 491 bp, Homo sapiens
taaaccatatcataaagtgaataattatggatggatgatggttgaagaatgtgaaaattctgtattatatcatgttaatctttcctgatctgtgttctgtgaggtctctcatatcttaattggtatcctaagggaaaaaaagtgttctgagtcttaaaaggtgcagcaaaactaygttaaactaattcaatatttggatttgtgttttttagaatggcaataattctccaaacttttatatattaaaatattttgactggctgactcaagtctatggtgtagttggagtgtgagaatgagtgaactatgtaggatttctaaaaagaactctacttatagaatgcctttattaatttattttttttcaaatagggccctattactagcaatcagaatacttgtattcaaaatactagaatacaatatggagaatactgatactgattttaaaaatatacccctaagtaaagctataagagcataaaatagtt

SEQ ID NO: 344287 - DNA, 572 bp, Homo sapiens
gattctggtgttgattaaaagaaaattatagcaacatttgcaatgtttcataaagaaattggtggagaccattttactcttttattttttattctaaatcatttttcagactcatayataattaaagctatacaataaaaaagcatgattagaactaaccaactatttagctattttagttaaaaatgaatgggggcaactcaaaatcacaggttatttgctaccatttcacagttgatgttatcttaaactttcaacagaatttcagttctagtacatgattcgagtactttcgaagttccatttgaagtaccttgaagttgagcaattatatttgcattattatgggaggaaaaggggctttctaaacaaaaagagtatatttgctcacacacaatacaaacatgccactgttaagtaaaaacattgaaggtagagagaaactaaatgtataaaaagtgcaggtaaataatagctcaaacttaaataatggtaagcactatgttgagggaaaaagaaggtgtgaaattgcttaagactggaaaccaaacttagacttcttttttagatgc

SEQ ID NO: 344288 - DNA, 549 bp, Homo sapiens
gcattttacatatactataattaaaaaatacatgtatatcttttaaatcatgtatagcttttatacattttttaatatatactttttaaatataaaatataataatactttttaaatataaaaaaaatcatgtatagcttttaaattcaaagctattacaattcatttgcccctcttgatggagtatagatgtctgcataacatagaggaaaaagcattttttgcttatcagtaatacctcggcatgcttcaacacacagagtgtgccaaccagctgataatttggcattttagatgtttacrttatttaatcttttatcgatgatcggtcatctttgaagattagactgtcatctttatagttttatcatctttatgtaccctgtcatcataaagtgattttaaactaaattgcaacagcagagacaagaacccactatttctcatgaacagacaagtcatatattgagatagtcctatttcagcatggaagagggccttttaattcttattggaagtggtttcaaacctacaaatttggcaggcatt

SEQ ID NO: 344289 - DNA, 529 bp, Homo sapiens
ggcaatattttggacaactttgttccatatgtgttgaccgtaagctagccatctttttgaatttctttttctgtcttcctctttcctttgagttttttatggttgtgagggtactgctaaatggagaaggacctgaaatgcaaagcagagaattttcatcaagctttattttgcaatggtgtgggtgaaatcaagggcattcataaagtatactttctactcatcacaaaaactcatttataattctcacaataaatcaaacaatattttataaaagaaaaaccaagagcaagatttaagctaaaacaagttgagttaatttattatgactccaaaatttccaacccacataagaatataaaatggtgtcccactcrcatatttttatggattgccctgatgtgagtatttcatgtgatggcgtatcctaattttactgattttctcaccataggaaaatccatctttgccattgttttgtacaagtgaaaggtccgtggagcaatgactcttattgtttagataaaaa

SEQ ID NO: 344290 - DNA, 529 bp, Homo sapiens
ggcaatattttggacaactttgttccatatgtgttgaccgtaagctagccatctttttgaatttctttttctgtcttcctctttcctttgagttttttatggttgtgagggtactgctaaatggagaaggacctgaaatgcaaagcagagaattttcatcaagctttattttgcaatggtgtgggtgaaatcaagggcattcataaagtatactttctactcatcacaaaaactcatttataattctcacaataaatcaaacaatattttataaaagaaaaaccaagagcaagatttaagctaaaacaagttgagttaatttattatgactccaaaatttccaacccacataagaatataaaatggtgtcccactcgcatatttttatggattgccctgatgtgagtatttcatgtgatggcgtatcctaattttactgattttctcaccataggaaaatccatctttgccattgktttgtacaagtgaaaggtccgtggagcaatgactcttattgtttagataaaaa

SEQ ID NO: 344291 - DNA, 546 bp, Homo sapiens
tgctattgtgaatagtgctgcagtgaacatgtgtctttatgatagaacaatttatattcttttgkgtatataccaagtaatgggattgctgggtcaaatggtagttctgtttttaggtctttgaggaatcaccaccctgtcttccacaatagctgaactaatttatactcccaccaacagtgtataaccattcctttttctccccaacttcaccagcatctgtaattttttgactttttaataatagccattctgactggtgtgagatgatatctcactgtggttttgatttgcattgctctgatgattagtgacagtgaacattttttcatatgcttgttggccatgtgtatgtctccttttgaacagtgtctcttcatgtcccttgtccccattgtaatggggttgtttgttttttcttcttctaaatttgtttaagttccttatagttctggaattagacttttgtcagatgcataatttgcaaatattttcttccattccataggttgtctgtttattctgttgattgttttgctgtgcaga

SEQ ID NO: 344292 - DNA, 571 bp, Homo sapiens
atttttccacagattgttgaggaggggtaattggcattagattctcataaggagcatgtagctyagatcccttgcatgcacattgcacaatagggtttgccctcctatgagaagctaatgctgctgatgatttgacaggatgggagctcaggcagtactggttcatggcctggggtttgggaatcccttgtctaaaccataaaagagagagggtataacaaggtgtttttgaccttccaactcatcatggccaggaactcagttttcaagtttttctggggtctccttggcacaacagagtctagtcagttgatgaagggattcaaattttatttttagtttacatctcaatcatagagctatgcctttcttgatttatttaccgcatcttactcaatattcatcttgctcaataatcagtgccactgtgttgcacaactttaggagtcacagttgcaatgtggtctttggggagctgcattcacattggaacctctgtgagtgatggactctagaactgtaaaactttgtggccctctttttggtcaccctgcagtatagaagtgcctag

SEQ ID NO: 344293 - DNA, 571 bp, Homo sapiens
atttttccacagattgttgaggaggggtaattggcattagattctcataaggagcatgtagcttagatcccttgcatgcacattgcacaatagggtttgccctcctatgagaagctaatgctgctgatgatttgacaggatgggagctcaggcagtactggttcatggcctggggtttgggaatcccttgtctaaaccataaaagagagagggtataacaaggtgtttttgaccttccaactcatcatggccaggaactcagttttcaagyttttctggggtctccttggcacaacagagtctagtcagttgatgaagggattcaaattttatttttagtttacatctcaatcatagagctatgcctttcttgatttatttaccgcatcttactcaatattcatcttgctcaataatcagtgccactgtgttgcacaactttaggagtcacagttgcaatgtggtctttggggagctgcattcacattggaacctctgtgagtgatggactctagaactgtaaaactttgtggccctctttttggtcaccctgcagtatagaagtgcctag

SEQ ID NO: 344294 - DNA, 645 bp, Homo sapiens
catttagacatatctgttattatgtaagacattcttattacattttttastagcacaaattgccaaagattggaaaaatgcaaatattacaagactgtgcaaggtaaaaatgtgaatattccaatctacactcattctccccataaatacatttttcttaatatttactctgtatccttttagacctctgctgtgtgtatatttgattataaattcaaaaaacctgaattgtctattatctgtaatatatcatattcatttttccttgttagaatatacagttctaccctctttttatcatgtatattatgactatgtgctaatttatttaacaactttcctattgaagaatatttaatgtatttccaaagtttacttattacaaataatactgcacagagaatctttattccaatataatttcatgtatctattacataaaattattaggaactacttcttagaagtagaaatgcaagtatatacagattttaaaatttacaaattgtccttcaaaacaattacttcaattgataggttcaccaacaatatatgagagtgttctctttctgacacttctgccaatgctagatattattatctactgaggtagataataaaaataaatggttcgattggaatata

SEQ ID NO: 344295 - DNA, 587 bp, Homo sapiens
aaattcttgaaatagtttaatgtgaatattatcaaaatttggaaacaaatatattaatatctgtcacagttttcatttcttggaaataatgaaatttacacagaaattgaataagtgtctatattataaaattttaaatatttttgtttggcttaacaaatcttttactgaaattagttacttaaaatatacgaaataaatgatagatgacagattttagtatatatgaagtttcttttaattattattatgaaatttgtaaaaagacttgcagaatacttcggcataaagcttattagaatagagaagtacatatatatttttaattctgggaaaaatggaagaaaawtcattttgcagggtggaaagattgaataattagcacaactttgtttgttttaaagacgaatttggtgtcctgcctctcaagtgattcacgtaatctccaggtagattcttaaactttgagaaaaatcatggatctgtagactcaccttgtgagacatcacttaggattttcaatgcctaggagaagtgatgtgtgttcattgacagaaactggttgagagggatgactggaattactc

SEQ ID NO: 344296 - DNA, 488 bp, Homo sapiens
tttattctttttgtggcaattgtgaatgggattgtgttcctgatctggctctcagcttggctgcttttggtgtagagaaatgctactgatttttgtatattgaattttttatcctgaaattttgctgaaattttttatcagctaaaggagcttttgggtcaagactatggggatttctagatatakaatcatgtcatgtgaaaacagggatagtttaacttcctctcaacctatttggatggcacttacttctttctcttgcctaattgctctgtctatatttctctcaccctttactttgtgtctataggtgtcattatacgtaagatgggtttcttgaaggtggcagacaaatggactttgtttttgctttttttatatccaacttgccactctgtgccttttaagtaggtcagttagatcacttacattcaaggtttacatttatatgtgaaattttgatgctatcatgaagttgttagctggtt

SEQ ID NO: 344297 - DNA, 510 bp, Homo sapiens
tttgagagagtatcagcgttgagggaatactttttaaggttttcgctttgatttgtacaggatagaaaatacctgggcatgcttgtaggcagacaagaagtagctgagagaaaaacatccagaagaagaacaaatgggcttcatctttttcataattgaactactgccttagcttagtgcctggatagcacatagtggtgatacataaattctaggcagacaggggtgtgaccctggcaaaaccccagcttccaatcgaaaagcctgaaacctgcagcccaaagtaagaacttccatcccagtgtgcctgctctctcccagttggttctttctgaataatgtctttccaccaactgaatgttkcctcttccacaactacctatggcccaccctgcccccaccctgtgcctataaagatcccagattcagctggcagaggaaacaagcggctggacgtcagggagaggcggctttgacttcagaaacagtggctgggcaacttgacttcaa

SEQ ID NO: 344298 - DNA, 552 bp, Homo sapiens
attattttgaagcttttccatggcatgtgtaatataatggaaagtacaagagtgaaacatctgggttataagtcagtccagaaccaccaaactatttaatgacaaagcaagtctagaacccactgtgctgacttgtggggagttttccttccattgtggcccctcaaatctctcgagtccacatttctccctttcytacccccaaagccggctgctttcccctcagtgtattctcaaatattgagtcttaggttcagactaaatactgtagcctgtatgtagacttttgattcaacgactggtatcctgactccacaaaaccaacccagaattgttcacatgtctcccaggtggtagaaactgcaaagcccaacacttcccataacaacatacacaaagatagctctaatcctgcaattacacaagagaccaggggcactgctgcaggtaatgagtcaggggaagaaagattctattttgtcttttgggtaatttaaagcagaggcaatgaatcattgtgttagaaaaaacgactttggtatcagacaaaac

SEQ ID NO: 344299 - DNA, 552 bp, Homo sapiens
attattttgaagcttttccatggcatgtgtaatataatggaaagtacaagagtgaaacatctgggttataagtcagtccagaaccaccaaactatttaatgacaaagcaagtctagaacccactgtgctgacttgtggggagttttccttccattgtggcccctcaaatctctcgagtccacatttctccctttcctacccccaaagccggctgctttcccctcagtgtattctcaaatattgagtcttaggttcagactaaatactgtagcctgtatgtagacttttgattcaacgactggtatcctgactccacaaaaccaacccagaattgttcacatgtctcccaggtgstagaaactgcaaagcccaacacttcccataacaacatacacaaagatagctctaatcctgcaattacacaagagaccaggggcactgctgcaggtaatgagtcaggggaagaaagattctattttgtcttttgggtaatttaaagcagaggcaatgaatcattgtgttagaaaaaacgactttggtatcagacaaaac

SEQ ID NO: 344300 - DNA, 550 bp, Homo sapiens
gggatctatggtaatgaatcatagattagaatattccaggggacaagatagatggacagcccacaagagtgctattcaatttgaattaaygtaaatccctcccttccctgacatgcccaaaattgagaactgtccaatgtcagctaacacaatgaaaaactagtccttcaccaaatttccggatctaaattagtttacagacccagaggttattgatcaaagggcaggcttggtttccttgaggaaggactctataatatcatcatttgtatatgtaagaaatatctccccagataaattttccagagtagctgtgcaagaggaaaatagaacatctagacctttcaaggacagttgaatacagggtctgagctgacaccattcagggtcccaaaataccatccaggagctccagtggagtggaggctcacagaatccaagtaataaacagatttctgatacaagttcattccacagtgagttcattgagtccacagacgtatttcccaattctcaagtatataattgggatagatatactaaacagctg

SEQ ID NO: 344301 - DNA, 443 bp, Homo sapiens
agaatacaagacaacaggcgtctcacctcagaagctgcccccactgccttcctgcctcctggcctataatcagagttaagtggaagcataacccagccagggttgagcagcatctgataagggaggacttggactacaaggacctggccaaaggagctasaagacctagccgtatggagcagcaggacccatattctgaaggctgaggatgcacaatcaagggggcctggacctatgactggttattgaagaatttattggcttgggggcactattttggggtataagattcaatatcctggaacagggttcagaggatgtttcaaacttgcatctagggtgggtcctggggcctggataaagctgtggcccacaatgagtgaggctgaaatacttacattacctaggaaagtcccccaaatcatactttaacccagaccatc

SEQ ID NO: 344302 - DNA, 523 bp, Homo sapiens
tgctcactccacccctgagagatagtgtcccacgccccaaagccagaatacaagacaacaggcgtctcacctcagaagctgcccccactgccttcctgcctcctggcctataatcagagttaagtggaagcataacccagccagggttgagcagcatctgataagggaggacttggactacaaggacctggccaaaggagctacaagacctagccgtatggagcagcaggacccatattctgaaggctgaggatgcacaatcaagggggcctggacctatgactggttattgaagaatttattggcttgggggcactattttggggtataagattcaatatcctggaacagggttcagaggatgtttcaaacttgcatctagggtgggtcctggggcctggataaagctgtggcccacaaygagtgaggctgaaatacttacattacctaggaaagtcccccaaatcatactttaacccagaccatcaagaaaacactgttaagaggcacatgagcctcacta

SEQ ID NO: 344303 - DNA, 254 bp, Homo sapiens
gtaagaacttctttgtttttattttgaccttcatagtttctgcttaatgtccctgattagacaccaagtcaagcttagggtattgccgtgaatgcctggctcttacaaggtttctgttccaaagctgaattctgctcccctatatttctaccyaattgtgagaaatccacatggacaaacctagtgtctattgctctttgcctcttccagatatcattcaccactgggatcttcatccctgtgtgccacagttc

SEQ ID NO: 344304 - DNA, 569 bp, Homo sapiens
atttgcagtctcaatttactgccttctagtcctttttatcttggccttctcataaaagggaaactgttttctttgaacaaagggatcagtaattcacaatcttggttttgccacaccccagggtgtcttcaaccataaaatagtgtcaagagattgtcaaaacaaaattaattgaaattgaaacaataaattcctgccataaaatgtcttcagaaggtgaaaggaaaggtgtatcatakaataaagcaaaaggtgagttccccaaaggatgagaattgttgatccaaagggaagatggaaaatcttttactcttatctcacctgtgtttttaaaaccttgcaggacatagaaggaggaaaaactagaattgtcaaaacaataagccacatcttcttacaagtcagggccctccacagcgtttctgacagtttgaacaccagctaaagtttttttaacactaaatttagcatgcacaggcatttcagatctgtcactagaagcagggtgatgtcagtgagaaaatctggtgttgtttcattttcacaagtttttcaggatctgaaatgga

SEQ ID NO: 344305 - DNA, 566 bp, Homo sapiens
acctaaaaaatgcttattaacaaggagaagggctgtcaaagggaggaaggcagtgagacaaacgtagtatttatcactcctgggggctccaatttatttagatgctttggaattctactctttgggccatgtatgtggtaagactaaagtcacattcacacttcaggggaatgctgttgtagtcattcttaagaaatgtgtcatgacatggggcatctttttatcctaaaccatttgtgctttgcctttcagactaaagtggcttctgaacgttagaattttaattagaagttgaatgaaaaccttttaccaatgaagatgatcttgaaaaacataaggcaataatgaggtttttaggaagcaaaccatttattattctgtgcccatttgactctctgcttcatgtkgaggggcaataaatgttcttctctattaaatttcctctgcatgaacttgcatttaattatttttaaggaaggcttcatgtctgctcttagtctgaagtcctcatgaaaaatttggagtttcacacaatttagctccctgtagaaaagattgctggtagc

SEQ ID NO: 344306 - DNA, 527 bp, Homo sapiens
tcctttcctctgcttggtcaattcaactattgatacttgtgtttgcattgtgaagttctcgtgttgtgtttttcagctccatcagatcatttatgttcgtctctgaactggttattctggttaacagctcgtgtaatgttttatcatggttcttaacttctttgtgatgagttagaacatattcctttagcttactgaagtttgttattacccaccttcggaatcctacttctgtcaattcatacatctcagcctccacttagttctgtgccctttctggagaggtgttgcgatcatttgaagraggataggcactctggctttttgagttttcagcactttttcattgattctttctcacctttgtgaatttatctagcttcaatctttgaggctgctgaacttcaggtggggtttttgtgggaatggttttgttgatgctgttgttgttatattctatttgtttgcttttaacagtcaggtccctcttctgtactgctgctgtggtttgctggggatccactcca

SEQ ID NO: 344307 - DNA, 527 bp, Homo sapiens
agttctgtgccctttctggagaggtgttgcgatcatttgaaggaggataggcactctggctttttgagttttcagcactttttcattgattctttctcacctttgtgaatttatctagcttcaatctttgaggctgctgaacttcaggtggggtttttgtgggaatggttttgttgatgctgttgttgttatattctatttgtttgcttttaacagtcaggtccctcttctgtactgctgctgtggtttgctggggatccactccagactctatttgcctgggcctttcccacacctggaggtgtcaccagtggagggtgcagaatagcaaagrtagctgtctgctcattcctctggtatctctgtcccagagggacactgacctgctgtctgcaggaacattcctgtataaggtgtcttatgacccctgttggggggtctcatgtagtcagaaggcatgggatctgggacccatttaacaaagcactctggctgccccttggcagagaaggtgtgctgcactgggg

SEQ ID NO: 344308 - DNA, 520 bp, Homo sapiens
tccaaacacaggcactgggtgttatgacttcaacatttgaattacatatggactgagatgcaattcagtccataccatcagttaattatagacttcaatcacctctacaagttatcttcacagcaatacmtaggttgatgtttgattgaataacagaaaaactaagactataaacctaaactaagttgacacataaaactgaccatcacaccagtagataaccgaatttgattcctaaaaacaggaataacagtgagattgtaatgtcgccaggaagtcttgatgtaccccattgaatttaccagaataacctccccacccagcccctgacagccaataattttatctacaccagagccattctaacttcaaggtgcctaagaagcacctggagatcttgctaaaatatagattctgatttagcaggtgggatggtttggggcctgagatgctgcatttctaacatgttggcaggtgaagctgatgctgctggtctaaggactcaagtttgaggtgcagc

SEQ ID NO: 344309 - DNA, 569 bp, Homo sapiens
tatgaatggtgtacccactgaactctggggttactcttgagctactaatattagtcatgcacatgtagataaacaaagaagagcgaactcggaggatgacacaggagcatggctttacatgggctatcagccagaaaacccctcctgaagaccaacatatatgaggtgtcctgctgaactgcctctakaatagagaggcttggaaaaactcaatcaggggagtcacagtttaagcaaaggtgagagttttaagtcagcaggtgaagtaaaaagcatatgtagacaaaattactcgagaaaatctctttcttatgaatatcaaaattagaaaatgactgatctacattaaagaaagaaagaactctcaatccacatgtcgaggatgaaagacatcttgttttaagataattatgaaataccttgtggggaatgagagatcacggaaaattttaaaatattccactttcctaaatggggtgccccttctgttttaaaagtaagtctctacgactttaatgtgtgagagtagatctgtgaatttgtttgttgctatgaggactcgggtaggg

SEQ ID NO: 344310 - DNA, 569 bp, Homo sapiens
tatgaatggtgtacccactgaactctggggttactcttgagctactaatattagtcatgcacatgtagataaacaaagaagagcgaactcggaggatgacacaggagcatggctttacatgggctatcagccagaaaacccctcctgaagaccaacatatatgaggtgtcctgctgaactgcctctataatagagaggcttggaaaaactcaatcaggggagtcacagtttaagcaaaggtgagagttttaagtcagcaggtraagtaaaaagcatatgtagacaaaattactcgagaaaatctctttcttatgaatatcaaaattagaaaatgactgatctacattaaagaaagaaagaactctcaatccacatgtcgaggatgaaagacatcttgttttaagataattatgaaataccttgtggggaatgagagatcacggaaaattttaaaatattccactttcctaaatggggtgccccttctgttttaaaagtaagtctctacgactttaatgtgtgagagtagatctgtgaatttgtttgttgctatgaggactcgggtaggg

SEQ ID NO: 344311 - DNA, 569 bp, Homo sapiens
tatgaatggtgtacccactgaactctggggttactcttgagctactaatattagtcatgcacatgtagataaacaaagaagagcgaactcggaggatgacacaggagcatggctttacatgggctatcagccagaaaacccctcctgaagaccaacatatatgaggtgtcctgctgaactgcctctataatagagaggcttggaaaaactcaatcaggggagtcacagtttaagcaaaggtgagagttttaagtcagcaggtgaagtaaaaagcatatgtagacaaaattactcgagaaaatctctttcttatgaatatcaaaattagaaaatgactgatctacattaaagaaagaaagaactctcaatccacatgtcgaggatgaaagacatcttgttttaagataattatgaaataccttgtggggaatgagagatcacggaaaattttaaaatattccactttcctaaatggggtgccccttctgttttaaaagtaagtctctacgactttaatgtrtgagagtagatctgtgaatttgtttgttgctatgaggactcgggtaggg

SEQ ID NO: 344312 - DNA, 646 bp, Homo sapiens
aactctaggattatagagagtttggccaagggaaaatttttagaaaataatcaaagggtgttccacttcatttcaaagtaaaatttagacacatttttttaagctgtgaggttttataaaatgaaaggtaaaacttctaaaaagcaattagatattttatttcagaamccaaaagccttgggacagggttagggagggaagctgacacataaagtgagcattggtggaatgaaaatcctcccacatctaatttgacacggcttggaaatacacacatttggcactcagtgtgtatggacaaaagcagaatcagactttcacctaggtttgaggtagataaagcagcaaagatcagtaatccaaaagtagatcaccaagttttcagaggcttgatttttctcagcagtattccttgcctctttctttagaataatcataagttaggtaactaaaatgacatgttttgaaggtctatttcaaagaaagctttcagctctccatttatatggatttaagacatgtcattaacatttatactaaaatacatcccattaggataaaaatcacacagcttttatgggtaaacttttaatgaggttttctcaaatgcaatgtagtgtttttaaagagtttataattaaattac

SEQ ID NO: 344313 - DNA, 687 bp, Homo sapiens
tgaataagtctgtattaatgtggctacatattaggaagcccattgttttctcacagggcctaagcctcaatttccagtaattccatcaataatgaagtaggaatctttatgtttgtctgcttaaatttttgtctttctcagtgaaatcagaactcaggcaagaaacacgataatatactctattaggttgcctaaaaccccaatatattccatcagtaattttcatgttgtacaggtttgttaatttatgtcctttagttaacctctaaacagcaccataaagatgattttaaagggtgacaattacatttctaatgatgtagtcctcttataatctctcccctcataatatccccttatttttatctagccataaggaatctcttatagacacctttgagatatggttgatgtatgatcaaggagtaactctaggattatagagagtttggccaagggaaaatttttagaaaataatcaaagggtgttccacttcatttcaaagtaaaatttagacacatttttttaagctgtgaggttttataaaatgaaaggtaaaacttctaaaaagcaattagatattttatttcagaacccaaaagccttgggrcagggttagggagggaagctgacacataaagtgagcattggtggaatgaaaatcctcccacatctaatttgacacgg

SEQ ID NO: 344314 - DNA, 687 bp, Homo sapiens
tgaataagtctgtattaatgtggctacatattaggaagcccattgttttctcacagggcctaagcctcaatttccagtaattccatcaataatgaagtaggaatctttatgtttgtctgcttaaatttttgtctttctcagtgaaatcagaactcaggcaagaaacacgataatatactctattaggttgcctaaaaccccaatatattccatcagtaattttcatgttgtacaggtttgttaatttatgtcctttagttaacctctaaacagcaccataaagatgattttaaagggtgacaattacatttctaatgatgtagtcctcttataatctctcccctcataatatccccttatttttatctagccataaggaatctcttatagacacctttgagatatggttgatgtatgatcaaggagtaactctaggattatagagagtttggccaagggaaaatttttagaaaataatcaaagggtgttccacttcatttcaaagtaaaatttagacacatttttttaagctgtgaggttttataaaatgaaaggtaaaacttctaaaaagcaattagatattttatttcagaacccaaaagccttgggacagggttagggagggaagctgamacataaagtgagcattggtggaatgaaaatcctcccacatctaatttgacacgg

SEQ ID NO: 344315 - DNA, 599 bp, Homo sapiens
gctgtacagaaaagggaaagcttatacaccatcggtgggaatgtaaattagttcagtctctgtggaaagtagtttagagatatctcaaagaatttaaaacagaactaccatttgactgaagagtcccattactggatatatatccaaaagaaaacaaatcattctaccaaaaagacacaggctatgttcattgcagcactattcacaacagcaaagacatagaatcaacctaggttctcatcaatagtggattggatgaagaaagtgtggtacatatacattatggaatactacacagccataaaaaagaatgaaatcatgtccttaacagcaacatagatgtaactagaggccattattttaagtgaattaatgaagaaacaggaaaccaaatactgcatgttctcacttataagtgggagctaaacattgggtactcatggacataaagatgggaacaacagaaactggggacccctakagagtggagagaggaagagggaaaagggctgtaaaattacctatggtgtactacactcagtacccaggtgacaggatcattcataacccaaacttcagtatcgctcaatatacccagg

SEQ ID NO: 344316 - DNA, 583 bp, Homo sapiens
actggattgtgtttattcaaagtttcctaagaatttaagaatttttaaagtgtttttattgtaggctggataaaagaaatcagtgttaatacctatattgtcatttcacacctctaactaacacaggtacacaatctcttacctgaaattcttgggcaattgtatttcacagaatttggaaatttggggctttttgactagtatattagtccattttcacactgctataaagatactacctgagactgggtaatttataaacaaaaaagctttaattgactcacagttacacatggcttgagaggcctcaggaaacttacaatcatggcagaagggaaaggggaagsaaggcacatcttacgtggcatcaggagagagagagccagtgaaggagaaagtgccagacttttaaacatctctcttgagaactcacttgctatcatgagaaccgcattggagaaaccacccccaaaatctaattaccttcctccaagtccctctctcaacacatggggattacaattagagataagatttgggtggggacacagagcaaaactatatcaactaggaatacggtaca

SEQ ID NO: 344317 - DNA, 477 bp, Homo sapiens
cctcccacaacacatgggaattatgggagcacaattcaagatgagatttgggtggggacacagagccaaaccatatcactgggtgacagagtgagaccctgtctcaaaaaaaaaaaaaaaaaagcagcatctatatcaatgtatactcccacacagagtgtgtaagagtctgttttscctgcatccccattcacctgtgagattatgaaatgcttgaattgacactgacctgaaatgaaatcttattgttgttttcatgtgcatttccttaattcccagtggtatgaatatcttttcccaggtttaatggcaatttttatttcctttccagtgaattgcctgttcatagtgcttgcctattttccattgggttatatttatctttttcttattctcgatactattccttgtctgttacatgggttgcaaatattttcaacttcctcttctatggtggtctcctcgagaagtccatgc

SEQ ID NO: 344318 - DNA, 477 bp, Homo sapiens
cctcccacaacacatgggaattatgggagcacaattcaagatgagatttgggtggggacacagagccaaaccatatcactgggtgacagagtgagaccctgtctcaaaaaaaaaaaaaaaaaagcagcatctatatcaatgtatactcccacacagagtgtgtaagagtctgttttccctgcatccccattcacctgtgagattatgaaatgcttgaattgacactgacctgaaatgaaatcttattgttgttttcatgtgcatttccttaattcccagtggtatgaataycttttcccaggtttaatggcaatttttatttcctttccagtgaattgcctgttcatagtgcttgcctattttccattgggttatatttatctttttcttattctcgatactattccttgtctgttacatgggttgcaaatattttcaacttcctcttctatggtggtctcctcgagaagtccatgc

SEQ ID NO: 344319 - DNA, 530 bp, Homo sapiens
acaagaagacctgtcacctcccaaagtttacatatgtccttgtgtgggttgtgttgtgttgtgttttgggggtttgtgtttgtgtgtgtgtgtgtgtgtgtgtgtgtgtgtgtgtgtgtgtattaagaacacttaacatgagatccacccccttaacactagttttaagtgcataacaccctattattaatacagacacagggttggacagcagatctctakaacatacgtattcacctggcatgactgaaactttacacccatagagcgacatctcttcattccccctcccccagtcgctggcacccaccatttccttctctgcctctatgagttgcattgtttcagagaccacctatgaatggaatcatgcagcgtttttccctctgtgcttggtgtattttgcatagtatagggtcctccaggttcatccatattgtcacaaatggtaggagttccttctttatgactgagtaatattctactgtgtgtatctaccatttttctttatgtattcatctgtccatgga

SEQ ID NO: 344320 - DNA, 635 bp, Homo sapiens
tgaattaattgataggcaattttgtatatgaagctgcagttagcttgacatctgcccttggctcttatcccattatcttgggaatattaattattaaccatgattttttttggtggtggrgtataacataaaggagtgaagaataatctagatgaaaagttaaataaatgaaatctccactcacacttgactcacatatttgccaagaactgtttggtaagaaaaactagatttccatgtgagaatcaggaattaaagactcttcccaaacatctctttttggtactactatttaattcttccagccttcttaactaggtgagggtttctcagaattcctggtcttaggatccctttattgtcttaaaaattattgagaactgtaaaaagcttttactggcgtaggttgcatctattgatactcattgcattagaaattaaaactgaaaagtttttgaaactcaagatgacacagtcacactttatatttattgtcagggtgatgacaacatcctatgtctctgtgcacttgtgagggactgtgagcaaaaaaggcaaataacattatagcattttggggagtcagcttccaagatggtcccagtaatccctgtcctcagtaatcacaccctgtg

SEQ ID NO: 344321 - DNA, 635 bp, Homo sapiens
tgaattaattgataggcaattttgtatatgaagctgcagttagcttgacatctgcccttggctcttatcccattatcttgggaatattaattattaaccatgattttttttggtggtggggtataacataaaggagtgaagaataatctagatgaaaagttaaataaatgaaatctccactcacacttgactcacatatttgccaagaactgtttggtaagaaaaactagatttccatgtgagaatcaggaattaaagactcttcccaaacatctctttttggtactactatttaattcttccagccttcttaactaggtgagggtttctcagaattcctggtcttaggatccctttattgtcttaaaaattattgagaactgtaaaaagcttttactggcgtaggttgcatctattgatactcattgcattagaaattaaaactgaaaagtttttgaaactcaagatgacacagtcacactttatatttattgtcagggtgatgacaacatcctatgtctctgtgcacttgtgagggactgygagcaaaaaaggcaaataacattatagcattttggggagtcagcttccaagatggtcccagtaatccctgtcctcagtaatcacaccctgtg

SEQ ID NO: 344322 - DNA, 628 bp, Homo sapiens
aaattgttatgcaccaatcgataattactacagcactattagaaaaatagttttgatctcacagactccttgaaagggtcttggggacctccaagagtttccataccacattctgaagactgctgaatgcagccatgcaggatttaaagagatatattccataaagatttgaggtcaggagaagcctttgcctagaaaaatgaatggaaaacgcaaggtttcatgctaaggagactgttctcattcagtgaccttattgattctgcacacatggtcgaggtgcaaagaaaagggctggttgctttcctcctgatcttccagaagactgagtgctcctcctactctgttatcttcccattttcgtagtcggaaaaaaattactcctgttcctccactcacctgggactttaagcgcacaattttaccaggtgtgtcagcacagaaactagcataatactaataaayttggagtatgcatctggagagaaaaagaacatcaattaagtctgtatggatcataaataacagcaactagctcctttgtagtaaacaaagcaatttcctatgaacatggaggaagagctaattaatgttactgttactactgctactaattaataataatggc

SEQ ID NO: 344323 - DNA, 508 bp, Homo sapiens
acatatatattttgaggataatggtgtgttctcagccaaagagagtctagagggagcgtgcagcatttagctctcaggtatcactcagagtcgtggctggaacagacagcctgctcagggtggtttaactggagggagtgttgtaaaggctgagccatagagctgtgggcataacggagggaaaaagccagggatggtgcaacaccccacgctagtcccagctgggagctgtttctaccccaaggcctaggggcagggcaaggcagttgagatgctggagcccagagagaggagaaccacagaaaacagacttcccagtgggacaggtgtgtgggcgtggaggaccacacrcccgcaagacacacatcaggccgggcagatgaggatgcattgtgtcccagggctcccgaaacagtaccacggatggaggatgaaacaacagacactgattctctcatagttcctcaggctgaaagtccgaaatcaaggtgtcagctgcaacacaatc

SEQ ID NO: 344324 - DNA, 465 bp, Homo sapiens
agaataagtagcaatctctcctttaaacarccctactgattgccactttatttttaatttgattttatgcagagagataggaacatgttctaggaattttgaaagctctgtgtaagaaaaaaaaaacccaagttactgtcatgttttaggggtcaaggaaaatgatttcataatgagtttgcaaaggatgaaaaatggcaatgatttgaaacttttcaaaattccaggtaaatctcaccacttctcaggaaatttaatttcagactaaatatatcagtcccgggggcaaagaacttcttcctacaccgccaaaattagtggttactgccttctctagagttttttgcctaaaatttagtttctttgttttttgttttgttttaatttcaaataagcagtaggaagaaagtccatgacgctaacagagctagaaatcagttagaccccatccccttactcctcctt

SEQ ID NO: 344325 - DNA, 451 bp, Homo sapiens
atgtaatgtacttgaatcatcccaaaaccatccttcccccascaccgccatctgtggaaaaattgtcttccatgaaactggtccctggtgccaaaaaggtcagggaccactgctgtaggccactcactcaatagcaccttcaaccccctctgcttgtcctcctctgctataggggctgagaggcctaaactacattctcagaaccccttgctgctagatgcaggattgaagcagtttgctccagtcggacccactcatttgggacgtagaggaagaagtgggttctagagcagcagccaggaaggcagttggggttttctggtgagcacagtggccctggttctcctggggcagctgtggggtgcccctggcatccaggccctcacatcatcatgccgaggggtgacagtggtgtttccaccacaacagtcctctgcagaggttggacctt

SEQ ID NO: 344326 - DNA, 558 bp, Homo sapiens
aaacagtttttatctttgttcatgttcagcatcagttatgtcttgtgatagaccmagcccaccaggttggctctgattacacctgggcgtggcctcttttttgatttaacccaactttctcccatataggaacatccccacgatgacaggggtggaatcccgaggggtcaggtggtccaggtggggctctgttctcctggccacatcccgtctgtacagcccctcacagggccacacctgctggctttgccctatggtagtggtgatggattaaggacagttcctctcctcccccagaaggctctgagggctccctccaattgtacaaaacccgccactatcaacaaagctggagggatatagaaaaacattcaagttactacttaaacaatggattaattggcattgttcctaggaacctatctaatgaataggaatataatttatgtttcatttaggaaaaatatactgcttgattctcagaaataaacattaaatataaatgcaatggaagtctaggacacagagagagagaaaaaaggaaaaagtggaaaagaa

SEQ ID NO: 344327 - DNA, 610 bp, Homo sapiens
gtaaaaaccattcagattttctatttcaaagttgaaaatatcatgaacaaggtgccagccttctacactctaaggggtgagataaaagactgaacagtgtgcaagttcatcgtggctgacatttcctcttgaataatttttcttcacaaactagatggggaaagaagttaacataaaaaagcccctgaacagcagacaatcggaattaaagcctcagaacaccgttgacttgccaagatccatctccatcagccctgctgcatgattgagactaacttctaccatwagctcattacagagaggctggaatgtagtgtttcatcaggagaagccagcgcatttccccaaagatgagaaattctgaatgacttaaaataacacatgcccagaaatgatttagagctctatcctttcaagagtcgtgtctgcaaatcagatgaactacatccacaaatccccctaagtcagtgctaggggacaccaattactgtcagctgatgaagacagatgggcgacaggagatggggagcggccggccataccccatgccaagggggttgcaatgccaatcgtccaccctaattcattatccattctcagcaaatagctt

SEQ ID NO: 344328 - DNA, 523 bp, Homo sapiens
gtcttcttcagtttctttcaatagtgtttcgcagttttcaatcttctgcgtatatattttgcagctgttataattttcwtacataattagggctgttctagcttccttttaaataatttttattatgattgtaaagtgttcatctctagtaatgcttcttgctgtaaggtgttctttttctgacatcagtatagctacgttagccttttattagtgttaacattgtacattttaccatcattcttttactttcaaccctgctagctgtggccctgggaaggaggctctgcacctgttttttcatctatgacaggcgggtaaaccacctacctcagaaggagttgtaagtaaataactaaaagatgtttaacatcggtcctggcgtggactaagtgctcactaaatggagtctcttattattgttgctgtggctattaatattaatagagaagggtaattctccattcacactgagagagaagagtttctttcatcagaccttcgagtttctgtaagaccacga

SEQ ID NO: 344329 - DNA, 523 bp, Homo sapiens
gtcttcttcagtttctttcaatagtgtttcgcagttttcaatcttctgcgtatatattttgcagctgttataattttcttacataattagggctgttctagcttcyttttaaataatttttattatgattgtaaagtgttcatctctagtaatgcttcttgctgtaaggtgttctttttctgacatcagtatagctacgttagccttttattagtgttaacattgtacattttaccatcattcttttactttcaaccctgctagctgtggccctgggaaggaggctctgcacctgttttttcatctatgacaggcgggtaaaccacctacctcagaaggagttgtaagtaaataactaaaagatgtttaacatcggtcctggcgtggactaagtgctcactaaatggagtctcttattattgttgctgtggctattaatattaatagagaagggtaattctccattcacactgagagagaagagtttctttcatcagaccttcgagtttctgtaagaccacga

SEQ ID NO: 344330 - DNA, 523 bp, Homo sapiens
gtcttcttcagtttctttcaatagtgtttcgcagttttcaatcttctgcgtatatattttgcagctgttataattttcttacataattagggctgttctagcttccttttaaataatttttattatgattgtaaagtgttcatctctagtaatgcttcttgctgtaaggtgttcttttyctgacatcagtatagctacgttagccttttattagtgttaacattgtacattttaccatcattcttttactttcaaccctgctagctgtggccctgggaaggaggctctgcacctgttttttcatctatgacaggcgggtaaaccacctacctcagaaggagttgtaagtaaataactaaaagatgtttaacatcggtcctggcgtggactaagtgctcactaaatggagtctcttattattgttgctgtggctattaatattaatagagaagggtaattctccattcacactgagagagaagagtttctttcatcagaccttcgagtttctgtaagaccacga

SEQ ID NO: 344331 - DNA, 523 bp, Homo sapiens
gtcttcttcagtttctttcaatagtgtttcgcagttttcaatcttctgcgtatatattttgcagctgttataattttcttacataattagggctgttctagcttccttttaaataatttttattatgattgtaaagtgttcatctctagtaatgcttcttgctgtaaggtgttctttttctgacatcagtatagctacgttagccttttattagtgttaacattgtacattttaccatcattcttttactttcaaccctgctagctgtggccctgggaaggaggctctgcacctgttttttcatctatgacaggcgggtaaaccacctacctcagaaggagttgtaagtaaataactaaaagatgtttaacatcggtcctggcgtggactaagtgctcactaaatggagtctcttattattgttgctgtggctattaatattaatagagaagggyaattctccattcacactgagagagaagagtttctttcatcagaccttcgagtttctgtaagaccacga

SEQ ID NO: 344332 - DNA, 558 bp, Homo sapiens
tttgacccctctgcctcctgagtagctgggattacaggcatgaatcccatgcccagctaattctttgcatttttagtaaagatgggtttcaccatgttggccaggctggtctcaaactcctgacctcaagtgatctgcmcaccttggcctcccaaagtgctgggattacaggtgtgagccaccgcacccggcctgtttttcatttttataagttttttatgtttctcctcttgtcctccttcctgagaggctggtggaaagagtggcaccgatgggtctgggctggtgaagatatccagtaaaattaccccttatatctgagaggatgattttggttaacagacccaaaccgagttaagggggaaaacatctaggggttcctatatctgaactgtaagagatttcctggcttctgggatggctggatccaggggctcaaatgaagtaatcagtatttttatgttatttccgactttccatcacttggcttagcattctccatactgatcacagtctctgacaagttgtcctgtcctaccatggctgcagacagctacc

SEQ ID NO: 344333 - DNA, 558 bp, Homo sapiens
tttgacccctctgcctcctgagtagctgggattacaggcatgaatcccatgcccagctaattctttgcatttttagtaaagatgggtttcaccatgttggccaggctggtctcaaactcctgacctcaagtgatctgcacaccttggcctcccaaagtgctgggattacaggtgtgagccaccgcaccyggcctgtttttcatttttataagttttttatgtttctcctcttgtcctccttcctgagaggctggtggaaagagtggcaccgatgggtctgggctggtgaagatatccagtaaaattaccccttatatctgagaggatgattttggttaacagacccaaaccgagttaagggggaaaacatctaggggttcctatatctgaactgtaagagatttcctggcttctgggatggctggatccaggggctcaaatgaagtaatcagtatttttatgttatttccgactttccatcacttggcttagcattctccatactgatcacagtctctgacaagttgtcctgtcctaccatggctgcagacagctacc

SEQ ID NO: 344334 - DNA, 558 bp, Homo sapiens
tttgacccctctgcctcctgagtagctgggattacaggcatgaatcccatgcccagctaattctttgcatttttagtaaagatgggtttcaccatgttggccaggctggtctcaaactcctgacctcaagtgatctgcacaccttggcctcccaaagtgctgggattacaggtgtgagccaccgcacccggcctgtttttcatttttataagttttttatgtttctcctcttgtcctccttcctgagaggctggtggaaagagtggcaccgatgggtctgggctggtgaagatatccagtaaaattaccccttatatctgagaggatgattttggttaacagacccaaaccgagttaagggggaaaacatctaggggttcctatatctgaactgtaagagatttcctggcttctgggatggctggatccaggggctcaaatgaagtaatcagtatttttatgttatttccgactttccatcacttggcttagcattctccatactgatcacagyctctgacaagttgtcctgtcctaccatggctgcagacagctacc

SEQ ID NO: 344335 - DNA, 571 bp, Homo sapiens
tgtaggtgaccagtatatattcaccaaaaacaagcatgcatccattttcccaaaagaatctgggagtgtagctacattctaaatatcagccttctattttaacttcctatgctgattcttccaacttctctttacagataacacaggcgtgacacrgagtttgacttcctagatttctccaaatttcatgggacacatattaaattcttagcactattttaaaaaatatctctctgacttgaaataataaacaacaattttactttttttcttggggataggcgaagggatgtattgcagtcagaaagcctcctgctagcatcattcactgaataaaagatttctctaatctcaaacctgactcttaatctctcaagacatgtgaagtttttaagaatcctaatactgttttatttatgtcttttttcaagtcttaccaaatgttctgcattacaactcatttttgatacacattaccataaatgttagattttaaatgtctattacagcaaataaatggcaaatgacatttaaactgattctcagtattgaaccctcctattttgtattt

SEQ ID NO: 344336 - DNA, 571 bp, Homo sapiens
tgtaggtgaccagtatatattcaccaaaaacaagcatgcatccattttcccaaaagaatctgggagtgtagctacattctaaatatcagccttctattttaacttcctatgctgattcttccaacttctctttacagataacacaggcgtgacacgsagtttgacttcctagatttctccaaatttcatgggacacatattaaattcttagcactattttaaaaaatatctctctgacttgaaataataaacaacaattttactttttttcttggggataggcgaagggatgtattgcagtcagaaagcctcctgctagcatcattcactgaataaaagatttctctaatctcaaacctgactcttaatctctcaagacatgtgaagtttttaagaatcctaatactgttttatttatgtcttttttcaagtcttaccaaatgttctgcattacaactcatttttgatacacattaccataaatgttagattttaaatgtctattacagcaaataaatggcaaatgacatttaaactgattctcagtattgaaccctcctattttgtattt

SEQ ID NO: 344337 - DNA, 602 bp, Homo sapiens
attacagcaaataaatggcaaatgacatttaaactgattctcagtattgaaccctcctattttgtatttataacagtcatttatctccagaattctatgggtatgtcaaaatgacaccaaagtaatattagaataataagtgttatttatatccctttcaatatggctcacagcctataaagcctgtgggaacaaggggcattcaggaggtatcattttttgccagcctttcactagtttacatcctcatacacagaaacaaaacaaaacaaaattccacaatttttacttatattragtaaattttaaggaactatatttcttcccattaattctttcaataagtatagattgatcacgaaaaacttgtttgctccctgaggcactactgtgatgaaactatttttttacttttaggtcctgacctagaggaagttacaattcagttgaacacctacctacctttttgttgaactattcacagaataaaactaatcttggtatactactgatgagaataatgtcaaaacaacaaaactatgtttcatacattaatatattaaatatagttgactcttctgtttataaacctacagctgtgt

SEQ ID NO: 344338 - DNA, 615 bp, Homo sapiens
tagcacctccagagctaaactcttacccaccagaaggttgccttgagagataacagtgaatttacaacccaaagtatgcctggctatagtttttkcccacctttaaaacctgattttgcccatgaagacactgacccaactgtcaagtaggtaaggcacccaagctagtacgaggacgcttcacttgcacattttgtcccctgacttttaaaagtgcctgctttctactccaaaagcaaagtggtacccttaaggcagaaagcctgcacttcttcccctaggccagctttagaataaagtcattttctttataccaaaccttgctcttgtcaattgaactctgcaagtggtgagtgactgaacatgccttttggttacattaaaaagagctgatgagaaaatatatttatactcattgtttcaatatttgtattgaggccactgacactaccttagagagaagaagctcttcatctttcatgcatgaattatatgtgaaaatgaccctttttaggagcagtgcattaacccatgctacttacagtctgaaattcttgtctcacctgtgtcaactttgatcaccatttcaacaagccctgaggaaagatgtttgac

SEQ ID NO: 344339 - DNA, 530 bp, Homo sapiens
gtagaacattaaaccactccctgggattacatgattacctagcacattagctatcacagcaattctaggagctratttgcattatccccagatgcttataaaagggcagaatatgttccagggtcaggcagctggtacatcagatttgcctgataacaaacctgggtccgctgtatttgatcatgctagtagattttttaaagtaactaaatgaaaacaaaaacagaaacaaaacccaagcatcataatgaaatagtacttctaacacaaacttggggttttaatacaatcatcttatttacaaatgcccaactcaactcaataacataggatataaaagactacgtacaatattaaagttagcatggcaaataaatgacatgattgttttttaaattttaattaatataagcaaataactatactaacattctacaccaatgctcaaaacagttattcatcacatcaattgtcaagtattcaagaataaattatttattgattaacttagttatagtactactgataag

SEQ ID NO: 344340 - DNA, 530 bp, Homo sapiens
gtagaacattaaaccactccctgggattacatgattacctagcacattagctatcacagcaattctaggagctgatttgcattatccccagatgcttataaaagggcagaatatgttccagggtcaggcagctggtacatcagatttgcctgataacaaacctgggtccgctgtatttgatcatgctagtagattttttaaagtaactaaatgaaaacaaaaacagaaacaaaacccaagcatcataatgaaatagtacttctaayacaaacttggggttttaatacaatcatcttatttacaaatgcccaactcaactcaataacataggatataaaagactacgtacaatattaaagttagcatggcaaataaatgacatgattgttttttaaattttaattaatataagcaaataactatactaacattctacaccaatgctcaaaacagttattcatcacatcaattgtcaagtattcaagaataaattatttattgattaacttagttatagtactactgataag

SEQ ID NO: 344341 - DNA, 530 bp, Homo sapiens
gtagaacattaaaccactccctgggattacatgattacctagcacattagctatcacagcaattctaggagctgatttgcattatccccagatgcttataaaagggcagaatatgttccagggtcaggcagctggtacatcagatttgcctgataacaaacctgggtccgctgtatttgatcatgctagtagattttttaaagtaactaaatgaaaacaaaaacagaaacaaaacccaagcatcataatgaaatagtacttctaacacaaacttgrggttttaatacaatcatcttatttacaaatgcccaactcaactcaataacataggatataaaagactacgtacaatattaaagttagcatggcaaataaatgacatgattgttttttaaattttaattaatataagcaaataactatactaacattctacaccaatgctcaaaacagttattcatcacatcaattgtcaagtattcaagaataaattatttattgattaacttagttatagtactactgataag

SEQ ID NO: 344342 - DNA, 530 bp, Homo sapiens
gtagaacattaaaccactccctgggattacatgattacctagcacattagctatcacagcaattctaggagctgatttgcattatccccagatgcttataaaagggcagaatatgttccagggtcaggcagctggtacatcagatttgcctgataacaaacctgggtccgctgtatttgatcatgctagtagattttttaaagtaactaaatgaaaacaaaaacagaaacaaaacccaagcatcataatgaaatagtacttctaacacaaacttggggttttaatacaatcatcttatttacaaatgcccaactcaactcaataacataggatataaaagaytacgtacaatattaaagttagcatggcaaataaatgacatgattgttttttaaattttaattaatataagcaaataactatactaacattctacaccaatgctcaaaacagttattcatcacatcaattgtcaagtattcaagaataaattatttattgattaacttagttatagtactactgataag

SEQ ID NO: 344343 - DNA, 621 bp, Homo sapiens
ggcaaaagagccccaatactagtcaatgctttatctatgttttttccttaaggttatctgtaacaaggacatcttcctgcaaaaggcaattttttttataatttcaatttttttattttggattcagaggatacatgtcaagtttgttacatgggtatattgtatgatgcagaggtttgggatatgaatgatcctgtcacccagatattgagcatagctctcaacagttagtttttccacacttttcctccctcttttcctccccaccctagtaatccccagtatatatttttgtcgyctttatgttcatgagtacccaatatttagctcccacttataagtgaaaacaaatactatttggttttctgttcctctgttaattcactgaggataatggatggcctccagctgcatgtatactcttgcaaggacaagtttttgttttcttactaccgcttactacttcttggtgtatatgtaccacatttctttatccagtatatcattgatgggtacctaggatgattccatatttttactattatgaatggtgctgggataaacatacaagtgcatgtgtcttttggcagaatgaactattttcttttagaaatataccca

SEQ ID NO: 344344 - DNA, 551 bp, Homo sapiens
aatataatttaatagtatacagttttaacacgtttattcatgtttctgattttctaatttttccccttctaattttttaacttcttcatgttttcagtccatttttacagatatgccatgctatgtcttctctatgttactgttactttccaaagacattgtcctctacaaattgttcttcttgcaacctagatctttgtagcarttatatttcaaaaaaatagagaatataattctagatcatctgcattttatgtcagcagcatttcctttgaggcacagtaaaagggtacatctgcatcattataacttaaaatgacgaatgattaatctttttatttcagatgttgcacagcagagctttctgagaagtcatttgtttttcattcatcaaaaatttgttttatttacaatggatagtacatactccatcattaaattttggcctgaaaagatggtttatatattctactctagcactatttagtgtgatggcaaaaaagtaaaatttcaggacatctaagattgttgaagctgtttatctacaatta

SEQ ID NO: 344345 - DNA, 600 bp, Homo sapiens
gttctgggatgtggacagttggcaagagagctaacacaaaattctagttgctgagactagaatgtgatttcaacttgtgctcccgtctgagccagtgaattgtgagaaaacctaaacacactgggggtggctatcaatgaggcgctcccatgctgtttgggtataccactgcaacttctcytagcttttctttagtggaaaggcttcaagtatgtccattagcaacccttctcaatgggtctctccatgcatctctaatattcatagtttttctatacttatgggaataaacacttcccttttccctaagtcagtttaaggcaaggagggatacagataaacagcaaaagtagagggagcaaggatacctgagaaaaaaggaggaggattgtccaaaaagggaaatgactttcattctcacattttctgttccactttttgaaatattttattttggctatccaaattattttttttattagaatgacagtcattccataaatactagtaatacatttgcttgggataaggcttgtctcagggccctggcaaatacataaatttattcaaatccaaagaaccattcttaggccattgcaa

SEQ ID NO: 344346 - DNA, 600 bp, Homo sapiens
gttctgggatgtggacagttggcaagagagctaacacaaaattctagttgctgagactagaatgtgatttcaacttgtgctcccgtctgagccagtgaattgtgagaaaacctaaacacactgggggtggctatcaatgaggcgctcccatgctgtttgggtataccactgcaacttctcctagcttttctttagtggaaaggcttcaagtatgtccattagcaacccttctcaatgggtctctccatgcatctctaatattcatagtttttctatacktatgggaataaacacttcccttttccctaagtcagtttaaggcaaggagggatacagataaacagcaaaagtagagggagcaaggatacctgagaaaaaaggaggaggattgtccaaaaagggaaatgactttcattctcacattttctgttccactttttgaaatattttattttggctatccaaattattttttttattagaatgacagtcattccataaatactagtaatacatttgcttgggataaggcttgtctcagggccctggcaaatacataaatttattcaaatccaaagaaccattcttaggccattgcaa

SEQ ID NO: 344347 - DNA, 600 bp, Homo sapiens
gttctgggatgtggacagttggcaagagagctaacacaaaattctagttgctgagactagaatgtgatttcaacttgtgctcccgtctgagccagtgaattgtgagaaaacctaaacacactgggggtggctatcaatgaggcgctcccatgctgtttgggtataccactgcaacttctcctagcttttctttagtggaaaggcttcaagtatgtccattagcaacccttctcaatgggtctctccatgcatctctaatattcatagtttttctatacttatgggaataawcacttcccttttccctaagtcagtttaaggcaaggagggatacagataaacagcaaaagtagagggagcaaggatacctgagaaaaaaggaggaggattgtccaaaaagggaaatgactttcattctcacattttctgttccactttttgaaatattttattttggctatccaaattattttttttattagaatgacagtcattccataaatactagtaatacatttgcttgggataaggcttgtctcagggccctggcaaatacataaatttattcaaatccaaagaaccattcttaggccattgcaa

SEQ ID NO: 344348 - DNA, 600 bp, Homo sapiens
gttctgggatgtggacagttggcaagagagctaacacaaaattctagttgctgagactagaatgtgatttcaacttgtgctcccgtctgagccagtgaattgtgagaaaacctaaacacactgggggtggctatcaatgaggcgctcccatgctgtttgggtataccactgcaacttctcctagcttttctttagtggaaaggcttcaagtatgtccattagcaacccttctcaatgggtctctccatgcatctctaatattcatagtttttctatacttatgggaataaacacttcccttttccctaagtcagtttaaggcaaggagggatacagataaacagcaaaagtagagggagcaaggatacctgagaaaaaaggaggaggattgtccaaaaagggaaatgactttcattctcacattttctgttccactttttgaaatattttattttggctatccaaattattttttttattagaatgacagtcattccrtaaatactagtaatacatttgcttgggataaggcttgtctcagggccctggcaaatacataaatttattcaaatccaaagaaccattcttaggccattgcaa

SEQ ID NO: 344349 - DNA, 629 bp, Homo sapiens
gcattacatgttggagtcatctgtgtgtggcagtaggtagagacggataaragttcgcttatataagaaatgtgtagcacaaataccccaaatgcaaattcaagtgaaagatttagtctcaccactatattctcattaaatgggtcgttatagtaaatgagtaaaatgagtcattacagtaaatgactactagaggtcatgccttatgcaaataaggcctaaaggcatgggtacaacacatactatgctgtgttacccactatctgtgtactcattatgaaatatatccaatatcgtaatgtggcagtcgtcctaaccaatttaaatgagcctaggtttagaaaggagatacccacaagaaagtaggatcataatatatgcaggagctgaaaagtgtggctgagaaaagagggtgtgagacatgtaagccaaaaagtatgtgggacaaatctcaattagttgaggagttgattttaccatggttaaggatattcccatgacacagccttaggaggtcctgagaacatgtgcccaagatggttgggttacagcttgattttcaatgttttgaggagataggagttacaagcagatatgtaatgtctgacacgtacatgtcaatacatgta

SEQ ID NO: 344350 - DNA, 629 bp, Homo sapiens
gcattacatgttggagtcatctgtgtgtggcagtaggtagagacggataagagttcgcttatataagaaatgtgtagcacaaataccccaaatgcaaattcaagtgaaagatttagtctcaccactatattctcattaaatgggtcgttatagtaaatgagtaaaatgagtcattacagtaaatgactactagaggtcatgccttatgcaaataaggcctaaaggcatgggtacaacacatactatgctgtgttacccactatctgtgtactcattatgaaatatatccaatatcgtaatgtggcagtsgtcctaaccaatttaaatgagcctaggtttagaaaggagatacccacaagaaagtaggatcataatatatgcaggagctgaaaagtgtggctgagaaaagagggtgtgagacatgtaagccaaaaagtatgtgggacaaatctcaattagttgaggagttgattttaccatggttaaggatattcccatgacacagccttaggaggtcctgagaacatgtgcccaagatggttgggttacagcttgattttcaatgttttgaggagataggagttacaagcagatatgtaatgtctgacacgtacatgtcaatacatgta

SEQ ID NO: 344351 - DNA, 629 bp, Homo sapiens
gcattacatgttggagtcatctgtgtgtggcagtaggtagagacggataagagttcgcttatataagaaatgtgtagcacaaataccccaaatgcaaattcaagtgaaagatttagtctcaccactatattctcattaaatgggtcgttatagtaaatgagtaaaatgagtcattacagtaaatgactactagaggtcatgccttatgcaaataaggcctaaaggcatgggtacaacacatactatgctgtgttacccactatctgtgtactcattatgaaatatatccaatatcgtaatgtggcagtcgtcctaaccaayttaaatgagcctaggtttagaaaggagatacccacaagaaagtaggatcataatatatgcaggagctgaaaagtgtggctgagaaaagagggtgtgagacatgtaagccaaaaagtatgtgggacaaatctcaattagttgaggagttgattttaccatggttaaggatattcccatgacacagccttaggaggtcctgagaacatgtgcccaagatggttgggttacagcttgattttcaatgttttgaggagataggagttacaagcagatatgtaatgtctgacacgtacatgtcaatacatgta

SEQ ID NO: 344352 - DNA, 453 bp, Homo sapiens
ctctttttactttgttaatctagtgagtagtctactgattttgtttatcttttcagaaaatcagctttctgttttgttgattctttgcttagtgctttttgtatcattatcattaattctggtctaatctctgttattttttttcctgttagctttgagtttgattttttcttgtttttctagytccctgagatgcaacacttgaaacttaaatcttttcatctttttcatataggcatttaatgctatatacttttcttttattactgcttttgctgtatctgtaacatattttgatatgttgtttctctgttttcattcctttcaaattatattttgatttttcacatcatttattttttctttcttctttttttttgagacagggtcttgctttgttgcccatgctagagtacagtggcatcatctcagctcactgcaaactccaccccc

SEQ ID NO: 344353 - DNA, 557 bp, Homo sapiens
tagatgacatctcctgggcaaccaatgtggcagacttcttacagcttgttgtctcatgtgcttatgaattatcttagggtttctatggggaaaaagaagccattccaagtatttaacaggattattaatagattcagttaaactgggcacaatacatggtctcagtcccaaacccataggctgtccacacataaacttaaaaggaaagatttttgtttctctgygggtatcagtccatttttctaacaaggctagtggtgaagttctaggccatcttaacagtgttatataatattagccagtgacatttttagtaggctttatttattagagcggttttaagttcagcaaaattaagtggaaagtacagagagttttcatgtacccacccctttcatgtacagcttctttctggtcaacatcccacattactgtggcacatttgttacaatctataaacctacattgatatatcatcggcacctcaattctatagtttacattagagtttgctcttggtgttgtacattctatggattttgacaaatgtataataa

SEQ ID NO: 344354 - DNA, 557 bp, Homo sapiens
tagatgacatctcctgggcaaccaatgtggcagacttcttacagcttgttgtctcatgtgcttatgaattatcttagggtttctatggggaaaaagaagccattccaagtatttaacaggattattaatagattcagttaaactgggcacaatacatggtctcagtcccaaacccataggctgtccacacataaacttaaaaggaaagatttttgtttctctgcgggtatcagtccatttttctaacaaggctagtggtgaagttctaggccatcttaacagtgttatataatattagccagtgacatttttagtaggctttatttattagagcggttttaagttcagcaaaattaagtggaaagtacagagagttttcatgtacccacccctttcatgtacagcttctttctggtcaacatcccacattactgtggcacatttgttacaatctataaacctacwttgatatatcatcggcacctcaattctatagtttacattagagtttgctcttggtgttgtacattctatggattttgacaaatgtataataa

SEQ ID NO: 344355 - DNA, 534 bp, Homo sapiens
cagtttattcttaaactaactgaaggacctcttggttgcttccaagttttggcaattgtgaataaagctactataaacattcatatacaggttttttktgtgtgaacatgtttttgacttatctgagtagtactaaagagcatgtgatcagtggatcagatggtaagagtatgttaatattttttaaaactatcaagctatctgccaaagtaacagtaccatttgcattcctgctagcaaagaagagagaaccagttgctgtacatccttgctagcatttggtattattaatgttacggatttgggccattctaatatgcatgtagtggtgtttcattggcatcttaatttgtagttctctaaagacatatgatgtgcaacatcttttcatatgcttatttccactagtatatctcttttggtgaggtgtctgtttaggtctttggctcactttttaagagttgctcattttttatctttgacttttaagagttatatatatatatatatatatatatatatatatatatatat

SEQ ID NO: 344356 - DNA, 534 bp, Homo sapiens
cagtttattcttaaactaactgaaggacctcttggttgcttccaagttttggcaattgtgaataaagctactataaacattcatatacaggttttttttgtgtgaacatgtttttgacttatctgagtagtactaaagagcatgtgatcagtggatcagatggtaagagtatgttaatattttttaaaactatcaagctatctgccaaagtaacagtaccatttgcattcctgctagcaaagaagagagaaccagttgctgtrcatccttgctagcatttggtattattaatgttacggatttgggccattctaatatgcatgtagtggtgtttcattggcatcttaatttgtagttctctaaagacatatgatgtgcaacatcttttcatatgcttatttccactagtatatctcttttggtgaggtgtctgtttaggtctttggctcactttttaagagttgctcattttttatctttgacttttaagagttatatatatatatatatatatatatatatatatatatatat

SEQ ID NO: 344357 - DNA, 617 bp, Homo sapiens
tcttaaactcaaatcatgtattttacttttaaaaaatttagtaattctattattctatcatgatactaattattgatttgctttgtttttactatgggcttggattttagacagctgcawcttcccccccaaaagggtagaaataacaataaaaataattagaaacattatagtgttactattttataataacacaaagaagagattgcaggggcaagtacaaactacaaataagaaactaattatccctgttgatagtaaggaaaaagactgtccctcccttttcatagagccattactttaaaaacttaagttctttcactatttgaaatgtatgtaggtctttgtaaaagctaaagaatcctcttccacctacatgacccaaggttgcttttctcaaggacttaggaaccatctccttgaaatgtaataatcaaggagaatagcaccattatctcctaccttctgtgggatcctagggacctcactgttgcaggaagtcagggaccccaaatggagggaccagctgaagccatgatggaagaacataaattgtgaagatttcatggacatttattagatacccaaattaatacttttataatttcttatgcctg

SEQ ID NO: 344358 - DNA, 617 bp, Homo sapiens
tcttaaactcaaatcatgtattttacttttaaaaaatttagtaattctattattctatcatgatactaattattgatttgctttgtttttactatgggcttggattttagacagctgcaacttcccccccaaaagggtagaaataacaataaaaataattagaaacattatagtgttactattttataataacacaaagaagagattgcaggggcaagtacaaactacaaataagaaactaattatccctgttgatagtaaggaaaaagactgtccctcccttttcatagagccattactttaaaaacttaagttctttcactatttgaaatgtatgtaggtctttgtaaaagctaaakaatcctcttccacctacatgacccaaggttgcttttctcaaggacttaggaaccatctccttgaaatgtaataatcaaggagaatagcaccattatctcctaccttctgtgggatcctagggacctcactgttgcaggaagtcagggaccccaaatggagggaccagctgaagccatgatggaagaacataaattgtgaagatttcatggacatttattagatacccaaattaatacttttataatttcttatgcctg

SEQ ID NO: 344359 - DNA, 613 bp, Homo sapiens
atatggaacatgtgcagatattaaacaacattaatctttatccctttcagaataagaagtcattcatgtatttaaattgtcaattagttaatagtttgtctctttgaggaataaatgtgtattggagtcaacactgatctctttttctgaaaatgtggaaattcagcaatagcagaaagctaggttagcctttgtgactgagaccatgtcattgtacccatctcttgcttctatccctgccattattgctactctgttcttgtaaccrctgtgcaaataatagagtgaccaataacaattgtggatggaatcacctggccacatatttctgtctacatggttattttgggggttacccataatagatgttcacctatgggcattaaagtgcaatacaaagttcatcacatttacatctcctcctgtaaacacatcctcctgagatatcagtatctcagaactgaatcttttaatcacttttgtattttttatttcaggctccagaccaaacagccaaatcatttttctactgcatatataagcctgtgtatatatttctcggtagattagaggctttattactgcatctcatccacttggaaagagaaaaata

SEQ ID NO: 344360 - DNA, 613 bp, Homo sapiens
atatggaacatgtgcagatattaaacaacattaatctttatccctttcagaataagaagtcattcatgtatttaaattgtcaattagttaatagtttgtctctttgaggaataaatgtgtattggagtcaacactgatctctttttctgaaaatgtggaaattcagcaatagcagaaagctaggttagcctttgtgactgagaccatgtcattgtacccatctcttgcttctatccctgccattattgctactctgttcttgtaaccgctgtgcaaataatagagtgaccaataacaattgtggatggaatcacctggccacatatttctgtctacatggttattttgggggttacccataatagatgttcacctatgggcattaaagtgcaatacaaagttcatcacatttacatctcctcctgtaaacacatcctcctgagatatcagtatctcagaactgaatcttttaatcayttttgtattttttatttcaggctccagaccaaacagccaaatcatttttctactgcatatataagcctgtgtatatatttctcggtagattagaggctttattactgcatctcatccacttggaaagagaaaaata

SEQ ID NO: 344361 - DNA, 613 bp, Homo sapiens
atatggaacatgtgcagatattaaacaacattaatctttatccctttcagaataagaagtcattcatgtatttaaattgtcaattagttaatagtttgtctctttgaggaataaatgtgtattggagtcaacactgatctctttttctgaaaatgtggaaattcagcaatagcagaaagctaggttagcctttgtgactgagaccatgtcattgtacccatctcttgcttctatccctgccattattgctactctgttcttgtaaccgctgtgcaaataatagagtgaccaataacaattgtggatggaatcacctggccacatatttctgtctacatggttattttgggggttacccataatagatgttcacctatgggcattaaagtgcaatacaaagttcatcacatttacatctcctcctgtaaacacatcctcctgagatatcagtatctcagaactgaatcttttaatcacttttgtattttttatttcaggctccagaccaaacagccaaatcatttttctactgcatatataagcctgtgtatatatttctyggtagattagaggctttattactgcatctcatccacttggaaagagaaaaata

SEQ ID NO: 344362 - DNA, 602 bp, Homo sapiens
tagtctcaagtaggcaagaagctcccacagccaaactgagaggcaagtatgacatggaggccagtcatgggcatcagagttggatgcaaccccctgccttttcaggactaaatcaggagggatttggcactaaagccatggttccaacacagcagcaaattttatagcctggagtgktgtagtagtttgaagacaaactgtttgtgaccagctggctgtcccaattttctgccacagaagagagcactggtggatcaagtgcatgagagtaatacaggtcccactatgacctgctaggctgtggagtgcatgtttcccctctttctctgtgctatctctttggcacagcaatggttgctttactcgtccatggagcattgctccatgggtctgagaactgccttctagctcctatcaatgctggcacttgcacctgacactgggggctcaagtacaggcttgtccattctagctctgcctggctttgctccctctcctaccctggaggcagaacacaagactgggaccacagagagtttcaatgccaagcctgtcacctggaacacccaagtacttctactggttaaaaagaagtaattcaa

SEQ ID NO: 344363 - DNA, 602 bp, Homo sapiens
tagtctcaagtaggcaagaagctcccacagccaaactgagaggcaagtatgacatggaggccagtcatgggcatcagagttggatgcaaccccctgccttttcaggactaaatcaggagggatttggcactaaagccatggttccaacacagcagcaaattttatagcctggagtggtgtagtagtttgaagacaaactgtttgtgaccagctggctgtcccaattttctgccacagaagagagcactggtggatcaagtgcatgagagtaatacaggtcccactatgacctgctaggctgtggagtgcatgtttyccctctttctctgtgctatctctttggcacagcaatggttgctttactcgtccatggagcattgctccatgggtctgagaactgccttctagctcctatcaatgctggcacttgcacctgacactgggggctcaagtacaggcttgtccattctagctctgcctggctttgctccctctcctaccctggaggcagaacacaagactgggaccacagagagtttcaatgccaagcctgtcacctggaacacccaagtacttctactggttaaaaagaagtaattcaa

SEQ ID NO: 344364 - DNA, 602 bp, Homo sapiens
tagtctcaagtaggcaagaagctcccacagccaaactgagaggcaagtatgacatggaggccagtcatgggcatcagagttggatgcaaccccctgccttttcaggactaaatcaggagggatttggcactaaagccatggttccaacacagcagcaaattttatagcctggagtggtgtagtagtttgaagacaaactgtttgtgaccagctggctgtcccaattttctgccacagaagagagcactggtggatcaagtgcatgagagtaatacaggtcccactatgacctgctaggctgtggagtgcatgtttcccctctttctctgtgctatctctttggcacagcaatggttgctttactcrtccatggagcattgctccatgggtctgagaactgccttctagctcctatcaatgctggcacttgcacctgacactgggggctcaagtacaggcttgtccattctagctctgcctggctttgctccctctcctaccctggaggcagaacacaagactgggaccacagagagtttcaatgccaagcctgtcacctggaacacccaagtacttctactggttaaaaagaagtaattcaa

SEQ ID NO: 344365 - DNA, 633 bp, Homo sapiens
aactttgtatcaggctgcaataagctccataaatgaaggagaaatgaagttgtttttttttatttttcagggaaccaaatgctgagaaaattcatcaccactagaccagccctacaagaaatgctctgaatagtcctaaacatgaatatgaaaggttgatacttgtcataataaaaaaaaagtataaaacttacagataatacaaaacaattactcagaggaagggaaaaaaaccaaatggcaacatgatagaattccactaatccacaaagacagagaaaaaacaratgaaaataaagaatatacaaagcagagagctaataatagaataacagaaacaaaacctcatatgtcaatattaaacttgaaaataaatgtattaaatgctccacttaaaatgtatagattagcaaaatagatttttttaaaatgaataaactttatgctacttaaaagaaattcaccttgctagtaaagacacatattggagatgaaggggtggaaaacgatattccacataaactgaaactaaaagcaggcagaagtagctatatttgtatcatacaaaacagaatttaaatcagaagcagcaataaaagacaaagaagaccataatataatgaaaatggataa

SEQ ID NO: 344366 - DNA, 513 bp, Homo sapiens
atagtcaaattaaaaacaaaatgaggtttgacactaatttgataccaatttgacacaaatcaggatagctagtattaaaaagtcaaaaaataacagatgttggtgagatgtcaggaaaggggaaggtttatacactgttagtaggaatgcaaatgagtacaacctctatggaaaacagtatggagatttctcaaagaactaaaaatagaactaccattcaatccarcaattcctactactgagtatctacccaaagggaaagaaatcattatattaaaaagatactggcaagcgtatgttcattgcagcactattcacaataacaaagagatggggtcaacctaaatgtttatcaatgaatgactggataaagtaaacatcatatatatgtagcacataaatgctatgaaaagctactcagccataaataagaatgaaattacatatttttcaccaacatagatgaaaccagaggtcattatctcagatgaaaaaactcagaaagtcaaatac

SEQ ID NO: 344367 - DNA, 600 bp, Homo sapiens
tggctaggtatcctagtcaaagttttgcctattgcaaaaatttctctattctactctctttcggggcacagattgggctgtatgcagcagtagtttctgttttgttcccactgacattctcagtcaatctgctcatgaactgaaccttacctttttctccatcagcttgccataagaatacagtcatatggtcatgggcatgacctagtggacaagcataagtgtacactattgaaaaacaaaaacagtgcccatmtgtttgtatcacttacttgtgccctctaagcctccttatgctgaatctcaagtatacattttcatcttagtatggaatgttgatgaattcacctaacattatggcttggtgatctaaaagaactcaacttgtgatgctcacttctgacggtgtagtcacctgggttccatggtcaggtgtatttgaatggtgtgtaataatctcctgctgatagcttggtattgcttcatcactgatggagtttatgttgtgtttctcctaattaggattgcattaactcaacttcataccttttctcaccacagatgtttttagtgctatagtgtctgccctgtcatatagcc

SEQ ID NO: 344368 - DNA, 467 bp, Homo sapiens
tctgcccaactcccagtagagaggagaccctggagtggtagctcctctctgcagctggtagtcttgatgtctgcttgagtctgactgagtctggggtttttatgggcttcagagggaaggaagtacatgctgattggttcatggggggccatgggcaggcctggaaaaaatatcataagttcaattctggtccatcagcctggcctccaggcttcaggctgcccctggtttgaaggtgggccttcactggggacctgcccctttctgcctaggagccagtctgcctcctgctgtcacacacagtgtccaggctgtttgtgaccaggggcacctccaagccgagctgccatcaggatcccccttggcctccctcccatgctwgtcagtgcccaaaatctggagggggctgatggggcagggggctggtgtgtcaacactgccctgagcatatacacagcttgccgggt

SEQ ID NO: 344369 - DNA, 467 bp, Homo sapiens
tctgcccaactcccagtagagaggagaccctggagtggtagctcctctctgcagctggtagtcttgatgtctgcttgagtctgactgagtctggggtttttatgggcttcagagggaaggaagtacatgctgattggttcatggggggccatgggcaggcctggaaaaaatatcataagttcaattctggtccatcagcctggcctccaggcttcaggctgcccctggtttgaaggtgggccttcactggggacctgcccctttctgcctaggagccagtctgcctcctgctgtcacacacagtgtccaggctgtttgtgaccaggggcacctccaagccgagctgccatcaggatcccccttggcctccctcccatgctagtcagtgcccaaaatctggagggggctgatggggcagggggctgstgtgtcaacactgccctgagcatatacacagcttgccgggt

SEQ ID NO: 344370 - DNA, 530 bp, Homo sapiens
aaaaaaaaaaacaagagtaactagacttgtatcagataaaatagactttaagccaaaaactgaaaagagacaaggaaggttrttatataatgatacagaagtcaaggtaacaagaggatatagcaattacaaatatatacgcacctagtactggaggacttaaatacatagggctaatattaatagagctaagggaagaaatagactgcaatacaataatagtaggaaacttcaattcccttgtttcagcaatggacacatcatccaaacataaaatcaaccaaaacatcagagctaaaccacattctagacctagaccaaatgaacctaacagatatttgtagaacattctatccaacagccatggaatactggttcttttcaacagcacatggaaaatcccccaggacagattatatattaggccacaaaacaagtcttaaatttaaaaaataatttaaaaatcaaaatcacaaaagtatcatttatgaccacaagggaataaaactagaaatcactatcaggaagaa

SEQ ID NO: 344371 - DNA, 615 bp, Homo sapiens
gtctttttctctacctctttggaattttttagtatctatttaaacaaaacaaagtaaaaactaaattccaaactgcattttactttctccttagccttttccactgactaacttaaagtacaatataagaaaatatgactatatgatacattttactttttttcattgatttaaagtgtcatcacagaaggaaaagagataaatgtttaattttcaaaactagaagaaaagcatgatttaaaaaacaatgactcataaatgatttaaaytgtgtgtatatatatgtgttggagaatgggaattatataactgcattataagtgctttggacaatagaaatactaaatagtaaaaagaaaaaaaagcctcatagtttgaaagccagcttgtatttgtagcaaacctctaaaagaagcctaagagatacgtcaacatttgaaaccattagtcataatgacacaacactagcactccaattggatgatatggagaggaccacgttgggacttatattttgatattatctaaccagaaaacaaaatagagcacccaaattttgggtaaagaaagaagaaggctttaggtagatgccagggtgcctctaaggtagaagac

SEQ ID NO: 344372 - DNA, 615 bp, Homo sapiens
gtctttttctctacctctttggaattttttagtatctatttaaacaaaacaaagtaaaaactaaattccaaactgcattttactttctccttagccttttccactgactaacttaaagtacaatataagaaaatatgactatatgatacattttactttttttcattgatttaaagtgtcatcacagaaggaaaagagataaatgtttaattttcaaaactagaagaaaagcatgatttaaaaaacaatgactcataaatgatttaaactgtgtgtatatatatgtgttggagaatgggaattatataactgcattataagtgctttggacaatagaaatactaaatagtaaaaagaaaaaaaagcctcatagtttgaaagccagcttgtatttgtagcaaacctctaaaagaagcctaagagataygtcaacatttgaaaccattagtcataatgacacaacactagcactccaattggatgatatggagaggaccacgttgggacttatattttgatattatctaaccagaaaacaaaatagagcacccaaattttgggtaaagaaagaagaaggctttaggtagatgccagggtgcctctaaggtagaagac

SEQ ID NO: 344373 - DNA, 457 bp, Homo sapiens
tcacatggtaaaagaaaaaagggggcaacaggctccctcaagcctcttttataagggcacaaatcccattagaatagctgtattcatagctcatgtgcctccatttggaggcctctttattaggggccttcagctaaggtcttcctcaggcatctctactgagacctacttttagaaggagggtggtaccttgaagacaattttccccactctcactcagtacttttctacccctagtttttcgtcgtctgctttactcccctacccaacccaggccygtaaaatgcaggtgccttttttgggaggctctctctacaggtattttacattaaatgcaacaatggagaacccagtacttttacctatttatttagcctcttgttactatcacagaaagtaattaaaggcttgattattactttaattttggcttgttgtcttaattggctaccctgag

SEQ ID NO: 344374 - DNA, 563 bp, Homo sapiens
aaactacccccatgatccaattacctacacctggtctctcccttgatgtgtgcagattatggggattataatacaaaatgagatttgggtggggacataaatcctaaccaaatcattctgtccctagctcttcctaaattacgtgtccctttcacatttcaaaaccaattatgccttcccaactgtcccccaaagtcttaattcatttaataattaacccaaaatttaagtccaaagtctcatctgagatgaagcaagtcccttctgcccaggagcctgtaaaatcaaaagcaagttaattacttccaagatagaatgggttgcaggcattgggtaaatgtttccattctaaaagagagaaattagcaaaacaaaggggccaagggtcccatgcaagtctgaaatccagctgggcagtcataaaycttaaagttccaaaatggtctcctttgactgactccatgtctcacatccaggtcatgcttctgtaagagatgggctcccatgaccttgagcagctccactcctgtggctttgcagagtacagacaccctcctggctgc

SEQ ID NO: 344375 - DNA, 601 bp, Homo sapiens
catctaaatggtattcatgatttagttttggataacaaaggacaattttaaacagtctttcttcaattaaaaagtagaaccatttygagatactagagattgatattttagttttagaaatttgaagcattattcttccaagtctctatctgtaaaaatataaaatagagagagatcaactttaagctcttgtctatataattcccttacagataaaaaaaaaatcacaggagtttttagttgttggttgttaaatatattatgtaaagtagaatcctttgcttttttaattagattattttatgatgttacacaatttggaattagtgaagaccaagagttatttaaattataacttagggaaatcggttctctgtgtaagcattaaaaaaaagaactaataataaggtagaaatctgtgtaaagataaatgttaaaggaaacacattttctttaaggcgatactaaatccaattatagtctgacagccctttcataggaagaacattgcattaaaatatttggacctccaaacataatgtataatacagtaaaactagtttttagtatctaataaaaatatgcagctgtttaaattata

SEQ ID NO: 344376 - DNA, 377 bp, Homo sapiens
ttctgtaaaactcataataagaaataatgaagcatctggcagatagggaaaggtccaagaagaaacattttgaacggaaagtgtatcactccctttggcaaagacttactggttggcaaagactgttgttgcttcaggaaacccttgcctgtcattttcagagtaagaatatatatttttccatgcattcagtgttgtcttcagagtggaattagttcttargaccaatagtaaagcatgttcttggttcctttttccctcagaagtagtttagaggacgggttctcaaactttgctgtttattagaatcaccaagtatcttagaccacttgtgctgctataacaaatacgtcagactgggtaatttataaagaaca

SEQ ID NO: 344377 - DNA, 563 bp, Homo sapiens
gacaagtaatagtcttcaggtttcttgtgagtgactaggagcagatcatgaaggsggtaaattgacctacacattattttagaagaattgtctaaaattcttataatctattctctcttttaatgggataatttatagctacccataaggaggaaatagaaccaaattggatgtcaggaaactagcattctagacccatagctaccactatttagttgtatgatcttatcacttaagagataccatccctgcatcaaaaatagtatttgtttaatgtaagatagtacataagtaagaaattctgaaagtataaattcctcaaatcaagatttaaagtgaaaaggaatacaaagactatataataaaatacattcatttctttctcaagatatttcaccttaaaagttatttaaagtacttgatagcttaaaataattgaaagagcagaaagtataaattcagagctaagggcagctcaaaaaagtattcattcattccgaccaagtggggaattaaagttagtcattcatgcattcattcagtgattattattggatgaaaac

SEQ ID NO: 344378 - DNA, 563 bp, Homo sapiens
gacaagtaatagtcttcaggtttcttgtgagtgactaggagcagatcatgaagggggtaaattgacctacacattattttagaagaattgtctaaaattcttataatctattctctcttttaatgggataatttatagctacccataaggaggaaatagaaccaaattggatgtcaggaaactagcattctagacccatagctaccactatttagttgtatgatcttatcacttaagagataccatccctgcatcaaaaatagtatttgtttaatgtaagatagtacataagtaagaaattctgaaagtataaattcctcaaatcaagatttaaagtgaaaaggaatacaaagactatataataaaatacattcatttctttctcaagatatttcaccttaaaagttatttaaagtacttgatagcttaaaataattgaaagagcagaaagtataaattcagagctaagggcagctcaaaaaagtattcattcattccgaccaagtggggaattaaagttagtcattcatgyattcattcagtgattattattggatgaaaac

SEQ ID NO: 344379 - DNA, 520 bp, Homo sapiens
gatgtatcacaggaattcagtgttggcttaacatccaaaaatacgtttgtgtaatacaacatatcaataaaataaaagacaaaaacctcataatctcaaataattaaaaaaatcttttgacaaaatttaacatgcttttataatgaaaacactcaaaatattaaaattagaagataactttctcatcataaaggccatttatatatatatatatatatatatatatatatatatatatacacacacacacagttatcatcataccatctgctgaaagactgcctycatcttaagatcagggattatgaacaatgcttattattaccacttttattaaactttgtgcttagcagtctagccatgcaattacacaaaagtaaaagtgacatataaaaactctccagtgtagaaaatcagaaataaagctatgcctagtctcatatgacaaaatcttgcttacagaaaattctaagaagtccattaaaagctattagaactaacaaacaagttggacaaggtt

SEQ ID NO: 344380 - DNA, 520 bp, Homo sapiens
gatgtatcacaggaattcagtgttggcttaacatccaaaaatacgtttgtgtaatacaacatatcaataaaataaaagacaaaaacctcataatctcaaataattaaaaaaatcttttgacaaaatttaacatgcttttataatgaaaacactcaaaatattaaaattagaagataactttctcatcataaaggccatttatatatatatatatatatatatatatatatatatatatacacacacacacagttatcatcataccatctgctgaaagactgccttcatcttaagatcagggattatgaacaatgcttattattaccacttttattaaactttgtgcttagcagtctagccatgcaattacacaaaagtaaaagtgacatataaaaactctccagtgtagaaaatcagaaataaagctatgcctagtctcatatgacaaaatcttgcttayagaaaattctaagaagtccattaaaagctattagaactaacaaacaagttggacaaggtt

SEQ ID NO: 344381 - DNA, 506 bp, Homo sapiens
tttttgaagtttaaaacttgtacactaaaagccacaaaatatacgtacaaattagaggatacctgaagaaatggaaagacatactaattttatggaacaggggatggaatattgttaagatgacaatgctcctcaaattaatctatatattcaacacaatattttccaattccagcagcctactttggcgaaatcaataaacactctgaagttgatacacaaatcaaaggactcaaaatagtcaaaacaattttgaaacagaacaaagttggatgacgcacaatttttgattaaaaccttactataaacctatactaaccaagactatgttactaattaaatagatacatagattggagacatagagagtccagaaatgaactcatacrtttatgatcaattgatttttaaaaagcacgagaacacaattcaatgaggaagaataatcttttgaacaaatgatgctgaaacaattggatattcctatgcaagagtgaagttggacc

SEQ ID NO: 344382 - DNA, 470 bp, Homo sapiens
cttctaacgcaaaggtcaacatgaaatagcactctcaagtagcacatcaaaacagccttttgcgacgtggcataattgcttgcttaagttcttgtatattacatgatctttctttcagaagtccagcgttgctgccaattctccttttttataattccttttctaaaactgtgctaccttccaatagctaaagatttcttttgtgcaggagagcctccagactgttattattttagtattttaatttcattgtctttgcataattgtataccttgaaaarttcattcagggtaaaaaaaaatgcttcatgagctagactcttatattcatttgttcattacttcactaatacagtcagtcaccaacttattcatcacacatccgctgtgtacaaggctttataaaatatgtggtttccaagatggaaaaaacgaagtctccaactattgagaatttagagcgtattggaa

SEQ ID NO: 344383 - DNA, 579 bp, Homo sapiens
accaaatgataccaactaataaataataataataaataataaataaggctatttcatggttggtgaagaagcactagacttgaaaccagacagtggtttactgaggtcgtgctgttactccatcaccttggagagatcaaccaagaagtagaggctttgtgtcatgagtgtaatacttactcacatatactggacgtagtgatgagacaggcaccagggctttatacacattgttccatttcaacctcgcagtgacccttaagagaaaggctgtttattttgtscattttcacaagtaaggaaaccagctcagagagattagggaactggcatgaaatcacacaactggcaagtcatagggaggaaatcaaactcaagctctcttatctaaaatctttgttcttactatgaccccttcaactcaagctagtgccaggaacattggggttagagccaaagggatctcaatctgatgactgcttctctgtgttgccagctgggtgatgtcaggcaggcagcccagcctccctgtgccttcctcttccttatctgtgaaatagtgatgcttttattatttta

SEQ ID NO: 344384 - DNA, 603 bp, Homo sapiens
tgacctctctaaagggaagcatttcaagaaaatctcagtcaccgcatatgtccaaaaactcactggattcagcattcagtaagaatgttccttatttggcagcatttttccctttaaatgttccagtaatggctagctttaatcccaaatattcaaactctttctgtttgcatgttatttttagaagcctttgtttttccccattcctggtatagttttacatttattttaattactaacatataggagtagagaaagatagaatatgcttttatcttttccttattgctgtgtgtttatggcctcatagataaagacttgctggaagacaagtcagacaggagcataatgctttacaacagtcagggaaaaaaatgggaagaaggggaaagagggtgtagaaataagaaaataattgatggagatttgcattcactgcaattatataaaatgaatatgcattcagtacattattttaatctattcttaatgttgggtcaagaatgtggtagatgtagatgtaatattaattacagtcattcctatgarttgtttaattctgcctattttgttatgcaacaggataaaaatggctatgtttat

SEQ ID NO: 344385 - DNA, 543 bp, Homo sapiens
atctcatttattaagaagcttttcatgttgtcttccatgggattaaatctagatgtgagatccagatcgctgactggcaattctttctctaggtagtgccagagagaaatagtgatgacgattatttttgtgaacagaccaagtgtccctttactgtagtctggttttgtatgcagagctggaaggaaacatacattgttaataatacctaagagatctcagtatctatctcttgccagaccctctgctaattattcactacattttctatttcacacaaaagttaataagtaggacatattatcatctttagtccacagataagtttgttgtattagaaagtttsaataaattaaccagacttgtacatttgaaaggcagaaagtgggacctcaatcctctgaatctagagtctgtactcttaaacacttctttagactaggacagacgtggtgtggcttttctgcctccatttcccaagccatttctccttttccctttagaaatttagtacctatagtatctattctgaatgtaagtatt

SEQ ID NO: 344386 - DNA, 574 bp, Homo sapiens
ttctttaactttttgttaaatagcatcatactttagcatcatatttatacactcttttatgtgtggattctttttgcttaccacaatgtttctaaagttcatttatgtagctgtgcatatcagtagattgtaattttaagtgtttttaaatttttttttaacttttgcttaatagtgtttcattgtataaatataccaccagtttttaatctgttcattttttgatgggcatttggattatygccagttcttggctgttatgattactgctactatgaaaattcttatgtaaggctttttgtgattacatacttttatttctgttgagaaattacatcggaatggtattcctgggacataggtacagttgtccctcagtatactcagggcgttggtacacagtaatcagcatctatgcaagtcctatattttagttcagagtttggttgaaaatatctgtgtatactagatctatacagttcagacctgtgttattcatgggtcaactgtaattgaatgttgttttactagaaatttccaagcaatttttaaaaatggttctactttttacctc

SEQ ID NO: 344387 - DNA, 602 bp, Homo sapiens
tgcacaattgcatacaaagtataaaagtcatacggacaaaacaggaaaaactggttgaaatgtttaatttttcagaatgaaagaattaaaatactcagtgaatgtttcctggagtagataagtgtcagatcaattcatgttcaaaattacatgaatacatctactttctctccctcacctcaccctcatgtgcatgaagtgtacttcctagctccttgatcttgtgtttggctggccggatttgctctggccaatggacgttaccagaggtgacccaaagagaagcataaatgctgttgaacgattgagtttacttcctggagctcctgagtttcataaygaaaagaacatgcttcagttaatcatagtctaaaagggatgtggaacagtgctgagcccaacctgcatcttggtggcaagcccagctagttaatcctgaattaaccaagtcccagtggactggcaaatgtgtgagactaaatacttctgatgtatgccactgatattttgtggctgttttatagcaaaacctgactgatagggttaaccagtagattaatgctcttcatcacaaaatgtgtttaattcaatatatcaattat

SEQ ID NO: 344388 - DNA, 566 bp, Homo sapiens
atggagtatgctatgcacaattgcatacaaagtataaaagtcatacggacaaaacaggaaaaactggttgaaatgtttaatttttcagaatgaaagaattaaaatactcagtgaatgtttcctggagtagataagtgtcagatcaattcatgttcaaaattacatgaatacatctactttctctccctcacctcaccctcatgtgcatgaagtgtacttcctagctccttgatcttgtgtttggctggccggatttgctctggccaatggacgttaccagaggtgacccaaagagaagcataaatgctgttgaacgattgagtttacttcctggagctcctgagtttcataacgaaaagaacatgcttcagttaatcatagtctaaaagggatgtggaacagtgctgagcccaacctgcatcttggtggcaagcccagctagttaatcctgaattaaccaagtcccagtggacyggcaaatgtgtgagactaaatacttctgatgtatgccactgatattttgtggctgttttatagcaaaacctgactgatagggttaaccagta

SEQ ID NO: 344389 - DNA, 241 bp, Homo sapiens
ggggaaactatttagatttaaccacttattttaccatgaacccttctgtttgtttagtttgagaatcatcttgcaaagctattgtgtttaagaatatccattgggataaggtagtaaaatggaagagtgagcktaggatcaaagtgagaaatgctatagtctagtgcttccacttgataaccttatgacctttgactaatcacctaattcttacagccacagtgaaagctttttgaggtag

SEQ ID NO: 344390 - DNA, 561 bp, Homo sapiens
ccttttgtaggtcatagacgtatttcaaaaaaacacatgatcctggtattctcgttttcctgttgtaaccaggatttwgcctgaactcctgagtagatgaaggggaagggttaggtagtatcatagcatggagtatggcaggtttctggccagtggtcaccatcattcttcagatggcacctgctgaagtgagcagtcaccatcattcttcagatggcacctgctgaagtgagcagtcctgtctggtcctctctctccttcacctattcatgctgacatcacctgaaatatctgtgttcccatctgttttctggtctctggacacatgttgacatcctcagtgtgatctctttgtcttggtctcttggatactgaaggccaaagaatccccctctcagctaatttttgctccctccccaaagatacagaaatgctagccatggttttgaacttcctaggaaagaaggatcctgagcatagctgcctcttggcttctgcattactcctggtctgctttcaggctgtgattttaaggagacttttttaaggaggtggcaacat

SEQ ID NO: 344391 - DNA, 610 bp, Homo sapiens
actgtgaagaggttagaaaatatgggtaagtatatagaatgtgtctttctgattatatctctgcccaagattgctctcctgatcaaacagtcctttgctcccttcttctaacatgtagaacatagtcatggctttcccaaggtaggcaattcaggttccaagattgagccaggaagctcattatgctcaaagtctggaatctccagatactgcacaatactcactgtaagtccatacttctttcactcggtctagacagctatgaacaagaagcctaattgtcacttacagacatctaataaagaacagagaaagaataatatgttggttatggttctccagagaaatagaaccaataagagatcagatagatgatagatagatagatagatagatagatagatagatagatagatagatagatgatagatagatagatagatagatagatagatagatagatagatacatagatagacggataggtactcgtctatttccaaytggtttcagtcttaataactcattgtaagttgaaaatatcataaatcaaaatgcatttaatacacctaatctactaaacattattcaggttaaccttttctaaaca

SEQ ID NO: 344392 - DNA, 445 bp, Homo sapiens
agttgaatggcaggtacatagcataagggcaccacaggagaacaatgaaagcacagttatgctaccatatgatggcataggttcttacttccttcttccttttggagttgagaggagggttttttttttttttgtataatttcagctgaagctaggttgaagtactgtattagtatgtttacacactgtaataaagaactgccagagactgggtaatttataaagaaaagaggtttaattgattcatagttacacatggctggggaggcctcagtacatttataatcatggcagaaagggaaggaggcatgtcttacatggtggcaggcaagagaatgtgtgtgaaggagacactgtcagtgtgtgtgaaggagacactgtcaaacgctagtaaaaccatcaatctcmtgagaactcattcactatcacaagaacagcatggaag

SEQ ID NO: 344393 - DNA, 496 bp, Homo sapiens
ctggctcatttgtgaagaaaagaggtttaattgactcacagttctgcatggctggggaggcctcaggaaacttccaatcatggcagaatgggaagcaggcacctcttacatggcagcaggtcagagagagcatatgaatgaggaactataaaacacctrtaaaaccatcagttctcatgagaactcattcactattgttgagaacagcatgaaggaaaccactcccacgatccactcagctcccaccggttccctccctgaacatgtggggattatgaagattacaattcaagatgatatttgtgtggggacacagagccaaaccatatcaaatacctacatccagtgccatgatatgtagttggcacaagcttgccaaccaaatgagcacctggaaaggggtgtatggggggtaaaaattcagcctacagtctgcctgccaagccatgagcccatcatggaactatctcctcctgaggaaaagagtgctttgttt

SEQ ID NO: 344394 - DNA, 496 bp, Homo sapiens
ctggctcatttgtgaagaaaagaggtttaattgactcacagttctgcatggctggggaggcctcaggaaacttccaatcatggcagaatgggaagcaggcacctcttacatggcagcaggtcagagagagcatatgaatgaggaactataaaacacctgtaaaaccatcagttctcatgagaactcattcactattgttgagaacagcatgaaggaaaccactcccaygatccactcagctcccaccggttccctccctgaacatgtggggattatgaagattacaattcaagatgatatttgtgtggggacacagagccaaaccatatcaaatacctacatccagtgccatgatatgtagttggcacaagcttgccaaccaaatgagcacctggaaaggggtgtatggggggtaaaaattcagcctacagtctgcctgccaagccatgagcccatcatggaactatctcctcctgaggaaaagagtgctttgttt

SEQ ID NO: 344395 - DNA, 414 bp, Homo sapiens
tagaatagccagtactgcatctcttattttatacactatgaagcataagtattgactcacaattaaaaaaaacccaataatctaagataaagtaatgtcctactatggtagactgttagaagataggctaatccctcctgacagttgtgtgttatttttttagaagagwcactactcttataatgacagaactgtgagtaatgtagcttctccataaatgcacatgaatgataacttttgactactttcttaaaacttattccagatttcaaatcctgctcttatccatgtctcacggttttttgctgatagattcaggcctaatgttttgcaaagtaacaatgcacatctcaaaatagatcagccttatcttccttatcaaaatacatctgatatcagttagaaggtcagcat

SEQ ID NO: 344396 - DNA, 572 bp, Homo sapiens
tcagtccaccaagttaaatgctaatctcttccagaaacatcctcacagaagtgttgtttaatgagatatctggccctgccatgacccagtcaatttgacatatgaatttaccctgacacatggcaaaagagaatttgaagtggtgattaaggttatggaccrttagatggagaaataatctgagatcattcagatagttcaatctaatcatatgagctcataaaagcagagggtctttccaggttgaagtaaagagagagacttgacaaagaagacaggtactaatctgctgttgctaactctgaaaagggaggaagggagccacgagactgaaatgaaggtggtcttcagagtcttgaacagcagtctgcgaacagtgcgaggaaacagggcttcagttccacaacactgaggagccgaattgtgccaactttctcaatgagcaaggaaatagattttgccctggaacatccagacaggttacagctctactgataccttgattttagcccagtgaattctgtgttcaaattctgacctgaagaactatatcataataagtttgtgttggt

SEQ ID NO: 344397 - DNA, 616 bp, Homo sapiens
gttttctctcagtgatctagagaaattaggaagtagctagagtgatgagagatcaagagagatactacagaatatttggtaacatcctgcattgcataatacagatgtttctgcaaagaaagctggatgctctgggaggaaggagtataatcacagaagtgaggaatatgagtacccaagagcttatgggagccaatgcacgaaccagaatttggtcctccatgggaggggggacagtaaatctattgcaatgggaaaggagttaggaataggtagaaaagagggaacaaaaggcttagatacggatagatcggtgaaygtgaagatgtgcaagttagagaattcccatatggttttcctagtgagatacaatgactttcagaagacagcttggaagttttgatgagactatgaaaaattgaggatgaactgattctaatccagagctatttcagtaaataaccctgggaaaagagtgagaataacgagaggttcccatttgacctaggaagaaaactaagatgtaaacttgatgaggttaatcttaatcttctaagaaaaagtagataatcagttcttatagattgcttcatgagcaaggtctcttatgtgctgt

SEQ ID NO: 344398 - DNA, 616 bp, Homo sapiens
gttttctctcagtgatctagagaaattaggaagtagctagagtgatgagagatcaagagagatactacagaatatttggtaacatcctgcattgcataatacagatgtttctgcaaagaaagctggatgctctgggaggaaggagtataatcacagaagtgaggaatatgagtacccaagagcttatgggagccaatgcacgaaccagaatttggtcctccatgggaggggggacagtaaatctattgcaatgggaaaggagttaggaataggtagaaaagagggaacaaaaggcttagatacggatagatcggtgaacgtgaagatgtgcaagttagagaattcccatatggttttcctagtgagatacaatgactttcagaagacagcytggaagttttgatgagactatgaaaaattgaggatgaactgattctaatccagagctatttcagtaaataaccctgggaaaagagtgagaataacgagaggttcccatttgacctaggaagaaaactaagatgtaaacttgatgaggttaatcttaatcttctaagaaaaagtagataatcagttcttatagattgcttcatgagcaaggtctcttatgtgctgt

SEQ ID NO: 344399 - DNA, 616 bp, Homo sapiens
gttttctctcagtgatctagagaaattaggaagtagctagagtgatgagagatcaagagagatactacagaatatttggtaacatcctgcattgcataatacagatgtttctgcaaagaaagctggatgctctgggaggaaggagtataatcacagaagtgaggaatatgagtacccaagagcttatgggagccaatgcacgaaccagaatttggtcctccatgggaggggggacagtaaatctattgcaatgggaaaggagttaggaataggtagaaaagagggaacaaaaggcttagatacggatagatcggtgaacgtgaagatgtgcaagttagagaattcccatatggttttcctagtgagatacaatgactttcagaagacagcttggaagttttgatgagactatgaaaaattgaggatgaactgattctaatccagagctatttcagtaaataaccctgggaaaagagtgagaataaygagaggttcccatttgacctaggaagaaaactaagatgtaaacttgatgaggttaatcttaatcttctaagaaaaagtagataatcagttcttatagattgcttcatgagcaaggtctcttatgtgctgt

SEQ ID NO: 344400 - DNA, 514 bp, Homo sapiens
tcatgcaactcagtaggaaaaaatcaagcaagccagcttttaaaatgggcaaaagacttgaatagtcagttcactaaagaagaatatgagaatatggtaagcacatagcagaatatttaacatcattattcactgaggaaatacaaatttaaatcacaatgggatatcatgaaaacctgctagaatggctaraatataaaagacttagaataccacgtgtttgtttgggctgtggaacattgttaacaatcaacatattttactgatgaaaatctaaaatggtacatccactttggaaaacagtataacagtgtcttataaaactaaacataggtataccataaaacctaaaaattggacatatacacgttatgtaagaaaaatgaaaatagatagccatacaaaaacatgtacatgaatgctgatagccctttattcacaaagggctctgtattagtcccttctcacactactataaagatagacctgagactgggtaatttgtgaagaaaag

SEQ ID NO: 344401 - DNA, 514 bp, Homo sapiens
tcatgcaactcagtaggaaaaaatcaagcaagccagcttttaaaatgggcaaaagacttgaatagtcagttcactaaagaagaatatgagaatatggtaagcacatagcagaatatttaacatcattattcactgaggaaatacaaatttaaatcacaatgggatatcatgaaaacctgctagaatggctagaatataaaagacttagaataccacgtgtttgtttgggctgtggaacattgttaacaatcaacatattttactgatgaaaatctaaaatggtacatccactttggaaaacagtataacagtgtcttataaaactaaacataggtataccataaaacctaaaaattggacatatacacgttatgtaagaaaaatgaaaatagatagccatacaaaaacatgyacatgaatgctgatagccctttattcacaaagggctctgtattagtcccttctcacactactataaagatagacctgagactgggtaatttgtgaagaaaag

SEQ ID NO: 344402 - DNA, 527 bp, Homo sapiens
acattgccaaacctctccttagcactgatttcactttatcttcaagcatgtttgagtttgtgcctcctccagtgtactgaaagttctatgaagtgacagacatggtctcattcagttcagtttctcccaagtgttatgcatatagaaaactccctaaaacactactgctcttgaaattgagcaaatagaatatgaagtttatgttatactaaagaagaaaactaatgtttaccaagcaaatactgtgtctggcacttcaaagtgtattctttayctctaagcaggagtttctattcctcatatgtatttgggaaatgtcgatgattcttttggcacttaagttcacttgagttaatagttatccttcttgaattccatcctctcatttcttttttctccattaacactttctttactaagatctggtcgagagggaacagtatgatgtcatgccattgttagaaaggtccctaaatatcatttattaccctggcgtgtgggctttctggggcttctcaacagacaag

SEQ ID NO: 344403 - DNA, 613 bp, Homo sapiens
tattttacctaaaataattgttgatctagtatacccttaagttttctacagaaacaagatagaccaaaggacactcgtagctccatgaagacatgtgagattttgcatccctttatgacatggaatgccaggtgtaggttaatggatgactctatgaaaaaaaaaaaagaggaggagaaaaacaggaraatggaaagccaactgtttcattgcctgatggcacaaaataataacacattttctgttttatgatggaagggtcatgtggcataagtactcaatgttcctgccaaaagcattgatccagatggaaatattaattatttgaccagatgtgtgacaatgtcactctgaaaggtggtttcagtatgctgtactgacatatatcatcacagaaattgcattgctaatagaatgtatctgaattagtggctctccagtgggacctcaatcattttgagccataaagaatgtatgattttagagctagaaaagactttagatcctatatagtctgaaagtctcattttatataagaagaaggtaaggctcagtgaggtaaagtgtatcacatgggcctgttaagttatgtatggcaaaattgagaattgat

SEQ ID NO: 344404 - DNA, 608 bp, Homo sapiens
agactaatattaagaagagctgagtgattaaaaaatagacagttaacctatctaagctaattttccaataatgtaggcttatttagatattaagtctgattattatgaaagttcatagcatgtataaaatacaaatagttttggtggcaatgtcayatggttttagcacagtttgtatcttgtttattttaaaataactttttaaattataattttattacatgacagaaatataacaaaatacaaatgtgtaaaaaattacataagaatctcatactcactaattataattatttatatcatgatttataatatttcatgattttaacatgtatgtttacatatatgcattagcaaaattgatcgcttaatggtagttcgttttattaagggaaaggttgcaacatcatttttaatgacttctgagtaatcagtctatgaaatgaacaaagcatgattaatgtaccaattatgccttgaaggttagttcagacacttccacttttccatattatgaataaatctgagattaaactatggtataaaatctttggaaatcaattcaattattttaggaagctaattctttgtgaggttaaattgctggg

SEQ ID NO: 344405 - DNA, 608 bp, Homo sapiens
agactaatattaagaagagctgagtgattaaaaaatagacagttaacctatctaagctaattttccaataatgtaggcttatttagatattaagtctgattattatgaaagttcatagcatgtataaaatacaaatagttttggtggcaatgtcatatggttttagcacagtttgtatcttgtttattttaaaataactttttaaattataattttattacatgacagaaatataacaaaatacaaatgtgtaaaaaattacataagaatctcatactcactaattataattatttatatcatgatttataatatttcatgattttaacatgtatgtttacatatatgcattagcaaaattgatcgcttaatggtagttcgttttattaagggaaaggttgcaacatcatttttaatgacttctgagtaatcartctatgaaatgaacaaagcatgattaatgtaccaattatgccttgaaggttagttcagacacttccacttttccatattatgaataaatctgagattaaactatggtataaaatctttggaaatcaattcaattattttaggaagctaattctttgtgaggttaaattgctggg

SEQ ID NO: 344406 - DNA, 608 bp, Homo sapiens
agactaatattaagaagagctgagtgattaaaaaatagacagttaacctatctaagctaattttccaataatgtaggcttatttagatattaagtctgattattatgaaagttcatagcatgtataaaatacaaatagttttggtggcaatgtcatatggttttagcacagtttgtatcttgtttattttaaaataactttttaaattataattttattacatgacagaaatataacaaaatacaaatgtgtaaaaaattacataagaatctcatactcactaattataattatttatatcatgatttataatatttcatgattttaacatgtatgtttacatatatgcattagcaaaattgatcgcttaatggtagttcgttttattaagggaaaggttgcaacatcatttttaatgacttctgagtaatcagtctatgaaatgaacaaagcatgattaatgtaccaattatgccttgaaggttagttcagacacttccacttttccatattatgaataaatctgagattaaactatggtataaaatctttggaaatcaattcaattattttaggaagctarttctttgtgaggttaaattgctggg

SEQ ID NO: 344407 - DNA, 562 bp, Homo sapiens
agatagtccgtgactgacatcttctcctgatttaggtctcagtttacctatccataccccagaggggttttccctgagtaccctaaccaagggagcctgtgctccattccagtggctctgtgtcagattatcctgttttgttgtatcaataccacctactgacactgacattatcttgtatttctgtttcccatttgtaaacaagtgcctgggacattgcccttgttctctgttctgcttcaaccctagcacmtaggttgttcctgccatatcataatcagtgacaattgttgaatgatagaatgaacttttaaaaacatattagaaaaatcacttttaatgcatggttttttctgtaatgaattcattccatttttgttacttctgtaattgatgcctattcataaacttcagtccattattctactaagtatccatcttttcttctttttacttttaagaattcactggcatacaagtaatactcttttcatgacatttattttaaatatttcccaattaatcatttgcctttaactttttataatgatttatttggtac

SEQ ID NO: 344408 - DNA, 504 bp, Homo sapiens
tacacagccacctggaagaaaatactcacacagaaatttccaagaagaaactaaaaccaatgaaaaattgatgctttccaatgaggtaggaattctaatttaatgtgtatacctagatctgattctcttggcatcacatgctaatttggttatatatttgttcaatcaatttagagacacggataaataaaaagtcagttcatttaatttgtaaaagatcaaagcgatagatccttarcagcaacataacaattctaccttgaactagttacagtttcatgaatgagccagatccacatttttatttgtttgtttttaagatacaaagcagagaagtagaaatatcttctctgggaagactcaggtaacacccaagagacccgtatcatgagttggtatctaccatgtttggagaaagaataaatgtttaacctgagtgtctagtttttcattcccctataagcgtagactaagatgaagtttcaagtataagttattgatgtg

SEQ ID NO: 344409 - DNA, 589 bp, Homo sapiens
attcagaggattccgcaggaccatgagggcaagtggttctaaattaggctgtgagctcttgaaggacgtcactttcataacatttgcattctgttttgaaggacaagtccatttaactaggtgaaggagtgggggaatctatttcaagaagcatgagttgataaagtttaatgtgcacagagttcatgacatataaaagcaaaggcaagtattttttatgactcgagaaactggtagagagaagcagctggagacgaggctggagatttagggaaaggacatataatgaagaatttgtagaccagtcaccccggcatgtgcctgtaatcccagctactcaggaggctgagacccgagggttaggggctcagcagaccagcctgtgcaactgcagtaagactttgtctcacacacaaagaaagaacacgtgtgttgatcctatatgtgtgaaktgtgtcctatagatacagataaactgatttttaaagtggtgaatgatataatcaaagtttgatttggaaaatattatttcttcagcaggcaaacaagttaccaagtttgtttttattgagatataatgcacgatatc

SEQ ID NO: 344410 - DNA, 627 bp, Homo sapiens
tattgctaccaaagcaaacaaaaataatttatacttagtaaaagtagtttttcttgcttttattttcttgttagaagaaacagattcctttaaattaaaaaaaagcaagatttaccttcatggaaaaataacttttattctaatacaaactaaaaggttggagcatcagtcattttgggtgtaagtgamggtctacaattacagctgtcaagaattgttattaacgtcatgttatgtcctggtgcaattggtgtagacagcaaaatgaaaaggtggcagtaatcttcacttttaagtagctcaatcacatttaccctcttattgtctgtattatttatatgtagatcagatgtaatgattctccacaaccccatgtgggcagataggaagcaccaagtgaaaagcttgtcctggtattattgcagtcaattctgatacccttaaatgatggtagaattcctgaggaaattatttgagttggaaagaatagttccactgaactactataagaatatattcaatgcagggattttttttcctggagatagcaaagtacttctcatttttcagacccaaaaatgcagcaggtggaattaggcaattcactaaatgcaacacacgtagcac

SEQ ID NO: 344411 - DNA, 627 bp, Homo sapiens
tattgctaccaaagcaaacaaaaataatttatacttagtaaaagtagtttttcttgcttttattttcttgttagaagaaacagattcctttaaattaaaaaaaagcaagatttaccttcatggaaaaataacttttattctaatacaaactaaaaggttggagcatcagtcattttgggtgtaagtgaaggtctacaattacagctgtcaagaattgttattaacgtcatgttatgtcctggtgcaattggtgtagacagcaaaatgaaaaggtggcagtaatcttcacttttaagtagctcaatcacatttaccctcktattgtctgtattatttatatgtagatcagatgtaatgattctccacaaccccatgtgggcagataggaagcaccaagtgaaaagcttgtcctggtattattgcagtcaattctgatacccttaaatgatggtagaattcctgaggaaattatttgagttggaaagaatagttccactgaactactataagaatatattcaatgcagggattttttttcctggagatagcaaagtacttctcatttttcagacccaaaaatgcagcaggtggaattaggcaattcactaaatgcaacacacgtagcac

SEQ ID NO: 344412 - DNA, 567 bp, Homo sapiens
gcaggactacgggctaaaatgaaaaactcaaaggcaaggcaagatgtgactttcctatatgcatcagttactgcaggacaaaaaccagtacatactaagtaagtaggcacccaaaatgctgaggaacggcacagaaaggagatataaaaccagcaggtggggatagataagatcgcttttcagcttcaatgttcttttgagtctatgcaacagggacatttgagcctcttcttaaaccagagatggatgtggattagactaggacagtggaagcagagaaagaagtactgctactcaccactcctagcaggactacactcagattggagcagagacaagtggcaggtgctttcctattgtatcttgatgtgctctcttgggaaaggccatcaagtctgattgttccattaatatctgsctcctccactaggatatcatctcctcaactgcagagactgatctacttgtattcaccaaattatgcctctaatactagcatggttcctagtgtatagcagtaggtgctcaataaatattttttcaatgcaagaataaactaagggactt

SEQ ID NO: 344413 - DNA, 576 bp, Homo sapiens
tgatgtgatcaggttagaaaaacacctcatgctaatggcgccagtgccattagcaacttatggcctagatttgatgaagaaataagcttctctcattttaacagtggtatcatacagagagttacttatatgcatgctctggataaaagactcagcacaattccagttttaaaatagataattaaaaatctgtatatktcaaacaagatttccagatagctgttggaaggggggaaaacattgttaagataggtgtacacatatagcaacctcagatataaattcatttaaattcttcattgatagcaaaccaaaaagaattatttctaaatagaactttgaagttactttaattttaatgtaataacaacgtcataacatcataaatcttagttgagaagcagctgttggttttttcaatccattagttatggtatttcaagcttccataaaagtactgaatctagatctttaaagatgaatttttctagctcatatcttaaggttactaaagcatacatgattactgcgggaacaaatgttttgtgtgtttatttcttttttattgctaatggt

SEQ ID NO: 344414 - DNA, 576 bp, Homo sapiens
tgatgtgatcaggttagaaaaacacctcatgctaatggcgccagtgccattagcaacttatggcctagatttgatgaagaaataagcttctctcattttaacagtggtatcatacagagagttacttatatgcatgctctggataaaagactcagcacaattccagttttaaaatagataattaaaaatctgtatatgtcaaacaagatttccagatagctgttggaaggggggaaaacattgttaagataggtgtacacatatagcaacctcaratataaattcatttaaattcttcattgatagcaaaccaaaaagaattatttctaaatagaactttgaagttactttaattttaatgtaataacaacgtcataacatcataaatcttagttgagaagcagctgttggttttttcaatccattagttatggtatttcaagcttccataaaagtactgaatctagatctttaaagatgaatttttctagctcatatcttaaggttactaaagcatacatgattactgcgggaacaaatgttttgtgtgtttatttcttttttattgctaatggt

SEQ ID NO: 344415 - DNA, 550 bp, Homo sapiens
ttccaaattaagcttgagcctcaataaaaatatttttaaatgcccaacaatattcagttattatttgccatgtttctgttttcatgggaagatataatatgtttaataaaaatacatatctaaaaggagaatccgattwgtaaaattataaattctagttttcagtcaaaaccaccctgagcgtgaacttatcagaatcttgtctgagtaactacaacccctcccccaaccttaaaaaaacacaccacagccccactctccaccggtgtggccaaaccaagggaaatgagaagcaggaatgtagctcacaggtcagagccaaatacgaagagtaaaaatagtaccttgagctttcagaaccacagattttcaaagtgagccagagggcagagcagcagctacattttcaaacagaagtaactacatctttctaatcaactgccgtgttatggaacataaactgcaggaaatgatggcttaatgtccttttatgtatcagataagcaggaggaagtatcagtggtgtgctttacttagtgagagaagctta

SEQ ID NO: 344416 - DNA, 550 bp, Homo sapiens
ttccaaattaagcttgagcctcaataaaaatatttttaaatgcccaacaatattcagttattatttgccatgtttctgttttcatgggaagatataatatgtttaataaaaatacatatctaaaaggagaatccgatttgtaaaattataaattctagttttcagtcaaaaccaccytgagcgtgaacttatcagaatcttgtctgagtaactacaacccctcccccaaccttaaaaaaacacaccacagccccactctccaccggtgtggccaaaccaagggaaatgagaagcaggaatgtagctcacaggtcagagccaaatacgaagagtaaaaatagtaccttgagctttcagaaccacagattttcaaagtgagccagagggcagagcagcagctacattttcaaacagaagtaactacatctttctaatcaactgccgtgttatggaacataaactgcaggaaatgatggcttaatgtccttttatgtatcagataagcaggaggaagtatcagtggtgtgctttacttagtgagagaagctta

SEQ ID NO: 344417 - DNA, 550 bp, Homo sapiens
ttccaaattaagcttgagcctcaataaaaatatttttaaatgcccaacaatattcagttattatttgccatgtttctgttttcatgggaagatataatatgtttaataaaaatacatatctaaaaggagaatccgatttgtaaaattataaattctagttttcagtcaaaaccaccctgagcgtgaacttatcagaatcttgtctgagtaactacaacccctcccccaaccttaaaaaaacacaccacagccccactctccaccggtgtggccaaaccaagggaaatgagaagcaggaaygtagctcacaggtcagagccaaatacgaagagtaaaaatagtaccttgagctttcagaaccacagattttcaaagtgagccagagggcagagcagcagctacattttcaaacagaagtaactacatctttctaatcaactgccgtgttatggaacataaactgcaggaaatgatggcttaatgtccttttatgtatcagataagcaggaggaagtatcagtggtgtgctttacttagtgagagaagctta

SEQ ID NO: 344418 - DNA, 412 bp, Homo sapiens
ctatggcagaaacaacggaagctatgacaattgttacatttcraactactttttgtgtgtttctttggccaccccaacttttgcttcatctttgctttcaggctgaccacccaaaaatcagaccatgttcataaaatggatttggcctcagtttcctctgcttgctttcttcaatgaaatcatgtgcctggaaatggaaggcataggacacgatacattatgaccaatcagtcatgttttacagttttgggttcaattgcagctgtcctgtaaatacaggctcacctcattctgtttttgaaacatattgtatatttatctctgattcaaactacattcccttaacaatgataaatacgtttggggtgatcaataaatatcaaccatagcttagcttgttttctgtgaacac

SEQ ID NO: 344419 - DNA, 533 bp, Homo sapiens
tttcactagtgtaaacagaattttattctagaaaaaacattttaagggattttgaaattatattaattttaaaacttcagttctttatttaaactagggctataagtgtcaggctaaaaattgggtaaagtggtcaaatttttataaaatttggaggttttacaatataaataaaaaagaaaaataccatttataagccacaagaagagttttcttctttgagtagatttacacgacataatttcatcatttattttacttaataatatagtataaataatatagttattttacttaataacatagtaaaaaattcatttcaacagtcatgattaaacatctacattccaaactccagcttctatttttgctgaggtagaaatatccatcatctttcmcactgagttcttagatttggagtcagaaattatttccttgatgctttgaaaagggagaaaggattctaacactattctgagtgccacttgtctatagaacctgctatagtatggataaatcccagtggagcttat

SEQ ID NO: 344420 - DNA, 533 bp, Homo sapiens
tttcactagtgtaaacagaattttattctagaaaaaacattttaagggattttgaaattatattaattttaaaacttcagttctttatttaaactagggctataagtgtcaggctaaaaattgggtaaagtggtcaaatttttataaaatttggaggttttacaatataaataaaaaagaaaaataccatttataagccacaagaagagttttcttctttgagtagatttacacgacataatttcatcatttattttacttaataatatagtataaataatatagttattttacttaataacatagtaaaaaattcatttcaacagtcatgattaaacatctacattccaaactccagcttctatttttgctgaggtagaaatatccatcatctttcacmctgagttcttagatttggagtcagaaattatttccttgatgctttgaaaagggagaaaggattctaacactattctgagtgccacttgtctatagaacctgctatagtatggataaatcccagtggagcttat

SEQ ID NO: 344421 - DNA, 419 bp, Homo sapiens
tggtctaccacccaggagccacgtttaaagttattgttttatttccctcattctcttcttattgtagaatacwccctaattatcccaaagtacttattttattatggtaaaaaatgggtcagaatacatacctattagaatggctaaaatccaaagcactgacaaagccaaatgctagtgaggatgtgaagcaccaggaactctcactcactgttggtgggaacgcaaaacggcagagccactttggaagacagttcggcagtttcttacaaaactgaacatactcttgtcatacaatccaggaattagtttccttggcatttacccaaatgagctgaaaacttgtgtccacacaaaacctgcatgcagatgtttatagcagctttattcataatggcgaaaacttggaagcaaacaag

SEQ ID NO: 344422 - DNA, 608 bp, Homo sapiens
tctaataatttatgtgctcaatgaactgagtcatcatcacaggaaagaaatagaatgtaaggataatatttcaagtgcagccactgctggagtgaagatggagtttagaatgctggcaatggaaatcawtgtaaatttcaacagagcaaagcagatattgttgaacatcacaatagcttctgagacttctgagtgccagccacactcatgggacacagtttattaaggttcctattaccagacaccaaaaaactggtatggataagaaacccaagacttcacgttaaaggaattttagttcatacattctgagtgccaaaacaatgccatgacatttaaacttaatttctctgaatctcagttttctctttgtaaaatgaagatatacattttatagagtttttttaaattgaatgagacagcaccaccagttgagcacaaactcacttatttattgagccctctctatgtgcaccaccatcagcacatagaaagggctcaataaacaagtacagtgatacattgtttaacagtgaggatacattctgagaaatgagtcttaggtgattctgctgtcatgtgaacatcatagagtgcacttacacaca

SEQ ID NO: 344423 - DNA, 419 bp, Homo sapiens
tggtctaccacccaggagccacgtttaaagttattgttttatttccctcattctcttcttattgtagaatactccctaattatcccaaagtacttattttattatggtaaaaaatgggtcagaatacatacctattagaatggctaaaatccaaagcactgacaaagccaaatgctagtgaggatgtgaagcaccaggaactctcactcactgttggtgggaacgcaaaacggcagagccactttggaagacagttcggcagtttcttrcaaaactgaacatactcttgtcatacaatccaggaattagtttccttggcatttacccaaatgagctgaaaacttgtgtccacacaaaacctgcatgcagatgtttatagcagctttattcataatggcgaaaacttggaagcaaacaag

SEQ ID NO: 344424 - DNA, 467 bp, Homo sapiens
tccttaagctcttttggacttgacctatatagcatttaaagatttaaattcctggcagtgtgctgtggctcacatgtgtaatcccagcactttgggagactgagaaaggaggattgcttgaggccaggagtttgagaccagcctgggcaacatagggaaaccttgtctccaccaaaaaaaaaaaaaaaaaaaaaagaaaakaaaaaagattcaaattcctaagcccactctttatctaccaaataaaaactggggggcagtgagaggatggaaggagctggaagttacactctttatgttctacttgcctctccgcattcacgcttctgtctgtacttggtacccaaggggctggtctgtatggacatgactgagcaccttgccttctggcttccaggtgtgttcagcaaagtgggagacagagcaggagacaggagggagtggggagagtgagtctggatatttct

SEQ ID NO: 344425 - DNA, 592 bp, Homo sapiens
ataactgagaatgtgcttgataagattctaatagagaaccctaagcaatggctaactttcaaataggatgggtgcttatgaattcacaccttgagtataaaacttgcagagaacattcagcgatttccagtccactgtgagatattaatcagttacctakgactaatgacagatcatttccttctgatgagaactaggaggggttgccttctctgagaccagctattacaactgtgcctctagggagttactcagcctaattgagccctattattttaacttaacaaaataaatacagaagtacctatttctaaacaatgatttaaagtctatatcccctaagcggagttgttgtttttctccctaatctatcagctgcactacttgagaaaatttaaagtgtttctagttaaattatttccttcttgagcgatctaatgtttcttgtaatattgatgatcctactaattatcctgctgttctttaattaatgcttaatgaataatatggcactgtaaaatagcttctgcaacaagggaagttaaattttgagacttttttccccaaaggatactgactgtaatacaattac

SEQ ID NO: 344426 - DNA, 592 bp, Homo sapiens
ataactgagaatgtgcttgataagattctaatagagaaccctaagcaatggctaactttcaaataggatgggtgcttatgaattcacaccttgagtataaaacttgcagagaacattcagcgatttccagtccactgtgagatattaatcagttacctatgactaatgacagatcatttccttctgatgagaactaggagggkttgccttctctgagaccagctattacaactgtgcctctagggagttactcagcctaattgagccctattattttaacttaacaaaataaatacagaagtacctatttctaaacaatgatttaaagtctatatcccctaagcggagttgttgtttttctccctaatctatcagctgcactacttgagaaaatttaaagtgtttctagttaaattatttccttcttgagcgatctaatgtttcttgtaatattgatgatcctactaattatcctgctgttctttaattaatgcttaatgaataatatggcactgtaaaatagcttctgcaacaagggaagttaaattttgagacttttttccccaaaggatactgactgtaatacaattac

SEQ ID NO: 344427 - DNA, 574 bp, Homo sapiens
aaaggaatattggttgtgtcttattttgcagctaattttggcacatttctctctacctctagttttgtgttccagtaataacactggcaaaggtctcagaatgcagatgccggtggctactacatgcctgctctgagacagtagtttatgttgtgttctgttgaaatgctaccatgagctgctgagtgttgccgtagaatttctgtacctgattagcagattgcataagtttcctttgcctggcttgagagttgtgctttgctaatgaattgcatgaacacgtaatgtggttcttaatggctcacacctgaccttgtagttgcacctgtacckagtgattcctgtggttctgttcacattcaaaatccttaaccagccttatttaaagatgacttcctgattggtagggggatagacagaaaggcaaggagagaaaaagttggaaaagacaggatttgaaattacccagggacttctttaaaaggacaagctattattactcacattatttattatagtaatagaagacaacctaattttgtttggacatcaggcaaattcaatattttacaag

SEQ ID NO: 344428 - DNA, 578 bp, Homo sapiens
ttttgcccaggctggagtacagtggcatgatctcagctcactgcaacctccgcctcccaagttcaagtaattctcctgccccagcctctccagtagctgggattacaggcaagtgccaccatgcccagttaattttgtatttttagtaaaaatgggttttcaccatgttggccaggctggtctcgaactcgtgacctcaggtgatctgcccacatcagcctcccaaggtgctgggttagaggcctgagccaccacgcttggcccatttttgccttttatattgaaggaacagcaatccacttggaaaagtagcagcagtttagccgtgtaagcactctcctggtatgtggctgtattttcttttaaggtaggcatccagagtttattttttggtccaaaagagtttattaaatgaattaacgttacagttacaaatacacttcttgcaacatttctccccatcatttctgcaagctcctttgagagatgatcaaggtgggargactgagtgacacagctgagggcagtagcctctagctgcaaaatttcagtgacaggggacagaggcacgggcatgg

SEQ ID NO: 344429 - DNA, 609 bp, Homo sapiens
gattgcaaaattcagtttcagaaagaaagtggatgattctctaagaatgggttctttaaaatatgctcagcagatctcaggagatctcaggagaagggatcctcagagtatttgttgaagtcaaacttttaatctctactgggtacaaggggtatggaagattttgctccattacaggtacacttttaataggcaagaattctagtttttgagaatccaagacackttcatgagtatgaaaaaagttatgagatatagcagggactcctcttagaggtagactgggcccagccaagcatggaaataaaggaaaatcttgatttccttcaagaaagatttgaggcacctgtgtagctttgaaaagtaaataagaagcctgataagcaagaaggtaataaccacttaaaacaattgccaaggaagttagagacacaaaatgtttgtttccttgtagaaaccaaagataacatcgtcacatatgttcctgaattttcagagacctgggccccctccaaaaggaaaatgtcatctgctgacccaatgttataaatttcttcctgagggagctggaggaagtcatatccataagccagaacttaacattctttc

SEQ ID NO: 344430 - DNA, 590 bp, Homo sapiens
tgttgaacgtatcaataaataagtgggcaaaatatgtatatctctgcccctgaggaactttaacttcaagacatataagatattaaagcaaagagmgatcaaatttctcttagggaatatcaccgttagtaggaaatccccactaaagtctttggggtaatgagagcacttaagctattcgttaaaaaaaaaaacactttcttggtatgattcttgtaactacttctatatgtttgaaattgtttaaagaagaagagaaaaaaaggtcttcaaaagcctttgatatgtccaaaaaaggcaggtagaatgaaaattcctcagtgttttacattacccttccttctacttaatttacacctgtataatgtatgagtcattgttctcccacgtcagttacagaatgtagagctgttgtaatcctgatactttttattcatagtcctgatcattatctcttaatatctgatttttgtcctcattccatgtgtcatttattattgatggtcttttaacagctgtctcagtgttcagacaatccatgaatacaaatttgctctatgctgtgtttcatttgttcagtttttaaagta

SEQ ID NO: 344431 - DNA, 590 bp, Homo sapiens
tgttgaacgtatcaataaataagtgggcaaaatatgtatatctctgcccctgaggaactttaacttcaagacatataagatattaaagcaaagagagatcaaatttctcttagggaatrtcaccgttagtaggaaatccccactaaagtctttggggtaatgagagcacttaagctattcgttaaaaaaaaaaacactttcttggtatgattcttgtaactacttctatatgtttgaaattgtttaaagaagaagagaaaaaaaggtcttcaaaagcctttgatatgtccaaaaaaggcaggtagaatgaaaattcctcagtgttttacattacccttccttctacttaatttacacctgtataatgtatgagtcattgttctcccacgtcagttacagaatgtagagctgttgtaatcctgatactttttattcatagtcctgatcattatctcttaatatctgatttttgtcctcattccatgtgtcatttattattgatggtcttttaacagctgtctcagtgttcagacaatccatgaatacaaatttgctctatgctgtgtttcatttgttcagtttttaaagta

SEQ ID NO: 344432 - DNA, 590 bp, Homo sapiens
tgttgaacgtatcaataaataagtgggcaaaatatgtatatctctgcccctgaggaactttaacttcaagacatataagatattaaagcaaagagagatcaaatttctcttagggaatatcacygttagtaggaaatccccactaaagtctttggggtaatgagagcacttaagctattcgttaaaaaaaaaaacactttcttggtatgattcttgtaactacttctatatgtttgaaattgtttaaagaagaagagaaaaaaaggtcttcaaaagcctttgatatgtccaaaaaaggcaggtagaatgaaaattcctcagtgttttacattacccttccttctacttaatttacacctgtataatgtatgagtcattgttctcccacgtcagttacagaatgtagagctgttgtaatcctgatactttttattcatagtcctgatcattatctcttaatatctgatttttgtcctcattccatgtgtcatttattattgatggtcttttaacagctgtctcagtgttcagacaatccatgaatacaaatttgctctatgctgtgtttcatttgttcagtttttaaagta

SEQ ID NO: 344433 - DNA, 609 bp, Homo sapiens
gattgcaaaattcagtttcagaaagaaagtggatgattctctaagaatgggttctttaaaatatgctcagcagatctcaggagatctcaggagaagggatcctcagagtatttgttgaagtcaaacttttaatctctactgggtacaaggggtatggaagattttgctccattacaggtacacttttaataggcaagaattctagtttttgagaatccaagacactttcatgagtatgaaaaaagttatgagatatagcagggactcctcttagaggtagactgggcccagccaagcatggaaataaaggaaaatcttgatttccttcaagaaagatttgaggcacctgtgtagctttgaaaagtaaataagaagcctgataagcaagaaggtaataaccacttaaaacaattgccaaggaagttagagacacaaaatgtttgtttccttgtagaaaccaaagataacatcgtcacatatgttcctgaattttcagagacctgggccccctccaaaaggaaaatgycatctgctgacccaatgttataaatttcttcctgagggagctggaggaagtcatatccataagccagaacttaacattctttc

SEQ ID NO: 344434 - DNA, 590 bp, Homo sapiens
tgttgaacgtatcaataaataagtgggcaaaatatgtatatctctgcccctgaggaactttaacttcaagacatataagatattaaagcaaagagagatcaaatttctcttagggaatatcaccgttagtaggaaatccccactaaagtctttggggtaatgagagcacttaagctattcgttaaaaaaaaaaacactttcttggtatgattcttgtaactacttctatatgtttgaaattgtttaaagaagaagagaaaaaaaggtcttcaaaagcctttgatatgtccaaaaaaggcaggtagaatgaaaattcctcagtgttttacattacccttccttctacttaatttacacctgtataatgtatgagtcattgttctcccacgtcagttacagaatgtagagctgttgtaatcctgatactttttattcatagtccygatcattatctcttaatatctgatttttgtcctcattccatgtgtcatttattattgatggtcttttaacagctgtctcagtgttcagacaatccatgaatacaaatttgctctatgctgtgtttcatttgttcagtttttaaagta

SEQ ID NO: 344435 - DNA, 487 bp, Homo sapiens
tcgcctcagctaaaccttgtagggccacaactgtggccacttggttttacagtccattgccagcatcaactgtgaaaggatccataactacaatgagccaggatgttatgtccctaggagaagaagcagccttaaaccattatttacactaaattgggatataaatattccagatcactcacatcttggtggctttttttttctsttgtagaattaagcttcatttgctttcattgtttacataaacgcatgtcatttatcggttatttattctttccttatctcattttggagttttctctgcctcccttatactacttgcactcaaagctttctcagtgtctgtttctgggagaaccctaaataagatacatatttggctaggtgatctcaatggccatatccagtactctttgtaaatggcctaaagatctcaagataatatgtctgataaccacaggccataagtttttatcagtctgtctga

SEQ ID NO: 344436 - DNA, 487 bp, Homo sapiens
tcgcctcagctaaaccttgtagggccacaactgtggccacttggttttacagtccattgccagcatcaactgtgaaaggatccataactacaatgagccaggatgttatgtccctaggagaagaagcagccttaaaccattatttacactaaattgggatataaatattccagatcactcacatcttggtggctttttttttctgttgtagaattaagcttcatttgctttcattgtttacataaacgcatgtcatttatyggttatttattctttccttatctcattttggagttttctctgcctcccttatactacttgcactcaaagctttctcagtgtctgtttctgggagaaccctaaataagatacatatttggctaggtgatctcaatggccatatccagtactctttgtaaatggcctaaagatctcaagataatatgtctgataaccacaggccataagtttttatcagtctgtctga

SEQ ID NO: 344437 - DNA, 467 bp, Homo sapiens
ggagggggtgggatagggagaraataaggtatggagaagtaaaacaaaaaggaagagatggggtgctctgaggtagaatcaaggcatcccaaagctgcataaatcccctcctcaattccatgggttctagcattgttgtatattagctaaattaattagacactgagagattaattatcaaaggaacaatgaacagcaatgaccagaccatatagaaatatagaacactgacctacaacctgcagcaggaaacaacccaaaaagccaaaccacaacctttgaagaaatctaccccaaatgaacaaaacttagtaactgtcaacttccctaattttttcccctgctactaacttagaactaagcaaatatgctcccctaaacaagtatatatcattgctgcatccagttagccaggctcccaatttcaccatgcaaaaaacctctcatgggtgcatacatgaagcctt

SEQ ID NO: 344438 - DNA, 551 bp, Homo sapiens
tctaagaatagtgagagtcctcatatttttaaataaatctcttctctcgagacttctaggatgcaactactacaaaccatctgactcctgctcaacaagcaattttactttgttttgtcaatgaactagtcagttggaagttggtaagaaattttttcaaaggtaaaactgaatgatctgttttctacccctcaaaaacgtatttcagaacacaaagaatgttgcattaacatatacaaagtctatttctcatatgaagctcttattgctacatatttcccaagaagaaagaaggtttctctctcatccctttaggctatttcctgacaaagcccactggaacttaaaattcatgcatttatttgatatgtttattatacatccctgtatgcctggatctgatttggtttcttctcaaatcgataacttctgctatttggtgtaccccagggcttagtccttggacgttttstctttcctaactacacctactctgtaggtgatctctttgaatactatttatggttgatcaatccaaatgcacatttaat

SEQ ID NO: 344439 - DNA, 569 bp, Homo sapiens
ttgcactaatacctgaactctagcatgcatatgagtcaccagtagaatttgattaatgtataggrtttcctaggctcccacatagtaagattctagtatagtaagtgcaggatacagctacatatctggaacttcaagaagaaaaatacttgtgtatctaagaaatacattttagatgatctctcaaagctgtcttatatgctaacctgaggagatatattttgggatgtttttaactttttttttaagtgactggattacttgtctacccccagttctattaaggataagaacactccagaataacacccatgatttatgttttgaaatctctcaaggagcaaaactacatggcaaataatccaccaattctccatgagattctaatgtcagaatcaataataggtgacattctattcccattaaaatttctggaaatttcctgtcaaacaaagcatgatatgtgttgagaaatgtgataaatcgcaagaagacactctatttttttaaatatttccattttttatttcaacatttattttagatactggggtacatgtacacatttg

SEQ ID NO: 344440 - DNA, 569 bp, Homo sapiens
ttgcactaatacctgaactctagcatgcatatgagtcaccagtagaatttgattaatgtataggatttcctaggctcccacatagtaagattctagtatagtaagtgcaggatacagctacatatctggaacttcaagaagaaaaatacttgtgtatctaagaaatacattttagatgatctctcaaagctgtcttatatgctaacctgaggagmtatattttgggatgtttttaactttttttttaagtgactggattacttgtctacccccagttctattaaggataagaacactccagaataacacccatgatttatgttttgaaatctctcaaggagcaaaactacatggcaaataatccaccaattctccatgagattctaatgtcagaatcaataataggtgacattctattcccattaaaatttctggaaatttcctgtcaaacaaagcatgatatgtgttgagaaatgtgataaatcgcaagaagacactctatttttttaaatatttccattttttatttcaacatttattttagatactggggtacatgtacacatttg

SEQ ID NO: 344441 - DNA, 569 bp, Homo sapiens
ttgcactaatacctgaactctagcatgcatatgagtcaccagtagaatttgattaatgtataggatttcctaggctcccacatagtaagattctagtatagtaagtgcaggatacagctacatatctggaacttcaagaagaaaaatacttgtgtatctaagaaatacattttagatgatctctcaaagctgtcttatatgctaacctgaggagatatattttgggatgtttttaactttttttttaagtgactggattacttgtctacccccagttctaytaaggataagaacactccagaataacacccatgatttatgttttgaaatctctcaaggagcaaaactacatggcaaataatccaccaattctccatgagattctaatgtcagaatcaataataggtgacattctattcccattaaaatttctggaaatttcctgtcaaacaaagcatgatatgtgttgagaaatgtgataaatcgcaagaagacactctatttttttaaatatttccattttttatttcaacatttattttagatactggggtacatgtacacatttg

SEQ ID NO: 344442 - DNA, 405 bp, Homo sapiens
gtgtggtttttaaagtctttttagataataaagaaacatgaatttcacataaccatatatattattttaaaaataacttgcttaagtatgaaaayatgaaaaaggaaactggctcctaccaaatcatattatgttttaaaatgatgctgaatttagctgtgacacctgtggtaaggtttcaattcctctaggaaggtctgtttcaatctctgtttgatatcagctgtcaatgggggtcacattccacccccaactaggcagaatcacagttaaacatgatatttaaatacatagctacttaattcagagagtttatgattaaactgaaacaaaaacataatctttcaaattgaaaaaaaatgtgttacggagacaactgtggactcaggattttgttattcatta

SEQ ID NO: 344443 - DNA, 601 bp, Homo sapiens
tctttttaggacatagacataacaaaataaattgtagatagagaaaaaaatttataacctcagtgawtggcaatttcattctcctctttgttcaggacaaaaatgttgcagtcattcttgatatctttttctcatatcccacattcaatctgtacttaagttacacgggtgctaccatgtaaatgcattcaaaatttaaattcaccaaaatatatccagattttgaccgtttcttgccacctacatttacaacacacatctaagccaccctcatctcttgtctggactgttccttcaaaatgccaagcattgctctcctgtctctgccaaagacaaagttagagtcatagtagttggagcaacttgttgcatggggatctgaacagttaaggttgtaggggaagttaagaagcttaagaaacctgaaaattagggtagccaggggtcacatagtcatgcaggtaactattaggaaacagcaggcactggtgggaaggccacgatggaagacacaaatatctctgaaggaagacatttatagggatgagagaaacaaaacaaggaaagcaagacatgatactaggatatgaccttgaaacct

SEQ ID NO: 344444 - DNA, 601 bp, Homo sapiens
tctttttaggacatagacataacaaaataaattgtagatagagaaaaaaatttataacctcagtgaatggcaatttcattctcctctttgttcaggacaaaaatgttgcagtcattcttgatatctttttctcatatcccacattcaatctgtacttaagttacaygggtgctaccatgtaaatgcattcaaaatttaaattcaccaaaatatatccagattttgaccgtttcttgccacctacatttacaacacacatctaagccaccctcatctcttgtctggactgttccttcaaaatgccaagcattgctctcctgtctctgccaaagacaaagttagagtcatagtagttggagcaacttgttgcatggggatctgaacagttaaggttgtaggggaagttaagaagcttaagaaacctgaaaattagggtagccaggggtcacatagtcatgcaggtaactattaggaaacagcaggcactggtgggaaggccacgatggaagacacaaatatctctgaaggaagacatttatagggatgagagaaacaaaacaaggaaagcaagacatgatactaggatatgaccttgaaacct

SEQ ID NO: 344445 - DNA, 601 bp, Homo sapiens
tctttttaggacatagacataacaaaataaattgtagatagagaaaaaaatttataacctcagtgaatggcaatttcattctcctctttgttcaggacaaaaatgttgcagtcattcttgatatctttttctcatatcccacattcaatctgtacttaagttacacgggtgctaccatgtaaatgcattcaaaatttaaattcaccaaaatatatccagattttgaccgtttcttgccacctacatttacaacacacatctaagccaccctcatctcttgtctggactgttccttcaaaatgccaagcattgctctcctgtctctgccaaagacaaagttagagtcatagtagttggagcaacttgttgcatggggatctgaacagttaaggttgtaggggaagttaagaagcttaagaaacctgaaaattagggtagccaggggtcacatagtcatgyaggtaactattaggaaacagcaggcactggtgggaaggccacgatggaagacacaaatatctctgaaggaagacatttatagggatgagagaaacaaaacaaggaaagcaagacatgatactaggatatgaccttgaaacct

SEQ ID NO: 344446 - DNA, 561 bp, Homo sapiens
ggtgatgtctgcaactaagttggctgtctctcggtcaagaacaaggtcattggttaggaagggccatccatacagcattttgtatgggctaagtcctgctttatggggatagttttggattcttagtaaggctataggcaacagagcaggctgtgcaaggtgggtttyttgggttagcatttttagatgttgcttgagtgtttggtttattttctcaacttttcctgaggattgtggcctccaggtgcagtataagtgatattgtatgcctaatttctgggatactccctgggttactgcagccttgaaagcggggccattgtcactctgtaagcctcggggaagtacgaatctgggaattatttcacgaattagtgcctttattacctcttgggacttttctgtcctacaagggaaggcctctgcccaaccagtgaaagtatctacccaaactagtagatactgaaatccctgagatttgggcatgtgggtaaaatctagttgccagtcttctcctgggtagtggcctgttctttgttctcctgaaggagcttggcgata

SEQ ID NO: 344447 - DNA, 478 bp, Homo sapiens
cctcagtcctgctgctggatcatctcaaaggttagtggcttctgactcagaggaccttcattccctgggggaagtgggcctcccagtgattcccttcacataaggggcatggacgagggggtggcttatttctattcagacaatcttttttaaagtgtccatgtagactgcactggaagcaagccctattaggcattcaatttggccagcctttcccttttccagagcctccaaagtctgcttgcttgaggaccatgactaaagyggtgacctttttttttttttaatcccgtttgccctgttccacctgctccttctgatctctattataaaaaagctgaggtggccaagttcaatagggcttttaaattttgctctgggcctaaggtggagttttgaaatttttttctaatgtctgcagctgactgagtgataaacttatcttttaagattagttgcccttcaatagagacaggtg

SEQ ID NO: 344448 - DNA, 620 bp, Homo sapiens
acaaatcaggaatgaagtaacattaccacgaactttacagaaataaaaaggattataaggtaatatttttaacaaatgtatgttgaaaaattggatatcataggtgaaactgacaattcctagaaaagaactgaagctgccttagaaatacgaaatctaaacagtcctgtaacaagtaaagagattgaggtagtaactaccacacacaaaaaaagcacatactcaaaagaatttactggtaaaatttaccaaacttctaaaaaagatttttttataattttttttcacagactyttccagaaaacagaaaaaagaaaaattctcatctcattttatgggtctagtattatcctaatacaatagccagaaaaaaatgtaagaaaagaaaaccataaatatcttactaatatagacacataaatcattaacaaaatgctagaaaactgaactcagcaatatataaaaagattatgtcccataacaaggtgggttttatcctcagacttcaaatttggtttgacatccaaaaatcaattaatgtagtacaccatacttataaaaccaaaaagtcacttgaatgtctcaatagataaagaaaaatcgctatacaaaattcaact

SEQ ID NO: 344449 - DNA, 568 bp, Homo sapiens
gaatcctttttggatacaagctctcccagagcaagatagaaatcattaggaaaacaatcaattttcaagaaacatctgccatggatatgttgtctattaggggtctagtactttacgtttattttmtttattcctaacaaaaacccttggatgtaagtgttcatggtgtgagccatttgatatagtaggaaattgaaactctgagaagcgacatgaattaagtgggatcccactattctctgttaagctgggatcagtagtcaggtttttctgacttcaaagtccagtcaccttcctcagggttaggtctcattctggaattaattcttcagactaaataaggtttattttcagacaatgcaaagctattttcagaaaaagactatttggtggttacgtttatgttaaatacatgcagcccttcaacaaatatgttttaaagtttataatttttttatgctttattgctcacatctgtttagtgatgtttaatttcttcttagtgttagaagtagttcatgcatagactttcttttaaaataaaatgaggtgagataactcataatta

SEQ ID NO: 344450 - DNA, 643 bp, Homo sapiens
tattctaagaagtgtatcctaaaaatgaccaaaagaaaaaaaaaaagcaattcattaaaacattattgggctcaaatatgcactatatttagcaggtacaataatgaaaaaggcaaaatgtcttccctgtagaagtttctggcataccagagtcatgtgtctaggtcagtgatacaagttgtctagagaggctggtaccaagagtgatcatcattacaacattaagtaaaataaacacaatttaaaatagactaaacctcccatcacagctgaatgaagtatrtaaatgttttcaagtgcactcaagagattgctattcagacactaaaaacacatgaatgagaagtctatgtgacaacctgaaacgcatttaaaaacaaaatattaaatggcatgattggttaactatgaaaatatgaatttacatgaatgtggaaaagacttagggatgaaaaaaattattgtcagaaagatagttttatttttcaattttctttaatgctattatactatggttatataataaatataatttatagagataagttgggaatatttatttagttttatcattattcaacaacaaccaaatactctaaaattgctcccttacctgttaatgggacgtaatttcattctttaa

SEQ ID NO: 344451 - DNA, 643 bp, Homo sapiens
tattctaagaagtgtatcctaaaaatgaccaaaagaaaaaaaaaaagcaattcattaaaacattattgggctcaaatatgcactatatttagcaggtacaataatgaaaaaggcaaaatgtcttccctgtagaagtttctggcataccagagtcatgtgtctaggtcagtgatacaagttgtctagagaggctggtaccaagagtgatcatcattacaacattaagtaaaataaacacaatttaaaatagactaaacctcccatcacagctgaatgaagtatataaatgttttcaagtgcactcaagagattgctattcagacactaaaaacacatgaatgagaagtctatgtgacaacctgaaacgcatttaaaaacaaaatattaaatggcatgattggttaactatgaaaatatgaatttacatgaatgtgraaaagacttagggatgaaaaaaattattgtcagaaagatagttttatttttcaattttctttaatgctattatactatggttatataataaatataatttatagagataagttgggaatatttatttagttttatcattattcaacaacaaccaaatactctaaaattgctcccttacctgttaatgggacgtaatttcattctttaa

SEQ ID NO: 344452 - DNA, 528 bp, Homo sapiens
ttgtctgttttatttcccatggtaatctcaggacttaacacattgagtatatagatttatgagccggaatcaaggaaatatatgttgtatgaatggatgaggaatacatttcagagctgttcactaattrttctttagtggaagtttacttcttagatgatagttacatagttttaaagacaattttacaaaaactaaaagacaatttcagaaatgaagaaataaaaagagtctacatttcaaacactggttctgaatatcatttagtttaaagacatttactttttaaatgtctttcagagggtaacaaaacctaacagtaataagataaaatggcaccagcttgtgtttgaaaagtttattcccagagcaagatttttcaagactgtggtgacattacgtatctaaagaagaatatgagaagcttttagtttaactgatgtttgacattttgtctttaagatgatatctccataatatacattattctcctcattcccagtttttctaacacagaaacgatggaaa

SEQ ID NO: 344453 - DNA, 592 bp, Homo sapiens
ttgtctgttttatttcccatggtaatctcaggacttaacacattgagtatatagatttatgagccggaatcaaggaaatatatgttgtatgaatggatgaggaatacatttcagagctgttcactaattattctttagtggaagtttacttcttagatgatagttacatagttttaaagacaattttacaaaaactaaaagacaatttcagaaatgaagaaataaaaagagtctmcatttcaaacactggttctgaatatcatttagtttaaagacatttactttttaaatgtctttcagagggtaacaaaacctaacagtaataagataaaatggcaccagcttgtgtttgaaaagtttattcccagagcaagatttttcaagactgtggtgacattacgtatctaaagaagaatatgagaagcttttagtttaactgatgtttgacattttgtctttaagatgatatctccataatatacattattctcctcattcccagtttttctaacacagaaacgatggaaataatgtgtaccactagtactcagatattcctggtccaaactctattttttttttttaatttaga

SEQ ID NO: 344454 - DNA, 592 bp, Homo sapiens
ttgtctgttttatttcccatggtaatctcaggacttaacacattgagtatatagatttatgagccggaatcaaggaaatatatgttgtatgaatggatgaggaatacatttcagagctgttcactaattattctttagtggaagtttacttcttagatgatagttacatagttttaaagacaattttacaaaaactaaaagacaatttcagaaatgaagaaataaaaagagtctacatttcaaacactggytctgaatatcatttagtttaaagacatttactttttaaatgtctttcagagggtaacaaaacctaacagtaataagataaaatggcaccagcttgtgtttgaaaagtttattcccagagcaagatttttcaagactgtggtgacattacgtatctaaagaagaatatgagaagcttttagtttaactgatgtttgacattttgtctttaagatgatatctccataatatacattattctcctcattcccagtttttctaacacagaaacgatggaaataatgtgtaccactagtactcagatattcctggtccaaactctattttttttttttaatttaga

SEQ ID NO: 344455 - DNA, 592 bp, Homo sapiens
ttgtctgttttatttcccatggtaatctcaggacttaacacattgagtatatagatttatgagccggaatcaaggaaatatatgttgtatgaatggatgaggaatacatttcagagctgttcactaattattctttagtggaagtttacttcttagatgatagttacatagttttaaagacaattttacaaaaactaaaagacaatttcagaaatgaagaaataaaaagagtctacatttcaaacactggttctgaatatcatttagtttaaagacatttactttttaaatgtctttcagagggtaacaaaacctaacagtaataagataaaatggcaccagcttgtgtttgaaaagtttattcccagagcaagatttttcaagactgtggtgacattacgtatctaaagaagaatatgagaagcttttagtttaactgatgtttgacattttgtctttaaratgatatctccataatatacattattctcctcattcccagtttttctaacacagaaacgatggaaataatgtgtaccactagtactcagatattcctggtccaaactctattttttttttttaatttaga

SEQ ID NO: 344456 - DNA, 171 bp, Homo sapiens
ctatattcagtctgtttctgcagtgtgataatttccttgaagttctgaatttggaacatccagttggcagggaaatagtttacttgtttctcrtgtattgatataaaggttttgactgcaatagtttacatgaaaggggatagtttaacatcgctctgaagtggaaaaatt

SEQ ID NO: 344457 - DNA, 171 bp, Homo sapiens
ctatattcagtctgtttctgcagtgtgataatttccttgaagttctgaatttggaacatccagttggcagggaaatagtttacttgtttctcgtgtattgatataaaggttttgactgyaatagtttacatgaaaggggatagtttaacatcgctctgaagtggaaaaatt

SEQ ID NO: 344458 - DNA, 171 bp, Homo sapiens
ctatattcagtctgtttctgcagtgtgataatttccttgaagttctgaatttggaacatccagttggcagggaaatagtttacttgtttctcgtgtattgatataaaggttttgactgcaatagtttacatkaaaggggatagtttaacatcgctctgaagtggaaaaatt

SEQ ID NO: 344459 - DNA, 563 bp, Homo sapiens
acaaaataaataaggtaatgtcacttctttgttcaggaattttcaaggttttcaatctcagttggagtaaaaggttaagttctcatgctgattcaaaagaacctacttcacctggtgccaccattaccttttcttattgtctctcctcctcttcctccyccttctctctctctctctctctctctctctgtctctctctctctggatcacctgttctatcaacattgacctcctcctcaaaccagggattctcctgcctccagatgttcatgcttgctttttcctctgctagatgtgcttttctacaggaaatcacatgacttgtctttccccttcttccagacttgtttttttaatccttccagaaaaccagctttaaaatgacaaccctactcattcacaaaatatcttcctttcttgctacagacttttgtccttagcacttagttcccattataatactatatatatgttttatttatttatttttgtatgtcatctactagactattaatttgattagggtaattatattggctgttctatccaatagatccaatagt

SEQ ID NO: 344460 - DNA, 563 bp, Homo sapiens
acaaaataaataaggtaatgtcacttctttgttcaggaattttcaaggttttcaatctcagttggagtaaaaggttaagttctcatgctgattcaaaagaacctacttcacctggtgccaccattaccttttcttattgtctctcctcctcttcctcctccttctctctctctctctctctctctctctgtctctctctctctggatcacctgttctatcaacattgacctcctcctcaaaccagggattctcctgcctccagatgttcatgcttgctttttcctctgctagatgtgcttttctacaggaaatcacatgacttgtctttccccttcttccagacttgtttttttaatccttccagaaaaccagctttaaaatgacaaccctactcattcacaaaatatcttcctttcttgctacagacttttgtccttagcacttagttcycattataatactatatatatgttttatttatttatttttgtatgtcatctactagactattaatttgattagggtaattatattggctgttctatccaatagatccaatagt

SEQ ID NO: 344461 - DNA, 563 bp, Homo sapiens
acaaaataaataaggtaatgtcacttctttgttcaggaattttcaaggttttcaatctcagttggagtaaaaggttaagttctcatgctgattcaaaagaacctacttcacctggtgccaccattaccttttcttattgtctctcctcctcttcctcctccttctctctctctctctctctctctctctgtctctctctctctggatcacctgttctatcaacattgacctcctcctcaaaccagggattctcctgcctccagatgttcatgcttgctttttcctctgctagatgtgcttttctacaggaaatcacatgacttgtctttccccttcttccagacttgtttttttaatccttccagaaaaccagctttaaaatgacaaccctactcattcacaaaatatcttcctttcttgctacagacttttgtccttagcacttagttcccattataatrctatatatatgttttatttatttatttttgtatgtcatctactagactattaatttgattagggtaattatattggctgttctatccaatagatccaatagt

SEQ ID NO: 344462 - DNA, 617 bp, Homo sapiens
gtataggaactaggctacaatagcagccattagttcaggacctaatgaatgtaacatgagtggcctaatgaaattaaccctcccaaatcaagtctctcctcaggcctctctattccctgagacacaacaatattgaaatctgggaaactaagaattgtacagtggcttccaagtgttcaagtgaaaggaagagtcacatttgtctcaccttaaatcaaaagctagaaatgggctsagcatggtggcccatacctgtaattccagcattttgggacaccaaagcaggagtatcacttgaggccaaaagtttgatatcagcctgggcaatatagccagactctgtctttagaaaaaaaacaaaaaatagctggcatggtgatgcacgcctttcatcctagctactctagagtctgaggttggaggatcacttgaccacaggaggtcaaggctgcagtgagccaagactttgccactgcactctggcctgggtgaaaaagcaagacactgtctctaaataaataataattaaattaaaaagtaaatttttaaaaagctagaaatgattaagatatgttaaaagttaagattggctgaaaactagacctcttgcaccagtt

SEQ ID NO: 344463 - DNA, 617 bp, Homo sapiens
gtataggaactaggctacaatagcagccattagttcaggacctaatgaatgtaacatgagtggcctaatgaaattaaccctcccaaatcaagtctctcctcaggcctctctattccctgagacacaacaatattgaaatctgggaaactaagaattgtacagtggcttccaagtgttcaagtgaaaggaagagtcacatttgtctcaccttaaatcaaaagctagaaatgggctcagcatggtggcccatacctgtaattccagcattttgggacaccaaagcaggagtatcacttgaggccaaaagtttgatatcagcctgggcaatatagccagactctgtctttagaaaaaaaacaaaaaatagctggcatggtgakgcacgcctttcatcctagctactctagagtctgaggttggaggatcacttgaccacaggaggtcaaggctgcagtgagccaagactttgccactgcactctggcctgggtgaaaaagcaagacactgtctctaaataaataataattaaattaaaaagtaaatttttaaaaagctagaaatgattaagatatgttaaaagttaagattggctgaaaactagacctcttgcaccagtt

SEQ ID NO: 344464 - DNA, 617 bp, Homo sapiens
gtataggaactaggctacaatagcagccattagttcaggacctaatgaatgtaacatgagtggcctaatgaaattaaccctcccaaatcaagtctctcctcaggcctctctattccctgagacacaacaatattgaaatctgggaaactaagaattgtacagtggcttccaagtgttcaagtgaaaggaagagtcacatttgtctcaccttaaatcaaaagctagaaatgggctcagcatggtggcccatacctgtaattccagcattttgggacaccaaagcaggagtatcacttgaggccaaaagtttgatatcagcctgggcaatatagccagactctgtctttagaaaaaaaacaaaaaatagctggcatggtgatgcacgcctttcatcctagctactctagagtctgaggttggaggatcacttgaccacaggaggtcaaggctgcagtgagccaagactttgccactgcactctggcctgggtgaaaaagcaagacamtgtctctaaataaataataattaaattaaaaagtaaatttttaaaaagctagaaatgattaagatatgttaaaagttaagattggctgaaaactagacctcttgcaccagtt

SEQ ID NO: 344465 - DNA, 489 bp, Homo sapiens
aactagctccaaaggctccaagattgtgtgattattggtgagggaaaggtctctgagaaggccagtaaactgaaagtcaaggttgttccatggtcatattttatttggtgcaccaagtgttttagggaattttaaatttacgttcctctgcccaccaatattttacaattctccgacatactatattttatactcagcttccaacagaggtacatcaattgcatggctcttgaaagacattaagaagtctggtgaaagatgattatgatgatagcaggacattatacagaagcacttcactatatgctgtacacatgtcccatttaatactaacaaccatccaatctattagacatgtttattcccatttcacagataaggaaattgatyaatttgcctaagccaacacaattccctgatggtagagctgagatttaattccaaatcgaaattatccaaatggtacgttcctaacttctaggctaaatt

SEQ ID NO: 344466 - DNA, 489 bp, Homo sapiens
aactagctccaaaggctccaagattgtgtgattattggtgagggaaaggtctctgagaaggccagtaaactgaaagtcaaggttgttccatggtcatattttatttggtgcaccaagtgttttagggaattttaaatttacgttcctctgcccaccaatattttacaattctccgacatactatattttatactcagcttccaacagaggtacatcaattgcatggctcttgaaagacattaagaagtctggtgaaagatgattatgatgatagcaggacattatacagaagcacttcactatatgctgtacacatgtcccatttaatactaacaaccatccaatctattagacatgtttattcccatttcacagataaggaaattgattaatttgcctaagccaacacaattccctgatggtagagctgagatttaattccaaatcgaaattatccaaatggtacgytcctaacttctaggctaaatt

SEQ ID NO: 344467 - DNA, 548 bp, Homo sapiens
attgacacctagaaaagattggttgtctgttcaatggtaaaactatattacatctctattcaaaaaggctgaggtataaattaatttttcagatcacccaaggaaagctagttatcattttctaaaaataggccaaatagatgtgcatgatagaaaactttccaaattgccatctttggtatagctatgtcattcaacgaagaaatatgcagggtgatcttgttatttaaagacatggaggtaaatctcagataaaacagctagaatactttaaaatagtttttctggagaatgatgtgggggcagaaggccagtgaaggaaggagcaggggacagctgtttcaactatgtcatttagtcttatttgatatttaatcacttrtgtaagatactttgttgaaaaaaagtaatttttcaaaaaggatcatacctttaccatttaacgctcgtggctaaactacacaagtgcagaaatgaatagttaaccttggaataatatggctttgacttatggctaacacacactgtgatagggggtctatttaaag

SEQ ID NO: 344468 - DNA, 566 bp, Homo sapiens
tttttaatttgaataatttcaaatggggttctaaaaaataaaaatctccccttcaatttgaaattataatttattttcttcttctccataacatttattatctgcattaattattagagaatcccttacaactagtccacaaactaatgacaggtccatattgtcctcaattttttgccctataatcattttacattatagatgcaagacaaaagaggagagaaaggagggaaggagacagagagagattagaaagaacaactggggaaatttttatccagggtttttacaaacaaaagtgttttaaagccatctcgaactcyggcagtgttgcttttctgttctttgggtgtttttatttaattatacaagaataatctcagaagctggtggtggtttcaatttgtctgatagagaaagctagagaattacccttcataatacttaattaaacatttctatcaattacactgaataaatatgcagtcacaacggctgctggttgatttgacgtttaaaaagatggcatatattaaagccccagtttggctatgcaacacattaga

SEQ ID NO: 344469 - DNA, 560 bp, Homo sapiens
tggcaaaataaactactgtcaccaagcccttgatatttagccctatagaaactaattcccttgggcaatccaaagtgccccatacagtaactactggggatggcaaagacaagaatgccatagctagtaattttcaaagtattccatgtttacatttctatccatttccctcacatactaacttcaccaaaataatcctctgattaagaaaatagttgcatttaaaattttctaatgcaaaagtctatgaagtcagttgagtgatcctaatttatcaattacaaatttagaaaaaatactatggtatgccaaagaggtgtttaaattaacattttcaaagacccacacamaaactaaatatacattgtagacaagtacagcaaagcaataaaagaaaaagataaaaatcactagtaatcaatcctagccatcagaggtaacaggtggtaaaatctggattttccatagacttattcagacacctgaagacttataataatggaaagtaagacgattatcaactctatatgctatggctacagtttctacttaggtgatga

SEQ ID NO: 344470 - DNA, 539 bp, Homo sapiens
aattaatcccaacaatgccattaaatagtatttaataaatatcaacattggaaatgagacaataggatgatcaagagagtgggtctcatcattgacccgctgtagcagcaggctaggatgggacaacacagatcaagggtgcaagttgaggcatctcctgtaatgagcacagcctgtgaacatgaacaacagttacattttactgattttctacattccagtttccttcaggcagccttttaagtgagtcttatgggaataaagacagaggctactaaacctttatgtagcaaataataccagagagattgggccaggcatggtggctcacacctgtactctcagcactttgggaggccaaggcagratgatcacctgagatcaggagttccagaccagcctggccaacatggtgaaaccccttctctactaaaaatataaaatttgctgggcgtggtggtgcacacctgtaatcccagctactcaggaggctgaggtgagagaatcccttgagtacaggggccggaggttgcagtgag

SEQ ID NO: 344471 - DNA, 633 bp, Homo sapiens
cagactttttcccctttctgaattgttagttggtctcctagcacatttggaatgtaacctttttaatccctgcatttgcaattagagattaaaattccattccaagagccattcggcagatggcatagcatgaagaaactggaggtattttaaaattgtatttatacagaacaccagctgaatttcccagtctgtttcttcctgagcttatacattctcttgcgaaaattgattgtttaagatgtagatttcatttgctgggatttagcattttyataggattttaaagcatcaattaatccatctcttttgttcagcacagttgatttaaatatagaagtaaaatctgtatttaaagaaactgcttcttaagaagattaagtcacctctgcaagggtcaccaaggtagggtcagaaaggccatatgataatggaacagggaggccactgaaccaacgcatccattaaatggaaacctcatcatatcttatgcaatttagaaagtttgattcttaattaagctttttcctttagctttctccaaaagacttttaaaattcttacagcttttagatttttattgacatataataaatacaaaaagcacataaatcgtacatgtatagtttgagg

SEQ ID NO: 344472 - DNA, 599 bp, Homo sapiens
ctgcctatatcaacaaaggagccaaggaccaaccattcaaatgggccctgctgccaagccttttttttttttttttttacaatgccatctcttcatattgttccatttaacaaaactgcagcccttcacctatccttaagtcccttggccaatggtacagagccagagtatgctactccctagcaggaaatcaacaggatgacctactaaacaccattcagaagatgctaagacccatgaattgcaacaggaaagaaaagacagagaattagtcagacaggtacatgctgtgccaaaratgcactacagcccccacccaattctgcctaatcctagctgggctgacaccaacctgatgagacaggcctataagatctcaaactaaaacagaaactcctgaactgggttctttcgaacccaggaagcagcagtaaatcattaaagaacagataagttcttaaggtgagggagagtttcagataaatggaatgctggtagaacacagggcccaaaggagcaaaagttaacctaagcccaggtagaaccttgtttactagagtattaggcatgggttggggcaactattctaaccagagaaa

SEQ ID NO: 344473 - DNA, 540 bp, Homo sapiens
  misc_feature (1)...(540): n = A,T,C or G
nnccatacaagcaaattactgtgtctacaaagcattcctgccacacttaattcaccattccctgacaaaatatgccatctttgtggttcaggtctgtacagtgctggtttcccttcccgggcagtttgcgctatcccatcccagcccattccccatccctccacctcccccttccctccccactctcatacaactcttcctcatctttcaggacttggcttcaatgtcaccttaactggaagcttctctcactctccagaagagcttcccattgcacytgatgcatgcactagatgcatgcactattatttgatcatttttaagttacagtccaaatctttttgtacctgaataacatgttgcccagtcagtctctcttcctggattcagaagtctttcatggtagatccagctggaagtgacaaaaagacatcttttgacataaagggatgacacagacagacataagttcttacatgtcttaaatgttatgtgaaaattaaacagaattcaaagacttgtggggaacacttaggaggg

SEQ ID NO: 344474 - DNA, 540 bp, Homo sapiens
  misc_feature (1)...(540): n = A,T,C or G
nnccatacaagcaaattactgtgtctacaaagcattcctgccacacttaattcaccattccctgacaaaatatgccatctttgtggttcaggtctgtacagtgctggtttcccttcccgggcagtttgcgctatcccatcccagcccattccccatccctccacctcccccttccctccccactctcatacaactcttcctcatctttcaggacttggcttcaatgtcaccttaactggaagcttctctcactctccagaagagcttcccattgcacttgatgcatgcactagatgcatgcactattatttgatcatttttaagttacagtccaaatctttttgtacctgaataacatgttgcccagtcagtctctcttcctggattcasaagtctttcatggtagatccagctggaagtgacaaaaagacatcttttgacataaagggatgacacagacagacataagttcttacatgtcttaaatgttatgtgaaaattaaacagaattcaaagacttgtggggaacacttaggaggg

SEQ ID NO: 344475 - DNA, 540 bp, Homo sapiens
  misc_feature (1)...(540): n = A,T,C or G
nnccatacaagcaaattactgtgtctacaaagcattcctgccacacttaattcaccattccctgacaaaatatgccatctttgtggttcaggtctgtacagtgctggtttcccttcccgggcagtttgcgctatcccatcccagcccattccccatccctccacctcccccttccctccccactctcatacaactcttcctcatctttcaggacttggcttcaatgtcaccttaactggaagcttctctcactctccagaagagcttcccattgcacttgatgcatgcactagatgcatgcactattatttgatcatttttaagttacagtccaaatctttttgtacctgaataacatgttgcccagtcagtctctcttcctggattcagaagtctttcatggtagatccagctggaagtgacaaaaagacatcttttgacataaagggatgacacagacagacataagttcttamatgtcttaaatgttatgtgaaaattaaacagaattcaaagacttgtggggaacacttaggaggg

SEQ ID NO: 344476 - DNA, 324 bp, Homo sapiens
aaaatgatggtaaatgagacattaatttacccttctaatctctatcacagcaaaaagataattaaaaaatctatatgaggaccacaaaatacacaaaaattatgtagcaaagcctatagcctgaaaaagtaaacattgaaatttrtatgtccataaaatgtttacaaaattgagtacatattacacaccccaccccaaaaacatctaagcaaagtagagaatgtagaaatgctacagattatattctctgattatgacacaacaaaactagaaattacagcatggaaatttaaaagctttctcttaaataattctatgtcaaaa

SEQ ID NO: 344477 - DNA, 414 bp, Homo sapiens
ggtcaggagttcaagaccagcctcgtcaacatggcgacaccctgtctctactaaaaatacaaaaattagcagggcctggtggcgcatgcctgtaatcccagctacttaggaggctgaggctggagaattccttgaacccagaaggtggaggttgcagtgagctgagattgcaccactgcactccagcctagatgacacagcaagactctgtcaaaaaaaaaaaaaaaaagaaatccaaataaaatttccagaatatgtggaaaatagtgataataaaaatattacacatgtgtaatcccagcattttgagatgccaaggtggcagsatcacttgaggccaggagttcacaaccagcctggacaacatagggagactccatctccacacacgccaaaaaaaaattttaaatagcc

SEQ ID NO: 344478 - DNA, 557 bp, Homo sapiens
  misc_feature (1)...(557): n = A,T,C or G
ccaaggtggcaggatcacttgaggccaggagttcrcaaccagcctggacaacatagggagactccatctccacacacgccaaaaaaaaattttaaatagccaggtatagtggtacttcttgtaatcccatctacttgggagtctaaggtgggagaatcacccaacctcaggagttcagggcttcagaaagccatgatcatatcactgcactccagcctcagcaacagagcaagatcctatctcaaaaaaaaaaaaaaaaaaaaatcacatgtggngaaatagctatagcacaataaaaataaatgtgttaagtatgaacaacaaaaaagctagtaaaggttgaacaacaactatccttaggaaagtggaaataatgtattaataaatatgaaagaaggctaggcatggtgactcacatctgtaatcccagcactttgggagggctgaggcagggcagatcacctgaggtcaggagttccagaccagcctggccaacatggtgaaatcttgtctctcctacaaatacaaaaactagccaggcttggttgcgcactcct

SEQ ID NO: 344479 - DNA, 414 bp, Homo sapiens
ggtcaggagttcaagaccagcctcgtcaacatggcgacaccctgtctctactaaaaatacaaaaattagcagggcctggtggcgcatgcctgtaatcccagctacttaggaggctgaggctggagaattccttgaacccagaaggtggaggttgcagtgagctgagattgcaccactgcactccagcctagatgacacagcaagactctgtcaaaaaaaaaaaaaaaaagaaatccaaataaaatttccagaatatgtggaaaatagtgataataaaaatattacacatgtgtaatcccagcattttgagatgccaaggtggcaggatcacttgaggccaggagttcacaaccagcctggacaacatagggagactccatctccacacacrccaaaaaaaaattttaaatagcc

SEQ ID NO: 344480 - DNA, 557 bp, Homo sapiens
  misc_feature (1)...(557): n = A,T,C or G
ccaaggtggcaggatcacttgaggccaggagttcacaaccagcctggacaacatagggagactccatctccacacacgccaaaaaaaaattttaaatagccaggtatagtggtacttcytgtaatcccatctacttgggagtctaaggtgggagaatcacccaacctcaggagttcagggcttcagaaagccatgatcatatcactgcactccagcctcagcaacagagcaagatcctatctcaaaaaaaaaaaaaaaaaaaaatcacatgtggngaaatagctatagcacaataaaaataaatgtgttaagtatgaacaacaaaaaagctagtaaaggttgaacaacaactatccttaggaaagtggaaataatgtattaataaatatgaaagaaggctaggcatggtgactcacatctgtaatcccagcactttgggagggctgaggcagggcagatcacctgaggtcaggagttccagaccagcctggccaacatggtgaaatcttgtctctcctacaaatacaaaaactagccaggcttggttgcgcactcct

SEQ ID NO: 344481 - DNA, 557 bp, Homo sapiens
  misc_feature (1)...(557): n = A,T,C or G
ccaaggtggcaggatcacttgaggccaggagttcacaaccagcctggacaacatagggagactccatctccacacacgccaaaaaaaaattttaaatagccaggtatagtggtacttcttgtaatcccatctacttgggagkctaaggtgggagaatcacccaacctcaggagttcagggcttcagaaagccatgatcatatcactgcactccagcctcagcaacagagcaagatcctatctcaaaaaaaaaaaaaaaaaaaaatcacatgtggngaaatagctatagcacaataaaaataaatgtgttaagtatgaacaacaaaaaagctagtaaaggttgaacaacaactatccttaggaaagtggaaataatgtattaataaatatgaaagaaggctaggcatggtgactcacatctgtaatcccagcactttgggagggctgaggcagggcagatcacctgaggtcaggagttccagaccagcctggccaacatggtgaaatcttgtctctcctacaaatacaaaaactagccaggcttggttgcgcactcct

SEQ ID NO: 344482 - DNA, 557 bp, Homo sapiens
  misc_feature (1)...(557): n = A,T,C or G
ccaaggtggcaggatcacttgaggccaggagttcacaaccagcctggacaacatagggagactccatctccacacacgccaaaaaaaaattttaaatagccaggtatagtggtacttcttgtaatcccatctacttgggagtctaaggtgggagaatcacccaacctcaggagttcagggcttcagmaagccatgatcatatcactgcactccagcctcagcaacagagcaagatcctatctcaaaaaaaaaaaaaaaaaaaaatcacatgtggngaaatagctatagcacaataaaaataaatgtgttaagtatgaacaacaaaaaagctagtaaaggttgaacaacaactatccttaggaaagtggaaataatgtattaataaatatgaaagaaggctaggcatggtgactcacatctgtaatcccagcactttgggagggctgaggcagggcagatcacctgaggtcaggagttccagaccagcctggccaacatggtgaaatcttgtctctcctacaaatacaaaaactagccaggcttggttgcgcactcct

SEQ ID NO: 344483 - DNA, 587 bp, Homo sapiens
cagttctgcacttaactttaggccttttctaacacctyatttcttggcagtaactgtggccagaatagctctttccacagagaaaggaccttttgaaaggatagggtctctagatagaaaagcaaatgcctcattccagaaggtcttcaagaagaaaatgttgtggtgataacaaacataactgattataatctattctgtgaaaaaagcttatgaaacagtagatgtgtgtatctagtacataagagctgaatgtcaatatatatatatatatagatatatacacacactcaaataaataatagttatctctaactagagaaattctagttgccttatattttcttctttttccttactatattttctacaataaacatgtgtttttaacaagaaaagtcttttctggtgtgctttttaattttctttgtttaagtgagagtgaggctacataactacatggctaggtagacttttagaaaacttggctgctctagaaaattgacatatcctgatttcttccatagcttggatcttgacctagagggaaatataaaaatgttgacttgaacctgaggggtgccatt

SEQ ID NO: 344484 - DNA, 587 bp, Homo sapiens
cagttctgcacttaactttaggccttttctaacacctcrtttcttggcagtaactgtggccagaatagctctttccacagagaaaggaccttttgaaaggatagggtctctagatagaaaagcaaatgcctcattccagaaggtcttcaagaagaaaatgttgtggtgataacaaacataactgattataatctattctgtgaaaaaagcttatgaaacagtagatgtgtgtatctagtacataagagctgaatgtcaatatatatatatatatagatatatacacacactcaaataaataatagttatctctaactagagaaattctagttgccttatattttcttctttttccttactatattttctacaataaacatgtgtttttaacaagaaaagtcttttctggtgtgctttttaattttctttgtttaagtgagagtgaggctacataactacatggctaggtagacttttagaaaacttggctgctctagaaaattgacatatcctgatttcttccatagcttggatcttgacctagagggaaatataaaaatgttgacttgaacctgaggggtgccatt

SEQ ID NO: 344485 - DNA, 489 bp, Homo sapiens
aaataatagttatctctaactagagaaattctagttgccttatattttcttctttttccttactatattttctacaataaacatgtgtttttaacaagaaaagtcttttctggtgtgctttttaattttctttgtttaagtgagagtgaggctacataactacatggctaggtagactttyagaaaacttggctgctctagaaaattgacatatcctgatttcttccatagcttggatcttgacctagagggaaatataaaaatgttgacttgaacctgaggggtgccattttcactgctgaagtagtttcatggatcatgaattggagaaatgacttcagcaacacgggtgttaaaaacagcacaagtgacccacaacagatgatggagaacaaagagcaagctgggaaaagcagtggcctttaatacagaaaagaagaagtatagccacaataaatattaggcagacagcagttcagcagtttatac

SEQ ID NO: 344486 - DNA, 489 bp, Homo sapiens
aaataatagttatctctaactagagaaattctagttgccttatattttcttctttttccttactatattttctacaataaacatgtgtttttaacaagaaaagtcttttctggtgtgctttttaattttctttgtttaagtgagagtgaggctacataactacatggctaggtagacttttagaaaacttggctgctctagaaaattgacatatcctgatttcttccatagcttggatcttgacctagagggamatataaaaatgttgacttgaacctgaggggtgccattttcactgctgaagtagtttcatggatcatgaattggagaaatgacttcagcaacacgggtgttaaaaacagcacaagtgacccacaacagatgatggagaacaaagagcaagctgggaaaagcagtggcctttaatacagaaaagaagaagtatagccacaataaatattaggcagacagcagttcagcagtttatac

SEQ ID NO: 344487 - DNA, 579 bp, Homo sapiens
agcttcagtctctgtgtgttcacaggtgctgyaaacacacgcatcactactaatatcccacttcagtgctattgctgctcccaaaactccaggtatttttaaccttataaacctccagaataatgagaccactgggttcagtaaattgctttgttgtgaagcagtgttagacaaagtgggagactagaagataaatctgtcaatgacatgtcctttaagactacttagattttgttgaatttgtggatcattccttacttgagcaaatggtaaattaactctctcttttctctctctgctgtagctggcacactttttccagtagccattctacttggtatgcttacttatcagctgtcctccaggggcctcacattagatgtttctcttgactaaccaaacatgacacacagctgaagtcagaaaaaccagattgataatttcactcaaactattttccttcattctaacaatttactggagtacacaattgtgactatttttagccataggaactcatagaaagaccaacttcattagacctacaaaatcgatattgtgtaacagtatatgcagtat

SEQ ID NO: 344488 - DNA, 583 bp, Homo sapiens
gctgctcccaaaactccaggtatttttaaccttataaacctccagaataatgagaccactgggttcagtaaattgctttgttktgaagcagtgttagacaaagtgggagactagaagataaatctgtcaatgacatgtcctttaagactacttagattttgttgaatttgtggatcattccttacttgagcaaatggtaaattaactctctcttttctctctctgctgtagctggcacactttttccagtagccattctacttggtatgcttacttatcagctgtcctccaggggcctcacattagatgtttctcttgactaaccaaacatgacacacagctgaagtcagaaaaaccagattgataatttcactcaaactattttccttcattctaacaatttactggagtacacaattgtgactatttttagccataggaactcatagaaagaccaacttcattagacctacaaaatcgatattgtgtaacagtatatgcagtatgtgtaggaataaaaagcatttctcaaatatgcagtactggattttgcaaaagcaccttacacttagctataaaggag

SEQ ID NO: 344489 - DNA, 579 bp, Homo sapiens
agcttcagtctctgtgtgttcacaggtgctgcaaacacacgcatcactactaatatcccacttcagtgctattgctgctcccaaaactccaggtatttttaaccttataaacctccagaataatgagaccactgggttcagtaaattgctttgttgtgaagcagtrttagacaaagtgggagactagaagataaatctgtcaatgacatgtcctttaagactacttagattttgttgaatttgtggatcattccttacttgagcaaatggtaaattaactctctcttttctctctctgctgtagctggcacactttttccagtagccattctacttggtatgcttacttatcagctgtcctccaggggcctcacattagatgtttctcttgactaaccaaacatgacacacagctgaagtcagaaaaaccagattgataatttcactcaaactattttccttcattctaacaatttactggagtacacaattgtgactatttttagccataggaactcatagaaagaccaacttcattagacctacaaaatcgatattgtgtaacagtatatgcagtat

SEQ ID NO: 344490 - DNA, 361 bp, Homo sapiens
gtgtaacagtatatgcagtatgtgtaggaataaaaagcatttctcaaatatgcagtactggattttgcaaaagcaccttacacttagctataaaggagtggaaaacacaaagatgagtaactgcacctttcaaaagactagagctataccaataatacaaaggtgtaaacaaataatgatgagatgacaaaggctgagtgttttctatttggaagctatgttgttgaattatttatgtatataatttcatgcaatcttcatgttatgggggtgttctaatccactgtgactctgtccttaaataaaagggagatttggacatagagacaggcayacggggaggatgccatatgagaattga

SEQ ID NO: 344491 - DNA, 569 bp, Homo sapiens
gaaactgaggcatcaggagttagtaaaagtccacattgagatatgagacccaccactggctggacgcagtggctcacacctgtaatcccagcactttgggaggccgatgctggtggatcacctaaggtcaggagttcgggaccaggctggccaacatggtgaaacccccatctctactaaaaatacaaaaattagctgggtgtggtggcargcacctgtaataccagctactagggaggctgaggcaggagaatcgcttgaacccaggaggtggagtttacagtgagccaaaatcacgccattgcactccagcctgggcaacaaaaacaaaactgttgggaaaaaaaaaaaaaaaaaaaaaaaaccaccaccatcattttgcaagtgttaccactattgtgtgttaatattgtagaagtattcctaattatgatttctttgtattcctaattgtaatagctttgtatttgaaaaattattgattcatactctatatgttattattttgtatgcgatgacaacagaatatattatcatgctccttttgtgaatctcattcataatataaa

SEQ ID NO: 344492 - DNA, 620 bp, Homo sapiens
tgctggtctggtctgatcttctcatcttcccttgggtgattctgtggcagtcacactagcctccttgctgctccacaaaaactccagcatgatcctacttcaggatatttgccattgttactgcatctgcctggaaccttttctcccatataaacatagagattgctcttgcctgtccttcaagtctattcttaaatgtcccattctctgtgaagctttcctgcccaccctatttaaattacagacttcactcccaattccccatctactttaagagtcttcatttatcattccttgacaaactgtaaatatacatgttcacttttttatcgtctgtctccaaatactggaatgttaagttctgtaatgtcagatatttctgtttggttcactggtgtattcttaaagcatgttacatactaggtatactcaatgaatatttgttgaataaatatcacattgggcttattccagaaattcaagcttgtttcaatagttagagcaatctacaaatgtaattcattacattaactaattaaaggagctaaatcacatcaccaccacaataatgcagaaaaacacatttgatacarctcaatattcatgcatgcctaacaaac

SEQ ID NO: 344493 - DNA, 332 bp, Homo sapiens
gctcatcttcatagatgagcagataaattcaaattaaaaccaccctgagatgctttttacatccatgagcctgataaaagttagagtctaaaagtaataattaacaaagatgggaagtaacagaaaatcttgtccattactggttaaagtataaactgatacagctactttatagaatattactttatagaataaagttgtgagtatgtatatgcagtgactcagcatmttcattgctagtatgtactcaagagaaacttacaggagtggactaggaagtaaatacaaaatgattacaacattgtttgttatatcaaaaaataaaaaagacc

SEQ ID NO: 344494 - DNA, 400 bp, Homo sapiens
ggtcctgtgtccatcttttcagattctgtatcccagcacttaggacatagacaaacacgaagatgacaatcaatatttgccaaaatgaaaaaacaaaagaaacgtaacatcatgtaaaagaagctggttaggtggagaaatttmtttaccatagtcttgcttgtggatccagtagtgacttttacattttatatctaaatagaagctggaggctttgttggggactcataggcataaaatattatgctatttattatagagttaaatgctacaaagacaaatctaattaataggcctattttcctttttaaattctactcataatttcttcatagtttttatgataaaaggttggattttgattagaactcccatgcttttgtgtcagaattaaaactgg

SEQ ID NO: 344495 - DNA, 590 bp, Homo sapiens
cactcctccgtggaactcctctgacatattaaacattgcagtccattataagctgcaagaggacagggatttttgcctgttttattccctactgtatcaccaggggctacagcaatmtctgacaaacagtgggcatgtaatgagtatttgttaagtgaagtaataaattcaatcaaatcacatcacctgtttaaagcacttcattggcttcacattgcacttagaataaagagaaattctttttatacaatataagttcctgcagaatgcagacactttctacttctccagcctcttttcaactcctctcctactagcttctgtatttaagccacattagacctttcttcagttttttatatagactttgttgcatcacacctcagagattctgtacatgttcttcctcctgcctagaaaggatcgtccctccactttcgccaactaatccctgctcaacttttcgtctcagcaggaggcccattctctttggcaatcctctggcctccagcccatttattatatgctcacatgtcaacatgtacttcgtacagcatgtaacacaattgcacttttatattttaacaaat

SEQ ID NO: 344496 - DNA, 562 bp, Homo sapiens
aggtttgtggaatgaaagaggaaaagaaagaattaatattcctttaaattaggatggcaaagatcgtatatagaaaattggctaagttgtggtccattcatgtttgctcccaattaaggagcacagctatgaaaaggaaggcttcaaattaataaccaatagattttttwaaaaagaaaactggccaggtactgtggcttatgtctgtaatatcagcatgttgggaggccaaggcaggattacttgagcccagaaattccagactagcctgagaatttggcaaaactctgtctctacaaaaaatacaaaaattagccaagtttggtggcatgtgcctgtagtaccagctacttgggaggctgaggtggaagaatagcttgagtctgggaggtcaaggctgcaatgagctgtgatcgcaccactgcactcaagcctgggtggtagagtaagaccctgtctcaaaaaaaaaaaaaaaagaaaaatcactaagcaaaataagacatgtgaaggatcatgtcaaagttaagaaaaattaggggaacattaaaagctttcttcccaa

SEQ ID NO: 344497 - DNA, 562 bp, Homo sapiens
aggtttgtggaatgaaagaggaaaagaaagaattaatattcctttaaattaggatggcaaagatcgtatatagaaaattggctaagttgtggtccattcatgtttgctcccaattaaggagcacagctatgaaaaggaaggcttcaaattaataaccaatagattttttaaaaaagaaaactggccaggtactgtggcttatgtctgtaatatcagcatgttgggaggccaaggcaggattacttgagcccagaaattccagacyagcctgagaatttggcaaaactctgtctctacaaaaaatacaaaaattagccaagtttggtggcatgtgcctgtagtaccagctacttgggaggctgaggtggaagaatagcttgagtctgggaggtcaaggctgcaatgagctgtgatcgcaccactgcactcaagcctgggtggtagagtaagaccctgtctcaaaaaaaaaaaaaaaagaaaaatcactaagcaaaataagacatgtgaaggatcatgtcaaagttaagaaaaattaggggaacattaaaagctttcttcccaa

SEQ ID NO: 344498 - DNA, 562 bp, Homo sapiens
aggtttgtggaatgaaagaggaaaagaaagaattaatattcctttaaattaggatggcaaagatcgtatatagaaaattggctaagttgtggtccattcatgtttgctcccaattaaggagcacagctatgaaaaggaaggcttcaaattaataaccaatagattttttaaaaaagaaaactggccaggtactgtggcttatgtctgtaatatcagcatgttgggaggccaaggcaggattacttgagcccagaaattccagactagcctgagaatttggcaaaactctgtctctacaaaaaatacaaaaattagccaagtttggtggcatgtgcctgtagtaccagctacttgggaggctgaggtggaagaatagcttgagtctgggaggtcaaggctgcaatgagctgtgatygcaccactgcactcaagcctgggtggtagagtaagaccctgtctcaaaaaaaaaaaaaaaagaaaaatcactaagcaaaataagacatgtgaaggatcatgtcaaagttaagaaaaattaggggaacattaaaagctttcttcccaa

SEQ ID NO: 344499 - DNA, 408 bp, Homo sapiens
gctggaaaacttatccttcaaaaatgaggaagaaattaagacatttccggatttttttttaaaactgaaaaaaatccatttatccctgaatttgmcattcaagaagtgttaagtccttcaggttgaaataaatgaactctaggcaataactataaaagtaaataagcaagctgtatgaatatacaaagctctctggtaaaggtaaatacataaacaaatataaaaacagtcctattgtaattttggtttgtaactctgctttttattttctacataatttaaaagggaaatgcataaaatgtaattgtaaatctgttagctggtatacaatgaataaagatataatttgttacatcaataacataaaaagagtagagctatatatatagcagtagaattttggtatgt

SEQ ID NO: 344500 - DNA, 408 bp, Homo sapiens
gctggaaaacttatccttcaaaaatgaggaagaaattaagacatttccggatttttttttaaaactgaaaaaaatccatttatccctgaatttgccattcargaagtgttaagtccttcaggttgaaataaatgaactctaggcaataactataaaagtaaataagcaagctgtatgaatatacaaagctctctggtaaaggtaaatacataaacaaatataaaaacagtcctattgtaattttggtttgtaactctgctttttattttctacataatttaaaagggaaatgcataaaatgtaattgtaaatctgttagctggtatacaatgaataaagatataatttgttacatcaataacataaaaagagtagagctatatatatagcagtagaattttggtatgt

SEQ ID NO: 344501 - DNA, 408 bp, Homo sapiens
gctggaaaacttatccttcaaaaatgaggaagaaattaagacatttccggatttttttttaaaactgaaaaaaatccatttatccctgaatttgccattcaagaagtgttaagtccttcaggttgaaataaatgaactctaggcaataactatawaagtaaataagcaagctgtatgaatatacaaagctctctggtaaaggtaaatacataaacaaatataaaaacagtcctattgtaattttggtttgtaactctgctttttattttctacataatttaaaagggaaatgcataaaatgtaattgtaaatctgttagctggtatacaatgaataaagatataatttgttacatcaataacataaaaagagtagagctatatatatagcagtagaattttggtatgt

SEQ ID NO: 344502 - DNA, 247 bp, Homo sapiens
catggtggctcatgcttataataccagtactttgggagrgggtggtggggggattgcttgaggccaggagttccagaccagcctaagaaacaaagcaagaccttgtctctagtaaaaataaaaaaataaaaataattggccaggcatagtggcatgtgcctatagtcccaactactgaggtggaaggatcacctgagcctaggaggtcaaggctgcagtgagttgagactgtgccactacactgaag

SEQ ID NO: 344503 - DNA, 247 bp, Homo sapiens
catggtggctcatgcttataataccagtactttgggagagggtggtggggggattgcttgaggcyaggagttccagaccagcctaagaaacaaagcaagaccttgtctctagtaaaaataaaaaaataaaaataattggccaggcatagtggcatgtgcctatagtcccaactactgaggtggaaggatcacctgagcctaggaggtcaaggctgcagtgagttgagactgtgccactacactgaag

SEQ ID NO: 344504 - DNA, 559 bp, Homo sapiens
ggagaatctgcaaaacagaatagcacttatggtattatttatgaatatgtacagaaagcatacatatacaatgtcaaaaacaaccagaaacctatgagtaatctaaaaacaataataagcattccaaaaattaacaatgattttaaaacattttacaacaatcaaatgtacatgtctagaaagggtttggtaacacaaaaatcagctaatatgattgtttacttgtaaccactgctcacgaaccagcttggatattatttttcaccaaggaaataaacacttctctttggactaactcccatgcggcagaaccagagcaaggcatttattgctattcggcagctctttgaaaaakcaatccaaaagagaaactctatggaagacccatcttcttcttgtttctctgatactctgcactctgaaaacgaactaaagtgaaaaaagaaaatgagagagacacaccgagaagcaaatacgaacgatggagaaagccaaactggtgcttccaaacatcaaatcagagaatgttgcccttgtcctggaattccccttgagttac

SEQ ID NO: 344505 - DNA, 644 bp, Homo sapiens
gagactctttttgtataaaagatctagctaatttatactaaagcttttgtgtggatatttaattattcagataattaccttaatttgccaatggaaattcagctatgcctaaatggcgttaagtttgggaatataggccagtgcttttcattttgttttattaccttactcagaacattggtttgttcaatcttctattgttctttttacacttttattccaggttaatttatttttacagctccaaatagcgcctttgtgtgaataaagtctaaaccacggataatttcaattttatcttctcagacaatatcaattctcatctttctagatgtctactggacatttccttttaaatagctcatcacaatcttgaggtccatgtgcctaaaatcaaactggtaatctaaaaatcacatttcattttttgaccccaaaccagctagcttcactgcggtaccaaccttcacttttcctttcacccctttgtcttccattcctttaagcaacattcctcagagwtattcatcctttttgttttcaaactttcttgccgctttctctttaatccaacctaatgaggcttttgcctctactcctccaagaaaacagctatcaggtaagacctccatgttgttaattca

SEQ ID NO: 344506 - DNA, 625 bp, Homo sapiens
cccacttctttctatctctaccatgatcatagtccaagccactttggctatagtctcctaaatgatttccttctttaacctccaatcttttctacacagagcatccagaatgatattttagaataatagagatcgtgccattaccatgcttaaatcctccagtggctttccatcatcagacctaaagccttctctgaattaaaaagctttattctaacccctgcttgcttctttaaccacccctcaattactctttatatctccacctatgattctatcaaaatggtcttttttttattgcttggacttggcaaacttgttttgcctcaactgttctgctacttgaaatactttctctattttttcatggctgacttcttgtcatcatttgtaattttcagcttaaatatcaacctcctcagagaggctttttctgcccatcctaaaacaggtagctgattactcacctgacatcatccaattttaattctttgcattgtattatagttattgatatctaaccgtttctattgtttatctttaaaaaaatttatgtcttaacttttcttttcttgtgcataatataagatcccatgaaggcttsgtcttgcttattccttttgta

SEQ ID NO: 344507 - DNA, 534 bp, Homo sapiens
acaactagcttcaaattttgcctataacacctaccatttgtgagaccatgggtaaatcattcaccttgtctgactttacagttttttccctttgcgtcagtgatattagaacattaactacttcagaaagtgttggaagtattaatgaaggatactttacattgattaaactaagaactttcttctctaccttctcttttgaaaataataaccctaaataccstgtgtaacccagctcattcagtcactcaacactgtaaaataaagatgtacacagtgttaaaaaagtggctatataaaaacatattcaacacatttaggtataaagttatttaaatataatcttaatattatgtgttctattatttgtttaaattctccaaacaaaatgaaatgttcaatttaatattaaatgtgagggaacagtatttcaagccttcaaccaccatgacattgtgttttcacaaataaattttaaagtctatccaaagcaactaaacaaaggtatttgtaccgacacccatttcaacacgg

SEQ ID NO: 344508 - DNA, 638 bp, Homo sapiens
gtgggcaaatctgtgaagttttcagtgttcaactttccatttaaattcctctttccccatctcagtggttagtctacccgtatatgcagaagctttgattttctaagattctttctattatctaccccccacccactcatcgaaacaggaagggytctaatgtctgccagttataggtgttaactggttgattgactaatgacccttgattgtgaatgagcttctgtaagtgtctaaccatggtcaggtccagttatattaatccttttgtctctaattatggaataaaatagtgcatctccattaaaggaattttgggcatctccaagtaaattggccttccttttgagagtaaggccaactctgaaggtaagtctgctggacttcttttaggataattgtatatatgctcagaagggacaaaagtcctctttttgaattggccttttaatgacttagggagaataggttcagaaggcactgagaccctgttaaatccaggtcatcagaagaaagaagtggagacataatctttagaatgagggtcccaggcaaaacttggtctctgaggagaacagagcagaacgaaagtgctgttttgagaaccaagactaggattctaattcagggaaacaaga

SEQ ID NO: 344509 - DNA, 587 bp, Homo sapiens
atttgtgtcctagttacttttgtagtccagtcatcttacttgcctatagataccccatgccatagttgtctacactaygtgaagtggcgtgtgtagttctaccagcctgaaacatttctcctccctgtctggtgggtaaactcttcaaagtctatcagaactggtcatttaggtcatttctatgaatacttcttgttccaaagtagacttaggtccacaggatgctgtgtccagctctaaagagaagctgtgacattgttttcaatcattcatttatttgccagttgcctccatcttactgaatttttggagaaaacttttgtatcatctgaccttatcagactggtatatagttgattttcaataaatacttgttgactgaactaaatgtgtatggcagtggtaatggtgggaggggattgcgttcaaggctggaaagaggaaaggtacataccaaacagcttcccctctgaggactaatttgagaaaactcaatacacaactgtgagaaagatattgcagacaagactattgactgggatttataaactgtgcccagagaacagcaggatttttaaggctatatg

SEQ ID NO: 344510 - DNA, 587 bp, Homo sapiens
atttgtgtcctagttacttttgtagtccagtcatcttacttgcctatagataccccatgccatagttgtctacactatgtgaagtggcgtgtgtagttctaccagcctgaaacatttctcctccctgtctggtgggtaaactcttcaaagtctatcagaactggtcatttaggtcatttctatgaatacttcttgttccaaagtagacttaggtccacaggatgctgtgtccagctctaaagagaagctgtgacattgttttcaatcattcatttatttgccagttgcctccatcttactgaatttttggagaaaacttttgtatcatctgaccttatcagactggtatatagttgattttcaataaatacttgttgactgaactaaatgtgtatggcagtggtaatggtgggaggggattgcrttcaaggctggaaagaggaaaggtacataccaaacagcttcccctctgaggactaatttgagaaaactcaatacacaactgtgagaaagatattgcagacaagactattgactgggatttataaactgtgcccagagaacagcaggatttttaaggctatatg

SEQ ID NO: 344511 - DNA, 547 bp, Homo sapiens
gaaagatattgcagacaagactattgactgggatttataaactgtgcccagagaacagcaggatttttaaggctatatggacataagtgttccataatgttttagaagtgaaaacaaaakaattgggagttattaagatgtccacacctttcagtttgagtcttaaattaatttgcccattatgcttttttaaaaaagcaatttaaactggaaaaactgctataaaatttctctgtgaccttgggaaagtcatttaacatgaccaggcctcaaagtgcttatcaaagaaatgaaaaggatttagtattcacaccaaaacaatattttgttcttcagtgacatcttaatagattaacagaagccatattttgtaggcttaacacatagaatctgacttctttccccgacttaattgatgggttgctcaataatctccctacccaacttgttttctctcatcagcttgctacaatatttaaaattcccaccaggaccttcttgagttcaggattatctctagaatgccttctttaaaatgcaaacaaat

SEQ ID NO: 344512 - DNA, 553 bp, Homo sapiens
tagttctctgacccattgaatctgagcaggccctgtaactatgttagccaataggattaccagtggtgaagttattccagtcctggatatcaccattgattggcctggaagcttctgcttcctatcttttggaagtctattgccattaaagaagagcaactgctctgagaccatcattgtgagaagcaaaaaaacacatggagaggtcctagagtcttgtggaaatttaaaaaaaaaaaaaaaatcttggatgttgtttctccagctttagcygccctaggtgacaccatgggaatcagaggccaactacccatataaacccttcctgaatttctgacccacaaaatgatgagcaaaatatatatgttttaagttactaggttttgtggtcattttaatgtagtaatagatggctggaacatgatatgtatgcccttcccctccccacaaaaaggatgtcaaaaattaatttaaagaagtcccgagttggtagcactgggaaactgccactgttaaaagcagaaccaaatgaaccaaacgatagtcagccaaa

SEQ ID NO: 344513 - DNA, 515 bp, Homo sapiens
gggttaaaaaaaggcgaaaccggagaaaggttgtggttctaggcaaatgcctagcggcctcctcatttgcaagcaagcagcgttttgctgataaaatgtttccacattctcttaaaatgctatagaataattcttaaaatagacacaagttacatatcctactaaccacttacaacttttgagtagagaacaagtatcctgcacccctcccttctcccctcctccccgtcgccccatacaaagttctcactattaaaagcaacagaaaattgaaaattttcaagaaaaaaagttgaacttacagtagccaaacattattgaaaaaagtaggaaatataattaatgtctgtcctgcgcggtgccactgcaacctgcagccagcttttgcccagtgaatgcacgagctttcaactgcaaaaacactggattcattaaccatctgaatgcaaaacgtaagcatgctttgagttyttaaagctgaccaaagtttttttttttttttttttaaatgtgta

SEQ ID NO: 344514 - DNA, 618 bp, Homo sapiens
gaccccaggtgtcggatgcctggctccatcctctgcaacttgcaagggagttaccttggagagtggggagttaattctaaacttctttaccaggcattttagtagccacgctggtcttcaaataatttaattgggaggtggctggatgaccacagagaggttgcaaaagatagttatccccattaaaagaaataccatgatttcagtctttcctgacataattaaaggctttggtaacactcctttattttgcctcatgctgtgaaaaaaatcacttacttctccagcaaatgaaactttaaaataaattctgcagtttaatttctgcttttaaaagttagtaggtatacgaggaaacagagaaagcattagaacaactgagttacacttcagctatttagcagtttaacattagarggaagaatacagccagttttcaacttagccaacttttaaaactacatgtgttcctggaaaataatacccgactagagtcaatttgcatgagattctaagctaggatctcaagaaggtgataaaatatatgaaatttcttgagtaaatggttggggaggatttgtaagcatctgaggatctagtgatctattagaagcacaa

SEQ ID NO: 344515 - DNA, 657 bp, Homo sapiens
caactgggtctttgatattttctttggctgaagaaaagtcaaaggtagctagaaagctagaaaactaccctgttagtgtgtagcttgaagggggtgggggtggggttgaaacactttttaaaaataattttaaagtttgaataatgttacctaattatatgaatattctttggaactgggctaacaatgtaactacaaaataaagcttctgggatttcaatgtgaagaaagtaaagaataatctgctggtttctgtagaggcaggtaccscatatttttcttttaaaccagtccatctgaattcaaaagactgagagagttcatctcaataatatgtgtgctttctaaagagtctttctggaatttcattttaaggctggaaaataatccagtgtatatacatgctagtcttaaactactcttaatttcctgctattgaatattgcctctatagtagctcattgattcacattgttcttagaatacagagccagagctaggcttttctattgttctctcctcatctccatgtcccacacacaatttttttcccagtgaagtgaagttttgtaaaataacaacaaaaacaaaaacaaaaaaattagaaaatgaaatattaaaatattcctgttgaatatcaaatgctactccaatctc

SEQ ID NO: 344516 - DNA, 571 bp, Homo sapiens
gggcagccgatgctggggactgcacccgggggctggggggtctcggaagcgaggaggccttgcctagctgggctggcccggggtcaggccctgtaggtgagggccaaggcgaracgggatgacagctgagcctgcccgggagcagaggcgcccacccatccttactgtgggctctccgtgcccccacagagctttcaaacttgaaagaggcccctgggacccggcgtgaccctagcggtggggagaagttgggcccgcgaggcctcaggcgaagccgcgggctcctccggaaggaaggaggagggtgaagtcccctgtcctagtcccaggggtgggagtgggaagctgttggtggtgatgcccggagcagcggaagcccgcggcttttcggaggaggggagcggctcgcactcctacggggcatccttgccaactttctgtcacaagagggggcggggagaaaccaaggcttttcgaggagggcgctgtccccctctggaactcgtccggcctgagtggcacttagagctcagtttctcttcggaagcctgtgctccccgaccgcggttgc

SEQ ID NO: 344517 - DNA, 590 bp, Homo sapiens
ccatctttggggggagttaataaagtattctgaatgcatgatctaacaaaactcggggatcgttctatgttttattgttacccccctgcataaagtcttctgaagctgaaaagagaaaggaaagggcttttgtgttagttgatccttggctattctagggctcaggttggtgtgaaagggatgaggaggtcacttgaaatctccttttatctactcttattttctctctggatcagcaactttgaatagacatcatctaatcgctcttaatrgaaagaaactatgggagcaacaaaaatgcctttactccagaagtgaatacatgcatgcggacagctagctgagctttcatagaactgaatctctgcacacatgtacttaaagatttttcagttcatggatatatatgtcaatatttcccatacatggggggcgatgattaggtaggttattttaccctcatgcataagtatgcacacacgtctaccttagaattctctaacaagcagtctaggtgatactttcagctgactcttcatttagctttttcatgccctcactctctgggcatatttaagtactgaaaaaaa

SEQ ID NO: 344518 - DNA, 600 bp, Homo sapiens
gacacaaataaatggaaagatatcccatgttcatagactggaagaatattgttaaaactgtcatactacccaaagtgatctgcaggtttaatgcaatacctgtcaaaataccaatgacatttttcatggaaatagaaaaaaaaatcctgaaattcatacagaatcacaaaaactccaaatagcaaaagcaatccttagcataaagaacaaagctggaagcatcacactatctgacttcaaaatatactacaaagctataataaccaaaacagcatggtactggcataaaaatagataaataaatcaatgaaacagattagagagccaagaaataaatttatgtacctacagccaactgattttcaacaaaggcacaaagaataaacattacaaaaaagacaatgtcttcaataaatgatgatgagaaaactgaatatccatatgtagaagaatgagaatagatatctacctctcatwgatatggtttggctctgtgtcctcacccaaatctcatcttgtagctcccataattcccacgtgttgtggaagggacctggtgggagatgattgaatcatgggagtgggtctttcctgtgctgt

SEQ ID NO: 344519 - DNA, 579 bp, Homo sapiens
gttcccttggcttttccagcttctggaagccacccccattccttggatcatggcccctgactccatcttcaaagccagaggtgaagcatcttcaaatctccctctcttacctctgctttcatcaccacatctcctgctccaattctgaatctcctactctctttcttttataaagacccttgtgattgctgggcatggtggctcccacccagaatcccaacactttgggaggtcaaggcaggaggaacacttgaggcccraagtttgaaactagcatgaaaaacacagtgagacccccacctctagaaaaaaataaaaataaatattagcccgacatggtggtatgcgcctgtagtcccagctacttgagaggctgaggtgagacaatcgatttagcccaggagtttgagatcagcctggacaacataactaaatctcatctctacaaggacgaggtgggaggatcacttgagcccaggaatttgtggccagcctgggcaacaaaagaagaccccatctggccaacatggccaacctggccaccatggcgaaactcttgactacaaaaatgagctgggc

SEQ ID NO: 344520 - DNA, 579 bp, Homo sapiens
gttcccttggcttttccagcttctggaagccacccccattccttggatcatggcccctgactccatcttcaaagccagaggtgaagcatcttcaaatctccctctcttacctctgctttcatcaccacatctcctgctccaattctgaatctcctactctctttcttttataaagacccttgtgattgctgggcatggtggctcccacccagaatcccaacactttgggaggtcaaggcaggaggaacacttgaggcccgaagtttgaaactagcatgaaaaacrcagtgagacccccacctctagaaaaaaataaaaataaatattagcccgacatggtggtatgcgcctgtagtcccagctacttgagaggctgaggtgagacaatcgatttagcccaggagtttgagatcagcctggacaacataactaaatctcatctctacaaggacgaggtgggaggatcacttgagcccaggaatttgtggccagcctgggcaacaaaagaagaccccatctggccaacatggccaacctggccaccatggcgaaactcttgactacaaaaatgagctgggc

SEQ ID NO: 344521 - DNA, 579 bp, Homo sapiens
gttcccttggcttttccagcttctggaagccacccccattccttggatcatggcccctgactccatcttcaaagccagaggtgaagcatcttcaaatctccctctcttacctctgctttcatcaccacatctcctgctccaattctgaatctcctactctctttcttttataaagacccttgtgattgctgggcatggtggctcccacccagaatcccaacactttgggaggtcaaggcaggaggaacacttgaggcccgaagtttgaaactagcatgaaaaacacagtgagacccccacctctagaaaaaaataaaaataaatattagcccgacatggtggtatgcgcctgtagtcccasctacttgagaggctgaggtgagacaatcgatttagcccaggagtttgagatcagcctggacaacataactaaatctcatctctacaaggacgaggtgggaggatcacttgagcccaggaatttgtggccagcctgggcaacaaaagaagaccccatctggccaacatggccaacctggccaccatggcgaaactcttgactacaaaaatgagctgggc

SEQ ID NO: 344522 - DNA, 579 bp, Homo sapiens
gttcccttggcttttccagcttctggaagccacccccattccttggatcatggcccctgactccatcttcaaagccagaggtgaagcatcttcaaatctccctctcttacctctgctttcatcaccacatctcctgctccaattctgaatctcctactctctttcttttataaagacccttgtgattgctgggcatggtggctcccacccagaatcccaacactttgggaggtcaaggcaggaggaacacttgaggcccgaagtttgaaactagcatgaaaaacacagtgagacccccacctctagaaaaaaataaaaataaatattagcccgacatggtggtatgcgcctgtagtcccagctacttgagaggctgaggtgagacaatcgatttagcccaggagtttgagatcagcctggacracataactaaatctcatctctacaaggacgaggtgggaggatcacttgagcccaggaatttgtggccagcctgggcaacaaaagaagaccccatctggccaacatggccaacctggccaccatggcgaaactcttgactacaaaaatgagctgggc

SEQ ID NO: 344523 - DNA, 576 bp, Homo sapiens
aatgtgctgggtgggcagaaatttcttgtgagtttatagaaagtccttgtgatagtgcttatygtggacacacacacaagatcccctttttcatgactcggctccactttgctttgggtctgatgtaagtgactttgccttgtcattggcaactttcactgtagtataatctgcacattaaagttacctaacaatagtacaaagaaagaaaattaaaggtatatctctttcaaaaatataaaccccaaaattgttaggaaattgtagtgagtataaaagataattcattataatagacatctcaagcttcacagaattctgacctttgctacactctcatccacaatcttttctcctagtaaatggcagctccttctgttaagttgctgaggcttcttattgcttttttcttcaaataacagtcagaactgaacaactgtaatcatcctagtccatacaattgttacattttcatttaaagaagatcaatgtgtgattctttttttatatatttctggacaattctttatattttaatagtcagaatttgatcaggaaaacagaagacatcctatg

SEQ ID NO: 344524 - DNA, 576 bp, Homo sapiens
aatgtgctgggtgggcagaaatttcttgtgagtttatagaaagtccttgtgatagtgcttattgtggacacacacacaagatcccctttttcatgacycggctccactttgctttgggtctgatgtaagtgactttgccttgtcattggcaactttcactgtagtataatctgcacattaaagttacctaacaatagtacaaagaaagaaaattaaaggtatatctctttcaaaaatataaaccccaaaattgttaggaaattgtagtgagtataaaagataattcattataatagacatctcaagcttcacagaattctgacctttgctacactctcatccacaatcttttctcctagtaaatggcagctccttctgttaagttgctgaggcttcttattgcttttttcttcaaataacagtcagaactgaacaactgtaatcatcctagtccatacaattgttacattttcatttaaagaagatcaatgtgtgattctttttttatatatttctggacaattctttatattttaatagtcagaatttgatcaggaaaacagaagacatcctatg

SEQ ID NO: 344525 - DNA, 576 bp, Homo sapiens
aatgtgctgggtgggcagaaatttcttgtgagtttatagaaagtccttgtgatagtgcttattgtggacacacacacaagatcccctttttcatgactcggctccactttgctttgggtctgatgtaagtgactttgccttgtcattggcaactttcactgtagtataatctgcacattaaagttacctaacaatagtacaaagaaagaaaattaaaggtatatctctttcaaaaatataaaccccaaaattgttaggaaattgtagtgagtataaaagataattcattataataracatctcaagcttcacagaattctgacctttgctacactctcatccacaatcttttctcctagtaaatggcagctccttctgttaagttgctgaggcttcttattgcttttttcttcaaataacagtcagaactgaacaactgtaatcatcctagtccatacaattgttacattttcatttaaagaagatcaatgtgtgattctttttttatatatttctggacaattctttatattttaatagtcagaatttgatcaggaaaacagaagacatcctatg

SEQ ID NO: 344526 - DNA, 608 bp, Homo sapiens
atcttagcctgacagtctagagtgtgggcacagaacccaagcttataggaatttctgaaaggtctgtaaatcttatccagatggacagtgggagctcataaagaattctgcaagccatcacatctgtcaaacctgctatgtctaatccttaagcctgctttatgtgaagacctcctcttcactcctcayttccagctctcatgagtttctttcataggcaaacccaaacctggaacaatgtgcctgaagacttcgggtgacacagtacccagacttaaataggaggggagccatggtggaagtggccatccagcacaattttcttggtctttactcatagttttgattccttaaaaaaattaaccacattaaaatatgtgtttcataatctacatctaataatacaaatatttaaagtcttttcaagattgaatatgctacccatgttgctgctacccccattttgtgtgtgtgatttttgtgtgtgtgttagaagctcatgacctttgaaacctgctcttgtgagcttgctttgatgatttatttgtccagagaggatttttttcctacctggcattttggactgctatcaacctgagaccactttg

SEQ ID NO: 344527 - DNA, 523 bp, Homo sapiens
aggaggggagccatggtggaagtggccatccagcacaattttcttggtctttactcatagttktgattccttaaaaaaattaaccacattaaaatatgtgtttcataatctacatctaataatacaaatatttaaagtcttttcaagattgaatatgctacccatgttgctgctacccccattttgtgtgtgtgatttttgtgtgtgtgttagaagctcatgacctttgaaacctgctcttgtgagcttgctttgatgatttatttgtccagagaggatttttttcctacctggcattttggactgctatcaacctgagaccactttgaattaaattctcagcttgcaaatttggaagccacacagattgtgtgagttcaggctgaaacctgtttgagagctggattctggctataaactctacagggaacattttctctctccactcagagctgagaccatagggaaatttatttgctagctctctttgcaggtttattttatttatttttttaatttctag

SEQ ID NO: 344528 - DNA, 608 bp, Homo sapiens
atcttagcctgacagtctagagtgtgggcacagaacccaagcttataggaatttctgaaaggtctgtaaatcttatccagatggacagtgggagctcataaagaattctgcaagccatcacatctgtcaaacctgctatgtctaatccttaagcctgctttatgtgaagacctcctcttcactcctcacttccagctctcatgagtttctttcataggcaaacccaaacctggaacaatgtgcctgaagacttcgggtgacacagtacccagacttaaataggaggggagccatggtggaagtggccatccagcacaattttcttggtctttactcatagttttgattccttaaaaaaattaaccacattaaaatatgtgtttcataatctacatctaataatacaaatatttaaagtcttttcaagwttgaatatgctacccatgttgctgctacccccattttgtgtgtgtgatttttgtgtgtgtgttagaagctcatgacctttgaaacctgctcttgtgagcttgctttgatgatttatttgtccagagaggatttttttcctacctggcattttggactgctatcaacctgagaccactttg

SEQ ID NO: 344529 - DNA, 523 bp, Homo sapiens
agtctgttttatatcagagatcttagcctgacagtctagagtgtgggcacagaacccaagcttataggaatttctgaaaggtctgtaaatcttatccagatggacagtgggagctcataaagaattctgcaagccatcacatctgtcaaacctgctatgtctaatccttaagcctgctttatgtgaagacctcctcttcactcctcacttccagctctcatgagtttctttcataggcaaacccaaacctggaacaatgtgcctgaagacttcgggtgacacagtacccagacttaaataggaggggagccatggtggaagtggccatccagcacaattttcttggtctttactcatagttttgattccttaaaaaaattaaccacattaaaatatgtgtttcataatctacatctaataatacaaatatttaaagtcttttcaagattgaataygctacccatgttgctgctacccccattttgtgtgtgtgatttttgtgtgtgtgttagaagctcatgac

SEQ ID NO: 344530 - DNA, 523 bp, Homo sapiens
aggaggggagccatggtggaagtggccatccagcacaattttcttggtctttactcatagttttgattccttaaaaaaattaaccacattaaaatatgtgtttcataatctacatctaataatacaaatatttaaagtcttttcaagattgaatatgctacccatgttgctgctacccccattttgtgtgtgtgatttttgtgtgtgtgttagaagctcatgacctttgaaacctgctcttrtgagcttgctttgatgatttatttgtccagagaggatttttttcctacctggcattttggactgctatcaacctgagaccactttgaattaaattctcagcttgcaaatttggaagccacacagattgtgtgagttcaggctgaaacctgtttgagagctggattctggctataaactctacagggaacattttctctctccactcagagctgagaccatagggaaatttatttgctagctctctttgcaggtttattttatttatttttttaatttctag

SEQ ID NO: 344531 - DNA, 523 bp, Homo sapiens
aggaggggagccatggtggaagtggccatccagcacaattttcttggtctttactcatagttttgattccttaaaaaaattaaccacattaaaatatgtgtttcataatctacatctaataatacaaatatttaaagtcttttcaagattgaatatgctacccatgttgctgctacccccattttgtgtgtgtgatttttgtgtgtgtgttagaagctcatgacctttgaaacctgctcttgtgagcttgctttgatgatttatttgtccagagaggatttttttcctacctrgcattttggactgctatcaacctgagaccactttgaattaaattctcagcttgcaaatttggaagccacacagattgtgtgagttcaggctgaaacctgtttgagagctggattctggctataaactctacagggaacattttctctctccactcagagctgagaccatagggaaatttatttgctagctctctttgcaggtttattttatttatttttttaatttctag

SEQ ID NO: 344532 - DNA, 444 bp, Homo sapiens
aatgaaccttccttccatacaatttcttctcctaaaytgtactctggctctcttatcacatacaaatgtctatgttaggtatttgtgtctgtcttgattcttggtaggcttctaaactctgtgaatgttggactgtgatgtagacatcatttcaccgcacactctgtaaccaccaaaccttagcagcttattcagtaagcacatacttggctcttaatgagtattgcttaaattgatgaattgaattagtattttaccttctctgttgcttagctaagcagaagaatttgtcatttttttaatttagtgactggttctattaaaagttacctttgtctatatcattttgttatactaaagcacaaatgtataaggtcaaaaaacattctcaagattttgtttaaaccacagccctcagttgtgtatatttatctcttgttttca

SEQ ID NO: 344533 - DNA, 444 bp, Homo sapiens
aatgaaccttccttccatacaatttcttctcctaaattgtactctggctctcttatcacatacaaatgtctatgttaggtatttgtgtctgtcttgattcttggtaggcttctaaactctgtgaatgttggactgtgatgtagacatcatttcaccrcacactctgtaaccaccaaaccttagcagcttattcagtaagcacatacttggctcttaatgagtattgcttaaattgatgaattgaattagtattttaccttctctgttgcttagctaagcagaagaatttgtcatttttttaatttagtgactggttctattaaaagttacctttgtctatatcattttgttatactaaagcacaaatgtataaggtcaaaaaacattctcaagattttgtttaaaccacagccctcagttgtgtatatttatctcttgttttca

SEQ ID NO: 344534 - DNA, 522 bp, Homo sapiens
gttggtgccatttaacctgaattatgatagatgataagtaatttgtcaggggaaaaatactccaggaataaagaacaggtacaaaggtcaggttctgggaagagcttgtcttggtccaggaactaaaaaatgttagagtggctggatctgggaargagacaaaaagttattaaatgaggcagcaggcttcagcaggtgccacattgctcagggccttgtaggccatgctaaggatttggatgttagtgtcagtacaaacaattgagtcataagcagaaagtaaaagcatgattccatcaaatgtttttctctaaacagtaattttataaatacaggttaaatgtgtgtggtcccagctactcaggaggtcccagctactcagtattccttttcaacaaatattaggtgcctactattagccaggtacagcccttagctactttgaatgaagcatatattacaaactggcagaaattcttaaagaatctaaagattgtttatacaccataatctcggtatttt

SEQ ID NO: 344535 - DNA, 444 bp, Homo sapiens
taaaattataaacttgattcgatactctgtggccatataattgttcctaatttggttggagaagggaggcagttagggaagccttccctgagttggtgccatttaacctgaattatgatagatgataagtaatttgtcaggggaaaaatactccaggaataaagaacaggtacaaaggtcaggttctgggaagagcttgtcttggtccaggaactaaaaaatgttagagtggctggatctgggaaggagacaaaragttattaaatgaggcagcaggcttcagcaggtgccacattgctcagggccttgtaggccatgctaaggatttggatgttagtgtcagtacaaacaattgagtcataagcagaaagtaaaagcatgattccatcaaatgtttttctctaaacagtaattttataaatacaggttaaatgtgtgtggtcc

SEQ ID NO: 344536 - DNA, 522 bp, Homo sapiens
gttggtgccatttaacctgaattatgatagatgataagtaatttgtcaggggaaaaatactccaggaataaagaacaggtacaaaggtcaggttctgggaagagcttgtcttggtccaggaactaaaaaatgttagagtggctggatctgggaaggagacaaaaagttattaaatgaggcagcaggcttcagcaggtgccacattgctcagggccttgtaggccatgctaaggatttggatgttagtgtcagtacaaacaattgagtcrtaagcagaaagtaaaagcatgattccatcaaatgtttttctctaaacagtaattttataaatacaggttaaatgtgtgtggtcccagctactcaggaggtcccagctactcagtattccttttcaacaaatattaggtgcctactattagccaggtacagcccttagctactttgaatgaagcatatattacaaactggcagaaattcttaaagaatctaaagattgtttatacaccataatctcggtatttt

SEQ ID NO: 344537 - DNA, 522 bp, Homo sapiens
gttggtgccatttaacctgaattatgatagatgataagtaatttgtcaggggaaaaatactccaggaataaagaacaggtacaaaggtcaggttctgggaagagcttgtcttggtccaggaactaaaaaatgttagagtggctggatctgggaaggagacaaaaagttattaaatgaggcagcaggcttcagcaggtgccacattgctcagggccttgtaggccatgctaaggatttggatgttagtgtcagtacaaacaattgagtcataagcagaaagtaaaagcatgattccatcaaatgttwttctctaaacagtaattttataaatacaggttaaatgtgtgtggtcccagctactcaggaggtcccagctactcagtattccttttcaacaaatattaggtgcctactattagccaggtacagcccttagctactttgaatgaagcatatattacaaactggcagaaattcttaaagaatctaaagattgtttatacaccataatctcggtatttt

SEQ ID NO: 344538 - DNA, 590 bp, Homo sapiens
gagcttgtcttggtccaggaactaaaaaatgttagagtggctggatctgggaaggagacaaaaagttattaaatgaggcagcaggcttcagcaggtgccacattgctcagggccttgtaggccatgctaaggatttggatgttagtgtcagtacaaacaattgagtcataagcagaaagtaaaagcatgattccatcaaatgtttttctctaaacagtaattttataaatacaggttaaatgtgtgtggtcccagctactcaggaggtcccagctactcagtattccttttcaacaaatattaggtgcctactattagccaggtacagcccttagctactttgaatgaagcatatattacaaactggcagaaattcttaaagaatctaaagattgtttatacaccrtaatctcggtattttataaatttcttgaaattatttttatttacactgctttgcagaattttaactggctttgaaataaacaatgacaatagtcctccatgttactagtttcaaattttcccaatacctactaagacattacttaatccacagatttattgtcaatagtttgtatcaaattgtg

SEQ ID NO: 344539 - DNA, 648 bp, Homo sapiens
caattgagtcataagcagaaagtaaaagcatgattccatcaaatgtttttctctaaacagtaattttataaatacaggttaaatgtgtgtggtcccagctactcaggaggtcccagctactcagtattccttttcaacaaatattaggtgcctactattagccaggtacagcccttagctactttgaatgaagcatatattacaaactggcagaaattcttaaagaatctaaagattgtttatacaccataatctcggtattttataaatttcttgaaattatttttatktacactgctttgcagaattttaactggctttgaaataaacaatgacaatagtcctccatgttactagtttcaaattttcccaatacctactaagacattacttaatccacagatttattgtcaatagtttgtatcaaattgtgataacatatttgaaattaatatttcaaattaaagcaaaatcacaaatttatactttatattatgaatgagattcacaaaaggagcatgataatatattctgttgtcatcgcatacaaaataataacatatagagtatgaatcaataatttttcaaatacaaagctattacaattaggaatacaaagaaatcataattaggaatactttttccata

SEQ ID NO: 344540 - DNA, 618 bp, Homo sapiens
ttaaatgtgtgtggtcccagctactcaggaggtcccagctactcagtattccttttcaacaaatattaggtgcctactattagccaggtacagcccttagctactttgaatgaagcatatattacaaactggcagaaattcttaaagaatctaaagattgtttatacaccataatctcggtattttataaatttcttgaaattatttttatttacactgctttgcagaattttaactggctttgaaataaacaatgacaatagtcctccatgttactagtttcaaattttcccaatacctactaagacattacttaatccacagatttaytgtcaatagtttgtatcaaattgtgataacatatttgaaattaatatttcaaattaaagcaaaatcacaaatttatactttatattatgaatgagattcacaaaaggagcatgataatatattctgttgtcatcgcatacaaaataataacatatagagtatgaatcaataatttttcaaatacaaagctattacaattaggaatacaaagaaatcataattaggaatactttttccatattaaccccccatagtggtaacacttgcaaaaagatgggggggggtttt

SEQ ID NO: 344541 - DNA, 556 bp, Homo sapiens
atgttagtgtcagtacaaacaattgagtcataagcagaaagtaaaagcatgattccatcaaatgtttttctctaaacagtaattttataaatacaggttaaatgtgtgtggtcccagctactcaggaggtcccagctactcagtattccttttcaacaaatattaggtgcctactattagccaggtacagcccttagctactttgaatgaagcatatattacaaactggcagaaattcttaaagaatctaaagattgtttatacaccataatctcggtattttataaatttcttgaaattatttttatttacactgctttgcagaattttaactggctttgaaataaacaatgacaatagtcctccatgttactagtttcaaattttcccaatacctactaagacattacttaatccacagatttattgtcaatagtttgtmtcaaattgtgataacatatttgaaattaatatttcaaattaaagcaaaatcacaaatttatactttatattatgaatgagattcacaaaaggagcatgataatatattctgttg

SEQ ID NO: 344542 - DNA, 556 bp, Homo sapiens
atgttagtgtcagtacaaacaattgagtcataagcagaaagtaaaagcatgattccatcaaatgtttttctctaaacagtaattttataaatacaggttaaatgtgtgtggtcccagctactcaggaggtcccagctactcagtattccttttcaacaaatattaggtgcctactattagccaggtacagcccttagctactttgaatgaagcatatattacaaactggcagaaattcttaaagaatctaaagattgtttatacaccataatctcggtattttataaatttcttgaaattatttttatttacactgctttgcagaattttaactggctttgaaataaacaatgacaatagtcctccatgttactagtttcaaattttcccaatacctactaagacattacttaatccacagatttattgtcaatagtttgtatcaaattgtgataacatatttgaaattaatatttcaaattaaagcaaaatcacaaatttrtactttatattatgaatgagattcacaaaaggagcatgataatatattctgttg

SEQ ID NO: 344543 - DNA, 618 bp, Homo sapiens
ttaaatgtgtgtggtcccagctactcaggaggtcccagctactcagtattccttttcaacaaatattaggtgcctactattagccaggtacagcccttagctactttgaatgaagcatatattacaaactggcagaaattcttaaagaatctaaagattgtttatacaccataatctcggtattttataaatttcttgaaattatttttatttacactgctttgcagaattttaactggctttgaaataaacaatgacaatagtcctccatgttactagtttcaaattttcccaatacctactaagacattacttaatccacagatttattgtcaatagtttgtatcaaattgtgataacatatttgaaattaatatttcaaattaaagcaaaatcacaaatttatactttatattatgaatgagattcacwaaaggagcatgataatatattctgttgtcatcgcatacaaaataataacatatagagtatgaatcaataatttttcaaatacaaagctattacaattaggaatacaaagaaatcataattaggaatactttttccatattaaccccccatagtggtaacacttgcaaaaagatgggggggggtttt

SEQ ID NO: 344544 - DNA, 618 bp, Homo sapiens
ttaaatgtgtgtggtcccagctactcaggaggtcccagctactcagtattccttttcaacaaatattaggtgcctactattagccaggtacagcccttagctactttgaatgaagcatatattacaaactggcagaaattcttaaagaatctaaagattgtttatacaccataatctcggtattttataaatttcttgaaattatttttatttacactgctttgcagaattttaactggctttgaaataaacaatgacaatagtcctccatgttactagtttcaaattttcccaatacctactaagacattacttaatccacagatttattgtcaatagtttgtatcaaattgtgataacatatttgaaattaatatttcaaattaaagcaaaatcacaaatttatactttatattatgaatgagattcacaaaaggagcatgataatatattctgttgtcatcrcatacaaaataataacatatagagtatgaatcaataatttttcaaatacaaagctattacaattaggaatacaaagaaatcataattaggaatactttttccatattaaccccccatagtggtaacacttgcaaaaagatgggggggggtttt

SEQ ID NO: 344545 - DNA, 365 bp, Homo sapiens
aaggataatagaaggtccatccatattccagcaaaagacatgatatcattttttaatggtggcatagtattccatggtgyatatgtaccacattttctttatccaatctgtcattgatgggcatttaggttgatcctattcttttgctgttgtgaacagtgctgcaatgaacatttatatgcatgtgtctttatggtagaatggtttatattcatctgggtatatacccagtagtgggattactgggtcgaatggtagctctgcttttagctctttgaggaatcactattctttgcacaatgattgaactgatttgcacacccaccaacagtgtataagcattcccttttctccatagcctcact

SEQ ID NO: 344546 - DNA, 365 bp, Homo sapiens
aaggataatagaaggtccatccatattccagcaaaagacatgatatcattttttaatggtggcatagtattccatggtgcatatgtaccacattttctttatccaatctgtcattgatgggcatttaggttgatcctattcttttgctrttgtgaacagtgctgcaatgaacatttatatgcatgtgtctttatggtagaatggtttatattcatctgggtatatacccagtagtgggattactgggtcgaatggtagctctgcttttagctctttgaggaatcactattctttgcacaatgattgaactgatttgcacacccaccaacagtgtataagcattcccttttctccatagcctcact

SEQ ID NO: 344547 - DNA, 365 bp, Homo sapiens
aaggataatagaaggtccatccatattccagcaaaagacatgatatcattttttaatggtggcatagtattccatggtgcatatgtaccacattttctttatccaatctgtcattgatgggcatttaggttgatcctattcttttgctgttgtgaacagtgctgcaatgaacatttrtatgcatgtgtctttatggtagaatggtttatattcatctgggtatatacccagtagtgggattactgggtcgaatggtagctctgcttttagctctttgaggaatcactattctttgcacaatgattgaactgatttgcacacccaccaacagtgtataagcattcccttttctccatagcctcact

SEQ ID NO: 344548 - DNA, 497 bp, Homo sapiens
cacctggccacattttcttttcattcttatggaaggcagtaktcagcaaaacagttaatcaattgagaatatattaggttgttataggaaccatgaaaaaataaaatagagtgtgtgtaaagaaggcttgatggccaggaagcttttacagggaagtgacatttgaactgagaccaaatacttaaagaagccagttctttgaagagttgatgggaaagtattccaagaagtgggaatggcaaggggaaaggacttaagatgtaacctcagaatgattaaggaggagcatggtacaagaggatgtcagaaacatagccaggaaagagagctatgcttaagtattaggattttattctttgcaaaggaaaagtccattgaagctttaaagcaaggacctaagagttaacataattttttaaggtaccttaaaaattttgctgaatgaagaattcattgaagtgagtcaggaatgtatgattttggacaactgacacaat

SEQ ID NO: 344549 - DNA, 497 bp, Homo sapiens
cacctggccacattttcttttcattcttatggaaggcagtagtcagcaaaacagttaatcaattgagaatatattaggttgttataggaaccatgaaaaaataaaatagagtgtgtgtaaagaaggcttgatggccaggaagcttttacagggaagtgacattkgaactgagaccaaatacttaaagaagccagttctttgaagagttgatgggaaagtattccaagaagtgggaatggcaaggggaaaggacttaagatgtaacctcagaatgattaaggaggagcatggtacaagaggatgtcagaaacatagccaggaaagagagctatgcttaagtattaggattttattctttgcaaaggaaaagtccattgaagctttaaagcaaggacctaagagttaacataattttttaaggtaccttaaaaattttgctgaatgaagaattcattgaagtgagtcaggaatgtatgattttggacaactgacacaat

SEQ ID NO: 344550 - DNA, 499 bp, Homo sapiens
acagttaatcaattgagaatatattaggttgttataggaaccatgaaaaaataaaatagagtgtgtgtaaagaaggcttgatggccaggaagcttttacagggaagtgacatttgarctgagaccaaatacttaaagaagccagttctttgaagagttgatgggaaagtattccaagaagtgggaatggcaaggggaaaggacttaagatgtaacctcagaatgattaaggaggagcatggtacaagaggatgtcagaaacatagccaggaaagagagctatgcttaagtattaggattttattctttgcaaaggaaaagtccattgaagctttaaagcaaggacctaagagttaacataattttttaaggtaccttaaaaattttgctgaatgaagaattcattgaagtgagtcaggaatgtatgattttggacaactgacacaatgcctgaggcatagtttcttcatatggaaattggagacaatgatcatatctac

SEQ ID NO: 344551 - DNA, 497 bp, Homo sapiens
cacctggccacattttcttttcattcttatggaaggcagtagtcagcaaaacagttaatcaattgagaatatattaggttgttataggaaccatgaaaaaataaaatagagtgtgtgtaaagaaggcttgatggccaggaagcttttacagggaagtgacatttgaactgagaccaaatacttaaagaagccagttctttgaagagttgatgggaaagtattccaagaagtgggaatggcaaggggaaaggacttaagatgtaacctcagaatgattaaggaggagcatggtacaagaggatgtcagaaacatagccaggaaagagagctatgcttaagtattaggattttattctttgcaaaggaaaagyccattgaagctttaaagcaaggacctaagagttaacataattttttaaggtaccttaaaaattttgctgaatgaagaattcattgaagtgagtcaggaatgtatgattttggacaactgacacaat

SEQ ID NO: 344552 - DNA, 451 bp, Homo sapiens
tgaactgagaccaaatacttaaagaagccagttctttgaagagttgatgggaaagtattccaagaagtgggaatggcaaggggaaaggacttaagatgtaacctcagaatgattaaggaggagcatggtacaagaggatgtcagaaacatagccaggaaagagagctatgcttaagtattaggattttattctttgcaaaggaaaagtccattgaagctttawagcaaggacctaagagttaacataattttttaaggtaccttaaaaattttgctgaatgaagaattcattgaagtgagtcaggaatgtatgattttggacaactgacacaatgcctgaggcatagtttcttcatatggaaattggagacaatgatcatatctaccttagcagattatataatgaattattttcctagggctcctgtaataaagtaccacaaactgggta

SEQ ID NO: 344553 - DNA, 451 bp, Homo sapiens
tgaactgagaccaaatacttaaagaagccagttctttgaagagttgatgggaaagtattccaagaagtgggaatggcaaggggaaaggacttaagatgtaacctcagaatgattaaggaggagcatggtacaagaggatgtcagaaacatagccaggaaagagagctatgcttaagtattaggattttattctttgcaaaggaaaagtccattgaagctttaaagcaaggacctaagagttaacataattttttaaggtaccttaaaarttttgctgaatgaagaattcattgaagtgagtcaggaatgtatgattttggacaactgacacaatgcctgaggcatagtttcttcatatggaaattggagacaatgatcatatctaccttagcagattatataatgaattattttcctagggctcctgtaataaagtaccacaaactgggta

SEQ ID NO: 344554 - DNA, 494 bp, Homo sapiens
agctatgcttaagtattaggattttattctttgcaaaggaaaagtccattgaagctttaaagcaaggacctaagagttaacataattttttaaggtaccttaaaaattttgctgaatgaagaattcattgaagtgagtcaggaatgtatgattttggacaactgacacaatgcctgaggcatagtttcttcatatggaaattggagacaatgatcatatctaccttagcagattatataatgaattattttcctagggctcctgtaataargtaccacaaactgggtaacttaagcaacagaaatttattgcctcacaattctagaggtgagaagtccagatcaagaagctggcagggctgggctgcctgaaaaggtgctaaggaaggaactgttccagtcctctttctctccttccagtagttccttggcttgtgacagcacagtgtcaattctcatatggcatcctccccgtgtgcctgtctctatgtccaa

SEQ ID NO: 344555 - DNA, 537 bp, Homo sapiens
tccagatcaagaagctggcagggctgggctgcctgaaaaggtgctaaggaaggaactgttccagtcctctttctctccttccagtagttccttggcttgtgacagcacagtgtcaattctcatatggcatcctccccgtgtgcctstctctatgtccaaatctcccttttatttaaggacagagtcacagtggattagaacacccccataacatgaagattgcatgaaattatatacataaataattcaacaacatagcttccaaatagaaaacactcagcctttgtcatctcatcattatttgtttacacctttgtattattggtatagctctagtcttttgaaaggtgcagttactcatctttgtgttttccactcctttatagctaagtgtaaggtgcttttgcaaaatccagtactgcatatttgagaaatgctttttattcctacacatactgcatatactgttacacaattcgattttgtaggtctaatgaagttggtctttctatgagttcctatggctaaaaatagtca

SEQ ID NO: 344556 - DNA, 537 bp, Homo sapiens
tccagatcaagaagctggcagggctgggctgcctgaaaaggtgctaaggaaggaactgttccagtcctctttctctccttccagtagttccttggcttgtgacagcacagtgtcaattctcatatggcatcctccccgtgtgcctgtctctatgtccaaatctcccttttatttaaggacagagtcacagtggattagaacacccccataacatgaagattgcatgaaattatatacataaataaytcaacaacatagcttccaaatagaaaacactcagcctttgtcatctcatcattatttgtttacacctttgtattattggtatagctctagtcttttgaaaggtgcagttactcatctttgtgttttccactcctttatagctaagtgtaaggtgcttttgcaaaatccagtactgcatatttgagaaatgctttttattcctacacatactgcatatactgttacacaattcgattttgtaggtctaatgaagttggtctttctatgagttcctatggctaaaaatagtca

SEQ ID NO: 344557 - DNA, 537 bp, Homo sapiens
tccagatcaagaagctggcagggctgggctgcctgaaaaggtgctaaggaaggaactgttccagtcctctttctctccttccagtagttccttggcttgtgacagcacagtgtcaattctcatatggcatcctccccgtgtgcctgtctctatgtccaaatctcccttttatttaaggacagagtcacagtggattagaacacccccataacatgaagattgcatgaaattatatacataaataattcaacaacatagcttccaaatagaaaacactcagcctttgtcatctcatcattatttgtttacacctttgtattattggtatagctctagtcttttgaaargtgcagttactcatctttgtgttttccactcctttatagctaagtgtaaggtgcttttgcaaaatccagtactgcatatttgagaaatgctttttattcctacacatactgcatatactgttacacaattcgattttgtaggtctaatgaagttggtctttctatgagttcctatggctaaaaatagtca

SEQ ID NO: 344558 - DNA, 587 bp, Homo sapiens
gatatgtcaattttctagagcagccaagttttctaaaagtctacctagccatgtagttatgtagyctcactctcacttaaacaaagaaaattaaaaagcacaccagaaaagacttttcttgttaaaaacacatgtttattgtagaaaatatagtaaggaaaaagaagaaaatataaggcaactagaatttctctagttagagataactattatttatttgagtgtgtgtatatatctatatatatatatatattgacattcagctcttatgtactagatacacacatctactgtttcataagcttttttcacagaatagattataatcagttatgtttgttatcaccacaacattttcttcttgaagaccttctggaatgaggcatttgcttttctatctagagaccctatcctttcaaaaggtcctttctctgtggaaagagctattctggccacagttactgccaagaaatgaggtgttagaaaaggcctaaagttaagtgcagaactgctgtgttttgatgaatattctgttgttttgagaggaggtagaagcattctcagcttcaggatatttgctcactact

SEQ ID NO: 344559 - DNA, 587 bp, Homo sapiens
gatatgtcaattttctagagcagccaagttttctaaaagtctacctagccatgtagttatgtagcctcactctcacttaaacaaagaaaattaaaaagcacaccagaaaagacttttcttgttaaaaacacatgtttattgtagaaaatatagtaaggaaaaagaagaaaatataaggcaactagaatttctctagttagagataactattatttatttgagtgtgtgtatatatctatatatatatatatattgacattcagctcttatgtactagatacacacatctactgtttcataagcttttttcacagaatagattataatcagttatgtttgttatcaccacaacattttcttcttgaagaccttctggaatgaggcatttgcttttctatctagagaccctatcctttcaaaaggtcctttctctgtggaaagagctattctggccacagttactgccaagaaaygaggtgttagaaaaggcctaaagttaagtgcagaactgctgtgttttgatgaatattctgttgttttgagaggaggtagaagcattctcagcttcaggatatttgctcactact

SEQ ID NO: 344560 - DNA, 172 bp, Homo sapiens
aaaaaaaccccaaatagtactttgaacttcacccgcagggagttattcaaattggttgtcagccagttatttcaggttgttgagatcatttggctcttgatyttattaatcatcttagccttccctttcaacaatttgccgactttgtgcaaattttattaatatgtgatct

SEQ ID NO: 344561 - DNA, 494 bp, Homo sapiens
ttacttaaactctataagcttcaayttctttatctataaggtaggtataaaacctgaaagttttggcatgagtttagtaaaactgtctgtgaagcccttgtggactgcttggtccatgtaggcatttgataaatggtggctttatatagaggagggaaatgcaagctatctcaaaaagaaatcagggaaataagaatgccatctgaaatctgtcatatgagaatgaaaggagcatagacaggttttgagtgtggggtgaggagtaggggaggggaggagataagtgaactgcccctcagacttccagggaggagaaaaatgatgtcactgggaactgcagtcatttgaaaagatagcaatcaagcatttctttcagagccctgttcatctttcagtggctttgcttctccagatgcttttgctccttcaattatctctgccttctcccacctcctctccaaccatctcttcccttccttaattcacaatttttc

SEQ ID NO: 344562 - DNA, 494 bp, Homo sapiens
ttacttaaactctataagcttcaacttctttatctataaggtaggtataaaacctgaaagttttggcatgagtttagtaaaactgtctgtgaagccyttgtggactgcttggtccatgtaggcatttgataaatggtggctttatatagaggagggaaatgcaagctatctcaaaaagaaatcagggaaataagaatgccatctgaaatctgtcatatgagaatgaaaggagcatagacaggttttgagtgtggggtgaggagtaggggaggggaggagataagtgaactgcccctcagacttccagggaggagaaaaatgatgtcactgggaactgcagtcatttgaaaagatagcaatcaagcatttctttcagagccctgttcatctttcagtggctttgcttctccagatgcttttgctccttcaattatctctgccttctcccacctcctctccaaccatctcttcccttccttaattcacaatttttc

SEQ ID NO: 344563 - DNA, 494 bp, Homo sapiens
ttacttaaactctataagcttcaacttctttatctataaggtaggtataaaacctgaaagttttggcatgagtttagtaaaactgtctgtgaagcccttgtggactgcttggtccatgtaggcatttgataaayggtggctttatatagaggagggaaatgcaagctatctcaaaaagaaatcagggaaataagaatgccatctgaaatctgtcatatgagaatgaaaggagcatagacaggttttgagtgtggggtgaggagtaggggaggggaggagataagtgaactgcccctcagacttccagggaggagaaaaatgatgtcactgggaactgcagtcatttgaaaagatagcaatcaagcatttctttcagagccctgttcatctttcagtggctttgcttctccagatgcttttgctccttcaattatctctgccttctcccacctcctctccaaccatctcttcccttccttaattcacaatttttc

SEQ ID NO: 344564 - DNA, 494 bp, Homo sapiens
ttacttaaactctataagcttcaacttctttatctataaggtaggtataaaacctgaaagttttggcatgagtttagtaaaactgtctgtgaagcccttgtggactgcttggtccatgtaggcatttgataaatggtggctttatatagaggagggaaatgcaagctatctcaaaaagaaatcagggaaataagaatgccatctgaaatctgtcatatgagaatgaaaggagcatagacaggttttgagtgtggggtgaggagtaggggaggggaggagataagtgaactgcccctcagacttccagggaggagaaaaatgatgtcactgggaactgcagtcatttgaaaagatagcaatcaagcatytctttcagagccctgttcatctttcagtggctttgcttctccagatgcttttgctccttcaattatctctgccttctcccacctcctctccaaccatctcttcccttccttaattcacaatttttc

SEQ ID NO: 344565 - DNA, 320 bp, Homo sapiens
tgacatagaattatttaagagaaagcttttaaatttccatgctgtaatttctagttttgttgtgtcataatcagagaatataatctgtagcatttctacattctctactttgcttagatgtttttrgggtggggtgtgtaatatgtactcaattttgtaaacattttatggacatacaaatttcaatgtttactttttcaggctataggctttgctacataatttttgtgtattttgtggtcctcatatagattttttaattatctttttgctgtgatagagattagaagggtaaattaatgtctcatttaccatcattt

SEQ ID NO: 344566 - DNA, 541 bp, Homo sapiens
agaattatttaagagaaagcttttaaatttccatgctgtaatttctagttttgttgtgtcataatcagagaatataatctgtagcatttctacattctctactttgcttagatgtttttggggtggggtgtgtaatatgtactcaattttgtaaacattttatggacatacaaatttcartgtttactttttcaggctataggctttgctacataatttttgtgtattttgtggtcctcatatagattttttaattatctttttgctgtgatagagattagaagggtaaattaatgtctcatttaccatcatttttctttctgtatctcttttcatttcctgatgctttggctttatgaaatctttatgtataaaaattgtgcacacatatctttatgcacagtgttttggattttacccttcataatgagcttttttctctcctttgaatttgacctggcctggtgttaacagcccaggtgtaaaattccagtgagaaagaagtctgatgaggagtcagtaggatcttttggttgctgag

SEQ ID NO: 344567 - DNA, 541 bp, Homo sapiens
agaattatttaagagaaagcttttaaatttccatgctgtaatttctagttttgttgtgtcataatcagagaatataatctgtagcatttctacattctctactttgcttagatgtttttggggtggggtgtgtaatatgtactcaattttgtaaacattttatggacatacaaatttcaatgtttactttttcaggctataggctttgctacataatttttgtgtattttgtggtcctcatatagattttttaattatctttttgctgtgatagagattagaagggtaaattaatgtctcatttaccatcatttttctttctgtatctcttttcatttcctgatgctttggytttatgaaatctttatgtataaaaattgtgcacacatatctttatgcacagtgttttggattttacccttcataatgagcttttttctctcctttgaatttgacctggcctggtgttaacagcccaggtgtaaaattccagtgagaaagaagtctgatgaggagtcagtaggatcttttggttgctgag

SEQ ID NO: 344568 - DNA, 448 bp, Homo sapiens
ggcttctggtcttgcataagacttcattgaggcctaaggggctatgcaggtctactgtccaaagtacagaggttattcctagtgtctttaatactactgtccctttaggcaagattatccttatgataagggagactgaattaagctattttggctgaggcatatttttataaattcatccaattagcttcccttgttgtagttttggctcaccaaacattgttctgattataatttagcatcccatataatttcatctgcagggagagtctgtactaggcatgacaatgcttacatatcagcccrtgtgactgcaagagtctcagtataatttgataacatggcactcagattctagacattattctctgtgtgcttagtgagtgtgatgacataaccttcagaaagattcatcctttctcacatattgataaatcaacttttacat

SEQ ID NO: 344569 - DNA, 485 bp, Homo sapiens
tgtgatgacataaccttcagaaagattcatcctttctcacatattgataaatcaacttttacatctacaaagttgaaagccagaaattaaaaccttattaattcactaaggcatccctatgatggcagtcttccaactagctccattctggggcactctgacatcattrtacactttccaatgaaagcagggagtgtatgtgattaaagggagagccctgtggcactcctgaaaaatctcccctcccagttcacattgacttattaaccaacactcatgatcatgtgaaactctagaactggatctggatgcctggcaggatgacatggtgtgaggctcaagcagcactgtgggaattcaagcatctgtttatttctgagagaaaaagtgtaaagcaaaataatatcttttaacaaacgtttgtatttgactaaaaaggaagcaagcacttaatttatgaatttgctaattgctcttctgagctg

SEQ ID NO: 344570 - DNA, 485 bp, Homo sapiens
tgtgatgacataaccttcagaaagattcatcctttctcacatattgataaatcaacttttacatctacaaagttgaaagccagaaattaaaaccttattaattcactaaggcatccctatgatggcagtcttccaactagctccattctggggcactctgacatcattgtacactttccaatgaaagcagggagtgtatgtgattaaagggagagccctgtggcactcctgaaaaatctcccctcccagttcacattgacttattaaccaacactcatgatcatgtgaaactctagaactggatctggrtgcctggcaggatgacatggtgtgaggctcaagcagcactgtgggaattcaagcatctgtttatttctgagagaaaaagtgtaaagcaaaataatatcttttaacaaacgtttgtatttgactaaaaaggaagcaagcacttaatttatgaatttgctaattgctcttctgagctg

SEQ ID NO: 344571 - DNA, 485 bp, Homo sapiens
tgtgatgacataaccttcagaaagattcatcctttctcacatattgataaatcaacttttacatctacaaagttgaaagccagaaattaaaaccttattaattcactaaggcatccctatgatggcagtcttccaactagctccattctggggcactctgacatcattgtacactttccaatgaaagcagggagtgtatgtgattaaagggagagccctgtggcactcctgaaaaatctcccctcccagttcacattgacttattaaccaacactcatgatcatgtgaaactctagaactggatctggatgcctggcaggatgacatggtgtgaggctcaagcagcactgtgggaattcaagcatctgtttatttctgagagaaaaagtgtaaagcaaaataatatcttttaacaaacgtttgtatttgactaaaraggaagcaagcacttaatttatgaatttgctaattgctcttctgagctg

SEQ ID NO: 344572 - DNA, 485 bp, Homo sapiens
tgtgatgacataaccttcagaaagattcatcctttctcacatattgataaatcaacttttacatctacaaagttgaaagccagaaattaaaaccttattaattcactaaggcatccctatgatggcagtcttccaactagctccattctggggcactctgacatcattgtacactttccaatgaaagcagggagtgtatgtgattaaagggagagccctgtggcactcctgaaaaatctcccctcccagttcacattgacttattaaccaacactcatgatcatgtgaaactctagaactggatctggatgcctggcaggatgacatggtgtgaggctcaagcagcactgtgggaattcaagcatctgtttatttctgagagaaaaagtgtaaagcaaaataatatcttttaacaaacgtttgtatttgactaaaaaggaagcaagcacttaatktatgaatttgctaattgctcttctgagctg

SEQ ID NO: 344573 - DNA, 589 bp, Homo sapiens
agtaaagagagatccacattataacttatgcatctctccccaagctcctggagactgactcctccaaacctatactctacaactcatgatgctccccaacttatgatggggctatgtcccaataaatccattgtaagtcaaaaaatcgttaggtgggccaggcgcagtggcttacgcctgtaatcccagcactttgggaggccaaggccagcgaatcaacagagatcaggaggtcagcctggccaacatggtgaaaccccatctctactaaaaataaaaaaattagccaggcgaggtgttgggcgcctgtaatcccagctacttgggaggctgaggcaggcgaatcgcttgaactggggacgcggacgctgcagtgagctgaratggcgccattgcactccagcctgggcagcaggagcgaaactgcatctcaaaaaaaaaaaaaaaaaaaaaaaatcgtaagtggaacttatgttagttagggactgcctgtgtagctagttgcctattatacatcttactagaatgccctccacaatctcttctatggtttacatagctagtagctaccgtactagtcagcacatgt

SEQ ID NO: 344574 - DNA, 588 bp, Homo sapiens
ttgttaaaatataaaagtgcaattgtgttacatgctgtacgaagtacatgttgacatgtgagcatataataaatgggctggaggccagaggattgccaaagagaatgggcctcctgctgagacgaaaagttgagcagggattagttggcgaaagtggagggacgatcctttctaggcaggaggaagaacatgtacagaatctctgaggtgtgatgcaacaaagtctatataaaaaactgaagaaaggtctaatgtggcttaaatacagaagctagtaggagaggagttgaaaagaggctggagaagtagaaagtgtctgcattctgcaggaacttatattgtataaaaagaatttctctttattctaagtgcaatgtgaagccaatgaagtgctttaaacaggtgatgtgatttgattgaatttattacttcacttaacaaataytcattacatgcccactgtttgtcagagactgctgtagcccctggtgatacagtagggaataaaacaggcaaaaatccctgtcctcttgcagcttataatggactgcaatgtttaatatgtcagaggagttccacggaggagtg

SEQ ID NO: 344575 - DNA, 312 bp, Homo sapiens
aattatgcagtctgtgttattcttttatagaagcatgaaatggacaaagactccrttttcaagagcaagcacttttgtagtttctgagcaaattatgactgcaaaggaagttctataggtagcctcagatccactacctaggaagcatgctaccaagcagacctaggatctaggatttgatcaagtgctgggcaacatgatacctctgcaatttagcacctccctatatacctccagttggctcagcccatcagggctaaaactacccctcatatcctagtgtctcttgtaggcagaagccttgcctaaacc

SEQ ID NO: 344576 - DNA, 312 bp, Homo sapiens
aattatgcagtctgtgttattcttttatagaagcatgaaatggacaaagactccgttttcaagagcaagcacttttgtagtttctgagcraattatgactgcaaaggaagttctataggtagcctcagatccactacctaggaagcatgctaccaagcagacctaggatctaggatttgatcaagtgctgggcaacatgatacctctgcaatttagcacctccctatatacctccagttggctcagcccatcagggctaaaactacccctcatatcctagtgtctcttgtaggcagaagccttgcctaaacc

SEQ ID NO: 344577 - DNA, 312 bp, Homo sapiens
aattatgcagtctgtgttattcttttatagaagcatgaaatggacaaagactccgttttcaagagcaagcacttttgtagtttctgagcaaaytatgactgcaaaggaagttctataggtagcctcagatccactacctaggaagcatgctaccaagcagacctaggatctaggatttgatcaagtgctgggcaacatgatacctctgcaatttagcacctccctatatacctccagttggctcagcccatcagggctaaaactacccctcatatcctagtgtctcttgtaggcagaagccttgcctaaacc

SEQ ID NO: 344578 - DNA, 619 bp, Homo sapiens
agttagtgacctagtaaccttccctctaatgaccagtagttttttttctgaataccattatgaactcatagattattgtttgcatttgatgtatttcaggccattgcagtctwtattgttttggatgcttacattgtctcatctaggttaataattatctcttcaagttgactttcatgtctttttgacgtgatcctgttggactttgatggcttccttgctttctggcaaaaaagatgttccaggatcaatatactgcaccatacatggagtcagccatttctctagggaaccttgattccttttagtagagaacacagtttgaggtcttggactgaatgacttttgtgaacctcctctcctgagactacagcctgcatccctgcatataaccgtttggagctcttgctgggcaccaacagatctcctaaaactgctatatagttctgcctcactcttacaaagattcatctcttgagagttttgtgctctacccccagatgtggtctttctggttctgaagcttttgcttcagtcaccctgaattttgccagccctatgcatgctataccttggattgccaacttgccctcactgaagccagtttctctggttagaa

SEQ ID NO: 344579 - DNA, 619 bp, Homo sapiens
agttagtgacctagtaaccttccctctaatgaccagtagttttttttctgaataccattatgaactcatagattattgtttgcatttgatgtatttcaggccattgcagtctttattgttttggatgcttacattgtctcatctaggttaataattatctcttcaagttgactttcatgtctttttgaygtgatcctgttggactttgatggcttccttgctttctggcaaaaaagatgttccaggatcaatatactgcaccatacatggagtcagccatttctctagggaaccttgattccttttagtagagaacacagtttgaggtcttggactgaatgacttttgtgaacctcctctcctgagactacagcctgcatccctgcatataaccgtttggagctcttgctgggcaccaacagatctcctaaaactgctatatagttctgcctcactcttacaaagattcatctcttgagagttttgtgctctacccccagatgtggtctttctggttctgaagcttttgcttcagtcaccctgaattttgccagccctatgcatgctataccttggattgccaacttgccctcactgaagccagtttctctggttagaa

SEQ ID NO: 344580 - DNA, 435 bp, Homo sapiens
ggcttccttgctttctggcaaaaaagatgttccaggatcaatatactgcaccatacatggagtcagccrtttctctagggaaccttgattccttttagtagagaacacagtttgaggtcttggactgaatgacttttgtgaacctcctctcctgagactacagcctgcatccctgcatataaccgtttggagctcttgctgggcaccaacagatctcctaaaactgctatatagttctgcctcactcttacaaagattcatctcttgagagttttgtgctctacccccagatgtggtctttctggttctgaagcttttgcttcagtcaccctgaattttgccagccctatgcatgctataccttggattgccaacttgccctcactgaagccagtttctctggttagaatagttgccccaacccatgcctaatac

SEQ ID NO: 344581 - DNA, 579 bp, Homo sapiens
gcctcttttcatttccctttgattttgagtaataaattctctcctcacttcccagctgaactgtttgggagtctctattccctagaaagactctggtsacatacccatcagattaaattaggtgaaaactctttggccttcatgaatgttgaaggatttcaaagggctaatggaaattcttctagaagtaactgcaacctccgccttccgggttcaagcgattttcctgcctcagcctcccgagtagctgggattacaggtgtccaccaccatgcccaactaatttttgtatttttagtagagacggggtttcaccatgttggccaggctgatctagaacttttgacctcaggtgatccgcccgcctcagcctcccaaagtgctgggattacaggcgtgatccaccgtgcccagttaaacttcagtttttcatgttccatgcataggtcagggtcttagggagtgattcattctagcagaactccctggattttaaggcagatgttccatttattaattgacaaaggaggcatatttctcccctggtaacccaaagatttaggtcattttcccagagac

SEQ ID NO: 344582 - DNA, 579 bp, Homo sapiens
gcctcttttcatttccctttgattttgagtaataaattctctcctcacttcccagctgaactgtttgggagtctctattccctagaaagactctggtgacatacccatcagattaaattaggtgaaaactctttggccttcatgaatgttgaaggatttcaaagggctaatggaaattcttctagaagtaactgcaacctccgccttccgggttcaagmgattttcctgcctcagcctcccgagtagctgggattacaggtgtccaccaccatgcccaactaatttttgtatttttagtagagacggggtttcaccatgttggccaggctgatctagaacttttgacctcaggtgatccgcccgcctcagcctcccaaagtgctgggattacaggcgtgatccaccgtgcccagttaaacttcagtttttcatgttccatgcataggtcagggtcttagggagtgattcattctagcagaactccctggattttaaggcagatgttccatttattaattgacaaaggaggcatatttctcccctggtaacccaaagatttaggtcattttcccagagac

SEQ ID NO: 344583 - DNA, 579 bp, Homo sapiens
gcctcttttcatttccctttgattttgagtaataaattctctcctcacttcccagctgaactgtttgggagtctctattccctagaaagactctggtgacatacccatcagattaaattaggtgaaaactctttggccttcatgaatgttgaaggatttcaaagggctaatggaaattcttctagaagtaactgcaacctccgccttccgggttcaagcgattttcctgcctcagcctcccgagtagctgggattacaggtgtccaccaccatgcccaactaatttttgtatttttagtagagacgggrtttcaccatgttggccaggctgatctagaacttttgacctcaggtgatccgcccgcctcagcctcccaaagtgctgggattacaggcgtgatccaccgtgcccagttaaacttcagtttttcatgttccatgcataggtcagggtcttagggagtgattcattctagcagaactccctggattttaaggcagatgttccatttattaattgacaaaggaggcatatttctcccctggtaacccaaagatttaggtcattttcccagagac

SEQ ID NO: 344584 - DNA, 579 bp, Homo sapiens
gcctcttttcatttccctttgattttgagtaataaattctctcctcacttcccagctgaactgtttgggagtctctattccctagaaagactctggtgacatacccatcagattaaattaggtgaaaactctttggccttcatgaatgttgaaggatttcaaagggctaatggaaattcttctagaagtaactgcaacctccgccttccgggttcaagcgattttcctgcctcagcctcccgagtagctgggattacaggtgtccaccaccatgcccaactaatttttgtatttttagtagagacggggtttcaccatgttggccaggctgatctagaacttttgacctcaggtgatcygcccgcctcagcctcccaaagtgctgggattacaggcgtgatccaccgtgcccagttaaacttcagtttttcatgttccatgcataggtcagggtcttagggagtgattcattctagcagaactccctggattttaaggcagatgttccatttattaattgacaaaggaggcatatttctcccctggtaacccaaagatttaggtcattttcccagagac

SEQ ID NO: 344585 - DNA, 388 bp, Homo sapiens
tatagcaattactgttttttacattttacagttacagtttcagagaaagtttgatatttatctaaaatttttcaatgtatgaactttttcatttgacaaaccataattgtacatattcttgggatacagagtgatatttctttacatgtatagaatgtgtagtgatcaaatcagggtaatttccactaatttaaaatgccacctttgttattgtaatttatrtatatactatatatatatacacacacacatatatatacatgtccacatacagtgtgtgtgtgcacatgtacacacatgcatatgtgtatataatgcccagtataagcaatgtgcacaaataaaattagctaacagagatagtatagagtgagaggagaggtagatt

SEQ ID NO: 344586 - DNA, 541 bp, Homo sapiens
ttatcattaaatgccacagagaggtaaagataaaracaacatattgttttgggtttagtaatttaagggttaccaaattccgttttggaggaggaacagattccatgtccactagaatggaatgaacaagaaatggaggaggaaaataggtagtttttcaaaagttttcaaaaatatgaaaagaagaaatgaaatggtacttggaagagattgttgaaatgggagagactatggtggcttgtttagaagcagttgagatagatccaattgagatagagatattgactatataaacaaaagaatgacaaattaatagtgtaatggataatttgactttggcaaatattgtgaatttttgtgaaagtacaactaaaaggcaatgtcactccaataatcaccagagtaatcaatttgcttattgctgtccctttaaatatagttctctggtatcaactaacatgtttttaactaatgatgcttcttaaagaaaagggaaaagacctttttctttctttcagtcttcaatgattcactgcttcat

SEQ ID NO: 344587 - DNA, 541 bp, Homo sapiens
ttatcattaaatgccacagagaggtaaagataaaaacaacatattgttttgggtttagtaatttaagggttaccaaattccgttttggaggaggaacagattccatgtccactagaatggaatgaacaagaaatggaggaggaaaataggtagtttttcaaaagttttcaaaaatatgaaaagaagaaatgaartggtacttggaagagattgttgaaatgggagagactatggtggcttgtttagaagcagttgagatagatccaattgagatagagatattgactatataaacaaaagaatgacaaattaatagtgtaatggataatttgactttggcaaatattgtgaatttttgtgaaagtacaactaaaaggcaatgtcactccaataatcaccagagtaatcaatttgcttattgctgtccctttaaatatagttctctggtatcaactaacatgtttttaactaatgatgcttcttaaagaaaagggaaaagacctttttctttctttcagtcttcaatgattcactgcttcat

SEQ ID NO: 344588 - DNA, 541 bp, Homo sapiens
ttatcattaaatgccacagagaggtaaagataaaaacaacatattgttttgggtttagtaatttaagggttaccaaattccgttttggaggaggaacagattccatgtccactagaatggaatgaacaagaaatggaggaggaaaataggtagtttttcaaaagttttcaaaaatatgaaaagaagaaatgaaatggtacttggaagagattgttgaaatgggagagactatggtggcttgtttagaagcagttgagatagatccaattgagatagagatattgactatataaacaaaagaatgacaaattaatagtgtaatggataayttgactttggcaaatattgtgaatttttgtgaaagtacaactaaaaggcaatgtcactccaataatcaccagagtaatcaatttgcttattgctgtccctttaaatatagttctctggtatcaactaacatgtttttaactaatgatgcttcttaaagaaaagggaaaagacctttttctttctttcagtcttcaatgattcactgcttcat

SEQ ID NO: 344589 - DNA, 440 bp, Homo sapiens
tgctgactcttccaagcttaacatttctcacaagtcaattagctttgtactgggaggagggcgtgaagggctgcttgcggtagttgtgtagcagcagcacaatggccgcagacaaggaaaacagtttctaggaattcctcgtatataattttatatttttgacaagattaatgacccatgctcccttcctctccatttctttttttggaattctgtgttggtatgyagttactatattttattaaaggaaattagccttatctcatattttattaaagaaaattattatattattcctttatatttttattaaaggaatttattattattattattaaaggaaattagctttatctcttattatattttttatgaccttcaaagtagtgtctctgcttaaaagtgtaccctggccgggcgtggtggctcacacctgtaat

SEQ ID NO: 344590 - DNA, 440 bp, Homo sapiens
tgctgactcttccaagcttaacatttctcacaagtcaattagctttgtactgggaggagggcgtgaagggctgcttgcggtagttgtgtagcagcagcacaatggccgcagacaaggaaaacagtttctaggaattcctcgtatataattttatatttttgacaagattaatgacccatgctcccttcctctccatttctttttttggaattctgtgttggtatgcagttactatattttattaaaggaaattagccttatctcatattttattaaagaaaattattatattattcctttatatttttattaaaggawtttattattattattattaaaggaaattagctttatctcttattatattttttatgaccttcaaagtagtgtctctgcttaaaagtgtaccctggccgggcgtggtggctcacacctgtaat

SEQ ID NO: 344591 - DNA, 440 bp, Homo sapiens
tgctgactcttccaagcttaacatttctcacaagtcaattagctttgtactgggaggagggcgtgaagggctgcttgcggtagttgtgtagcagcagcacaatggccgcagacaaggaaaacagtttctaggaattcctcgtatataattttatatttttgacaagattaatgacccatgctcccttcctctccatttctttttttggaattctgtgttggtatgcagttactatattttattaaaggaaattagccttatctcatattttattaaagaaaattattatattattcctttatatttttattaaaggaatttattattattattattaaaggaaattagcyttatctcttattatattttttatgaccttcaaagtagtgtctctgcttaaaagtgtaccctggccgggcgtggtggctcacacctgtaat

SEQ ID NO: 344592 - DNA, 440 bp, Homo sapiens
tgctgactcttccaagcttaacatttctcacaagtcaattagctttgtactgggaggagggcgtgaagggctgcttgcggtagttgtgtagcagcagcacaatggccgcagacaaggaaaacagtttctaggaattcctcgtatataattttatatttttgacaagattaatgacccatgctcccttcctctccatttctttttttggaattctgtgttggtatgcagttactatattttattaaaggaaattagccttatctcatattttattaaagaaaattattatattattcctttatatttttattaaaggaatttattattattattattaaaggaaattagctttatctcttattatattttttatgaccttcaaagtagtgtctctgcttaaaagtgtaccctggccgggcgtggtgrctcacacctgtaat

SEQ ID NO: 344593 - DNA, 438 bp, Homo sapiens
ctacttttttgttttctcatttttattgcataatatttaattatgcaaaaaatacattaaatacatagaaaatatataatgtagctataagaataaagaacgatggtaaaacwaatgctaatacccactacctgacttaaagaatatgatactatttttttccaattgaaatcccctcaactactcagaattactgctatcccttttatcctttcattaattttcttctagttttctcacatgtgaatctatttctaaatacatttctttattttgcaagtttttggacttcatataaatgtaaccatattgtatatattcttcttcagcttctttttcactaaacaatatgttttgctgatacttacattcatatgtacagtaatagttgatttattttaatggctatatattattccattgttagaatacaccagg

SEQ ID NO: 344594 - DNA, 622 bp, Homo sapiens
gaaatcccctcaactactcagaattactgctatcccttttatcctttcattaattttcttctagttttctcacatgtgaatctatttctaaatacatttctttattttgcaagtttttggacttcatataaatgtaaccatattgtatatattcttcttcagcttctttttcactaaacaatatgttttgctgatacttacattcatatgtacagtaatagttgatttattttaatggctatatattattccattgttagaatacaccaggatttatttttacttatttttttttgctggaaaattgggtcttttttattttttgatataacaaacaatgttgtaatcattttgtatttacttcctagtccactcctgtaagtttctcttgagtacatactagcaatgaagatgctgagtcactgcatatacatactcacaactttattctataawgtaatattctataaagtagctgtatcagtttatactttaaccagtaatggacaagattttctgttacttcccatctttgttaattattacttttagactctaacttttatcaggctcatggatgtaaaaagcatctcagggtggttttaatttgaatttatctgct

SEQ ID NO: 344595 - DNA, 588 bp, Homo sapiens
atgctgagtcactgcatatacatactcacaactttattctataaagtaatattctataaagtagctgtatcagtttatactttaaccagtaatggacaagattttctgttacttcccatctttgttaattattacttttagactctaacttttatcaggctcatggatgtaaaaagcatctcagggtggttttaatttgaatttatctgctcatctatgaagatgagcttcttttcatataattatgagtcatttttgttttgccttcttttgtttatgcattttgcttgttctatgtcttatttttcctgttgatttttgrgagttcatatatattctaaatgtatatttattcactcatatatatgttgcaagtattacagtttatgatttgtcaccttatgatatcatccaaatagagaagctttatattttgatgtagtcatgtgttcatttttcctccttaatgtttgtttttcttggttctatgacctaccaaaagtaacaaaaattctcatttatttttaatctaaatgttttaagtattttcctggaattcaccttgaattgatttctattggagatagg

SEQ ID NO: 344596 - DNA, 588 bp, Homo sapiens
atgctgagtcactgcatatacatactcacaactttattctataaagtaatattctataaagtagctgtatcagtttatactttaaccagtaatggacaagattttctgttacttcccatctttgttaattattacttttagactctaacttttatcaggctcatggatgtaaaaagcatctcagggtggttttaatttgaatttatctgctcatctatgaagatgagcttcttttcatataattatgagtcatttttgttttgccttcttttgtttatgcattttgcttgttctatgtcttatttttcctgttgatttttgagagttcatatatattctaaatgtatatttattcactcatatatatgttgcaartattacagtttatgatttgtcaccttatgatatcatccaaatagagaagctttatattttgatgtagtcatgtgttcatttttcctccttaatgtttgtttttcttggttctatgacctaccaaaagtaacaaaaattctcatttatttttaatctaaatgttttaagtattttcctggaattcaccttgaattgatttctattggagatagg

SEQ ID NO: 344597 - DNA, 495 bp, Homo sapiens
ttagtgaactaaaatcaagttgtcgacaggcatgtttctttctggyggctagggtagaatccatatcctggccttttctatcttctagagaacatcagcattccttttctcattgcctctcctctctctttttaaagctggcgatgtcacatttctctgaccattctttcattgtcacatctctctctggactcagctaagaaaggttctccatttttaagaactcatgtgattagactgggcccatctggataacccaggaagatctctccatctcggtttgcatccttaatcacatctgataagcctttattgcattcagtgtaacatattcacaggttccagggttaggcatgggcatctttgagggctattattctccctaccacattatttgcctagcatctttcattacattgtccatctatttacttactgatttctaatgacatccaaatcagttacaacattttatgtaagcattgtttttatttt

SEQ ID NO: 344598 - DNA, 495 bp, Homo sapiens
ttagtgaactaaaatcaagttgtcgacaggcatgtttctttctggcggctagggtagaatccatatcctggccttttctatcttctagagaacatcagcattccttttctcattgcctctcctctctctttttaaagctggcratgtcacatttctctgaccattctttcattgtcacatctctctctggactcagctaagaaaggttctccatttttaagaactcatgtgattagactgggcccatctggataacccaggaagatctctccatctcggtttgcatccttaatcacatctgataagcctttattgcattcagtgtaacatattcacaggttccagggttaggcatgggcatctttgagggctattattctccctaccacattatttgcctagcatctttcattacattgtccatctatttacttactgatttctaatgacatccaaatcagttacaacattttatgtaagcattgtttttatttt

SEQ ID NO: 344599 - DNA, 495 bp, Homo sapiens
ttagtgaactaaaatcaagttgtcgacaggcatgtttctttctggcggctagggtagaatccatatcctggccttttctatcttctagagaacatcagcattccttttctcattgcctctcctctctctttttaaagctggcgatgtcacatttctctgaccattctttcattgtcacatctctctctggactcagctaagaaaggttctccatttttaagaactcatgtgattagactgggcccatctggrtaacccaggaagatctctccatctcggtttgcatccttaatcacatctgataagcctttattgcattcagtgtaacatattcacaggttccagggttaggcatgggcatctttgagggctattattctccctaccacattatttgcctagcatctttcattacattgtccatctatttacttactgatttctaatgacatccaaatcagttacaacattttatgtaagcattgtttttatttt

SEQ ID NO: 344600 - DNA, 495 bp, Homo sapiens
agatgtttgttaggcatgcatgaatattgagytgtatcaaatgtgtttttctgcattattgtggtggtgatgtgatttagctcctttaattagttaatgtaatgaattacatttgtagattgctctaactattgaaacaagcttgaatttctggaataagcccaatgtgatatttattcaacaaatattcattgagtatacctagtatgtaacatgctttaagaatacaccagtgaaccaaacagaaatatctgacattacagaacttaacattccagtatttggagacagacgataaaaaagtgaacatgtatatttacagtttgtcaaggaatgataaatgaagactcttaaagtagatggggaattgggagtgaagtctgtaatttaaatagggtgggcaggaaagcttcacagagaatgggacatttaagaatagacttgaaggacaggcaagagcaatctctatgtttatatgggagaaaaggttccagg

SEQ ID NO: 344601 - DNA, 495 bp, Homo sapiens
agatgtttgttaggcatgcatgaatattgagctgtatcaaatgtgkttttctgcattattgtggtggtgatgtgatttagctcctttaattagttaatgtaatgaattacatttgtagattgctctaactattgaaacaagcttgaatttctggaataagcccaatgtgatatttattcaacaaatattcattgagtatacctagtatgtaacatgctttaagaatacaccagtgaaccaaacagaaatatctgacattacagaacttaacattccagtatttggagacagacgataaaaaagtgaacatgtatatttacagtttgtcaaggaatgataaatgaagactcttaaagtagatggggaattgggagtgaagtctgtaatttaaatagggtgggcaggaaagcttcacagagaatgggacatttaagaatagacttgaaggacaggcaagagcaatctctatgtttatatgggagaaaaggttccagg

SEQ ID NO: 344602 - DNA, 413 bp, Homo sapiens
atgcagtaacaatggcaaatatcctgaagtaggatcatgctggagtttttgtggagcagcaaggaggctagtgtgactgccacagaatcacccaagggaagatgagaagatcagaccagaccagcacttgggcatctaatgggaaaagtttctcaagccatcataaaratttcatctttactataaatactatgagaaaccatgggatgttttacagtaagaaaggtggcataatatgttacatgttttaaacaaactctatagcttctgagttgaaatagattgtaggggctcatggcagaagcagagggaacatttaggaggctactgtaaagaatatcatgaaaagaacaaacaacgctatgtaacatgcttaaatggactgaagaagatgaatgaaatcaaaatgatgt

SEQ ID NO: 344603 - DNA, 413 bp, Homo sapiens
atgcagtaacaatggcaaatatcctgaagtaggatcatgctggagtttttgtggagcagcaaggaggctagtgtgactgccacagaatcacccaagggaagatgagaagatcagaccagaccagcacttgggcatctaatgggaaaagtttctcaagccatcataaagatttcayctttactataaatactatgagaaaccatgggatgttttacagtaagaaaggtggcataatatgttacatgttttaaacaaactctatagcttctgagttgaaatagattgtaggggctcatggcagaagcagagggaacatttaggaggctactgtaaagaatatcatgaaaagaacaaacaacgctatgtaacatgcttaaatggactgaagaagatgaatgaaatcaaaatgatgt

SEQ ID NO: 344604 - DNA, 413 bp, Homo sapiens
atgcagtaacaatggcaaatatcctgaagtaggatcatgctggagtttttgtggagcagcaaggaggctagtgtgactgccacagaatcacccaagggaagatgagaagatcagaccagaccagcacttgggcatctaatgggaaaagtttctcaagccatcataaagatttcatytttactataaatactatgagaaaccatgggatgttttacagtaagaaaggtggcataatatgttacatgttttaaacaaactctatagcttctgagttgaaatagattgtaggggctcatggcagaagcagagggaacatttaggaggctactgtaaagaatatcatgaaaagaacaaacaacgctatgtaacatgcttaaatggactgaagaagatgaatgaaatcaaaatgatgt

SEQ ID NO: 344605 - DNA, 413 bp, Homo sapiens
atgcagtaacaatggcaaatatcctgaagtaggatcatgctggagtttttgtggagcagcaaggaggctagtgtgactgccacagaatcacccaagggaagatgagaagatcagaccagaccagcacttgggcatctaatgggaaaagtttctcaagccatcataaagatttcatctttactataaatactaygagaaaccatgggatgttttacagtaagaaaggtggcataatatgttacatgttttaaacaaactctatagcttctgagttgaaatagattgtaggggctcatggcagaagcagagggaacatttaggaggctactgtaaagaatatcatgaaaagaacaaacaacgctatgtaacatgcttaaatggactgaagaagatgaatgaaatcaaaatgatgt

SEQ ID NO: 344606 - DNA, 478 bp, Homo sapiens
tacggaactagcagaggccaggcattgtggctcatgcctgtaatcccagcaatttgggaagcctaggcaggaggatcgcttgaggycaggagttggagaccaatcagtgctaaatagtgagactctgtgtctaccaaaaaaagaaacattagccaggtgtggtggtggtgcacacccgtagttccagctacttgggagtctggggtgggagaaatcccttgagcctgggaagtctacactacagtgagccaagattgtgccactgtactccagcctgggcgacagagtgagaccctgtcttagaaagaaaaaagaaaagaaagtgttaatccccctatgggaatctcctcttctcctgccctctctggaacctcacttgtcagttcttcctcccactttcctgtatctttaacctatcccccacttttagctccttcccatcatcatttaaattactcaaacttcttctgttttaaaa

SEQ ID NO: 344607 - DNA, 478 bp, Homo sapiens
tacggaactagcagaggccaggcattgtggctcatgcctgtaatcccagcaatttgggaagcctaggcaggaggatcgcttgaggtcaggagttggagaccaatcagtgctaaatagtgagactctgtgtctaccaaaaaaagaaacattagccaggtgtggtggtggtgcacayccgtagttccagctacttgggagtctggggtgggagaaatcccttgagcctgggaagtctacactacagtgagccaagattgtgccactgtactccagcctgggcgacagagtgagaccctgtcttagaaagaaaaaagaaaagaaagtgttaatccccctatgggaatctcctcttctcctgccctctctggaacctcacttgtcagttcttcctcccactttcctgtatctttaacctatcccccacttttagctccttcccatcatcatttaaattactcaaacttcttctgttttaaaa

SEQ ID NO: 344608 - DNA, 478 bp, Homo sapiens
tacggaactagcagaggccaggcattgtggctcatgcctgtaatcccagcaatttgggaagcctaggcaggaggatcgcttgaggtcaggagttggagaccaatcagtgctaaatagtgagactctgtgtctaccaaaaaaagaaacattagccaggtgtggtggtggtgcacacccgtagttccagctacttgggagtctggggtgggagaaatcccttgagcctgggaagtctacactacagtgagccaagattgtgccactgyactccagcctgggcgacagagtgagaccctgtcttagaaagaaaaaagaaaagaaagtgttaatccccctatgggaatctcctcttctcctgccctctctggaacctcacttgtcagttcttcctcccactttcctgtatctttaacctatcccccacttttagctccttcccatcatcatttaaattactcaaacttcttctgttttaaaa

SEQ ID NO: 344609 - DNA, 556 bp, Homo sapiens
ggattacaggtgtgagccattgcacccaactggtrtagccacgttagaaaacagtctggcagtttctcaaaaggctaaatgtacagtcatcctataatgcaacaatttcactcctaggcatatatcccagaaaaataaaaatatatgtccacacaaaaacttgtacaacaatcttcatagcagcattattcataatgaccaatacatggaatacatggaaacaacccaaatatccaccaactgatgaacagataaacaaaatgcagtgtgtctctaccatggaatactgccatagaaggaatgaaatattgatacacactatgacataaaggaactttgaaaacactgtgctaagaggggaaaaaagccacaaaagatcacatattgtacaattctatttgtccagattaggcaaatctatagtgacaaaaaaattaatcaatggttgcctaaggctgggggcaaaggtaggtggggagagtaggaggtagtggctgaggggtatggatttctctatagggtaatgaaacgttctaaaagtgactgtggtgatcga

SEQ ID NO: 344610 - DNA, 556 bp, Homo sapiens
ggattacaggtgtgagccattgcacccaactggtgtagccacgttagaaaacagtctggcagtttctcaaaaggctaaatgtacagtcatcctataatgcaacaatttcactcctaggcatatatcccagaaaaataaaaatatatgtccacacaaaaacttgtacaacaatcttcatagcagcattattcataatgaccaatacatggaatacatggaaacaacccaaatatccaccaactgatgaacagataaacaaaatgcagtgtgtctctaccatggaatactgccatagaaggaatgaaatattgatacacactatgacataaaggaactttgaaaacactgtgctaagagggraaaaaagccacaaaagatcacatattgtacaattctatttgtccagattaggcaaatctatagtgacaaaaaaattaatcaatggttgcctaaggctgggggcaaaggtaggtggggagagtaggaggtagtggctgaggggtatggatttctctatagggtaatgaaacgttctaaaagtgactgtggtgatcga

SEQ ID NO: 344611 - DNA, 511 bp, Homo sapiens
cctcatccacagccacacaaacccgatcatgcagctatgtggttacaaggcctacatagcctagaagggactggtctgacttgagatttcatttgtatttgtattttgagacagggtcccactctgtcacccaggatggagtgcagtggtataatcatagctcactgcaaccttgaccaactgggttcaacagatgctcctgactcagctgcccccatacctgggaatacaggcaagtaccaccatgtcaggcatttttttcatttttgtagagagagaagtcttgctatgttgcccaagctggcctcaaactcctagaatcaagagatctgcccatctcagccacatgagtaactggggccataggtacataccrtcatgcctggctatatttattttattaaatttattttttttatttttgtagagaggaggtcttgctgttttgcccaggctgctctcaaactcatggccttaaaacatactcccatctctgcctctcaaactgttg

SEQ ID NO: 344612 - DNA, 511 bp, Homo sapiens
cctcatccacagccacacaaacccgatcatgcagctatgtggttacaaggcctacatagcctagaagggactggtctgacttgagatttcatttgtatttgtattttgagacagggtcccactctgtcacccaggatggagtgcagtggtataatcatagctcactgcaaccttgaccaactgggttcaacagatgctcctgactcagctgcccccatacctgggaatacaggcaagtaccaccatgtcaggcatttttttcatttttgtagagagagaagtcttgctatgttgcccaagctggcctcaaactcctagaatcaagagatctgcccatctcagccacatgagtaactggggccataggtacataccgtcatgcctggctatatttattttattaaatttattttttttatttttgtagagaggaggtcttgctrttttgcccaggctgctctcaaactcatggccttaaaacatactcccatctctgcctctcaaactgttg

SEQ ID NO: 344613 - DNA, 635 bp, Homo sapiens
tatccacatggaattagctgagttgtggcaacagcagttgttcttatatattattatttttactaggtcggggcaacttaaaacctaacagacttggatccaggccgaaacgttataaaggaaaaaagcaagtggtgttgacagagttactctctgcttgataactaaaaagcatagaatgcaaaagtagggagggccctgccctcctagccaaaattgcacataccttccctgctgcagctggtgaagcagctaactgcatgtgtttccctattgcaggcctttctggtgggtttacctcctgagaggaagaagtgagaaataccctcgctcctcttaattacayaggaggcaggtggagaggcattgttgtgcatgtgtggctcagttaaccccacttgtggcgcaataaatatgaaattatgacaattcagatcatctaccttgacttcctcaagtaggaatacaggtgtagaaagaagggttcaaagtgttcatgacaaaactgcctctcttctgggcttcttccctgtgggtttcttcttagagcagcactctccagtaatgcaaatgaatatgcaattctgtgttttctgatgactgcatttaaaaagaaaaaattcatttaaataatt

SEQ ID NO: 344614 - DNA, 590 bp, Homo sapiens
ttttctaggtgccaaacactaggcgctatactggagagacaacagtgaacagtacaagcaaagtccctgccatctctacaattacaggaaagtttcagaaatgccatgaaatgctacagtaagcacacagcagggatatctgacctggtctagctgggggggcaaggtgtagtcagtaaagattttccagaggaagttacattgaagatgagacctgaaaaattgtaaacatttgccaggtacttggcagtattggtaaatatgccagcagaagagaaaataagcatgaaggctcagagtggagagggcacacatcaccctttcagtaaactaaagaacttaaacttgactggaactatcaaggagagacaaagtcgtaaaagataaagttggagaagcaagtagagtgaggcttagccaaggaagagtttggactttatcctaatgacaaagtgaagaccttcaaagtaatttaagcaggagcagcaggatcactctagaaaratcactttggggttgtaaggtgatgtaacttgcagcagacagaccatttaggaggctatcagaatagttcatttgagttcacgatg

SEQ ID NO: 344615 - DNA, 507 bp, Homo sapiens
cccagtgcaggttaataatttcctctaagactcaattttattaactttaagtatatacactatctatttcacagacttgttgtgaaagtgccacacattattttcataataaacttgctctttttattttctttccactagtatattttagacaccgattccattatttaacttcttcctcaatacctcagctacattttttcaacaaacttaaatcttgcttttaatccctgtctccagatgwttactacagtttctcaacttgacaatgttgagaatattgaatagaaaatattaatgttttcctcataagtccatttggtttttagttgccagctcttctttttcaaatattaatcttatatgtcccatcacgattcttttcccttcagaaaaaacaaaaaaaacaaattttccaatttttattgttttgatgtattttcatttcctcgtaattactcaaagatttatcatcatattcaaacaatcccatctacaattacttat

SEQ ID NO: 344616 - DNA, 558 bp, Homo sapiens
ccctagcagaagttctccatgagagcctaacccctgcagcaaacttctgtctagacatccaggcatttccatacaccctctgacatctaggtggaggttcccaaatttcaattattgatttatgtgcactggtaggctcaacacttcatggaagctgccaaggcttgaggcttgcaccttctgragccacagactaatctttatgttggcccctttcagctagggctgcagtggctgggatgcagggtaccaagaccctagactgcacacagcatggagatcatggtcctggcccatgaaaccactgtttcctcataggctccaggcctgtgatgggaggggctgctgtgaagacctctgacatgccctggagatattttcctattgtcttggtaattaaaatttggctcctcattacttatgcaaatttcttcagccagcataaatttctcctcagaaaatgggattttcttttctattgcattgtcagcctgcaaatttgttgaacttttatgccgtttcccttataaaactaaatgactttaacagcacccaagt

SEQ ID NO: 344617 - DNA, 598 bp, Homo sapiens
gatgagatttgggtggggacacagccataccgtatcaactgggatacctattatctacctcaaacattattttgacagttaaataagaacaacaaagtaatctgccagcacatattaatcactaaatgtattttagctattagttattaatttgtttaacaaaagacatattcactaattttaagraacttttaccttatcacatctatattagaggaaagaaggtataatgcagaatattcccagcttacgtggtacatatttggaggttgtggtctcatcgtggaagcaattcaccatccttgctatttttgtttctgttataccgataaaatgttgcttgtgtttctgttataccgataaaatgttgcttgtgtttcttgcttgatatcaccaagcaactgagggaagtagataagaaataagtggtttgagagagatagcctgggatttaaagtttcacattaatcaatggcataggagatcatctatcagcatgtttttccctctctgtcctacttccacttacctcccttctttctttctaccataactgtcccacaggcagtctagcaaaagattgattgttgaaaaaaag

SEQ ID NO: 344618 - DNA, 570 bp, Homo sapiens
  misc_feature (1)...(570): n = A,T,C or G
aaaataatatttattattttcaggctgttaaacactcacaatacctgtggtgatttttataatatgtccacacatcccttgaaattactctcttcaaaagacttttctcacctaaattgtggacttagtgactcacatacaatgactacaatgtggtgaaagtgaaagtatatatgayttttggatggagttataccaggcattgcagtttcttcctcacatacgctcttttggatcacttgctttgtgggaagataacagccaagttgtaagaacactcaagnnnncaaatccttatagagaggaccatgtggcaaggaactaaggcctcctgccaacaactaatatgactagttagttatcttctaaagagattaaaacaagaaaaactttgttctacatctcaccacattcttataatttttgttgttcttcagttcctgtgtagctcacatttttatatggtatcattttccttctgcctgaggaacttcccttaacatttcttgtagttgagttctgatggaaatgaaatcttcacatttgtgttgatttaaaaagggtttctgg

SEQ ID NO: 344619 - DNA, 617 bp, Homo sapiens
tacatagcactgatgactgatgggttgtcataggcaatttgacttagaccatggagttccttcaaattgtatatctaaacattttcagtgtcagctgatttagcatgaacatctggcaaagtattttcttggtattcaattaatttttgttctacttgggttagcagttttattaaaaaagtcagtctttttgttaaagttccagaaatttttacccagtccaaatgatatgattctaaagttactagaaacctgtattcaagagtgcttttcagggtccattatattatttcacaaatatcctaaaaaacaccattttctaggattttctttgcttgtgaagctttcagaatctgcaacagcattaaacagttaactgtggaaatgactttaaatagtcatagttgaaaacacaattaacaaggaaatgtgattttttctgtggtctacaataacaacataataatcataattatgattgatagcatactcagaaattgaaattatacaaattccatacaattttgggacacatattaataycaatcactaaaatataacctgaagaaggttaaacattattttttattttgacaatggctttccatgtaacttag

SEQ ID NO: 344620 - DNA, 541 bp, Homo sapiens
tctttggttgaattttttctaatttgtttattatttcctagtatagtttccattgagcatttcttcttcaaagtccaaatatttaaaaaattatgtatttataaacaatgtttaaaatgttcctcgttagtcatgaaattaattttctagtatatagttattaaccagcatttacactctttccataaactccctggatgattaaaagaaaatgatggattataaattggtttttagtgcttataaattkcataagatataagaggttatatagctggtctttgtttagtatccacttttataatatcattttaatatttaatgaagaactaatgcttatgaaaatattgtatcatttatattttgatgttatggtcagctccaacactactcacctttcgtcaccctcaaatgcttccttcagaacctagcattatattcaacttctggatcctaaagtactcatcacctaatatacataccatagttttactctcagattttcactttataataaattgtgcaaattctagatttgttg

SEQ ID NO: 344621 - DNA, 622 bp, Homo sapiens
cattgtctgcagtgacatgataataaaacaatttggtattccaaattttatatattctttattctttgaatcttttcgaacttctgaaattcatactgcagacttcaaaccatgactttatcactaattattatgattttaagagacataaaaactcraagtaatagtctcaaattcaaagaaacatttgataacaaaatagaattttaatttagaaagccatcacgatttgcaacagaaactaacttttgatgtttaagttttagaagattacatataaaaaccagataattgaaatgcaaaacatgagatttttatctgtaaaagtcagaaaattcagttttggtccacacagcaaaactatgaactttgatacccttcctataagtaaataattacttattcctcaccattgcaatgttcatccgatagcaaaacgcaaacaccaagtgaacaatagtaccttattaaggatctttttccttgacaggaagactgttttcatctatactttgctgttgctatactaaaagattttcatatgtgatgaaatttcagtgagaagcattataacataatatgtagagcataatagttaatgcatcatgaggaaagtctgcca

SEQ ID NO: 344622 - DNA, 622 bp, Homo sapiens
cattgtctgcagtgacatgataataaaacaatttggtattccaaattttatatattctttattctttgaatcttttcgaacttctgaaattcatactgcagacttcaaaccatgactttatcactaattattatgattttaagagacataaaaactcgaagtaatagtctcaaattcaaagaaacatttgataacaaaatagaattttaatttagaaagccatcacgatttgcaacagaaactaacttttgatgtttaagttttagaagattacatataaaaaccagataattgaaatgcaaaacatgagatttttatctgtaaaagtcagaaaattcagttttggtccacacagcaaaactatgaactttgatacccttcctataagtaaataattacttattcctcaccattgcaatgttcatccgatagcaaaacgcaaacaccaagtgaacaatagtaccttattaaggatctttttccttgacaggaagactgttttcatctatactttgctgttgctatactaaaagattttcatatgtgatgaaatttcartgagaagcattataacataatatgtagagcataatagttaatgcatcatgaggaaagtctgcca

SEQ ID NO: 344623 - DNA, 586 bp, Homo sapiens
ttaagttgtcagattaaagcctatttatataataagttatttaacggtatctttctgatgcacagttgaactcatggagatacagagtagaattatggttatcagagtctrggaagggtattggggagtagtggggtaagtggggataattaatgtgtatgaaaatacagttacaatgaataagacccagtatttgatagcaaacaggatgactacagtcaacaataatttattatatattttaaaataatgaaaagagtgaaattggaatgttcttaacacaaagaaaggacaaaatgcttgcggtaatgaatacccccaattaccctgttgtgattattacacatagtatttctgcatcagaatatcacatgtactgccatgcatatatatatatatatatatatatgtatatatatttacctactgtatacccataataattaaaaatgaaaaacttaatataaaataaaaaatatggtaacattgaatttcatgggtatgcacattgaaaagaaaatggccatttactgctatatctatgaatacaaataacttcccaatttcagctttattgcaggtgtgg

SEQ ID NO: 344624 - DNA, 586 bp, Homo sapiens
ttaagttgtcagattaaagcctatttatataataagttatttaacggtatctttctgatgcacagttgaactcatggagatacagagtagaattatggttatcagagtctaggaagggtattggggagtagtggggtaagtggggataattaatgtgtatgaaaatacagttacaatgaataagacccagtatttgatagcaaacaggatgactacagtcaacaataatttattatatattttaaaataatgaaaagagtgaaattggaatgttcttaacacaaagaaaggacaaaatgcttgcggtaatgaatacccccaattaccctgttgtgattattacacatagtatttctgcatcagaatatcacatgtactgccatgcatatatatatatatatatatatatrtatatatatttacctactgtatacccataataattaaaaatgaaaaacttaatataaaataaaaaatatggtaacattgaatttcatgggtatgcacattgaaaagaaaatggccatttactgctatatctatgaatacaaataacttcccaatttcagctttattgcaggtgtgg

SEQ ID NO: 344625 - DNA, 685 bp, Homo sapiens
aatattaattgctatgtatcatgtattttccaataaatacttgttcaatgattctatttgtcattttctctgtaaaatttctagggggaacaacacaaaggctactctttgacaaggtaagaatyaaggctgaatggagcaatttgaaattattaataatttaactgttttagcaaaattgagtcagaaagtaactagattatatggtttggctttttgtaccaaccaaatctcttcttgaattgtaatcccacatgtcaaggagggacctgatggaaatgattgaatcatggggccaatttccgccatgctgtttttgtgatagtgaggagttctcatgagatctgatggtttataagtggcggttttccctgcactcgcccctccctcctgccacctagtgcagaagttacttgcttttccctcaacttctgccatggttgtaagtctcctgagtcctcccagccatggggaactgtgagtaaattaaacctcctttctttataaattacccagtctcgagtaatatctttatagcagtgtgaaaactgattgatatattagaccacataagaacttctgccagtcatggtagacatatttatgaatgaccttcaaaagtttcttagacattcttttaaatatttcttcaacaaatatttatataacaggcactgtttgagga

SEQ ID NO: 344626 - DNA, 685 bp, Homo sapiens
aatattaattgctatgtatcatgtattttccaataaatacttgttcaatgattctatttgtcattttctctgtaaaatttctagggggaacaacacaaaggctactctttgacaaggtaagaattaaggctgaatggagcaatttgaaattattaataatttaactgttttagcaaaattgagtcagaaagtaactagattatatggtttggctttttgtaccaaccaartctcttcttgaattgtaatcccacatgtcaaggagggacctgatggaaatgattgaatcatggggccaatttccgccatgctgtttttgtgatagtgaggagttctcatgagatctgatggtttataagtggcggttttccctgcactcgcccctccctcctgccacctagtgcagaagttacttgcttttccctcaacttctgccatggttgtaagtctcctgagtcctcccagccatggggaactgtgagtaaattaaacctcctttctttataaattacccagtctcgagtaatatctttatagcagtgtgaaaactgattgatatattagaccacataagaacttctgccagtcatggtagacatatttatgaatgaccttcaaaagtttcttagacattcttttaaatatttcttcaacaaatatttatataacaggcactgtttgagga

SEQ ID NO: 344627 - DNA, 470 bp, Homo sapiens
gttaagatcatttattcctatctgtctccagcgccatactataatatatctctgctgccaagtgataattcatttatcactatgatttcttatctactctatccttaactattcccctcccataatttctgcaatctcccaccaagtstccattctctgcagagtagtcagagtgattttcttaaaatgcaaatcagattatttctttcccatgctcagaagtctcattactcccctgcagaagaaaatgaattacaaacattttagcgcgctttacatgtcattgccttccctcaagcattcttttgtgtctgtcttataataagcacataataaatattatttaatgaatgcattgtagtaaaaacatcaatttctaatatattacacaatttgcttttctatatcataaattatttgttgtcactctttcacacacacacacacacacacacacacacacacacaca

SEQ ID NO: 344628 - DNA, 619 bp, Homo sapiens
taaaattgtatctcattgtcattttgatttgcatttctctactaaataacaatattgaatatttttcaggtgcttattggccacttgtatctctatcttctttggagaaatatctatttagatcctttcccattttaaaaacttaggttatatgtttttttattattgggttggaaaagttcaatatatattctatatgcaagaccattattcaatatatgacttgtcaatattttaccccrttcagtagattgtcttttcactttcttgatactgttctttgatgtacacacatctttaatttgaataaaattcaatttatctattctattttccatactttgtttctggtgccatatctaagaatccattgcctaactcaatgtcacaaaactttgttcacacattttcttctaagagttttataagtttatctcttacacttagctctttaattaaaaggagcattctttggaaaatataaagcgtctcctaatgacaatgttgcccaaaatagttccattgttagtctgttctgtgatgtgctgccagttccagcagctagaagaaaacaagagcacaaacatagatactagaaacttctgctattgatgacaaa

SEQ ID NO: 344629 - DNA, 619 bp, Homo sapiens
taaaattgtatctcattgtcattttgatttgcatttctctactaaataacaatattgaatatttttcaggtgcttattggccacttgtatctctatcttctttggagaaatatctatttagatcctttcccattttaaaaacttaggttatatgtttttttattattgggttggaaaagttcaatatatattctatatgcaagaccattattcaatatatgacttgtcaatattttaccccattcagtagattgtcttttcactttcttgatactgttctttgatgtacacacatctttaatttgaataaaattcaatttatctattctattttccatactttgtttctggtgccatatctaagaatccattgcctaactcaatgtcacaaaactttgttcacacattttcttctaagagttttataagtttatctcttacacttagctctttaattaaaaggagcattctttggaaaatataaagsgtctcctaatgacaatgttgcccaaaatagttccattgttagtctgttctgtgatgtgctgccagttccagcagctagaagaaaacaagagcacaaacatagatactagaaacttctgctattgatgacaaa

SEQ ID NO: 344630 - DNA, 470 bp, Homo sapiens
gttaagatcatttattcctatctgtctccagcgccatactataatatatctctgctgccaagtgataattcatttatcactatgatttcttatctactctatccttaactattcccctcccataatttctgcaatctcccaccaagtgtccattctctgcagagtagtcagagtgattttcttaaaatgcaaatcagattatttcwttcccatgctcagaagtctcattactcccctgcagaagaaaatgaattacaaacattttagcgcgctttacatgtcattgccttccctcaagcattcttttgtgtctgtcttataataagcacataataaatattatttaatgaatgcattgtagtaaaaacatcaatttctaatatattacacaatttgcttttctatatcataaattatttgttgtcactctttcacacacacacacacacacacacacacacacacacaca

SEQ ID NO: 344631 - DNA, 437 bp, Homo sapiens
ccttcctaagagcccatgtatgctgaaaatgtattatttataaaatttatgacagtgtctcttgatgcacaggtgagatacatacttgaagtacttcctctatttaagagaagtacttaaataaatgtgcacagtataycctttgatctgataaacccaatatgagtaatatttcatgactttagatgagaaagctaagatacagtccccctctcttcctctggagagtgttttatgttacttttaaagcctagaaacattgtattcattttgcctccaagatttgaggacaaatatgactggcgaggaagatagaaccaagatagtcatgcacacatgtgcatacacatacacgcatatacacatacctcaggtatagagtccttacgatgtgaatcaattgacattttcaataatgtggggaaataatttccttg

SEQ ID NO: 344632 - DNA, 483 bp, Homo sapiens
atgactttagatgagaaagctaagatacagtccccctctcttcctctggagagtgttttatgttacttttaaagcctagaaacattgtattcattttgcctccaagatttgaggacaaatatgactggcgaggaagatagaaccaagatagtcatgcacacatgtgcatacacatacacrcatatacacatacctcaggtatagagtccttacgatgtgaatcaattgacattttcaataatgtggggaaataatttccttgtatattttactagtttgatttcacttgtaaaaattatttttcaaccaaaaagatataactgataacattttgattaccaataatggggtttcacaagtaactgactctaaaatattgaatttcctgaattctgttagaatataacaggtgaggaatgtagaatatttatttagttactaacaaatggttaaatgatttctgtttttcctgtggacattaga

SEQ ID NO: 344633 - DNA, 599 bp, Homo sapiens
tgagaaatttacttaaatattgttgtttctgtgtcaggcaaatttcttatctgaggatagatccctgcttttgcagcactaatgttccaatactggaaaataacctagatattttgaggaacatacaagaccagggrcttacagcataatgaacatgagagttcaattctaaaatgaattcagagaaatagattcctaatcagagaaggtctgaaacataatgggaagaaatcaggatttcattgtaaatgaaatctttaaaaaatgaaaagcttttaatcatgacataaataatctgtaaaagataattctgttcaatcaacgaagaatagatgtaggacaatagccacatgttgaattttagctgagtcctctgttcctacaaaacagaaatgtttaagaaattctcccaccttttagtgttctgggtaatggcttattacaatgaaatgccctttcccttaagactttgataagactcacaggaagtacccttatttacctgtgaaaaggccagacacatgccctctaaattccctttccttgccccttaaataattaactaaatcgcttgtccttactgatctatcagttcaaaa

SEQ ID NO: 344634 - DNA, 283 bp, Homo sapiens
acaccagctataatacaaagttgtcttttgttgctttattttgcctcttgaactaatgcttcactcttttctacttttaacaaagtactgataatgtaattaatttcaaaagtaccaagttttctgttgacccattagattctcagatagctttagatcttagtttcaaaactgaagtttctacttttctactcyaattagcatcactatcggcactaaacacaacttatgactttgaaaaaagtttgtttgttttttcaaaaactataccaagaagccaaaa

SEQ ID NO: 344635 - DNA, 583 bp, Homo sapiens
accctcaccccacaaccactaccaacccaggccatgaggagtactgccagatgaactccaatattcccttaaggcccaaggtctcttaagtcagcttgtaaattctgcctgacmaaggactcatctttcagggcaatgggctctgctctggcccatggaagatccagaaatgacaccaaagagtcaagccttgagtctgggacctcaagagcctacttggtgctctgctaccctgtagctatgctggtatctaaggtgcaagacgaagtctccttttctttttcttctgcttttctcaggcagaagttttaccccttagccaccatagctagttatgtgctgagtcacacctgaagcctgcaagtctcagagtttcaacaaggccctcaatgttgtacctgagtgctggttgttcggggcccaagggctcttcagttagcaggttatgaatgttgacaggactgtgtcttttccttcaaggcagtgggttcccttttggcacagggtgtgtctagaaatgccatctagaatctagggcctggaatggggacctcacgagtctgactggtgccctatcctgctg

SEQ ID NO: 344636 - DNA, 565 bp, Homo sapiens
attgaggtttgggaaccttcacctagatttcagaggatatgtagaaaagccctgatgttyaggcaaaagtttgctacaggggcagcgtccttgtggagaagttctgctagggcagtgcagaaggaaaatgtgggtaggagcccccacacagaatccccagtggggctctgcctagtggagccatgagaagagggccatcattctccagactccagaatggtagatctatagacagctttcactgtgtgcctaaaaaagccgcagacactcaacaccagcctgtgaaagcagccaggagggggactgtatcctgcaaagctacaggggcaaagctgcccaaggcttggggacccacgtcttgcattaacgtaacttgtatttgagacatagtgtcaaaggatattattttggtaatttaaggcttaattactgctctattaaattttggacttgtgttgggcctggagccccttcattttggccaatttctcccatttggaatgtatttacctggacccctattgtatctaggaagtaagtaacttgcttttaattttatagggtc

SEQ ID NO: 344637 - DNA, 588 bp, Homo sapiens
tttttctatatattgtttattttgtgttgagtattccagtacctctgtcttctactaaatattatgtcattatgctttgatcacattcattccattttttttcccagaaattccacttcagaagctctctttattcccactataaytactctcaatttctgccacctcgatgttctgatatctttcttcatttctttcctgaggtagattccacttcttaaattttatattttcttgttatttggtttactctcttgttttgctaaatcacctgagaaagtttgcatgtgaaatacatattttggaaaacatagtgtccgaaaaatttttttacactcaatttgattggtagcttgttttagtatagaaaaggtgcagatttagaattaagggatgacttaaaggctttatgctactattttctatattataatgttgctatcagtgccattttaactcgacatttctatatgattattcaattcacttttatattttgatgttctgaaattttataacattgtttcttgctgatcctttcttattaatttttctggagacaaagagaactttaaatctgcagacata

SEQ ID NO: 344638 - DNA, 614 bp, Homo sapiens
actatgttaaagaaaagcggtgaaagtgggcttccaggccttgttccaggctttagaggaaaggattgcagttttccctgttcagtatgacactatctgtgagtttgttgcatatgacttttatcatgttgaagtatgttccttctatacccactgtattgagagtttttattatgaagcaatgttgaattttattagatgttttttggcatctattgaaatgatcatatggtttttgtctttcattctattgatatgatgtatcaaattcattgatttgtgtatggtgaaccatccttgcctccctgggatgaagaccacttagtcatgatgaattatctttttaatgtattgtttgagttgctagtattttgttgaagatgtttacatttatgttcatcaaaaatattggcctgtagaatttttttatgttgtgcctttgtctggttatgctatcagggtaatactgtcttcatagaatatatttggaagtgtttactcctacttgattttttttaatcgtttcagtaggattattattagttctttyttagttgcattgcagaattcatctacaccaggtcctgagattttccttgatgggagacttttat

SEQ ID NO: 344639 - DNA, 527 bp, Homo sapiens
  misc_feature (1)...(527): n = A,T,C or G
nnnnnnnnnnnnnnnnnnnnnnnnnnnnnnnnnnnnnnnnnnnnnacaattctacacacctacagtgaactcatttttgacaaaggtgccaagaacatacactggggaaaagacagtctcttcaataaatggtgttaggaaaactaaataaccatatgcaaaagaatgaaactagacccctgtcgcttgccatatacaaaattcaaatgaaagcagagtaaacatttaaatytaaagcctgaaactacaaaactactgccagaaaactttagggaaaatctccaggacattgttctcaggaaagattttttgagcaataccccacaagcacagacaaccaaagcaaacatggacaaatgagatgacatcaagctaaaaagcttctgcacagcaaaggatacaaacaacaaagtaaagagacaactcacagaataggagaaaatatttgaaaacttcccatctgacaaggggttaataaccagaatacataagaaactcaaaggactctatgggaaaaaaaaaaaaaa

SEQ ID NO: 344640 - DNA, 527 bp, Homo sapiens
  misc_feature (1)...(527): n = A,T,C or G
nnnnnnnnnnnnnnnnnnnnnnnnnnnnnnnnnnnnnnnnnnnnnacaattctacacacctacagtgaactcatttttgacaaaggtgccaagaacatacactggggaaaagacagtctcttcaataaatggtgttaggaaaactaaataaccatatgcaaaagaatgaaactagacccctgtcgcttgccatatacaaaattcaaatgaaagcagagtaaacatttaaatttaaagcctgaaactacaaaactactgccagaaaactttagggaaaatctccaggacattgttctcaggaaagatttyttgagcaataccccacaagcacagacaaccaaagcaaacatggacaaatgagatgacatcaagctaaaaagcttctgcacagcaaaggatacaaacaacaaagtaaagagacaactcacagaataggagaaaatatttgaaaacttcccatctgacaaggggttaataaccagaatacataagaaactcaaaggactctatgggaaaaaaaaaaaaaa

SEQ ID NO: 344641 - DNA, 536 bp, Homo sapiens
accctttaacagttttttaaaaaaattttatagtgaatacctctaacatattattgtcttttgcttgatagaaataaaattgttgccaactgtgctgggaaatcataaaagtctagctaatgggaaacagctttaaarggtagagaacatgaatattaagttatcatggtgtgaacagataccttatattgctggatctacaactgccaggtataagaacaattagcccaatgttaatctaagttgtatggtgttaagcaactataagagggtgtatgaacatttattatcagagttaactgggtctgtaattaaaaacacttgcttaaaggggaacatttttagaatatgccttactgttaataaagctgagctaatctttgtaaagtaaccagtgtagtgcttgtcacctggtaagcattcagtaaacagtggtgctttttatcagagtaagggcgcaaattctcagatgatagctctcttgaataaggaatttgattttttatgattaaacttcattttgaaactttgttcta

SEQ ID NO: 344642 - DNA, 541 bp, Homo sapiens
ctagaacttttctgctgatatggatccaataagaatttagtaggctccctatttcacttctaacaacaccatggttaactagtcartgccacagatctgcacaggatagattattctgattgctgctttgattctgctgttccttacagtaaccacgcccaccttgcttttggcagtctagtagcaccaattggctgctgtcaccatggtaaccaattactctcattgcatttaggcttcccaattctgtggctgcagttctcactgtaagatttggcttgcagagaagtgtgattacacagctcttcaggaatgccacggtttccctcacaaatttattttttacagtatacttatgttttatggaccctctcaggattaatgagtaggtcttaaatgacaaatgcactctaacattctaatttccctaagcctctgaatccctttctctatacacaaatcaaggaaggtctggcatttctaatttgctcactttaggccacattttggtccatgtttcaaccagccaacaaaccaaacg

SEQ ID NO: 344643 - DNA, 552 bp, Homo sapiens
tattttctggtattttatttgctgagttgattcaggtttcagtccaataaggaagacatctctgggtaggcaatggttgtagctaaggcagatgggtatatgtaatacccaacagtgggctaaggtgctagccttgatgagggtggctgagggagctctcagatgtgctgaggttttaccatggtgaagagtgggaactacctcagctcccctgccaggcctgcaggaaagctcttcacctcacagcctcactcgtattctagtgtttcagctactcaaatctgacagccacctcttttcttctatagaaatgttgatgttccaagtagaaaggaactgtgactctgcctctcatgcagacctgaatctggagygtgctcctcctgtggggttgtgcttaccctggattgttccaggaaggctgtctatatgtgccttcactctgcattcctacgggggaagctccagctgtgtctgcagtggagtgccagggagtaagaaggacatcttctcacagaggctgcctgcctgttgtagtagagaggtgcagac

SEQ ID NO: 344644 - DNA, 549 bp, Homo sapiens
acccactgttgggtatgtctttctcagcagtgcaaaaacagactaatacagacatatagaaaagagaaggttctacttggcatctgccaccccataccctagccccatactctagctaggataagctgggaagcagaagaagcttcctctggtggagacaaggtaagcaagaggaatccagcagcctccatcaacaccttggacacatataatttttattattgggaactcccgccattctcacaggcactaagcttagctgtgggagattccttgagtccacacagctgtgtttccccacagaaaaagccaacactgtgtcctaccccctctggaccctgtggctactgagctatgtcatcttggaactgaaactrctaatggagtgtgttttgctctgggactgagtgttcatggcaccctttcctccctgagggtaaagtgttgctgaaccacccctgcctggtagcatgatatccccaagccaagctgcaggaggctgttacactcttccccatgtggccaagtggtggtggagatgccccacct

SEQ ID NO: 344645 - DNA, 616 bp, Homo sapiens
gaaaattatttatctgacaaggggtgaatatttgcaattaaaaaaaacatccaaacaactcaccagcaaaaaaaaaaaaaaaaaaaaaaaaaaatacggttagaaaatggtaattgagctagagatctctcaaagaagacatacaaatgcccaacagttatatgacaaaagtcttaatatcactaatcatcaggcaaatgcaaattaaatccataatgagatattatctcacctcagttacaggattttatgaaaaggataaaaaaaatgctgtcaaggatgtggaaaaaaaggaactttttctgttgtacactgttggtactaatgtaaattagtgcagccattatggaaaacagtatgaaggttttttaataaactaaaaatagaactaccctatgatatacaatctcactaaaggagatatatatgtatatatatatatrtgtgtgtgtgtataatatatatatgaaagggaattagtataccaaagagctatctgcacccccatgtttactgcagcactatttacaatagccaagctatgaaatcaacctaagtgaccatcagcagataaaagaataatggaaatgtgatgtacatacacaatggaatactg

SEQ ID NO: 344646 - DNA, 533 bp, Homo sapiens
acctgtgtggaataattttaaaaatggaattttcaaaattaaggcaacaagaaaggataaataaaagttkgaaatgatataagaaagatttaatactttcctcacctttcaaaagcgttatggccaacatgcctataactaaagacaagttaagagaaaagcatagaaaatttatttcatcaaagttttacattacatgggagccttcagaaatgaagacacaaagaaccaaggaaaactttgtattattatgctcccagaagaatgaacagtcatgtaaaaatgtgattggaccaaaaaattgtatgatctaatggtaatagatggagggggaatctcagcaaagcctatccagatttgtcttggcctttctgtgaagcattcctgccctctagctataagacatgacccctctgtaatgaaggtcttatgacctactttcaggcaagtaagtcagataatttacttatggtcagctctcacacagaaatagaaaagtcagagtggctttcttgctactgagatcctcccaa

SEQ ID NO: 344647 - DNA, 508 bp, Homo sapiens
acctcatttgaaggtgtatatttcactcagtgtttttgtacttctctgtgagaggtgcagaccagagcggcttctaatcagccatcttggtctgccccaacaagttgttcatgacaagtgcagatgtatagccaaggagcagcaggaagagagtgtcagtgaatagaaaattactgaaaggaaacatcaagggtagggagatagatggttgttaaaccaacctaataggattcttgttaaagacaggccaaagaattagacaaaatgagggratgcagaatgttattatatatcaaaagggtgcggattctcactaaactaactaagcaagatcctttctaagactggggtaagcaggcaaaggcaggatgagggccagggccaagggctggtcaagaagagtgccccaaggagtctgaatatagtttggtgaagtacagtctttgtcaaagcccagtattgtctcacactatttaacaacattgtcgtcaacaatagttcacatgtg

SEQ ID NO: 344648 - DNA, 542 bp, Homo sapiens
agactcacccaaattaaggtaaaagaacaaaccaaacccaaacccagcagaagaaataacaaaaatcagagcctaactaaataaaattgaaacaaaaaattacaaaagataagtaaaacaaaaagtggttctttgaaaagataaacaaaattgatagatcattagagagattaaccaagaaaagaagagacaagatccaaataagctcaattagaaacaaaatgggagctattrcaaccaataccacacaatacaaaagattatttcaacctattatcaacatctttatgtgcacaaattagtacatctagaggagacggataaattcctagaaatgtagaaccttactagattaaattaggaaaaaatacaaactctgaacagaccaataacaagcagcaaaaattgaatcagtaataaaaaaattgtcaacaaaagagtacgtgatgagaggggttcacagctgaattctatcagatgttcaaagaagaattggtaccattttactgaaagtattccaaaatatagagaaagggaatcct

SEQ ID NO: 344649 - DNA, 588 bp, Homo sapiens
cactttcaccacttctattcaccacattactagaagtcctagccagagcaatcggaaaaaagaaaaaaaaaaataaagagcatccacattggaaaagaggaagtcaaactgtcagtgcttgctgatgatatgaccatatacatagaaaagtctaaagactcatccaaaaagttcctatctggtaaataaatttggtaaagtttcaggacaaaaaaatcaaagtacacaaatcagtagccctgctatatatcatcaaayaccaagcttagaatcaaatcaagaactcaatcccttttatagcagttgaacatatatatatatatatatatgaatatatgtagaaatatacttaaccaagaggtgaaagatctctacaaggaaaagtacaaaacattgctgaaagaaatcagagacaacaaaaagcaaatggaaatacatcccataatgatggataagtagaatcaatagtatgaatatgactatactgcctgaagcaatatatagattcaatgtaatgcccatcaaaatatcatcatcattcttcacagaaaaaaaattctaaaattcaccaaaaaagagtcctcatag

SEQ ID NO: 344650 - DNA, 588 bp, Homo sapiens
cactttcaccacttctattcaccacattactagaagtcctagccagagcaatcggaaaaaagaaaaaaaaaaataaagagcatccacattggaaaagaggaagtcaaactgtcagtgcttgctgatgatatgaccatatacatagaaaagtctaaagactcatccaaaaagttcctatctggtaaataaatttggtaaagtttcaggacaaaaaaatcaaagtacacaaatcagtagccctgctatatatcatcaaacaccaagcttagaatcaaatcaagaactcaatcccttttatarcagttgaacatatatatatatatatatatgaatatatgtagaaatatacttaaccaagaggtgaaagatctctacaaggaaaagtacaaaacattgctgaaagaaatcagagacaacaaaaagcaaatggaaatacatcccataatgatggataagtagaatcaatagtatgaatatgactatactgcctgaagcaatatatagattcaatgtaatgcccatcaaaatatcatcatcattcttcacagaaaaaaaattctaaaattcaccaaaaaagagtcctcatag

SEQ ID NO: 344651 - DNA, 556 bp, Homo sapiens
aagaacccaaaagtaaatgcaaccaaaacaaaaataaataaatgggacctgtttaaactaaaaaggttctgcacagcaaaagaaacaattagtagagtaaatagatagcacacagagttggagagagtctttgcaaactacgaatcttacaaaggactaatatacagaatctacaaggaatccacacaaatcagcaaaaaaaaaacaaaaaagacattcaaaaagtgggcaaatgtcataaatagaaaattctcaaaagaaaatatacaaatgaccaaaacacatatgaaaaaaatgctcaacgtctctaattatcagggaactgcaaattaaaaccacaatgagctaccaccttactcttgcaagaatggccataattaaaaaatcgaaaaacrataaatgttgttgtggatgtggtgaaaaggaaacacttttacactgctcctgggaatgtaaattagtacaaccactatgaaaaacagtatggagattttttgaagactaaaaatagaactcccatttgatccagcaatcctactgctggctatccacccag

SEQ ID NO: 344652 - DNA, 394 bp, Homo sapiens
tactatgtacttacattctgtaatagaaagtaaatamatatatttaaaattataaaagaaaaatagcagtaaaagtttattatattaagatgtggttgcaaatagtagggaaaaaaagtagtactatatgtgtgtttctttggaaagatgctctgatgggcaggaaggagatagtagtgtctgcaatttttccttatgtaccaaacaatgccaagcaacctgcaagattatgggcatattttgaaaaataaagtattaacaaataaatgactcctctttttgcttaggattgtcttgactttatgggctctgttttggttccatatgaaatttaaaggagttatttctaattctgtgaagaaagtcaatagtagcttaatgggaatagcattga

SEQ ID NO: 344653 - DNA, 394 bp, Homo sapiens
tactatgtacttacattctgtaatagaaagtaaatacatatatttaaaattataaaagaaaaatagcagtaaaagtttattatattaagatgtggttgcaaatagtagggaaaaaaagtagtactatatgtgtgtttctttggaaagatgctctgatgggcaggaaggagatagtagtgtctgcaatttttccttatgtaccaaacaatgccaagcaacctgcaagattatgggcatattttgaaaaataaagtwttaacaaataaatgactcctctttttgcttaggattgtcttgactttatgggctctgttttggttccatatgaaatttaaaggagttatttctaattctgtgaagaaagtcaatagtagcttaatgggaatagcattga

SEQ ID NO: 344654 - DNA, 645 bp, Homo sapiens
ctatattcaagtacaattgatggtaaataaagaagccagaataacatgttaaatagtatcttgagatacaggtaagggaaggaatgcaaccagcaaaatatttgaagtgggaaactctacaggacaagtgagacagagttttcaataaataaacttacaaaataatagagtgagaattcatatattaaggagatttgaaagacatatcaagtaatcacaatgtgtggacttatttaatcgtttaattaaattgaaaacaatacaaagttatgagaaaaatgaaattttgaacaatacaacattaattgcatatttgaagctacaaagaaatttctatttatttttcaggaatgaaaaattgtgggtgtgttaaagttctcatcttttagagataaatatcaaaatatttactaattaaatgataagttccctgtaatttatttcaaaataatatattcagaaaggtattggcgatttgtataaaataaattgaccatgtattaataattattaaaaytgcatattgattatataagattttgagatagcattcaatatatcaatatagtcaatatattatgaatatacaaacatctaattttttattttttaaatatttcataataaaaatcatgtttatttaat

SEQ ID NO: 344655 - DNA, 585 bp, Homo sapiens
tactgcttacacttttttctaaaacattaacattttgtgatgtttagttgctcatgttcttccattccttcagtgcatcacaatttggaaactgtgtccaatttattcaacatatgaaatatactcccatmttgttccttgtctttccacactcaagactacaatctttagcctttcattcatgctttcttatactaatagtacagtgtatcaggtacttacttccttgactctcttcttataagttctccacctgtcttcagagttacatttctgaaactcaattataatcatgccacttttctggcttaaaacttgtaaatattcccattgtctaatgaatacagtcctaacttcctatttgtcatttagtgatatgtgtgatctttaacatattttcagattcatcttttactactgttccttctacacattgaaatatgaatatatgtagactgtaattaaaaactgtttcagttttggtactcttctgtttctgatgaaaaaaatttttgcttaatactttcatattttgctagataaagatataaagaatgcactgggacgtttcagaaatagggcttg

SEQ ID NO: 344656 - DNA, 564 bp, Homo sapiens
ctacactcattattcagcttaatggtacttgaaaagacaaggactgccccaccccaccaaaaaaaatcaatgactcctacaaattacaagaaaacatagttttgcttgtaagtttaacatatgagaaacagatcataaattatatatagttttaggaaacatgactcaagcatttttaaatttgactagtaacttgggaatagctaatacaaatgaatgtctttgaaattaaataatggaaaaagaaaagactgaataatgtgtacttaatttctcagaccttttactaattacgtatgtattcttggcaattgagaaatctascttgtcatgtaaaattcacaagaaaattggcttgtgattaaaaaaaacagaagaaactttaattttgatgtatgctgagcaaagtatcttccagttaaagcaaaaacaattttcaaggtgatagaaatcagaggtaattaattgaaataattacccaatttttatacatttcaattacttagcctgtatatctaaatataccttgtgattttgtgtgaaccatcaccattatacagaatt

SEQ ID NO: 344657 - DNA, 577 bp, Homo sapiens
aataggatacatacacacacacacacacacacatatacagaggctccttaacttcttaacttttgataggcttatgttccaataaactcattgtaaattgaaaatactgttaattctaaaatgcatttaagatacctaaccaaataaacatcatagcttagcctaccctaccttaaatatgtccaaatctcttactatactcatgtatatttatacacacatacacacatacacacacacacatatatatacacagacaaccttttttttttttttttttttttttttaaaaatggagtcttgctctgtcgcccaggctggagtgcaggggcgcatttcggctcactgcaagctccacctcccgggttcacaccattytcctgcctcagcctcccaagtagctgggacaacaggcgcccaccaccaggcctgggtaattaattgtaatgaagggttgaatatctcatataccgttacaaaataggctttgtgctaggtagctttgcccaactataggctaatgtttgaccaaataccttggcacccttacccagcaggtggatgattaaaattaatc

SEQ ID NO: 344658 - DNA, 605 bp, Homo sapiens
tacaccactggctattggtgatcaatgtgaccttcagtctctctctctctcccaggcagttgtggtggttggagcaggaagtcccaaccttctaatcttgctttggtctttctggtgaccagccccaccctgaacctatcagacaaaagacacacaaaagtcattaaactctttgtgatgtatattaatataccacaataaactctttgtgatatatttatatataccacaaactctttaatgactttttgtttgtattcagcagtttgtctatgataagcttaggtgtgctttttgtttgtttgcstcttttattcctgtttagatcatcctgaaattcttggacttgtaaattacattattttagaatcaaatttgggaaatattcagtcaatatttctttatatacattttttctgcatcttctctctctgttattcttctaagagaattatgtgtgtgtgtattatatatatatatagatgtatatatatatatatatatatacatctatatataatatatagatgtagtttgtctgtgtctctgtccaaaccttaacttgaattgtatctcccagaattcccaagtattgagggaggaac

SEQ ID NO: 344659 - DNA, 591 bp, Homo sapiens
attttatcatttgccatatgttacataattacataaatgttagtatatgttgtgaatatgctgcaaattaacagcttttcttgtttctgaagagaaaatgagaaattaatttggcaaatgtcaagtttagttcatgtcaagatgctttttgtgtcatgatacatcatgaaagattaaacagatatgttctcctaaatagaacaatttggcggcagcagctgtggttcacattctttcatttagcagattcattccacctgacttcagagaaattgctaagatcacgttttcataatatgcatatgtttttatttctcttgcctaattcagttagagttgatagaggaaaakaaaattttgttgtattatgcatctttagttgaaaatgggtaccactgtagttttattcatgcatcaataattagaaaataaacacaaattaaaattgtagtcctttaaggttgattttaatgtaaagtgggatgtctataaacatcatgactcatttggaatacactataaactttgtaagattttaaaagctcacaacaaatatgggtgtcagcagtgttcactgtctcctgttgtttc

SEQ ID NO: 344660 - DNA, 557 bp, Homo sapiens
aatatgggtgtcagcagtgttcactgtctcctgttgtttcctaaactacatgcagtatattaaaccggattgggaaacgggggaagcagtttgtcatgctccacagctaaaaggcattttttaaatgtcttgctctggttccctgttgaataaaaatgtagtaaaaatgtagcccaaataggtcatcattttacactcttttctctatagctgtttgtttgtttgttacagttctctgctataaagttacttcccatggtaaagacatttttaatgatttttaccaaaactctacttttgaataatacatttctgtcttggaaatagtgtaggtacagacttaaataaattattctaaaatgttttcttagttaaaygtttgcataactcttgtaagtatagcagattatcaaggctttcaacatcttggttgtgttgctggtgagataccttgtaataacctgataacaaataaaatataggattgcttccacatctacaagtgttccaggcattgtactagtcattttacgtaggatatcacctttaatgtgtaa

SEQ ID NO: 344661 - DNA, 581 bp, Homo sapiens
tatattcagtgagtagttactggatctcaaggcaagtgcatctattctataacttatgcattttgtctctgtgaggaaattgaygtaatagcaatcaccttcttacttctatttgtgattggaatgagggatatgcaatggtcttctaatatccagaatgacatgcattgccctttgttccaaatggagataattatgaatcctttagttatctaccattgaattatgatatgaacttcagatctaaaaccacatgtataattgttttaattgtttatttgaaggttttgatgcagaatttgtacctgaaattattttttatgaaagttaaattgttattattatcactgtttcagtggatactcagaaaatatttacactaaatcctttattccaaatcattttagaaactctagggactcaataatcctttcaggggattagcctacattttaaagctccagtgatccagataatctcttcggggaattccgcccacaattgagtgctccaaagacagcacagcatttccctagagaataatgtttttatgataaactttttaaaataaagaccatatc

SEQ ID NO: 344662 - DNA, 581 bp, Homo sapiens
tatattcagtgagtagttactggatctcaaggcaagtgcatctattctataacttatgcattttgtctctgtgaggaaattgacgtaatagcaatcaccttcttacttctatttgtgattggaatgagggatatgcaatggtcttctaatatccagaatgacmtgcattgccctttgttccaaatggagataattatgaatcctttagttatctaccattgaattatgatatgaacttcagatctaaaaccacatgtataattgttttaattgtttatttgaaggttttgatgcagaatttgtacctgaaattattttttatgaaagttaaattgttattattatcactgtttcagtggatactcagaaaatatttacactaaatcctttattccaaatcattttagaaactctagggactcaataatcctttcaggggattagcctacattttaaagctccagtgatccagataatctcttcggggaattccgcccacaattgagtgctccaaagacagcacagcatttccctagagaataatgtttttatgataaactttttaaaataaagaccatatc

SEQ ID NO: 344663 - DNA, 581 bp, Homo sapiens
tatattcagtgagtagttactggatctcaaggcaagtgcatctattctataacttatgcattttgtctctgtgaggaaattgacgtaatagcaatcaccttcttacttctatttgtgattggaatgagggatatgcaatggtcttctaatatccagaatgacatgcattgccctttgttccaaatggagataattatgaatcctttagttatctaccattgaattatgatatgaacttcagatctaaaaccacatgtataattgttttaattgtttatttgaaggttttgatgcagaatttgtacctgaaattattttttatgaaagttaaattgttattattatcactgtttcagtggatactcagaaaatatttacactaartcctttattccaaatcattttagaaactctagggactcaataatcctttcaggggattagcctacattttaaagctccagtgatccagataatctcttcggggaattccgcccacaattgagtgctccaaagacagcacagcatttccctagagaataatgtttttatgataaactttttaaaataaagaccatatc

SEQ ID NO: 344664 - DNA, 562 bp, Homo sapiens
caataatcctttcaggggattagcctacattttaaagctccagtgatccagataatctcttcggggaattccgcccacaattgagtgctccaaagacagcacagcatttccctagagaataatgtttttatgataaactttttaaaataaagaccatatccttttacaaatatatattttaatactgtactcttataatgtcagaaatatactacctttattccaaatatgtctttatattttgatttgtattttaatacacaaacctatgaattcaccacttaaatgtagatatggcactgatrtagggcactgttatttattttctgtaaagtactcaagagagtgtgtctaacaaattcataagaatgaaagcctccaagggcgtaaagattgacagtggtgattttaaaaacaaacaaaaaagccacagggagaaggcatacataatattatgccgaaagaaaatatctgagtttatttttctacttctcccacacaaaactagagaacctctcctggaatatttgaaactttggatacacaactgagaagaaaacat

SEQ ID NO: 344665 - DNA, 557 bp, Homo sapiens
agtcacagtatgaaaaaaaaataacaggtgtttgagaaaatgtggaacaattgtaccctcttacattggtggtgaaaatgtaaaaatagtacagccattagaaaaaacagtttagaagtttctcaacatttaaatagaatcactacatgactcagcaattccacccctaggtatatgcccaaaatgcacataacatgtattcaaacaaatacctgtgcataagtgtttacagcagcactattcacaaaataccacaaggtagaaacatcctaaatatttattaatcattaatggataaacaaatggtcatatgtacatacaacgkaatattattcagcacagaaggcatgacataatgatccatgctaaaatagggaagaaccttgaaaacactgttctaaatgaaaaaagccagacataaagtctcatattgcaggatttcatttatatgaaatagacagaagaagtgaattcacagaaacaaaagcagatggttggttatgtagggataggaatagatggcaaaaatgggcacaactgcttaatgggcacaaggt

SEQ ID NO: 344666 - DNA, 606 bp, Homo sapiens
gcaaattctgtctgaaaatagatctccagataatacccaatctaatattcaaactgaagtatcttgaaatacacttagatwttttagtgtgtagcttgagtcttcaccattactgctttctaaactttatttcataatttatgtgagggtggtcatcttgtcatggtgaaaaagatagctttataacttatcaactaaagacctcaagattaatcttcaggttaatgtatatgcaattattatttccactaatcttctctatcaccttgactccagatagacttatttatctctcaaaataggaggtagcaggaaactctttccctaaacattttgtgtgattcatttcttactgttgcaatgggaattttgttttaaaaccttggaggaaaagatggtggtaacatgttttctacatagatcttagaaaaaaattctctctaatttattggttaaaaatctataaggatataacctttgacaaaataactcttaaacaatagaaggacaggatttagaattcagacatctccctggtggtcttttattgttgccacaggcagaaagaatagctggaaggcatttctgaagcttttgaacagataa

SEQ ID NO: 344667 - DNA, 627 bp, Homo sapiens
cagatgacatgatcctatatctagaaaagccagtagtttcagccaaaagcttcttaagctgataaacaacttcagcaaactccgaggatacaaaatcaacatacaaaagtcactagcatttttatccaccaacaaaagccaagccaagtgccaaatcagaaagacaattctattcacaattgccataaagaatacaatacctaggaatgctgcaaaccaaggaggtgaaagatmtctacaatgagaaatagaaaacactgctgaaagaaatcagagatgacataaacaaatggaaaactttccatgtgccagaaagatttcataccattaaaatggctatactgcccaaagaacttacagattcattgttattcctatcaaactaccaatggcattttccacagaacaagaaaaaactattttaaaattcatatgggaccaaaaatgagcccaaatagccaaggcaattctaagcttaaaaaaaaaaaaaaaagcaggaggcatcaagccaagctaacttagttaaaactacactacagagttgcagtaaccaaaatagaatggtactgctacaaaaacagacacataaaccaatagaacagaatagaaagcccagcaataaggcca

SEQ ID NO: 344668 - DNA, 683 bp, Homo sapiens
aaaacaaaataataaaaatatttatattacataaaatcactgaataaaaggaagctggttgagccatactaatatttagtcgcacatactcaattttgaggcagaacatttattacagtaatatgtaaaatgtcttttacagtaataaatgtgattaattcattaaatgacataatcctrcatgtatatgcctccaacattatagcctcataatttataaaggaagaagaaactgacagaaataaaagaaatagaaacacttgcaatcagagagggggaatttaatatacatctcaataactaggaaaagcagaacaaattcagtaatggttaggaattataattaaaaccttggtccacatagatatatttttggaacattgaaccaatataacacaatgtcttagtctataccaaggtagggcctgctttctgattcatagatagtgctttcttgcctgtccccacatggtggaagagatgaatgagttcctttgggactcattccagagggctccaccattatgacatatcatcccccaaagtctccacttcctaacaccatcaccttggggattaggatttaaacatatgaatttttggggaaacacaaacatgcagaccataaaacaatatgtatcatttcaggtagagatagagcatttagtaaatttgactatata

SEQ ID NO: 344669 - DNA, 404 bp, Homo sapiens
agaaaaaatttaaactgaatatcaatgacaatatatgtcaatacttttttgatgtaactaaaacaawgataaaatagaaatttataagtaaaaatatgtatttaattaaaaagcaagagtgccttttaaaaagtgatctaaggtggtatctctatggctagaaaaattttagtaactcaaagtagagaaaggaaataaagatttttcaatgaaacacaaaggaatgttcaatatagaaaatcaactaagccaaaagctagttcttagcttcattaatcaaatgaataacactctagaatgacagagttcaaaaaaaaagcagaaagaaaacatcataaattgccaatattccaatataagaatataacaatgtgggggtgggtttggggaggagaaggcagagg

SEQ ID NO: 344670 - DNA, 627 bp, Homo sapiens
cagatgacatgatcctatatctagaaaagccagtagtttcagccaaaagcttcttaagctgataaacaacttcagcaaactccgaggatacaaaatcaacatacaaaagtcactagcatttttatccaccaacaaaagccaagccaagtgccaaatcagaaagacaattctattcacaattgccataaagaatacaatacctaggaatgctgcaaaccaaggaggtgaaagatctctacaatgagaaatagaaaacactgctgaaagaaatcagagatgacataaacaaatggaaaactttccatgtgccagaaagatttcataccattaaaatggctatactgcccaaagaacttacagattcattgttattcctatcaaactaccaatggcattttccacagaacaagaaaaaactattttaaaattcatatgggaccaaaaatgagcccaaatagccaaggcaattytaagcttaaaaaaaaaaaaaaaagcaggaggcatcaagccaagctaacttagttaaaactacactacagagttgcagtaaccaaaatagaatggtactgctacaaaaacagacacataaaccaatagaacagaatagaaagcccagcaataaggcca

SEQ ID NO: 344671 - DNA, 567 bp, Homo sapiens
gtgtgatctcggctcactacaacctctgcctcccaggttcaagtgatcctcccgccttcgcctcctgaatagctgggattacaggcatccaccaccatgcccagctaattttttatgtttccagtagagatggggtttcaccatgttggccaggctggtcttgaactcctgatctcaagtgatctgcctgcctcaggctcccaaagtgctgggattacagacgtgagccaccacaccctgcccagtctgtggattatcttttcattttctcaactgggtctttgaaagagaaaaatgcttaattttggtgacataaatttttatcaattgttttatgatttgtgctttttgttccctacctaaaagtgtttgcctaactcaaggtcttaaaaaagtttctactatgtttgtttgttctagaagttttatagttttagcttctacatttaggtctgtgatcctaaatgtagaagtgtgatccattttgtgatccatttgagttaattattgtatatggtgcaaggtaagyttttttttttttttttttgcatatggatatccagtatt

SEQ ID NO: 344672 - DNA, 579 bp, Homo sapiens
ttgtccaacatttaccttattaagggctgcgtggacacggccattagataatacttatttctccagaggcaatcaacctttttcactccagtgatagaatggagcttccattaggagtagcagcttggaagaccaacttctgatttaaatcccacctccgccaagaccttggcaagtgctccaaaaccatctctgggcttcattttcctcatctatacaatggcggtaatgcatatattcactttataggtatggtatgagaattaaatgaattaacacctggaaactctaaagkgcaagcgaaaatattagctaagatcattattactacaactaatcaatatcatttcaactaggggaaattgcccatctaaaatcaggattgcaatgagactaaactgggcttttctattgcattattttctacactgaaaagtttcctgagattaagaaaaggaaaattagaaaaattactctttattaaggcccataaggaccaggactgtgcctttcctagttattccttcgttcttaccacacagaatagtggcagacacatattagctgttcagtgagctg

SEQ ID NO: 344673 - DNA, 572 bp, Homo sapiens
tcccagccagtgacagtgtgatggggctaccagagcccagccattcctgtccacaaggctgcttttggtctgggtacagcctttggtctgggtgccccaacagcctagcagacttcctcagagctgcactgtagcctgaagctcttcttgtccagccttccttccttctcactctttcttcacagataccaaacctccctcctgctcctcctgttccctcttccttttatcctacagatacttcccccaataaatcttttttcttctaattccrtcttggcctctgcttcttgaaagatcaaaaatgatacatcttctaaggcccagcttcatgatcccatgtctttgtatttttcaaggaaaggaggctcccccttgctcctgtctgcctcatcacctccacttacatttttcctaaatagtgtaatccagcctctcttcgtttatttaattctccttttcacctctctcaccctgatgaaacccagccaaaatccaataaatgatcaagcaggcaaagaatccttgctcattgcaagtgtgttctattgttgcatgtgtgtgtatgtgcg

SEQ ID NO: 344674 - DNA, 499 bp, Homo sapiens
caacttatttattttatagaggaagaaacaagtccaaagatgcatagtgacttgtgcaagttacacagttagccagtggcagaggaaagactagaatagtctcctaacccctatctagtattatttccactacaatacggggctcccatacttcaagtaaatttgtacttcatttttattatagctaaataccagtgtagtatttaataaaaagtayattgaatttatgcacaaaaagggaaaagttaggaaaactgcttggattattaaggtttaaaacacactatttttaaagcctaagttgactcaaggtagacgtcagtgttcacttaacttggtgatacaaaagtaaaaacagatgctgatggccaggaaaggatgttgccagtaaagattctgacaacaaaaatgacttatatatgtctaatgacttttcaaaatcattttaaagactttcaaataaaaagacaaaatttagttgaagtctaataattacaac

SEQ ID NO: 344675 - DNA, 530 bp, Homo sapiens
acttggggttgaccaccaattcacagtgcctcagtggttcacaccaccactctcgtgaaagcctggggcaggcatctgcttgttgacaccccccttgtctaatgtatgctttacaactacttgaattcgagcagtgttgctgaactcaaaagcacctgaatgaacagttgtgttctacttcaaattgattattgctgagactgagctctctgatgtgaatcaagaggtatttttaggcttccagccaaaattggttggaatgatagaaatgatcatggactcaatagccttcacctgattttgaaataatggccacaggaaacagaaactgrtattttataaaaagcagtattttggtatagacagtatctttgatttcacaaaaatcctgaagagtcccaccttttagctctggactctccagtgagaactactggagcagaagaaaatctgtgccctcttcctaagaggctaggtagtagctgtaagcgtcaagactagaatttggcaatttctattcctcagaaaaa

SEQ ID NO: 344676 - DNA, 530 bp, Homo sapiens
acttggggttgaccaccaattcacagtgcctcagtggttcacaccaccactctcgtgaaagcctggggcaggcatctgcttgttgacaccccccttgtctaatgtatgctttacaactacttgaattcgagcagtgttgctgaactcaaaagcacctgaatgaacagttgtgttctacttcaaattgattattgctgagactgagctctctgatgtgaatcaagaggtatttttaggcttccagccaaaattggttggaatgatagaaatgatcatggactcaatagccttcacctgattttgaaataatggccacaggaaacagaaactgatattttataaaaagcagtattttggtatagacagtatctttgatttcacaaaaatcctgaagagtcccaccttttagctctggactctccagtgagaactrctggagcagaagaaaatctgtgccctcttcctaagaggctaggtagtagctgtaagcgtcaagactagaatttggcaatttctattcctcagaaaaa

SEQ ID NO: 344677 - DNA, 577 bp, Homo sapiens
tgctgcttctgcatgcactgctaccatcagattgccagtttgctattatttgtgtatattccacattactaccttttagtctttattcacatttttaaatcctccattgtcaatattctcttccctattttctttcccattcttcttcctttcttcttcgtttcactcttactcctcttccttccttttatctaccctcatgtttttgatgcaaaaatttattaaattcttataaaaataattgcctccatgaaactgtcctagatatttcctgagataatgatcttatcacctttgttttttttttttttttcattkgttggttttcaggcactgtcctttgatccgtatctgtgaaaactgagcctgaaacacagccagtgaaagtcaagccacataatatgtgaatgcctctttccttctatcctctactctaccctgttaacctttcctaacaaacacaaacaccaagggaatgtcccactggcaaagcttgcagcttccttccacactgctttctaggttactgggggaatgaatttaggctgtgatcaccaggctgcagccatatgagttg

SEQ ID NO: 344678 - DNA, 577 bp, Homo sapiens
tgctgcttctgcatgcactgctaccatcagattgccagtttgctattatttgtgtatattccacattactaccttttagtctttattcacatttttaaatcctccattgtcaatattctcttccctattttctttcccattcttcttcctttcttcttcgtttcactcttactcctcttccttccttttatctaccctcatgtttttgatgcaaaaatttattaaattcttataaaaataattgcctccatgaaactgtcctagatatttcctgagataatgatcttatcacctttgttttttttttttttttcattggttkgttttcaggcactgtcctttgatccgtatctgtgaaaactgagcctgaaacacagccagtgaaagtcaagccacataatatgtgaatgcctctttccttctatcctctactctaccctgttaacctttcctaacaaacacaaacaccaagggaatgtcccactggcaaagcttgcagcttccttccacactgctttctaggttactgggggaatgaatttaggctgtgatcaccaggctgcagccatatgagttg

SEQ ID NO: 344679 - DNA, 497 bp, Homo sapiens
agagtctttctttccccatgctaattttcatcaattttctattgctttaatttycccttgagctttagctttttagaagaatgattcattcttttcagcatataccatgatcattaaacaattacacctttatcaagtagagcagcaaaagactccatggataataatgaggttggaaactctcctgtacaacctgttggctcatcttggaagaagaatgtcatgccaaattattttttatgtggtcagtaataatgttctaacaagggtggatggagagatgagcataaagggcaattctaatggaaagaacgatagtaatattcaccttgccaaaacatggtaatgtcttgacaagatgctacatgctcttgctgctaaattaggttttatactaagttagcagcccctatagctatccactatcttacagactgaactagaagataaataatacacctttcatgttttagaaatctttcatatgactatgtaat

SEQ ID NO: 344680 - DNA, 398 bp, Homo sapiens
tttgagaatgttcagcacaatgtctgaacagaattacactcaacaaatggaggttgctgctgtgatgttagcmccatgattgtgtgctttgaatatctaactaacgccattgtgagacccttggcattgacctattgaatgcaaaaaaaaaaaaaaaaaaaaaaaaaaagcatagcctgactccagtcattattactcattcctattattatggacatttttatttttgtatcactggggacaattacatacctccaaataattcttttgcagactccttattttggggggactatgcataaagaagaagccaaaaactaacttcatattataatctttgtccatactaaagaaatttttatgtcattaaatgaaatattgcattatgtattcataga

SEQ ID NO: 344681 - DNA, 497 bp, Homo sapiens
ccatctattggctagcactactctagagggcactgaaaaagtgagctccaggaccttgctgtaccttatgccaaagcccatttactttattttttatcccaaattatacctagccacatgccaatatgtttcaagagagttaatacaactataacacataacaaatatgctttgataayacaaattcaataaataatttataaaaatattataaaatctctaacaaaggagaaattatatccaaagataaagctaaaataaataattaaataaataaacttctaaatgttccttccctcaatttctcactctgtgcagtctcattagagggattcctctcagaagcatggatagagttaggtgcttttagtggttgtaggggtttgtaatagtgtagttaggaccctatgttctacctggtgattttttctgttttcctttttcacccttttcaggccttaaataaatgttgtgtctttaggggtaccggaaatatt

SEQ ID NO: 344682 - DNA, 510 bp, Homo sapiens
gagcaagtctcagttacgctgatgatgtaaactttcaatagtgaagcattaaacttgttcacgtcacaacaatgtcacaacatttctgaagccaggacttcattctagtaaactagatatatttcacaatgtcaaatcacttaaaaaccttctacacacctggaatttgcaagataagagtgtgaatggataggatcacacctagaaaatctggttaagtaaggatcagacaaatgctaaataatgtcaagaaaaggtaaaaccagaaayacgatccagatggggatttgcctttgtcttttctgttcctttcctctcactgggaacaaggaaaactactttgaaggctaccatcattgtaggacaactatattcagaattttgcaaccaggtccctgtgcccaataacaggaatgtatcctaatttaacatcatccaaaagtaacataaataaataaataaataaagtttcaggagaaaggttctctttgtggaaaatggcataaattg

SEQ ID NO: 344683 - DNA, 440 bp, Homo sapiens
ccttccattccattccattccattccactccattccgttccgttccattccattccattccattctattcgggttaattccattccattccattcrattgcaatcgagttgattccattccattccattccattccattccattccattcctttccattccattacggatgattccattccattgcattccattccattccattaccctgtactcgtgttgattccattccattccattccaatccatgccattccactcgtgttgattccattctttccattccattcaagttgaatccattccattgcattccattccattcgattccattcgattgcacttgggttgattgcattccattccattccattccattccattccattccattccattccgttccattccatttcattacattcagattgatcctattca

SEQ ID NO: 344684 - DNA, 609 bp, Homo sapiens
gaatggaatggaatggaatggaatggaacggaacggaatggaatggaatggaatggaatggaatggaatggaatggaatcaacgcgagtgcaggggaatggaatggaatggaatgcaatggaatggaatcttccggaatggaatggaatggaatrgaatggaatgaaatgcaatggattcaactcgattgcaatggaatggaatagaatggaatggaatggaatggaatggaatggaatggaatggaattaacccgaatagaatggaatggaatggaatggaacggaatggaacggaacggaatggaatggaatgcaatggaatggtatggaatggaatggaatggtacggaatagaatggaatggaacgaattgtaatggaatggaatggaatggaatggaatggaatggaatggaatcaacgcgagtgcaggggaatgtaatggaacggaatgcaatggaatggaatcatccggaatggaatggaatggaatggaatggaaaggaatcaacccgagtgcaatcgaatggagtggaatggaatggaatggaatggaacaacccgaatggaatagaatgtaatggagagtaagggagttgaatagaatc

SEQ ID NO: 344685 - DNA, 609 bp, Homo sapiens
gaatggaatggaatggaatggaatggaacggaacggaatggaatggaatggaatggaatggaatggaatggaatggaatcaacgcgagtgcaggggaatggaatggaatggaatgcaatggaatggaatcttccggaatggaatggaatggaatagaatggaatgaaatgcaatkgattcaactcgattgcaatggaatggaatagaatggaatggaatggaatggaatggaatggaatggaatggaattaacccgaatagaatggaatggaatggaatggaacggaatggaacggaacggaatggaatggaatgcaatggaatggtatggaatggaatggaatggtacggaatagaatggaatggaacgaattgtaatggaatggaatggaatggaatggaatggaatggaatggaatcaacgcgagtgcaggggaatgtaatggaacggaatgcaatggaatggaatcatccggaatggaatggaatggaatggaatggaaaggaatcaacccgagtgcaatcgaatggagtggaatggaatggaatggaatggaacaacccgaatggaatagaatgtaatggagagtaagggagttgaatagaatc

SEQ ID NO: 344686 - DNA, 609 bp, Homo sapiens
gaatggaatggaatggaatggaatggaacggaacggaatggaatggaatggaatggaatggaatggaatggaatggaatcaacgcgagtgcaggggaatggaatggaatggaatgcaatggaatggaatcttccggaatggaatggaatggaatagaatggaatgaaatgcaatggaytcaactcgattgcaatggaatggaatagaatggaatggaatggaatggaatggaatggaatggaatggaattaacccgaatagaatggaatggaatggaatggaacggaatggaacggaacggaatggaatggaatgcaatggaatggtatggaatggaatggaatggtacggaatagaatggaatggaacgaattgtaatggaatggaatggaatggaatggaatggaatggaatggaatcaacgcgagtgcaggggaatgtaatggaacggaatgcaatggaatggaatcatccggaatggaatggaatggaatggaatggaaaggaatcaacccgagtgcaatcgaatggagtggaatggaatggaatggaatggaacaacccgaatggaatagaatgtaatggagagtaagggagttgaatagaatc

SEQ ID NO: 344687 - DNA, 603 bp, Homo sapiens
caatcaacctgatgcaatggaatggagtggaatggaatggaatggaatggaaacatcccgaatggaatggaatgtaayggagtgtaagggaattgaatagaatcaatacgaatgtaatggaatggaatggaatgaaatggaatggaatggaatggaatggaatggaatcaacccgagtgcaatggaatggattcgaatggaatggaatggaatggaatggattcaacaagaatggaatggaaaggaatggaatcaacccgagtgtaatggcatggattggaacggaatggaatgggatggaatggaatggtacggaatagaatggaatggaatgaaatggaatagaatggaatggaatggaatgaacccgtgtgcaatggaatggaatggaatggaatggaatggattcaactcgaatggaatcaactcgattgcaatggaatgcaatggaattgaaagtaatagaatggaatcaacccgagtggaatggaatggaaaggactggaatggagtggaatggaatggaatggaattaacccgaatagaatgaaatggaacggaatggaatggaatggaatggaatggaatggaatggaatggaat

SEQ ID NO: 344688 - DNA, 603 bp, Homo sapiens
caatcaacctgatgcaatggaatggagtggaatggaatggaatggaatggaaacatcccgaatggaatggaatgtaatggartgtaagggaattgaatagaatcaatacgaatgtaatggaatggaatggaatgaaatggaatggaatggaatggaatggaatggaatcaacccgagtgcaatggaatggattcgaatggaatggaatggaatggaatggattcaacaagaatggaatggaaaggaatggaatcaacccgagtgtaatggcatggattggaacggaatggaatgggatggaatggaatggtacggaatagaatggaatggaatgaaatggaatagaatggaatggaatggaatgaacccgtgtgcaatggaatggaatggaatggaatggaatggattcaactcgaatggaatcaactcgattgcaatggaatgcaatggaattgaaagtaatagaatggaatcaacccgagtggaatggaatggaaaggactggaatggagtggaatggaatggaatggaattaacccgaatagaatgaaatggaacggaatggaatggaatggaatggaatggaatggaatggaatggaat

SEQ ID NO: 344689 - DNA, 603 bp, Homo sapiens
caatcaacctgatgcaatggaatggagtggaatggaatggaatggaatggaaacatcccgaatggaatggaatgtaatggagtgtaagggaattgaatagaatcaatmcgaatgtaatggaatggaatggaatgaaatggaatggaatggaatggaatggaatggaatcaacccgagtgcaatggaatggattcgaatggaatggaatggaatggaatggattcaacaagaatggaatggaaaggaatggaatcaacccgagtgtaatggcatggattggaacggaatggaatgggatggaatggaatggtacggaatagaatggaatggaatgaaatggaatagaatggaatggaatggaatgaacccgtgtgcaatggaatggaatggaatggaatggaatggattcaactcgaatggaatcaactcgattgcaatggaatgcaatggaattgaaagtaatagaatggaatcaacccgagtggaatggaatggaaaggactggaatggagtggaatggaatggaatggaattaacccgaatagaatgaaatggaacggaatggaatggaatggaatggaatggaatggaatggaatggaat

SEQ ID NO: 344690 - DNA, 603 bp, Homo sapiens
caatcaacctgatgcaatggaatggagtggaatggaatggaatggaatggaaacatcccgaatggaatggaatgtaatggagtgtaagggaattgaatagaatcaatacgaatgtaatggaatggaatggaatgaaatggaatggaatggaatggaatggaatggaatcaacccgagtgcaatggaatggattcgaatggaatggaatggaatggaatggattcaacaagaatggaatggaaaggaatggaatcaacccgagtgtaatggcatggawtggaacggaatggaatgggatggaatggaatggtacggaatagaatggaatggaatgaaatggaatagaatggaatggaatggaatgaacccgtgtgcaatggaatggaatggaatggaatggaatggattcaactcgaatggaatcaactcgattgcaatggaatgcaatggaattgaaagtaatagaatggaatcaacccgagtggaatggaatggaaaggactggaatggagtggaatggaatggaatggaattaacccgaatagaatgaaatggaacggaatggaatggaatggaatggaatggaatggaatggaatggaat

SEQ ID NO: 344691 - DNA, 601 bp, Homo sapiens
aattgatgcctaaaattcagtccacaagtccactccttgtcaacttggcacccaaacccacatccttatgccatagttaatttccaaataaagacaataacaaggtaatagttcagcccaacatgaggtaaccaacatgatgtaactatcctgcatatagccgaaaactcacactattttmttccccagaatttagatgtcaggattttaacatttgggattttaatctcttgcaattgtgatttttgggatttttagatgttagggattttacagtttagggattttgaccttttgggattttgacattcagaattatggcatttgggattgcatcttttgagattttcagcagcacctatctcttcattagatcataaaaattatagataagaattatgatcaacaccgatctcttggctagattataaaaataatagctaccatttaccgagtatccattaaaagccaggtaaattccagcatgtattagtgcaactatggccacatctaccaagcaataattcattagtgtagtttactgcgtatgtaagaaacagtaagtgatgatttcatttagcaattaaaaaaaaagtttagt

SEQ ID NO: 344692 - DNA, 591 bp, Homo sapiens
tgggtgttgaattttgtcaaatgcttttctgcagtgattgatatgattatgtgatgtttcttctttagcctattaatgtggtgattaataggctcacgactgattgacttccagtcaatccagtgatttttgctacaatgattgatcttcaaatattgagtcagcctggaataaactctacttgtcatggagtaccattaattttatatattgctgaattctatttgccaatatgttamgaatttttgaatctgtagccataagggatatttctctgtattcttattttttttgtactgtcattggttttggtattagggtaatactagtttcataaaatgaattgggaactgttctctttttattttttggaagagaagtgtagaattgctttgttgatttattaatcttttcaaagaacgaaattgtattagattgttcttgcactgctataaagaagtacctgagactgggtaatttataaagaaaaggggtttaattggctcacggttctgcaggcttacaggaagcattgctggggaggtctcaggaaacttacaatcatggcgaaaggggaaggggaagcaggca

SEQ ID NO: 344693 - DNA, 630 bp, Homo sapiens
ttacagcttgtacctttcagagtggcaggttgagccatacctggtgccacttgaatcacagctggggtggtcaaggagtgatgaggctagaatgcagggagcagagacctgcaaggaccctgggcaggaagcccacggagggtttcctggatttgtctggcaaaactattttgccctcctaggcctctggggcccatgatgggagaggcagcttcaaagatatctaaaatgtcttcagggtctttcttctagtctcttaatcatcccttctctctgtactgatctcctcagtaaaggtcactgaaaaaaaaagcacgttctcctgaacatgttttttcactctttacatggccaggctaagagttttccaaatccttctgctttgcttctttcttgattataaattccattttaagtcawtttttccctctcacagcttaatgtaagtggttaaaggtagccatgcagcagcctgaatgttttactgcttcaacatttcttctgccagatatcctaattcatggatctttttttgctctttttttcattttaatttttaaaatttttaatttttgtggatatacagtaggtgtattaagttctacattccataatatccttagacatgga

SEQ ID NO: 344694 - DNA, 632 bp, Homo sapiens
aaaactcaataaattggaatggaaattccccaaactgataaagtatatgtataggaatcctataattaacctcacatttaatagcaaaaggtaatttcctctaccaatatcaggaataaggcaaggatgtctgccctgttttattcaatatcatcttggaggtttwagccagtgtgataaggcaagaaaaataagtgaaaggcataaatattaggaaaaaagaaaatatcgctgtttctatttgcagatgacatgcagagaaatcctaaggaatcaacaaaactgctaaaatgagatttcaaatatcgtttacagtagcatcaaaaactaaacagggataaaattaatgaaaaatgtacaaaaaaggtatgtgaaatctgtaaaacattgatgagagagagcaaagacctaaataaatgaattgatatactatgttcatttagaaacttaatatggttaagatgtcagttctccagaaattgattaaaagattcagcacaatcccaattaaaatctcagcaagatttttagtaagaaattgacaagctaatctcaaatgtatatggaaatgcaaaataactacaataatctaaacaattttgaaaagcaagaccaaaattggaagacttaat

SEQ ID NO: 344695 - DNA, 576 bp, Homo sapiens
tttcacagcaaaaagcacagaagttatcagtgactactaggtcatgagtctttttgactcagccaatttgaagaagctggccaaaaatgtgacaatgtgagtaccaaaacagaataataatggcaatggattgaaacacacaaraagtattatcatctgtggcctggtgtagtggctcacacctataaccccagtactttgggaggccaaagcgggaggactgcttgatgccagaagttcaaaaccagcctgggcaacatagcaagaccccatctctacaaaaaattttaaaaattagccaggagtggtatttggtgcctgtagttctagctacttaggaggttgaggcaggaggattacttgagcccaggaggtcaaggctgcaatgagctgtgatggcaccactgcactccaaactgggtgacagagcaagaccctgtcgccaaaaaaaaaaaaagtgttataatctatgaattcatagtatattaaaataaagtactctttggtcagtttttgaggatgttagggaaacaaaagaaaataatcaagcctttatcctgcctttcctatacaact

SEQ ID NO: 344696 - DNA, 590 bp, Homo sapiens
cagacattctttggaaggtggaatggcatagagcatacaagtgttctgaataggaattctgtgttgtaaaatagaacaatgggaaatgaatttgtaaaggaaatttggcccatatttcagagtcttgaagacctaaagcattactttctaggcaacatggagccagacttgttgaaggcttaaaaggaaaagccacacgatcagagctgggctttggatgaatttttaggcaggtgtagaaaagtgactgaaagtgtgaaagactggggtcatgggatccatttaagttattgcatatgggcatatgggagttaatatgggcataaataagggcggtggggtggcaggtgttacacagaaacagatacaaaagatgtggagttcacaggaagatagggaaactaaccagacagagtgagtgacgaaaatgttgatacctgaggttttgagtctgacggagacaayggaagtgagatggggaatgtgaacgagaagttgttcatgggaaaagatgaccaacttcattttggaggtagcgattttgagactccaatggggcatcaaacagaccgtatttagtaggtgtactt

SEQ ID NO: 344697 - DNA, 593 bp, Homo sapiens
gctggttgtgtatagaaaattaaaaagttagccaggcatggtggcacctgcctgtgatcccagcattttgggaggtcaagactggaggatcacttgagcccaggagttcaagatcagcttgggcaacatagtgagacctcatctstacaaaaatcagaaaattagccagatgtggtagtgcctgcctgtggtcccagctactcaggaggttgaggtaggaaaatcatataaacccaggagttggaagctgcagtgagccatgattgcaccactgcattccagcatgggcaaaagagcaagaccctatctcaaaaaaaaagaaataaaataaaaaactgttagcaaagtgtctattttggccatatggaaataagtcagatttattgttaagaacaatgtaagatccatacatgtatgactctatgtcttcatccacccatctgttctgtatgcaatatgtgcactttatttgagggcagagataaataatataaagtgcctacctaatgatcataatattttttctaggagttttctaaacggacagaaagtattgcagtccaggctgagaaccttgtaaaggaagcttcaga

SEQ ID NO: 344698 - DNA, 534 bp, Homo sapiens
tcccagctacttgggaggctgaggcacgagaactgcttaaacccaggaggttgcagtaagctgagattgtttcactgcactccagcctgggggacagagcgagactctgtctcaaaaatataaaaagaccatgaacttgccaagtcatccttcccagtagatcttccaatgtctaagaagaaaagccaaatatatcaattaaatacttaaaatagtaaagagcatttatcagtagtttaggtcaaagtcatgatgcagtasgatcagattttgatgagatttttaaaacactttgcatcatacattgaagattccaaaagtagagcacaactgtatgagttttacagtttgtacaatgggatattactttctatttcatgtagcatttagaattgtatatgtcttctctttgtctcatatagaaggggcatcattaaactttaatagctttagcattaagccaccaagagagtccgaaaaatctattatatttccatacagatgatatttgagcctattttcactacatgaaat

SEQ ID NO: 344699 - DNA, 630 bp, Homo sapiens
aaactattgtgactactagaaaaagaacacaaagcaaatctctcgtggaaactgaatgtttcaaatttttttggagtggctgttatgcaaatatatcctatgggccaccctgagatctgctaagagttatacaacaagacacctactctgtaacaaacttgcacatcctgcacatgtrccctggaacttataaaataaaataaaataaaaacgcctactctaaaagacatttattatacttgttatctgtttggtgagacaagaaggtggcttaagcaatgatttgagttaaataataattcaagaaaagagatttcccttcttactatgagataaattgcttaatgcatgataaaaattcaatgagtcttaagctgaggtacttttatatagggcatttccttaaaatatttcaagtagtgaaatattatggtgaaaagaaatctagaagactgggaggagcaagcagcaagccagtgagagaagtcaggtggccccgtggagaacctgaatgagcagaacagtgtgttaggattgtctgcagaagtggccaggatggagagaaagcacccagaaacaagcacactaagatctcttagcatctggtcctggaatatcagactgaaactg

SEQ ID NO: 344700 - DNA, 630 bp, Homo sapiens
aaactattgtgactactagaaaaagaacacaaagcaaatctctcgtggaaactgaatgtttcaaatttttttggagtggctgttatgcaaatatatcctatgggccaccctgagatctgctaagagttatacaacaagacacctactctgtaacaaacttgcacatcctgcacatgtaccctggaacttataaaataaaataaaataaaaacrcctactctaaaagacatttattatacttgttatctgtttggtgagacaagaaggtggcttaagcaatgatttgagttaaataataattcaagaaaagagatttcccttcttactatgagataaattgcttaatgcatgataaaaattcaatgagtcttaagctgaggtacttttatatagggcatttccttaaaatatttcaagtagtgaaatattatggtgaaaagaaatctagaagactgggaggagcaagcagcaagccagtgagagaagtcaggtggccccgtggagaacctgaatgagcagaacagtgtgttaggattgtctgcagaagtggccaggatggagagaaagcacccagaaacaagcacactaagatctcttagcatctggtcctggaatatcagactgaaactg

SEQ ID NO: 344701 - DNA, 582 bp, Homo sapiens
  misc_feature (1)...(582): n = A,T,C or G
tagggcatttccttaaaatatttcaagtagtgaaatattatggtgaaaagaaatctagaagactgggaggagcaagcagcaagccagtgagagaagtcaggtggccccgtggagaacctgaatgagcagaacagtgtgttaggattgtctgcagaagtggccaggatggagagaaagcacccagaaacaagcacactaagatctcttagcatctggtcctggaatatcagactgaaactgcaagaaggattgcatgcttatcaatgcgaaaaagtcgcaattattagaaaaacaatgaggaacataaaagaccttgaatttggtgttgaagtatatttgggccactttctctaacgcagttttggtgtaatgatggcaggagaagcagatacagaggaaggtaatgagcagcctgtagagamgaaataaaagctgagactatggaaaaccatttaaaacatctggaagaagggaagtaggtctgggtgtgttatattgtatctagacacgagtcaacatttaaaaagcaaaatttaagtgcaatgtagttttcnnnnnnnnnnnnnnnnnnnnnnnnnnnnn

SEQ ID NO: 344702 - DNA, 563 bp, Homo sapiens
gcttcctcttaaacgtcttataaaagttgatgggagaaagttggagtataaatctgtaatacaataaatcttttttgagaagcaattttgactgttgaattttccagcatagacagtatcatttaaggcragttattaatctctataaatcagtaacattgcctttagcttcaattatactcaacgattttctttctttaagtttaaaaaattggcttcttcaagtatgaaataaactttgtctttctacctattacctacatttgtgctcattcatttttttctgtcttccataagaataatcattactgtgacttctttctacattctattacttatttctttaaaagaacaccctttattgcccaaacgtcatataattacaaaagtagagagattatacctatttccagcctcagaaattatgaactgatagccaacctctttcatctatattcctacccatcctttcctcaactcctttgccaaaccatgttattcagatgccgggcattacattacaggattttctaacacatcatggaaattgatcatcacaaagt

SEQ ID NO: 344703 - DNA, 532 bp, Homo sapiens
aaagatacatagcaagacaaaaaaaaaagttactgagaaaatggcmtacctaccttttatggataacttttaatgtaattataaaatgcattctttaaacatctaaaatcaacatgtcccattatttcacaaattatgtctttctcttattccactatttgtaaagtatttattgcatttacccacaaatacaatgtgaaatatgtaaacttaagtataggtggatcaattcttacctttctaaggttctcttcaaacttttgctgctgagataaatgtcccaggattgttccttccagacactgtgcatgctctcgaagctcttccccgtatcttcttatttgtgtcaacttggctttaattcgagcagattctccagtggtaacaaactgagcaaaagactgggcttcttcttctaatcctacaatgctgctgagcttactttctatttcctgaattgtgacctaatagttaaaacaagaaaaatgacaatgtaggctgagcaagcttgccttcctgaaatgatacaatt

SEQ ID NO: 344704 - DNA, 532 bp, Homo sapiens
aaagatacatagcaagacaaaaaaaaaagttactgagaaaatggcctacctaccttttatggataacttttaatgtaattataaaatgcattctttaaacatctaaaatcaacatgtcccattatttcacaaattatgtctttctcttattccactatttgtaaagtatttattgcayttacccacaaatacaatgtgaaatatgtaaacttaagtataggtggatcaattcttacctttctaaggttctcttcaaacttttgctgctgagataaatgtcccaggattgttccttccagacactgtgcatgctctcgaagctcttccccgtatcttcttatttgtgtcaacttggctttaattcgagcagattctccagtggtaacaaactgagcaaaagactgggcttcttcttctaatcctacaatgctgctgagcttactttctatttcctgaattgtgacctaatagttaaaacaagaaaaatgacaatgtaggctgagcaagcttgccttcctgaaatgatacaatt

SEQ ID NO: 344705 - DNA, 558 bp, Homo sapiens
agaattttcatttctaacaaatctccagctgatgctgaggctgctgatccagggacctcattgctatgtacttgacagagaaaagcccacatactgtcatttcaatttatttcaactgggggaagaaaggacattttacatgttaaccaacatctgaaaaatactgataactattaaggaagtgtgtgcatgtgcacatgtgtttatgtgtgtctgtggagtgtctctcacaaacatagaagcttgtttgtatataagaagatgaaaattatttctctgagaaaaagggccaaattattyaatcaaaatacatcaaaaattcagccaagtctctgtttcagattatttaaatggaaaatactattgccctaggaaaaaaataaagttttgacttctgtctagatgagacaccatagtcagaaataatttctgcctagttgaggcaatcagaaataatttacataaatgtcggatatgcatcatttttatttttcatatgaatgaatgaagtggtatatctcatcaatatttgttatttgagcatttatacaggcttcc

SEQ ID NO: 344706 - DNA, 601 bp, Homo sapiens
ttaggaggctaaggcatgagaaaggcttgaactcgggtggtagaggttgcagtgagccaagatcacaccactgtgctccagcctgggcgatagagggagactatctcataaaagaaacaacaacaaaagaataaaatgcctttgagcaagcaagtttacatctagagattttccaaagaaataaaattatgtgcactaagatttaggtaaagtgatattcttcataccattatttgtaataggagaaaatatagaaataaccaaaatgttaaaaacaggtcaataattaaataaatccagatatattcttatgataggacactgtgcaacctctaagaaatcacaatgtaggataatgtttaataatatggaataaagtttgcacaacatgattcaatttaaaatgcctacagaaatagtctacattatataatgtgctccgaattttgtttaataggtctttgtacatgatgtaaaatatatgttgagggtcattttttwaaatgcatatgaatgtccaattgttctagtaccatttattgaaaatattattctttctccaccgaactttctttatatctttgtcaaaacaattgactgt

SEQ ID NO: 344707 - DNA, 620 bp, Homo sapiens
gtgggtggatgcacaagatacagtgaagagtcattatttcaatagatttgctctgatttatattgaaattgggagtttgtggtkttcgtaaggtctcattgctgcttgtttggagaacagattgctctccttggaaaaacttagatcagaagagagtcaaagaaaaaagataggataaaagaagaagaaactggaaggcttctgtggaaaacaaatgacaacatgtaaaaaggaggatcttagtgaagataaaggataggcttcgaaaacaaaggatgttggtaaaactgaaatagaggaagcagaaattagacaagaaaattcaaaatttagggaaatgataaggaagagaatccattagatgactacaaaattgtaaattatatttatttttatgtaggaatattggaagcacatttataacaaatactcttttattctctttttcaactctacaaatgttttcctatttgttttaaataatacggactcactttcttgtaaggcacttttataattaggttttagtcacgcaattataatgaaagagacctaaaaggcaatatatatatatataatatatgcagttttgttatccttccttgattaccaggttgaat

SEQ ID NO: 344708 - DNA, 558 bp, Homo sapiens
aatttttttctatagttagattaattatcttgaatatcccattagtgccaaaatgcaatttaagccatcatttcaaaataattttatgtatgcttatcaggactagtaaatttgtctctctaaagaataattacctgagaaaatgttacaaagttacctgctaaggcaaactattgcttaaaaaaaatatgcttttcaaaactcacccacccaactgccgccatgataatagtagggattatagttttgatgataggttttcctttgcttgacacccttatttatctctactgcttcagcsgtaaacattataaactctcagttttacataatagtttttagttccttcgccatcctgctgccttcttttaaatatatgcctcaatttgcctctttcacatttgaagtatggttctcagaaccaagcaaaatattcccagtggttttgagtggccaaccatagtgaacaaactaccatgttcatgttctttattctgaattttatatttttattaataccgattgaaagtataacaacattgggggcagttgtatatc

SEQ ID NO: 344709 - DNA, 558 bp, Homo sapiens
aatttttttctatagttagattaattatcttgaatatcccattagtgccaaaatgcaatttaagccatcatttcaaaataattttatgtatgcttatcaggactagtaaatttgtctctctaaagaataattacctgagaaaatgttacaaagttacctgctaaggcaaactattgcttaaaaaaaatatgcttttcaaaactcacccacccaactgccgccatgataatagtagggattatagttttgatgataggttttcctttgcttgacacccttatttatctctactgcttcagcggtaaacattataaactctcagttttacataatagyttttagttccttcgccatcctgctgccttcttttaaatatatgcctcaatttgcctctttcacatttgaagtatggttctcagaaccaagcaaaatattcccagtggttttgagtggccaaccatagtgaacaaactaccatgttcatgttctttattctgaattttatatttttattaataccgattgaaagtataacaacattgggggcagttgtatatc

SEQ ID NO: 344710 - DNA, 636 bp, Homo sapiens
agattaccaaaatgctgttacagtagtatgtctactgagctaatacaaatggcatcaaccacarttgatattttttaagtgtaatcatgtatgactaggcaaaagtagattaaagagagtaaaaactaaagcagtagttgccaattattttttatcccagttctacactagagggatatcacatactcacttcaggcacactagcttactactgtaagtcttaagaaaaagaacttgtagttatgtccccctggtggatgggaactaaagttaagataccagtgacctaaaaagatgagggtagagaacaaatcatttggagtttcatactattattttgattatctgtgttctttgactcttcaataatgctcttgagaaagatactgcatttgtaattaattgtattctttttctgcatgtgtttagttttgtttgttgttttttttaaggcattctgtgaaactttagaagagacaaactaccgcttacagaaagaactacttgaaaaacaaaaggagatggaatcactaaagaaactgctcagtgagaagcaacttcatatagacactttagagaacagaatcaggtgtgttgtgatacttgcatttctactctgactaattcaacccttaa

SEQ ID NO: 344711 - DNA, 567 bp, Homo sapiens
gttttaattatctgagatgtaacaatgtacccgtaaccttactggcttaaaccaggaatttattctttttacatgtcaattttctgggtcaagacactggacagggcggtgtgggttggttgcttcgtgatgtccctggtctcatctggaaagactctagtggctggggacttgaagcagggacccagaaggactctaktggctggggacatggagcaggcacccagccctctctttgtggccagcacggacttcctcccagtctggcagtcaggtagtcaggtttgtctggcttctcctagggcgtgtgtccaagaggcccaggcagaagctgtaagttctctcatgatcatccctcagaaatcccagagcatctctcctgccacactgtccagtcatactcatcactgagacaagccatgattcaagggcggaaggtgattagattccacctcttgatgagaagcatagtaggaacctgcagcagtctttaataaaccacaggttgtcctctgtccacaaactattaacgtttctcccacatgcaaattatgctttgcccctctc

SEQ ID NO: 344712 - DNA, 567 bp, Homo sapiens
gttttaattatctgagatgtaacaatgtacccgtaaccttactggcttaaaccaggaatttattctttttacatgtcaattttctgggtcaagacactggacagggcggtgtgggttggttgcttcgtgatgtccctggtctcatctggaaagactctagtggctggggacttgaagcagggacccagaaggactctattggctggggacatggagcaggcacccagccctctctttgtggccagcacgracttcctcccagtctggcagtcaggtagtcaggtttgtctggcttctcctagggcgtgtgtccaagaggcccaggcagaagctgtaagttctctcatgatcatccctcagaaatcccagagcatctctcctgccacactgtccagtcatactcatcactgagacaagccatgattcaagggcggaaggtgattagattccacctcttgatgagaagcatagtaggaacctgcagcagtctttaataaaccacaggttgtcctctgtccacaaactattaacgtttctcccacatgcaaattatgctttgcccctctc

SEQ ID NO: 344713 - DNA, 632 bp, Homo sapiens
atcaggttgtggtggcctatcatctgcccctgatgcactcagccacagtgaggactgaatcaggttgttgtgacctatcatctgagcccacacactcagccgcagtgaggactgaatcaagttgtggtggcctgtcatctgcccctgacgcactcagccacagtgaggactgaatcaggttgttgtgacctaccatctgagcccacacastcagccgcagtgaggggacaggtgtgaaaacagtcggcatttccctttagaagctgttggtgggaggcaggagggagatgctgccctgcaggccccgtctaacagttggtcattcccatggggcgcctgttacagttctgtgattagtgcccagtccgggtccctgagaacggcgcccagtccttgtccctgagaacagcgtttgtgtccttttactcctccctctgggcttttgtcattctccatgttctttttccttcagtgcctgggttgccgttgaccaactttctctgcgtttttcttatagtcaatagggtattcaatggcttctttttaatttttttctttttttttctttggccttttgagacaagaaattatttctttatattttctgtaaattttgtttgaaaactgaactt

SEQ ID NO: 344714 - DNA, 632 bp, Homo sapiens
atcaggttgtggtggcctatcatctgcccctgatgcactcagccacagtgaggactgaatcaggttgttgtgacctatcatctgagcccacacactcagccgcagtgaggactgaatcaagttgtggtggcctgtcatctgcccctgacgcactcagccacagtgaggactgaatcaggttgttgtgacctaccatctgagcccacacagtcagccgcagtgaggggacaggtgtgaaaacagtcggcatttccctttagaagctgttggtgggaggcaggagggagatgctgccctgcaggccccgtctaacagttggtcattcccatggggcgcctgttacagttctgtgattagtgcccagtccgggtccctgagaacggcgcccagtccttgtccctgagaacagcgtttgtgtccttttactcctccctctgggcttttgtcattctccatgttctttttccttcagtgcctgggttgccgttgaccaactttctctgcgtttttcttatagtcaatagggtattyaatggcttctttttaatttttttctttttttttctttggccttttgagacaagaaattatttctttatattttctgtaaattttgtttgaaaactgaactt

SEQ ID NO: 344715 - DNA, 446 bp, Homo sapiens
tttctgtaaattttgtttgaaaactgaacttccttctttagatcatgtccctctcctgtcatatttattcattgacagttaggggaggctggtagcactttccatgttcttcccagatgtctccttaggcagatccckgagatggtgcagtgccctttcagtttccatgttgtggtcgtagttttcccacagtccctcagcacgtaactctcaggccttttctccagtttccaatgacattttctcaccgtccttcaggccctgaccaagattcttgatgcccttccaggttgcatgaatggtctccttgaggcccagttacatatcagcctcacagtcgtggcaaatattttagcttctgattaccacagcggctcatttccagctaccatattctgttccagttatctattctgaagaaaccatccccaaaacttggcagctta

SEQ ID NO: 344716 - DNA, 633 bp, Homo sapiens
tttgtgtcattatttattaattctttgcataattggacttcgaaataggattttaaaaaatgttttgaccgtgtgctcttcacaatgaagatcactaggcatttgttatgtgattctttctttyctatcatatgggagaaaataggattgggctgtgtgccctgagagggagggcacatttagatattttaggagctgtaaatagaagaccaaatatcagagagagagacttcgcttcacctgtagttcaaatggtttgttaggacaggaacagtggctcatgcctgtaattacagcactttgggaggttgaggcaggtggatcacttgggctcatgagttcaagaccagactgagcaacatggtgaaaccctgtctttacaaaaaatagaaaaactagccaggcttggtgatgaacagtattatgaggttgcacttcactgaaaaaccaaagttgtttagcacttccatgtgaaccacaccatctcacaactatgacgtgtagcagaagtccattcccaaggacacaaagaagacacaccatgttaatggaatgacatactgcaatgtatctagataaaccatcctgggccttgatgagacagacagatgcagtcttgaaggaactgattat

SEQ ID NO: 344717 - DNA, 396 bp, Homo sapiens
ttccaggctatctgccatgatcacagtgagtttgttacwggtgatgtgaaatttggaaaaataaaagaacaataggatggccagaagtgatacagacttggacacatcatgtttgaaatatctgaggtcccatatgtagggatgtccaactggcaattgggaatacaattccagagttcacaagagatatcaaagctggagataaagattttgaaactatcagaatttcaatggtacctgaatccatcagaccaaatgaacctaagagaatgaaaggataaaaaggaacaagtacagaatccacagaatccctaatatttacaaagagaaataaactgttaagaccaagaaggaactttctgagtttatttcacaaattaagaacagctcaatatt

SEQ ID NO: 344718 - DNA, 607 bp, Homo sapiens
tggctgctgcaagcatacctaatggcattcgattttgctcccagtgtaatcaagcagaaaatggttgatttctgcatttccaactgaggtacctgattcatctcatcgggattkgttggacagtgggttcatcacatggagggttagccgaagcaggacagggcatcaactcatcaaggaagtgcaagggtttgagggattttcctttcctagctgagggaaggcatgacagactgtacctggaaaaacaggacactctcacccaaatgctgcacttttcccacagtcttagcacctggcagaccaggagattctctcctgtgctgggttcattgagtcccacacccagagagccttgttcactgctagggaagcagtctgagattaaccttcaaggcagcagctgggcagggggaggtgaatctgcaatttttgaggtttgagtaggtaaataaagtggtcaggaagcttgaactgggtagagccactcacagctcagcaaggcctactgccttaataaactcaaactctgtgggcagggcatagctgagtaaaaggtagcagaaacttctgcggacttaaacatcccatctgacagctctgaaga

SEQ ID NO: 344719 - DNA, 607 bp, Homo sapiens
tggctgctgcaagcatacctaatggcattcgattttgctcccagtgtaatcaagcagaaaatggttgatttctgcatttccaactgaggtacctgattcatctcatcgggattggttggacagtgggttcatcacatggagggttagccgaagcaggacagggcatcaactcatcaaggaagtgcaagggtttgagggattttcctttcctagctgagggaaggcatgacagactgtacctggaaaaacaggacactctcacccaaatgctgcacttttcccacagtcttagcacctggcagaccaggagattctctcctgtgctgggttcattgartcccacacccagagagccttgttcactgctagggaagcagtctgagattaaccttcaaggcagcagctgggcagggggaggtgaatctgcaatttttgaggtttgagtaggtaaataaagtggtcaggaagcttgaactgggtagagccactcacagctcagcaaggcctactgccttaataaactcaaactctgtgggcagggcatagctgagtaaaaggtagcagaaacttctgcggacttaaacatcccatctgacagctctgaaga

SEQ ID NO: 344720 - DNA, 607 bp, Homo sapiens
tggctgctgcaagcatacctaatggcattcgattttgctcccagtgtaatcaagcagaaaatggttgatttctgcatttccaactgaggtacctgattcatctcatcgggattggttggacagtgggttcatcacatggagggttagccgaagcaggacagggcatcaactcatcaaggaagtgcaagggtttgagggattttcctttcctagctgagggaaggcatgacagactgtacctggaaaaacaggacactctcacccaaatgctgcacttttcccacagtcttagcacctggcagaccaggagattctctcctgtgctgggttcattgagtcccacacccagagagccttgttcactgctagggmagcagtctgagattaaccttcaaggcagcagctgggcagggggaggtgaatctgcaatttttgaggtttgagtaggtaaataaagtggtcaggaagcttgaactgggtagagccactcacagctcagcaaggcctactgccttaataaactcaaactctgtgggcagggcatagctgagtaaaaggtagcagaaacttctgcggacttaaacatcccatctgacagctctgaaga

SEQ ID NO: 344721 - DNA, 607 bp, Homo sapiens
tggctgctgcaagcatacctaatggcattcgattttgctcccagtgtaatcaagcagaaaatggttgatttctgcatttccaactgaggtacctgattcatctcatcgggattggttggacagtgggttcatcacatggagggttagccgaagcaggacagggcatcaactcatcaaggaagtgcaagggtttgagggattttcctttcctagctgagggaaggcatgacagactgtacctggaaaaacaggacactctcacccaaatgctgcacttttcccacagtcttagcacctggcagaccaggagattctctcctgtgctgggttcattgagtcccacacccagagagccttgttcactgctagggaagcagtctgagattaaccttcaaggcagcagctgggcagggggaggkgaatctgcaatttttgaggtttgagtaggtaaataaagtggtcaggaagcttgaactgggtagagccactcacagctcagcaaggcctactgccttaataaactcaaactctgtgggcagggcatagctgagtaaaaggtagcagaaacttctgcggacttaaacatcccatctgacagctctgaaga

SEQ ID NO: 344722 - DNA, 568 bp, Homo sapiens
acataggcattgagaagatagttttagaaacacattccargttcctatttctgcatgtaagaagcttggaggtaatcaataattactttacaataattaatttttataacaagcttaacaacaaattaatatgacacaattaatcttaacaacaaataaaaagctgaagagactaaaaaatccacaattgtttctagatttgaatctcaggggaggacacagggcaaaccacttcccccaggattgcagagacagagaaatgaatataggacttaatggcttacaggaacatggactcactactgaaaccaaccttggaaccagtgctggagtagaaaaactcaaaccgtaactggtgaacggctggaggatccgcgtggacaactctaagtggtaaaaactacaaagagatagagttattgtggggggagggggaacaatactgtaaaattgtctcatggggcttcaccaggctcctgtgacaaatacctgagaaaactcccctcctgcttctacctttgggaaggaaaaaggaaaaccagtttgaaatgtgccagagtacctggtt

SEQ ID NO: 344723 - DNA, 594 bp, Homo sapiens
acaaaaaaccaaacactgcatgttctcactcatagttgggagttgaaaaatgattacacatggacacaggaagaggaacatcacactctggggacagttatrgggtgcagggagaggggagagatagcattaggagatatacctaatgctaaatgacgagttaatgtgtgcagcacaccagcatggcacatgtatacatatgtaactaacctgcacattgttcacatgtaccctataacttaaagtataataaaaaattaattaataaatatatattcctcaattaaaaaaaagaactctgagtgtactgatagccaagctgagacagtaaaaagcatgatatagtaaagtcatgatcaatttggacacatactgatattgggctaagatggagattaaaatatgtatatcagtgttaaaaaaaaaaagaaagactgttatgcaacactccagaaactcttaaaactcacatttgataaagagactgttactcaaaacacttcaataactcttaaaactcacatctgataaagagactttacacaaaacactccaataacccttaaaactgacatccgataaagagactgtttt

SEQ ID NO: 344724 - DNA, 594 bp, Homo sapiens
acaaaaaaccaaacactgcatgttctcactcatagttgggagttgaaaaatgattacacatggacacaggaagaggaacatcacactctggggacagttatagggtgcagggagaggggagagatagcattaggagatatacctaatgctaaatgacgagttaatgkgtgcagcacaccagcatggcacatgtatacatatgtaactaacctgcacattgttcacatgtaccctataacttaaagtataataaaaaattaattaataaatatatattcctcaattaaaaaaaagaactctgagtgtactgatagccaagctgagacagtaaaaagcatgatatagtaaagtcatgatcaatttggacacatactgatattgggctaagatggagattaaaatatgtatatcagtgttaaaaaaaaaaagaaagactgttatgcaacactccagaaactcttaaaactcacatttgataaagagactgttactcaaaacacttcaataactcttaaaactcacatctgataaagagactttacacaaaacactccaataacccttaaaactgacatccgataaagagactgtttt

SEQ ID NO: 344725 - DNA, 594 bp, Homo sapiens
acaaaaaaccaaacactgcatgttctcactcatagttgggagttgaaaaatgattacacatggacacaggaagaggaacatcacactctggggacagttatagggtgcagggagaggggagagatagcattaggagatatacctaatgctaaatgacgagttaatgtgtgcagcacaccagcatggcacatgtatacatatgtaactaacctgcacattgttcacatgtaccctataacttaaagtataataawaaattaattaataaatatatattcctcaattaaaaaaaagaactctgagtgtactgatagccaagctgagacagtaaaaagcatgatatagtaaagtcatgatcaatttggacacatactgatattgggctaagatggagattaaaatatgtatatcagtgttaaaaaaaaaaagaaagactgttatgcaacactccagaaactcttaaaactcacatttgataaagagactgttactcaaaacacttcaataactcttaaaactcacatctgataaagagactttacacaaaacactccaataacccttaaaactgacatccgataaagagactgtttt

SEQ ID NO: 344726 - DNA, 573 bp, Homo sapiens
tggtgacagcaagtcttcctgtcccatgagaatggaacatacactctttccaggttccattccaatcaygtaacaaatgtgactgcctctttgttgcagcatcggaaagaccagagacacatttgtactcaagttctatagcttataacctgcatatgtctacatgccagcattattttattaatgtgtatttcctttaacctgaattttacttatttctatcttttcattttaatccatggactccataaaggcaaaaaatacaatgtaaaacaaagtgaggaatatataaacaaatgactcaccagagatttattcattgtttgctgatcgtgaaaatgcacagagcactctggaagcatagctgtgataacagtcgaatggagtgggttaaggagagaactgatgtggcttggtcctagattctcctgcccaaaatgttctacacaatagctggaaaagactaaaacaacaaaaaaacctccctgtgacagaatagtcattcatgcctcaataagggacaacaaatatcccactgaagatgtacccacaagtatattaactagtagagat

SEQ ID NO: 344727 - DNA, 573 bp, Homo sapiens
tggtgacagcaagtcttcctgtcccatgagaatggaacatacactctttccaggttccattccaatcatgtaacaaatgtgactgcctctttgttgcagcatcggaaagaccagagacacatttgtactcaagttctatagcttataacctgcatatgtctacatgccagcattattttattaatgtgtatttcctttaacctgaattttacttatttctatcttttcattttaatccatggactccataaaggcaaaaaatacaatgtaaaacaaagtgaggaatatataaacaaatgactcaccagagatttattcattgtttgctgatcgtgaaaatgcacagagcactctggaagcatagctgtgataacagtcgaatggagtgggttaaggagagaactgatgtggcttggtcctagattctcctgcccaaaatgytctacacaatagctggaaaagactaaaacaacaaaaaaacctccctgtgacagaatagtcattcatgcctcaataagggacaacaaatatcccactgaagatgtacccacaagtatattaactagtagagat

SEQ ID NO: 344728 - DNA, 429 bp, Homo sapiens
ggcctgtcttgcttacagcatgccttcctcactaagcttaattatttcttccttttggtttaaagtgacagacatgcaactcttctttcacttgaacatatagaggctattgtagggttattaattggccacattttaatattaataaaaagaagcctgagaaaaagagagagaaagagaaatggcccgttggtggggcagtcagaacaaacgcatttgtcaattgtttgcggtcttatccgggtgtgatttgtggttcccaaaacaatgacaacagtaccattaaagatcactgattacagatcaccataacagattcaataataaaaagcttaaaatactgtgagaatgccgaaatgtgacacagagacgtgaagtgagcacawgctctaggaacaatggtgccagtgagacctgcttattgcaggg

SEQ ID NO: 344729 - DNA, 552 bp, Homo sapiens
gaatgccgttcttatctttgtgtctctgtaggtaaggtgttttctgccccacctctggtttctttcagagttttcctttatcttttatttcatatagtttgaaaattatatgtccaagtgtaggttgttggcatttattctgcatggtgttctcggagcttcctggatytttggtttggtgtctgacattaatactggaagttctcagacatggtagttgcagaactttcttctatttcttctcctcctggtattctcactactctgtttcaccttttgtagttgtcccacagtcttggatatcatcttctgttcttttcagtgtttcttttctttagtttttgaagtttctgatgataaatcctcaagctcagagactctttactcagctgagtccagtctactaataagccatcagaggtattcttcagttatttaccacattttttatcactacattatgttgaaggttcttacgatgtctgtctttctgattacattacccatctacacttgaatgctgtctacttcattcattagagcccttaacat

SEQ ID NO: 344730 - DNA, 552 bp, Homo sapiens
gaatgccgttcttatctttgtgtctctgtaggtaaggtgttttctgccccacctctggtttctttcagagttttcctttatcttttatttcatatagtttgaaaattatatgtccaagtgtaggttgttggcatttattctgcatggtgttctcggagcttcctggatttttggtttggtgtctgacattaatactggaagttctcagacatggtagttgcagaactttcttctatttcttctcctcctggtattctcaytactctgtttcaccttttgtagttgtcccacagtcttggatatcatcttctgttcttttcagtgtttcttttctttagtttttgaagtttctgatgataaatcctcaagctcagagactctttactcagctgagtccagtctactaataagccatcagaggtattcttcagttatttaccacattttttatcactacattatgttgaaggttcttacgatgtctgtctttctgattacattacccatctacacttgaatgctgtctacttcattcattagagcccttaacat

SEQ ID NO: 344731 - DNA, 540 bp, Homo sapiens
atatttttgtctgcttctgaagcttgctctgttgacacaaattgtatttttttctttttttggactttagtatgccttgcaatttgttccctttaktctcatgcatgaagtacccacgaaaagtgactgctgttagtatagcttcagtaatgtggtgatgaggtgacagggcagctgatgctctcttagtctctttaggctactataacaaaatactttagactgagtaattcataaacaacagagattattgctcacagatctggaggctggaaagtccaagactaaagggccaggatatttggtgtttggtgaaggtcaaacattcagacacttgcaacgactatagtgacagcagcagtcttcagaaatcctatgtgagggacaaacactcagaagccagctggagtgttctagaatcctatgtgagggaaaaacattcagaccccagcagtagtgttgtggaatcctatgtgagggaagaacattcaaaccctcgtagcagtgttctggaatcctatgtgagggaaaaaaattcag

SEQ ID NO: 344732 - DNA, 540 bp, Homo sapiens
atatttttgtctgcttctgaagcttgctctgttgacacaaattgtatttttttctttttttggactttagtatgccttgcaatttgttccctttattctcatgcatgaagtacccacgaaaagtgactgctgttagtatagcttcagtaatgtggtgatgaggtgacagggcagctgatgctctcttagtctctttaggctactataacaaaatactttagactgagtaattcataaacaacagagattattgctcacagatctggaggctggaaagtccaagactaaaggrccaggatatttggtgtttggtgaaggtcaaacattcagacacttgcaacgactatagtgacagcagcagtcttcagaaatcctatgtgagggacaaacactcagaagccagctggagtgttctagaatcctatgtgagggaaaaacattcagaccccagcagtagtgttgtggaatcctatgtgagggaagaacattcaaaccctcgtagcagtgttctggaatcctatgtgagggaaaaaaattcag

SEQ ID NO: 344733 - DNA, 540 bp, Homo sapiens
atatttttgtctgcttctgaagcttgctctgttgacacaaattgtatttttttctttttttggactttagtatgccttgcaatttgttccctttattctcatgcatgaagtacccacgaaaagtgactgctgttagtatagcttcagtaatgtggtgatgaggtgacagggcagctgatgctctcttagtctctttaggctactataacaaaatactttagactgagtaattcataaacaacagagattattgctcacagatctggaggctggaaagtccaagactaaagggccaggatatttggtgtttggtgaaggtcaaacattcagacacttgcaacgactatagtgacagcagcagtcttcagaaatcctatgtgagggacaaacactcagaagccagctggagtgttctagaatcctaygtgagggaaaaacattcagaccccagcagtagtgttgtggaatcctatgtgagggaagaacattcaaaccctcgtagcagtgttctggaatcctatgtgagggaaaaaaattcag

SEQ ID NO: 344734 - DNA, 512 bp, Homo sapiens
tgtgtcctgtctggtgcactctgagcttccgatctttgattttgtgtctgacattaacagtggaagttgtcagacatgactgttgcagatgtttcttctacttctctctcttctccttctagtattctcatcactctatgttacaccttttctagctgtcctacagttcttggatattatgttccattgttttcagtttttraagtttctttcaatgtttccagagctcagagactctttcctttgttgtgttcagtctactagtaagccaatcaaagacattcttcaggtctgttgcagtatttttttatctctactgtttcttttttgttctttccttggacttctgtctctctgcttacattgcctatctgttcttgaatgctgtctcctttgttcatcagagcccttagcatactactcagagatatttttaaaaatccctgtctgataattccagcatcatagctgtgtcttgttctgatgatctgtcacttcaaattgtgtttttt

SEQ ID NO: 344735 - DNA, 428 bp, Homo sapiens
gaatcctaggtgtgggaaaaacattcagaacctagtagcagtgttctggaatcctatgtgagggacatacattcagaccacggcagcagtgttctggaatggtatgtgaaggacaaacattcagacccttgtagcagtgttccggaatcctatgtgagggacaaacattcagaccacrgcagcagtgttccggaatcctgtatgacggaccaacattcagacccttgcaacagtgttctggaatactaggtgagggagaattatttataccctcgtagcagtgttctgtaatcctatgtgagggacaaacattcagaccccaggagcagtgctctgaaatcctaagttaagggaaacattgagaccccagcacgaatgttctggaatcctatgtgagggacaaacattcagaccacggcaggagtgtt

SEQ ID NO: 344736 - DNA, 428 bp, Homo sapiens
gaatcctaggtgtgggaaaaacattcagaacctagtagcagtgttctggaatcctatgtgagggacatacattcagaccacggcagcagtgttctggaatggtatgtgaaggacaaacattcagacccttgtagcagtgttccggaatcctatgtgagggacaaacattcagaccacggcagcagtgttccrgaatcctgtatgacggaccaacattcagacccttgcaacagtgttctggaatactaggtgagggagaattatttataccctcgtagcagtgttctgtaatcctatgtgagggacaaacattcagaccccaggagcagtgctctgaaatcctaagttaagggaaacattgagaccccagcacgaatgttctggaatcctatgtgagggacaaacattcagaccacggcaggagtgtt

SEQ ID NO: 344737 - DNA, 512 bp, Homo sapiens
tgtgtcctgtctggtgcactctgagcttccgatctttgattttgtgtctgacattaacagtggaagttgtcagacatgactgttgcagatgtttcttctacttctctctcttctccttctagtattctcatcactctatgttacaccttttctagctgtcctacagttcttggatattatgttccattgttttcagtttttaaagtttctttcaatgtttccagagctcagagactctttcctttgttgtgttcagtctaytagtaagccaatcaaagacattcttcaggtctgttgcagtatttttttatctctactgtttcttttttgttctttccttggacttctgtctctctgcttacattgcctatctgttcttgaatgctgtctcctttgttcatcagagcccttagcatactactcagagatatttttaaaaatccctgtctgataattccagcatcatagctgtgtcttgttctgatgatctgtcacttcaaattgtgtttttt

SEQ ID NO: 344738 - DNA, 512 bp, Homo sapiens
tgtgtcctgtctggtgcactctgagcttccgatctttgattttgtgtctgacattaacagtggaagttgtcagacatgactgttgcagatgtttcttctacttctctctcttctccttctagtattctcatcactctatgttacaccttttctagctgtcctacagttcttggatattatgttccattgttttcagtttttaaagtttctttcaatgtttccagagctcagagactctttcctttgttgtgttcagtctactagtaagccaatcaaagacattcttcaggtctgttgcagtatttttttatctctactgtttcttttttgttctttccttggacttctgtctctctgcttacattgcctatctgttcttgaatgctgtctcctttgttcatcagagcccttagcatactactcagagatatttttaaaaatccctgtctgatmattccagcatcatagctgtgtcttgttctgatgatctgtcacttcaaattgtgtttttt

SEQ ID NO: 344739 - DNA, 608 bp, Homo sapiens
ctaaaatttacatttctgagttaagaatacttaaaatattataaaaacagaagcaaaattcattatgtgtttcattaattacctttattaaaaacaatgcaattatattacaataggacaaaaaatgtttaagcaaacgaaaagaaaaccatgacatacccaaactcaggaggaggcaacaaaggcagtgctaaagggaagcttacagctgcagatgcttaaattaaaaagaagaaagacctcatacccgtgctaaaaggaagcttacagctgcagatgcttaaattaaaaagaaraaagatctcaaacccatgctaaagggaagcttacagctgcagatgcttaaattaaaaagaagaaagatctcaaacccatgctaaagggaagcttatagctgcaggtgcttaaattaaaaagaagaaagatctcaaatcaataacctaacattacacctgaagggggggaaaaaaaaaactaatgacaaaccaagcaaaaggaagaaaataacagattagagcagagataagcagaataataccagaaaaaaaaggaaaaaaaaacacactgagttttttttaaagatcaataacaattttaaaactcacagc

SEQ ID NO: 344740 - DNA, 207 bp, Homo sapiens
ccagatgggagccatgaaacacaaaccctccatggtcaggtctgtatttgtttcctgccttttccccggcaatccccaggccccagcagtggtggtctacctctgctgattctcattcagaatctaaacttagaaacaattakaacctagaccccaattctacctgaaagtaacagaataacataatctataccctgcagcatgact

SEQ ID NO: 344741 - DNA, 552 bp, Homo sapiens
acaaggcaggcgttgggggggcgggcagtgggccaggcccaggcacgtcctttgccagagactgggcaggtgcggagaggggcgaagcagtgctgccctggtcgagggagcctcccgctctggacggttcgccraacctgccccaggaggttgctgcaggagctgggtggggaaggggagggatgaggggatgcaggccagatcaggtggccccttagccctgggtgatgcaagaggggctgtgggagaccagagaagacccggagcagaaactgggaactgatatctctggctgaatatttgtcctcttgctgaagtttgaaagtcagttatttcattacagttcaattttattacaaaaataacaactattaaaaattccctgtagtcactggaatgataaattttggtgcagttttagcataacaatctttggagtttttagatattctaattattgaaattgcagccatgtttcaaaatacatgccatatatttttatggcatccacccctgggtccctgtgtcccgcatccgcctctgtgtacctgc

SEQ ID NO: 344742 - DNA, 552 bp, Homo sapiens
acaaggcaggcgttgggggggcgggcagtgggccaggcccaggcacgtcctttgccagagactgggcaggtgcggagaggggcgaagcagtgctgccctggtcgagggagcctcccgctctggacggttcgccamacctgccccaggaggttgctgcaggagctgggtggggaaggggagggatgaggggatgcaggccagatcaggtggccccttagccctgggtgatgcaagaggggctgtgggagaccagagaagacccggagcagaaactgggaactgatatctctggctgaatatttgtcctcttgctgaagtttgaaagtcagttatttcattacagttcaattttattacaaaaataacaactattaaaaattccctgtagtcactggaatgataaattttggtgcagttttagcataacaatctttggagtttttagatattctaattattgaaattgcagccatgtttcaaaatacatgccatatatttttatggcatccacccctgggtccctgtgtcccgcatccgcctctgtgtacctgc

SEQ ID NO: 344743 - DNA, 552 bp, Homo sapiens
acaaggcaggcgttgggggggcgggcagtgggccaggcccaggcacgtcctttgccagagactgggcaggtgcggagaggggcgaagcagtgctgccctggtcgagggagcctcccgctctggacggttcgccaaacctgccccaggaggttgctgcaggagctgggtggggaaggggagggatgaggggatgcaggccagatcaggtggccccttagccctgggtgatgcaagaggggctgtgggagaccagagaagacccggagcagaaactgggaactgatatctctggctgaatatttgtcctcttgctgaagtttgaaagtcagttatttcattacagttcaattttattacaaaaataacaactattaaaaattccctgtagtcactggaatgataaattttggtgcagttttagcataacaatctttggagtttttagatattctaattattgaaaytgcagccatgtttcaaaatacatgccatatatttttatggcatccacccctgggtccctgtgtcccgcatccgcctctgtgtacctgc

SEQ ID NO: 344744 - DNA, 293 bp, Homo sapiens
aatgtttgtcccacacgtaggattccagaacaccccagctgtgttytgaatgattgtcccttacatagaattccagaacactgctgctgtggcctgaatgtttgttcctcacataggattccagaactctcttgctgtggtctgaatgtttgtccctcctataggattccagaacactgctgctgtgttctgaaaggttgacccttacataggattccagaacactcctgttgtggtctgggtgtttgtgccttacgtgggattccagaacaatcctgctgtggtctgcatga

SEQ ID NO: 344745 - DNA, 487 bp, Homo sapiens
gattccaggacactgctacgagggtatgaatgyttgtccttcacataggattccacaacactgctacgagggtctgagtgtttctccctcacatagtattccagcacacttctgctggtgtctgaatgtttgtacctcacatcacattccagaacactgctgctggggtttgaatgtctgtccctcacatagaattccagaacactgctgggagggtctgaatgtatgtctctcctatgggattccagaacactgctccaagggtctaaatatctctccctcacataaaattccagcacacggctacgaagttctgaatgtttgtccctcacataggattccagagcccccttgctgtggtctgaacgtttgtccctcacataggatttcaaaacactgctacgaaagtctgaatctttgtccctcacatgggactccagaacactcctactggggtctcaatgtttgtccctcacataggattcct

SEQ ID NO: 344746 - DNA, 487 bp, Homo sapiens
gattccaggacactgctacgagggtatgaatgcttgtccttcacataggattccacaacactgctacgagggtctgagtgtttctccctcacatagtattccagcacacttctgctggtgtctgaatgtttgtacctcacatcacattccagaacactgctgctggggtttgaatgtctgtccctcacatagaattccagaacactgctgggagggtctgaatgtatgtctctcctatgggattmcagaacactgctccaagggtctaaatatctctccctcacataaaattccagcacacggctacgaagttctgaatgtttgtccctcacataggattccagagcccccttgctgtggtctgaacgtttgtccctcacataggatttcaaaacactgctacgaaagtctgaatctttgtccctcacatgggactccagaacactcctactggggtctcaatgtttgtccctcacataggattcct

SEQ ID NO: 344747 - DNA, 487 bp, Homo sapiens
gattccaggacactgctacgagggtatgaatgcttgtccttcacataggattccacaacactgctacgagggtctgagtgtttctccctcacatagtattccagcacacttctgctggtgtctgaatgtttgtacctcacatcacattccagaacactgctgctggggtttgaatgtctgtccctcacatagaattccagaacactgctgggagggtctgaatgtatgtctctcctatgggattccagaacactgctccaagggtctaaatatctctccctcacataaaattccagcacacggctacgaagttctgaatgtttgtccctcacatargattccagagcccccttgctgtggtctgaacgtttgtccctcacataggatttcaaaacactgctacgaaagtctgaatctttgtccctcacatgggactccagaacactcctactggggtctcaatgtttgtccctcacataggattcct

SEQ ID NO: 344748 - DNA, 487 bp, Homo sapiens
gattccaggacactgctacgagggtatgaatgcttgtccttcacataggattccacaacactgctacgagggtctgagtgtttctccctcacatagtattccagcacacttctgctggtgtctgaatgtttgtacctcacatcacattccagaacactgctgctggggtttgaatgtctgtccctcacatagaattccagaacactgctgggagggtctgaatgtatgtctctcctatgggattccagaacactgctccaagggtctaaatatctctccctcacataaaattccagcacacggctacgaagttctgaatgtttgtccctcacatagkattccagagcccccttgctgtggtctgaacgtttgtccctcacataggatttcaaaacactgctacgaaagtctgaatctttgtccctcacatgggactccagaacactcctactggggtctcaatgtttgtccctcacataggattcct

SEQ ID NO: 344749 - DNA, 644 bp, Homo sapiens
tgctatggtctgagtgtttgttcctcacataagattccagaaaacagctacaagggtctcaatgtttgtccttcagacaggattacaaaacactgctgtcctggtctgaatatttgttcctcacataggattccagaacaatcttgctatggtctgaatgtttgtccctcacataggattacagtacactgctacgagggtctgaatgcttgtccttcacataggattccagaacactgttgctgggttctgagtgtttgtgtctcacgtaggattccagaagaagctacaagggtctgaatgtttgtccatcacatacgactccaaaacactgctgctggcgtctgaatgtttgtccctcacataggattccagaacactgcaaagagggtctaaatgtttgtccctcacataggattccagaacacttctgttcggggtctgaatgtttgtctctcacatgggattccagaacactgctgctgtggtctaaatgtctgtccctcacataggattccacaacactacaaggctctgaatgtttgtcccccacataggattccagaacactgctgccattgtctaaatatttgtccctcacgtaggattccagaagcctgctgygagtgtctgaatgtttgtcc

SEQ ID NO: 344750 - DNA, 642 bp, Homo sapiens
cactgtcaaactcctgggcttgagcaatccttcagcctcagcttacagagtagccaggactacaggcatccagcattatgcctatttttttttcttacttttgaagagagagggtcttgcattttgtttatacttttatccctagcaacaagggtggttctagatctataaggtgaactttgtaatacaattttattaattcataagttattacagtggaagcatatttctactgtgattactccttctcccaccataaacagtacaaaacaaactacgtcttatctaaaatacatataagacacatggacacacaaaagagtgaattcccagattcttgtttyttgaccctgggctgatgctttgacttgaggaaatatgtgccattacaggggttggtgtcctttgaagatgtggctctgcactttacctgggaggagtgtcaggacctggatgatgttcagaggaccctgtacagggacgtgatggtggagactggtatcattgggtgagtgaaacttcccagtaactcccaggaatgtgttttgttgttggtaaatatagaaacccttttaaggtataataatatttacttgtaggattctggttgatgaaaaatgtgtcattactctgtaatgaaat

SEQ ID NO: 344751 - DNA, 550 bp, Homo sapiens
taaaatacatataagacacatggacacacaaaagagtgaattcccagattcttgttttttgaccctgggctgatgctttgacttgaggaaatatgtgccattacaggggttggtgtcctttgaagatgtggctctgcactttacctgggaggagtgtcaggacctggatgatgttcagaggaccctgtacagggacgtgatggtggagactggtatcattgggtgagtgaaacttcccagtaactcccaggaatgtgttttgttgttggtaaatatagaaacccttttaaggtataataatatttacttgtaggattctggttgatgaaaaatgtgtcattactctgtaatgaaatgttcaaattgsctccttcattacacagtccctgaagcccagctcttgtcattctgaaaaggatttgacttagtgatttgacaaagtattccattgtttctcattaccagggcattgcattaccaaacctgagatgatcttcaagctagaacaaggagcagagccatggatagtagaagaaaccccaaacctgag

SEQ ID NO: 344752 - DNA, 609 bp, Homo sapiens
tgttttattttttattaaacagatggttctcactctgtttctcagactcaagtgcagtggcatgattatagttsactgtaacgatgaactcctgggatcaagtgttcctcacagcctagcctcccaagtaggtaggactacaggtgtgtgccaccacacctggctaattttttattgtttgtggagatgaggtcttgttctattgcccaggctggtctcaaacttctggccttaaatgatccttgtagactcccacccacacacacaaaaaaaatagtagctgagtatggtgacatgggtttgtaatcccagtttttatacttgggaggttgaggtggaaggattgcttgagctcaggagtttgaagcttcagtgagctatgatagcaacactgcactccagcctgggtaacagagtaagatcctgtctcagaaagaaattatgaaactgaggagaacccatcataggggcctggataggggtggtgctggacttgggaggataaccagaagattctcggtctcaagtccaaagaaaccaatgatttcctgttgaagggctcagatttctgtttgagagtggagtttgtagttatcatttgaagatgag

SEQ ID NO: 344753 - DNA, 609 bp, Homo sapiens
tgttttattttttattaaacagatggttctcactctgtttctcagactcaagtgcagtggcatgattatagttcactgtaacgatgaactcctgggatcaagtgttcctcacagcctagcctcccaagtagstaggactacaggtgtgtgccaccacacctggctaattttttattgtttgtggagatgaggtcttgttctattgcccaggctggtctcaaacttctggccttaaatgatccttgtagactcccacccacacacacaaaaaaaatagtagctgagtatggtgacatgggtttgtaatcccagtttttatacttgggaggttgaggtggaaggattgcttgagctcaggagtttgaagcttcagtgagctatgatagcaacactgcactccagcctgggtaacagagtaagatcctgtctcagaaagaaattatgaaactgaggagaacccatcataggggcctggataggggtggtgctggacttgggaggataaccagaagattctcggtctcaagtccaaagaaaccaatgatttcctgttgaagggctcagatttctgtttgagagtggagtttgtagttatcatttgaagatgag

SEQ ID NO: 344754 - DNA, 609 bp, Homo sapiens
tgttttattttttattaaacagatggttctcactctgtttctcagactcaagtgcagtggcatgattatagttcactgtaacgatgaactcctgggatcaagtgttcctcacagcctagcctcccaagtaggtaggactacaggtgtgtgccaccacacctggctaattttttattgtttgtggagatgaggtcttgttctattgcccaggctggtctcraacttctggccttaaatgatccttgtagactcccacccacacacacaaaaaaaatagtagctgagtatggtgacatgggtttgtaatcccagtttttatacttgggaggttgaggtggaaggattgcttgagctcaggagtttgaagcttcagtgagctatgatagcaacactgcactccagcctgggtaacagagtaagatcctgtctcagaaagaaattatgaaactgaggagaacccatcataggggcctggataggggtggtgctggacttgggaggataaccagaagattctcggtctcaagtccaaagaaaccaatgatttcctgttgaagggctcagatttctgtttgagagtggagtttgtagttatcatttgaagatgag

SEQ ID NO: 344755 - DNA, 609 bp, Homo sapiens
tgttttattttttattaaacagatggttctcactctgtttctcagactcaagtgcagtggcatgattatagttcactgtaacgatgaactcctgggatcaagtgttcctcacagcctagcctcccaagtaggtaggactacaggtgtgtgccaccacacctggctaattttttattgtttgtggagatgaggtcttgttctattgcccaggctggtctcaaacttctggccttaawtgatccttgtagactcccacccacacacacaaaaaaaatagtagctgagtatggtgacatgggtttgtaatcccagtttttatacttgggaggttgaggtggaaggattgcttgagctcaggagtttgaagcttcagtgagctatgatagcaacactgcactccagcctgggtaacagagtaagatcctgtctcagaaagaaattatgaaactgaggagaacccatcataggggcctggataggggtggtgctggacttgggaggataaccagaagattctcggtctcaagtccaaagaaaccaatgatttcctgttgaagggctcagatttctgtttgagagtggagtttgtagttatcatttgaagatgag

SEQ ID NO: 344756 - DNA, 498 bp, Homo sapiens
gtttaacatggggaataagagattttctgcttggaaaacctccagacacatttaaccattctcagggaggagtgaaaagttaacatataggcaaaatcctgtctacaagctacttccatgcttaggagacagaaaaatggccatctcctgtacctgccagttgctgacccaagaaaaactggctatyttcaaggaataatgatgaaaaaatagcaactactaaaacagccactattgttatatgaataaatagaaaaaaaagagagaaaacaaatgacggataatgagcacttattaaaacctatgagtaggaagtagatgcatattattaccaaataattctttgtgaaataaaaaagaaaaggaaaacttcaaaatgcaaagaaaaactcaattgaacattagaaaatatactgatttattacatgatgtcagaaggaacaggaaccatatgcatataaaaccaatacccattattaatttttatcaaatcttact

SEQ ID NO: 344757 - DNA, 498 bp, Homo sapiens
gtttaacatggggaataagagattttctgcttggaaaacctccagacacatttaaccattctcagggaggagtgaaaagttaacatataggcaaaatcctgtctacaagctacttccatgcttaggagacagaaaaatggccatctcctgtacctgccagttgctgacccaagaaaaactggctattttcaaggaataatgatgaaaaaatagcaactaytaaaacagccactattgttatatgaataaatagaaaaaaaagagagaaaacaaatgacggataatgagcacttattaaaacctatgagtaggaagtagatgcatattattaccaaataattctttgtgaaataaaaaagaaaaggaaaacttcaaaatgcaaagaaaaactcaattgaacattagaaaatatactgatttattacatgatgtcagaaggaacaggaaccatatgcatataaaaccaatacccattattaatttttatcaaatcttact

SEQ ID NO: 344758 - DNA, 498 bp, Homo sapiens
gtttaacatggggaataagagattttctgcttggaaaacctccagacacatttaaccattctcagggaggagtgaaaagttaacatataggcaaaatcctgtctacaagctacttccatgcttaggagacagaaaaatggccatctcctgtacctgccagttgctgacccaagaaaaactggctattttcaaggaataatgatgaaaaaatagcaactactaaaacagccactattgttatatgaataaatagaaaaaaaagagagaaaacaaatgacggataatgagcacttattaaaacctatgagtagkaagtagatgcatattattaccaaataattctttgtgaaataaaaaagaaaaggaaaacttcaaaatgcaaagaaaaactcaattgaacattagaaaatatactgatttattacatgatgtcagaaggaacaggaaccatatgcatataaaaccaatacccattattaatttttatcaaatcttact

SEQ ID NO: 344759 - DNA, 554 bp, Homo sapiens
agtaacctggactaaatgaaacaaaaatcagaaaaccttggaatagtcaagtccaaaactggactaaatgaaacataaaaattagaaaaccttggaatgatgccaaccatctttcagggagtctacaaatcagccacatgctgctcccataagcacgtcatgtgtttctttcccctgagaaattaccttaatgtattcaatggcagtgtttagagaaacgtattactggccaccatttaaactawgttctccatagtagtaaaatcaggggaaagagaagtggaacattcagttttgttcagcaccacacacaagcccccagcatggacaaagtgatgattgaaagccgtgtcatgttccaccaagtgtttttgttggacacaaacgttctcatccaccagttgaagggtgacctctatctttctaaatcccagtgaagtctgactatcctccaaatccaaaatttttcaacttacagattagcttcaaattccacacaactggcaccccactaccaccaagtctgaggccccaagaaccccactggaaacttg

SEQ ID NO: 344760 - DNA, 547 bp, Homo sapiens
aggatggaaatacatatatcatgcaaacagtaaccctgagaaagctattytaaagtagctatactaatatcagacacaatgaattttaaaacaaacaaacaaaaaaaatcggccaggtgaggtggcttatgcctgcaatcccaggactttaggaggccaaggtgggcagatcacctgaggttaggaattcaggaccagcctggccaacatggtggaaccccgtctctactaaaaatacaaaatctagcgggttgtgatgatatgtacctgtagtctcagctactcaggaggctgaggcaggagaatcgcttgaaacaaaaaggcgtaggttgcagtgagctgagatcacgtcattgcattccagcctgggtgacaagagagaaactctgtctaaaaaaaaaaaaaaaaattttagagataatgtgggacattttacaataacaaaatggccaatccatcagtaagaaagtacaagtataaacatatatgcacccaattaaacatcaccaaagtacatgaaacaaaaactgacagaaatgacagccaa

SEQ ID NO: 344761 - DNA, 590 bp, Homo sapiens
tcatcaacattgtccatcatagactctacactaggccattaaaggaactgaacagcatgtactccaatcacaatagagtgaacctagaaattaataacaagaaagtagggaaactgaaatatgttgaaattaaaccacacacatccaaattactaatcaaagaagaaatccaaacagaaatttgaaaatatacttagaggaatgaaaatgaagtcacaacatacaaaacttaatgaaagacaattaaagacatgcttgcagggaaatttattgctgtaaatatagataataaaaaagagaactatttcaaatcaataacataacttttgacataaggacactggaaaaagaagagcaaatggaagctraagtaagcggaaggaaggaaataataaagatcatagcagaaaccaatgaaacagagaatagaaaagcaacagagaaaaacaatgaaactaaaagcacattcaaacaagcttaacacaattgacaaaccttattgtcatgaaaatgtattttgggtatactaccaagaagtagtgagttgtgcgacacaggaactggaggaccaagataactgctgttgctag

SEQ ID NO: 344762 - DNA, 542 bp, Homo sapiens
aactaataaagagcatatttaaaaccacagccaatagcatacttaatattggaagcctgtatacttatatcctgagatcaggaacaagatagataaatccactctcactacatcctttcatcattatgctggaggtgctagccaggacaatttggcaacagaaataaatgcaagccatctagattagaaaagaagtaggccaggcatggtgtcacaagcctgtaatcctagcattttgggagtccaatgtgggtggatcctttgaggtcaggcgttcaaggycagcctggccaacatgaagagaacccgtctctaccaaaatcacaaaaattagccaggtgtgatggtgcactcctgtaaacccagctacttgggaggctgaggcacaagaatcacttgaacccaggaggcggaggttgcagtgagctgagattgcaccactgtgctccagcctgggcaacagagccagactccatcacaaaaaaaaaaaaaaaaaaaaaaatctgagccagtgcataccttaaataaacaatcctcctgtt

SEQ ID NO: 344763 - DNA, 558 bp, Homo sapiens
ctgttaatcaagattaaacaaaacaactacatgaaattaagtggttcacgaagatgatgtttttatgacttttatttgaaacattattggctgtgaaatattttgttttccagatttaagaaaactttatctcgtaagctacctacagtttacaaaaattcactaaaktataattttttgaacaaagatggaagcattcattttgtctccctacttgattcctccaaaatttggaaaacatttgtgagtattcttttatttttactcaataaatatctgtttctcttcataaacagaatgtcattgaaaacattggttatattattaaggctttgactgaaatctcatatttaagaaggtgcataaagtgcctggcttccagtgcttccgcctgacagtgaatgagtaaaaattgtcacatcctggcaggcccaagaactttaagattgtaagtaaaatctaaaacctcccttgctttggcttaagaggtttttaaacctgaactttttgtagattaatgtagagagaaagttctgtttctaaagaaaaactataatg

SEQ ID NO: 344764 - DNA, 597 bp, Homo sapiens
attggtttgatctggtagggtggggagcttccaggtcatagataaatttaaacattgattgaaagagttattagaagaaaggaatgcctgtgttacaataagcagttatgaagaccaaggttttatcatgcagatgaagccaccaggtcacaggcctcagagaaaatagattgtaaatgtttcttgttacacttgaggtttgtattgatgttaatgctggaggggtacaatgaggcatttccaagcccgttttcatcatggcctgaactagagtttcaggttaactccggaatggcctctgccaagaggatgggtccattcagatggctgttggggggccttagawttccacttttggttaacactgtcccccttctggccaagtcagtggccacccaatttttattttgtcctatagtgttgccagggtggcgtagctacctacttcacgtccaccctatttttgtagcctgtcagtttcaggtgattacctaagaaccttaagatacatggttattttaccaataatttaagatttagctgttttcattaaaccgcaacattaacatcttattggtttaaaaaccacaaaagcag

SEQ ID NO: 344765 - DNA, 439 bp, Homo sapiens
gcctgtcagtttcaggtgattacctaagaaccttaagatacatggttattttaccaataatttaagatttagctgttttmattaaaccgcaacattaacatcttattggtttaaaaaccacaaaagcagagatgattctgtttggtggctggctttatagttttataacttctcattttttgagacggagtctcactgagccacccaggctggagtgcagtggcaccactctgctcactgcaacctctgccccctgggttcaagagattctcctgcctcggcctcctaagtagctgggaatacaggtgaccgccaccacagctagattttgtatttttagtagagacgggtttcaccatattggccagactggtctcgaactgacttcatgatccaaccgcctaggcctcccaaagtgttggaattacaggggtgagcc

SEQ ID NO: 344766 - DNA, 481 bp, Homo sapiens
ataagcaatatagctggttaatcaaagaaatatgagtccttcctttacttctctggcttggaaaactctttcctcaaggtccagcttttgttagcctttggccattagccttggtaggatgatctttactctcactatttttacaaaggccacttttcgcatctgtattttagcatttattttgctttattgtaattttctgtttacacaagtgattctrtaagcaaaccagggttctccatggtacacaaccatattaccctcagcatctacaactagggcctgacaacagtggaaactcttcaaatgcctgcataatcaatgagtgaatgaatgaacgaacaaataaacaagtaagaaaggacaccagaagaaagggtgggaggtagcatctacagcgataacttatccaaataaatgctcaaattcatgttctgtagaggcatgcaaagatataacgtaaaccttaacaaattccacc

SEQ ID NO: 344767 - DNA, 621 bp, Homo sapiens
acaggccccacacaagtccagaacacagaagggcagtcattaaatcttaaagctccaaactcatctcttttgactctatgtactacatacagggcacactgatatgaggggtaagcccccaaggccttgggcaactctgccyctgtggctttgcagggttcagccccgaggctgctctcatgggctagagttgagtgcctgtggcttttccaagctgagagtgcaagctgtgggtggatctaccattctggggtctagaagactgtggccctcttcccacagttccactagtcagtgccctagcagggactttgtgtggggcctccaatcctatatttcctcttgacactgccctagaagaggttctctgtgagggctccactcctgcaataggctgcttcctggatgcccaagcttttccatacatcctctgaaatctaggcagaggccaccaagcctccaccactctcacactctgttcaactgcaggcttaacaccacttggaagccaccaaggcttacagcttgcattattcaaagtggtagcctgagctgtacctgggcccctttgagccatggctggagctgaaggtggggaacagtgttccaaggctgtgcagg

SEQ ID NO: 344768 - DNA, 484 bp, Homo sapiens
attagctcttgactcccttttagttaggcaaatatctctagcaagtagttccacagcctgcttgaactcctcccctaaaagagctttttcttactttgccacatggccaggctagaaattttccaaacttttatgctctgcttccctttaaaatatatatatatatattccaactttaagtcatttctttgttcctgaatctgagtacaggttgttagaagcagccgtgccacatattgaacactttgttgcttagaaatttcttccaccaggtaccctaaatcatcaytctgaagctcaaacttccacagatccctaggccatgaatagaatgcagccaatctctttgctgaggcatagcaagggtgacctttgctcctgttcccaataagttcctcattttccttcatcttcctgtcttcttctgagccctccaaactcttccaacttctgcctgatacccagttccaaagttgcttctaca

SEQ ID NO: 344769 - DNA, 555 bp, Homo sapiens
tgaaggtgctatgctgccgtctttaaaggtggaggaagaggccacaaaccaacgaatgcaggcaatatttagaagccggaaaagacaaggaaaaagattctcctctaaagcctccagaaggaatgaagctctgctgacaccttgattttaatctcagtaaagcccgttttggatttatgacttcagaactggaagataatatgtttgtgttgttttaagccactaaatttgtggcaatctgttatagcagtgacagtaaatttatacagttagcttaccgttattgaaagattgagatgtcgaaaggggacactgaggtaagggaggagctacaggaggtggcttccacccctagggctgggagaaaasggaattagccaggctcatttgaacccagaaacgtggaggacagaccctgtggaactgggacccagacctctgaggagtgggcactggcatactggtgctctgaggagcaccctgaagctgattctgggaatatggagaatactggaaactgcaaccagctgctgctgccggggtgaaaaattactg

SEQ ID NO: 344770 - DNA, 589 bp, Homo sapiens
taagccaacacgcccagccaattttttttctaaggcaacttgaaaatggaaagaaaactttatgaacccttccctgactcaatagcagtcttagcgacagcagcccaccttcccagggtgggactccggtccttgtttatagagagcagagccaactttatacacaattattaggtatgtctattctaacctgcctgggtgttacctgaaaaactgaaacaaagtgctcatttctgttttcacactgtaacccactgtagaaaagcagcaggcgttgtttaaacattgtaaggcaaacaaacaaactgcaactgcctggggccgaagagtacrgttggtacatagaataactttcctaaagcctgggagtaaaagccagggagagagaattgttgggaaattagggcattcaaattcaaaagtgctctgtatatagggcaacttagaaagcaacacacatgtctgggacaggatgcatgttcagagaactgagaacagcctaagattccaccactggttgatatatagactcagtgcaaccaggaaatgactgctgaggaagaatttcaaatggccttattaagtgtta

SEQ ID NO: 344771 - DNA, 530 bp, Homo sapiens
gatttagacatccagatacaagaggcttagagatccccaaatagatataatgcaaagttcttctccatgacatattatagtcaaactgtcaaaaacagagagagaattctaaaarcagcaagagaaaaacatctggttccctataaagggacccatatcagactaatagtggacttctcagcagaaactttacaggccaggagagtatagtatatgcaaagtgctgaaagaaaaaactgccaattaaggatgctatacccagcaagattatcctttataaatgaaggagaaataaagtctttcccagacaagcaaaaactgaggaaattcatcaccacccagaatcaaagccaacacatcctatgcaaccaaaccatagacacatattcaggataaagtcctcctctcccctctgctccctacaagaaatgcttaagggagtcctacagatggaagtgaaataacaaagaaatcagtaaaacaattcaagatatgaataaggaatttgccagagaaagaatgttatttac

SEQ ID NO: 344772 - DNA, 548 bp, Homo sapiens
tcccagcactttgggaggtcaaggcaagcagatcacaaggtcagaagattgagaccatcctggctaacatggtgaaaacccgtctctactaaaaatacaaaatattagctgggcgtggtggcatgcatctgtaatcccagctactcaggaggctgaggcaggagaatcacttgaacctgggaaggggaggttgcagtgagctgagactacgccactaccctccagcctgggcgacagagtgagactccatctcaaaataaataaataaataaataataaacaatacagaggatcaacaaaatgaagagttggctttttgaaaagaaccaaaattgataaaccacttgctagactaagcaaaaaaaaaagatccaaataaaatcagaaacgaaaaaggagacattataacagatactcagaaatacacaagatcatcagatactatcatgagcaactatatacagtaaactggaaaatctagagaaaatggaaarattcaatatatataacctaccaagattgaaccaggaagagagaaaacctaaaca

SEQ ID NO: 344773 - DNA, 624 bp, Homo sapiens
cacatttgtttatgaaaggtttaatttttcattaggggagtacccataaatgtcatttttaagaatgtggagggtattttgtcatctttaggaacttagaagcaggagggtgtgatggccagatgatcttggtagttaataagctgacagcttcatgaaactcctcttaaagtaatttaaaaaaaaatatgtgtttttttggagtaaaactcaaaccaagttatagtgccattttaatttacaggaagaagagtgggagagaagaagtccatcagcattttagtggagtaaataatgaaattaaatgggaagagaaaccrtaattataaaagttactatgagtgtgtcagtgaattctattgttattttctgcctctttattttcaagaaatagctacttaattttgatccttacgctgtaatttgtctgcttttatttcagatagagtcaagtacatctgatagtttattcatggatttgatttgaatctctataacttgcttttgtcaagtgccacatttagatggcttttgttttatgtcattatttttatcaacagtattttaaaaactctacagtatagtttataaaatactacgtatagtttctaagtatttcatatg

SEQ ID NO: 344774 - DNA, 526 bp, Homo sapiens
tcccaccagtgatttatgaggattcgcatttctctccacatccttaccaacacttgttattatatgccttttttaatatagtcatcctagtgggtgtgaagtgacatctcattgtagtagatttctctcttacaaatagcatgtacctggctttttaaaaactcagtcttaaaatttaacttactctcattttatgctaacgttgttacatttggtctttgttctgccatcttaatttgttgtctgtcatttttttctgacctctgtgatatgaattatactttgtttctcttttattttstaatggtttgggagttctgccttctatttctgtaggtagttactattgaaattttacccaacacatttaagcctaaattttactaccaacatcaacaacttttaagagtaattactgtgtcttgcctcttctcctcttcactaatttattctatcagacatgtattcatagttgtttcttcaaaattcatattaaccacagagagacaaatatttcgtgttctca

SEQ ID NO: 344775 - DNA, 524 bp, Homo sapiens
caattaaagacacctgtggcacatatacaccacagaatactatgcagtcataaaaaagaatgagttcatgtcctttgcagggacatggatgaagctggaagccatcattcttagcagactaatacaggaagagaaaaaccaaacactgcatgttctcactcataagtgggagttgagctatgagaacacatggacacgggaaagggaacatcacacaccagggcctattggggagttgggagcaaggggagggagagcactaggagaaatacctaatgcttgtggggcttaaaacctagatgatggattaataggtgcagcaaaccaccatgacacatgtatacctgtgtaacaaacctgcacgttctgcacatgtatcccataacttaaaattaaaaaaaaaaaaaagaaacagkggttgtgagataacagtgcagtagagtggtagggatgaaagacaaattataaatggtggaggagtggggagaataaaacaaaaacaaacaaacaaacaaacaaaaaca

SEQ ID NO: 344776 - DNA, 531 bp, Homo sapiens
tttttaaatgatttctctaaggttaaaagatacaatgaatgatacaaagaggtcagagtgcctttgtttgtaaatacaataatattatatgtatatatgtgtacatgtatgtatctatagactttttgctgtgaaagatgatactagcgctcatactagctaattatattccctcattcacttctcatttttctattttgttgtttatcttatcgaggttgtagcatttatattctgttctataactaaaactagcagagttcttaagtgtaagtttgtgtttgaaagtattctgtgtgtatcccattrttcctctttcattctcaagatctgcatattgattcatatttaattgaatggatttcattgttaagtgatctctttaagaataatcatctgttatttttcatattagcttttttatattagtttttttaatgttcaaattgttcaaatgtgtttgttggatgtcttttttttttttttttttttttttgagacggagttttgctcttgttgcccaggctggag

SEQ ID NO: 344777 - DNA, 602 bp, Homo sapiens
ctgaaaatgactttatttctttttcatttatgaaacttagttttgctgtatacaaacttcttggctgacagttattctgttgatggaggctgaagataggacctcaatccttctggtttgtaaggtttctgctgagaagtctgctgttagtctgatgaattttcctttgtaagttacctgatgcttttgtcatactactcttagaattctttccttcatgctgaatttagataatctgatgactatatgcctttgtggtgaacatctttttgccatgaatttccaggtgttatttgagcttcttggatttgaatatctagatctctatccaggccagggaaatttatcttaaatatttcctcaaataagttttccagacttaatgttttcttttctccctcaggaacatcaattattctttggtttggccagtttacataatatcatatttcytggagattttgttcattttgtattctttttaaaatttttttgtctgattggcttaatttaaaagtcttatcttcaagctctgatattcatacttctactcagtctgttaaaactttccactgcattttgtaattccctaagtgtgtctt

SEQ ID NO: 344778 - DNA, 602 bp, Homo sapiens
ctgaaaatgactttatttctttttcatttatgaaacttagttttgctgtatacaaacttcttggctgacagttattctgttgatggaggctgaagataggacctcaatccttctggtttgtaaggtttctgctgagaagtctgctgttagtctgatgaattttcctttgtaagttacctgatgcttttgtcatactactcttagaattctttccttcatgctgaatttagataatctgatgactatatgcctttgtggtgaacatctttttgccatgaatttccaggtgttatttgagcttcttggatttgaatatctagatctctatccaggccagggaaatttatcttaaatatttcctcaaataagttttccagacttaatgttttcttttctccctcaggaacatcaattattctttggtttggccagtttacataatatcatatttcctggagattttgttcattttgtattctttttaaaawttttttgtctgattggcttaatttaaaagtcttatcttcaagctctgatattcatacttctactcagtctgttaaaactttccactgcattttgtaattccctaagtgtgtctt

SEQ ID NO: 344779 - DNA, 512 bp, Homo sapiens
gtctagccactcagtgaagttgccacactccaggctggtgctcgggaatatcttcaaggtatttggtgatgtgacttttcctcaagtctcccagtagtggggagcagcactggctctaatggggatggcagtggagtgaggtagactatgggagatttcttcgttattgatagacttagtgtgttggctttctcgaataccagtaatagtaatgaactggtcatttggacagactcaagaccacctgtttagccagagtggtgcaggtggtgcaggcagtagtgatagctgagattgtgcagctgttttctccttcctgggtgcagtgttattctaccaggaaatgcttcaatggactgtgttggttggcctccagcaaggaggtggcgcttacaaaggaacagcagctgtggtagtagcaatgagatttttgyttgtcttatgttgcccaggggcagtactctggtttcttaggcaatgagtggggtcacaaagctcccaaaagtttctgt

SEQ ID NO: 344780 - DNA, 546 bp, Homo sapiens
agaataacttccaaaattgactcagtaataaaaatcctaccaaccagagaaagccctggaccagactgattcatagccaaattctaccagacttacaaagaagagctggaccaattctactgaaaatattccaaaaaatgaagaagaaggtacttctcactaactgattctatgaagccagtatcaccctagtgccaaaacgtggcaaagacaaaatgaacaaagaaaactacaggccaatattcttcataaacatagatgcagaaatccacaacaaaataccagcaaaccaaatcctgcagtatataaaaattttaatttgccatgatcaagtaggctttatacctggttcaacatacacaaataaataagtgtgagtcactacataaacaaartttttaaaaaattatatgataataaatgtagaaaaatcttttattaaaatccaacatcccttctttattaaaaaaccctcaataacttggcatctaaggaacatacctcaaaataattagagccgtctgtgacaaacccatagctaacatc

SEQ ID NO: 344781 - DNA, 484 bp, Homo sapiens
ccagagcaatcaggcaagagaaagaaataaaaggaatccaaataggaaaagaaaatgtcaaattatctctttctttrctgacaatatgattctataccttgaaaactctgaggaccctgccaaaaggctcctacaactaacaaatgactttggtaaagtttcaggacacaaaatcaatatacaaaaatcagtagtatttctatatatcaataacattcaatccagagccaaatgaagaatgcaatgaatgcaatcccatttacaatagccacaaaaaaataaaatacctaagaatatatctaaccaaacaggcaaaagatctatacaaggagaactacaaaacactgctgaaagaaatcatagatgacacacaaaacaatgaaaaaaattccatgctcacggattggaagaatcaatattgtttaaatggtcatacttctcaaagcaatctacggattcaatgctattcttatcaaactactgt

SEQ ID NO: 344782 - DNA, 616 bp, Homo sapiens
aaaatgagttgtgagataaatactcggagtctttatgaaataactttctggataaagctgctggttcactatgagctccttcacgtttcctccttcctctcccttccccatcttccctctcatccccagggtgagaaaaaaatagaattccactttttacattaaatgaaaagaaatgcattaaaaagaccactcasaaagcctgatgcttacttagctcctgatagtgggagaacaatggggcaatacctgattgactctaagctggaaaactaagagaaagtcaggctggctggctcttcaggcaactgcagccaaggtgaggggcctgcaatggactgtctacactcagagtgtttagaggtgtagaaatgcataagccagatgtgggctgagcacaagagagagctcacatgcagctcttttacctcctgtccgatagggctactcagaagtgtgatggagctccaagggagaccatgcaaagtgctctgaaaatcctggggctgaggggccacctccagccagaaaaatgtgtcaccacatcacagaagttctattaaatccagggaagaactttgaagaacctacaaggatgccagtgagacacaatgcc

SEQ ID NO: 344783 - DNA, 634 bp, Homo sapiens
gctgagcacaagagagagctcacatgcagctcttttacctcctgtccgatagggctactcagaagtgtgatggagctccaagggagaccatgcaaagtgctctgaaaatcctggggctgaggggccacctccagccagaaaaatgtgtcaccacatcacagaagttctattaaatccagggaagaactttgaagaacctacaaggatgccagtgagacacaatgccaatctttaaacaccagccagacccagatgtgtgcagtaaagttatagcagtactgggtaagtaaggaatttcctgcgcttcttgaggaattcaaattgtctctgtttgcagatgacatgattgkatatttagaaaaccccatcatctcagccccaaatctccttaagctgacaagcaacttcagcaaagtctcaggatccaaatccatgtgcaaaaatcacaagctttcctatacaccaataacagacaaacagaaagccaaatcatgagtgaactcccattcacgattgctacaaagagaataaaatacctaggaatccaacttacaagggatgtgaaggacatcttcaaggagaactacaaaccactgctcaaggaaataagacaggacacaaacaaatggaaaaa

SEQ ID NO: 344784 - DNA, 634 bp, Homo sapiens
gctgagcacaagagagagctcacatgcagctcttttacctcctgtccgatagggctactcagaagtgtgatggagctccaagggagaccatgcaaagtgctctgaaaatcctggggctgaggggccacctccagccagaaaaatgtgtcaccacatcacagaagttctattaaatccagggaagaactttgaagaacctacaaggatgccagtgagacacaatgccaatctttaaacaccagccagacccagatgtgtgcagtaaagttatagcagtactgggtaagtaaggaatttcctgcgcttcttgaggaattcaaattgtctctgtttgcagatgacatgattgtatatttagaaaaccccatcatctcagccccaaatctccttaagctgacaagcaacttcagcaaagtctcaggatcmaaatccatgtgcaaaaatcacaagctttcctatacaccaataacagacaaacagaaagccaaatcatgagtgaactcccattcacgattgctacaaagagaataaaatacctaggaatccaacttacaagggatgtgaaggacatcttcaaggagaactacaaaccactgctcaaggaaataagacaggacacaaacaaatggaaaaa

SEQ ID NO: 344785 - DNA, 605 bp, Homo sapiens
ttgtgtgtgcatacatttccatttctcttaggtaaatacctaggatgtatggtaagtgcagggctgaccttttaacatactgctgtactgtttacaaaatggctgtgccaccttttttcataccagcaatgtctatacactctttttggttcgtccaagaaatattttcttaagctagtgttaaaatgatttcttccatgttttcctctctaagtgttaatagctttagcttatacgtttaggtccctgattcatttcaaatwtatgtgtatggtgtgaaggaattgtatgatttttctttttatttttgtacatatacacagcagtttcatcactgtttttggaaatgcacactttccactctttaaataacttggcacttaacgtggaaaatcaattttccatttaagtgcaggtctatttctgaactttccattgatttatggatctatctttacttcagtatctctctgtcctgactaatgtagctttatattgccttgaaatcaggttgtatgagttttaattttttttccaaaattattttggtaagtgctgtggtctgaatgtttgtatcctcctaaaattcctatgttgaaagccta

SEQ ID NO: 344786 - DNA, 615 bp, Homo sapiens
ctggcacatagtaaaaactcagtgaactgtgtatcttaataataatacctcaattttaaagtattgaaatgtgtaaacatcattgaaaaacatcccagaagtagaaatacatcttgatttatgtgcatttatacacaacattttcaattaccttcccaaacagtgccaacctcagaaaacatttcaaaatattagtatttcttgagagaggttaataaataagcaccttctctcattctttcagaatctatagctcttttgatttttatctggtttcactttccataaggggtttccagcctaaaactgaaagtgtatcgtcaggggttttrcaaaacaaattgagttttccaaactagagatagcctaaggttgctcccaatgtccttcgtcctcttatttttctcttacttgctagttaatgcctttctgccaatgtaagaaattatccctctcttacccatggtgctgccaattacactccagaacctagactgactaaacacctaaagtgaaatagcaaagaaaatttgagaccaaattatatatctatgtgtacccactccccaccaaaaaggccttacctaccatcacctaccctttcaggcaagcctg

SEQ ID NO: 344787 - DNA, 407 bp, Homo sapiens
tagtctaagactgagaactggctcaggaccagaaatggggtaaagaaccattacttttaattggtggagttgtcttcagtcttctgattatcaattcatgatttattgtaatggtataaattaagaaactcacttgtctgccgatcactcttgccactaggagcactgtgttctattaaccatcacataactctctattggtcaggttcccttggctacctctaatagtaattacatttaccttgcctcttatgcttaagtgctattaactggcttccactatttggggatacttcaatatttattgatattaaggattccagttctgtaacagsaccccttaatgagaactgtaacttttagaagacagacacctttgagcttgtcaagtgatgctggtgcccgta

SEQ ID NO: 344788 - DNA, 407 bp, Homo sapiens
tagtctaagactgagaactggctcaggaccagaaatggggtaaagaaccattacttttaattggtggagttgtcttcagtcttctgattatcaattcatgatttattgtaatggtataaattaagaaactcacttgtctgccgatcactcttgccactaggagcactgtgttctattaaccatcacataactctctattggtcaggttcccttggctacctctaatagtaattacatttaccttgcctcttatgcttaagtgctattaactggcttccactatttggggatacttcaatatttattgatattaaggattccagttctgtaacagcrccccttaatgagaactgtaacttttagaagacagacacctttgagcttgtcaagtgatgctggtgcccgta

SEQ ID NO: 344789 - DNA, 522 bp, Homo sapiens
gttatttgtgtgtgaatgtcttcatctctttttccgcagtctggaattctmtaaggcacagtccatctttttctttttgtatcctcagagggatttgtataaaataggtgcttaatacacctttgttgacagaatgagcatcattcaatacatacttgtagcaatgaattcctattattaacttttggatttgatttcctataatcactacctttgatgatagaaaagaaacctgtcttttttttttcccagaaggcaaactcagagataaacagaaaatcaaaactggctcccgtcagtacatatggaaagattttacttgtgctcaagtaaacacaagacagttacaaatatgaaatgcatttggccaatgttttggatgttagcaccttctcttggaaaaaaaaatatactagaattgttggtgcattaatgatttcctttagcatgtgatttctcagattggcatgatctttatgggctttatagaaactttgatatcagcaacaatggcactgctgg

SEQ ID NO: 344790 - DNA, 546 bp, Homo sapiens
gaggttgtggaggatgtacaaaaaaggaatctggaatatttgacttttaaagctttgcaagattccctcccaatcctcgcccaatttgatgtacccagtgctggatcccaggagaaattttgaaataaacacaatttctggttaaaagaatagtcctggagccgaactgatgtggaggaaacaggctctgggaatcgtaaaaccagatgggacaggctttctgggctcacacccatgctgctgtggcctcctggtgtatctccctgcatttgttctcttcattccagtttatcctttgcacggttaccagggcgatgtttctgaaacaacaaatccgatggcaacatcatttctgctkaaaattcttcagagattgctttttgtctctaggataagcccaaacctcttaacatggcattcaaagctgcaagtccccctcaccattcctgctgctcaccactccccacctcctcatacctcaggcttgcagggcatactgaaccgttttctgcttacaaatgactaggctcttcttcacctctgcac

SEQ ID NO: 344791 - DNA, 584 bp, Homo sapiens
cccctctgggggcccagaagattttaaagagaaactacagttgctttccatcagcttacagcatagaggcaattgyttctttaaaagatatatctaaataaaatgtcaagatgatacatgcttttaaaggaatgtttgtagaatgttcaacacagctacaattctttgtggcacaattcaatagcagttctcaatttgctttgaagggaaatatgcaggatataaagaaacgctgctctctgcagagatgataagtgcagttgccagatcgaagtaatatttttagttatggttttagtatattaaattatatttttatggtgaattatttttggtggttagttcattgagcctatattaatgttagcatatggacttactatgtgggcatttatataaattatcagaatggaggtcattaggggaagacacagagagagtcacacaacattaagatttttaaaagaaagtagacatagaactaggaatgttgagctgtagttttggtactaatcaatgagctgttggatcttagataaaaattaataacttaatttttcctgccctcatttatataacttaca

SEQ ID NO: 344792 - DNA, 584 bp, Homo sapiens
cccctctgggggcccagaagattttaaagagaaactacagttgctttccatcagcttacagcatagaggcaattgtttctttaaaagatatatctaaataaaatgtcaagatgatacatgcttttaaaggaatgtttgtagaatgttcaacacagctacaattctttstggcacaattcaatagcagttctcaatttgctttgaagggaaatatgcaggatataaagaaacgctgctctctgcagagatgataagtgcagttgccagatcgaagtaatatttttagttatggttttagtatattaaattatatttttatggtgaattatttttggtggttagttcattgagcctatattaatgttagcatatggacttactatgtgggcatttatataaattatcagaatggaggtcattaggggaagacacagagagagtcacacaacattaagatttttaaaagaaagtagacatagaactaggaatgttgagctgtagttttggtactaatcaatgagctgttggatcttagataaaaattaataacttaatttttcctgccctcatttatataacttaca

SEQ ID NO: 344793 - DNA, 489 bp, Homo sapiens
gtttttagattagcacactttttcctagggccttttaatttagatcagtgcaagtaatggcttaaaagatctcgaacctgctgttacctgactccaggttaatatccctctgatgtgcacttctgctactttcaagtattatcctgtctggagtgcctttgcagctttgctcttcacagcagttkcttctagaaatcattgtcttacatgatttcaatcaaaattatattcaagagggacagtgtgtatatgtgggtggaagaagagcctaaaatgggagagtgggcagcagaacatgaatttcttttattcatcaccattccattgatgtaccacattgccccagagttaaggtatcaggaggtggcagaaataattaagttatacagcattaatctgatacaaatagctgtttgtcagaatcttggaaatgctggttgattaggctttggtcttcgggttagttcattttcatgctgctggtaaaga

SEQ ID NO: 344794 - DNA, 237 bp, Homo sapiens
tgaattatgaccaacttaacttttgtaaaactcaagtttcttatccatcaaacagttaataatacctaccataaagagttgctgtgaggatgaaaagaargaacacatatatgagttctacacagagcttggaaaaacatgggtgcccaaatacatagtgtgtgttctgcctctatctcttattattgaaattgtggaaacatgcatataaatgtgcactctgaactctcctaataa

SEQ ID NO: 344795 - DNA, 237 bp, Homo sapiens
tgaattatgaccaacttaacttttgtaaaactcaagtttcttatccatcaaacagttaataatacctaccataaagagttgctgtgaggatgaaaagaaagaacamatatatgagttctacacagagcttggaaaaacatgggtgcccaaatacatagtgtgtgttctgcctctatctcttattattgaaattgtggaaacatgcatataaatgtgcactctgaactctcctaataa

SEQ ID NO: 344796 - DNA, 237 bp, Homo sapiens
tgaattatgaccaacttaacttttgtaaaactcaagtttcttatccatcaaacagttaataatacctaccataaagagttgctgtgaggatgaaaagaaagaacacatatawgagttctacacagagcttggaaaaacatgggtgcccaaatacatagtgtgtgttctgcctctatctcttattattgaaattgtggaaacatgcatataaatgtgcactctgaactctcctaataa

SEQ ID NO: 344797 - DNA, 237 bp, Homo sapiens
tgaattatgaccaacttaacttttgtaaaactcaagtttcttatccatcaaacagttaataatacctaccataaagagttgctgtgaggatgaaaagaaagaacacatatatgagttctacacagagcttggaaaaacatgggtgcccaaatacatagtgtgtkttctgcctctatctcttattattgaaattgtggaaacatgcatataaatgtgcactctgaactctcctaataa

SEQ ID NO: 344798 - DNA, 642 bp, Homo sapiens
catgttttctattggaccacgataagtttgcatgagtagtacattgccatattgatagtgataaaattaactatcataaattgaatgcctactcttgtgtctcacactacatatgacatttgaaaaatcrtatctcattccgtcttcacaataatctagaaaagtaggcaacattgaaggaaataatcctcataaagtttagataaactagcccacaatcatatacttagtaactaaccaaggtgtattatagtactgattttctgactccagagattctgtcactgtaacaccagcaccaagcacagacattggggaagaactcctgcctagaagggacaccccattgcaagtacagatggaagaaaatttacgtttactaagtctgacattctgcttggagaagagagccttttaaatgtcccatagtgatggtttgagggctggagagtttgccagtagtcatggggaaaggtagaggtttagaaaatgtagtttgtagctaatgttttacagtgctgctctatgcttaaagaggccattcaaccagtaatctcagtttttcacaagttttcaaaaaatcagaatgaagaatagagtcattttatccaaaactgatgccattaaagcccttatacaagt

SEQ ID NO: 344799 - DNA, 642 bp, Homo sapiens
catgttttctattggaccacgataagtttgcatgagtagtacattgccatattgatagtgataaaattaactatcataaattgaatgcctactcttgtgtctcacactacatatgacatttgaaaaatcgtatctcattccgtcttcacaataatctagaaaagtaggcaacattgaaggaaataatcctcataaagtttagataaactagcccacaatcatatacttagyaactaaccaaggtgtattatagtactgattttctgactccagagattctgtcactgtaacaccagcaccaagcacagacattggggaagaactcctgcctagaagggacaccccattgcaagtacagatggaagaaaatttacgtttactaagtctgacattctgcttggagaagagagccttttaaatgtcccatagtgatggtttgagggctggagagtttgccagtagtcatggggaaaggtagaggtttagaaaatgtagtttgtagctaatgttttacagtgctgctctatgcttaaagaggccattcaaccagtaatctcagtttttcacaagttttcaaaaaatcagaatgaagaatagagtcattttatccaaaactgatgccattaaagcccttatacaagt

SEQ ID NO: 344800 - DNA, 642 bp, Homo sapiens
catgttttctattggaccacgataagtttgcatgagtagtacattgccatattgatagtgataaaattaactatcataaattgaatgcctactcttgtgtctcacactacatatgacatttgaaaaatcgtatctcattccgtcttcacaataatctagaaaagtaggcaacattgaaggaaataatcctcataaagtttagataaactagcccacaatcatatacttagtaactaaccaaggtgtattatagtactgattttctgactccagagattctgtcactgtaacaccagcaccaagcacagacattggggaagaactcctgcctagaagggacaccccattgcaagtacagatggaagaaaatttacgtttactaagtctgacattctgcttggagaagagagccttttaaatgtcccatagtgatggtttgagggctggagagtttgccagtagtcatggggaaaggtagaggtttagaaaatgtagtttgtasctaatgttttacagtgctgctctatgcttaaagaggccattcaaccagtaatctcagtttttcacaagttttcaaaaaatcagaatgaagaatagagtcattttatccaaaactgatgccattaaagcccttatacaagt

SEQ ID NO: 344801 - DNA, 634 bp, Homo sapiens
accacaaacagacattctcatacataaactcagctgatcaatttcctcttcttagttgttttgctaatgggctccaatctctcacggaggtcacttgtatgtgggaagatgctgctgtcattcccaaatacatagcaacagtagatataggattagaaacaagaaatgttcagaaaattataccacaatggtttttaaagtgtggtcctctgaccagaagaattagtatcacctggaaacttgttacaaaagtaaaatcttagacaccaccatcaagacgtactgaatcagaaactcaggggacggggtccagatatctttattttagtaagtgttccaggtaattctcatgtacactaaagtttaagaacattagtgctagtgtattccttttacaggtagatgttaacactcaaggatcaacatccaagaagmgtctagactgcccaggattaggatttcaacagcagtcctgagtctagagggccaaatacaacacacacaaactctggggccaaggctatgtgctgagctgtgtgctgagttattcctgcaagtattgatcgacttcccctcctgcctgtgaatgattacatgtattgaatggaattggccatttaaaaaacagcttgcc

SEQ ID NO: 344802 - DNA, 523 bp, Homo sapiens
caaatttactcagttttaagaagcagtttcaccttctcagacatggctttgagatttaaatttactatttcaaaaaatagagagataataaaatttatgatgaccttatttacaacattcatatatgaacttggtaaaagggttagataatatcaattccccagtgaactgaagaaatgaggccaaattttcaaagtttgcaatcaacgctgtggagaaacaatcaatagcccagctcctacctaccaaactgttacttctattaacgtgattcagttcacagaaagaagtaagaacaagcacacttcatttaacagggagctttgttcacttctaagctgacagcaagtgtgcaactctgataatatttttaattcccttttaatttacatcactgatgtacaatcccctaggctctttctccctccaaaaaagaacaaatwggctagttaaagattatcttttttcctaacaactcatattttgggctttggtttgctaacgagatgtataccatgaagaa

SEQ ID NO: 344803 - DNA, 581 bp, Homo sapiens
aagacagtggatgtcttctgccagcagaactcagtaaaaggaagatacagagatagactgagcaaatcccttaatctcscaagtcctctgtttcttcaactgtaaaatgggcagaactagctagacatgcttccaaggtacatcccatggagatcactaattcattataaatctttatacctcactttgaaaatataatataccataaaaatgctaaatattattattaaatattcagaatgaggtttttctctaaatctactgtcatatgctcaattgaatgctaataatgttaactctgtgggatacaatttcaattattcatgggagtagcatatataatgtgtcgtggtgaatatgctgggcaatgtattttcacctatcaatatgatggtttctgacgaaaactccctctccaggtaatgtgaaatgagatactttaggcagctatttcttttaacaactcttcatatgatatacaactttagaggaaagtttctgcaatctgtgtcaaactcctcgtcttcagggaggccaattcacctacatcaaaccttcgtattctcaaatgagtgggaaag

SEQ ID NO: 344804 - DNA, 581 bp, Homo sapiens
aagacagtggatgtcttctgccagcagaactcagtaaaaggaagatacagagatagactgagcaaatcccttaatctcccaagtcctctgtttcttcaactgtaaaatgggcagaackagctagacatgcttccaaggtacatcccatggagatcactaattcattataaatctttatacctcactttgaaaatataatataccataaaaatgctaaatattattattaaatattcagaatgaggtttttctctaaatctactgtcatatgctcaattgaatgctaataatgttaactctgtgggatacaatttcaattattcatgggagtagcatatataatgtgtcgtggtgaatatgctgggcaatgtattttcacctatcaatatgatggtttctgacgaaaactccctctccaggtaatgtgaaatgagatactttaggcagctatttcttttaacaactcttcatatgatatacaactttagaggaaagtttctgcaatctgtgtcaaactcctcgtcttcagggaggccaattcacctacatcaaaccttcgtattctcaaatgagtgggaaag

SEQ ID NO: 344805 - DNA, 698 bp, Homo sapiens
aaaatagtccttttgcattgttggtatagtgatttccaaatactttacaaaccttatatttagtatctataataaaacccttaggggtatattttagcagatgagggaactgaggctcaaacaggctgagcggcatgaacaagttcactcaggactgcagagtagagcaagcatttgaagccagagctctcgggctctgcaaaccatggcacttttattaggctacagttatcagccctgaggtggtagaggagatggctatccagccttgagatactatcactatattcaggtgaagattcttgtctccaaaagagcaggtcaaaaacttaaaaaagtataggtttattgaatatctgttacatgccaagtactrtgataggaactgaagatgagagatatctattttttaaagagagagagaaaaggtaacatttcactgaacttgaggaacataatagcacctattgaagaaggcaaaaaaatgttaaagcatattacaatgcaatatgtgaaataattggatattaggacatttgtctctcttatagcatagtaattagcattaaaagagaattgagagaagagactttgttgattaaatattgcatttcctatcactcctagtacttgggtgtgcactcctcattgtttaaaggaaaagttacatttttgaaataactgttacataatagaca

SEQ ID NO: 344806 - DNA, 632 bp, Homo sapiens
atggttaaaaagatggatatttttattataattaataagaattaatgcagttttaggagatagtagtggcaattgtaaataatgaaggtaaaaatttaataactgaatgaaatttaaaattaattgttatkgatagccaaaaatcttccctgcaagaaggtacttacgttaagctaaattagttagaatgattcattctttgaatggaggagtgtgagcctgaaaagtctcagtgagagaatcctgatatagtttacttagctagaagcaggtgcctaagagtataacagaaagggaacactatttcagtaagggactagagcaatcttttagtcaagtcctattcaaaccatctgtattaaatgaatatgtttttctaaaataaacaaaagattatttttaaaatttctaatccattgtagatcaatattttgcaaaattcaataaaaatagaaaaataaaagacatacacaatataagcttaactttaaaaaatatgttgcttggcaaatataaaagtatattgtttaattgttatacatttcctaaattcttattctttaatttctacatttgaataaccaagaaccaataatggtttgcagattactagattatttttggagaagtcc

SEQ ID NO: 344807 - DNA, 632 bp, Homo sapiens
atggttaaaaagatggatatttttattataattaataagaattaatgcagttttaggagatagtagtggcaattgtaaataatgaaggtaaaaatttaataactgaatgaaatttaaaattaattgttatggatagccaaaaatcttccctgcaagaaggtacttacgttaagctaaattrgttagaatgattcattctttgaatggaggagtgtgagcctgaaaagtctcagtgagagaatcctgatatagtttacttagctagaagcaggtgcctaagagtataacagaaagggaacactatttcagtaagggactagagcaatcttttagtcaagtcctattcaaaccatctgtattaaatgaatatgtttttctaaaataaacaaaagattatttttaaaatttctaatccattgtagatcaatattttgcaaaattcaataaaaatagaaaaataaaagacatacacaatataagcttaactttaaaaaatatgttgcttggcaaatataaaagtatattgtttaattgttatacatttcctaaattcttattctttaatttctacatttgaataaccaagaaccaataatggtttgcagattactagattatttttggagaagtcc

SEQ ID NO: 344808 - DNA, 569 bp, Homo sapiens
attctaacatttatatgaagggatccagagtatgtatgcaaaacaactttgaaaaataaaaacaaagtttaatttgattttaaactttataaagttatgataatcaaaaaatatgttattggcctaagaatwggcatatggatttacagaacagaataaatagttgaaaaacaggctctcacatgcattgtcaattcattctgaacaaggtgtcaaggtaattcaatgcaaataatctttagcacaaatgatgctggaacaattagatactcatgtcctccctccacccaacccttccccagaaaaaaaagagaaaggaaaagaaaattgacaccttacattatataaaaaattatattctacatgaagcgtaatcctaaatgtaagagttcaaactaaaatttactgaaggaaacagaagaaaattattgacatttaaggttaagcaaaactgttaatgcagttagcagttaggggtatctttactgtatataaaacttaaaataatgacaaacaatttcattatgaagaaaaacacttgcattttgaatgatagtattaataagatg

SEQ ID NO: 344809 - DNA, 569 bp, Homo sapiens
attctaacatttatatgaagggatccagagtatgtatgcaaaacaactttgaaaaataaaaacaaagtttaatttgattttaaactttataaagttatgataatcaaaaaatatgttattggcctaagaattggcatatggatttayagaacagaataaatagttgaaaaacaggctctcacatgcattgtcaattcattctgaacaaggtgtcaaggtaattcaatgcaaataatctttagcacaaatgatgctggaacaattagatactcatgtcctccctccacccaacccttccccagaaaaaaaagagaaaggaaaagaaaattgacaccttacattatataaaaaattatattctacatgaagcgtaatcctaaatgtaagagttcaaactaaaatttactgaaggaaacagaagaaaattattgacatttaaggttaagcaaaactgttaatgcagttagcagttaggggtatctttactgtatataaaacttaaaataatgacaaacaatttcattatgaagaaaaacacttgcattttgaatgatagtattaataagatg

SEQ ID NO: 344810 - DNA, 510 bp, Homo sapiens
ttagaattgttgattttgaaaagtttcagatggagcccaaacctgtctctgcatataagttacacaaatgattctaatagagtcagccttgaaagccattatgttattgtgtacctagaatatgttggttatggtaggtggtaaaagatacaaatacaattaaaactgtccatttcttcagagaatctattagagaaaggcaaaacaaataaattacactgctattattgagacctgtgaataaaaagattttttaaaattcagagaaaaatacaagtaactttttctagaatttcagaaaacattaaatacmttgtgaatgctatggctaaagaacaatttttcaaacagattctgtggaagagagggtgtgccaaacatatgaactgcatctgtaaagtatggaggcagatgatctgatgacttattaaagcaatctcaagtaataaagtatactgagaaagaagtatgtctatgtatgtgtaacagacattagtagtttataaacag

SEQ ID NO: 344811 - DNA, 543 bp, Homo sapiens
tggttaaaagtgcaagtacacacatgtacatactgttgccataatcatagtaggactcccagtgaattataagatgtagcaactgccgttgcccttttcttgcttttggatcagagaccarcagtcaaaaaacaaaacaaaacaacaacaacaaaaaaaagtaaccaacctggctgacaggactatgttacagtgatcttcatgaggaggtacccatgttacagggaatggggccggggagaaatttgtgcaaaatcctagtaatccatttagacttttttgggttcccttgtccaattgtgatggtaagtgggcaagagaagcaaccccagcctgagagtgaagacatgaagacaggaactcagaaccttcagagatactggtctccaggagagccactgcagccagcagatgtagtgctaaagtaatgtaactaaaaagtggatgaaagaaaaattagtatcagttgaggctctgatatcaactacaggcagtaggggctacaattttgagcccagccactgggcctcatcctggttccca

SEQ ID NO: 344812 - DNA, 546 bp, Homo sapiens
tggttctaatattgtagcagtttacactttttctccattcagtccatctctgttcactcatgctttccttaagtggacatttttaatattggaagatccaccattcctttcaaattattatttttagtgtgttcaggaaatcaatatcaagtgataattactgccaaatagttctctcgtaaatatttaaattatttgatgactgcccaggtagagaatagggtattttattgttgttaaaagtgagacacacaggagaatatgtttgggcaatggatcatgaggtcaagagatcaagaccatcctggcaaacatggtgaaactatgtctctactaaaaatacaaaaattagctgggtgtggtggcgcacgcctgtagtcccagctactcgggaggctgaggcaggagaatcacttgaacccaggaggcggaggttgcagtgaggtgagattgtgccactgtactccagcccggcaacaaagtgagactccgtctcaaaaaaaaaaaaaaaaaaaagyaaaaaacagtttcagcatttgtgcttaa

SEQ ID NO: 344813 - DNA, 644 bp, Homo sapiens
acgtaagcataacacacgaaggttgccaaaaagccccataacactattgcactaaatattaaagtattcacatgagagtttcacaattgtttcctcacttcctccattactttaaaattaggtaagatgctgttttaataattaatttcttggaaacaagatatattagtcctagatttaatacaatgaagccacatttaagactgggttatatttctaaggctaatatcattggtatgataaaaataaccctcaaacatttcttgatccttattgaaggtgctacagtgaataytggcgctttgttgctcgtttttccccatgtgttggaatacaaccctgcttttttgatggagaggtacgtgatctacttttcttgcagctagggtttgttttgtgtgaaatatacacatcttaaaatactgaaatcatatttaatctgtaagagatgttcatataatgaaagaaattacaaactgaggctcactggagaaacaacagatttatggtttctagaaataaatttaaataaataagtataaaagctctttaaaaataaagattattgaatcccacaaaatatatcctcaattaaagggaagatggtattttcatctaaaggaagactcactgtcttaaagaga

SEQ ID NO: 344814 - DNA, 644 bp, Homo sapiens
acgtaagcataacacacgaaggttgccaaaaagccccataacactattgcactaaatattaaagtattcacatgagagtttcacaattgtttcctcacttcctccattactttaaaattaggtaagatgctgttttaataattaatttcttggaaacaagatatattagtcctagatttaatacaatgaagccacatttaagactgggttatatttctaaggctaatatcattggtatgataaaaataaccctcaaacatttcttgatccttattgaaggtgctacagtgaatattggcgctttgttgctcgtttttccccatgkgttggaatacaaccctgcttttttgatggagaggtacgtgatctacttttcttgcagctagggtttgttttgtgtgaaatatacacatcttaaaatactgaaatcatatttaatctgtaagagatgttcatataatgaaagaaattacaaactgaggctcactggagaaacaacagatttatggtttctagaaataaatttaaataaataagtataaaagctctttaaaaataaagattattgaatcccacaaaatatatcctcaattaaagggaagatggtattttcatctaaaggaagactcactgtcttaaagaga

SEQ ID NO: 344815 - DNA, 463 bp, Homo sapiens
ataatgaaaacatatcaaaatttgtgagaggcagttaagattattaatacttttcttgttttttttctccttaaactttaggcagaagaaggagtaaagaaagcataaattctgtatctgtgtttgggtaaatatatttttattaggtatgcccagcacagagatttacttgtagtaaagagcaatgccagatacttaaatattgcttcccacttcgtgattstaattttataaatatttctatcaatctgttcgtatctattttaaccagccctcatggttaagtctctgaacatgacaaaagtctttgaactactctaccaagagtgacacagtctccatcaagctctggagccatgtagtcatggcagagcaaagagtatttagctcagtggggattggaattcagcatcgttacaaatggacacagttcacactgggacacgatatctccttggatgtc

SEQ ID NO: 344816 - DNA, 463 bp, Homo sapiens
ataatgaaaacatatcaaaatttgtgagaggcagttaagattattaatacttttcttgttttttttctccttaaactttaggcagaagaaggagtaaagaaagcataaattctgtatctgtgtttgggtaaatatatttttattaggtatgcccagcacagagatttacttgtagtaaagagcaatgccagatacttaaatattgcttcccacttcgtgattgtaattttataaatatttctatcaatctgttsgtatctattttaaccagccctcatggttaagtctctgaacatgacaaaagtctttgaactactctaccaagagtgacacagtctccatcaagctctggagccatgtagtcatggcagagcaaagagtatttagctcagtggggattggaattcagcatcgttacaaatggacacagttcacactgggacacgatatctccttggatgtc

SEQ ID NO: 344817 - DNA, 463 bp, Homo sapiens
ataatgaaaacatatcaaaatttgtgagaggcagttaagattattaatacttttcttgttttttttctccttaaactttaggcagaagaaggagtaaagaaagcataaattctgtatctgtgtttgggtaaatatatttttattaggtatgcccagcacagagatttacttgtagtaaagagcaatgccagatacttaaatattgcttcccacttcgtgattgtaattttataaatatttctatcaatctgttcgtatctattttaaccagccctcatggttaagtctctgaacatgacaaaagtctttgaactactctaccaagagtgacacagtctccatcaagctctggagccatgtagtcatggcagagcaaagagtatttagctcastggggattggaattcagcatcgttacaaatggacacagttcacactgggacacgatatctccttggatgtc

SEQ ID NO: 344818 - DNA, 592 bp, Homo sapiens
gcacaccactcccgtgccctcccacctccttcccagtctttccttcttccacctgagttgacacttttgcccttgagagattctcctgattactcaagacattccgtccactttaagtacaggccacaggtcccatggcaagagcatttgtctcttaacatgtrggagtctttatacattccagtctctaatgatgacaggcttgcagtgggctcttaattcttaatttcttacggaagttttagttttctaaaggcagtctaggccttgcagcatctcttctgaattctatgacacatgaaaagtgctcaaatattatgccagccctcatgatttcacagttcaaactttatcccatcattctcacttcacaaaatgcttccatccaccagaaaccccatttctgtgaagaaatgagaaatatatttaccctctaactggcacactacgtattttaagtgctgaccacacaatcttcaaaccattttggtaagacatgcagtaagagcatagttagagctgaagattttccttattaaaaattgctgattgcttttcctttcagcataagaatgtgcaccttatatacaaa

SEQ ID NO: 344819 - DNA, 462 bp, Homo sapiens
agatgaggtgagcaacttcttatattttgaaagtgtttgttgtgtcgcactagaaggctttttttttctttgctatttatctccaaagccctgccttgaattgtgacactaaccactgcatgtcaatttgtagctctttctttattccagactttacattttaggcattgttgtgattatggctttattgcctatgggcacaagtacctaggactttggggccataaagctgcctttgcagcttgtgccttttctgacaatccaaaaaagtggcttttccatatttccttcattttccttgtctatgatatgaaaaaggtttgcagcatggcaagatcaattaagagcagaaacccaaaagctgttagctgaaaaacaaacaaaaaatacctwtggtgaagcgtgatttttgggtgaagttaaaggcaggaagctggtagagttcataggttgtttagtgga

SEQ ID NO: 344820 - DNA, 589 bp, Homo sapiens
aaatgctctactaatattgccaaaggaggaatagatgcacctgaattgtcctgagaaatgccctcactgcgccagatgatcatcccaagatatgatgctggaaatcacgagggttcctgtatgccaccgaattatattcagtaacaaagccacccacctcagatgcccaggaacatctcccttttctgtcaatcatctctgatcatttctttagcaggaagaatatcaatatccrtcaatctaacttctcagttggggtgaattttctaagatatgaagagacagatgtcaaagctttgggtaacctacaaaattattacattattattccttacaactttattctggtattgctatactccatgctacctggctaacagttttatactttatattgtatattgtatttttattacatggcaaaacacacataagctttctggtcagaaaggttttagttttactcatgttgctatcatttcttagctgtttgaccttaggcaacttgcctaaactctcaaacccttacctgtaaaatagatacaataccactaacattagagttaaaatgagttacgtaagataatac

SEQ ID NO: 344821 - DNA, 585 bp, Homo sapiens
aaatttgggtctattcccattactatagtgggtgatttttttcatgcaaatattatgtctggttaatttaaggttgtgataggaagatgaagggggaatatgtgctgaggaggctaacaacaaatggctrcaaagccagattgaactggttcaccattcatgcccatcttaaaagcacttcctttctgatactgtgtattctacaccacatgctgcccttttcagaatgtgggtgatacctccttaataagggttcctagaaccttgtctctcttttctacctggtaacctcttcaacagatgggggcctcatggagtcacagccagcagggtttagatttgggcataagctgtgaaagtagaatccggtgttcccatccctggtctgcctcccctcattgtaggattaatcattgttctaatgctagaggacataacactatctttcccatattgaaaataaaacatacttaacagtctgcttggcatatagaaaatgcctaataaattaaataatggttcttcttacaaaaatgagactagtcttagagaatgtgtctataaaacatttcccaacttctccca

SEQ ID NO: 344822 - DNA, 585 bp, Homo sapiens
aaatttgggtctattcccattactatagtgggtgatttttttcatgcaaatattatgtctggttaatttaaggttgtgataggaagatgaagggggaatatgtgctgaggaggctaacaacaaatggctgcaaagccagattgaactggttcaccattcatgcccatcttaaaagcacttcctttctgatactgtgtattctacaccacatgctgcccttttcagaatgtgggtgatacctccttaataagggttcctagaaccttgtctctcttttctacctggtaacctcttcaacagatgggggcctcatggagtcacagccagcagggttyagatttgggcataagctgtgaaagtagaatccggtgttcccatccctggtctgcctcccctcattgtaggattaatcattgttctaatgctagaggacataacactatctttcccatattgaaaataaaacatacttaacagtctgcttggcatatagaaaatgcctaataaattaaataatggttcttcttacaaaaatgagactagtcttagagaatgtgtctataaaacatttcccaacttctccca

SEQ ID NO: 344823 - DNA, 585 bp, Homo sapiens
aaatttgggtctattcccattactatagtgggtgatttttttcatgcaaatattatgtctggttaatttaaggttgtgataggaagatgaagggggaatatgtgctgaggaggctaacaacaaatggctgcaaagccagattgaactggttcaccattcatgcccatcttaaaagcacttcctttctgatactgtgtattctacaccacatgctgcccttttcagaatgtgggtgatacctccttaataagggttcctagaaccttgtctctcttttctacctggtaacctcttcaacagatgggggcctcatggagtcacagccagcagggtttagatttgggcataagctgtgaaagtagaatccggtgttcccatccctggtctgcctcccctcattgtaggattaatcattgttctaatgctagaggacataacactatctttcccatattgaaaataaaacatacttaacagtstgcttggcatatagaaaatgcctaataaattaaataatggttcttcttacaaaaatgagactagtcttagagaatgtgtctataaaacatttcccaacttctccca

SEQ ID NO: 344824 - DNA, 566 bp, Homo sapiens
gggagctaaacactgagtacacacggacacaaagaagggaacagcagacaccagggcctacctgagggtggagggtggaaggagggtgaggatcaaaaaattacctattggatactatgctgattccctcrgtgatgaaataatctgtacaccaaatcccacaacacacaacttacctacataacaaactggcacatgcacctctaaatctaatataaaagttttaaaaaatggacaaaataattggaacagatatttcttaagacacacaaatggccaacaaatacatgaaaatatgctcaacatcacttatcatcaggaaaatgcaagttaaaaccacaatgaggtattatctcacctcagttagaatggctatgatcaaaaagacaacaaaaaaataagatgagggcaaggatgcagagaaaaggaattctagtctactgttggtgcaaatgtaaactagtacaaccactatggagaatagtatgggtattcctcaaaatctacaaatagaactaccatatgatctagcaatttcagtactgggcatttatctaaagaaaagg

SEQ ID NO: 344825 - DNA, 586 bp, Homo sapiens
atgctgattccctcggtgatgaaataatctgtacaccaaatcccacaacacacaacttacctacataacaaactggcacatgcacctctaaatctaatataaaagttttaaaaaatggacaaaataattggaacagatatttcttaagacacacaaatggccaacaaatacatgaaaatatgctcaacatcacttatcatcaggaaaatgcaagttaaaaccacaatgaggtattatctcacctcagttagaatggctatgatcaaaaagacaacaaaaaaataagatgagggcaaggatgcagagaaaaggaattctagtctactgttggtgcaaatgtaaactagtacaaccactatggagaatagtatgggtattcctcaaaatctacaaatagaactaccatatgatctagcaatttcagtactgggcatttatctaaagaaaaggaaaycagggtatcaaagagacatctgcaccatcatgttaactgcagcactattcacaatagccaagatatggaattaagttaggtgttcaacaacagatgaatagataaagaaaatgtcacacacacacacacaca

SEQ ID NO: 344826 - DNA, 657 bp, Homo sapiens
tggaagtacccagggtagggaacttagcttacagagtagtatgcaatgtttcagtgtctatacacaattgacagagatggtacaagccatgaatagtggagacatakagaaatggggcatcatgctgccacttaacaaattcacttgatcacatccctccctacaatgttcagattacaaagcagatattctgccccactgacacttctcaggtctcatcccttctgagattacttgtatgagttgtactatcggtccgtcctcacattactataaggaaatacccaagactgggtaatttataaaggaaagaggtttaattgactcacatttcagcatggctggggaggcctcaggaaacttacaattacggcaggagataaaggagaagcaagacaccttcttctcaagatggcaggaaggagacttgctgagcgagggggaaagaaccacttataaaacctcagatctcgttagaactcactcactatcacgagaacagcatgggggaaaccatcccaatgattcaattacctgcacctggtctctcccttcacacatggacatgatgaggattatgtagattacaattcaagatgagattcaggtggggagagaaaacctaactatatcaagtcatgctccgtttagtacaag

SEQ ID NO: 344827 - DNA, 540 bp, Homo sapiens
atgcactacaagttctgattcttatattacccactggaagttggaaatacggtttcacatttttgccttaaaattatataaagtgaattcaatgcttagttgttacttgygggtatttttcatgagcttaaaacaataattgcactttcgtatttccaaaaagaaatttttaaaatgtaatccagaagagcaacagtctgaaatatttttaagacctttaagattgatatttgccactttgaaaaaaaaagtacattcttcaaagttactcagtgacattgcagatatgttttgcccagttaatctctttcccatcaaagattgtgggctttttacaagtacttttctgattcattcttcaatcacaaggactacaaaaatctccatctgccactttgctatttttggatcagttcagatataataaagaatgtggttacttgctttgaccaagtagttaggatgtatactctatttttctaataaaaatgatatgtcctattgatagtgaaaaatttggtgacaaaaatatatatatga

SEQ ID NO: 344828 - DNA, 619 bp, Homo sapiens
attcatatgtaggactctcacgtaattttctcagaacttagctcaggcttgccaacagccaatccttaatcatgttctggatctgaatttacttccccctcaggtatttttcttctgtaatctcatcttgcttccttatagtcaatgtctcttgtttgactaattaatctgtgagcatatcaacttatttaaaatctccaattgaaaataaacatgaaaggttcataaaaggacaaatggagacactgaacctcatcaaaattaaatatttggctttgtgaaagactgttcagaagaaaagaaaagctacagactagggaaratatttgcaaatcacatatttaaaaaagaactatgatctggaatatataaagaattttcaaaactcaacaataaaataacaatcaaattagaaaatgggtatggctataaaccataaagtgacataaaggataatcttaagataattaaagtcaataaagatgatcctacaagatgaaaacaatttgaaagtatacaataaagacagaaaataatttaatttcatggtaatttatctgctagagtggagaacacttcgaattgattaaatcattcaaatttattttaaaacttgaaa

SEQ ID NO: 344829 - DNA, 588 bp, Homo sapiens
tgtgatatatatggaatactattcagccataaaaaagaattaaatccatcattcatcttaatagggatgagcctggaggacattatgttaagttaaataagtcaggcataaaaaattaaatgctatgttttctcactcatatgtggaaactaaaaaaaaatgatctcatagaggtagagagtagaattgtgattgttagaggctaggtagagtagagaagagagaaggataaagagagctgggtttacaaacacaaagttacagctagatgggaagaataagttctagtgttctctagcactgtggaatgaataaggttagcattaattttgtgtatttttttttaaagctagaagaaaggacttcaaatattcacaacacaaagaaatgatggctctttgaggtgaytgataatgctaatcaccctggtttgatcattttgcactgtatacatgtattgaaatataactgtaacctataatgtgtgcaattattatatcaactataaaataaaaggaaaaagactctacctcatacattgtgctattgtaatcatacatattacatcctaatacactataaacctta

SEQ ID NO: 344830 - DNA, 588 bp, Homo sapiens
tgtgatatatatggaatactattcagccataaaaaagaattaaatccatcattcatcttaatagggatgagcctggaggacattatgttaagttaaataagtcaggcataaaaaattaaatgctatgttttctcactcatatgtggaaactaaaaaaaaatgatctcatagaggtagagagtagaattgtgattgttagaggctaggtagagtagagaagagagaaggataaagagagctgggtttacaaacacaaagttacagctagatgggaagaataagttctagtgttctctagcactgtggaatgaataaggttagcattaattttgtgtatttttttttaaagctagaagaaaggacttcaaatattcacaacacaaagaaatgatggctctttgaggtgattgataatgctaatcaccctggtttgatcattttgcactgtatacatgtattgaaatataactgtaacctataatgtgtgcaattattatatcaactayaaaataaaaggaaaaagactctacctcatacattgtgctattgtaatcatacatattacatcctaatacactataaacctta

SEQ ID NO: 344831 - DNA, 588 bp, Homo sapiens
tgtgatatatatggaatactattcagccataaaaaagaattaaatccatcattcatcttaatagggatgagcctggaggacattatgttaagttaaataagtcaggcataaaaaattaaatgctatgttttctcactcatatgtggaaactaaaaaaaaatgatctcatagaggtagagagtagaattgtgattgttagaggctaggtagagtagagaagagagaaggataaagagagctgggtttacaaacacaaagttacagctagatgggaagaataagttctagtgttctctagcactgtggaatgaataaggttagcattaattttgtgtatttttttttaaagctagaagaaaggacttcaaatattcacaacacaaagaaatgatggctctttgaggtgattgataatgctaatcaccctggtttgatcattttgcactgtatacatgtattgaaatataactgtaacctataatgtgtgcaattattatatcaactataaaataaaaggaaaaagactctacctcatacattgtgctattgtmatcatacatattacatcctaatacactataaacctta

SEQ ID NO: 344832 - DNA, 588 bp, Homo sapiens
tgtgatatatatggaatactattcagccataaaaaagaattaaatccatcattcatcttaatagggatgagcctggaggacattatgttaagttaaataagtcaggcataaaaaattaaatgctatgttttctcactcatatgtggaaactaaaaaaaaatgatctcatagaggtagagagtagaattgtgattgttagaggctaggtagagtagagaagagagaaggataaagagagctgggtttacaaacacaaagttacagctagatgggaagaataagttctagtgttctctagcactgtggaatgaataaggttagcattaattttgtgtatttttttttaaagctagaagaaaggacttcaaatattcacaacacaaagaaatgatggctctttgaggtgattgataatgctaatcaccctggtttgatcattttgcactgtatacatgtattgaaatataactgtaacctataatgtgtgcaattattatatcaactataaaataaaaggaaaaagactctacctcatacattgtgctattgtaatcatacatatyacatcctaatacactataaacctta

SEQ ID NO: 344833 - DNA, 560 bp, Homo sapiens
ataatcatcaccctacctcagtaccacgtgggtaggmagccacctgaatgtatcagactaaagcatctgcttcttggttggcaggttttgtttccttcccagaagtttccctcctcacagtaattgacccgtcagcactttgcctgcacagctgcaggttaaaagggtgacagtctagcaagcagctggctgcagtactctagtttgcaagattcctgctgcattgtgtcagaaaggaaaagattctaacttgaaaagcaagaacatgcagaggttgaagatctgtaacaaataaacatattttttaaaaagcaaatggagaaaaaagtgattaggtaacaccaaacaggaccttcgaatctcaatgcaatgtgtcttctcctgtttgggtcttcctcagcttgtagtattacatcttgagcagacctacactttctttcaactatttgcatattttttgtgcctgtgcccaggagaccatttggtgcaaactgtccatctgcctttgttttctcagattttaacaccattcaccttgcatcccttatgattgtatttgt

SEQ ID NO: 344834 - DNA, 557 bp, Homo sapiens
ttgagcagacctacactttctttcaactatttgcatattttttgtgcctgtgcccaggagaccatttggtgcaaactgtccatctgcctttgttttctcagattttaacaccattcaccttgcatcccttatgattgtatttgtgccaggatgaagattatttataagcctagagcttatgtgaactcttctgcagtagatctctatgctctctaatgagagaaatgctttgcctttgttcaattcaagagctgagtttttctactgcaaataggcatctgcaggaacatagaaaactatgcggcaagagatagtcactgccgcataagagaatttawgagtgacatatatcccactgaaagccaactaggtctgaaatgcctgccactcagcttggcagactggagagccatgactactaactattgtgaggtcaggccagtaactatgtattgattatttactacatgatcagagaaagattaatggagtgtgagcaatctcttcaacccttcattatccatcaatattggcaataatcaagaattttggactgc

SEQ ID NO: 344835 - DNA, 320 bp, Homo sapiens
cactttttgatatacttgtccttaagcacatagaataggttcttaaaattgaaaattgttaagtcaaagagtatatttagtttaaacaggtaaggccagatttttttccccaaattctgtaaaaattcatattcccaatagcaatatataaaactatttatttccataaatccacttcagcaagggacttaattttytttttaacttttgccaatttgatgaatgaaaaataatattcaattgccataattttcattttcctgattgctagtgaggtagaccatctgttcatatttattgaccaattgtatttcctttac

SEQ ID NO: 344836 - DNA, 320 bp, Homo sapiens
cactttttgatatacttgtccttaagcacatagaataggttcttaaaattgaaaattgttaagtcaaagagtatatttagtttaaacaggtaaggccagatttttttccccaaattctgtaaaaattcatattcccaatagcaatatataaaactatttatttccataaatccacttcagcaagggacttaattttttttttaacttttgccaatytgatgaatgaaaaataatattcaattgccataattttcattttcctgattgctagtgaggtagaccatctgttcatatttattgaccaattgtatttcctttac

SEQ ID NO: 344837 - DNA, 320 bp, Homo sapiens
cactttttgatatacttgtccttaagcacatagaataggttcttaaaattgaaaattgttaagtcaaagagtatatttagtttaaacaggtaaggccagatttttttccccaaattctgtaaaaattcatattcccaatagcaatatataaaactatttatttccataaatccacttcagcaagggacttaattttttttttaacttttgccaatttgatgaatgaaaaatratattcaattgccataattttcattttcctgattgctagtgaggtagaccatctgttcatatttattgaccaattgtatttcctttac

SEQ ID NO: 344838 - DNA, 542 bp, Homo sapiens
aataaaaaaaaaaactgaaaaatctaaatgttggtggcattgtggagcaattacaacttttatacccaactgatgaaagtgtaaatttgtacaatacacatggcaggacttttataaagctacacatatgaaaacccatgacctagaaattcccttagattatactcaataagaatgttcacatatccaaatggacctaacagacacataaagaaatttccagacaatatcagcagaatacacattcttctcaatctcatatggcacattctccaggatagattacgtgttataccacaagtcttaaatataagatattgtaccaagtatcttcacatatcagtaacagaaataaaacagaaaaatttaaaaacatgtagaaactaaacaacacgctcttgaacaacaaagaagatgcacaaagagcatttgacaaaattcaacattgcttcatgaaaaaaacctccaaaaaggtagacattttataaatgaaattataaaaccactggataaatgawaaaataagaatattttaaaaaatg

SEQ ID NO: 344839 - DNA, 547 bp, Homo sapiens
gtctttcacaggttgccaagaacagacaatagaggaaagaatagtctcttcaacaaatggtgttgggacaactggatatccccatgctaaaatatgaaattggactctatctcacaccatacacaaaagtcaactcaaaatgcattgaacacttacatataaaacttgaaactgtagaattcctaaaacaaacaaaacaaataggataaactttcttgatattagtcttggtaatcaccatttggatatgacaccaaaagcacaggtaataaaagcaaaagtagacaagtgggattacattaaaagtcttctgaatagcaaaggaaatgatcaacaaaatgaaaagacaacatattgaatatttgcgaaaagtatttgcaaataatatatctagtgagggattartatccaaatatataagaactcatacaacttaataccaacagtacaaataacccaacttaaacatgtgcaaaggacctacataggcttcttaaaagaagaaatttagatggacaactggcatactgaacggtacttaacatct

SEQ ID NO: 344840 - DNA, 552 bp, Homo sapiens
tttgaacccaggcattttaactccagagttcatatttttggttgctacaccatattgctactgaaaagtaaaccaaggctgtaaaaaggtgactatgaagaaaccctaaatcaatattgatgtagttaagataatttgaaatatttttataaactctttttcttgcaaaaaawctgctgcttctacctcttattgcctatcttagtaaatgtgaccaataatcatcttttaatacaggccagagaacatagactcatcctagatttctactacttttacactaccaaaggaccaaatcttacaggtttagaatacgaatgattcaaacagctatcatttactcagcatctgtggtcataaactgtgcaagttacttgatctgtgattcttgtatctctcatttcatgaacacaattttaggtaggtattattatccctacctaagattcacaaagttgcattaatttgtttaaattacattgtcaataagtgactgaactggggattggcccacactctttcaactataccatactatattgattattaagt

SEQ ID NO: 344841 - DNA, 557 bp, Homo sapiens
caaagttgcattaatttgtttaaattacattgtcaataagtgactgaactggggattggcccacactctttcaactataccatactatattgattattaagtatctctgctgtgtaacccatcttttccatccccattgccatacccttcaatcatctcatcatctcatcttcattagtacaaaatgttctttaacagattttgctgcttttagtgtsaaaattctcatactctcatccatccatatcctgttgactattatctaaagggcacatttgattatgccacacccttgtgaacaatcacaactgtttattacaagataaatacagtttcatacattcataaggcacttctaaatgcctccttccctcactagtttcttattcgcccagactatcttcatcctttgcacacaggcacacacacacacacacacacacacacacacacaccatgctccagtaaaattaaacattggaaaggtctcttttttctcttgctgcttaaacagaaggaaaggtctctgaatgcacattagtgtttcatgtttgtat

SEQ ID NO: 344842 - DNA, 557 bp, Homo sapiens
caaagttgcattaatttgtttaaattacattgtcaataagtgactgaactggggattggcccacactctttcaactataccatactatattgattattaagtatctctgctgtgtaacccatcttttccatccccattgccatacccttcaatcatctcatcatctcatcttcattagtacaaaatgttctttaacagattttgctgcttttagtgtgaaaattctcatactctcatccatccatatcctgttgactattatctaaagggcacatttgattatgccacacccttgtgaacaatcacaactgtttattacaagataaatacagtttcatacattcataaggcacttctaaatgcctccttccctcactagtttcttattcgcccagactatcttcatcctttgcacacaggcrcacacacacacacacacacacacacacacacaccatgctccagtaaaattaaacattggaaaggtctcttttttctcttgctgcttaaacagaaggaaaggtctctgaatgcacattagtgtttcatgtttgtat

SEQ ID NO: 344843 - DNA, 591 bp, Homo sapiens
ggtgatgtgaattttagaaacagaacgtcattggtcagcattgacctactttgtcatcttaagtgagcccagggttttttgtgttcttgggggttggaggtagttgttggctacttttatgcattcagaatgtccacatcttttgtctgttctttctcagtagtatgttaggtttccttgtaaccctgctaggtcacattgcctttttaggaattttagtctcaaaccttaatcaacacagcattttcattgggtagccgtgtacaagcagaggaggctcttgtgagaactaggcaaaatttaaagacaaacaaaggtccctcaccrttactagaaaaaagaataacccaagtctatcttaatactgtcagtaaagagcgtctttatacggaaagggaaggacattcctaaggtgaaaaaccctggtctgttctggtgactgcagcctgcttgtaacagcatgaagaggagaggactgacgttattgctgtccttgattggcaaagagaagtgaaagtacctaattctgccacagtctacctaatgatgctctgtggattatacccctgcattctccagcccttcggttag

SEQ ID NO: 344844 - DNA, 593 bp, Homo sapiens
gtggtgacatgcacctgtcatcccagcttctcgggaagctgaggcaagagaaaccctgtctctgctaaaaatacaaaaattagccgggcgtggtgacatgcacctgtcatcccagcttctcgggaagctgaggcaagagaatcgcttgaacccgggaggcagargttgcagtgagccaagaccccgcctttgcactccagcctgggcaacaagggcaaaactccatctcaaaaaaaagcaaaaaaatttttacttttgccgggcgtggtggcccatgcctgtgatcccagcactttgggaggccgaggcaggaggctcactgcagcccaggagttcaaggctgcagtgaactgtatcatgccactgctcgccagcctgccccacaaacatattttttttcacttttgcatattttacaaagcacacacccacgtgagcgcattgccagccccctcgccccccaggacaaagtggagaccctgtcagcgaggaggctaccgcttaagtccctggggttctccagagaaggaggagaaggctctgcagagccatgcgccctggacggaagaactttcaaaagtaattcaacaaaa

SEQ ID NO: 344845 - DNA, 593 bp, Homo sapiens
gtggtgacatgcacctgtcatcccagcttctcgggaagctgaggcaagagaaaccctgtctctgctaaaaatacaaaaattagccgggcgtggtgacatgcacctgtcatcccagcttctcgggaagctgaggcaagagaatcgcttgaacccgggaggcagaggttgcagtgagccaagaccccgcctttgcactccagcctgggcaacaagggcaaaactccatctcaaaaaaaarcaaaaaaatttttacttttgccgggcgtggtggcccatgcctgtgatcccagcactttgggaggccgaggcaggaggctcactgcagcccaggagttcaaggctgcagtgaactgtatcatgccactgctcgccagcctgccccacaaacatattttttttcacttttgcatattttacaaagcacacacccacgtgagcgcattgccagccccctcgccccccaggacaaagtggagaccctgtcagcgaggaggctaccgcttaagtccctggggttctccagagaaggaggagaaggctctgcagagccatgcgccctggacggaagaactttcaaaagtaattcaacaaaa

SEQ ID NO: 344846 - DNA, 590 bp, Homo sapiens
gtctgcttcttgttttgatcctgacacgatgtcccgactgcctgctctttgagcccgtctgttttatggacactggaaccttaaactccaggcttcactttgtgtggccttgatggggttcagacatacaaggagcctccagggcagtcccggtgcccaaacaggtctttccttgtgtgaatgttagagggagccatttgctttggattttccccaacccgctcaaactggtagaattaaaaatagcaaatcattttaggttgcataagaatctttagagattggcagttatcaaatgccttcccaaatgcagtttgtttgtcacactgagattttttgctgatgctaagaaaaaattaccttgtcaagttgaccaagcgggtctgatttctcagaaggtcactcctcgggcccgggactgcaaggctgacttcaggtagagaactacttttctacataaacaacagaggaactttagcttatattaaaatagtgatcaaagtgcttatgttttacgcaaaattaatgtaacsttaagttagatgttagtattatgcagtatccatccccagtcccgatggtagcagcag

SEQ ID NO: 344847 - DNA, 455 bp, Homo sapiens
atttttttttttaattaaaacattttaaaaaattattttattttttcagacgtggtctcactatgttgtccagaggctggtctcaaactcatgaactcaagcgatctgtctgccttggcctcccaaagtgttgggattataggtgtgagccaccgtgcccggccatgtacccctgaacttaaaataaaagttataaataggctaggtgccctggcttatgcctgtaattccagcactttgggaggccaaggcagaaagattgcttgaccccccaaattcaaaaccagtctaggcaacatagtgagaccctgctccattaaaaaaaagaagacatawgtaggttagtcaggtgtaggggtatgcacctatatgtggtcccagccactcaggaagctgaggtgggaggaggatcacttgagcctagaaggtcgaggctgcagcagtgagccatgatc

SEQ ID NO: 344848 - DNA, 487 bp, Homo sapiens
tcagccatttgtttttaatgccttttaagtttctaaatctataataaatagtgcctccttgagtgtgtgtatgtgtgtgtgcctgcatgcacatatatgacactaatttttcaaataaattgggctatgtccagatgtggaatctcactcatataatcccagtattttgggagtctgargcaggaggattacttcaggccaggaattcaagaccagcctcagcaacacagccagacctcatctctacaaaaaataaaagaaatattagctgggtatggtgatatgcacctatagccctagctactcgggagcctgaggcaggaggaatgcttgagcccaggagttcaaggctgcattgagcttagaaggcatcactgcaccccagcctgggcgacctcatctctttaaaagagcaagatcttatctcttaaaaaaaaaaaaagaaaaaagaaaacaaattgtgctagtagtcttgtagaacgtctca

SEQ ID NO: 344849 - DNA, 605 bp, Homo sapiens
ctattatgagcaactatatactaatacactggaaaacctagaggaaatagatacattcctggacacatacatacctaccaagattgaatcaggaaaaaacagaaaacctgaacagatgaataatgaactacaagattgaatccgtaataaaaactctcccaacaaagaagtttaggacaaaatagctttactgccaaattctaccaaacttataaaggagaaataacattacttcttctcaaactattccaagaaactgaagaggaagcaattccccttaactcattctatgaggccagcattaccctgataccaaaaccagacaagaatgtaacaaaaaaaggaaatggcaggctagtgatgaacacagacataaaaatyaccaacataacactagcaaatcaaacccaacagcacatcaaaaaaggtaatgtagcatgattaagtgggatttatcccagagatgcaaggatggttcaacatacacaaatcaaaagatacgatatagccatcatcagagtgaaggacagtagccatatcattctctaaatagatgcagaaaaagcattggataaaactcgacgttccttggtgataaaaatctc

SEQ ID NO: 344850 - DNA, 548 bp, Homo sapiens
agacatttaaacaatactgattcttccaatccatgaatatgaaatttctttccattttttgtgtcatcttcaatttcttacatcagtgttttatagtttttattgtagagatctttcacttctttggttgagtttattcctaaatatttagttttatttttagctattgtaaataggattactttcttgatttcttttttagattgtttgctttgacatatagaaatgccactgatttttgcatcttgattttgtatcctgcaattttactgaatttatttatcagttctaatagtttcttgttggagtctttaggttttaccaaatataagattatatcatctgcaaacaataataattttatttcttcttttctaatttggatgcctttatttgtttctcttgtctgattgctctagctaggatttccagtaygatattgaataatagtggtgaaagtgagcattcttgtcttgcttccagtcttagaggaaaggcttttatttttttcttcattcagtatgatactagctgtgggcttgtcatat

SEQ ID NO: 344851 - DNA, 564 bp, Homo sapiens
ttccatgtgtttgtatagctttcaaagttccttttgttattaatttttagttttatcccactgtggtcagagaatatacttggtatgattttaatttttaaaaaaattttttaaagacttattttgtggcctaacatatggtctgtcacatggtgaatgatccatgtgtggaggagaagaatgtatattctgcagttgttggattaaatactctgtaaatatctgttaagtacatttggtctataatgcagagtaagtctattgtttctttgttgattgtctgcattatctgttcaatgctgcaagtggggtagtcaagtcatcagctattactrtattgggatctgtttctgtatttagctctaataatatttgctttatatatctgagggtttcagtgtcgggtacatatatatttacagttgttctatcctcttgctcgattgacctctttatcattatgtaatgacctctttttttgtctctttgtagttttcatcttgaaatttattttgtctaagtataactactcctgctctttttttgctttccattggcatgata

SEQ ID NO: 344852 - DNA, 564 bp, Homo sapiens
ttccatgtgtttgtatagctttcaaagttccttttgttattaatttttagttttatcccactgtggtcagagaatatacttggtatgattttaatttttaaaaaaattttttaaagacttattttgtggcctaacatatggtctgtcacatggtgaatgatccatgtgtggaggagaagaatgtatattctgcagttgttggattaaatactctgtaaatatctgttaagtacatttggtctataatgcagagtaagtctattgtttctttgttgattgtctgcattatctgttcaatgctgcaagtggggtagtcaagtcatcagctattactgtattgggatctgtttctgtatttagctctaataatatttgctttatatatctgagggtttcagtgtcgggtacatatatatttacagttgttctatcctcttgctcgattgacctctttatcattatrtaatgacctctttttttgtctctttgtagttttcatcttgaaatttattttgtctaagtataactactcctgctctttttttgctttccattggcatgata

SEQ ID NO: 344853 - DNA, 535 bp, Homo sapiens
ggccttataaagtgagtaaagaagtgttttctctacttctaatttctgaaagaaattgtagagaattgacaacatttcttcactaaatgtttaataaaattcaactatgaagccatctaagcctgtgctttctttttacaaagattattaattattgattcagtttctgtgctttctttttacaaagattattaattattgattcagtttctttaatagatacasactcatggaggttatctatttggtattatgtatctttcaaggatttggcccacttcatcttggttaccaaatttgtaagcatagaattgttcaaaatattcttttattactctttttaatgtccataagagaagtagtgatgttcctctatcatttctaatattattaatttatgtctttcttcttggttagcctgggtaatgaaccagcttcttattttgttgattttcccttttttatgtatattttacttatttctgatctaattattattatttctttttttctgtgtgttttaggcctacattgc

SEQ ID NO: 344854 - DNA, 532 bp, Homo sapiens
ttattctgccctgtgtcataattatatgtgtaaatgtctatgtttcaaagttctttgagtataaggactaaatttaatttgcttttataaccctctgtagtgcttggtataggaaaactatcagattgactttttaaatgaacgaaaaaattaatcaatcaattaaaaatggcaaaatatagaatcttagcatcctctctagttttttrttgccccctcccagctctgatcccttctctgcatgtctgtaccctgttctctgttctatatctgctgaccctccccacagcttaaccatcaggatcgcactgactgttttccactctggctaagggaaggacctagagataaggggagagagagattgaggtatttcttcccctccgctttctcccttcagtgtcattgctgtgctccagtgacttctacctgaaagccaacccttcttccaaagctggcactctcactggattccacttgtacagttttctcctcctgcctattcaggcctagagatggcagtggcttccca

SEQ ID NO: 344855 - DNA, 532 bp, Homo sapiens
ttattctgccctgtgtcataattatatgtgtaaatgtctatgtttcaaagttctttgagtataaggactaaatttaatttgcttttataaccctctgtagtgcttggtataggaaaactatcagattgactttttaaatgaacgaaaaaattaatcaatcaattaaaaatggcaaaatatagaatcttagcatcctctctagttttttattgccccctcccagctctgatcccttctctgcatgtctgtaccctgttctctgttctatatctgctgaccctccccacagcttaaccatcaggatcgcactgactgttttccactctggctaagggaaggacctagagataaggggagagagagattgaggtatttcttcccctccgctttctcccttcagtgtcattgctgtgctccagtgacttctacctgaaagccaacccttcttccaaagctggcactctcactggattccactygtacagttttctcctcctgcctattcaggcctagagatggcagtggcttccca

SEQ ID NO: 344856 - DNA, 539 bp, Homo sapiens
gtacgccatgtataaaattatatgcaggaagagtgtgtttctaaaatcacgcatattaaggaacattaagaaaatgataagcatagaaaatatttttcaaatgataaaaatgcctaactaggcagcaaagattttgagctatagacraccactctttccattctccatgatgccagtgttgttaggagaaaaggattctgcctcccaatcttatccataccccacccccaaagaaaggaaagaaaaaaacttatttttcattttctcttcacattttctaagacactagttgggaagcaatggacagaaacaaatcaagcaaccctccctttctttttttttccagctaattcagaatgaattgaatttacacaagcaacagtgcttaagcaaaaccgttcctatggttacacagaaggttttctaaatgtggcacaagatgcaggcagccaaaatgacttgactgtttatgttaaatatgaagtctattccctattgaaatttaatgatctactagctgcattttagcagcttgcacc

SEQ ID NO: 344857 - DNA, 450 bp, Homo sapiens
ttgctacataagggcgttccttgatgtctgtaagtaggaacctcccattcagcaaaaatagaaaatgaaaacaggctgcaggatgccactctctcgtatttacttatgtatttagttcaatttgactaatgcttattgagcttcttatgtagtctattagactatataagaaggactatggatataaagaaaaaatatatatttcytaaacacagatagccattggtcaagtagaaaagatgggcaatcaatactgccatgccaggtatttcttctcaatagcaatctatgtgtagttctataccatgtcaccatcctccacgaatataatcacgccaaacataagattttggttgtcaggaaaggatactgcaacatatggcttggactatctccataactcacgctcccccagtctctcctgtgcaggatcacccactgggagtttca

SEQ ID NO: 344858 - DNA, 581 bp, Homo sapiens
tttgcactggggacccatgcctttcaagctgactcatgtgcaagaagaggtcaaggatggagtcttkgttatgatttgtagttaacttaccctagtaaataggccagtctgttttcaacgactcaggtcaacaaggatagggatctggaactcggaagtattttacaatcaggttaaagatgagtttagatttctggagggatacacttcaaatagtgtttatgctccctggatatcacactcaggaaactgaattaggaagaaacctgcttccttccactgcctggctaaacagatgggacacaaaaaaaaatcctgatatagacccattcctgttgcagagaggcatagaatcctgagtagaaaatggaaaaagatttttccattttatgcattagcagagtttattttagtgatttgtttagttgttaatcttctctgtgatagtgtgatccctggaagggccaccaggtctcttgtgctcattttatccagtagggggacacaaaaatgtgctcaatcattgtcagctgctggaagcaataaatttagggaatgtctaaagaaagaaaaagaccctc

SEQ ID NO: 344859 - DNA, 572 bp, Homo sapiens
catatttgtccagagtcttggaccacgaagaaaataacacaagaggaaagaaaacagctaagttactgactttctgtggctaagacaaaggttctggaccaattgaaattcaaagtgaaatacatctggtgtatttaattcagtcagaatagattagatagattccattttctacatgctgataacacctakggaaggactgaggaatggaagatcaaacacacaacctccttataaacacacctctgtgcagcatttataatgtacacacaatagccagcatatctttcctcataaggtttggattgttgaaaaggtgttaaagcaatttacaatggggttgtgatttttatttgcagtgcaaataggaaaggacttttgatgcaaaaccttgtcaatgcagaagcaaggcattattttcatggtaggaaagataaagaaaaatagaatctgcatctccctttgaagaatctagccctagctgccaaggaaagcaaaataacagaacaaatagattcctgtgagaggataagcaccttttcgatcctgggagctttgtcatttttcaaaac

SEQ ID NO: 344860 - DNA, 576 bp, Homo sapiens
cctctgtacgtaccactacgaaagaggctgaattcagtgggctgagcagtgatgatctgcgggcctcatttccacaacatctcacaagataaagcccacagtcttggaattccagccagctaccaggagcagtgttgcacctacttggggaagaaatcaaggggtggggaggagcasgacgccatcttaactatttggaaaactcagccattccagcctgtgggtggaagggatctcccaacatagcacagctgctctaccaaaatgtagccaaactgcttctttaagtagttccccaatatgtttctcctcactgagtgggacccccaccctgaactaggaccccttagccacccctgctgatgttctctggccaaaagagatttgaaaacttcctaggacagagttctcagagggatgaatgggtcacaatctttcctgtttgggtgacttagccattccagcctccaggctttggagagcccaagctgactgggggtggaagttgtactccagtacagcacagctactctgtgaaagtgtgcccagactgcttctttaagcaggttcccaatc

SEQ ID NO: 344861 - DNA, 575 bp, Homo sapiens
tgcaaagaactgttcaaggataagtcaatttggcctccttatatgttaatccaggtttgtgtcatggcttcccaatgatgtgctggtaaacatttagcaagcagctctctggggaagaaaaaactaaataaaacaaacaaacaaaaaccccttctttgtagtgttgccaattcccttggtataaatacaaccacataactgatgtcaagataccagcttatacagagttggggagatctgtgcagctgcagatgattgtatagaatttccaccatacaaatacaataaatgtaaataatctcaagaacaaaaagtaaaatgtaaaataagtaggaattactgagttttgactattatctatcttttttatatgatttatctaattgtatggctatataatttaattttaataatgattgtgtttgacaatcagctcacaaaatttaaagctggttttyacgggccagtataagccagttccaacaccactctccttcaggccacattaaggattaagctttatcctaaatgcagtgtggaaagccattaggaggctttaaggagaggagagaatg

SEQ ID NO: 344862 - DNA, 575 bp, Homo sapiens
tgcaaagaactgttcaaggataagtcaatttggcctccttatatgttaatccaggtttgtgtcatggcttcccaatgatgtgctggtaaacatttagcaagcagctctctggggaagaaaaaactaaataaaacaaacaaacaaaaaccccttctttgtagtgttgccaattcccttggtataaatacaaccacataactgatgtcaagataccagcttatacagagttggggagatctgtgcagctgcagatgattgtatagaatttccaccatacaaatacaataaatgtaaataatctcaagaacaaaaagtaaaatgtaaaataagtaggaattactgagttttgactattatctatcttttttatatgatttatctaattgtatggctatataatttaattttaataatgattgtgtttgacaatcagctcacaaaatttaaagctggtttttacgggccagtataagccagttccaacaccacwctccttcaggccacattaaggattaagctttatcctaaatgcagtgtggaaagccattaggaggctttaaggagaggagagaatg

SEQ ID NO: 344863 - DNA, 575 bp, Homo sapiens
tgcaaagaactgttcaaggataagtcaatttggcctccttatatgttaatccaggtttgtgtcatggcttcccaatgatgtgctggtaaacatttagcaagcagctctctggggaagaaaaaactaaataaaacaaacaaacaaaaaccccttctttgtagtgttgccaattcccttggtataaatacaaccacataactgatgtcaagataccagcttatacagagttggggagatctgtgcagctgcagatgattgtatagaatttccaccatacaaatacaataaatgtaaataatctcaagaacaaaaagtaaaatgtaaaataagtaggaattactgagttttgactattatctatcttttttatatgatttatctaattgtatggctatataatttaattttaataatgattgtgtttgacaatcagctcacaaaatttaaagctggtttttacgggccagtataagccagttccaacaccactctccttcaggccacattamggattaagctttatcctaaatgcagtgtggaaagccattaggaggctttaaggagaggagagaatg

SEQ ID NO: 344864 - DNA, 581 bp, Homo sapiens
tatataccaaaataaatattaatcattctattataaagacacatgcacacatatgttcattgcagcactatccacaatagcaaaggcatgcaatcaatctaaaagtccatcaatgatagactggataaagaaaatgtggtatatacacaccatggaatactatgtaggcaaaaaaagaactaaatcatgtcctttgcaaggacatggatggagctaaaagccattattcttagcaaactgatatagtttggctctgtgtccccaaccaaatctcatcttgtaatttccatgtgttatgggagggaactggtgggagatgattgaattattgaattmcgggggcgggtctttcctgtgctgtgatagtgaatgggtctcatgagatctgatggttttaaaaatgggagtttccctgcacaagcttctgttccttgtggctgccatgtaagaagtaccttttgccttcagccatgattgtgaggcctccccagccacatggagctgtgagtccaataaacttatttcttttgtaaattgcccagtctcgggtatgtctttatcagcagtatgaaaacaaacta

SEQ ID NO: 344865 - DNA, 625 bp, Homo sapiens
tggtacagtagaaagctagaaagaaaataggacaattataatttcaggtgaagcttctgacacagcccttgatagtctagcttggtctggacttcttgttatgtgagaaaaataatarcctatttacttcaggcactgtgggtaggtttctttaacatgaagttaaaaatcatcctatctgatttagattttgcatacagctgaacttattcctaacatatatgttgggaaaacaaactctataaacacttaatatttagtaaatttttttaccaattcaagctgtattaaaactgtatgtttcaatatatattaatataaatgtaaatctgaagttctaagctagtctggctagtctgccctaccttgatgcaaatggaaacatttaccaagaagagtatggacttcaacttccaattcttaaaataaaccaaaattttcaatgtgtatgttaattagagctccaattcataatggactagttccatgaataggcagaataaacagttctattttaacacgaagtcacatgggaacattccctgattcttccacttttaataagcatttttttgttaatgtatgaggggtgttgtgtgtgagtctacaaatcaactgtacacag

SEQ ID NO: 344866 - DNA, 625 bp, Homo sapiens
tggtacagtagaaagctagaaagaaaataggacaattataatttcaggtgaagcttctgacacagcccttgatagtctagcttggtctggacttcttgttatgtgagaaaaataataacctatttacttcaggcactgtgggtaggtttctttaacatgaagttaaaaatcatcctatctgatttagattttgcatacagctgaacttattcctaacatatatgttgggaaaacaaactctataaacacttaatatttagtaaatttttttaccaattcaagctgtattaaaactgtatgtttcaatatatattaatataaatgtaartctgaagttctaagctagtctggctagtctgccctaccttgatgcaaatggaaacatttaccaagaagagtatggacttcaacttccaattcttaaaataaaccaaaattttcaatgtgtatgttaattagagctccaattcataatggactagttccatgaataggcagaataaacagttctattttaacacgaagtcacatgggaacattccctgattcttccacttttaataagcatttttttgttaatgtatgaggggtgttgtgtgtgagtctacaaatcaactgtacacag

SEQ ID NO: 344867 - DNA, 597 bp, Homo sapiens
agaaaagagaacctaaatatgtctaggggatataaatagtttctcagaagaggggacacatgaactgagtccaaagaaagtttaatagtttataagacaaatgcagcagtagaagtttgggggtagaattatgggcagagtgaaatgctagcaaatgcaaaaatgttcacgaatctgttggattccaagagccacaaacacttttgaatggtaagtgcttggtatgtgtggtggcatggcagcccaggagactagggaaccaggcaagggtcagctcatgarggtccctcacacttaggagtttagactttgtcatagagactgctagtctccaaactttggggacatgctacttattcataaaattattgagcacagattaaactttttttgaaaacctttggagcctgttacatgtatttctataaaatatgttgtaatagtcagggttctccggaaaaatagaaccaatagaatgaacatatattcaagaaagtaagaaagagagcgaatgagatttattttgacatgctacccattcataaaattattgagcagagattaaaatttttttgaaaatcttttgagcatgttaca

SEQ ID NO: 344868 - DNA, 603 bp, Homo sapiens
ctgctagtctccaaactttggggacatgctacttattcataaaattattgagcacagattaaactttttttgaaaacctttggagcctgttacatgtatttctataaaatatgttgtaatagtcagggttctccggaaaaatagaaccaatagaatgaacatatattcaagaaagtaagaaagagagcgaatgagatttattttgacatgctacccattcataaaattattgagcagagattaaaatttttttgaaaatcttttgagcatgttacatgtgtttctgtaaaatatgttgtaatactccagggttctccagaaaaatagaaccaatagaatgaacatatattcaagaaagtgagaaagagagcaagttagatttattttagggaattggctcacatgattgtggaggctagcaagtctgaaattacaggacagcccagaagcctggagactgagggaagagttgattttacatcaggactgtgaaggcagtctgctcaaagagttctctgtcccggaggaagtcagtctttttctcatgcacttcaactgattrgatgaggcctacccacgttattgagggtaatctgctttaat

SEQ ID NO: 344869 - DNA, 586 bp, Homo sapiens
ttctgcacatcttaaatgtgcatggcttgttccagccacttggagctaacctcttggcattgagaaatgaaggcttggaatacagatatgagttccagcctaggcatggtgagtcaaattaaatgtgatgacaatagaaatagggtgttattggagttataacacacagcaatatttaaattatatggtattaacaaaactggctaccatttatccagggtttattacgtacaaggcactatgctaaatgctttgcatacattatctcaactaaccttgaaaacaaccatagaagataagaattgtcatcttcctttttatggaccaaaaaattaatgcttaggrtggggcatggtggctcacacctgtaatcccagtactttgggaggctgagacaggaggacttcttgaggccaggagtttgagactaacgggcaatatagtgagacaccatctctacaaaaaacaaaaaaaagtagctggatatggtgtcaggtgcctgtagttgtagctaatgagctgtgattgcaccactgcctcccagcctgggcgacaaaatgagaccctgtctcaaaaataaataaat

SEQ ID NO: 344870 - DNA, 595 bp, Homo sapiens
ttaattccattaatatacttccaaaataaagcagcttcagattgttataaatacctctacccttcatttccacacagcagcccacataaaaactgaactaaaaaaatccattcattacccactgcactctgaattaatttcaagtcatcatttttattattagaaaatgtgatggccattttaccttgtaaggacaawcaacagcaattactgtacgttcaaatgccatggggatttctgtgaatctcagttttgctcaaggaagcattggctaggaatgagagaagataaaacaaatggacctttcttacttaaattccccactgagtaaatactaccacattaccagctctgaataattaacttccatccactgtgccaaaaatgatgcattgtatttcaaatgcatcttttcaataaatactccttgagagaaagcaccacagaaatcatgacagctgtcattgcactaaacttttacttactcaaatcattttctgaaagccatcattagaatcaaattaaaataaagctgaggttttctaaataaaactgtcaaagaagataaaagtttttacattgacagtttagcaac

SEQ ID NO: 344871 - DNA, 595 bp, Homo sapiens
ttaattccattaatatacttccaaaataaagcagcttcagattgttataaatacctctacccttcatttccacacagcagcccacataaaaactgaactaaaaaaatccattcattacccactgcactctgaattaatttcaagtcatcatttttattattagaaaatgtgatggccattttaccttgtaaggacaatcaacagcaattactgtacgttcaaatgccatggggatttctgtgaatctcagttttgctcaaggaagcattggctaggaatgagagaagataaaacaaatggacctttcttacttaaattccccactgagtaaatactaccacattaccagctctgaataattaacttccatccactgtgccaaaaaygatgcattgtatttcaaatgcatcttttcaataaatactccttgagagaaagcaccacagaaatcatgacagctgtcattgcactaaacttttacttactcaaatcattttctgaaagccatcattagaatcaaattaaaataaagctgaggttttctaaataaaactgtcaaagaagataaaagtttttacattgacagtttagcaac

SEQ ID NO: 344872 - DNA, 566 bp, Homo sapiens
tcactacgatatatggattctttggaaccaatttaagaatgatgtaaaaattttattttaaattgccaatatttatgtcatgccagaaattatatcatttataagtagttaaaattaagacaaaagattttagatgtcaacttaaacatttgtgaaagggcacataatttgtaaatgttcttttagggcatacatggggaaaaattgttgaagacttctgtctttcactgtaagatattagattgaacatctccatgtatgtttattatttctatccctgcgacaccagcagcttttttcttctactcgcaagccacccttcttttttaattgctccatgagggttattgtgtatgcaggtccagaagaaaacaacaaaccatgtggtgcctgcccggcagttaacaaggctcatgccccagcacactggctcatttctgyacaacagccccttactacatgaacctcaatttcatgcctgagtaaaattacaaatcaccacatgtcatggtccttcatggtcacttgcacagagttgacatcgtgaacataaaacttgtaaatac

SEQ ID NO: 344873 - DNA, 566 bp, Homo sapiens
gtgctggcatagcgatggtaggctacgagcagaaagggagcacgcagcagacaaacacactcattcacagaatggttcaagacaatatgtaaaacttcaaaatgctttcgggaatttttcaaggacctagtctacctgaaagtttgttggttaataaccaaacaaaaataaagacaaaagcaaaattagaaactggatattagtcctgttgtgatcccatttgtgcctctaggctagtaaggcctakgtatttgagacaatgtatgcattcatatattgtaatgcatctatattatatgtaaaaatgtattttgataaattcataaatgtttctcacattctttggttttaccttatcagccagatgttcatttgttgaatagatattcactgaatatctgttgggctgggagaaaatgatgaacaagacatacaaagtccttgggtttttttgtttgtttgtttgttttgttttttttcagacagaggttcactcttgttgcccagggtggagtgcagtggcgtgatcttggcttactgcaacttctgcttcctgggttcaagtg

SEQ ID NO: 344874 - DNA, 618 bp, Homo sapiens
aacagcatttgaaggaatgtcatttttactttggatctgagaaaaataaatgcaaacacctgtcttttttttttttcttttttgaggcagagtctcactctgttgccaggctggagtgcagtggcatgatctcagctcactgcaaattctgcctcccatgttcaagcaattctcctgcctcagcctcccgagtagctgggattacaggtgcacgccaccaagcctggctaatttttgtatttttagtagagacggggtttcaccatgttggccaggatggtctccatctcttgatctcatgatcagcctgcctcagcctccctaagtgctgggattacaggcrtgagccaccatgcacggccaaacacacaagtcttatagtataaaggggagaatcggaggtccacttcctagtcacccaccaacctcattaatatctttctgttatctggtatctcacctttccaagatatgtttattcccttcatctggttatcagtaaatctagatcaataattaattggcaattaattgattccaaaatagaaaaattatagcaaaagtaatgaaagctatttttgaacatgaggcctctttgctcctcagcaccatcctcta

SEQ ID NO: 344875 - DNA, 606 bp, Homo sapiens
tgcatagtaaatgtcaaaccaaatgtcagattctgttttgttttttgtttttttttttcagaaatttatgggrtctttattttttataatagataaaaatagcttgcattccattccatatgcatttgaaaaccatgtgggatgggagttttcacctcccctctcctatcaccaatgacccctggtaatctctggttctggtctcctaccgccaatggatgtgccggctcactcaggcctcacctccgtgactggtttcctttctctgctctgggccaccacaagagcagaacatggtcccttcaactgttatgatcttatttcactttgtccactataacagttgaaaagcaatgtcttatttcaatttaaatttatattaatattgggaatcattttttcagcattattttctacttgtgtaaattgtttgatctttgcctattttaaagaaatatcttactcttgaagtattatcttatatattattatgagtttcttacaaattaaatatattactaacattttgtcagtatgagtgcaatttgcctttaatgttgtttatggtatatatgacatataaaaagtttaatttttcatgagtta

SEQ ID NO: 344876 - DNA, 499 bp, Homo sapiens
ttgtgctatcaaatagtaggacttattccttctttgtattttttgtacctattaaccatccccacttcccccaaagcctcccaacacccttcccagcccctggtaaacatccttctactccctatgtcattaagtttagttgttgtgatttttagatcccacaaataaatgagaacatgyaatgtttgtctttctattcctggcttattttatgtaacataatgatctctagctccatccatgttgttgcaaatgacaggatctcattcttttttatggctgaatagtactccattgtgtgtatgtaccatatacatattttacttaaacccaaacattcctgcacttcttggatttacactttagtagggaattttaaaaagcaaaagaaaacaataaaaaacaagaaatatttaagatatttagcattatattttgaaaaaaaatgctaaggagaaaaataaagccaagggagatgagaaattgtagacgtaaagat

SEQ ID NO: 344877 - DNA, 562 bp, Homo sapiens
gcccctggtaaacatccttctactccctatgtcattaagtttagttgttgtgatttttagatcccacaaataaatgagaacatgcaatgtttgtctttctrttcctggcttattttatgtaacataatgatctctagctccatccatgttgttgcaaatgacaggatctcattcttttttatggctgaatagtactccattgtgtgtatgtaccatatacatattttacttaaacccaaacattcctgcacttcttggatttacactttagtagggaattttaaaaagcaaaagaaaacaataaaaaacaagaaatatttaagatatttagcattatattttgaaaaaaaatgctaaggagaaaaataaagccaagggagatgagaaattgtagacgtaaagatagagggtggttgtgtaaagcatccaaggaaggtctctgtgagagaagggcttgaaggaggtgagagaatgagccacaggacatttggggaaaacacagtccaggcagatgaatgagagaacttgacgatgcagagaagagaaaagtggagcagaagac

SEQ ID NO: 344878 - DNA, 470 bp, Homo sapiens
acgacaacaataataacaaaatagaaagaaagaaaaaaaaatgatcactttaatctcaataaagtttcaaaccatttgaattctgaaaagctcttgagaggaagaaagcagccaggtgcagaggcttatgcctgtaattccaggatttgggcatcaggaggtcgaaccatggagtttgagatcagcttgggcaacagggtgagacccggtctctacaaaatatttttttaaaaattagctggrtgtggtgttaaatgcctgtagttccggctacttgggaggctgaggtgggaggattgcttgaattcacaaggttgagaagttgagactgcagttaacctcgatccataattgcaccactgcactccagcctaggcgacagagcaacagagcaagaaaaaaaaaaaatgaaaagacaagttacccactgggagaaaatattttgaaattacatacctgaaagaggatta

SEQ ID NO: 344879 - DNA, 511 bp, Homo sapiens
ttaccattgggagttattgtgtaaagtgtggtacctctctgcattgtttcctacaactgcatgtcagtatagttatttcataacaaaaatgttaattttaagaagakttagggggctgaaagatttcttttaaaaaatcgtggctgggcgcagtggctcacacctgtaatcccagcactttgggaggccaaggtgggcggatcacctgaggtcaggagttcgagaccagcctcaacatggagaaaccccatctctacaaaattagccaggcatggtggtgcatgcctgtaatcccagctactcgggaggctgaggcaggagaattgcttgaacctgggaggcagaggttgcggggaggcagaggttgcggtgagccaagatcatgccattgcactccagcctcagcaacaagagtgaaattccgtctcaaaaaaacaaaacaaaacaaaacaaaaaacttcaactctacctatcagaactgcaactagacccattccaacagaaaatatag

SEQ ID NO: 344880 - DNA, 574 bp, Homo sapiens
actttttattccctaatcacttcccttctcccccacgaaattttaataccgtagatacgctacatatctgtttatgcagtgttgtctgccaaccattgcaataaataagttttatttatttcaccactccttcctacctctgctaagaaccattttttacccatggggcaatattaatcttcatagaggatttatgctttctgaaaaaaaaagctcagataatattgtcttttttcttcttttgggggaaaggcagtttgatataataaaaagattagagacttgggagtcagagagatgggggttctgtttttgccattaccagctgtgtgatcttgggaaaacayctcagaatcttatttcataagcagtaaaatgtaggaaagtatacttaactcataaggctgtttggagattaaatttagaattcctgtgcgatctttggcatagtgacactcacataagtataattccctagtagttactctaggtcatattggtcaactcatcaatttctcaatgccaattaccttctgtcttcttgaaatcgtattattcctggattaattcacac

SEQ ID NO: 344881 - DNA, 421 bp, Homo sapiens
ggagtgttaaaaatccagatccatcgcattgctttgaagacaatttcaaagtatgtcttacctagctgtatatactattttgtaaatgctgggcagtaaatggttaattcatagccatagcattttcccataacattttgtgctacaattaaggtatcaggtaaaacgcattgaaagtctttcagaaattgatgcacaaagcagaaaacacattaataggagtacaatagacaattttagagatagcagatcatctttcccatcttgcttgagaaacagatgctgaataaccatcayattacacaaagtgtccttcagaaacactaaatgtaattaggagtagctgttccttggagaagaaaatagcataataataagagggttggtggcacatatgaaatggaagaattacataatcctc

SEQ ID NO: 344882 - DNA, 416 bp, Homo sapiens
ctaaggaaaacaataaactatctcctgccttaaaaaacagccacttgaaatcacaacaattatttcatgctaggtcacaaytttaatttttaatttttattttatgttattttttattattttactttaagtcctgggatacatgtgcagaacatgcaggtttgttacataggtatatgtgtgtcataccggtttgctgctcctctctacccatcatataggttttaagccccgcatgcattagttgtttgtcctgatgctctactcccctcgtacccccaccccctgacaggcctccgtttgtgttgttcccctccctgtgtccatgtattctcaatgttcaattcccacttatgagtgagaacatatgatgtttggttttctgttcctgcattagtttgctgaggatgatgact

SEQ ID NO: 344883 - DNA, 416 bp, Homo sapiens
ctaaggaaaacaataaactatctcctgccttaaaaaacagccacttgaaatcacaacaattatttcatgctaggtcacaactttaatttttaatttttattttatgttattttttattattttactttaagtcctgggatacatgtgcagaacatgcaggtttgttacataggtatatgtgtgtcataccggtttgctgctcctctctacccatcatmtaggttttaagccccgcatgcattagttgtttgtcctgatgctctactcccctcgtacccccaccccctgacaggcctccgtttgtgttgttcccctccctgtgtccatgtattctcaatgttcaattcccacttatgagtgagaacatatgatgtttggttttctgttcctgcattagtttgctgaggatgatgact

SEQ ID NO: 344884 - DNA, 559 bp, Homo sapiens
gcattttcaatgctatttctgttggcacatttttatttcattcccaggagaggaaagcagcatgctctgcccactgcagacacatttgccatttacaagcctgtaagtgttatttcaccacttatttctctctgtgtattagagtgtgagttctttccctatttaaaatcaaatactgtcctggattgctcctccaatatgtcaaattttaaagatgaaagtcaactaagatttttgctatttgagtatgtggcaatagacatcagaaacagattatgtagggagatgaatgyaatttttttctttttttttttttttttacaaaaagcttgaagggctatactgaagtgctcattatctaaacatattgttagagatcaagtggtttctgtcacagggcttaaacttctttaaattgcaacctaatctgcatagaaaaagaaggtgactttttgtatgacattggacttcagaccttggtctttctgtttaagtatacacaaaatttaagattaatcacttttttgcatggcttttcaaatgtgagaactcaactccc

SEQ ID NO: 344885 - DNA, 517 bp, Homo sapiens
ttcattgcagcagcatttttcatgatagcgaagatacagaaacaatctaaatgtctgtcagtgggtgaatggacaaggaaattatacatatatatgtgtaatacacacatacttcattaggtaggtatgattggtctttgatgaccaaatcaacctttaacccctctcygcttcctagaggtgggggtggggctgaaagttttaaccctccaatcacatagttggcagccctggcaactatcctgtggttatttggagtactcagtgatcagccatctcattagcatacaaaaagacatatcactttgtagattccaaggattttagcagctgtgtgccaggaaccagggacagagaccaaatatatatttatacttgatatatatatcaagtatacatacacacacttattataacaaactattattcagcctgaacaaagaaagaaatcctaccttttgcaacaacatggatgaatctggaggagattttgctaattaaatgtcagatataagaa

SEQ ID NO: 344886 - DNA, 584 bp, Homo sapiens
tggccaatatttctggcttttgaacgttaccaaaggtaacctcccagatgctcagagaagaaaaattcaagatggttcacagaggggaaaagaaccaacaaatggtaaaggtcacacagatatcaaaccagaaaggaatcatttcccaagccaggactcaacacaggccaccactgtaaaatggcaaaaccccagctgctgagccacagcattggacagtctacactgttcctttcagaaggagtctagagtagctcattttgagcttgcaaaggcttccaactacttaagacaayttttagagctaactatgacctcctagggacataaaacaagatggagacctcatccagttgttttgtttgtttcagggacctgcagcaaagtttgttactgaccaggctactgggttgtcacgagcagtgagcttatggggtcctaagcccatgttctatcctaaggtacacctcttcatgacagtacaacagagaaagaaaaattcatagcacaaaataacccagatttgctacagcttatgagtagcctcagaatttcttttcacattaaccaaaactttacaaagg

SEQ ID NO: 344887 - DNA, 584 bp, Homo sapiens
tggccaatatttctggcttttgaacgttaccaaaggtaacctcccagatgctcagagaagaaaaattcaagatggttcacagaggggaaaagaaccaacaaatggtaaaggtcacacagatatcaaaccagaaaggaatcatttcccaagccaggactcaacacaggccaccactgtaaaatggcaaaaccccagctgctgagccacagcattggacagtctacactgttcctttcagaaggagtctagagtagctcattttgagcttgcaaaggcttccaactacttaagacaacttttagagctaactatgacctcctagggacataaaacaagatggagacctcatccagttgttttgtttgtttcagggacctgcagcaaagtttgttactgaccaggctactgggttgtcacgagcagtgagcttatggggtcctaagcccatgttctatcctaaggtacacytcttcatgacagtacaacagagaaagaaaaattcatagcacaaaataacccagatttgctacagcttatgagtagcctcagaatttcttttcacattaaccaaaactttacaaagg

SEQ ID NO: 344888 - DNA, 615 bp, Homo sapiens
cctggcctgattttcacataataaaatattttaaaaatttgtcttcaaccattaaaaaatgtgaaaatcaggacgggtgtggtggctcatgcttacaatcccaackctttgggaggctgagtgagccaggagtattgcttgaactcaggagtttcagaccagcctgggcaacacagtgagacctctcctctgctaaaaataaaaaaaaaaattacccagatgtggtggcacatatctgcagtcccagctactcaggaggctgaggcgggaagtttgcttgagcccaggagtttgagactgcagtgagctgtgatcatgtcacttcactccagcctgggtgacagagcaagactgtctatttattttaaaaataaaataataaaatataaaataaaataaaataaaaatgtaaaaaccagattcagaccatatgttattaggcagtgggcaggattcagtccagtggccatagtttgctgacccctgtcttaagtgaagatattgataagccccaaacctgaatctctcctaaagtcaagactttcaaagcagattattaatgagaaatgccctgtgccagatgcccctgtggtatgaacaaggtcaggttcctca

SEQ ID NO: 344889 - DNA, 604 bp, Homo sapiens
tgtactttatagattataaggatgccataattaaatcatttcgtccacatgtaggagactgcggtaaaaaaaatgtgagcagcatctactttgtaattaacatgaacacctctsaagttattttgctacaagtgtagcattattataataattagaatacatagtatataattataataatttgacattataattgtaatattatcctctctggatacaaaaattaacattggtggtggaagggagaggctgagacgggacccatcagggccaaggaggcagttcctgaggctggtacccctgagacatcccttgctctcaccccatcttccagctgctgcatctttggtggaggcctgcagaggcaccagcggcaccccaacagccagcgggcttctgaccccagctgcaggtctaggcaatttcctttctcatcagtgcttatttgaatttgctaacacgcagccatttcgactcttaattagtgatctgtcctttcccatttaatatatgaagaaagcgccaatgagtagaaaaattgccaaaaggcaagcactaagggagaaacaaggcagataactggatgtttgtcctaattttctta

SEQ ID NO: 344890 - DNA, 489 bp, Homo sapiens
acgtcctcacccaacctccctggtagacttcagacagcactgggtgaggggcttatcctctttgcacccccgttgtcctcatcagcacttagagcccttgaggacttggtctccagccagatttcaggctcagtttgtyttatctatctgcttggccggtcccctagccccctgtccctacggcgaactctctgactgcagtgcagtgataccagccccttggcagtgggttgatttgcgtgcccacctgcccccaaccttatttatgtgttggagtccccagtacctcagattgtggccttacttggagataggatcgctacagaaggaatttggttaaagtgaggtctttagggtgggcaatccaggatgactgatatactcacaaaaactagaaatttgagcacaaatatgtatagagggaagaggatgtgaagacgcagggagaaatcagccatctaccagctgaggagagagtcctggaacaaa

SEQ ID NO: 344891 - DNA, 591 bp, Homo sapiens
tgaaaaacaaaataagtatcaacaatattccaagcaaaagttaaaaagtttgcttcagatttctgagttctgcccatttagttcttgttttgcttgattgttgggaataggcccccaaatctggccataaactggccctacacctggccacaaacaaaatctctgcagcactgtgacatgttcatgatggccatgatgcccacactgaaggttgtgggtttaccagaatgagggcaaggaacacctggmccacccagggcggaaaaccacttaaggcattcctaagccacaaacaatagcatgagcgatctgagccttaaggacatgttcctgctgcagataactagccagagcccatccctttgttttggcccatccctttgtttcccataaggaatgcttttagttaatctttaatctataatctatagaaacgatggttatcactggcttgctgtcaataaatatgtgggtaaaactctgttcatggctctcagctctgaaggctgtcagccccctgatttcccactccacactctatatttctgtgtgtgtgtctttaattcctctagagccactgggctagggtct

SEQ ID NO: 344892 - DNA, 570 bp, Homo sapiens
tctttaaaagtggagtttggcaactgaactatattaaaattaatatgtcttagcacaacataaaaataaaaaaaaacactaagctgcagcattaatataatcaactatggcatccatccttctcttcagtgtacgtctatggattgtgaaattttaagaaatctcatctatcatggactatgactcaaacaaaacaaaacaaaacccagaacaaactaggacaagattagatcactgtcattgcatatcaaaatgtcttgaaaaactagccacctcatatccagatgaacaactacrggatgaataaacaagcaataaaatgatgatacttatttcagataatgatagtaatggtcacacagcactattctaagtccttacattatcaggacaattctatgaggtacatgctaatagcattttagagataaggaaaaggaggcacagaaaattgatggagttacccagggctctataattagcaagaggcagagccagtacaaggaaacatttagtgtattctgaggctatgtatattagcatttcaatggaagtttgtcctcaacattt

SEQ ID NO: 344893 - DNA, 560 bp, Homo sapiens
cattgcgttagttcttttaatatatggtgtatagtgacayctataggagactgtgtgtaatgaatggcattcatttaaaatagggattctatgggtgtggtaagcttttagtgtgaggaaagtgcattcaatggaaacaggaaaatataaattcagcattaacacttaaagtgtgtaagctctcccttaagaattaaagatgcctggaatatattccataatagaaatagcttcaaatgactgggaaaattgatggagaagagaacaatttccatggtaacaatataatgggaatttcttttttttaaggaagagtaaagtaaaaaacagaaatataaagtgagtgccacaaaggagactacacctggcagcaagtgatagggtagaaatagctctttttttcaaatatctgagtaaaacactatttaattctctgtatcagtaacaatcataaaacaattgtggttataattatagttacatcttgtgctatgccatatcaattatatttcccaactaacatcattgtgtcacagacatgcctgaaaagctgaggccac

SEQ ID NO: 344894 - DNA, 604 bp, Homo sapiens
gtctcaaaaaaaaaaaaatattataagcgtcwctatgagattttagaaagatgtactctattagataggtaggtcttcaatagagctcgtttcttatctggattagtgatttcttggtggagcccattaacaaataaaagtgacaaagcgttttatatgtcgtggactgcagcatggatagtcccgaaaaaaaagcacacctacttgataaacactttttacgttctaggtggcataacaactaagtgcaaaggttggtagattcaaatttttgtcctaccaattagttgcttaagcttttcagttttcttttgcaaagcatcatttaaaagacgcagtacaaatttttgaaatcttagtaggagtttctgcacatcaacaggcatccctggatgggcccaattttgaacccctcatttttaaatgcactttttaaagtacagtgttcttcatctggtatgttccacattgtaatcacatgttggtgattacaattctaaattatctttagtaagattttaccatttttgtaagtatttgcagcttccaaggcctaatatgtatacatattgtgaaaggcaggcatactcagaaggtggagtac

SEQ ID NO: 344895 - DNA, 604 bp, Homo sapiens
gtctcaaaaaaaaaaaaatattataagcgtctctatgagattttagaaagatgtactctattagataggtaggtcttcaatagagctcgtttcttatctggattagtgatttcttggtggagcccattaacaaataraagtgacaaagcgttttatatgtcgtggactgcagcatggatagtcccgaaaaaaaagcacacctacttgataaacactttttacgttctaggtggcataacaactaagtgcaaaggttggtagattcaaatttttgtcctaccaattagttgcttaagcttttcagttttcttttgcaaagcatcatttaaaagacgcagtacaaatttttgaaatcttagtaggagtttctgcacatcaacaggcatccctggatgggcccaattttgaacccctcatttttaaatgcactttttaaagtacagtgttcttcatctggtatgttccacattgtaatcacatgttggtgattacaattctaaattatctttagtaagattttaccatttttgtaagtatttgcagcttccaaggcctaatatgtatacatattgtgaaaggcaggcatactcagaaggtggagtac

SEQ ID NO: 344896 - DNA, 343 bp, Homo sapiens
aagcctcagtaatggcagatgcccctccccgcaccaagctagagcatcccaggtcgacttcagactgctgtgctggcagtgagaatttaaagccagtggttcttagtttgctgggctccctgggagtgggacccgctgaatgagatcacttggctccctggcttcagccccctttccagggcagtgaatggttctttctggctggggttccaggcaccgctggggtatgaaggaaaaaaaaaacatcstgtgtctagctcaatgtctgccaaaatagccacccatttttgtgcttgaaacccaggaccgtggtggcgtaggcacacaaaggaatctcctgatc

SEQ ID NO: 344897 - DNA, 464 bp, Homo sapiens
atttttttccccgtgtattctcttaacaaatggtagttattgagtagtttcttgaatgaagagcttgagacctaagtttaccatgacatatcttcatgacattgacagacctactcaatctgagtctgattttctaccaaattttgtaaggataatatgaaataaaatatattaaagcacttttcaagctggaaagtacttttcaaatataagtaagtatactcttatgctatttcagccttctggtatccagtgtttttcttggggygattttctaccaattacaataaaggaaccctttaatatttctcctaatagatatcatctggccagattacttagagcttcccagacttcaataggaaaccttttttcccccaatatattatacagttatttattatacaataaaaataatatgcaaaatgtggcctgtcctttgaggggttgctattttgttctag

SEQ ID NO: 344898 - DNA, 594 bp, Homo sapiens
gaagttaactacataagtccactacacctaattataaaagatgaaggttttaaaatttgcataattgcaactgttggtaggggtcgctaacatatttgcattatctacttatgttccataccaactcttttaagcaccactttttaaaaagtcagctatgtcagatgcttgtaggtgtcagaacatcataacctacaacgcaggcaatgcctttttctacatacacccctgggttccaatggctttctaaaatcaatttmtatgttttgatactattccatcttccatcttttaaaaataaagtctttctatccatatctgcatgtagcaagagaagtgcataatgactaaatcaagtcccaagtattcatttatgccttttacaagtaatcattccattagctgtagttcataataattaacatttacaaagattgcattcacacagtgaaagtgcacaggtagtcaagaataggggttggtattcatcataagggcctttatactttggaggctaaaagaatacctagatcttaggaaaatggatatcaaatatccttttgtagctacctactgtttaaatgtctaaataat

SEQ ID NO: 344899 - DNA, 594 bp, Homo sapiens
gaagttaactacataagtccactacacctaattataaaagatgaaggttttaaaatttgcataattgcaactgttggtaggggtcgctaacatatttgcattatctacttatgttccataccaactcttttaagcaccactttttaaaaagtcagctatgtcagatgcttgtaggtgtcagaacatcataacctacaacgcaggcaatgcctttttctacatacacccctgggttccaatggctttctaaaatcaatttatatgttttgatactattccatcttccatcttttaaaaataaagtctttctatccatatctgcatgtagcaagagaagtgcataatgactaaatcaagtcccaagtattcatttatgccttttacaagtaatcattccattagctgtagttcataataattaacatttacaaagattgcattcacacagtgaaagtgcasaggtagtcaagaataggggttggtattcatcataagggcctttatactttggaggctaaaagaatacctagatcttaggaaaatggatatcaaatatccttttgtagctacctactgtttaaatgtctaaataat

SEQ ID NO: 344900 - DNA, 653 bp, Homo sapiens
tgctagtttttgaactcttgataaatttggtgacactgtggctgatccactttatccctgctttgtttgggtatggtcttgctctctgaggcaccacttccccattcccattgacttcaggaaaggttcattaggcctgatctctctcagtcttttttcttcctcccctttcttctctcttctccacgctggactctggggctctttattcctcaggtcccctgtaggttaagcctaagctcttatcctctcttctctttaactcacagwcagcattggcatctgtattcagtaaccctccatatgaataaataaaagcaggtaccagcctcccaaatctccaggtctggctggacaaacagcttgagatgcagctcctgtcacagtttcatgtcaccttggagcaaaaaacttcccaaggcttttgagatacatctgacagtaactttaattccccagtgtttaagttttccagactcctacaaaccctctatataacctacaaataattaatatctaaagaaagccaatttatggacctagatgtcacatcaaggcagaaggaatgaacatatatgtgcatgggataattaagggtttctttatgcttttcaaaaggtctgatctgttggtagacaacgagggtctgagcc

SEQ ID NO: 344901 - DNA, 448 bp, Homo sapiens
agcttcctgtaaccaacaattaaagtcatgggagtttgtaacagaagggaagaagttcaaggtttttcctagagaaaaacttttatttaaggtatagaagaaatgaaacagaaaaaaaaaaaacccaaccctagcaacacattataaccaccactaaragaagcgtttgaaatgtagtaaaatgtaatgaatttgttatggtacttcaatacctaacagtaataacactaaccaaaattcatataagttgcgagaattcattgatcttgatttgaagttgaatatcctgaattcacagtcgtgtttaatattaatttcctctggatccaccaaatgggtacttattcagtccacacctcagttaacccgagtctaaaataaagataggatgtgaacatcatcttcctttttattagctatctgtgtagtggagtttgctgaagaaaaa

SEQ ID NO: 344902 - DNA, 448 bp, Homo sapiens
agcttcctgtaaccaacaattaaagtcatgggagtttgtaacagaagggaagaagttcaaggtttttcctagagaaaaacttttatttaaggtatagaagaaatgaaacagaaaaaaaaaaaacccaaccctagcaacacattataaccaccactaaaagaagcgtttgaaatgtagtaaaatgtaatgaatttgttatggtacttcaatacctaacagtaataacactaaccaaaattcatataagttgcgagaattcattgatcttgatttgaagttgaatatcctgaattcacagtcgtgtttaatattaatttcctctggatccaccaaatggktacttattcagtccacacctcagttaacccgagtctaaaataaagataggatgtgaacatcatcttcctttttattagctatctgtgtagtggagtttgctgaagaaaaa

SEQ ID NO: 344903 - DNA, 448 bp, Homo sapiens
agcttcctgtaaccaacaattaaagtcatgggagtttgtaacagaagggaagaagttcaaggtttttcctagagaaaaacttttatttaaggtatagaagaaatgaaacagaaaaaaaaaaaacccaaccctagcaacacattataaccaccactaaaagaagcgtttgaaatgtagtaaaatgtaatgaatttgttatggtacttcaatacctaacagtaataacactaaccaaaattcatataagttgcgagaattcattgatcttgatttgaagttgaatatcctgaattcacagtcgtgtttaatattaatttcctctggatccaccaaatgggtacttattcagtccacacctcagttaamccgagtctaaaataaagataggatgtgaacatcatcttcctttttattagctatctgtgtagtggagtttgctgaagaaaaa

SEQ ID NO: 344904 - DNA, 588 bp, Homo sapiens
gtctattgagggagtttggtaagacaaaatatatgaacacacagttttctacaaaattattattgcaaaaggttagtactgttgatattattaatagtaagaaatgggatataatgtgtatccacccacagaggatgggttaaacaatggtacagccacttagttgaatactattcaggttttattttctgttktgtgttttgaagatttttcttttgagaaagagtctcactatgttgtccaggctggagtgtatggtgcaatctcagctcacagcaacctctgcctcccaggttcaagtgattctcatgcctcagccaccccagtagctgggattacaggcatgtaccaccacatctggctaatttttgtatttttagtagagacgggatttcaccatgttgaccaggctggtctcaaactcctggcctcaagtgatatgcccactttggcctcccaaagtgctgggattacaagtgtgagtcactgcacctggctgagagctttctttttttcttttttttttttttgagatgggggtctcactctgttgtccaggctggagtgcagtggtgtgatcatggctca

SEQ ID NO: 344905 - DNA, 574 bp, Homo sapiens
atttgcatatgtttcacacatttatagagttgtctccataggagcagttttaggcacatagagcaccccttttctaattgaagtgtccctgaggagcaaaggatagaagagttaggcggtacagtttgtccccaccaggtgcccccacagttcctttatggcaagagttcatggtgtctgagatactggacacagttacgaaggtgaamacagtagatgagtggtgaggggtgtatgtgggagcggtactcggggaggtggctgggcaggaaacataggaacaccaaatctcacctccagtccacataggagacacccaagagtggaaagttttagtctcatatgtgtggacatagtttttagaaggcaataggaaagcaggtgctacacaaagaacagaagctccttagaatgttagctgcccacgcactgaaaggggacccttagagaaatatccacaactgtctatttctaagtctgtattcttttcctgcatgctgcaaaacttgctttgttctcaagttttctcaaaaacaaggtaaaaattctaactctacagtttctaggagacaac

SEQ ID NO: 344906 - DNA, 605 bp, Homo sapiens
aaaggccttactatcaaactcttaattaaaattcaatcattccagtacagatgattgtaataaacatgattatttacagaaagagaataaagacagaaactctgggaaagaaacccacatcagtaatgagaccagaatatatcttatatactagaacacagaatttaaaggcatataaaaagaccaacaaattttcaggtgcatccatttattcatatccatttattcagtcactgtcctgaaagtgaattcctgggtctgcaaatgtggctgctccagattctgcctagtgggagtgtttttatctccaattttctttgtgggtacatcctgggaagggcaggatactttgwgctactgataatctttatttttttctgtacaccaagcatagaaaaagtttgatttgagggggaaaatatatctctgacgataaaacatgacatttttctgcataactgtagtaggtacctgattttattgatgagattcttttggttgtaacacagacacacagatgctgtcttgggtagcttatcttgggatcctcccaccattcggagccattagagctaaatttctaaacttcttttacttggcagcaa

SEQ ID NO: 344907 - DNA, 605 bp, Homo sapiens
aaaggccttactatcaaactcttaattaaaattcaatcattccagtacagatgattgtaataaacatgattatttacagaaagagaataaagacagaaactctgggaaagaaacccacatcagtaatgagaccagaatatatcttatatactagaacacagaatttaaaggcatataaaaagaccaacaaattttcaggtgcatccatttattcatatccatttattcagtcactgtcctgaaagtgaattcctgggtctgcaaatgtggctgctccagattctgcctagtgggagtgtttttatctccaattttctttgtgggtacatcctgggaagggcaggatactttgagctactgataatctttatttttttctgtacaccaagcatagaaaaagtttgatttgagggggaaaatatatctctgacgataaaacatgacatttttctgcataactgtagtaggtacctgattttattgatgagattcttttggttgtaacasagacacacagatgctgtcttgggtagcttatcttgggatcctcccaccattcggagccattagagctaaatttctaaacttcttttacttggcagcaa

SEQ ID NO: 344908 - DNA, 605 bp, Homo sapiens
aaaggccttactatcaaactcttaattaaaattcaatcattccagtacagatgattgtaataaacatgattatttacagaaagagaataaagacagaaactctgggaaagaaacccacatcagtaatgagaccagaatatatcttatatactagaacacagaatttaaaggcatataaaaagaccaacaaattttcaggtgcatccatttattcatatccatttattcagtcactgtcctgaaagtgaattcctgggtctgcaaatgtggctgctccagattctgcctagtgggagtgtttttatctccaattttctttgtgggtacatcctgggaagggcaggatactttgagctactgataatctttatttttttctgtacaccaagcatagaaaaagtttgatttgagggggaaaatatatctctgacgataaaacatgacatttttctgcataactgtagtaggtacctgattttattgatgagattcttttggttgtaacacagacacasagatgctgtcttgggtagcttatcttgggatcctcccaccattcggagccattagagctaaatttctaaacttcttttacttggcagcaa

SEQ ID NO: 344909 - DNA, 285 bp, Homo sapiens
actggggagtgtattgcctattcccctttacaatttttgtttaaaagaagaaaacgcattttgtcatataagtcagatagttgtatatcttccttgaatttcatgaaataatttggataacaaaatttcacaagtgtgatgtttcaaattacactggtaagattaatttaattatttgcatttgtatgctgcaacaagctaactgcttcaggatagtataaaatcatcmccatttctaacatcatgaccatcaatatttatagagcacacccatcatgttttatc

SEQ ID NO: 344910 - DNA, 499 bp, Homo sapiens
ctgcaacaagctaactgcttcaggatagtataaaatcatccccatttctaacatcatgaccatcaatatttatagagcacacccatcatgttttatcacatcactatcatattttataaaatatacaatgccatctattgtaaggtgtatcatctctttttgtgtcactagagaaaatgcttccaatcagtgctaaaatgtcytatgctaaaatgtcataagctgtaaaatagtaaaatacatcatgaattttagggatattgaaatgcaaaaaaagggcatttaaaaatcaatctgatacaactccataaatccaaatatgctttcataattatttcataaatagtaattgtcctgtgggaaaaattattgaatgcacacacacacacacacacacacacacacacacacatacacaatttagggcatttatgagatgatatgtagtactttggtctagttacctttccagttacctggtaaatagattattctgtat

SEQ ID NO: 344911 - DNA, 499 bp, Homo sapiens
ctgcaacaagctaactgcttcaggatagtataaaatcatccccatttctaacatcatgaccatcaatatttatagagcacacccatcatgttttatcacatcactatcatattttataaaatatacaatgccatctattgtaaggtgtatcatctctttttgtgtcactagagaaaatgcttccaatcagtgctaaaatgtcttatgctaaaatgtcataagctgtaaaatagtaaaatacatcatgaattttagggatattgaaatgcaaaaaaagggcatttaaaaatcaatctgatacaactccataaatccaaatatgctttcataattatttcataaatwgtaattgtcctgtgggaaaaattattgaatgcacacacacacacacacacacacacacacacacacatacacaatttagggcatttatgagatgatatgtagtactttggtctagttacctttccagttacctggtaaatagattattctgtat

SEQ ID NO: 344912 - DNA, 582 bp, Homo sapiens
actcaaaaagccagagtgcccactttcctccaaatgactgcgacacctctccagcaagggtttggaactgggctgaggctgagatggctgaaatgacacaagtaggcttcagaatgtggattaaaaacgaacttcactgaactaaaggagcacgttgtaacccaatgcaaggaagctgaaaatcatgataaaacaatgcaggagctgaacagccaaaatagccagtatagatagaaatgtgactgacctgatagagctgaaaaacacacctcagcaacttcacaattcaatcacaagtattaacagcagaatagaccaagtggggaaaagaatctcagagcttgaagtctgtccccctgaaataagacagacaagaatagagaaaaaagwctgaaaaggaagggaaaaaaactcgcagaaatatgagattatgtaaagagactgaatctatgactgattagggtacctgaaaaagatgggaagaatgaaaccaatttgcaaatatttttaaaaccaagagtaaataatattgggaccttgaaatcagaattttaacaagtcaaatttttctgacccccatga

SEQ ID NO: 344913 - DNA, 549 bp, Homo sapiens
gatctttgagtaaaccacgcccaattttgttttaaatgttagaaactaactcaaagcaagacaagctggctgaacaaagtaattctatttgttggattcattttgtagtctcctgattcattatctctaaatcagacttttatagtacattccttatatcattctctgcaaagtagtctcattaccatttgatacttattatcatgtatttcttctcattgaaagcaaacttgaagcacattttcaagaaggcatagttaagcagctattacgagttactgttgtcaaaggaatcccttatttctggtagaagtaccatttttatatttggggatgaactcgtgctgyattagagactgtgtctccactgcagccagattacattgtatggatatcactagaattgtgcatgtcgaaggagtaggtgctttgctgggaagaacttcagttaaatacaggacctagagatgctcaagcgtacttggccattgcggtggtagacagtgaaatgtgttttcacaagtttctataacaaagctggggactctg

SEQ ID NO: 344914 - DNA, 559 bp, Homo sapiens
ttcatgtataatagttacataagagatacacgttttaaaattgctaatagcaattgcttacagtgagtgattattactacagggtgatactccttttttgtgcatttaaatgaaaaaaacatgctgttagacacctagaatgtacagtatgaggaatgggctgattacagagtggrctaattggtgtttgtttgccccgcagccttggggaaatgtccttacaataaaatacactatggaagcattgcactctctcgttccatggaatttgcctcttttgaggacacacgattagatgtataaatgggatccttgattttggagatctgttttgccttccagctgtgcctgcttattaagccctggtaagtgcatgctttcctggctctgttccttaaaaggttccaccctatagccaataatccaatcaagaaacaggtctttaacaacatatccataggtaacaatatatccatatgtctgcttttcctggccatctgaagggaacttttactcatgtcattttaaaataaaaagtgaattatctattttgtttcat

SEQ ID NO: 344915 - DNA, 559 bp, Homo sapiens
ttcatgtataatagttacataagagatacacgttttaaaattgctaatagcaattgcttacagtgagtgattattactacagggtgatactccttttttgtgcatttaaatgaaaaaaacatgctgttagacacctagaatgtacagtatgaggaatgggctgattacagagtgggctaattggtgtttgtttgccccgcagccttggggaaatgtccttacaataaaatacactatggaagcattgcactctctcgttccatggaatttgcctcttttgaggacacacgattagatgtataaatgggatccttgrttttggagatctgttttgccttccagctgtgcctgcttattaagccctggtaagtgcatgctttcctggctctgttccttaaaaggttccaccctatagccaataatccaatcaagaaacaggtctttaacaacatatccataggtaacaatatatccatatgtctgcttttcctggccatctgaagggaacttttactcatgtcattttaaaataaaaagtgaattatctattttgtttcat

SEQ ID NO: 344916 - DNA, 561 bp, Homo sapiens
aattctttgcaagtgaggaatgcaaaagaactttcttaatctgataaagaatgccttttaaaagctacatctttaaaaaatattataattaaaataatataattaaattaatataattataattatataattaatgataaatttattgaaagattttccatagagatcaagaacaagagaaggatgcacgctatcactgcctgcagaaaacattgtactaaaatcccagcaactaaagaaatcaagaaaaaaaagaaagagaaaaagaaacaaaaaagaagtcaaggacaaaaagacattagttcacaaagcawgaaattagttttgcagatggcatctttgtgtatgcagaacatccagactctttggcagggtagtatatgtagcaaagtaactatatataaggtaaatatacaaaaattaattgcatttctaaatgctagcaataagcatatgggaagtgaaaatttgtcaataatataaaaaagtgaaacaaggaaaaattcagttaaagtatgcaagacatcgaacctacacatattaacaagataaattaaagaa

SEQ ID NO: 344917 - DNA, 612 bp, Homo sapiens
tacaaaggcttttggaggacacagggagttgaactcaaaaatttagatcacttcgtatgttgaatcccatggagtgaggttggggagatgacccctggggagacacacattttstgttggtgtcctcaataacaacccaaaccacagtagaggtagtgtgggtgtatagattttaaagaacccaaatatactcttgcagctcatacaaatatgtttagagataaatccatattagatataagtagcccttttactcatatgcttgggatttcactgattctcgtaataccacccaaaggtagaattttaactcacacagggatcaaactagtgttaggaatatgatgcacagtattttagaataataatattttagaggtgacaatttagagatcatctagtccacgcactgcaattaaaagttagaaaaccattgcacagagaggttaagtgctttgtaaaaggttgcacatcaagttaaccactaatcatggaatcattaaaaaagaaaaagtcatcactaatttaaatttatagttggaaaatttagaactggatttggcttttgaaattaccttgtcatcccttctcattctgtggataaaataacta

SEQ ID NO: 344918 - DNA, 612 bp, Homo sapiens
tacaaaggcttttggaggacacagggagttgaactcaaaaatttagatcacttcgtatgttgaatcccatggagtgaggttggggagatgacccctggggagacacacattttgtgttgstgtcctcaataacaacccaaaccacagtagaggtagtgtgggtgtatagattttaaagaacccaaatatactcttgcagctcatacaaatatgtttagagataaatccatattagatataagtagcccttttactcatatgcttgggatttcactgattctcgtaataccacccaaaggtagaattttaactcacacagggatcaaactagtgttaggaatatgatgcacagtattttagaataataatattttagaggtgacaatttagagatcatctagtccacgcactgcaattaaaagttagaaaaccattgcacagagaggttaagtgctttgtaaaaggttgcacatcaagttaaccactaatcatggaatcattaaaaaagaaaaagtcatcactaatttaaatttatagttggaaaatttagaactggatttggcttttgaaattaccttgtcatcccttctcattctgtggataaaataacta

SEQ ID NO: 344919 - DNA, 612 bp, Homo sapiens
tacaaaggcttttggaggacacagggagttgaactcaaaaatttagatcacttcgtatgttgaatcccatggagtgaggttggggagatgacccctggggagacacacattttgtgttggtgtcctcaataacaamccaaaccacagtagaggtagtgtgggtgtatagattttaaagaacccaaatatactcttgcagctcatacaaatatgtttagagataaatccatattagatataagtagcccttttactcatatgcttgggatttcactgattctcgtaataccacccaaaggtagaattttaactcacacagggatcaaactagtgttaggaatatgatgcacagtattttagaataataatattttagaggtgacaatttagagatcatctagtccacgcactgcaattaaaagttagaaaaccattgcacagagaggttaagtgctttgtaaaaggttgcacatcaagttaaccactaatcatggaatcattaaaaaagaaaaagtcatcactaatttaaatttatagttggaaaatttagaactggatttggcttttgaaattaccttgtcatcccttctcattctgtggataaaataacta

SEQ ID NO: 344920 - DNA, 612 bp, Homo sapiens
tacaaaggcttttggaggacacagggagttgaactcaaaaatttagatcacttcgtatgttgaatcccatggagtgaggttggggagatgacccctggggagacacacattttgtgttggtgtcctcaataacaacccaaacmacagtagaggtagtgtgggtgtatagattttaaagaacccaaatatactcttgcagctcatacaaatatgtttagagataaatccatattagatataagtagcccttttactcatatgcttgggatttcactgattctcgtaataccacccaaaggtagaattttaactcacacagggatcaaactagtgttaggaatatgatgcacagtattttagaataataatattttagaggtgacaatttagagatcatctagtccacgcactgcaattaaaagttagaaaaccattgcacagagaggttaagtgctttgtaaaaggttgcacatcaagttaaccactaatcatggaatcattaaaaaagaaaaagtcatcactaatttaaatttatagttggaaaatttagaactggatttggcttttgaaattaccttgtcatcccttctcattctgtggataaaataacta

SEQ ID NO: 344921 - DNA, 576 bp, Homo sapiens
taaaaacctggcacctacttcatttgacttcatataggaggaaaggcccatttagaaaatatggtctacatatctagaaataaataaataaataaaaggagtaggcctcttatattacaaaattttccaaagtcatagtagatctctrcggaacaaagttagaaagttaaatatcatgatgggactaaagaattaggtcacaatttgttaaaacaaaaacaaaacccaagcaattcattggtttagtctggtaacatagtctgcaaaatgagaggattaaagttgtgttcttacctaatcctgcacatgtgttgattagccaaaactcagggactgtgctattactgatcattatacttgcctaacagaaaggctgttaggttttcatttactgtacaccataatcacctgcagaatttgttaaaatcacagatgctcaaatgttaccccaaacttaccatattgggatctctgggggaggtggtcatttatattttgaactagctttcccaggtgattttgatgctcaccttgtcttatcatatggaagactctctaataaggagcatggaagca

SEQ ID NO: 344922 - DNA, 490 bp, Homo sapiens
taggaatatagactggggtccaaatccagactgtcacacatagcaccatmttccttcttcatctttctcctccttatttcttatttctaccactatttccattatcttctctcagaacttgtaaaaagtaacagaatctggaattttccagtaggaggtaatatgatagacatttctctaattggaggatactgaagttaaactcggcccaaacggctttcatgttaaacagcttctgcagggtctcagagctgaaagtgtccagttgtatccacttatttattttgattgtattagtttctattctacagaatactttttaagtaacatttaaggtcatttatcttttggttaagtagtcaggaagcaagagagagagaagaaggagaatctaatgttcttttcctactttatcatattcttctgatagcatcagaatcaccgtgtcagtcataataaacacctgatagcccaagattcagattattta

SEQ ID NO: 344923 - DNA, 490 bp, Homo sapiens
taggaatatagactggggtccaaatccagactgtcacacatagcaccatcttccttcttcatctttctcctccttatttcttatttctaccactatttccattatcttctctcagaacttgtaaaaagtaacagaatctggaattttccagtaggaggtaatatgatagacatttctctaattggaggatactgaagttaaactcggcccaaacggctttcatgttaaacagcttctgcagggtctcagagctgaaagtgtccagttgtatccacttatttattttgattgtattagtttctattctacasaatactttttaagtaacatttaaggtcatttatcttttggttaagtagtcaggaagcaagagagagagaagaaggagaatctaatgttcttttcctactttatcatattcttctgatagcatcagaatcaccgtgtcagtcataataaacacctgatagcccaagattcagattattta

SEQ ID NO: 344924 - DNA, 498 bp, Homo sapiens
aatgagtacttaatgaatctctatgccacctcttamacattagctctctcaagtgaacatctggcaagtattaagttacaattaattcatgattgaattctgtacacgtgtctgaagcgctaatattccatgtaattagagggagatttgtgtcctttagataccggatatgcaggtggtagaattagtacttgttgaaaaaatgttaaagtattacttttattcttgtctaaagaggccattctgtgtgaacagagtggcagtatataaataaatatatatattttatatatatatatatttctgacgtgtgtgtgtgtgtgtatatatatatatatatatatatatatatatatatatacacaatgtatattagatgaactgggtgcttgcccacctgccataataaataaaaacttgagaggtaactggatcatatatacttttaaaaagatatatatatatatatctttcaaaacaagggacatgcacacacat

SEQ ID NO: 344925 - DNA, 498 bp, Homo sapiens
aatgagtacttaatgaatctctatgccacctcttacacattagctctctcaagtgaacatctggcaagtattaagttacaattaattcatgattgaattctgtacacgtgtctgaagcgctaatattccatgtaattagagggagatttgtgtcctttagataccggatatgcaggtggtagaattagtacttgttgaaaaaatgttaaagtattacttttattcttgtctaaagaggccattctgtgtgaacagagtggcagtatataaataaatatatatattttatatatatatatatttctgacgtgtgtgtgtgtgtgtatatatatatatatatatatatatatatatatatatacacaatgtatattagatgaactgggtgcttgcccacctgccataataaataaaaacttgagaggtaactggatcatakatacttttaaaaagatatatatatatatatctttcaaaacaagggacatgcacacacat

SEQ ID NO: 344926 - DNA, 552 bp, Homo sapiens
ttaaatttggcttaaacggtggaaacccatcaggagcttttccgaacgaatggtactttaaatgaggtgccctaagtagtataggggaccaattttattggcaaatgcaatatcttaatgcctcaaatgagtgcccagcatgccggaagtcctcgtaaatcatttatctcccgtagccctaagaaaaactaaagcaacatatgggccacaccccaagtcttcattatttctctgattctactgaatcatgatgtcttagttaagaaaatgctcattcatatgttattaaaacaaattttgcctaaaatactccaagtatagtaatagaaaagtcataaagtatttcattctacttatttgactaataaaacagcaaaaagtacatattaaataaggtrtctaaatccattagtgaatatcttatcactgtcaccaataaacaaaacaaaccttgaaagcatatatttgatgatgtgttcaataatatagactgaactatgtttaatgctaccaaatgtgaagaataatagtaatatttatgaaacttatttt

SEQ ID NO: 344927 - DNA, 532 bp, Homo sapiens
aattcaatgaaatcagggttctgccaagattttatgtaaataaatgggcctcatggtcaaaatttaaaaatcragtataccctacaccccttttggaactttataatgagctttataataacggtgctgagaaggtatatagtaaagaactctatctacatatgtttaatatatatttagcgcattttaatttctatcataattcatcagatctcacatgtcatttatcatgtgtctttagtgatagattttttaaagacacaaactccatattaaatgtacatgcacaattattagcacgccgtaatatttaattattcatagacttacacagcacttttttcttcaatggaaatatataagttttagtatagacctttttcacattctgaatcaaagaatcatttgtaagttttttcctaccacatgatatcattttatcaagttcatttctgtgcaccttatcaaagattgacgttttgggattactttgagtcattttttctaccaaattctcattctgcaagctttg

SEQ ID NO: 344928 - DNA, 532 bp, Homo sapiens
aattcaatgaaatcagggttctgccaagattttatgtaaataaatgggcctcatggtcaaaatttaaaaatcgagtataccctacaccccttttggaactttataatgagctttataataacggtgctgagaaggtatatagtaaagaactctatctacatatgtttaatatatatttakcgcattttaatttctatcataattcatcagatctcacatgtcatttatcatgtgtctttagtgatagattttttaaagacacaaactccatattaaatgtacatgcacaattattagcacgccgtaatatttaattattcatagacttacacagcacttttttcttcaatggaaatatataagttttagtatagacctttttcacattctgaatcaaagaatcatttgtaagttttttcctaccacatgatatcattttatcaagttcatttctgtgcaccttatcaaagattgacgttttgggattactttgagtcattttttctaccaaattctcattctgcaagctttg

SEQ ID NO: 344929 - DNA, 532 bp, Homo sapiens
aattcaatgaaatcagggttctgccaagattttatgtaaataaatgggcctcatggtcaaaatttaaaaatcgagtataccctacaccccttttggaactttataatgagctttataataacggtgctgagaaggtatatagtaaagaactctatctacatatgtttaatatatatttagygcattttaatttctatcataattcatcagatctcacatgtcatttatcatgtgtctttagtgatagattttttaaagacacaaactccatattaaatgtacatgcacaattattagcacgccgtaatatttaattattcatagacttacacagcacttttttcttcaatggaaatatataagttttagtatagacctttttcacattctgaatcaaagaatcatttgtaagttttttcctaccacatgatatcattttatcaagttcatttctgtgcaccttatcaaagattgacgttttgggattactttgagtcattttttctaccaaattctcattctgcaagctttg

SEQ ID NO: 344930 - DNA, 532 bp, Homo sapiens
aattcaatgaaatcagggttctgccaagattttatgtaaataaatgggcctcatggtcaaaatttaaaaatcgagtataccctacaccccttttggaactttataatgagctttataataacggtgctgagaaggtatatagtaaagaactctatctacatatgtttaatatatatttagcgcattttaatttctatcataattcatcagatctcacatgtcatttatcatgtgtctttagtgatagattttttaaagamacaaactccatattaaatgtacatgcacaattattagcacgccgtaatatttaattattcatagacttacacagcacttttttcttcaatggaaatatataagttttagtatagacctttttcacattctgaatcaaagaatcatttgtaagttttttcctaccacatgatatcattttatcaagttcatttctgtgcaccttatcaaagattgacgttttgggattactttgagtcattttttctaccaaattctcattctgcaagctttg

SEQ ID NO: 344931 - DNA, 543 bp, Homo sapiens
tttttgattcagtgaaaccaaagttttctctaccctctaacagaatccaacagcattactgtcactgcttctaacaaagaggctctgaatgtgagacctggcaaaagtgatttttctccccctcaatataatctttcacttggaaaagaagtgcctagatctcaggtagctttgttcataaaaaatggaagatcatcacagactgtttattttgtctgatttatactgccttctcatgcaatatacaaacttaattgcaggggccacttttagactattgactctatctcattgatctgatgtttgtgataacaytgtcaccactttttaaaaaattatgtgactttagaataaggttaaaaattttgtatgacaaataccctatccttagacttctttttctccatttccctattaatatctacttaatctttctaataaaatttatcagattctaaaattatgcctttggggcttttattgaattttcattaaatatatacactaatttaagtggaaaattataataccgtctttaaatag

SEQ ID NO: 344932 - DNA, 543 bp, Homo sapiens
tttttgattcagtgaaaccaaagttttctctaccctctaacagaatccaacagcattactgtcactgcttctaacaaagaggctctgaatgtgagacctggcaaaagtgatttttctccccctcaatataatctttcacttggaaaagaagtgcctagatctcaggtagctttgttcataaaaaatggaagatcatcacagactgtttattttgtctgatttatactgccttctcatgcaatatacaaacttaattgcaggggccacttttagactattgactctatctcattgatctgatgtttgtgataacactgtcaccactttttaaaaaattatgtractttagaataaggttaaaaattttgtatgacaaataccctatccttagacttctttttctccatttccctattaatatctacttaatctttctaataaaatttatcagattctaaaattatgcctttggggcttttattgaattttcattaaatatatacactaatttaagtggaaaattataataccgtctttaaatag

SEQ ID NO: 344933 - DNA, 543 bp, Homo sapiens
tttttgattcagtgaaaccaaagttttctctaccctctaacagaatccaacagcattactgtcactgcttctaacaaagaggctctgaatgtgagacctggcaaaagtgatttttctccccctcaatataatctttcacttggaaaagaagtgcctagatctcaggtagctttgttcataaaaaatggaagatcatcacagactgtttattttgtctgatttatactgccttctcatgcaatatacaaacttaattgcaggggccacttttagactattgactctatctcattgatctgatgtttgtgataacactgtcaccactttttaaaaaattatgtgactttagaataaggttaaaaattttgtatgacaaataccctatccttagwcttctttttctccatttccctattaatatctacttaatctttctaataaaatttatcagattctaaaattatgcctttggggcttttattgaattttcattaaatatatacactaatttaagtggaaaattataataccgtctttaaatag

SEQ ID NO: 344934 - DNA, 507 bp, Homo sapiens
gggaagctccaatgggtatataagctcccctgaaatatgaattcttccagagctgcaaaaatcccaagtgaaaaaaattcaaaaacaaacagctacaaggttaaaagagttaaatagagatttcacctgttgcccatttcagggaaaaagagttggaatcctgacaaagcagaagcacttgataaacaactgtgtattgaaactctaggaaagctactttaggagtgaagactacatcctggactaaaatagtctccctaggacagaagaaaaacaaacaaacaaacaaaaaaacaaaatagacccactcttgcaaagcttacagttaarcctgcaggtttcctgtctggcaattactgagtagattctattgaatcaactcttccgaagataacaacaacttctatttaaaactccaaaccaaacaaatagaaaacctacctgaaggcactgggttactaaaaacaggcagaaaactgcagggatgtaggccgttggaagaaggga

SEQ ID NO: 344935 - DNA, 576 bp, Homo sapiens
aaaaagaaatagcagactcaaattcacaacctctacctggtgaatcagaagggtgcgaggaagcagtacgtgtctctaggataaatgaagttaaaatcacacagttaaagctaaaaggatttgtagcaataaaacatcaactagagctcattcattacaaattcagttgatgaatgtaaagaaaaacatccaacagaccacttgtgtggtagaatggacacaagtgacaagggaactggtgggctagaagattgaggccaggaattctcatagaatgtggcagaaatgaaaagattrggatagctaaagaaaggttaagaattatagaaaacaaattccacattttaacatccgtctactaggtgttccagaagaaatgaatccttaaataaataataaaagttcccagaactaaggaaagacatttcatagattgaaaatactcaccaagaattaaaaaaaaaaaaaatctgcacatagaaatttcaggatctcaatggggcaagaaagtcagaaaatcatccagacaaaaaattcacctacaaaggaagaagagtcagattatcatcagccatt

SEQ ID NO: 344936 - DNA, 553 bp, Homo sapiens
acatctttgcaattatgaactgagctatgacaaccatatgtatgccggagtctttctgatataatggcttattttcctctgggtagatacccagtagtgtgattgctggatcaaatggtagatctagttttatttcttcawaaaatctccacactgctttccatagaagttgtgctaatttacattccttcccagcaaagtgtaagtgttcccttttcaccacatccactccaacatctactatttttgactttttaataatggtcattttggctggggtaaggtagtatctcactgtggtttcaatttgcatttccctgatgattggtgacactgagcatcttttccatatgttgttggccatttgcatgtcttcttttgaaaaatgttcgtgtcattttcccactttttgatgagattatttgtatttttttcttagtaatttgagttccttgtagattctgaatattagtcctttgtcagatgtttagtttgcaaatattatgaaatcttgatcaattatagtaaataggaaattttttgctacttaaac

SEQ ID NO: 344937 - DNA, 491 bp, Homo sapiens
ccagtaagagtagaaattggttcaatcatcccagagggcaatttgtcaaggtatatcaaatattataaaaataacctctgcattttgctttttgggaattacttttctaggaatctagactactctgaaatgtacaatattatttataatattaaaatttgaagaacctaaatgtcyaacaaaaagagaattattaaatgagtcattgtacagacatgccataggctaccagaaagccccacatcatgattaagaagaatattttaatgacatggtaaagggagaagaggaaagaataataccattctaggtgcagtgtgatctcaattgtgaagaaaaaatttcaaagaaaaagtctggaaagcaatacaccaaagttgtaataataggttactgctgaatggtgagcttataatttatatatgtccttccttttaacattttcggaattattcaaaatagatgggattcaaaattcaacatattacatc

SEQ ID NO: 344938 - DNA, 434 bp, Homo sapiens
catcattcagactaagctctaggccagggatagcaaactgttttcacctcaaattttctctccaatcaattgatagtggctgcctggagcatggcggtcagaagaaaggattgtgaggcacattcacactcatagttagaggctgccgtgcttgactgatgatgtctgaggtgagcacaggttgggagggaggggagaggcagcctttacaccacatagtggtctctatcactctgtgctctggacactgctcatcttcacaccctccctgattttacttctagaaggatgacctatgttttccaagttgrggaatgaaatatgtttttgaatgggagagtgagagacagaaggcagggagaccagtaagaaaacttcagcagatactgatcatgttgggattcttttaaacttgatgcttagagaggttcagc

SEQ ID NO: 344939 - DNA, 511 bp, Homo sapiens
tttaggttgattgcatatctttgctattgtgaattgtgctgtgataaacatacacatgcagtatataatgacttcttttcattgctggatcaaattgtaggtttacttttagttcttagagaagtatccatactgttttccatagaggttgtactaaattcccatcygcagtgtataagtgtttccttttcaccacacctataccaacatctattgtttttcactttttcatgatggccattctggctgggttaaggtggtatctcattctggttttaatttgcattttcccaatgattgaacattttttccataagtttgttggccatttgtatgtcctcttctgagaagtgtctctatatgtttcttgcctactttttaatgggatcatttgtttttttccttgctgatttgaattccttgtagattctggttattagtcctctgttagatgcatagtttgcaaatattttctcccattctgtaggttgtgtgtttactgtggttattt

SEQ ID NO: 344940 - DNA, 511 bp, Homo sapiens
tttaggttgattgcatatctttgctattgtgaattgtgctgtgataaacatacacatgcagtatataatgacttcttttcattgctggatcaaattgtaggtttacttttagttcttagagaagtatccatactgttttccatagaggttgtactaaattcccatccgcagtgtataagtgtttccttttcaccacacctataccaacatctaytgtttttcactttttcatgatggccattctggctgggttaaggtggtatctcattctggttttaatttgcattttcccaatgattgaacattttttccataagtttgttggccatttgtatgtcctcttctgagaagtgtctctatatgtttcttgcctactttttaatgggatcatttgtttttttccttgctgatttgaattccttgtagattctggttattagtcctctgttagatgcatagtttgcaaatattttctcccattctgtaggttgtgtgtttactgtggttattt

SEQ ID NO: 344941 - DNA, 511 bp, Homo sapiens
tttaggttgattgcatatctttgctattgtgaattgtgctgtgataaacatacacatgcagtatataatgacttcttttcattgctggatcaaattgtaggtttacttttagttcttagagaagtatccatactgttttccatagaggttgtactaaattcccatccgcagtgtataagtgtttccttttcaccacacctataccaacatctattgtttttcactttttcatratggccattctggctgggttaaggtggtatctcattctggttttaatttgcattttcccaatgattgaacattttttccataagtttgttggccatttgtatgtcctcttctgagaagtgtctctatatgtttcttgcctactttttaatgggatcatttgtttttttccttgctgatttgaattccttgtagattctggttattagtcctctgttagatgcatagtttgcaaatattttctcccattctgtaggttgtgtgtttactgtggttattt

SEQ ID NO: 344942 - DNA, 511 bp, Homo sapiens
tttaggttgattgcatatctttgctattgtgaattgtgctgtgataaacatacacatgcagtatataatgacttcttttcattgctggatcaaattgtaggtttacttttagttcttagagaagtatccatactgttttccatagaggttgtactaaattcccatccgcagtgtataagtgtttccttttcaccacacctataccaacatctattgtttttcactttttcatgatggccattctggctgggttaaggtggtatctcattctggttttaatttgcattttcccaatgattgaacattttttccataagtttgttggccatttgtatgtcytcttctgagaagtgtctctatatgtttcttgcctactttttaatgggatcatttgtttttttccttgctgatttgaattccttgtagattctggttattagtcctctgttagatgcatagtttgcaaatattttctcccattctgtaggttgtgtgtttactgtggttattt

SEQ ID NO: 344943 - DNA, 581 bp, Homo sapiens
atctatatgaaatcactggcctattacttctcaaacctggattaaatatgtggaggactctgcactttcattagaaactttattatcttatttctaatgggactagtgtttctcacaagccaggacagcaccttcttcacctctgtgaaatgtccaaaataatgagcactcttggctgtagaataaaaggaaaactaggaaaaaaagagaaaggggtgattattgttgttgatgaagcactcagtgcaagattttctgacttattgtaacaacatctgatcatatctctccctagattaaaacactagttgactccctcttcaccyacaaaattaagcttagtttccccattatggaacacaaagccatgcagagtttggatgctggctacccctttagcctcattctctgctactgttgcataatctcattgccctggttgtaagtcatggtcacttgtgagactgtgatgtctccctagggtatgttgacattgagaaaggactggtagagatatattcatcacatccaaggaggacccatcaaataaattacctcttatagctactttctgctttaaa

SEQ ID NO: 344944 - DNA, 566 bp, Homo sapiens
ggagagatagcattagaagaaatacataatgtagatgacaagttgatgatgggtgcagcaaaccaccatggagtgtgtataactatgtaacacgttctgaacgttctgaacatgtatcccagaacttaaagtataataaaaaaaaaataagaaatcagttttagttaggtacgatttacacagaataaaattcaccagttttaagtatataatttgatagatttcaatggctgcctagagttgagtaacgaccaccaccacaatcaagacatagaacacccgcatcatcttgaaaaattcccttgcacccktttgggatcatccctgtctccacttccagctcttggcaaccactgatctgatttctgttcctattttgcctttcacaaaatgtcatataaatgaaatcacagacatgtaaccttttgtagctggtttctgctacttagtatgaagcttttaagactcattcaagtgtggcatatatcagtagttcatatttttttattgctgagtattccgttaaaaggatgtaccagtttgtttacccatttactagttgaaga

SEQ ID NO: 344945 - DNA, 573 bp, Homo sapiens
gccagtgacccctccatcaataggggtcattagaccacaagaacctgttgctgccctgagaaggacaaggtgaaggggggtgggccagcccaaacccagaaagaggaaccaagatcacagaaagagacaagtatgagccatcctttaagagacactgggcatataggaggggcattcagtgtggtggtcaaggctgcaggtgcagaaggaaagaataaatcttccaaargacctaccagtttgcaccattttataccaaaaaaaaaaaaagtaacctggaaaattcatcttgcatccagtgttatccaaagtgaatcccatttttctctgtggcttctcttgctctttctaaaatgcattaattcaactatgttttaatgaaagagtggaacatgcacatcttgagtaaactgacagttacaactcaaaatgatgagtaaacactggggacatctattccatctggcctgggagtttgggggatgagaaggctttctctgggggccagtgcagcacaggagtcccagaagagaccacagccaaggaccatagtgtgcatgagagatttcattt

SEQ ID NO: 344946 - DNA, 635 bp, Homo sapiens
agtagtaaaaatctgcaaaatgtgcaaaattcagcttaacttaaaatcactggccactatgagagccatggccttgacccaagattcctcataattaaccacaactagtggatcaatagattatttcagaaactagctgtaaaagcttatgcttaaatagttcttaaaatataagccttattgttgtataatattttgcttccacagggcctaaacattgttatctcttgtggaaggagattttgaatcrtaaatctatagacacatagttttggcattcattaattttaattcctgcaaattttgtagaacaatgatccaaactttttgaacccaaaaacataatttagatgggatcaatatgatttttaaaaagtgaaacaaacaaaacacttcttctgagttcaatatcagaatcatctttaaaggtgaaatataagtaatggggaaaaaataaagatacaaccaaacctagttgaggtcaaaaaaaggcagccatgctgaaaaagcatgccattcttgagtgacatgatcacatcttgctttttaatatggttagaagtgcattcttgaataactggttgaaaaactaaagttaatctgattctttaaagtctatataaaacactattgcc

SEQ ID NO: 344947 - DNA, 555 bp, Homo sapiens
agcaagcaaaagttggagttaggagatgataacaaatataccacactcttaagaaactaaaatggagaaagaaggaaggagaaggagagggatatccagagttatcagaggcgtgtgtgtgtgtgtgtgtgtgtgcacgtgtgtgtatttgtctggggccatatttataatctgaaaaaaagaactagtacacrgggaataattaaatatcaacatgacaagggcagacattgtgcaagtccagttgtcagagttgactgacaggtgtatagatagctcacctcacctttacatcggggtggaaagccacagtggaccttaggacaaagggacggttccagaagttcctattatagggatacagccagaccctcagcacctccacaggggatggatgttatccagagccctgaagtcacccatgaagacagcaggcacctcccgatcttttctttgcggtagagggcctgagtgaaacactgacaaaccacaaatttgtttcgtgctttgtttttgtggtgggggtgtttttccttgggaagtggcacattttgc

SEQ ID NO: 344948 - DNA, 472 bp, Homo sapiens
ctgccagcagcttccttggctagaagactcagtgggttctcttttagctggggttattcatctcagatagcagagcaggtttggcattctcacaaggaaaaaaaaaggctctgtattaaggagacatgctttggcctgctcattggtgggtggggctggtggagtggactgatgatgatcttyaggaaggctcaggtttctcaagcaggagagaaaaccacatgtagtaggaagtggactttctcccaaataccacttaggaaaaaaaaagtgatttcctgaaaggaaagctaatggaaaatgaacttaaatatgtaaatttattcagtgtgtatcttttattgagaagctactgagttccagcaatggcatttaggattgaatttcaagagatgatctttcaattggtttatggtggtccagcagtctcccagctctgtctctgtggcaagcctgaaaagaggagtcacag

SEQ ID NO: 344949 - DNA, 661 bp, Homo sapiens
aggaattgtaaacaattaataagtcttgtgaacacgactatgttaacaaatcatcagaaaaaaacaattagcaaattaagaaaaatagcatccaggtctggcaattttgtgagtgttctattctggagaaaataaaaattagtacaggtcttctaaaaagcaatacgataacatatatcaagaattataaatcattccaaacatggaatttatcctgaagagatcattaaaaagaataaaatgaatctatacaggatgatgttctttgtagcattaactcgaatgagaaaaaaagtgaaacaccccagctatccaacattagggacaataatactgtggaacgatctgcagtgataaccatgaagactaaatgaaaagcacaatgcacttatgatataattataggggaaagaagcaaacattttaaaagttcattatgactacctaaaatctaagtggattcagataaagtaartaaaaggagatgacacaaaatgattttgaatgatttcttttctttttccaaattttagtgtcatcacattcttccctttaaaaaatttaactagcagattatttgcatgatttgacatctagtcttcttgcatgagcaaaagggagagtaaatataaaagaacagaaaatcagacctcaataatat

SEQ ID NO: 344950 - DNA, 590 bp, Homo sapiens
catgatgttagactctgcatgacccatggttaacctggaccatacacagactactcaccagtcatcagggagtcgaacaagcgtttctgtggaccaaactgatgatgtttttccacacctgccaaagggaattgggttcccacatgcacttgggaaaaagaaaaaaccacattgaggtgccagatatcgggtgaacatgctcccaataattcaatgtatttcacataggttcttttctatttccctaagtataaaccagtctgagaaataaagggaaagagaacaaaaaagagaattttaaagcttggtatcagagtgaaacctcacatttcaacaggttccctgatgccacccaagccccaaaaccagcaagtttttagtagtgattttcaaagsggaaggagtgtaggaatagggtgtgagtcacagagatcacatgctccacaaggtaataaaatattgcaaggcaaatggaggcaggggaagctcacaggaccagggtgaaattaaaattgctaatgaagttttgtgcacacattgtcattaataacatcttatcaggagacatggtttgagagcaaacaaccgat

SEQ ID NO: 344951 - DNA, 515 bp, Homo sapiens
ttcccacatgcacttgggaaaaagaaaaaaccacattgaggtgccagatatcgggtgaacatgctcccaataattcaatgtatttcacataggttcttttctatttccctaagtataaaccagtctgagaaataaagggaaagagaacaaaaaagagaattttaaagcttggtatcagagtgaaacctcacatttcaacaggttccctgatgccacccaagccccaaaaccagcaagtttttagtagtgattttcaaagcggaaggagtgtaggaatagggtgtgagtcacagagatcacatgctccacaaggtaataaaatattgcaaggcaaatggaggcaggggamgctcacaggaccagggtgaaattaaaattgctaatgaagttttgtgcacacattgtcattaataacatcttatcaggagacatggtttgagagcaaacaaccgatctgacaaaaatttacaaggcaggaattttgttgtcctaataggcaggaaagtgcttcagga

SEQ ID NO: 344952 - DNA, 556 bp, Homo sapiens
agtgtttccaaactgctgaaacaaaacataggtttaactgtgtgagcttaattcacacataccaaagctgtttctcacataggttctttcttgtttttatttrggaatgtttgctttttcatcattggcctcaatgagctcccaaatgtccttccagagattctacaaaaacaatgtttccacactgctgaatcaaaagaaaggtttaactctgtaaaatgaatgtacacatcacaaatcagtttctcagatggcttctttcaagtttttatctgaagataattgctttatcaccataagcctcaaagcactcccaaatgtcctttcgcatattctacaaaaatagtgcttacaaactgcagatttaaaagaatggtgtaactctgtgagatgaatgcacacatgacaaagcagtttctcagatagattctttcttgtttttgtctggagatagttgctttgtcaccataggcctgaatgagctcccaaatgtcctttctcagattctacacaaacaatgtttccaaaccactgaatcaaaacctaggtttcactg

SEQ ID NO: 344953 - DNA, 535 bp, Homo sapiens
cattcccagcaaactctcgcaaggacaaaataccaaacaccgcatgttctcagtcataggtgggaattgaacaatgagaacacatggacacaggaaggggaacatcacacactggggactgttgtggggttgggggagaggggagggataccattaggagatatacctaatgctaaatgacgagttaaagggtgcagcacaccaacatggcacatgtatacatatgtaacaaacctgcacgttgtgcacatgtaccctaaaacttaaagtataataataataaactaaataaataaataaataattaattaaaaataaattatggtacaatggaatgttcacccagrcaaattaattattcattcccttaccctaattcaacagtattccatacacagcacttatcacagtgcttactcatatttatatgtttgtctgagtttccctgaaaactagggattcataaataaataaataaataaataaataaataaataaataaatgttgtatgcaggtatggtattgggtgagaaa

SEQ ID NO: 344954 - DNA, 661 bp, Homo sapiens
tccccttttttccccctaaaggaccattaaagcagggaacagcaattattctccagtttgcatttgctcttttctcctttgagwgatagcccctcactgctttttggcaggtcacatggctgcctattagaaatattagaaatgcttcccaggagctaagcgatgctttgtgactaagctctcaccaatggagcaagagtggaagtgacaggcagacctgctgagccacctccttaaatacaatgtgtttcctctttactttctctctttcctcctcaccatgaacaggaacttggatacatagtgtgaaccattcttacctaggtaggtgagaaacacactggagggtgacagagcaccatgggagaaggaagaaggaagaagtatccacccatggatgctcgggtaatttagtggagaggagctacctacagcatgcatcacatgcctaacggatctgaggaaaaattagaagttgacctggacccagaatactgaatttttgaatcccattctttaccagccatctattatccttttaggtgcacaagaaaattgtatatgtaaatgaggatttagtttcaaactctagttctctgctccactggatcacgcagagcaaatgttgcaaacctggtcaccaacaggggctgggcaggta

SEQ ID NO: 344955 - DNA, 661 bp, Homo sapiens
tccccttttttccccctaaaggaccattaaagcagggaacagcaattattctccagtttgcatttgctcttttctcctttgagagatagcccctcactgctttttggcaggtcacatggctgcctattagaaatattagaaatgcttcccaggagctaagcgatgctttgtgactaagctctcaccaatggagcaagagtggaagtgacaggcagacctgctgagccacctccttaaatacaatktgtttcctctttactttctctctttcctcctcaccatgaacaggaacttggatacatagtgtgaaccattcttacctaggtaggtgagaaacacactggagggtgacagagcaccatgggagaaggaagaaggaagaagtatccacccatggatgctcgggtaatttagtggagaggagctacctacagcatgcatcacatgcctaacggatctgaggaaaaattagaagttgacctggacccagaatactgaatttttgaatcccattctttaccagccatctattatccttttaggtgcacaagaaaattgtatatgtaaatgaggatttagtttcaaactctagttctctgctccactggatcacgcagagcaaatgttgcaaacctggtcaccaacaggggctgggcaggta

SEQ ID NO: 344956 - DNA, 598 bp, Homo sapiens
acacatttgaaagaatatccatctatcaaaggacaaaatgaggttattaaaatggctttcttaactgcaatgattgtggcatcagaaactagggcttgcatttcttttatgaaagtggagaaaattaattttctttgaatgctatgtttgcctgattcaggaacagctgctccatttccgacttttgaatcttttctttacaagactaaataacccgatgacaagttttatacttaaaagttaacaggagataattccttgtctttttttttttttttttttttttcaccactcctattcaacatagkgtgggaagttctggccagggcaattaggcaggagaaggaaataaaggcttttcaattaggaaaagaggaagtcaaattgtccctatttgcacatgacatgattgtgtatctaaaaaaccccattgtctcagcccaaaatctccttaagctgataagcaacgtcagcaaattctcaggatacaaaatcaatgtacaaaaatcacaagcttttttttcccccattaacagacaaacagagagccaaatcatgagtcttgtaaattgtggtacaacagcaaaataggctaaac

SEQ ID NO: 344957 - DNA, 598 bp, Homo sapiens
acacatttgaaagaatatccatctatcaaaggacaaaatgaggttattaaaatggctttcttaactgcaatgattgtggcatcagaaactagggcttgcatttcttttatgaaagtggagaaaattaattttctttgaatgctatgtttgcctgattcaggaacagctgctccatttccgacttttgaatcttttctttacaagactaaataacccgatgacaagttttatacttaaaagttaacaggagataattccttgtctttttttttttttttttttttttcaccactcctattcaacatagggtkggaagttctggccagggcaattaggcaggagaaggaaataaaggcttttcaattaggaaaagaggaagtcaaattgtccctatttgcacatgacatgattgtgtatctaaaaaaccccattgtctcagcccaaaatctccttaagctgataagcaacgtcagcaaattctcaggatacaaaatcaatgtacaaaaatcacaagcttttttttcccccattaacagacaaacagagagccaaatcatgagtcttgtaaattgtggtacaacagcaaaataggctaaac

SEQ ID NO: 344958 - DNA, 598 bp, Homo sapiens
acacatttgaaagaatatccatctatcaaaggacaaaatgaggttattaaaatggctttcttaactgcaatgattgtggcatcagaaactagggcttgcatttcttttatgaaagtggagaaaattaattttctttgaatgctatgtttgcctgattcaggaacagctgctccatttccgacttttgaatcttttctttacaagactaaataacccgatgacaagttttatacttaaaagttaacaggagataattccttgtctttttttttttttttttttttttcaccactcctattcaacatagggtgggaagttctggccagggcaattaggcaggagaaggaaataaaggctwttcaattaggaaaagaggaagtcaaattgtccctatttgcacatgacatgattgtgtatctaaaaaaccccattgtctcagcccaaaatctccttaagctgataagcaacgtcagcaaattctcaggatacaaaatcaatgtacaaaaatcacaagcttttttttcccccattaacagacaaacagagagccaaatcatgagtcttgtaaattgtggtacaacagcaaaataggctaaac

SEQ ID NO: 344959 - DNA, 598 bp, Homo sapiens
acacatttgaaagaatatccatctatcaaaggacaaaatgaggttattaaaatggctttcttaactgcaatgattgtggcatcagaaactagggcttgcatttcttttatgaaagtggagaaaattaattttctttgaatgctatgtttgcctgattcaggaacagctgctccatttccgacttttgaatcttttctttacaagactaaataacccgatgacaagttttatacttaaaagttaacaggagataattccttgtctttttttttttttttttttttttcaccactcctattcaacatagggtgggaagttctggccagggcaattaggcaggagaaggaaataaaggcttttcaattaggaaaagaggaagtcaaattgtccctatttgcacatgacatgattgtgtatctaraaaaccccattgtctcagcccaaaatctccttaagctgataagcaacgtcagcaaattctcaggatacaaaatcaatgtacaaaaatcacaagcttttttttcccccattaacagacaaacagagagccaaatcatgagtcttgtaaattgtggtacaacagcaaaataggctaaac

SEQ ID NO: 344960 - DNA, 514 bp, Homo sapiens
cattcatttcactgagttaaagctttctttgaggtcagcagtttggaaacactgtttttgtagaatctgcgaaaggatatttgatagctctacgaggccataggtgaaaaactgcaaatccaaggataaaaactagaaggaagctatgtgagaaaccgccttgtgaagtatgctttcatctcrcagagttaaaactttcttttcattcagcagtttggaaattctgtttttgtagaatcttggaagggatgtttgggagctcattgaggccaaatgcaaaaaagggaatatcccaggataaaaaatagacttaagctatatcagaaactgctttgtgatgtatgcattcatctcgcagagttaaacatttttttttcattcaatagtttggaaacactgttttttgtagcatctgtgaagggatatttgtaagcgcattgagacctgtgatgaaaaaggaaatatcttcagataaaaacagaaagaagctttctgagaaactgcttcatgatgt

SEQ ID NO: 344961 - DNA, 523 bp, Homo sapiens
ttgttatatctgtgaagtgttatttgacagctcattgaggcaataggagaaaaagcaaatatatcargatgaaaaaacaggaggaagctatataaaaaagagctatgtgatttctgtattcatctcacagagttaaaagtttctcttcatacagaagtttgaaaacactattttggtagaatctgcgaagggatatttggaactccttgaggccagaatcgaaaaagtgaatatcccatgaaaaaaactaaaaggaagatatatgagaaatggctttgttatgtgtgcatacgtctctcatagttaaaattttcttttcaatgaagagtttggaaacactgtttttgtagagtgtgtgaaggcatatttgggagtgcattgaggcctgtggtgaaaaggagatatcttcagataaaaattagaaagaagctttctgagaaactgctttgcaatgtgtacattcatctcaaagtgttaaacctttctttggattaagcagtttggaaacactgtttctgttcat

SEQ ID NO: 344962 - DNA, 552 bp, Homo sapiens
aaacatttcttttcattcagtagtttggaagaaacgtgtttgtcaaatctgtgaagagatatttgagagcatattgaggaaaacggtaaaaaaggaaatatcttcagataaaaactagaaagaagctttctgggaaacttctttttgtgtgggcattcatctagcagagtgtaacttttctttctattcagcagtttggaaacactgttttagtagaatctgtgaatggatatttgaaagcatattaaggtctgtggttaaaaaggaaatatcttcaaataaaacctgcaaagatttctgagaaactgtttgtgatgtgttcattcacctcacagagttaaacctttctttggaktaaatagtttgcaaacactgtttctatccattctgcaactggacatttgggaactcatggaggccaatggcaaaaaagcaaatatcccaggataaaaactagaagaaatctatcagataaactgctttgtgatgtgttcatttatctagcatatttaaacctttcttttcattcagcagtttggaaacactgtttcg

SEQ ID NO: 344963 - DNA, 577 bp, Homo sapiens
gcattcatctcacagagttaaacctttctttggattcagcagtttggaaaaagtgttttagttcattctgtgaatggatatttcggagcttattgaggcccatggtgaaaaagggaacatcgaatgttgaaaactagaaggaagctctcttagaaactgctttactttgtatgcawtcatctcacagagttaaaccttcttttcattcagcagtttggaaacaatgattttgcagaatctgcgaaggtatatttgtgcattgaggcctagggcaaaaagctaaatttcttcatataaaaactagaaagaagttttctgagaaactgctttgtgacttgtgcactccactcacagagttaaaactttctttggattcagaaatgtggatacactgcttttgtccattctgtgaatggaaatttgggagctcattgaggccaatgccaataaagtgaatataccagggtacaaagtaaaaggaacctatcttagaaaccgctttgtgatgtgtgcattgacctgacagagttaaaatcttcttttttttcctcgaagaacagttgttttaataattttt

SEQ ID NO: 344964 - DNA, 577 bp, Homo sapiens
gcattcatctcacagagttaaacctttctttggattcagcagtttggaaaaagtgttttagttcattctgtgaatggatatttcggagcttattgaggcccatggtgaaaaagggaacatcgaatgttgaaaactagaaggaagctctcttagaaactgctttactttgtatgcattcatctcacagagttaaaccttcttttcattcagcagtttggaaacaatgattttgcagaatctgcgaaggtatatttgtgcattgaggcctagggcaaaaagctaaatttcttcatataaaaactagaaaraagttttctgagaaactgctttgtgacttgtgcactccactcacagagttaaaactttctttggattcagaaatgtggatacactgcttttgtccattctgtgaatggaaatttgggagctcattgaggccaatgccaataaagtgaatataccagggtacaaagtaaaaggaacctatcttagaaaccgctttgtgatgtgtgcattgacctgacagagttaaaatcttcttttttttcctcgaagaacagttgttttaataattttt

SEQ ID NO: 344965 - DNA, 513 bp, Homo sapiens
gcatcacgctacctgatttcaaactactrcaaggctacagtaaccaacacttactttacattgagcagtttggaaacactgcttttgtagaatctgtgaagttatatttgggagtgcattaaggcctacgttgaaaaatttaacatcttcagattaaaactagaaaaaaagctttctgagaaactgctttgtgatgtgtgcattcatctcacagacttaaactgttctttggattcagcagattggaaacactgtttttgtccattcttggaatggaccttgggagctcattgaggccaatggcaaaaattgaatatacccatatgaaatactagaaggaagctatttgagaaacaactttgtgatgtgtgcatttatctcagagttaaaattttcttttccttcagcaagttggaaagaatgtttttgtagaatctgctaatggataattggtttcacgttaaggcctatggtgaaaatggaaacaagttcagataaaaactagaaagaagc

SEQ ID NO: 344966 - DNA, 513 bp, Homo sapiens
gcatcacgctacctgatttcaaactactacaaggctacagtaaccaacacttactttmcattgagcagtttggaaacactgcttttgtagaatctgtgaagttatatttgggagtgcattaaggcctacgttgaaaaatttaacatcttcagattaaaactagaaaaaaagctttctgagaaactgctttgtgatgtgtgcattcatctcacagacttaaactgttctttggattcagcagattggaaacactgtttttgtccattcttggaatggaccttgggagctcattgaggccaatggcaaaaattgaatatacccatatgaaatactagaaggaagctatttgagaaacaactttgtgatgtgtgcatttatctcagagttaaaattttcttttccttcagcaagttggaaagaatgtttttgtagaatctgctaatggataattggtttcacgttaaggcctatggtgaaaatggaaacaagttcagataaaaactagaaagaagc

SEQ ID NO: 344967 - DNA, 513 bp, Homo sapiens
gcatcacgctacctgatttcaaactactacaaggctacagtaaccaacacttactttacattgagcagtttggaaacactgcttttgtagaatctgtgaagttatatttgggagtgcattaaggcctacgttgaaaaatttaacatcttcagattaaaactagaaaaaaagctttctgagaaactgctttgtgatgtgtgcattcatctcacagacttaaactgttctttggattcagcagattggaaacactgtttttgtccattcttggaatggaccttgggagctcattgaggccaatggcaaaaattgaatatacccatatraaatactagaaggaagctatttgagaaacaactttgtgatgtgtgcatttatctcagagttaaaattttcttttccttcagcaagttggaaagaatgtttttgtagaatctgctaatggataattggtttcacgttaaggcctatggtgaaaatggaaacaagttcagataaaaactagaaagaagc

SEQ ID NO: 344968 - DNA, 573 bp, Homo sapiens
accaaaacagtgtttccaaactgctgaatgaaaagaatgatttaactcagcgagatgaatacacagataacaaagcagtttcttcaataccttccttctactttttatcctggtctatttatttttttgccaatggcttcaatgaggtyccaattgtccattctgggacaaaaacagtgtctccaaactaataattccaaagaaaggtttaactctgtgagataaatgcacacaccacaaagcagattctcagaaagcttctttctagtttttatctgaagatgtttcatttttccccatagacctcaatgagctcccaaacatcccatcacagactctactgaaacaatgtttccaaactacagaattaaaagaaagttttaactctgtgagataaatgaacacatgacaaaatggtttctcggatagcttccttctacttttatcctgggatattttctttttcacatggggccacagtgagctcccaagtacctctttgctgattctaccaaaacagtgtttccaaacagctgattccaaagaaatatttaactctgtgagttgacagca

SEQ ID NO: 344969 - DNA, 588 bp, Homo sapiens
gagttcattgtgtccaatggaaaaaaactgaatattcccagataaaagctataatgaagctattagtgaaactgctttttggtgtgtggattaatcttagagagttaaacttttctttgaattcggcagattggaaacagtttttttgtagaatttgcaaaatggcatttgggagcccattgagacctatgggaaaaacccaaatgtccccagataaaaactagaaggaagctatctgtaaaactgctgggtgacttgtggattcacctcacagaattacatccttctttttactcagcagcgtggaaacattctttttktagaatctgtgaagggtcatttgggagtccattgaaacctacagggaaaaaccgaataggcccagataaaaagtagaaagaagctatctgtgaaactgcttggtgatatgtggattcagcccacagagttaaacctttattttgattcaacaggttggaaacactctttttgtagattctgtaaagggatatttgggattccattgaagcctatggggaaaaaacgattatcccgtataaaaactagaaagaagctatgtgtgatact

SEQ ID NO: 344970 - DNA, 588 bp, Homo sapiens
gagttcattgtgtccaatggaaaaaaactgaatattcccagataaaagctataatgaagctattagtgaaactgctttttggtgtgtggattaatcttagagagttaaacttttctttgaattcggcagattggaaacagtttttttgtagaatttgcaaaatggcatttgggagcccattgagacctatgggaaaaacccaaatgtccccagataaaaactagaaggaagctatctgtaaaactgctgggtgacttgtggattcacctcacagaattacatccttctttttactcagcagcgtggaaacattctttttttagaatctgtgaagggtcatttgggagyccattgaaacctacagggaaaaaccgaataggcccagataaaaagtagaaagaagctatctgtgaaactgcttggtgatatgtggattcagcccacagagttaaacctttattttgattcaacaggttggaaacactctttttgtagattctgtaaagggatatttgggattccattgaagcctatggggaaaaaacgattatcccgtataaaaactagaaagaagctatgtgtgatact

SEQ ID NO: 344971 - DNA, 573 bp, Homo sapiens
accaaaacagtgtttccaaactgctgaatgaaaagaatgatttaactcagcgagatgaatacacagataacaaagcagtttcttcaataccttccttctactttttatcctggtctatttatttttttgccaatggcttcaatgaggtcccaattgtccattctgggacaaaaacagtgtctccaaactaataattccaaagaaaggtttaactctgtgagataaatgcacacaccacaaagcagattctcagaaagcttctttctagtttttatctgaagatgtttcatttttccccatagacctcaatgagctcccaaacatcccatcacagactctactgaaacaatgtttccaaactacagaattaaaagaaagttttaactctgtgagataaatgaacacatgacaaaayggtttctcggatagcttccttctacttttatcctgggatattttctttttcacatggggccacagtgagctcccaagtacctctttgctgattctaccaaaacagtgtttccaaacagctgattccaaagaaatatttaactctgtgagttgacagca

SEQ ID NO: 344972 - DNA, 527 bp, Homo sapiens
cccacaaggaaattaggaagaagctatctgagaaactgctttgtgacctgtagatttacctcatagagtcaaaccttacctttcattcgtcagtttggaaatacagtatttgtataatttgtgaaaggacatttgggagtgcattgaggcctatgctctaaaagcaaatatcttcagataaaaccttaaaagaagttatctcagaaactgttttgtgatgggtacattcatctcacagagttaaaaatttcttttgattctacagtttcttcagatacaaagccaatatcttcagataaaagctggaaagaagctatctgagaaaytgctttgagatgtgtgcattcatcttacagagttaaacctttcttttgattcagcagattggaaaccctgtttttgtacaatctaagaaagaacattacggagcacattgaggcctatggtgaaaaatggaacaaccccagatgaaaactagaaagaagctatctgagaaactgctttgggatgtgtgcattcatctcaca

SEQ ID NO: 344973 - DNA, 581 bp, Homo sapiens
aaaaaacctttctaagaatctactttatgaagtgcacattaatctcacacagctcaatctttcttttgatttggctgtttggaaatggtttttgtccgttctgtgattggacatttgggaggtgattgaggccaatggagaaaaagtgaatatccawgaaataaaactagaaggaagctatctgagaaaccactttctgatgtgagcattcatctcatagaggaaaacgtttcttttcaatcagcagtttggaaacactgtttgatagagtctgcaaaagtatatttgggagaccattgaggccaatggtgaaaaaggaaaatcttcagataaaaactagaaagaagctctctgagaaagttctttgtgacgtgtgcattcatctcacagaggtcaaccattttttgcattcagcagtttggaaacactgtttttgtacaatctgtgaagggatatttgggagctcattgaggctaaaggtgaaaaagtgaatatcgcaagacaaaaattagaaggaatctatctgagaaaccgcttgcttatgtgtacattcatctcacagagttaatcctgtcttttca

SEQ ID NO: 344974 - DNA, 548 bp, Homo sapiens
tttggattcagcagtttggaaatactgtttttgtagaatctgcaaagggaatttctgaggtcattgaggccaaaggtgaaaaagtgaatgtgccaggataaaaactagaaggaagctctctgagaaactgctttgtgatgctttcattcatctcacaaagttaaacgtttcttttcattcagcattttggaaacacygtttttgtagaatccgtgaaggaatatttgggcatatattgaggcctctggtgaaaaagaaaatatcttcagttgaaaactagaaagaagctttctgagaaagtgctttgtgatttttacattcatttgacaaagttaaactttctttgaattcagcagtttggaaacactgtttttgtccattctatgaatggacttttgggagctcattgaaaccaatggtgaaaaccaaatatcccaggaaaatatttagaagaaatatatctgacaaagtgctttgtgatgtgtggatttttttcacatggttaaacttgtttttcattcagcagtttgcaaacactggtttttaaa

SEQ ID NO: 344975 - DNA, 494 bp, Homo sapiens
gtttaactgtgtgagctgaatgcaaagataacaaagttgtttctcagatagcttctttcaagtttttatctaaagatatttgctttttcatcataagcctcaaagcgctcctrcatgtccttttgcagattcctcaaaaacagtgtttccaaactgctgaatcaaaatataggtttatctgtgtgagctgaatgcacacataaaaagacctgtttctcaaatggcttctttctagtttttatctggggatatttgcttttttaccattggcctcaatgaactcccacatgttctcttgcagattctacaaaaacagtgattccaaactgctgaatgaaaagaaaattttaactctgtgagatgaattcacacgtcacaatgcagttgctcagatagcttctttcatgttcttatgtgaagacatttgctttttcaacataagccttgaagcgctcccaaatgtcctttcgcagattctatgaaaacagtttttc

SEQ ID NO: 344976 - DNA, 494 bp, Homo sapiens
gtttaactgtgtgagctgaatgcaaagataacaaagttgtttctcagatagcttctttcaagtttttatctaaagatatttgctttttcatcataagcctcaaagcgctcctacawgtccttttgcagattcctcaaaaacagtgtttccaaactgctgaatcaaaatataggtttatctgtgtgagctgaatgcacacataaaaagacctgtttctcaaatggcttctttctagtttttatctggggatatttgcttttttaccattggcctcaatgaactcccacatgttctcttgcagattctacaaaaacagtgattccaaactgctgaatgaaaagaaaattttaactctgtgagatgaattcacacgtcacaatgcagttgctcagatagcttctttcatgttcttatgtgaagacatttgctttttcaacataagccttgaagcgctcccaaatgtcctttcgcagattctatgaaaacagtttttc

SEQ ID NO: 344977 - DNA, 494 bp, Homo sapiens
gtttaactgtgtgagctgaatgcaaagataacaaagttgtttctcagatagcttctttcaagtttttatctaaagatatttgctttttcatcataagcctcaaagcgctcctacatgtccttttgcagattcctcaaaaacagtgtttccaaactgctgaatcaaaatataggtttatctgtgtgagctgaatgcacacataaaaagacctgtttctcaaatggcttctttctagtttttatctggggatatttgcttttttaccattggcctcaatgaactcccacatgttctcttgcagattctacaaaaacagtgattccaaactgctgaatgaaaagaaaattttaactctgtgagatgaattcacacgtcacaatgcagttgctcagatagcttctttcatgttyttatgtgaagacatttgctttttcaacataagccttgaagcgctcccaaatgtcctttcgcagattctatgaaaacagtttttc

SEQ ID NO: 344978 - DNA, 607 bp, Homo sapiens
acatctttctgatttttaacaggagatatttgctttctcaccattggcctgaaggagctctsaaatcttctttctcagattctacaaaaacagtgtttccaaacagctgaatcaaaacataggtttaattgtgttagctgaacgcaaacataacaatgctgtttctcacatacgttctttctagtttttaatcgggatatttcctttttcaccattggcctcaatgagctcccaaatgttctttcacagattctacacaaatggtgtttccaaactgctgaatcaaagaaaggtttaactctgtgagatgaatgtacacatcacaatgcagtttctcacatagcttctgtcaagtttttacctgaagttaattgctttttcaccataagcctcaaagtactcccaaatgttctttcgcagactctgcaagaacagtgtttccaaactgatgaatcaaaagaatggtgtcactctgtgagatgaatgcacacatcacaaagcaatttctcagatagattctttcttgtttttgtctggagatattcgttttcaccatagacatcaaagccctcccaaatatcccttcacagattctactaaaacagtg

SEQ ID NO: 344979 - DNA, 577 bp, Homo sapiens
ggatatttgggatctcattgatgccaatggtgaaaaaatgaatattccaacataaaaactagaaggaatgtatctgagaaaccactctgtgaggtgcgcattcatctcacagagttaaacctttcttttaattcagcagtttggaaactctgttatggtagaatctgagaagggatatttgggtagtattgaggactagggtggaaaaggaaatatcttcagttaaaatctagaaagmacctttcggagaaactgcttggtgatatgtgcattcatatcacagaattaaacatttctttggattctgtagtttggaaacagtgtttttgtccattccctgaatggatatttgggagcccattgaggccaatggtgaaaaagcgaatatcccaggataaaaactcgaaagaatctatcagagaagccactttgtgatgtgtgcattcatctagcagagttaaacctttcttttcattcaacagtttggaaacactgtttttgtagaatctgtgaaggtatatttgggaactcattgaggccaatggcaaaaaagtgaacatcccaggataaaaactag

SEQ ID NO: 344980 - DNA, 576 bp, Homo sapiens
acactgtttttgcagaatctgcgaaggtatgtttcggagtgcattttggtctagtgtgaaaaaggaaatattttcagataaaaactcgaaagaaccttcctgagaaactgctttgtgacgtgtgttttcatgtaacagagctaaaactttctttggattcagcagtttggaaacacagtttttgtccattctgaaagtggagaattctgagctcattgaggccaatggtgaaaaagtgaatattcctggataaaaattagaagtaaggtatctgagaaactgctgtgtgatgtgtgcagttttctcacagagttaaacctttatttggaatcagcagtttgkaaaccctgttttggtagattccatgaagggatatttgggagcacattaaggcctacagtgaaaaaggaaatatcttcagatgaaaactaaaaaaaaaaaaaatgatttttgagaaaatgctttgtggtgtgtgcattcatctgggagttaaacttttgtttggattgagcagtttgaaaacactgtttttgtccactctgtgaatggacacttgggagctcattgaggccagtg

SEQ ID NO: 344981 - DNA, 486 bp, Homo sapiens
aatgctttgtggtgtgtgcattcatctgggagttaaacttttgtttggattgagcagtttgaaaacactgtttttgtccactctgtgaatggacacttgggagctcattgaggccagtggtgaaaaagcatataatccaggataaaaaatagatggacactgtctgagaaaccactttgtgatttgtgcattcatcttgaagagttaaatctttcttttcattcagcaatttggaaacactgtttcagtagagtctgcgaagcaatatttggtagcacattgaggtctatggtgagaaaagaaatatcagataaawtatagaaagaagatttctgacaaactgcttggtaatgtgtgccttcatctcactgagttaaacctttctttggattcagcagttaggaaacactcttttttccatctgtgaatggacattttggagctcatgattccaaaggcaaaaaaccaaatatccaaggataaaaa

SEQ ID NO: 344982 - DNA, 562 bp, Homo sapiens
gagaagaaaggtttatctctttgagatgaatgcatacattgyaaatcggtttctcagataacttccttctagtttttaacctgagatattcggttttcaccattgttctcagtgagctcccagaagtccatttgcagaatggacaaaaacagtgtttccaaactgctgaattcaaagaaagtttaactctgtgacataaatgcacacatcacagagtagtttctcagaaaatttcttcctagtttttacatgaatatatttcctttttaacagtaggactcaatgtggtcccatatatcccttctcagtttctaccaaaacagtgtttacaaactcgtgaatgaaaaggaagttttaactctgtgggatgaatgcacacatcacaaatcagtctctcagattgctttgttctaatttttatcctgggatattcacttttttcaccttcggcatcaatgaactcccaaatatctctttgcggattccacagaaacagtgtttctaaactgctgaatccaaagagagatttagctctgtaagatgaatgcacacttcacaaagc

SEQ ID NO: 344983 - DNA, 646 bp, Homo sapiens
tttacaaactcgtgaatgaaaaggaagttttaactctgtgggatgaatgcacacatcacaaatcagtctctcagattgctttgttctaatttttatcctgggatattcacttttttcaccttcggcatcaatgaactcccaaatatctctttgcggattccacagaaacagtgtttctaaactgctgaatccaaagagagatttagctctgtaagatgaatgcacacttcacaaagcagtttctcagaaaacttctttctagtttttagctgaagatatttcctttttcaccactrgcctcaatgcactcccaaatatccctttgtagattctgccaaaagagtgttttcaaactactgaatgaaaagaaaggtttaattatctgatatgaatccacatatcatgaaatgatttctcatatagcttccttctagttttaatcatggcatattttattattcccctttggcctcaatgtgctcccaaatactccttcgcagattcttccaaagcagtgtttccaaactgcttaatgaaagaaaggtttatctctgtgatattaatacacacattcaaagtggattatcagatagcatccttctagtttttatcctgggatattctcttttttccattggacccattg

SEQ ID NO: 344984 - DNA, 537 bp, Homo sapiens
ccctttgcagattcgccaaaaacagtgtttccaaacagctgaatgaaaagaaatgtttatatctgtgagatgaatgcacacatcacatagggttttctctgatagtttcattccagttttyatcctgggatattcactttttcacctttggcctcaatgagctcccaaatagccctttgcagattcttcaaaaacagtgtttcgaaactgcagaatgaaaagaaaagtttaactttctgaaatgaatgcacccattgcaaagcagtttctcagatagcttccttccaggtttttttcttgggatgttctcttttttcccattggcctcagtgagctcccaaatgcccagtcacagaatggacaaaagcagggtttgtgaagttctgaatggaaagaaatgtttaactctatgaggtgaatgcacacatcacaaagaagtttctcagaaagactctttagggtttttatctggagatatttcctttttcaccataggccacaatgagctcccaaatacgcctttgcaaattcttctaa

SEQ ID NO: 344985 - DNA, 584 bp, Homo sapiens
gtttttatctggagatatttcctttttcaccataggccacaatgagctcccaaatacgcctttgcaaattcttctaaagcagggtttccaaaaggctgaatgaaaaagaaagttttacatctgtgagataaatgcacacctcacaaagtggttactcagatagcttccatctagtttttatcctgggatgctcactttttcactttggcctcaatgagttcccaaaaatcatttgcagatactacaaaaacagtgtttccaaactgctgaatcaaaagaaatattgacccctgtgagatgaacgcacacatcagaaaataggttctcggaaagcttccttctagtttttatctgaatatatttcctttttcaccatagacctcaatgcgctccaaaatataccttsagatattctaccaaaacagtgcttccaaactgctgaatgaataggacattttacctcagtgagattaatgcacacatcacaaagcagtttctcacatagctttattctactttttaacctgggaaatttgctttttagtcattagcctcaatgaactgcctgatgtccattctcagaa

SEQ ID NO: 344986 - DNA, 594 bp, Homo sapiens
ttttcattgagcactttggaaacactgatttggtagtatctacaaagggatatttcagagcgcattgaagtctacggtgaaaaaggaaatatcttcaggtaaaaaactgaaagaagatttctgagaaactgctttgtgatgtgtgcgttcatctcacagagttaaacctttctttggattctgcagtttggaaacactgtttttgtacattctgcgtatggacatttgggagttcattgaggcctatrgtggaaaagtgaatatcccaggataagaaccagatggaagctatctgagaaactgctttgtgatgtatgcatacatcttgcatagttaaacctttcttttcattcagcagtttggaaacaccggttttgtagattctgtgaagggatatttaggagcacattgaggcctatggtgaaaaaggaaatatcttcagataaaagcagaaagaagctttctcagaaactgccttgtgatgtgtgcattcatcttacagagttaagtgtttgttggactcaacagattggaaacactgtttttgtataatctgtcagggatttttgagagctcattgaggccaaaggcaaa

SEQ ID NO: 344987 - DNA, 487 bp, Homo sapiens
acatttgggagttcattgaggcctatggtggaaaagtgaatatcccaggataagaaccagatggaagctatctgagaaactgctttgtgatgtatgcatacatcttgcatagttaaacctttcttttcattcagcagtttggaaacaccggttttgtagattctgtgaagggatatttaggagcacattgaggcctatggtgaaaaaggaaatatcttcagataaaagyagaaagaagctttctcagaaactgccttgtgatgtgtgcattcatcttacagagttaagtgtttgttggactcaacagattggaaacactgtttttgtataatctgtcagggatttttgagagctcattgaggccaaaggcaaaggagagaatatcccaggatcaaaactagaaggaaactatctgagaaactcctttgtgatgtatgcattcatcttgcagagttaaacttttcttcggattcagcagtttggaaac

SEQ ID NO: 344988 - DNA, 518 bp, Homo sapiens
catttgggagctccttgaaactaatggcaaaaaagcaaatattgcaaaataaaaactagaaagaagctgtttgagaactggctttgtgatatgtgcattcctctgacagagttaaaccacgactttcattaggtagtttggaaatgctgtttttggagaatctgtgaaataatatttaggatcacattgaggcccatggtgaaaaaggaaatatcttcagataaaaactagaaagaagctttctgagaaactgctttgtgatgtgtgcattcatctgacagatgtaaacttttctttggattcagcagtttgcaaaaactggattcagccgtttttgtccattctacaaatggacatatgggagtacattaaggctaatggcataaaagcgaatatcccacgataaaaactagaataaaactacctgagaaactgcttcatgacgtatgcattcatcttgcagacttaagyctttctttttattcagcagtttggaaacaatgctttttatttttttt

SEQ ID NO: 344989 - DNA, 556 bp, Homo sapiens
aactgctttgtgatgtgtgcattcatctcacacagttaaacctttctttggtttcagcagttgtgaaacactatttttgtagaatctctgagggaatatttagaacttcattgaggtaaggtgaaaaagtgaatatctcaggttaaaaactggaaggaagctatccgagaaaccgctttgtgatatgtgctttcatctctcagagttaaacctttgttttcattccacagtgtaaacactgttttggtataatctgcaaagggctatttgggagcgcattgaggcctatggtgaaaatggaaatatcctcagataaaaagtagaaagaaggtttctatgaaactgctctgtgatatgcacattcatctsacagagttaaaagtgtctttcaagtcagcagtttggaaacactgttttgtccattttgcaaagggaccttttggagcttattgaggccaatggtgaaaaagcatgtataccaggataaaaactagaaggaagttatctgagaaaccactttgtgatatgtgcattcatctctcagagctaaaacttt

SEQ ID NO: 344990 - DNA, 703 bp, Homo sapiens
gctttgtgatgtgtgcattcatctcataaacacttcttttgattcagctgtttggaaacattgtttcagaaaggacatttgggagaacattgaggcctatggtgaaaaagcaaacatttccatataaaaactagaaagaagctatgcgagaaactactctgtgatgtgttcattcaactmacagagttaaaccttacctttcattcagcagtttggaaagaaagtttttgtataatctatgaaaggacgtttgaaagcccattgaggccttttgtgaaaaagccaatattttcagataaaactttgaaagaagctatctgagaagctgctttgtgatgtgctcattcatctcacagagttaaactttccttttgtttcggcagtttggaaacaatgtttttgcagaatctgtgaagggacatttgggagctcattgaggccttcggtgaaaaagcaaatacttccagataaaaactagaaagaagcaatctgagaaatggctttgtgatgttttcattcatctcatggaggtaacttttgttttgattcagcactttggaaacactgtttttgtagaatctgcatgaggacattagggaacacatttagtcctatggtgaaaaagctaatatcttcagagagaaacttgaaagaagctatctgagaaacttctttgtgaagtttgcattcatctcacagagtt

SEQ ID NO: 344991 - DNA, 703 bp, Homo sapiens
gctttgtgatgtgtgcattcatctcataaacacttcttttgattcagctgtttggaaacattgtttcagaaaggacatttgggagaacattgaggcctatggtgaaaaagcaaacatttccatataaaaactagaaagaagctatgcgagaaactactctgtgatgtgttcattcaactcacagagttaaaccttacctttcattcagcagtttggaaagaaagtttttgtataatctatgaaaggacgtttgaaagcccattgaggccttttgtgaaaaagccaatattttcagataaaactttgaaagaagctatctgagaagctgctttgtgatgtgctcattcatctcacagagttaaactttccttttgtttyggcagtttggaaacaatgtttttgcagaatctgtgaagggacatttgggagctcattgaggccttcggtgaaaaagcaaatacttccagataaaaactagaaagaagcaatctgagaaatggctttgtgatgttttcattcatctcatggaggtaacttttgttttgattcagcactttggaaacactgtttttgtagaatctgcatgaggacattagggaacacatttagtcctatggtgaaaaagctaatatcttcagagagaaacttgaaagaagctatctgagaaacttctttgtgaagtttgcattcatctcacagagtt

SEQ ID NO: 344992 - DNA, 552 bp, Homo sapiens
accataagctctgactgcctgcacggttgggcaaaagagccatatttttcttaytgcagagagcctataaatggacatccaagtagggaagatattgctaaattcttttcgtagcaaagaatattaatattcatactcagaaaggaatgcattcctggggggaggtctataaacggctgctctgggaatgtctctcctatgggcttgagataaggactgagatatgccctgatatcctgtagtgccctcaggcttattagggtggggaaaaactctgccctggtaaatttgtggtcagactggttctctgctctcaaaccctgttttctgttgtttaagatgtttatgaagactatacatacactgctgaacatagaccattatcaggagttctacttttgccctttgacctgtttattcagaagcatgtgatctttgttctactttttgccctttgaagcatgggacctactccctgttcttacaccccctccccttttgaaacccttaataaaaaacttgctggtttgaggttcaggtgggtatcacagt

SEQ ID NO: 344993 - DNA, 552 bp, Homo sapiens
accataagctctgactgcctgcacggttgggcaaaagagccatatttttcttactgcagagagcctataaatggacatccaagtagggaagatattgctaaattcttttcstagcaaagaatattaatattcatactcagaaaggaatgcattcctggggggaggtctataaacggctgctctgggaatgtctctcctatgggcttgagataaggactgagatatgccctgatatcctgtagtgccctcaggcttattagggtggggaaaaactctgccctggtaaatttgtggtcagactggttctctgctctcaaaccctgttttctgttgtttaagatgtttatgaagactatacatacactgctgaacatagaccattatcaggagttctacttttgccctttgacctgtttattcagaagcatgtgatctttgttctactttttgccctttgaagcatgggacctactccctgttcttacaccccctccccttttgaaacccttaataaaaaacttgctggtttgaggttcaggtgggtatcacagt

SEQ ID NO: 344994 - DNA, 552 bp, Homo sapiens
accataagctctgactgcctgcacggttgggcaaaagagccatatttttcttactgcagagagcctataaatggacatccaagtagggaagatattgctaaattcttttcgtagcaaagaatattaatattcatactcagaaaggaatgcattcctggggggaggtctataaacggctgctctgggaatgtctctcctatgggcttgagataaggactgagatatgccctgatatcctgtagtrccctcaggcttattagggtggggaaaaactctgccctggtaaatttgtggtcagactggttctctgctctcaaaccctgttttctgttgtttaagatgtttatgaagactatacatacactgctgaacatagaccattatcaggagttctacttttgccctttgacctgtttattcagaagcatgtgatctttgttctactttttgccctttgaagcatgggacctactccctgttcttacaccccctccccttttgaaacccttaataaaaaacttgctggtttgaggttcaggtgggtatcacagt

SEQ ID NO: 344995 - DNA, 552 bp, Homo sapiens
accataagctctgactgcctgcacggttgggcaaaagagccatatttttcttactgcagagagcctataaatggacatccaagtagggaagatattgctaaattcttttcgtagcaaagaatattaatattcatactcagaaaggaatgcattcctggggggaggtctataaacggctgctctgggaatgtctctcctatgggcttgagataaggactgagatatgccctgatatcctgtagtgccctcaggcttattagggtggggaaaaactctgccctggtaaatttgtggtcagactggttctctgctctcaaaccctgytttctgttgtttaagatgtttatgaagactatacatacactgctgaacatagaccattatcaggagttctacttttgccctttgacctgtttattcagaagcatgtgatctttgttctactttttgccctttgaagcatgggacctactccctgttcttacaccccctccccttttgaaacccttaataaaaaacttgctggtttgaggttcaggtgggtatcacagt

SEQ ID NO: 344996 - DNA, 577 bp, Homo sapiens
tttggaaacactgtttttgtacaatcctagaaaggacatttgggagtgcattgagagctatggtgaaaaatcaaatatctccagatgcaaactaggaagaaactataagagaaactgctttgtgatgtgtgcattcacctaatagattaggacatttattttgattcagcagtttggaaacactgtctttgtagaatctgcataaggacattagggagtgcattgaggcttatggtgaaacagaaaatatcttcagacaaaaacttgaaggaggctacctgagaaacagctttgtgatgtgtggtttcatctcccagtgttaaaactttcttttgattcagcagtttgaaaacactgtttwtgatgaaaatgcaaaaggacatttgggagctaattgaggcaaatgttgaaaaagtgagtattcccagattaaaaactagaaagaatgtatgtgagaaacagctttgttatgtgtgcattcagctcacagagttaaatctatgttttgatccagcagtttagaaacacagtttttgtataatctgcgaaagaacatttgagagtacactgaggcctt

SEQ ID NO: 344997 - DNA, 589 bp, Homo sapiens
acactgtttttgatgaaaatgcaaaaggacatttgggagctaattgaggcaaatgttgaaaaagtgagtattcccagattaaaaactagaaagaatgtatgtgagaaacagctttgttatgtgtgcattcagctcacagagttaaatctatgttttgatccagcagtttagaaacacagtttttgtataatctgcgaaagaacatttgagagtacactgaggcctttggcaaaaagcataaattttctgataaaaatttgaaagaatctatctgaggaactgagtgatgtgttcactcagttgacagagttaaaactgtcttttaattcagcagttttgaaacactgtttttgcagaatytgtgatgtgacatttgggaggtcattgagaccaatggtgaaaaagtgaatatttccagataaaaactagaaagaagctgtctgagaaactgatatgtgatgtatgcattcatctcatggagttaaacatttgttttggctaagcattttggaaacactgtttttgtaggatctgtgtaaggacattagttggcgccttgagacctatggtgaaaaataaaatatcttaa

SEQ ID NO: 344998 - DNA, 491 bp, Homo sapiens
tcagaaagcttctttctagattttgtcggaaggtatttcctttataaccatcggcctcaatgcgatcccaaatattctttcacagattctccaaaaacagkgtttccaaactgcctaatggaagtcgtggtttaactctgtgagatgaatgcacacatcacaaagcagtttctcagataccttctttctggtttttatcctgggatatttgctctttcacattcggcctcaatgatctcccaaatatccctttgcagattctacaaaaacagtgtttccaaatcgttgagtctaaagaaagtttcactctgtgagatgaatgcactcatcacacagaggtttttcaggaagcttctttcaagtttttatctgaagatattccctttttcaccttagccctcaatgtgctcccaaatatcccttcacagatcctaccaaaaacgtgttcccaatctactgaattatcaggggaaaccacctccagtaattca

SEQ ID NO: 344999 - DNA, 522 bp, Homo sapiens
gccaatgagttccagattatttctaactcagcctgtcataagaaactgtggtggactgtggaccccataacccatgacttctggcgttccaactttgggttactctgaaattggtcatatgatttgatttcatcatgagacacatcaaatgagcagagacttgataagcacttgtatattaaggaatgtccttttggaactctccctcttgcagtgctaacttgagactgccatgctgttaggaagttcaagttcaccacatggagatgaaataagatatcatgataaacatccccagctgatcccagcctccagtgatccrtcaactacatatatgatcctaagtcacatgtgtgaccccgagcaagatcagcagaacaatcactcagccaacccacagaaccctgaaaaaatataaatcattatagtttaaaccacaagttttgggtagcttgttatgctgctattgataataaaaacaaactggagatattttcatctagatggcaatctactcaattg

SEQ ID NO: 345000 - DNA, 561 bp, Homo sapiens
atccatccaggtgagaggtcaaatcagtggaggaaaaggcacataagcccaataagaataattttgtgtagcacgtaaatcattgtgagaggaaaccgttgagacagaaagtataaagaggagaatcattaaataaaacctattgtaagtgagattgagtgctgaaggagaaagaagaacagggggttcacatttttaggctaatagaaatagtgagatttttaggtttgtaaggagaaaaaaaggtaatcaggagaagtgagattagttagatgggtctccattgccatcagggaggattgaatcagacccattgtgatttggtgtgccaggttctaaggagttgacccagaactcaccacatctgaggrcagtctctaacacggatatcttttctctgtggttttcatggtcagtattcacctgaagcttgagtctcctgatgggtacccagaccagatctcctggtgaaacacaagcatatccccttccccacgttataattgtgccatattctcacgtattggtttgggaatttttccataactttggattgccttc

SEQ ID NO: 345001 - DNA, 566 bp, Homo sapiens
tattggtttgggaatttttccataactttggattgccttcatttagggagaattttttgcctgtataatggcatttggctgcagttagattattatctttaggaacattaaaaaaaatttaaagtaaacaatgccaaatgtaattgggagtggggggtagttaaattatgttttggttgttcagactgtttggacaattgggtttttaaagcgtgattggcctgctccaccacarcttgtccctgaggattataatggattccagtaatatgggaaattccccactgttgtataaataaatcaaaagccttactaacatatccaggggcattgtctgtctttatttgatgtggaagacccataactgcaaagcaagtacacagatgttttttaacacgggccatgccttcccctgtttggcaagtagcccagataaaacctgagaatgtatctacagagacatgcacatatgacagtctgccaaaggacctaacatggctcacatccatttgccataaatcattaggatttaggccttgggattaacaccaggttcctgatttgga

SEQ ID NO: 345002 - DNA, 582 bp, Homo sapiens
ttcctggtgcgtgtggtggtggggacgaggggagccctctcctgctctgctcatgtctgtctagttacctactgtaacaagaccatagtattggggacagagctagcactcagcaaagacatgttgaataaataatccttcacaaatcatcatctcatggtctgaagttctggatttcaatctcttgattccaatctgtcttgaggtgaatggtgagtccccaaaagctgtgttcacctgaagtctgtgtgatctgctttgtaaaaagggccttgcagatgtaattaaattaaagatcttgagatgagatcatcctggattacctgggtgggycctaaatattgtgttggtgcaaaagtaattgtggtcttttccattgaaagcaatggcaaaaaaccgcaattattttgtaccaatctaatacaatgttgtccttatgagaagaggagaagacacagagagagaaggtcatttgaagtctgaggcagatgttggacttacattgccacaaaccaaagaacacctgggaccaccagatgctgaaatggacaaggaaaaattctgtcctagagtcttttgagg

SEQ ID NO: 345003 - DNA, 582 bp, Homo sapiens
ttcctggtgcgtgtggtggtggggacgaggggagccctctcctgctctgctcatgtctgtctagttacctactgtaacaagaccatagtattggggacagagctagcactcagcaaagacatgttgaataaataatccttcacaaatcatcatctcatggtctgaagttctggatttcaatctcttgattccaatctgtcttgaggtgaatggtgagtccccaaaagctgtgttcacctgaagtctgtgtgatctgctttgtaaaaagggccttgcagatgtaattaaattaaagatcttgagatgagatcatcctggattacctgggtgggccctaaatattgtgttggtgcaaaagtaattgtggtcttttccaytgaaagcaatggcaaaaaaccgcaattattttgtaccaatctaatacaatgttgtccttatgagaagaggagaagacacagagagagaaggtcatttgaagtctgaggcagatgttggacttacattgccacaaaccaaagaacacctgggaccaccagatgctgaaatggacaaggaaaaattctgtcctagagtcttttgagg

SEQ ID NO: 345004 - DNA, 312 bp, Homo sapiens
gatatgatattaggggggtattaatatggcaatctttctctagatcatgtttaatattttttwaaaatgtaaatgaataattaataatgttctaagaaataaatatatattttaaaagtgtgattccacttaggatcattaacctacattttttaaccttatgaagtaagattgaatttttctaagattttaaaaataaattgaagatacagctccaggttacagatctattttacttagaagaaactgtagctgagagtggttacttcacaagtccatgctctgctgggggtagcagagttgggattttta

SEQ ID NO: 345005 - DNA, 312 bp, Homo sapiens
gatatgatattaggggggtattaatatggcaatctttctctagatcatgtttaatattttttaaaaatgtaaatgaataattaataatgttctaagaaataaatatatattttaaaagtgtgattccacttaggatcattaayctacattttttaaccttatgaagtaagattgaatttttctaagattttaaaaataaattgaagatacagctccaggttacagatctattttacttagaagaaactgtagctgagagtggttacttcacaagtccatgctctgctgggggtagcagagttgggattttta

SEQ ID NO: 345006 - DNA, 312 bp, Homo sapiens
gatatgatattaggggggtattaatatggcaatctttctctagatcatgtttaatattttttaaaaatgtaaatgaataattaataatgttctaagaaataaatatatattttaaaagtgtgattccacttaggatcattaacctacattttttaaccttatgaagtaarattgaatttttctaagattttaaaaataaattgaagatacagctccaggttacagatctattttacttagaagaaactgtagctgagagtggttacttcacaagtccatgctctgctgggggtagcagagttgggattttta

SEQ ID NO: 345007 - DNA, 587 bp, Homo sapiens
ggaaactgtcatagaagaggtggcattgagtgggacaatgaatgacaggtgaggattcaatacagagaatggggggaaggcaattcatacttagatactagcacgtccagaatgaggagacatgaaattaaagcaaagaaactgatatcaacmggctgtggcttcggaaatatgagttgtactagcaaacttctcacttacgctactctattttcccatggtccctgaaggttgtatgtctacttagaactcttctcctcatttgccccatggagcaagaagttggtgtccttctctacaacctggagcagagatgggcccttagctggtgctcagtaagggctgatgtgtgggtggatattcagagtctgcagaagaaaaagtagaaatgacttcagccagcctgggactgctctaagcaagatgttttcctaggatggtatcccagtctcaaaagggatgggccacaatgtggtacaaaactctagggaacagcatcacagctgccctgcgtctgttataatattagtccattgacgttgatgcagcgagcctctacttttcagtttactttgggtcttggacat

SEQ ID NO: 345008 - DNA, 592 bp, Homo sapiens
gtgcacttgaaaggaaaaaaaaatggtgaatactagcattgtcaacaacatctgcccttttggtcattgaatgattgcctcactttttttccccacacattaaacacctattgttcacaatagaaatcacaatagaaaatgcaaagtctcctccattcatcacaagtaggtcaacatccaggatattgggggcatgaatggtagcccatgcattaggtttgggaattttttcctctcattccaaagattcatatcctaaaaaggaaacatgcaagaatgaaacaggggcatatactataatgaaataagatcatcataagaaatacaccatgcaggtgaagggaaaatgagaccactcatcagtaactgaaaggacaattctgagatctgggagatactctgggttcccctaacccgaggaaggagactgttcctttattaggccctgattttgctctctggaagcagcttcctaatttattcttttaggcccatggatctgccctctggctagttctttgttttcccgttattatccttctcagctacttcygatataagcatggggtggcataccctctttgggagctga

SEQ ID NO: 345009 - DNA, 592 bp, Homo sapiens
gtgcacttgaaaggaaaaaaaaatggtgaatactagcattgtcaacaacatctgcccttttggtcattgaatgattgcctcactttttttccccacacattaaacacctattgttcacaatagaaatcacaatagaaaatgcaaagtctcctccattcatcacaagtaggtcaacatccaggatattgggggcatgaatggtagcccatgcattaggtttgggaattttttcctctcattccaaagattcatatcctaaaaaggaaacatgcaagaatgaaacaggggcatatactataatgaaataagatcatcataagaaatacaccatgcaggtgaagggaaaatgagaccactcatcagtaactgaaaggacaattctgagatctgggagatactctgggttcccctaacccgaggaaggagactgttcctttattaggccctgattttgctctctggaagcagcttcctaatttattcttttaggcccatggatctgccctctggctagttctttgttttcccgttattatccttctcagctacttctgatataagcatgsggtggcataccctctttgggagctga

SEQ ID NO: 345010 - DNA, 625 bp, Homo sapiens
aaaagatttatgtatgctttagagcttccttcagataaatgtgtttattattattatttcatctgaaagcttttcagatacactaaagctaatactagctatctagtggtaggctctgatagttggtaaaagagacaccctgggcttgacagtttgtgcccatcaagaagcaagtaaaataccaaccacacagatagcacatctagtgttcaattcacagcaactcataacttccattcatgattgaatcagctgaaaattaggagagttcactaatttgcttcaactgagccatcggaatggcatatggcagttgcttttcaatggctagttattcagcttcaagggaatattccagagaagtattaagtgaaagcccaatatccaaatcatttatcatggatcggttcttgccgaagtattgagaggaattctgcagcttttctagggcaagtgtgcctgacaayccaccaaaacaccctcagagagacctggggatggaaccttgtgggaacagccttgtcatttagaaggaacctaagtttcaaagccagacaaatgttgcttcactcatgctatcagtcagttagtgaaggcatcttgattaaccttggcataagcagaa

SEQ ID NO: 345011 - DNA, 551 bp, Homo sapiens
aacttcctttatgtgtggccaaggactgaaaattcaaaatggacagaagtaacatatagcacatccaggactgacttgtgaaaacctcttgtgttattttccattctcttcctccatctgctagctggatgtagacatccagcagaggacgccaaggccctgggattggtagacacacagatggaaagatgctgggytccgaagcactgcatgaaggctgcctgccaaatccccacattgaaaatcatttgagtgagtacatagaactctactgtattaagctacttaggttttgggcttctttcttagagcaataatcaatgacattctggaaaatgtttaagaatcagcactctgaaaaatgattcctgatttgtagtgtttgccaatttccatggtgtaaatactcccaccatggccaatttcaagttaccaatgtgacattactgaatgtggagttgcaaaaagatgtgcataattagtcctcatgagctagtgagcaccagctccaggacaccatactcaaagtaatcatttcgtgactaatattg

SEQ ID NO: 345012 - DNA, 497 bp, Homo sapiens
cactgataatattctggtgaacatccctctagacctctcttttgtatagaaatatatatacactgtatatatgtatgtatatatgtatatatttctaataaatgggataatgccacacgtctctcaaaaacatgtggttcatagctttacatttcaataaattgaggtctacttcactagttttagaagctaaagattttaggtgtaacaaaatgtacttacctaaattattctatattttattgttattttttattaatttaagcaataatgcaataaacatattcattcattcatattttcacatgagtatatttatcttcttaaattcccaaaagtgaatttgacaggtcaaagggtatattccttttatatactgatatgtatcctaaaattgaacaccagaaagactattgtattttgtatttcatgtccacttcaatagttcattcaagtaatcgcttcccaacmcttcataaaaatagcattttcaatct

SEQ ID NO: 345013 - DNA, 543 bp, Homo sapiens
ttcctcagtatcttaaccagctggggctgctatcacaaaatgccatagactgggtggcttaaacargagatgtttatttctcacagttctgaaggctgggaagtccaaggtgaaggtgccttggaattagtgtctggtgagggccctcttccttgtttgcagatggcaccttctcactgtatctttacatggtagagagagaaggggttctggcctcttcctcttcttaggagagaatcattcctatcatggaggctccaccctcatgacctcatctaaaccgaattaccttccaaatgccccacctataaatgtcctcatattggtgattacagcttcatcctaagaatctggggaggacacaaacatttagtttctaacactcagtttctaagtagaggttcggacctgtaggaatggaggctcctggaaaccagaggggtcagaagaaagccagacccatcagatttcttttatcagatgtcaacaaatcttcctcagtacccacctgtgcctgtggaaagctcttcccgtcagagcaat

SEQ ID NO: 345014 - DNA, 543 bp, Homo sapiens
ttcctcagtatcttaaccagctggggctgctatcacaaaatgccatagactgggtggcttaaacaagagaygtttatttctcacagttctgaaggctgggaagtccaaggtgaaggtgccttggaattagtgtctggtgagggccctcttccttgtttgcagatggcaccttctcactgtatctttacatggtagagagagaaggggttctggcctcttcctcttcttaggagagaatcattcctatcatggaggctccaccctcatgacctcatctaaaccgaattaccttccaaatgccccacctataaatgtcctcatattggtgattacagcttcatcctaagaatctggggaggacacaaacatttagtttctaacactcagtttctaagtagaggttcggacctgtaggaatggaggctcctggaaaccagaggggtcagaagaaagccagacccatcagatttcttttatcagatgtcaacaaatcttcctcagtacccacctgtgcctgtggaaagctcttcccgtcagagcaat

SEQ ID NO: 345015 - DNA, 614 bp, Homo sapiens
cttcttaattcctaggactatcaagtagtatgcgatccaytgagtttgtttttcatgcttatgttatgatgtggagaggtaatggctggggctctattagccatctagagccatgaggacaaaggccactttctgggtactaaagggtgacctttgggatggagtctggttcctacaggattgtggcacctctaggctcccctgttagattgcccaggctctcctcccacccactacccagcctccaacttggctcagtacagctccaccagcacttgcttctctcaggtcttccccagcacctacattgaaattgttacctgacttgcctggatttctcaccaggctgtgttctccaaaaaggctgggaccttcaaggctagacacctctcatttctagcaaggtgcctgctgcacaataatgtttgttgaatatgtgaaggaatatgtaaatatgtttattgcacgagtgaataactggctgaaataatgaacattttcttacgaaaacattaaagatgcaatagcataggtggtgttctagctaataaaatcctgtgggtgcagaaagctgcaaagagcagagcattttgggtgctaactaggccaaattc

SEQ ID NO: 345016 - DNA, 577 bp, Homo sapiens
gtgtgaacaaaaggacattaatcacaagtaaatgtaaaatatttgctccagaaagcttgaagatcaattgagtccatgggagtaaattactcaatgatctcttgaagatacaagaatagaaagagaagattatttaattacaaagaaggtctctgtggagaacatgccattcacaatccatcaatatgaattcagaacatcggccaagctttctgttctaacctcatgacacaagctttctgttctaacctcatgacaccgaagcctggatatctcccagacattctaggaaagattacttagrggtgttcattgttctctagagtccttagctggtctgaggtcataatatagacactaatttttgttctgttaaatcagcaatctaccttccatgtatttgcttaaagtatcttttaccaagaccactatatttcctttaataattcaataataacacagtcatactactgaaaactgtgatgtgaattagatcacattatacaaaaccctcttgctatactaagggggtggtctgttaggaaagagtgccgtatactgctaggagtcagtgtgc

SEQ ID NO: 345017 - DNA, 609 bp, Homo sapiens
tgaaacttcagtgagcgtcaataaagttatcattacagtctcgtgcttaaggataagacatcgctcaacaacaccccgtagaattctaaacaaatagatgtaaatgggaatttagaagtaatatgatacaatctcctatctgatccttagaattgattggtaaaagaataaggaaataaacctaagcctttaaaaataatcttaaaggcctttgtggatctttaaataccagcatattaaaaggagcacaataattggactcgcgasaatactcactcttgaaacctttggtcaccatataagcagttagaccttccagaggccgccattctctgagaaggcccaaattagtcctggtggagagaccatatgtaaaggccctgaaactatgtgaagagagagagggacagaggcctagcaaacctcaactgacattcctacagacccttcttttctagatcctgaccgcaactgcaggagagaccctatgccagaactgtctagtccctcttttctcaaattcctcagaactgtgagatatgactcagaaattgtgagatataacaaaatgagtgctattattttacatcactaggttttgtgatgatt

SEQ ID NO: 345018 - DNA, 609 bp, Homo sapiens
tgaaacttcagtgagcgtcaataaagttatcattacagtctcgtgcttaaggataagacatcgctcaacaacaccccgtagaattctaaacaaatagatgtaaatgggaatttagaagtaatatgatacaatctcctatctgatccttagaattgattggtaaaagaataaggaaataaacctaagcctttaaaaataatcttaaaggcctttgtggatctttaaataccagcatattaaaaggagcacaataattggactcgcgagaatactcactcttgaaacctttggtcaccatataagcagttagaccttccagaggcygccattctctgagaaggcccaaattagtcctggtggagagaccatatgtaaaggccctgaaactatgtgaagagagagagggacagaggcctagcaaacctcaactgacattcctacagacccttcttttctagatcctgaccgcaactgcaggagagaccctatgccagaactgtctagtccctcttttctcaaattcctcagaactgtgagatatgactcagaaattgtgagatataacaaaatgagtgctattattttacatcactaggttttgtgatgatt

SEQ ID NO: 345019 - DNA, 609 bp, Homo sapiens
tgaaacttcagtgagcgtcaataaagttatcattacagtctcgtgcttaaggataagacatcgctcaacaacaccccgtagaattctaaacaaatagatgtaaatgggaatttagaagtaatatgatacaatctcctatctgatccttagaattgattggtaaaagaataaggaaataaacctaagcctttaaaaataatcttaaaggcctttgtggatctttaaataccagcatattaaaaggagcacaataattggactcgcgagaatactcactcttgaaacctttggtcaccatataagcagttagaccttccagaggccgccattctctgagaaggcccaaattagtcctggtggagagaccatatgtaaaggccctgaaactatgtgaagagagagagggacagaggcctagcaaacctcaactgacattcctacagacccttcttttctagatcctgaccgcaactgcaggagagaccctatgccagaacygtctagtccctcttttctcaaattcctcagaactgtgagatatgactcagaaattgtgagatataacaaaatgagtgctattattttacatcactaggttttgtgatgatt

SEQ ID NO: 345020 - DNA, 523 bp, Homo sapiens
gataaccagaacagatttttatttctcaattgaaatatttctttcttttatttctccctccaggagagaattcaggagaagtttcagtctggttaaaatggccacctcttcccaggtcctttgtacattagtgggagggaaaaakgtcattttatcttgtaagaaatcaaatagtggactttccctctaccggaaaaacaaggagaatacatatacaaaattatgcttgctttaaatcgaatgccattgtgtcatagtggagcatgggagaaaaagttgtgctgtgtgaccctgtgaaacacaaggcttgtatgcccaacctggggagcagtgactcttctcgttctcagccaggcagtggattgagcttgatgctcgtggtgcccgctcttccacaagcttgggcaaggatcccaatgaaggctctgatggtgattgcgtgctgcattcctccttggacccctttccagtatgatgagctctaaggaagcagcacataaagcagcacaggaaatgcaagaca

SEQ ID NO: 345021 - DNA, 605 bp, Homo sapiens
tgtttgcagctaattgcaccattaaccaaagaaaatcatatgatataggcctgttgtcagtatgagagaggactaccaaaaggcgtgaatattgagaaatgagaacaatttgggtaacaactacaatctgcccaccaaaaaaggacaaccaagtagttcttcacttgagtgacttaacaagtgtctttaatttcttgtttctttttagaaaaccaaaaaagccccaaccctgaatatcatagattatatgaattagtttgtgccatatatatatatatatatatatatatatatatatatatawaatttcttactcaaagctgctgatcctgattatgcaaagcttgtctgccatatttatactcttgatgtaccatggcaaaatttctgtaaacagggttgaataaatagatgacagagaataccttatgtaccattacacaagtgaaaggcgtacttcagacttggaatatacattcaccaaatgtgaaagacaatggtttacaaagcttactatacaatgtaaccttaccaaaatgatttcttttatattttctgtatttaattttaaaaattatgatagtaatgtatggttgttgaaacaa

SEQ ID NO: 345022 - DNA, 605 bp, Homo sapiens
tgtttgcagctaattgcaccattaaccaaagaaaatcatatgatataggcctgttgtcagtatgagagaggactaccaaaaggcgtgaatattgagaaatgagaacaatttgggtaacaactacaatctgcccaccaaaaaaggacaaccaagtagttcttcacttgagtgacttaacaagtgtctttaatttcttgtttctttttagaaaaccaaaaaagccccaaccctgaatatcatagattatatgaattagtttgtgccatatatatatatatatatatatatatatatatatatataaaatttcttactcaaagctgctgatcctgattatgcaaagcttgtctgccatatttatactcttgatgtaccatggcaaaatttctgtaaacagggttgaataaatagatgacagagaataccttatgtaccrttacacaagtgaaaggcgtacttcagacttggaatatacattcaccaaatgtgaaagacaatggtttacaaagcttactatacaatgtaaccttaccaaaatgatttcttttatattttctgtatttaattttaaaaattatgatagtaatgtatggttgttgaaacaa

SEQ ID NO: 345023 - DNA, 605 bp, Homo sapiens
tgtttgcagctaattgcaccattaaccaaagaaaatcatatgatataggcctgttgtcagtatgagagaggactaccaaaaggcgtgaatattgagaaatgagaacaatttgggtaacaactacaatctgcccaccaaaaaaggacaaccaagtagttcttcacttgagtgacttaacaagtgtctttaatttcttgtttctttttagaaaaccaaaaaagccccaaccctgaatatcatagattatatgaattagtttgtgccatatatatatatatatatatatatatatatatatatataaaatttcttactcaaagctgctgatcctgattatgcaaagcttgtctgccatatttatactcttgatgtaccatggcaaaatttctgtaaacagggttgaataaatagatgacagagaataccttatgtaccattacacaagtgaaaggcgtacttcagacttggaatatacattcaccaaatgtgaaagacaatggtttacaaagctkactatacaatgtaaccttaccaaaatgatttcttttatattttctgtatttaattttaaaaattatgatagtaatgtatggttgttgaaacaa

SEQ ID NO: 345024 - DNA, 575 bp, Homo sapiens
gtttccctctttgtgtaatcaaaagcaggttactctactctgagccaccagttcctcaactttaaatagggattacaaacctactttgcaagaatattagaagaattaaatagaatcatatatacaacctagcatggggcctgctatcatggaccctacctgcatgccatgatgayatgcaaaaggcatctgcaggccttcctcaatccattaagttcaacacttaataatcaaatagaacttccagccaaatctgactctgggtcctctaaattccacctgattttatagtcagttaacagcaagggtgtctcccttattagtgaagcataggggccctttacagcctttgtgtccctgagtccttggcttctagcacagtgcctgtaggcaggacgttacaaaattataatccaaatccagttttttttttaattaaatgatttctatttacaaaacaagacttttttttctgggttttctattgaccactccaccctgattttaaaatctaaggagaaaatgacccgtgactctgtgattacccctctcactggagctctgttaggtttgca

SEQ ID NO: 345025 - DNA, 562 bp, Homo sapiens
atactttaagttctgggatataggtacrgaatgtgcatgtttggtacataggtacatatgtgccatggtggtttgctgcactcatcaacccatcgtctacattaggtatttctcctgatgtgttttacacattattcctgaagctatttctaagtattttaatttttgcaatcaacagaaaaaactgggattttttctgacattttctgttttgctgtttatataaaaggctgccaattcctctatattaattttgtatctggtcaattactgaattattttgtttgtagtagttttcaattgattctctcagagttttcagatacctaatcatgatatctgtaaataagaataattttaccacctcctcttcaatttttatatttttaatgtatttatcttgtctgatcatgttgggtaaaacccctaggacaatgttaaataataatgaacaaattaaatagtagtaaacatcccttgtttctgactttctgccttctctcttccaccccacaatttgagtatattatcaccccagtgttcacttttatactgttagcta

SEQ ID NO: 345026 - DNA, 562 bp, Homo sapiens
atactttaagttctgggatataggtacagaatgtgcatgtttgktacataggtacatatgtgccatggtggtttgctgcactcatcaacccatcgtctacattaggtatttctcctgatgtgttttacacattattcctgaagctatttctaagtattttaatttttgcaatcaacagaaaaaactgggattttttctgacattttctgttttgctgtttatataaaaggctgccaattcctctatattaattttgtatctggtcaattactgaattattttgtttgtagtagttttcaattgattctctcagagttttcagatacctaatcatgatatctgtaaataagaataattttaccacctcctcttcaatttttatatttttaatgtatttatcttgtctgatcatgttgggtaaaacccctaggacaatgttaaataataatgaacaaattaaatagtagtaaacatcccttgtttctgactttctgccttctctcttccaccccacaatttgagtatattatcaccccagtgttcacttttatactgttagcta

SEQ ID NO: 345027 - DNA, 562 bp, Homo sapiens
atactttaagttctgggatataggtacagaatgtgcatgtttggtacataggtacatatgtgccatggtggtttgctgcactcatcaacccatcgtctacattaggtatttctcctgatgtgttttacacattattcctgaagctatttctaagtattttaatttttgcaatcaacagaaaaaactgggattttttctgacattttctgttttgctgtttatataaaaggctgccaattcctctatattaattttgtatctggtcaatwactgaattattttgtttgtagtagttttcaattgattctctcagagttttcagatacctaatcatgatatctgtaaataagaataattttaccacctcctcttcaatttttatatttttaatgtatttatcttgtctgatcatgttgggtaaaacccctaggacaatgttaaataataatgaacaaattaaatagtagtaaacatcccttgtttctgactttctgccttctctcttccaccccacaatttgagtatattatcaccccagtgttcacttttatactgttagcta

SEQ ID NO: 345028 - DNA, 654 bp, Homo sapiens
catttttaaagagcagtgtataaactagtccaataccatgactttcattcatatcatatacatgaattaaagtttaattctttgaaacttagcattgcagtatttcatgcataataacagtttgtaatacttgtttgtctgttaccaccattcctctaaggtcctccaaaggacctaagattattatcctacactttgtatttgaggagactgaggcactgattttgaaaaggattgcctgtgctgctctattacagcagctcaagcatgcaagttttcaggaacaaatcacagagaacacttggtatgacttttccccacaccatccactcagcctctcagacctctaaagcaaagtctgcccatcagctctgccccagcctgaaaagggcccatgtccaactttcaagcatttgtctcttacrtcatcgtcagccttgtgcactagacttggaatcaacatcaaggtaagccttggggagagatcagatttgtagatctggaaacttcaagccaatacgacagcagttccttggacattcaatccaaaagccccacttggtggtggggagttgggggggtgagcccatggatccgtaccagagaccagcctgcctctggaggtgttccaggctctgatgcaaccaacagcca

SEQ ID NO: 345029 - DNA, 547 bp, Homo sapiens
gcaagtcacactgcagcatagggctacaagaagtcaaaaaattctacatttaaattcagcctttcagttctttataaggtgtcttgtcaaggcagaaagattgaagtgtttacttggcagtttttataactttttgaaattcagatgtgtatgtgagcctttgtttctgctcttccctcagacttcacacagttaggagccggtctgcccccaacctctcgatagagcatttataatttataaagcccttttatacgtggtcaccaaatcctcccaaccaccccatttcacagaaagaaacaactaaaaaccatctgagtctcaaggaggttccttgacatatccaaatcacatgggcaataagaagtattgttttacctctcccaggcaggaggcatcttggatacaggttaagaagcaaatcaaggtcacaaccatcatcttaggggatggagttttggcctctcrtgcaaccgtcgatgtacaaaagtctgggaggaattccctgtttccaagatgccctgtttgtgggtcaagaggaaggaga

SEQ ID NO: 345030 - DNA, 614 bp, Homo sapiens
gagcctttgtttctgctcttccctcagacttcacacagttaggagccggtctgcccccaacctctcgatagagcatttataatttataaagcccttttatacgtggtcaccaaatcctcccaaccaccccatttcacagaaagaaacaactaaaaaccatctgagtctcaaggaggttccttgacatatccaaatcacatgggcaataagaagtattgttttacctctcccaggcaggaggcatcttggatacaggttaagaagcaaatcaaggtcacaaccatcatcttaggggatggagttttggcctctcatgcaaccgtcgatgtacaaaagtctgggaggaattccctgtttccaagatgccctgtttgtgggtcaagaggaaggagaagcattgggaggaactgtggagggtatgcaggcaaaggcccaggaaccctgaaggaatcaaactctcaacatccaaaccackgcttaacatcattgtccttcagttactaatcttctgtcatttaagcaagtggcctaataatgactttgttatttgtattccatatttatacattagatttaaaatcatcccaaggaaatgccagacactaggctgagtc

SEQ ID NO: 345031 - DNA, 558 bp, Homo sapiens
tatcttgtccagcctgctgccactggatcataggtaaggtggatacattatccagccagctgccactggactctttcctctgtatgtgagcccctagtaaaacctcatgtcttgtttgctggctctaggtctcctcttcggcctcttgaacctagtaccttccctattgaggtgaataggggttcagcccaacatactgtcagtaggacagggagaagagcaaatccctggcaatgtgaaacacacacacacacacacacacacacacacatagagtgaataaaataggcaccaatggctcagtgtccatatctgaataattagtattcttaggatctgctttagtacatactctcctgctcagcaattcagtaggttttcaagacgcttcaacagctccttctcctttacataaagtgtgtctgctgatgatccatacagyccgtgtcactccaaagagggctcgcagcattcttcctagcctggccccatgtcaggctacaacacttgcagaggaggagaatggaactttctgtccataaaatgacgtcatggcaa

SEQ ID NO: 345032 - DNA, 513 bp, Homo sapiens
ttgttctgaaagccaaccttcacatacctgaagacattattaaggcatctctccaacttctcttctctgggatgatcaatcccaattccttccacttgtcctggtaaatcttactttctagcttttaatcatctctatgactttctcctgaactttggtatacttaaagattaattggagatacaggtggtcattcatgtctttgaggcagcagttctcaaaacattttgctctcagtacccttttgacactcctaaaactgaaaaccccaaataaattttatttacatgggttatattagattkgtgcaaaagtaattgtggtttttgccattgaaaatagtatctattaatattttctagattagaaattaagactgagacctctctaagacccaaaatacacatgtaagcagtccattatctgtcagtgtgatgaagtcatcacgtcacatagcctttagaagactctattgtatactcatgagagaatgaaactgagaagacaaataac

SEQ ID NO: 345033 - DNA, 585 bp, Homo sapiens
ctgcttctgggtcctgtccaaagtgatctgcttgggataacatagtttcatcttcctctaagtctatcatttcaaaactgtcattgatgaaatgacagcttttaaagatgttttaagatgatgcaatttgagattaaggtttgtgctagcagccaagaattacagcttcaaaatgtcttcacagatacaaagtcctagttaaagtcataccttatagacatttaggaggatatctttttctcatttttgactatgcttaaatgacaaaacaattcagagaaaaagcrtaattacccagatataccagggccaaataactctgtactcatattgaaaatattggagacagaatagacttatttaaatgaggcacacaattgcaaagagttaacagataatcccttccttttcagtgttagacaaacaggtgacatctctgagcacttcagacatgatcttgattgattggaaaggtttacagaaacccataaatattataatttatgtttagtccaagggcatagaaactttgtagcacatgaagatgcagcatatttcatcttagatttttctctacatccgtgt

SEQ ID NO: 345034 - DNA, 665 bp, Homo sapiens
  misc_feature (1)...(665): n = A,T,C or G
tatgtgtgtgtgtgtgtgtgtgtgtgtgtgtgtgtgtgtatatatatatactttntttttttttgagacagagtctcattctcacccaggctggagtgcggtggagccatctcggctcactgcaacctctgcctctgttcaagcgattctcctgccttagcctcccaagtagctgggattacagtcgcccgccgccatgcccagataatttttgtatttttagcagagatgaggtttcaccatgtcagccaggctagtttcaaactcctgacatcaagygatctgcttgcttcagcctcccaaagtgctgggattacaggcatgagccactgcgcccggctcctgcctaattttagagacaagaaatataaatactcattttcccagctttgtttgcaattgtggtggtaatatgacaccattataataagtaaaatgctttggagatctaataaacaataggtaataaacatactgtggggatgtatgagaaactaagaagttagataagaagaaagagttgtagtagctgtctcccttctctgctttattgtattttgaatttagacatgatgccacaagcaatggcagtcatcttgtcatcatgggggaaaggccaagacactcacagatatgcagctatgatatttttatgccattgaaca

SEQ ID NO: 345035 - DNA, 665 bp, Homo sapiens
  misc_feature (1)...(665): n = A,T,C or G
tatgtgtgtgtgtgtgtgtgtgtgtgtgtgtgtgtgtgtatatatatatactttntttttttttgagacagagtctcattctcacccaggctggagtgcggtggagccatctcggctcactgcaacctctgcctctgttcaagcgattctcctgccttagcctcccaagtagctgggattacagtcgcccgccgccatgcccagataatttttgtatttttagcagagatgaggtttcaccatgtcagccaggctagtttcaaactcctgacatcaagtgatctgcttgcttcagcctcccaaagtgctgggattacaggcatgagccactgcgcccggctcctgcctaattttagagacaagaaatataaatactcattttcccagctttgtttgcaattgtggtggtaatatgacaccattataataagtaaaatgctttggagatctaataaacaataggtaataaacatactgtggggatgtatgagaaactaagaagttagataagaagaaagagktgtagtagctgtctcccttctctgctttattgtattttgaatttagacatgatgccacaagcaatggcagtcatcttgtcatcatgggggaaaggccaagacactcacagatatgcagctatgatatttttatgccattgaaca

SEQ ID NO: 345036 - DNA, 609 bp, Homo sapiens
ttgaacaaaattatcaaattatgaatgcactaagttgtatcactgcaacttcattttggattatgtaaatttatcctaaagaaatattcactcacatacacaaagacacgtatacaagaacattgatttcagtactctgtaatgataaacaatttgaaataaaatgaatgttgaccatgaagaaaagtggttaaataaatcatcatcactatgcagccataaaaaaagagagaccctaaaggcacaaacccaaaaagaccatcaaaatacattgtatgtaaaaaaaatacatgaaaaaacaatatctataatatggccacatttatgtgaaaatgtttgtgtgtgtacataagtttgtatatgaaaygttgagaatttttttttcagggaaaagggctaagttttcaatttttctaatcctcaggactgtttgaattttggtcaaatatgttcacatataaacaggctgcataaataaatttattcataaaaaaataaacacttgatagcagcttaaatgcttaactttcccatgagaatttgagtttcagatagtaattaaaggagtggaatggaattccatgtaaacaggagaaaaatatatatgga

SEQ ID NO: 345037 - DNA, 473 bp, Homo sapiens
tttttaatttttgtgggtacatagtaggtgtatatatttgtgggatacatgagatgttttgatgcaggcatgcaatgtgtaataatcacatcatggaaaatggggtacccatcctctcaagcatttattctttgtgytacacacaatccatttatacccttttacttatttttaaatgtaaaattaaattattattgactatagtcaccctgttgtgctatcaaatactgtcttattcattctttctaactggtgcttcttgactctttagtttttgaattagaataaaatcatttcactgactcaacaatttgagaatgacaaaaattacttggaaccaaacaatttttatccttctaatgattactaattcctaattgattaaatgttatgtagttttttgatttgattattatcaccacctatcacaaaccaaaaatggaaaactcttagagcaatcaatcttttaaata

SEQ ID NO: 345038 - DNA, 561 bp, Homo sapiens
tttctcaataagatgagaaagaataggaagtgcttagctaaatgtctgacacatggtaagcattgagtaatggtcagcaattaataaaaattgtggttaccagggactggaaagggaggggaaagaagttgctgtttaacgggtatagagatacagatttgcaagatgaaagtgttttggacatctatttacaacagcatgaatgyacttgtattatactgaactgtacactaaaaaatggttaagatggtagattttgtgttttgtttttaccacaataaaaaagaaaaagaaaaaaacgctaatattctcaagcaccaagtttattgactagtatcccactacttataactgtggttgtaagtagtaaccacaattatccagaatcttgacagatttcctggcagttttcaaacttcaatgcttttcagctctaaaatgtatactgtagttgcattatttttaaaattaatacaaatatttgtacatatttatggggtacatgtgatattttgttacgtgcatcgagtgtgtaatgatcaaatcagggtatctgaggtg

SEQ ID NO: 345039 - DNA, 485 bp, Homo sapiens
gtgctatgccatggaaatcattttacaatgtattactgtgtttttaaatactatttacrgacatgaatcatctttctaccacttagaagctaagtaatgaaagcctgagagcccacaaggagttgttgaagactccagcgtatttatttattataatttagttcagatgtacactattctctagtcacctaatcaataataagtgattaaaatgaccaattaaatgataaacatgttggggttttcaatctttttattgactggactagattgagtgtacagcttagacatggtataggaattattcaaatgctctcaaaaattctattggaaaatgtattcaatcatagattcttaatcaggccaagaggaaattctaagaattttaaaaagcatatcacaaaatgtttaagtgcatgaactgtggggccagtgagacctgagtctgggtctcaactatgttctgccatttactagctatatat

SEQ ID NO: 345040 - DNA, 514 bp, Homo sapiens
tttattgagtgcctactacatctcaggtttgtaccaagtgctcttcctgcattagctcacttaattctgaggcaaactgaggttagagagactaggcaacttgcctgtatcttcacagcatgtgtgtggcagaagtaaaattcaaacccaaattcatctccaaagataagcttttaggaccacaaaatactctgtagtatatttgtaaagctaacaattttcttttacagcatagaaaattatatttcaatatatggaggctaaaccaggagtgaagaaaatacgactgtggttgtcttagtagatwgtgtcttcttttccctgtcataatattgaatgtggtttggaataaatgaccaaatccacaactctgaaaatatctaaaatgtgttggtgctgtcatgtcaaacacagtcttagttatgccatagtaatttttaaaattgaattttcatagttagctcactgagatgggtccaagaatgaagcagagcatgaaacttcatatatggat

SEQ ID NO: 345041 - DNA, 523 bp, Homo sapiens
tattttcagatcatagctatatttaattacatcttctgtcacataaaaaatggctaagatttttaacctttctttttcaagagtaaaggcagctccctggcatgaccaggaatgggccttttgttgaacacaaaattgagatttatggtgctgggttatataaagaaaaaggaaaataaatgtatttgtcttgtgactataaagaatgatttcttgtagatttagctttggacttctacatacaaaagagggatgtgtgatgtggcacagtaagactaaatcctaatgtgtacaaatcacctggatattgtgttgaaatgcagatgcagacttaggagatctgagggagggccttagatctgcatttccggtaagatccccattgatgctaatgcatttgggcctactggccacacttyaagaagcaagagtatagaagaaagaactaaggtatatagtattcaagaagtctggctttagttccagtttcatcactaattagccatgagacctcaccaatatc

SEQ ID NO: 345042 - DNA, 467 bp, Homo sapiens
cctgcttgttgatcacttgtattcaacaagttactcagtaaatttggctgtgctacatcgatgcattaattttggtttgcaaaagcctattctctgtgttatartaaaggccttgtttcctcccaatcaataatactttatgctagaaaacagggcagattctaggcaaatcttgaaatgggaagattgttttcttaattatccatctgcttttcctttctgagccctccaaaacactttttttggttacctctcatttacacaattcagattcttttactatgatgcccaacagtttaggacagatatatgagagggaattttctattaagtggtggggagtggtaatagactaactttccaataccttagtttccatatatataaacttacaactaaaatatctcttcacagaaatgttataggatcaaaaataaataaggtcatataatatacaaaacagaata

SEQ ID NO: 345043 - DNA, 467 bp, Homo sapiens
cctgcttgttgatcacttgtattcaacaagttactcagtaaatttggctgtgctacatcgatgcattaattttggtttgcaaaagcctattctctgtgttataataaaggccttgtttcctcccaatcaataatactttatgctaraaaacagggcagattctaggcaaatcttgaaatgggaagattgttttcttaattatccatctgcttttcctttctgagccctccaaaacactttttttggttacctctcatttacacaattcagattcttttactatgatgcccaacagtttaggacagatatatgagagggaattttctattaagtggtggggagtggtaatagactaactttccaataccttagtttccatatatataaacttacaactaaaatatctcttcacagaaatgttataggatcaaaaataaataaggtcatataatatacaaaacagaata

SEQ ID NO: 345044 - DNA, 581 bp, Homo sapiens
cccaaaacattataatttcagcatgcattcaatacaaaaattattattgatatattttttattctttcttttgtcatactaaatctggtatatattttacccttacaagacacctcaaatgctcaatagcccacatgtacctactggctactctattagcatagcttagagagatatagagactaccaytgactttttaaaaacagtttattttgaactaattataggttcacaagatgacgagaaaagaggagtaaggccctggatacccttcattctgtttccagtaatactgatatcttacataactgtagtacaataagaaaaccagaaaatttattctggtctgtcattgccttttaaacacagccttttctaccctatatacctagatttctctgagctcacaagttgaataaggtctttcttctcctatggaaataaatgaataataagagagataggctaaagctatttcattccagtttgctttctcctagagtgtatagcagatgtcaccttccacttataaaataaagatcttttccatctacccactgcagtgtattatactcttcctt

SEQ ID NO: 345045 - DNA, 581 bp, Homo sapiens
cccaaaacattataatttcagcatgcattcaatacaaaaattattattgatatattttttattctttcttttgtcatactaaatctggtatatattttacccttacaagacacctcaaatgctcaatagcccacatgtacctactggctactctattagcatagcttagagagatatagagactaccactgactttttaaaaacagtttattttgaactaattataggttcacaagatgacgagaaaagaggagtaaggccctggatacccttcattctgtttccagtaatactgatatcttacataactgtagtacaataagaaaaccagaaaatttattctggtctgtcattgccttttaaacacagccttttctaccctatatacctagatttctctgagctcacaagttgaataaggtctttcttctcctatggaaataaatgaataataagagagataggctaaagctatttcattccagtttgctttctcctagagtgtatarcagatgtcaccttccacttataaaataaagatcttttccatctacccactgcagtgtattatactcttcctt

SEQ ID NO: 345046 - DNA, 614 bp, Homo sapiens
agatcatagactaaaagtgaaagctagaggcataacattttctagaagaacacttaggagaatatatttatgaacttgaggtaggcaaagatttctaaaagakaatacaaacaacatcaataataaaagaaaaaaattacaaattggactgcatcgaattttaaaacttctaatcatcaaaagacaacattaataaagtaaaaagactaggaagaaatatttgtaatacatgtatctgacaaagagtttgtatctagaatcataaggaacttctacacatcattagtaaacacataaatcacccaacaaaaaaagatatttgaataatcactatgcacatgaaaatcaatagtattaaggaaatgcatgtttaaagcacattaaaatactactatatctattagaatagttaaaacgaaaagaccaaatattggtgaggatgtggagcaatggaactcttatgtactgttcggagtataaaatcatcaactacttagaaacccatttggtagtttttaataaactgtaacaactcaatcctagcaattctatttctaggtaggcatccaagagaaataaatggatgtgtccacaatgtaacttttatcagaata

SEQ ID NO: 345047 - DNA, 614 bp, Homo sapiens
agatcatagactaaaagtgaaagctagaggcataacattttctagaagaacacttaggagaatatatttatgaacttgaggtaggcaaagatttctaaaagataatacaaacaacatcaataataaaagaaaaaaattacaaattggactgcatcgaattttaaaacttctaatcatcaaaagacaacattaataaagtaaaaagactaggaagaaatatttgtaatacatgtatctgacaaagagtttgtatctagaatcataaggaacttctacacatcattagtaaacacataaatcacccaacaaaaaaagatatttgaataatcactatgcacatgaaaatcaatagtattaaggaaatgcatgtttaaagcacattaaaatactactatatctattagaatagttaaaacgaaaagaccaaatattggtgaggatgtggagcaatggaactcttatgtactgttcggagtataaaatcatcaactacttagaaacccatttggtagtttttaataaactgtaacaactcaatcctagmaattctatttctaggtaggcatccaagagaaataaatggatgtgtccacaatgtaacttttatcagaata

SEQ ID NO: 345048 - DNA, 420 bp, Homo sapiens
aaatagagcagcctggggaaaactcacactgcacctgcacagataagcaggcagggtccagcacagaagccttttgttctttgtgtgattaatgggctcccaggaaagtttcctccatttttcagacacgtacatggtggaatccatgggaacttgcacagggaagggaaatggggcttgcytaaaacaaacccacagttatacaaacaagagcagctgtgttttgtgcttacctggtgacatcccgcctgcatatacaggaggccttatacaaagagcttttcagataagaaagtttaatcagacagctacagagatgagaggaatttctcatgaaagcttttggattcaactgtaaaagtggcaacccactcagactcccctctctgctgtggagaactttcttcttttgcttattaa

SEQ ID NO: 345049 - DNA, 476 bp, Homo sapiens
tcctctttctgctaaaggcatgtttatttattcagtggttattgggagaagtgaagacacagacctaatccagtgatgcatcattgctgagcacagtctgaggcttactgcctatcttcctyaggagctctcagaactgggactctgtcccacgtggttactgggtaggccagctgggtaacccacctatgaccttcccgtcagtcaccgttccgtgctttcctgtgtgccattcttactaatcttagggactttagtaacaacctcccaactcactcccctgtctccagtcagttcttaatcagagttatcctctatatacactgctgtatgctcagattttctgaagcactgactatttactaaatgtggttattatagaatttggaggaaaaggaaagcaaagtggcaactcaggttctaaaataagaataaaaaaatattgggttctagtgcttgctctcccattaacttcc

SEQ ID NO: 345050 - DNA, 579 bp, Homo sapiens
caagagactaacattcagaataaaaaatgaattcaaacaactcaacagcaaataacagaatccaattagaaagtgggcaaaagaactgtgtatatatatatatatatatatatatatatatatatatatatakaatacacacatacacacacacacacacacacaaacggaataaaatttagtattaaaaaagaatgaaatcctgtcatttgtagcaacgtgaatggaactggaagtcattatgttacatgaaataagccaggcacagaaggaaaaataccacatattctcactcatatgtgggagctaaaaaaaaaaagtttcagctcatgaaagttgagagtagaattgtgggtattagcagctgggaaaggaagtaggtggggaggttgggaagaggttggttaataaatacaaaattatggctagattgggggaattagttctggtgtttgcagcactatagggtaaatatgattaactagaattttttgaatattttcaaaaagctataagagaggactttaaatgctcacaacacaaagaaataataaatatttgaggtggtgtttatgctaa

SEQ ID NO: 345051 - DNA, 452 bp, Homo sapiens
caaactgccagtttgctgctatataccttgttgagtgctttctytttatcatttgctccttgttcatttcttttctaagtatgttctgtgaaccacctggctcagaatatcttgggtgtgttcttaaaaacacatactcctggtactcatcatggatctacttggtcagaattggtggcaggaatattcattttttaaaaattccaaaaataaattccatctagtatagattaagaaaactaacccagaccaactctgttccataagaatgattcttaaaaaaagtttcagaatcgccacaatgtcttccacaatggttgaactagtttacagtcccaccaacagtgtaaaagtgttcccatttctccacatcctctccagcatctgttgtttcttgactttttaatgatcaccattctaactggtgtgagatggtatctcattgtggtttt

SEQ ID NO: 345052 - DNA, 617 bp, Homo sapiens
ttagtattttagtgtttaaaaaatcttttgtattagagttatgggtaaactgcacattgccatcacaatgttaaactgttctgtatttgactatatatctgcctttgcttgtgggatttatacttacaaattctttaatggtactgcttagtgtgttttgactctatttgaaaaacactcttaaacatttctcataaggcagatctagtggtgacraattcccttggtttttatttgtcttggaaatatttgatctcgctttcattttaaaatgatagctgtgcagtgtgtagtattcttggttgacattttttttttcttttagtactttgaatatatcatcctgttctctcctgaccagcaaagtttctgtcaagaaatacactaatagttttataagcattacatgaatgtaatgagtgatttttctcctgctgctttcacaattctctttgctgttgtcttttgacaacttattcacaatgtgtcttggtatagacctccttatgttcagtatatttgagtctggatgtctattttccttcccagatttgggaagagttctgttatcatttctttaaatcaggtccttttcccctttttttttctggaactca

SEQ ID NO: 345053 - DNA, 635 bp, Homo sapiens
agtgttagtatagctcagaggagacatgcagtaggcaggtcctctctgtaggcaggtcatcccatcgagtgtttaactctcagcagagaggaggccctggagagggttgcttctctctgcagtcaggttgtcccatcatctccccagctcctagcagagaggaggccttgcagtgggttcctctctgcagctggtagtcccaacatttctgcaggtctctgaagctttcagcagagaggaggccctagagtgaatagctcctctctgctgctggccatcccatcttctcytcagctctggctgagcccagggcttttatgggcctcagaggggaggaagtgcctgctggtcagtcacagggtggtgatgggtggccagaaaaggcacaagttcccactcctgtcagtgggactggcagcctggcccccagcctgaaggtggggcttcaccagggacctctccctcctgaccagaaatctgtctgcctcctgctgccattcatgtcactggggctcaggactcctctggactttgctccaagatgagcaggcaccgacagcagggagaagccaggcagtgggaagagatacttaccagcctgatgacagggaggccttcctggatccccaagggtg

SEQ ID NO: 345054 - DNA, 450 bp, Homo sapiens
ttcatcacatcttaatgaatccatagcctcaaatgactcgcagtctccatcgtcggtttgtttcttccattgctcatacttgttttgcattgcagcgatcattttatgctcagtaaaaatacttacagtttttgcctttcaattgttgattaaaagtgtgtaaccttgagaaattatctactacaaaaaccactctgtaaggctttcttgattgttaaactgtattttacccaacacggtttcattctcctggtattgtgakccattttatgaagaaagcaaattcagtctctaaatttgtttacactaatcagccacttctgctggctaaggcagaaatgatagggtggaaagtgaggtatttgataatatgttcctatttccttatacatttttctaaaagacgtgtattcaaatacattttaaaactatttttttgttgttgttttt

SEQ ID NO: 345055 - DNA, 503 bp, Homo sapiens
gtaaatgctcagaatgaataagatcaattgtggagaaaaatcgatgtggtctggctgtatgagagtattaactttaatgcttctcatttgtatgtataaattctacttcaaaaagaacagaacaataaaacaatgtgggctggtcctttattattttccttgtaaggaggctgtgtttctgtggtccaaactaattcctcaccatacagaagcagaggagtgacagtttcacctcatgattccaaataattggtttgacttatgtttagagtgaattgaccattttaacagctggattatttgcagtcactcttggttttattgttaggattaaatttatttattcatcaaatctttttttttttgagayggagttttgctcttattgcccaggctggagtgcaatggcgtgatctcagctcactgcaaccaccgccaccagggctgaagtgattctcccgcctcagcctctgtagtacctgggactacaagcatgtgccacc

SEQ ID NO: 345056 - DNA, 594 bp, Homo sapiens
ctctgcaggctgtacaggaagcgtggctggggaggccgcagaaaacttaacaattataccagaaggtgaaggaatgtcttaatggccaaagaaggaggaagagagagagaagaagaaggtgctacatacttttaaacaaccatatcttgtgagaagtcactatcatgagaactgcaagggagatgtctgcccccgtgatctaatcacctcccaccaagcccytcctccaatattagggattacaatttaacctgagatttgggtggagacacaaatccaaaccatatcattctgtccctggcccctcccaaatctcatgtcctcctcacattgcaaaatacaatcacccttatgaacagtccctcatagacttaattcattttagcattaactcaaaagtccacagtccaaagtctcatctgagagacagcaagtcctttctgtctataagcctctaaaaaacaagttagttacttccaagatacagtgaggttacatcacaaactggggttatgtgcctgcagcttttccaggtgcacagtgaaagctgtcagtgaatctagcctagcattctggagtctggaggacggtgac

SEQ ID NO: 345057 - DNA, 645 bp, Homo sapiens
gcttgcactctctggagcagaggcctgagacatatcctgggcccttttagccatggctggagctgaagtggctgggacatgagcagtgtctcaaggttgygcagggcagcagggccctgggcccaggccatgaaaccattctttcctcctaggcctctgggcctgtgatgggaagggctgcaacaaaggtctctgaaatgccttcaaggcattttccccattgttttggctatttagctcctctttactgcagctggcttgaattcctccccagaaaatgagcttttcttttctaccacacggtcaggctgcaaattttctgaagtcttatacccttttaaatataagttccagtttcagatcatctctttgttcacatatatgaccatactctgttggaagcagccaggccacatcttgaacactttactgcttagaaatttcttccaccagatagcctaaatcatcactctcaagttcaaaggtccacagatcccttgaccggggtataatgccaccagtctctttggtaaagcatagcaagagtgacctttaccccagttcccaataaatttatcatctccatctgagactacctactactggacttcattgtccatatcactgtcagcattttaggcacaa

SEQ ID NO: 345058 - DNA, 645 bp, Homo sapiens
gcttgcactctctggagcagaggcctgagacatatcctgggcccttttagccatggctggagctgaagtggctgggacatgagcagtgtctcaaggttgcgcagggcagcagggccctgggcccaggccatgaaaccattctttcctcctaggcctctgggcctgtgatgggaagggctgcaacaaaggtctctgaaatgccttcaaggcattttccccattgttttggctatttagctcctctttactgcagctggcttgaattcctccccagaaaatgagcttttcttttctaccacackgtcaggctgcaaattttctgaagtcttatacccttttaaatataagttccagtttcagatcatctctttgttcacatatatgaccatactctgttggaagcagccaggccacatcttgaacactttactgcttagaaatttcttccaccagatagcctaaatcatcactctcaagttcaaaggtccacagatcccttgaccggggtataatgccaccagtctctttggtaaagcatagcaagagtgacctttaccccagttcccaataaatttatcatctccatctgagactacctactactggacttcattgtccatatcactgtcagcattttaggcacaa

SEQ ID NO: 345059 - DNA, 522 bp, Homo sapiens
cacaacacataattagaaactgtacccatttttgctcactggattatctatggcctagcacagtgctaggcacatagtagatacttaatatttactgagccaattaatgaatgaaccttgggcaagttgcttattattaacaatagcaagcacctgttaagtgcaaaacactagggtcaagttatggcacttagagtctaaagacttttgctcttatatcctaccatttatccttatcartgaaacaacacaaaatgttttgccttcaggatcaaggctttttcagatatagattttaaatggctcagaaaggaatgaatatttgaagaaagaattgtacatagatttaactggaagggaggagcccaaggaatttaacacagaaatggttagtggcacagaccctaaatcacagtcactcagagaatgggcactgatgatgtgaaaaagttagggttggccaggtgcggtggttcacgcctgtaatcccagcactttgagagccaaagtgggtggatcgct

SEQ ID NO: 345060 - DNA, 522 bp, Homo sapiens
cacaacacataattagaaactgtacccatttttgctcactggattatctatggcctagcacagtgctaggcacatagtagatacttaatatttactgagccaattaatgaatgaaccttgggcaagttgcttattattaacaatagcaagcacctgttaagtgcaaaacactagggtcaagttatggcacttagagtctaaagacttttgctcttatatcctaccatttatccttatcagtgaaacaacacaaaatgttttgccttcaggatcaaggctttttcagatatagattttaaatggctcagaaaggaatgaatatttgaagaaagaattgtacatagatttaactggaagggaggagcccaaggaatttaacacagaaatggttagtggcacagaccctaaatcacagtcactcagagaatgggcactgatgatgtgaaaaagttagggttggccaggtgyggtggttcacgcctgtaatcccagcactttgagagccaaagtgggtggatcgct

SEQ ID NO: 345061 - DNA, 576 bp, Homo sapiens
ttcttccacctctgccacacctgagacagcaagacaaaccccttctcctctttctccccctcagccttattcaacctgaagattgaagacctttataatgatccacatccacttaatgactaggaaatatattttcttttccttatgattttcttaatattttcttttctgtagcttactttattgtaagaatatggtatataatacatatacacaacgtgttaattgactgtgttatcagtaaggcttctggtcaatggtaggctattagtagmtaagttttggggaagtcaaaagttatatgggaattttcaactgtatggggagttggcatccctaacccctgcattgttcaaaggttaattgtagttagtatttcctgaggaaagtctacctgaatcgcaagactatcagtcctgatggcatccctgctgttttgttccaacaaatatgtcaataataatatttggttgagacatactaagtggaactggcatagagcagcaccccagctgtagagtgagtgaattgcaggctcaaggtatgatggaagtttagtaaaaatcacagcacttg

SEQ ID NO: 345062 - DNA, 672 bp, Homo sapiens
taccgcctgccttgtttgtcttcagagagaggaatgtggaaataatccttaaaaatcaatagcatattatgaaaacagtacatccttacgttactagaccagaaatgtactctctttccctttacatttttttcctctgggcattataattgtttgggacaaagggaagaagtattaaataggggttcttaacttagagaacttccaaaacatttatgggtagaatttagatgggaagaaactacatctttattttattaactctaaatgaaattgagattttctttcaactatacatgtaggcagcaaattaaagtaggagtagtcgctgtacctgtgactgacaccaatagaagtcacagatgttttcatatcacattatagttgttgcaaatatttcaaaatattatttctactgatctgtattttgaaaataatagttattagatgagctgctagaacttgttagttaatgtgttaattaggaagtccacatgtcactatatcatacatttgctttttaatattggaaaatgtatttcaatataacaaatttcatttctatcatatctgytttattttatgcatttaaagacattctgagaagcagtctatagacatcaccagacttccaaaggggttaataaaacatagaggttaagatcccttgtg

SEQ ID NO: 345063 - DNA, 585 bp, Homo sapiens
tccacttgctgattttctttagcttcagattcattaagggcatgttggcaaatcatactcatctgtaagaacattctaataagttccgtgttgctgtctactacatgagagtcaatttgacaaacagctaattttttaaggaattcagcagttggatttccacacagtaaaaagattggtagagggcagagatttggccaggggcctgggggtggggtggtggggcasggggactaacacaacatgtattgctgttgctgcctatgcaatgtatatctactaacatatgttaaacacacacatacacatgtgtgtgtaacaaaacactatgctaggcattatgtgtgagatgaggaacaagatacagttcttgctttagggtcagtctcataagattgtaaactatgagcccaaatgcctgaattataagacagtatggaatgtatatataattaatatatacactgggcagtctacttagtgtgatgtaacaatgcgggttcccaggccccaccccagacttactgaatctgaatctctgggagtaccatccagcaatctgtgttttaattagctcctatgttt

SEQ ID NO: 345064 - DNA, 550 bp, Homo sapiens
ctgtcctactggttccagtcagagccaagccccatttttgatgtcctcgggccagtgttgraagtcaacttctggacacatctttatcctggacagatcttccttggtccattcataggtctttcttttattctgctccataattgctctttcttggccaagactgctcctccccaaatgatccttgtctggctctacctcctgacttttcacctcttattgtcttcttcctgccctggtcccttttcctgtcagctctcaaggcttacacttattgggcacccaacttcattatttcccaggtgtgaaccagtgacccatcaaccaggtgtcttcagggggactttgccatatcagctaattacatttttacaatttggtgtcttgatcggcagactgaaactgaaatatagggaactctctcatctgcagcagttcagaggaccagttgtctccgtggcaaagtaattagcacgttaggataaaactgtcatctttgatggacttaaaactgtcattcttccagaagagaaagatggactcatcaccc

SEQ ID NO: 345065 - DNA, 550 bp, Homo sapiens
ctgtcctactggttccagtcagagccaagccccatttttgatgtcctcgggccagtgttgaaagtcaacttctggacacatctttatcctggacagatcttccttggtccattcwtaggtctttcttttattctgctccataattgctctttcttggccaagactgctcctccccaaatgatccttgtctggctctacctcctgacttttcacctcttattgtcttcttcctgccctggtcccttttcctgtcagctctcaaggcttacacttattgggcacccaacttcattatttcccaggtgtgaaccagtgacccatcaaccaggtgtcttcagggggactttgccatatcagctaattacatttttacaatttggtgtcttgatcggcagactgaaactgaaatatagggaactctctcatctgcagcagttcagaggaccagttgtctccgtggcaaagtaattagcacgttaggataaaactgtcatctttgatggacttaaaactgtcattcttccagaagagaaagatggactcatcaccc

SEQ ID NO: 345066 - DNA, 619 bp, Homo sapiens
aaagaataggatagtggaggacatcctggaggatgacagcattttaaggggtaggtgaaataagaaagtgcatgaagtgatgggttgggaaccaaatcacagtgttccagaagacaaaggaggagagagtgtcaaaaagttgagagttaacatcagtaccaaatgccccagggtaatcaagtgaggtaatggttatgatgaccattttgtgagaattcacttgtgtgccagactgtgtgttaagtaacttacattcattacatcaggactccatgtaacaaccctatgaagtaggtactgttaatatccctgttttatagatgaggaaactaaggcgcaaaaagagcaagtaacttttccaagctcacacagcttgtaaatgacagaggtaaggttccagtctaggcatcccgattctagggagcttgtaattttaawccccgtgctatagtaatttacagtggcatgatggcggtggaagatagcttcaaatgagtgataaacgatgtctaccacgggcaatacactcatctgagtgtttctccctatctcatttcaacaacttcactttatattttaggaaaccaaagcacacaaagaggaactaacttgcccaaag

SEQ ID NO: 345067 - DNA, 643 bp, Homo sapiens
gtatattggtaaacatgtagcctcaggtaacactgaaaataacaaaatacttggtttgggcactaaagggaaagataaaatgactattttaagtatagacctgagatcttgaacaaatttatatccacaatcgttggtttctttgctaaaagagtagaattatcaccagaaaaaaatccaaggtatgatgactcctttatctattaggctatgtgatttaaaaggatattgtacatgtttgggatcaatagaatttttgtgggtttagccagagacatgatcaggctctttctgttcttgtctttcccaactaatcgtttgcatctgaggtttccactgatatatgacctggttggtgtagtactgagagatctaggattttattcctgtaactattctcaatctctctcaatttctgycttcggctttggaaagttttataagcactaatagttgagtcaaaggcttatagttatttatgcaggatttttcatggctctgatgggttttgtttcagtaaataattgagattctgggttttctggccacataggagggtatgcaaacaggtcaaaatgaagggtagaaggagaggtaaataaaggagcataagacgggaaaacaaaaattgtgagagaaaggt

SEQ ID NO: 345068 - DNA, 636 bp, Homo sapiens
ttctcagtagttagaagttaaagaaataaaaatatttttccccaaaatatattcctttgatatatttttaaatgaccagaagattggagtggctctgaaaagctgtcttttggagagaaaaattgtagctgtagagaatctttattaatgcacccaagctttcccgttctttccccaatctagaagaaattaattgagagtctgacactgtattagctcattttcacactgctgataaagacatasttgagcctaggcaatttacaaaagaaagaggtttaatggacttatagctccacgtggtaggggaagcctcacaatcgtggcggaaggcaagaaggagcaagtcatgtcttacatggatggcagcaggcaaagagagagcttgtgtgggggaaactcccatttttagcaccatcagatctcaagagacttattcactatcatgagaacagcatgtgaaagatccacccccataattcaaatacctcctcaccagtttcctcccattacatgtgggaattgtgggagttacaattcaagatgagatttgggtggggacacagccaaaccatatcaggctccattaaagatctgaacaggaacacttaccatctattgtctctgaggcctgct

SEQ ID NO: 345069 - DNA, 636 bp, Homo sapiens
ttctcagtagttagaagttaaagaaataaaaatatttttccccaaaatatattcctttgatatatttttaaatgaccagaagattggagtggctctgaaaagctgtcttttggagagaaaaattgtagctgtagagaatctttattaatgcacccaagctttcccgttctttccccaatctagaagaaattaattgagagtctgacactgtattagctcattttcacactgctgataaagacatagttgagmctaggcaatttacaaaagaaagaggtttaatggacttatagctccacgtggtaggggaagcctcacaatcgtggcggaaggcaagaaggagcaagtcatgtcttacatggatggcagcaggcaaagagagagcttgtgtgggggaaactcccatttttagcaccatcagatctcaagagacttattcactatcatgagaacagcatgtgaaagatccacccccataattcaaatacctcctcaccagtttcctcccattacatgtgggaattgtgggagttacaattcaagatgagatttgggtggggacacagccaaaccatatcaggctccattaaagatctgaacaggaacacttaccatctattgtctctgaggcctgct

SEQ ID NO: 345070 - DNA, 636 bp, Homo sapiens
ttctcagtagttagaagttaaagaaataaaaatatttttccccaaaatatattcctttgatatatttttaaatgaccagaagattggagtggctctgaaaagctgtcttttggagagaaaaattgtagctgtagagaatctttattaatgcacccaagctttcccgttctttccccaatctagaagaaattaattgagagtctgacactgtattagctcattttcacactgctgataaagacatagttgagcctaggcaatttacaaaagaaagaggtttaatggacttatagctccacgtggtaggggaagcctcacaatcgtggcggaaggcaagaaggagcaagtcatgtcttacatggatggcagcaggcaaagagagagcttgtgtrggggaaactcccatttttagcaccatcagatctcaagagacttattcactatcatgagaacagcatgtgaaagatccacccccataattcaaatacctcctcaccagtttcctcccattacatgtgggaattgtgggagttacaattcaagatgagatttgggtggggacacagccaaaccatatcaggctccattaaagatctgaacaggaacacttaccatctattgtctctgaggcctgct

SEQ ID NO: 345071 - DNA, 296 bp, Homo sapiens
aaaaatatatcaaaggaatatattttggggaaaaatattttttatttccttaacttckaactactgagaaacaacgtgagataatgagaaaaaaaaattgtggtattctagaatttaagagtctaggttctatgaggaaagcatcagacatacctcatttaagggacatactacaaaacgcataccaaaatatgtcacaaaactctcaaggtcatgaaaaataaggaaagatggaaaaactatcataagtcagaggaggctaaggaggcagtacaactaaatgcaatgtgggaact

SEQ ID NO: 345072 - DNA, 565 bp, Homo sapiens
ctactgtatgttcaccttattttgtgtaaaatgctgctctactgagtgccagaagaatacataattgactcttcccttatctgcttcttttctcttgcaatatgtggattattatgccctctctctttccccttcagctcacttttctcctttaaatattgaagccctcaaagttatctttggagaaaggcacagaccacagactgtttatgtgattccatctttatttcttcaggggaaatccttagccttagcaaaataaacttctaaattgattgagacctgtcttagatagtttttagtttacagaacaatatagagggaagagatataactgagaactagaaaatctaatattggttatcagaaaattttcccagacaggacwgtttcagagcactattttgcacacacatacacatatacaaatcttagagtgttctttcaatttctgaactgtcaaattggtgagggagaaagttaaatccctgtatatacatagggtacataaattattatagatctgagattttaatgaattgtggaattttaaataaatttcatt

SEQ ID NO: 345073 - DNA, 565 bp, Homo sapiens
ctactgtatgttcaccttattttgtgtaaaatgctgctctactgagtgccagaagaatacataattgactcttcccttatctgcttcttttctcttgcaatatgtggattattatgccctctctctttccccttcagctcacttttctcctttaaatattgaagccctcaaagttatctttggagaaaggcacagaccacagactgtttatgtgattccatctttatttcttcaggggaaatccttagccttagcaaaataaacttctaaattgattgagacctgtcttagatagtttttagtttacagaacaatatagagggaagagatataactgagaactagaaaatctaatattggttatcagaaaattttcccagacaggactgtttcagagcactattttgcacacacatacacatatacaaatcttagagtgttctttcaatttctgaactgtcwaattggtgagggagaaagttaaatccctgtatatacatagggtacataaattattatagatctgagattttaatgaattgtggaattttaaataaatttcatt

SEQ ID NO: 345074 - DNA, 565 bp, Homo sapiens
ctactgtatgttcaccttattttgtgtaaaatgctgctctactgagtgccagaagaatacataattgactcttcccttatctgcttcttttctcttgcaatatgtggattattatgccctctctctttccccttcagctcacttttctcctttaaatattgaagccctcaaagttatctttggagaaaggcacagaccacagactgtttatgtgattccatctttatttcttcaggggaaatccttagccttagcaaaataaacttctaaattgattgagacctgtcttagatagtttttagtttacagaacaatatagagggaagagatataactgagaactagaaaatctaatattggttatcagaaaattttcccagacaggactgtttcagagcactattttgcacacacatacacatatacaaatcttagagtgttctttcaatttctgaactgtcaaattggtgagggagaaagttaaatycctgtatatacatagggtacataaattattatagatctgagattttaatgaattgtggaattttaaataaatttcatt

SEQ ID NO: 345075 - DNA, 565 bp, Homo sapiens
ctactgtatgttcaccttattttgtgtaaaatgctgctctactgagtgccagaagaatacataattgactcttcccttatctgcttcttttctcttgcaatatgtggattattatgccctctctctttccccttcagctcacttttctcctttaaatattgaagccctcaaagttatctttggagaaaggcacagaccacagactgtttatgtgattccatctttatttcttcaggggaaatccttagccttagcaaaataaacttctaaattgattgagacctgtcttagatagtttttagtttacagaacaatatagagggaagagatataactgagaactagaaaatctaatattggttatcagaaaattttcccagacaggactgtttcagagcactattttgcacacacatacacatatacaaatcttagagtgttctttcaatttctgaactgtcaaattggtgagggagaaagttaaatccctgtatatacatagggtacataaattattatagatctgagattttaatgaattgtggwattttaaataaatttcatt

SEQ ID NO: 345076 - DNA, 535 bp, Homo sapiens
ggataacaacttcagtgtcatttatctaaggtattaaagaatgcagcatttcatcaaggctgtgagtcaactatacctaggcattgtcttctgtgtttggctgtggatgaacctctctggggtactcctctaaaaattaagaggagatagaggtactgagggaggaaaggattcctcactgtacaaacttttgaaaaaaaattcaagggcagccattacgtagcagaagtctaggaaatgagagtgrttaatattagatcataatcttaaaaagtaattattcactgccttatgaaaagaacaaattaattttctttagagcatggcaaagaccataatgtttcctcagacaaatgatgataacaatgacagtagcaatcaagtaaataagagagtttcttagcagcacgtggtagggaggagatgttcaatctctaggaaacagctgagagaacttgaggggaagtaataacacatcaagattgagaacagaagttgacagctaaacaagtttgaagctcttctcttatctttg

SEQ ID NO: 345077 - DNA, 535 bp, Homo sapiens
ggataacaacttcagtgtcatttatctaaggtattaaagaatgcagcatttcatcaaggctgtgagtcaactatacctaggcattgtcttctgtgtttggctgtggatgaacctctctggggtactcctctaaaaattaagaggagatagaggtactgagggaggaaaggattcctcactgtacaaacttttgaaaaaaaattcaagggcagccattacgtagcagaagtctaggaaatgagagtgattaatattagatcataatcttaaaaagtaattattcactgccttatgaaaagaacaaattaattttctttagagcatggcaaagaccataatgtttcctcagacaaatgatgataacaatgacagtagcaatcaagtaaataagagagtttcttagcagcacgtggtagggaggagatgttcaatctctrggaaacagctgagagaacttgaggggaagtaataacacatcaagattgagaacagaagttgacagctaaacaagtttgaagctcttctcttatctttg

SEQ ID NO: 345078 - DNA, 585 bp, Homo sapiens
gctgaaatgcaaccatttatctcaatcttccaaacccttctcatatgamcttaagtgggcacctaagaccaggttttctaaaaaaattaaataaaggagttttttttttaaaaattcaaatgcactgaacaaagaaagaagcaaatggggcatttaccccatcaaccaaatttgccacctttttcctgaaggagcattatttatcatctccatttttacctgtcgtagtaactggagggatggatagaagcagctggcaattggccagtattactgtctctttttgaaacatgatttagatgttcattgatcttcatttgcacatattcattctttaagaaattagtaaaccgtctttaaaacatgttgactgtatataacagaaatctgaaactatgaacaaaacaaaatcttttcatagtgtttgctttctgttcttattatctgaggtggatgacctggcaaccttgttcatcacccatagggctattcaatcagaggtaataaatgacatgagacttactcgtgagtctttctcaactgaaactaacacttacttttgtttgcctcaacttcttttgcgct

SEQ ID NO: 345079 - DNA, 539 bp, Homo sapiens
gggcaatatccaaaacattttggtggctcttaaaatacatactgattttatgtattgacataaaattgacaactggcagcaccaaatgctggctggaactctcatttgtctctggtaggaatgcaaaattgccaagcaactttggaagacagatgagcagttcctgacaatattaaatatgtttttaccatatttagtaataacacatcttggtatttagcagcaatcacacaccttggtttttaccaaaatgagttgaaaacacagtctacgtgcatatttataggcactttattcataactgccaaaacatgcaaacaatcaagatgtccttcagtagrttaataaagaatatgtggtatatacacacaatgaaatattattcagcactaaaaaagtgctatgatgccataaaaagacatcgaggaaacttaaatgcgtattactgagagacaatctgaaaaggttgaatactgtatgattttaacaaaatcacattatggaaaggcaaaatgagggagacagtaaaagaatcagtg

SEQ ID NO: 345080 - DNA, 592 bp, Homo sapiens
cttcaacaggttattcaattacaacttctacctattttgcagcaatgcagtgctggatttatttttgctagtatggaaacattaagaacaagtaaggataattttagatgaagagagacatctcaaaggtaatttgcaaacattccagacactgttctcttgttgtaacagatcatttacattctgggtaggaacacaaagtttcctgaggaatcttgcttaagaacaatggactgtggtcacagcctgtgacttccatctgtgtcttttctcacaacaacaataaaaaaagcaaaatacttgaggagtgttcagtgactttcaagatcataggaagaatgtgamaagtgtctgaatattttcccttttcaggcagctggatgagacaatatctctttcttgatcttctctgcatgagatactttaccatttgagtggttattgccacacagcagtcagcatgtgacttttatattggcattttccgaactcaggtcacaatggctgacccctgatttagactatgctacatgtttttagagtgccaatgcctaactgttgtcaggtctgtcactgtcctataagatgaaaa

SEQ ID NO: 345081 - DNA, 592 bp, Homo sapiens
cttcaacaggttattcaattacaacttctacctattttgcagcaatgcagtgctggatttatttttgctagtatggaaacattaagaacaagtaaggataattttagatgaagagagacatctcaaaggtaatttgcaaacattccagacactgttctcttgttgtaacagatcatttacattctgggtaggaacacaaagtttcctgaggaatcttgcttaagaacaatggactgtggtcacagcctgtgacttccatctgtgtcttttctcacaacaacaataaaaaaagcaaaatacttgaggagtgttcagtgactttcaagatcataggaagaatgtgaaaagtgtctgaatattttcccttttcaggcagctggatgagacaatatctctttcttgatcttctctgcatgagatactttaccatttgagtggttattgccacacagcagtcagcatgtgacttttatattggcattttccgaactcaggtcacaatggctgacccctgatttagactatkctacatgtttttagagtgccaatgcctaactgttgtcaggtctgtcactgtcctataagatgaaaa

SEQ ID NO: 345082 - DNA, 592 bp, Homo sapiens
cttcaacaggttattcaattacaacttctacctattttgcagcaatgcagtgctggatttatttttgctagtatggaaacattaagaacaagtaaggataattttagatgaagagagacatctcaaaggtaatttgcaaacattccagacactgttctcttgttgtaacagatcatttacattctgggtaggaacacaaagtttcctgaggaatcttgcttaagaacaatggactgtggtcacagcctgtgacttccatctgtgtcttttctcacaacaacaataaaaaaagcaaaatacttgaggagtgttcagtgactttcaagatcataggaagaatgtgaaaagtgtctgaatattttcccttttcaggcagctggatgagacaatatctctttcttgatcttctctgcatgagatactttaccatttgagtggttattgccacacagcagtcagcatgtgacttttatattggcattttccgaactcaggtcacaatggctgacccctgatttagactatgctacatgttkttagagtgccaatgcctaactgttgtcaggtctgtcactgtcctataagatgaaaa

SEQ ID NO: 345083 - DNA, 512 bp, Homo sapiens
tttcttattctcagacaacagtcttggttgtaacggtgacttaaaagggctactgtggtcttgcatcgctaatctcatcccctgctaggcacaagttggctcactctacactagccacagtggctgtcttagtccatttgtactgctaaaaggaatayctgaagcctggtaatttacaaagacaagaaatttatatctggctctcagttctgcagactgtacttgaagttaggcattagcattggcttctgatgaggacctcagactgcttccactcctggcagaagcctgtgtgtacagatcacatggctgaaaacaagagagaggagaaagggccagtctctttgacaacaagttttcatgggaactaagagtgagaactcactcactgccatgagaatggcaccaacccattcaaggggatctgtctctgtggtccaaacacctgtcatcattccttgtgtccatcactgagtaacaaatttcaacatgagagctggcaggtacaaaaa

SEQ ID NO: 345084 - DNA, 512 bp, Homo sapiens
tttcttattctcagacaacagtcttggttgtaacggtgacttaaaagggctactgtggtcttgcatcgctaatctcatcccctgctaggcacaagttggctcactctacactagccacagtggctgtcttagtccatttgtactgctaaaaggaatatctgaagcctggtaatttacaaagamaagaaatttatatctggctctcagttctgcagactgtacttgaagttaggcattagcattggcttctgatgaggacctcagactgcttccactcctggcagaagcctgtgtgtacagatcacatggctgaaaacaagagagaggagaaagggccagtctctttgacaacaagttttcatgggaactaagagtgagaactcactcactgccatgagaatggcaccaacccattcaaggggatctgtctctgtggtccaaacacctgtcatcattccttgtgtccatcactgagtaacaaatttcaacatgagagctggcaggtacaaaaa

SEQ ID NO: 345085 - DNA, 571 bp, Homo sapiens
gctgtcttagtccatttgtactgctaaaaggaatatctgaagcctggtaatttacaaagacaagaaatttatatctggctctcagttctgcagactgtacttgaagttaggcattagcattggcttctgatgaggacctcagactgcttccactcctggcagaagcctgtgtgtacagatcacatggctgaaaacaagagagaggagaaagggccagtctctttgacaacaagttttcatgggaactaagagtgagaactcactcactgccatgagaatggcaccaacccattcarggggatctgtctctgtggtccaaacacctgtcatcattccttgtgtccatcactgagtaacaaatttcaacatgagagctggcaggtacaaaaaaaccatactcaaatcatggcgctggcctcttggctatttggctattggaaaatgttccaagtgggatcccatggcagtatctctatatttgctgctccctgtcaaggtgcattctcacttcaggatatttgcaagggctgcttcctttccctttactctctctccttgtagagagttacct

SEQ ID NO: 345086 - DNA, 571 bp, Homo sapiens
gctgtcttagtccatttgtactgctaaaaggaatatctgaagcctggtaatttacaaagacaagaaatttatatctggctctcagttctgcagactgtacttgaagttaggcattagcattggcttctgatgaggacctcagactgcttccactcctggcagaagcctgtgtgtacagatcacatggctgaaaacaagagagaggagaaagggccagtctctttgacaacaagttttcatgggaactaagagtgagaactcactcactgccatgagaatggcaccaacccattcaaggggatctgtcyctgtggtccaaacacctgtcatcattccttgtgtccatcactgagtaacaaatttcaacatgagagctggcaggtacaaaaaaaccatactcaaatcatggcgctggcctcttggctatttggctattggaaaatgttccaagtgggatcccatggcagtatctctatatttgctgctccctgtcaaggtgcattctcacttcaggatatttgcaagggctgcttcctttccctttactctctctccttgtagagagttacct

SEQ ID NO: 345087 - DNA, 566 bp, Homo sapiens
ataacattctagagtaaagaagccagtaaactatgaaaggtaaaacatgaattcctaacaaagatgactaaaccagaaataagatgcaattataaacttgattaaaagattgatggcctcatcttcttggagtatgaggcacaagaatatttaayaccctttaatcttactatcttttaccttcagacagtctttacaaaagtaatgatttgataattcaacaccagacctaagattaagaaagaaactataattacattgaaatttatcaatgttgactttatttatagcctaaaaaaaatcagataatttacaacaggcagtgtttacatttttattttatttctgttgtttctatccaaacctgggcttacactttatccttcctaaaatgaaaaaaacagaggctgtaaaagtttagatcaagtttatttaatcttattcaagtaaagattcaggatagtccttaatgagtggagaaaagaattttccaatatgccaaggtagctataaaaatattaatttaataataagtaatgtttatttagtttccactctgttgtaga

SEQ ID NO: 345088 - DNA, 566 bp, Homo sapiens
ataacattctagagtaaagaagccagtaaactatgaaaggtaaaacatgaattcctaacaaagatgactaaaccagaaataagatgcaattataaacttgattaaaagattgatggcctcatcttcttggagtatgaggcacaagaatatttaataccctttratcttactatcttttaccttcagacagtctttacaaaagtaatgatttgataattcaacaccagacctaagattaagaaagaaactataattacattgaaatttatcaatgttgactttatttatagcctaaaaaaaatcagataatttacaacaggcagtgtttacatttttattttatttctgttgtttctatccaaacctgggcttacactttatccttcctaaaatgaaaaaaacagaggctgtaaaagtttagatcaagtttatttaatcttattcaagtaaagattcaggatagtccttaatgagtggagaaaagaattttccaatatgccaaggtagctataaaaatattaatttaataataagtaatgtttatttagtttccactctgttgtaga

SEQ ID NO: 345089 - DNA, 566 bp, Homo sapiens
ataacattctagagtaaagaagccagtaaactatgaaaggtaaaacatgaattcctaacaaagatgactaaaccagaaataagatgcaattataaacttgattaaaagattgatggcctcatcttcttggagtatgaggcacaagaatatttaataccctttaatcttactrtcttttaccttcagacagtctttacaaaagtaatgatttgataattcaacaccagacctaagattaagaaagaaactataattacattgaaatttatcaatgttgactttatttatagcctaaaaaaaatcagataatttacaacaggcagtgtttacatttttattttatttctgttgtttctatccaaacctgggcttacactttatccttcctaaaatgaaaaaaacagaggctgtaaaagtttagatcaagtttatttaatcttattcaagtaaagattcaggatagtccttaatgagtggagaaaagaattttccaatatgccaaggtagctataaaaatattaatttaataataagtaatgtttatttagtttccactctgttgtaga

SEQ ID NO: 345090 - DNA, 566 bp, Homo sapiens
ataacattctagagtaaagaagccagtaaactatgaaaggtaaaacatgaattcctaacaaagatgactaaaccagaaataagatgcaattataaacttgattaaaagattgatggcctcatcttcttggagtatgaggcacaagaatatttaataccctttaatcttactatcttttaccttcagacagtctttacaaaagtaatgatttgataattcaacaccagacctaagattaagaaagaaactrtaattacattgaaatttatcaatgttgactttatttatagcctaaaaaaaatcagataatttacaacaggcagtgtttacatttttattttatttctgttgtttctatccaaacctgggcttacactttatccttcctaaaatgaaaaaaacagaggctgtaaaagtttagatcaagtttatttaatcttattcaagtaaagattcaggatagtccttaatgagtggagaaaagaattttccaatatgccaaggtagctataaaaatattaatttaataataagtaatgtttatttagtttccactctgttgtaga

SEQ ID NO: 345091 - DNA, 393 bp, Homo sapiens
tatctatctatctatctatctatctatctatctaatctatttacctacctacctatctatatttttcaaccatttaatagtaggaaataatgaaagctgatgcacatctcttgttcaattaatcagtgatattgttaacgtaaaccatacctgcaaacataccatacttgaaaaaaatgtttaaggattctgggagagcaaacattrtaattaaaatgaatttatttccaaagtcactcgtaatagttgtaatatagtcacacataaaacataacagaatggcaaaaataagtagttaacaccacatccaatgatctcacctggtgactgttataactgtgtctgaatttactacttaagctccagtggctatctatgcagataattcacttg

SEQ ID NO: 345092 - DNA, 564 bp, Homo sapiens
aacaagtacatcaaattcagttgtaatgcatgtgacttttaaatgtctatgatttctaaatattagagtgaacgtgctgcattgctatgtgaagctgtaggccagtttgtaatttttctcratgtaatcaagcgataacttttaatcacccagagccctaggtacgctatatgtatgtaagagtcatcggaggtgtaattagatgtaaaattgaaatccagtaaaatatttacactttcatcacttctatgatcactttagggcaattaaaactaattaaaaacacagagagaaagcaagtacacatctgggttgacagtgagagccatgggatatgtttatgtttctacaactgattattaaggttcaaaatagaacaaagacctttgtcccaagccattgttaaagcatttggcacagtctttatttgatgcttaccaagtagtacagccatgctctacataaacactcttataattagtggaagccagtgacattcccacaagaaattaagaactgacagactcagatcaacaatttagtattgttgaaagaaaaacatag

SEQ ID NO: 345093 - DNA, 551 bp, Homo sapiens
tcaaactatagcaggcacacacaataaatctggctttagtctcttctagtatgatgtgcaatctaagaataaatttyacatttttaaatggttacattttagaagaattaaattttaaatcattatatgagtacctgcttattctccttgaattttcttcctggctcacaaagcctaaaatatttactatctagcgctttacaggatactgtttgccagtgcctgcactatgctgataagtagggttaagtcacagcataacccaaggctggaccggctcaaggagaacaaaaggaccctatctatacactaatgcagctgcaggaactggccaacataaacttgcaggagctgatagagcacatgagggccaaagcctaaagatgctagatcaaaggaactctccaaaaactgaaaagggatatgagcccttgtactttggcttaattttctattacagtggcagcaaattgtcacaaactggaggagttaaaacaacacaaatttactatcttacagttctatgggtgagtagttgcatatatgtcctg

SEQ ID NO: 345094 - DNA, 624 bp, Homo sapiens
ttgtatgttctcacttgcatgtggaaggaaaaaaaaatgatatcatggaagtaaagaagagaataatgattacttgatcctgggaaatgaggggaaattaaaagagtctgattaatgaatacaaaaagtagaaggaatgaatacagttagagagaaggaataaatagtgtttggtagcatactaggatgagtatatttagcaataatttatgatttttcaaaatagctagaagagtgaagatgtttccaacacaaataaataaaggtttaaggtgatagatttccttattaccttgatttgatgattacacgttgtttgtatgtatgtttgtatcaaaatatcaacgttaccctataaatatgtacaatcattattacaatgyatcaatcaagaagtcaaaaaacaagtagagaaatcagataaaaaatctatgaatgccaaaagtgccttgtaatggtgtatgatgatgtttgtaatgacagcgtttacaaaagcagttgatttgtagtttcccagaattttgtaaaggtatctgcctcctcatactctaattgaatgtattatcaaacattcatcatttgagggaatagagtatttgttttaaacaattggcatttaataac

SEQ ID NO: 345095 - DNA, 608 bp, Homo sapiens
ctttttttatattcattagctccataaagtctataaaggcattgtacttgaattaaaaaaaaaataaaaaacacaacttcacagagacaggtccttcttatagggaaaggaatagaacccagagtgaaaaagagacataaatctcagactttgacaaatatgaataaaaataagtggatttatataaacttggacatagactaacaaatggtaagttagtataaaaaataaatacataataatctaaatgcaatcatctttctaaraaaaggttggtagggagagttgtgttacataatgtgacttgcaactaagagtccctaaagagcaatcatgtaatcacttcaaacctatgggaggaaaagacttgaaccattagcatggtattaagatgaatgctcaatgagtgcaatgttaaaaaaactactattgtcttcagctaacttcatagatacatatgtgtatatatatatgtgtgtgtgtgtgtgtgtaatttgtgaaaatttgtgcacactctgagagggagattagtgtgccaaaagtactttacgagtattttaggataacataggtgaaaagtaagattgagtaatatggtttgtatctgt

SEQ ID NO: 345096 - DNA, 542 bp, Homo sapiens
aggccacagctcccacagcacttccaaattttctagtacctaatttctgcagttcactgtggccagcaactttcagtggccaacagctttccccagcacttcctcagggcagatgatttctagctgagtgctcccagcaagataattgtcagggaatagctgtccctggcatcctagatagtgaatttccagccagtttcatcagcacaacactataacaacttccttgccatgaccgtgccccctccacaaaagtctagatctcagccttgggttggtagtagggggtggaaattcttccttgggttctctatctcagcccaagtggtaatggctctttttatatctactatgcctacattccttaaattaatatttactccatactagtcaaaccctcattactctaatttcctgttatagttaataattcttctttagattttcccttaactaagtggtttctctttcttgattagacytagactgatacagaacatgcattttttaaaatgtcatcctcactgattctcaagtacatt

SEQ ID NO: 345097 - DNA, 605 bp, Homo sapiens
tgattcataggaaatcctaattttttaagtcagttatatggtggtcttgttcccttgaaggtacatgcttatgagatggacttgttatcattttctgacatgtgatatgtgatggaggtccgctgggggtggtatgtcttcttaaaatgtctcccaccacttaaaaaacacaggaacatataatctttttcttatcccacaaattatgtcttgatgtggcatgttgcaaacattaaggaaaatagcctgaagatcaaaccaatgcactaagcataagacactakaaagatgaaaagctcttctgatgatagcatgatgttgacaaaatgcctaattagtagactgaataatataaatattctagagcttcttgttatatgtgacaatgaatgttgtcattgtttaaaccacttgaacttgcattttctactacatgcagactaatgttttctgattgaaatgcctctcaagtatgacccagtgtgtgtgtgtccacatttctatgaattcattctctactcctccattttttaaacaactgaaagtaaccagaaagaatgttattaaaaaaatcctgaaaaatatgtttttaaaatcagaaaaaa

SEQ ID NO: 345098 - DNA, 559 bp, Homo sapiens
gctcaagatgtgattcaacagcctcggttggtaggactttgcaggtgccaaaacatcagaagcacagtgagttggttgttgtagctgctgctgggtgaatcaagtcaagaaaactctagatacaggcaagacctggagaatctgagrcatcctataagtgcagttgtatacaacatccaaacagtgacacataaaataatttttaattgaaatatattttatcccccccgaatgatttttccttcctaactttcatttacttaagtttggcaattctatatcaaattctattccttttttttctcctctgtctcccctccattgttcttttacagcatctcatgccctgtttggcttcaacacaatcaccacatctgcaagtacaaatattctgcttccccaccagattattgcagtagccctgtaacaagtctttcacccttaatctcctccagctcggcttcacactatgtattatttccagggccgtcttttaaaaagacaaaacaaacaaactccaaattatttccatgaaactctggaggttttcagcatcaat

SEQ ID NO: 345099 - DNA, 559 bp, Homo sapiens
gctcaagatgtgattcaacagcctcggttggtaggactttgcaggtgccaaaacatcagaagcacagtgagttggttgttgtagctgctgctgggtgaatcaagtcaagaaaactctagatacaggcaagacctggagaatctgagacatcctataagtgcagttgtatacaacatccaaacagtgacacataaaataatttttaattgaaatatattttatcccccccgaatgatttttccttcctaactttcatttacttaagtttggcaattctatatcaaattctattccttttttttctcctctgtctcccctccattgttcttttacagcatctcatgccctgtttggcttcaacacaatcaccacatctgcaagtacaaatattctgcttccccaccagattattgcartagccctgtaacaagtctttcacccttaatctcctccagctcggcttcacactatgtattatttccagggccgtcttttaaaaagacaaaacaaacaaactccaaattatttccatgaaactctggaggttttcagcatcaat

SEQ ID NO: 345100 - DNA, 526 bp, Homo sapiens
ctaccaaactgtcttccaaagtgactgctccattttgcattcccatcagcaaaaaatgaaagcttctgtttctccacatccttatcagcatttgatgttgtcagtgctttsgattttggccattctaataaatgtgtagtggttgttttaattttcagttatgtaatgacaagatttttcaatgtctttttaatcccattcagaccctttggtggacattttagagggacttgagcttagaaaatattagttaaatttggcaacttctctgggaatgtgttagctagtgacttacagaataatcaaaatgtttagaacttataaaatgtgtgtattacctgttactaatttattgcttattaattcaccagttggcccaacattcccaagctgagcttccagcagcaattataccttccttgcggggcctataggcaatagaactgctctacctaactctcctcctactttctcaggcaggagaacttatacatctacagtctttaccactagggtcccttaaagt

SEQ ID NO: 345101 - DNA, 613 bp, Homo sapiens
gaaatctggggaaacagtgatttggtagaacaactccatcagcctctcaggcacagttgtgccctgcttttaggaagctgatcaaaaactgtgcatagccaccaaaggaaacagtgctttggcagagcactgaatcacaagaaaatggtggctgggctgcccagaatagtcacacccgcgtgggcctgagctgaagtggcacattgcccactggggaagtagagccttggttgagctgagcagctgcacttcccaaggctgagctgaaacactctgtcctaaaagccaaacaactctagtatcttgcttcctggagatggagtagccccatggaatttgagctgctgagatgctcctctttccagraagtggagtcacccctgtaccgccttatgcacccagggcccaaactgtagccaagcttgccatttcttggatacttgttgctacacctggcttcacagtctgggatactgctgaaccccgcaatgccaagatctggagtgactactacacagtactccttgtccccacgggttaaagttgccattgagccctactgactcagaatcctgaattccaattgtccctaagctcaaatttctagagaacc

SEQ ID NO: 345102 - DNA, 577 bp, Homo sapiens
tagtaaaggcacttaaatatactgacatatgtaatacaaatatcaaacactttctattaagtgatatggacagcatataggaggacataattctaacatcccttgtatcattagttaagaaaggaatcttggacaggacttaaaagagatgaaccctcggaaatataataaatgtartaattgtactagattaattttttcctagtcttctttttgtatgtgtgtttaagaactctatagaaatagtgttaaaataaagatccctcaagggctatcttttcacatcttagttaagaatatctgggtaagcttccagcaactgtacttttaagttattaggtatctggggattctcgtgcccaacaatgtttgaaaatcaattgtctaaaaaatcaagagtagaataactatagcctgcaggccaaatctagcctacagcctgttttaatatgtttaccaagcaaagaatgatttttacactgttttgatatgtaaaaaataaaagagaagagaaaaatatgtaatagacaccatatgtagcccacacagcctaaaatatctactttatggtcattta

SEQ ID NO: 345103 - DNA, 481 bp, Homo sapiens
caggagaatcccctgggtccccctccactgcacttctagactgaggcagagagccacctggactttttgcaggggcaaccttcaagtccaaatgacctctacaaaactttggccctggagtagagcagcaccarcgtcatagcttcaatagaggctgcagttgcagtacctgagagcaataagactgctccacccctccttgctggacagggctcagtgtcaggttctggcccagcagtcccccttcagcccaaattcgactagccactccacctacccccaccagcgatagccaggatggcattgcttgctagagcttctggcccagtggtgccacttctgtgtgaactcagctggaggtcacagttttctgttgtcccaggaaacacctgaattgcagagtgcgtgactccacctgcccctgtcactagtagcccggtgggcaacacctgctagagctcctggctcggcagctccactt

SEQ ID NO: 345104 - DNA, 481 bp, Homo sapiens
caggagaatcccctgggtccccctccactgcacttctagactgaggcagagagccacctggactttttgcaggggcaaccttcaagtccaaatgacctctacaaaactttggccctggagtagagcagcaccagcgtcatagcttcaatagaggctgcagttgcagtacctgagagcaataagactgctccacccctccttgctggacagggctcagtgtcaggttctggcccagcagtcccccttcagcccaaattcractagccactccacctacccccaccagcgatagccaggatggcattgcttgctagagcttctggcccagtggtgccacttctgtgtgaactcagctggaggtcacagttttctgttgtcccaggaaacacctgaattgcagagtgcgtgactccacctgcccctgtcactagtagcccggtgggcaacacctgctagagctcctggctcggcagctccactt

SEQ ID NO: 345105 - DNA, 481 bp, Homo sapiens
caggagaatcccctgggtccccctccactgcacttctagactgaggcagagagccacctggactttttgcaggggcaaccttcaagtccaaatgacctctacaaaactttggccctggagtagagcagcaccagcgtcatagcttcaatagaggctgcagttgcagtacctgagagcaataagactgctccacccctccttgctggacagggctcagtgtcaggttctggcccagcagtcccccttcagcccaaattcgactagccactccacctacccccaccagcgatagccaggatggcattgcttgctagagcttctggcccagtggtgccacttctgtgtgaactcagctggaggtcacagttttctgttgtcccaggaaacacctgaattgcagagtgcrtgactccacctgcccctgtcactagtagcccggtgggcaacacctgctagagctcctggctcggcagctccactt

SEQ ID NO: 345106 - DNA, 536 bp, Homo sapiens
aacatctctggctgggcgcggtggctcacgcctgtaatcccagcaccttgggaggccgaggtgggtggatcacgaggtcaggagatccacaccattctggctaacacggagaaaccccgtctctactaaaaatacaaaaaattagccgggcgtggtggcgggcgcctatagtcccagctactcaggaggctgaggcaggagaatggtgtgaacccgggaggcggagcttgcagtgagctgagatcgcgccactgcactccagcctgggcgacagagcgagactccrtctcaaaacaaacaaacaaacaaacaaatttctatagtctgtgaattcaaaggaaattagtatcctacatggctatatctgtaaacatatctgctattattatttctggttaaatgaaagtgaaatataaaccagatgaaaaaatcatctaaagaagatatctttaataactaaaacatatatcttaaacgacttaattgccgcgtttttggggtttgaaaatagatattcaacagaaatatttattgat

SEQ ID NO: 345107 - DNA, 316 bp, Homo sapiens
gcttcttcctttatggcctaaaccatatagaacatataatctattctgacacttttattagccacatatttttccttctatcaaactaaatagttgtattaaatctacacacaatctaaatgtktatgtgttaacttactcagcctcttctgcatctgttttaattcctagggcattttctccacatggtaatcagagaagtactgtttccagaaaataatggaaacttcagaattaactgatttgcactttctaatgggcatggatggggatagtgactaattagcagtgtgatccatcattctaagcaattcta

SEQ ID NO: 345108 - DNA, 617 bp, Homo sapiens
ggctctgcaaaccacatttttactttgcttacagattttccattagtttctgccaggggggagcactataagccaaaaaagctggaagaggaagaagggaattgtcgcttcctgtttgcttcttgtagacttccatttggtgtgtccttcttgtaaacttcactccagcaatgcttactcaccctggcaagtagcagttcctttctacaatatcagctgagtctactttgcagctttcccaacccttgtagaatcacctttatctactctcctcagaaacaacaccaccagctgagaaagcagaattctttcctcaaaggccagagtctcagctccgtggagaccctcctcttagttctttaktgggggactggaatgggaactgttttctgaagttgtcacacctgtgacactttagtctctcctacctttcagtcacctagctagccactgtgtagctaggaaaaaaattgtttaaatttgctttgtttcaaaaattgggcttattttggtctcccaactggaccctgactgatataaaacctagagctctaagctcttttcagcaattatttttatttgataactctgaaatatagtgtgcattattcaaattg

SEQ ID NO: 345109 - DNA, 617 bp, Homo sapiens
ggctctgcaaaccacatttttactttgcttacagattttccattagtttctgccaggggggagcactataagccaaaaaagctggaagaggaagaagggaattgtcgcttcctgtttgcttcttgtagacttccatttggtgtgtccttcttgtaaacttcactccagcaatgcttactcaccctggcaagtagcagttcctttctacaatatcagctgagtctactttgcagctttcccaacccttgtagaatcacctttatctactctcctcagaaacaacaccaccagctgagaaagcagaattctttcctcaaaggccagagtctcagctccgtggagaccctcctcttagttctttattgggggactggaatgggaactgttttctgaagttgtcacacctgtgacactttagtctctcctacctttcagtcacctagctagccactgtrtagctaggaaaaaaattgtttaaatttgctttgtttcaaaaattgggcttattttggtctcccaactggaccctgactgatataaaacctagagctctaagctcttttcagcaattatttttatttgataactctgaaatatagtgtgcattattcaaattg

SEQ ID NO: 345110 - DNA, 617 bp, Homo sapiens
ggctctgcaaaccacatttttactttgcttacagattttccattagtttctgccaggggggagcactataagccaaaaaagctggaagaggaagaagggaattgtcgcttcctgtttgcttcttgtagacttccatttggtgtgtccttcttgtaaacttcactccagcaatgcttactcaccctggcaagtagcagttcctttctacaatatcagctgagtctactttgcagctttcccaacccttgtagaatcacctttatctactctcctcagaaacaacaccaccagctgagaaagcagaattctttcctcaaaggccagagtctcagctccgtggagaccctcctcttagttctttattgggggactggaatgggaactgttttctgaagttgtcacacctgtgacactttagtctctcctacctttcagtcacctagctagccactgtgtagctaggaaaaaaattgtttaaatttgctttgtttcaaaaattggkcttattttggtctcccaactggaccctgactgatataaaacctagagctctaagctcttttcagcaattatttttatttgataactctgaaatatagtgtgcattattcaaattg

SEQ ID NO: 345111 - DNA, 739 bp, Homo sapiens
ataggctaaaaaccagctactatcttaaaaataaatgcttactattctaagaaatgtattgtttacaaataacctgtatcatctggtaaatttatgtgaatgacatcccacaacttcaagcagatgaaaagggtttagtccatgagggctttaccttgygtcatcactgggagggaacgaagaaatgtctctccacattctttctagactctcggttcaagttaggctcatgtcaggattaagaaaatttcacttctcaagctactttggtataatgctgaaagaaataaagccaattgtccataaggtgagttcagagatggctttgacatgacctaaaggatttggggtcccaactcccagtttaaggatggtgctttcttgctgcagatagctgaaaaactgttctactgaacttctcttgcattagtcatggttctccagagaatagaaccaataggagatacacagacacacccacacacatacacacacacacacacacacacacgggaatgtattgcaagaattctctcacacgattatggtggctgagcaccccataacttgccatctggagaactagcaaagctggtgatgtaattcagtccaagtctggggatgatggtgccaagtcccagtccaattagcttaaacagagagagaaaatgcactcttattcttcctttttattctgtttaggccctcagtggattggattatgcccatccacattggt

SEQ ID NO: 345112 - DNA, 605 bp, Homo sapiens
catagcctatgaactcttgcatatgtgcacaagggacatgtacaagaatatttattgcagcttggtccacaacacctgataaatgaaaacatckgagtgtcaactgagaagagaatgctaaaataatggaatggtgagtgttctaaaataaactagcgctgcatacaacaataagggtcactcttagaaacatggggtggttcattttgtgtgtcatcatggctaagctataaagcccagatctttggtcaaaacttagtctagatatttctgtgaagctatttttatatgagattaacatttacaatcagtagacactatgtaaagcagagtcccccaactccataatgtgggtgggcctcatttaatcagtcgatgctcttaagagcaaagattgaggtttctcacaaaagaagaaattcttcctaaagactgcaacatagaaatcctgcctgaatatgactccaaaagcacaaacaacaaaagtaaaactagacaaatgagattatatcaagctaaaaaatctcctgaactacaaaggaaacattcaccagagtaaagagacaacctctgcaatgggagaaatatttgcaaagtatgcatta

SEQ ID NO: 345113 - DNA, 531 bp, Homo sapiens
tttcataagtataccttgttagagtcctgtgagtcctttcaattacctgaccccaagtaactgcagcacaccatggtggccaatcaggactggtcattaacacatactaaacaaccccaggcactgctagaaataactaggctgaacttgacaaagctctgaaggtcstgcgctatcaggtataagcaaaaacaccatgatatatttatgggtgtgttgttcttgttcattcttacatgttgaaagagagttttaaatgaagtgatatagtttgacatgaatataagagagattatctgtgttcaatccacggaaaaatgagattattgcttaaacttcaattttctcttttgtaaaatggaaaatattacagagttcacattataggtctgcttaagggtaatttagtacatgcaaaacgcactcaagcaagtattaagttctccataaatgtgagctcttgttattactctccccaaataaagatttctgttaaacatgaacacttataacaaagcttggtactgtatt

SEQ ID NO: 345114 - DNA, 531 bp, Homo sapiens
tttcataagtataccttgttagagtcctgtgagtcctttcaattacctgaccccaagtaactgcagcacaccatggtggccaatcaggactggtcattaacacatactaaacaaccccaggcactgctagaaataactaggctgaacttgacaaagctctgaaggtcgtgcgctatcaggtataagcaaaaacaccatgatatatttatgggtktgttgttcttgttcattcttacatgttgaaagagagttttaaatgaagtgatatagtttgacatgaatataagagagattatctgtgttcaatccacggaaaaatgagattattgcttaaacttcaattttctcttttgtaaaatggaaaatattacagagttcacattataggtctgcttaagggtaatttagtacatgcaaaacgcactcaagcaagtattaagttctccataaatgtgagctcttgttattactctccccaaataaagatttctgttaaacatgaacacttataacaaagcttggtactgtatt

SEQ ID NO: 345115 - DNA, 531 bp, Homo sapiens
tttcataagtataccttgttagagtcctgtgagtcctttcaattacctgaccccaagtaactgcagcacaccatggtggccaatcaggactggtcattaacacatactaaacaaccccaggcactgctagaaataactaggctgaacttgacaaagctctgaaggtcgtgcgctatcaggtataagcaaaaacaccatgatatatttatgggtgtgttgttcttgttcattcttacatgttgaaagagagttttaaatgaagtgatatagtttgacatgaatataagagagattatctgtgttcaatccacggaaaaatgagattattgcttaaacttcaattttctcttttgtaaaatggaaaatattacagagttcacattataggtctgcttaagggtaatttagtacatgcaaaacgcamtcaagcaagtattaagttctccataaatgtgagctcttgttattactctccccaaataaagatttctgttaaacatgaacacttataacaaagcttggtactgtatt

SEQ ID NO: 345116 - DNA, 578 bp, Homo sapiens
tgcatcaagcagaggaaagaatcagtgagctcaaagacagattatttgaaaatacgtagtcataggagtaacgggaaaaaggaataaaaaggaacaaagatgacctacaagatatagaaaattacctcaaaagaccaaatctaagaattattagtgtttaagagatttgagcaagagcaaggagtagaaagtctgttcaaagaagtagtaacaaaaaactttccaaaagttgaggatataaatattcagatacaaagaggtcagattacaccaaacaaattcaacccaaataagaccgtcccaaagtacttaataatcaaactcttaaaggccraggacaaagagaggatgctaaaagcagcaagagaaaagacataaataacatataaagaagctgcaatttgtctggcagacttttaaacagaaaccatacagtccaggagagagcgggacgacattttcaaagtgctgaaagaagaaaactgccatccaagcatactatatttagcaaagctattcttcaaatctgaaggagaaatagtcttttctagacaaacaaaaacagagaattcaccacc

SEQ ID NO: 345117 - DNA, 578 bp, Homo sapiens
tgcatcaagcagaggaaagaatcagtgagctcaaagacagattatttgaaaatacgtagtcataggagtaacgggaaaaaggaataaaaaggaacaaagatgacctacaagatatagaaaattacctcaaaagaccaaatctaagaattattagtgtttaagagatttgagcaagagcaaggagtagaaagtctgttcaaagaagtagtaacaaaaaactttccaaaagttgaggatataaatattcagatacaaagaggtcagattacaccaaacaaattcaacccaaataagaccgtcccaaagtacttaataatcaaactcttaaaggccaaggacaaagagaggatgctaaaagcagcaagagaaaagacataaataacatataaagaagctgcaatttgtctggcagacttttaaacagaaaccatacagtccaggagagagcrggacgacattttcaaagtgctgaaagaagaaaactgccatccaagcatactatatttagcaaagctattcttcaaatctgaaggagaaatagtcttttctagacaaacaaaaacagagaattcaccacc

SEQ ID NO: 345118 - DNA, 578 bp, Homo sapiens
tgcatcaagcagaggaaagaatcagtgagctcaaagacagattatttgaaaatacgtagtcataggagtaacgggaaaaaggaataaaaaggaacaaagatgacctacaagatatagaaaattacctcaaaagaccaaatctaagaattattagtgtttaagagatttgagcaagagcaaggagtagaaagtctgttcaaagaagtagtaacaaaaaactttccaaaagttgaggatataaatattcagatacaaagaggtcagattacaccaaacaaattcaacccaaataagaccgtcccaaagtacttaataatcaaactcttaaaggccaaggacaaagagaggatgctaaaagcagcaagagaaaagacataaataacatataaagaagctgcaatttgtctggcagacttttaaacagaaaccatacagtccaggagagagcgggaygacattttcaaagtgctgaaagaagaaaactgccatccaagcatactatatttagcaaagctattcttcaaatctgaaggagaaatagtcttttctagacaaacaaaaacagagaattcaccacc

SEQ ID NO: 345119 - DNA, 598 bp, Homo sapiens
gatattataaaggatacaaatgagcagccagatgaagaggtccatcgggcaaggtccagagggatcctcagttcatgagcttctatcctcttggaatgcaggatgagcaccccaacatctacgtgtccaccaacccagagctctcttaaccttgtcgtttagggctttcatggaggagctattacttaggcatgattaattaaattattggcctttggtgattaactcaatctcccaggaggttgcagggtggggctgaaagttccagccctctattacatggttggtgcctctagcaaccagcccccatcctgaagctatmtaggggcccatccagagccacttgattcacgtaaacccaggtatgggtgagaggggcttattatgaataacatgacaaatgtccactcgaggacttgactgccaaacactcacatacacatactttttccatgcttacaattaagcagcaacagatttagcaactatgcaatgcaaaatactgccaccaaatataccccttatagaagacatcagtaaaagggagataaatcgttaactgccactgcctccaggcccaaatccaagagctctgaaa

SEQ ID NO: 345120 - DNA, 561 bp, Homo sapiens
taattattggtgggttttttgttcgttttttgctgttgagttgtttgagttccttgtatattctgcacattaattccttgtgggacgaatagtttgcaaatattttctctcattctgctggttgtctcttcactctgttgactgtttcctttgctgtgcagaagctmtaaagtttggtataatctcatttatctattttcacctttgttgcctgtgtttttgagattttatccaaaaaaatctttgcccagaccaatgctgtaaagtgttttccctatgttttcttatagtagttttataattttgtgtctattaagtttttaatctgtttgagttgatttttgtgtatgatgagagatagttgtctagtttcatttttctgcatgtggatacccagttttcccagcaccatttattgaatagactatcttttctccagttaatgtttttagtgtcttcgtcaaaaatcatttgtctgtaaacacatggatttatttctgggctccctattctgtttcattggtatatgtgtctgtttttatgccagtaccatgctgtttt

SEQ ID NO: 345121 - DNA, 561 bp, Homo sapiens
taattattggtgggttttttgttcgttttttgctgttgagttgtttgagttccttgtatattctgcacattaattccttgtgggacgaatagtttgcaaatattttctctcattctgctggttgtctcttcactctgttgactgtttcctttgctgtgcagaagctataaagtttggtataatctcatttatctattttyacctttgttgcctgtgtttttgagattttatccaaaaaaatctttgcccagaccaatgctgtaaagtgttttccctatgttttcttatagtagttttataattttgtgtctattaagtttttaatctgtttgagttgatttttgtgtatgatgagagatagttgtctagtttcatttttctgcatgtggatacccagttttcccagcaccatttattgaatagactatcttttctccagttaatgtttttagtgtcttcgtcaaaaatcatttgtctgtaaacacatggatttatttctgggctccctattctgtttcattggtatatgtgtctgtttttatgccagtaccatgctgtttt

SEQ ID NO: 345122 - DNA, 596 bp, Homo sapiens
cccagtaatgctatcattcctgcagacttatataggtactgtgttggtggtcttggataagattcagaataattctctggattactagagactctggttcttttcccttactttctcccaaacaaatgaagtctctttctctgtgctaagccacctggaactgagaatgggggacacaagcaccactgtggccaccaacactggaactgcactggttcagacctgaagccagcacagcactgggtctcgcccaaggcctgccgtaaccactacctggctaccacctatgtccactcaagtccctagggctctacgatcagcaggtggtaaagccaaccaggtttgtgtcccttcattcagagtggtgagttccccttggcccagggaaggtccagaaatgcagtttggagccagggattgaagtcaaaaaccttagaaatgcatttgacrttctattctactgtggctaagctagcactcagatcatagtacaaagtcctttcccctcttccctctccttgctataggaaaagaggcctctccttgtggctaccactgccactagcccacaggagaggttcaccaggccaccactg

SEQ ID NO: 345123 - DNA, 550 bp, Homo sapiens
ggtaaaagaattcctacaattgtcagaaaatcaatttccagattcccaaattccatttatatcctctcttaaataagatttacctgagtatacaatgtgttcaccaatagccctttttttcaactttaccaaaaatgaatcattgcttcaccctcagtgaaaaattactaggtgcccaaaaaaaaaaaaaaaaaacggtggcgttttcctttcatgactactcaagactatgtaaggtcmtagggcttcccatcattccttctcttttatgtacactttcctgataaggatgaagctgggcattaaagagaaatttgccgtttgggcaaaaaccaaagaaatttggatccctgtctggatgttctaaattcaggtatacaataaagtgtggttaatgataataaaaataaaaatgaaataaagtgggagaaatgataatttttgtttaatgactttacctcttctattctcctattattaaagaattcattatttacaaggacaaatctgttgagagcaaggtaaaaagcatctgcgggaaatattgaac

SEQ ID NO: 345124 - DNA, 538 bp, Homo sapiens
atttaggctatttcttttctctatccagtattcattcaataaatacatawtgattacctactaagtgccaaactctgacgctcttaggggcaaaggacattatagagaacccacatgtagtctagtggaggtagaaaaatagtaattaaataattttccagacacatatagaatttcaactataattagtgctgtgaagaaaaagtccattgtattttgagaatatgtgagaggtactctgactttttacgtggggactagggaggatttcttagcggaggtgacttttgcattgagttatgaacaatggttaggaattaagcaagtgtagcagagagggaggaataggcaaagtccctgaggagaaaggaaatgatccaggagctgaaggatggctgtgggcttgagttcagagaggagtgaagagtgggtcaagatgagttcccaaaaggggccagaccaagcatggtcttttacccacaagaaaatgggaagccttgaacattctttaaacaaagcagtatgatgattcaattta

SEQ ID NO: 345125 - DNA, 373 bp, Homo sapiens
tgctgggtttgtttctttcttagaagtttgtaagattttctttttgtcccagtgttttaatgtagcttggtgtgggtccatgtttttttattgtgttgagtgcaatatccttcatttctggtatattatcttgaattatttccactatactttctcctcctcctcttataatttcctcatttctttctttatatggtttmtattatttaagacatcttctattttattctcttaaaataattttttaacttgtctttttactctaatttctgaaatatttttgtaactattttctaaagtttctattaagatttctagttttgctgtcatatttaattcccccctacaccagcccctaaaaagcatcctattt

SEQ ID NO: 345126 - DNA, 593 bp, Homo sapiens
atcacctgaggtcaggagtttgagaccagcctggccaacatgatgaaaccctgtctctactaaaaatacaaaaattagcaaggcatggtggcgggcacctgtagtcccagctacttgggaggctggggcaggagaattgcttgaacccaggaggtggaggttgcagtgagctgagatcgtgccattgcattccagcctgggcaacaagcgaaactccatctcaaatattttttaaaaagatatatacacatatataaaaatagatatatatacatatagaaatagaaatatatatgcaaatatatataaaaatagaaaaaaattaatgatcacaaaaaaatgttctgtcttttcagcaaggatagcggaaggaaaaaggcacttcctacatcctaagggatgrgaagagatgggaggtgaattcgccacagttccaagcggaaagtcagtggttcaacatgaaatacactaaattaatgagatttcttgtcctttggtcactctgtgttggaaggaatggtgacactgagttgaggtgttttgcatgagttgtgagataatgcagagttcatttcctctctgatttatagctc

SEQ ID NO: 345127 - DNA, 583 bp, Homo sapiens
tgccattattcatatgccttgagataaaacgtaaagaccaaagagagtagtgtaattctctgtacacatctgatactgtatcttagttcagtatttatttaataaaacttaaacaataattgacctttattaatgttgatgataataaaagatatactccctttacaaaattatcagttcctacatatgattaacttgttaagtaacttgtatgcattggttgttactcttcacaaccatcctataagggaaatactgattatttccattgtacagaggagaaaaactaaaaataaataagtgaaaaaataattaaggtaagcattaaagatgtatgactagtaaatgacaaagctacatttgaacagattcttttgagtccaaaaaccttacaccttctaaatttattaatgaaattcccaagagaaagtcrttgcagaaagttttaatcttacagaaggtatagaatagattaggaatacagaggtgctaactgaacatttttccaacttctttctacctttccaaagatgctctaatcaacatgtggttgattttaagagcccaaaggttttgacatgat

SEQ ID NO: 345128 - DNA, 640 bp, Homo sapiens
atgctttcacttgaggggattggatgttaatagaaagagggatgtggatagaaagaggccagattagggtggggcagtatgaggagagggtggtatgtaggtatcaatatattcttcctgaccctaaccctaacctcgtgtggcagaaaggtacggggacagcaggctgaagcctcaggtataggaacagaaagtgagcaacagacaaaatccasaatgcctaggtggctcctgactcatgtgtaaattctgcaccaattgccaaatactgactagcaggaagggaatagtcatgtggctaagagcacatgttctagagtcacactcatctgagtatgatcccaatttttctatttaccactcatatgacctcgagcaagttatttatcctccctatgtcttctcctcagacaaatagagataacagtgacaccttactcataagacaatccatcatgaggattaaataacacaaaaccttcaacatttttagagcaatgcttagaacacaggaagtgctcactaagagccgctattatcaccatcatcaataatattatcatttgccctgctcttctatttcctggaccgtctcagcagcaacaaactcttttcttacagatatgcaaaccagctacac

SEQ ID NO: 345129 - DNA, 640 bp, Homo sapiens
atgctttcacttgaggggattggatgttaatagaaagagggatgtggatagaaagaggccagattagggtggggcagtatgaggagagggtggtatgtaggtatcaatatattcttcctgaccctaaccctaacctcgtgtggcagaaaggtacggggacagcaggctgaagcctcaggtataggaacagaaagtgagcaacagacaaaatccacaatgcctaggtggctcctgactcatgtgtaaattctgcaccaattgccaaatactgactagcaggaagggaatagtcatgtggctaagagcacatgttctagagtcacactcatctgagtatgaycccaatttttctatttaccactcatatgacctcgagcaagttatttatcctccctatgtcttctcctcagacaaatagagataacagtgacaccttactcataagacaatccatcatgaggattaaataacacaaaaccttcaacatttttagagcaatgcttagaacacaggaagtgctcactaagagccgctattatcaccatcatcaataatattatcatttgccctgctcttctatttcctggaccgtctcagcagcaacaaactcttttcttacagatatgcaaaccagctacac

SEQ ID NO: 345130 - DNA, 640 bp, Homo sapiens
atgctttcacttgaggggattggatgttaatagaaagagggatgtggatagaaagaggccagattagggtggggcagtatgaggagagggtggtatgtaggtatcaatatattcttcctgaccctaaccctaacctcgtgtggcagaaaggtacggggacagcaggctgaagcctcaggtataggaacagaaagtgagcaacagacaaaatccacaatgcctaggtggctcctgactcatgtgtaaattctgcaccaattgccaaatactgactagcaggaagggaatagtcatgtggctaagagcacatgttctagagtcacactcatctgagtatgatcccaatttttctatttacyactcatatgacctcgagcaagttatttatcctccctatgtcttctcctcagacaaatagagataacagtgacaccttactcataagacaatccatcatgaggattaaataacacaaaaccttcaacatttttagagcaatgcttagaacacaggaagtgctcactaagagccgctattatcaccatcatcaataatattatcatttgccctgctcttctatttcctggaccgtctcagcagcaacaaactcttttcttacagatatgcaaaccagctacac

SEQ ID NO: 345131 - DNA, 582 bp, Homo sapiens
tacagtcatttgttattatttatgaaaatcaaaattagaaagaatctgaataatcgataataaatggtttctcaaataaattatgaagaaacataaatgataaaaaaactgtatttcctgaatgctcacatatataagtgttaatgcataagaaaactacacagacacaaaactgataaaaacagtaacttctgaggatgagaaatactggaggactttatttaattatttgagactttttaaatgagaatgcaatggtgttttgcttgatataatctttaaaacacatataaaactattattaatgttctgcaaaccctacataaataaagaaccagatcaaagaaaatagcaatgaaaaaagcacatccacaagatgaaatatcatatatctattaagatkaatgtttctggataaattttagtgatatgagaaatgttcattatatattactaagtggagtaaagagaaggataaaatgttctctctgctatgaatatctgtgtgtgtccataaataagaaaacagaataaagcacatcgaaatatgaatagttgttatatgtaggctgtgaaatacca

SEQ ID NO: 345132 - DNA, 603 bp, Homo sapiens
ctgcttttctatttaacgtctttgcagtttcaatgggagaaagaaaaacaaaagtggaagatgaattatttttaacagaattaatatagctaagaaaatacgccattctaaaccagtaataataggcccctgcctggttccaacagtagatactgtttctaacattatagcattttgctgatgaacatgccccactgaaatcctaaccattaattttctaaactgtactttttaaaaacttgacaaggcttgtttggtcactgaattatatatcctcttctaaatttccttcttgggaaagttttctttttcacccttaaagggatattatccctgctttggacaactttctcttaatagtcagatgttttcaatgtacttcatattccccaccattcccactaattaaatttttcatctgcacratggatggtaaaggccaatttcacaataagagggtgttgccatcaccacattactagagaaggaaagggaagatgatgtcaaagcagatctgacctgggctttgcattttggtctggggcttctgctccccccagttttcttaaaaagggccagatgagatacaaacccaagggctgc

SEQ ID NO: 345133 - DNA, 603 bp, Homo sapiens
gctgccctccacaactacatcaaaagatatatttcaagtccccttggtcagctcttctgaggagattttacacaaaagccccttaattggctgtcagtgagtagcacctagytcttttcctgtccataagatgtgggagaaaaaaaagagagacataaactcaacaatataatattgttggaaattatcttatagacacaagctttgattccacatctgcagacttgtgactagagggcaaggatccccctccccttcctttcaccattactctaaagctggtctcaattcaagataaaaagaaagttctaaactttaagattattttaatatcaaagggagatgatgaaaacggcatttccatccaaattataagcttatgttttctttttaaattaaatatgcttaaaaagccaatctccaaattttagcacagatgctcacaaagaatagaggcaatggttatttagccaagggggttaataattaagtgttttattaagctggcctaatttacattttaattcaaaaagcatattataaattaaaaggaaaaagcgtgtttctaaaaaaatgtcaaaaatcaaatatcaaaataaagat

SEQ ID NO: 345134 - DNA, 553 bp, Homo sapiens
ggcattgttactcataatggctaaaaattggaagcaactaaggtgtctctcaataggggagtaaataaaggaactgtgttaaatccacacaacaggatattactcatctcttaaaaaaaatgagctatcaagccataaagagacatggaggaaactttaatacatgttgttaagtgagagaagccaatctgaaaaggctatactatattatatgattccaactatattatgttctggaaaaggtaaaactatagagacaggaaaaaaagattaagtggttgccaggggttggtaggtaggtagagggatgaataggtaaagtacagacaatttttagggcagcaaaaattattctgtatgttgctgtaatggtggatacatgacactaacatttgacaaacctatgtaactgcacaacacaaagagtgaacccttgatgtsaactatggatattcattaataataatgtagcaatattggttcattagtttcaacaaatgaaccacatgaatgcaagatattaatcacaggagagattgtgtgtgagagaagg

SEQ ID NO: 345135 - DNA, 641 bp, Homo sapiens
ccaagatttggagattggagtttgtttgttaaacagtggtattatagtgaaaaacctccctgagatgctatctagtcctagtttgctaagagtttgtattataaatggactttgaattttatcaaatgctttatctgcatttattgagataataatataaattttccctcatcctattaatgtggtaatttatcttgtttgatttttgaatgctaaacaaaccctgcattcctagatttaaacagacaaaamgacttagtactgaggtattattctctatattttgctgaattcagcttgcttatttaattttttagtttgtgcatctatgtttgtgaaagaaattgattcataaatttcttccatcatattgttcttatctgattttattaccagtgttatgccattctttggaagagtttggccacgactagaatgatttcttcctcgaataacatttataacattctccaatgaagatatgtaaacttaggattttctttgagtaaatatttataactaataattcatttaaaaagttataaagtaatcaaaacttctatttcttttttagtgagtttaattagaatttgtgtttgcttttgtcagacactgtcaattttgctgtagaacttgttcta

SEQ ID NO: 345136 - DNA, 554 bp, Homo sapiens
aatgacttccaacagtactctgaactcacatctccacataactctggcatattcagaaatttaattttctgaactttttttgtccaaacagaaagaaacgacatgtgataactgaaactggttgaggactaggaaacagaacattatcaaatgtttggtattgatctattcatgcagatgatcttgtttaggatcatcaatttataatcctgtaaccaaattgatcattctaataatcacaataaatacatygcagagagagagagagagagagagacagaaatatattactaaatacttttaataactctcaagacaaaaaggataagataattaaccttttacagtaaaacttgacattttgaaagactgcattccaaacttaggactttgacttttttctgtaagagttcaaagctcataaatatatttcattctatggcaggtactaagtatttcccttggttatatattacatggaaaaacttttcctaaacctaaatgtatacaccagtcttcttatgtttcagaaatactggcagaggaaatatgtt

SEQ ID NO: 345137 - DNA, 564 bp, Homo sapiens
cttactttctttctttccttcttttgacaggttctcactctgttgcccaggctggagtgcagtggcacaatcayagttcactgcaacctcgacttcctgggcttaagtgatcctctcaccttcccaagtagctgggactacaggcatgcacttttttttttgtagagtcagggtctcactatgtaaccgaggctggtctcaatctcctaagttcaagtgatcctcccaccttggcctcccaaagtgctatgattacaggcacaagccaccatgcccagctgtagataatttcaatatcccaatttcaacaagtcatagctcaaacacacaggaaattaataaagaaatattggatttaaattgcagttttgaccaaatagacctaacaaacctacagaggactttccatccaacaacagcagaacacatattttctccagtgcacatggaacattttccagtataagccatatgttaggccacaaaacaagtcttaacaaatttaagaagattaaaattgtctctcatatcatttcagaccacaataatatgaaactagaaatt

SEQ ID NO: 345138 - DNA, 564 bp, Homo sapiens
cttactttctttctttccttcttttgacaggttctcactctgttgcccaggctggagtgcagtggcacaatcacagttcactgcaacctcracttcctgggcttaagtgatcctctcaccttcccaagtagctgggactacaggcatgcacttttttttttgtagagtcagggtctcactatgtaaccgaggctggtctcaatctcctaagttcaagtgatcctcccaccttggcctcccaaagtgctatgattacaggcacaagccaccatgcccagctgtagataatttcaatatcccaatttcaacaagtcatagctcaaacacacaggaaattaataaagaaatattggatttaaattgcagttttgaccaaatagacctaacaaacctacagaggactttccatccaacaacagcagaacacatattttctccagtgcacatggaacattttccagtataagccatatgttaggccacaaaacaagtcttaacaaatttaagaagattaaaattgtctctcatatcatttcagaccacaataatatgaaactagaaatt

SEQ ID NO: 345139 - DNA, 593 bp, Homo sapiens
tacaggcacaagccaccatgcccagctgtagataatttcaatatcccaatttcaacaagtcatagctcaaacacacaggaaattaataaagaaatattggatttaaattgcagttttgaccaaatagacctaacaaacctacagaggactttccatccaacaacagcagaacacatattttctccagtgcacatggaacattttccagtataagccatatgttaggccacaaaacaagtcttaacaaatttaagaagattaaaattgtctctcatatcatttcagaccacaataatatgaaactagaaattaatagcaggaggaatcctggaaaattgaaaaatatgtggaaatgaaacaacatgctcctgaaaatccaatgaataaaagaagaaatcaaaatggaaactaaaacatatcttgatacaaatgaaaatataaacataacgtaccaaaatctatggaatgtaccaaaaacaattctaagaattttatggcaataaacrcttacattaaaaaagaagaaagattccaaataaatagtctaatattatacctcaagaaactagaaaaagaacaaattaaaccaaaaa

SEQ ID NO: 345140 - DNA, 654 bp, Homo sapiens
ggaaggtgttgtataaagcaaagttggtcccattaacaatgtcttagtggaaaagctgttggttaaaaagaatggcaaatcttgaatgtttacttagaagctcctgaaaccaagaggtcattgattgctaatcttggaccagtggctcctaaactttatcatggataattatgactgaggtgctgattaaaatgtctcaaacaaactctatttattaaggcctgagataatacctactcttcttatcaaaccctctaagtgtttttgatgcaggtgatcttgcctatagcccacatatttcaaaatgtgctccaagattgtgtagtctaccactctcattttgatagtgatgaaaaccaaacccagagcaatgattaaatgccattccacgaaactcacacaagtgtctgactagaacttgactctcctcayttccaaattaatagttagtattaaaatgataccaaagaacctcacttttttaaaagagaaaaaaaatggatgattatggcttaagagatttttctcttaacaacaataataaaagttttttagctagaaatcatgaaacttgaactagcatgtcccaaacatcaaacagaaaaaggctgctcctgtggaaagaatgcaaaggcaacatggcactaagaggct

SEQ ID NO: 345141 - DNA, 475 bp, Homo sapiens
tgaataagcttttgaattgtatgtagactgttatttaaaccttctttcagagatttagagtccattattgggctactattgttggtagttctatagtagagtaagagtgtggattttggagttagacacatgcaggagtagatgtatagtttgctgacttagaaattastggtgagatcttaggcaagttatttaaccactcctagtctcatttttctcaaggtaaaatgggattaaccactgtttaggaattttgtgaggtctagaaaaaaatacagtatgtttcttataaataaacacttagaaagtggttatgattatttttactgtatatatgtttgtttctcattgtactttcacctacttgaggtcagagacagtcttacccacattaatatgtccagcatgtcaaaattcagaccagggtagtggtttaacaaaggtaactgaaagaatgaatgaatgaatgaatgaa

SEQ ID NO: 345142 - DNA, 515 bp, Homo sapiens
ttatgggctcttcctggatcccataaaggtagcagactacctttaaacttgaactacaactgttttctgagccaccagcctgccaatctcccccattagattttggactccccaagcctccagaatcatccagtttcttaaaatgcatctctttctgtatrtctgcacatcctattggttctgtttctctggagagccctaatacactaaccaatgagatctataagtttactaattgatgatgattatgttactttgctctggctgtatcattaagaaaactcagcccaacttttgtccagtgcttttcagagtgtttcccacagggccctaactcattggattctatacatgtccagtggactgcctacatcagattacctgggggcttggaaaaattcatatttctaggttctacttcagatatgttgaattagaatccctatggtgggacttggcaatctgtgtttttgacaaattcttcttctaattcttgtgcatataaaatttgagaa

SEQ ID NO: 345143 - DNA, 610 bp, Homo sapiens
aacaaacactacccactcctcgtctctgtaatcaaaaacaaaaactagttataaaacctgaaggcattttaaattttttttggtttatagaacagggtgaaaaataaaatgcaaataatggatcagcaaaattgttctagttcaggggtcgacaaactctggcctgcaggcaaatccagcccactgcctgtttttaatatggcatgtgagccaagaattatttttacgttcttaagagattgtgaaaaatataataaagaagaataggcaacagaagccatatgcggcccacaaagactaaaatatttactatctttcctttttcagaaaacatttgctgaccccaatctagtctaaataagaaaatatttagagccattctgttatctctgtgatccctgacaatctgcatgtctcctctgagcctgctcccttatctgtgactttgggatgattacatctgatcaaacttacaaakaaaaaaaaaaaactacctgtttaccaacctcttctacttcccccatcctcctccccagcctctggcaaccactattctatttttgcttctgtgagatttggtgatttattgtacagcaaggtgactatcatt

SEQ ID NO: 345144 - DNA, 583 bp, Homo sapiens
taaaattctcctggaattttggtaggaattgcattaaatctttaagtcactttggggacaattgattatgttaggcttcctaatccataaacatggtataccttgaaatcaaaggtcttctttgatttgtttaatcaacattttgtgtttaacatgcaagccctgaccatatttttaagtttttaatattttgtatctaagtttttaatattttgatctgattataaatggtaacatatttaatttytgtttttcaattgtttactgattgtatatagaaatagaattgatttttgtgagttgaccccataacacataaccttgctaaatgcacttattagtggtacatggaaaatttttaaagatactgttacgaattagcataagaagatgccctgagaaaaagaataaggggcaatttgttcagaggagtccaagccctcactagaggaatctcactgagtgttctttatacacaaaaaattggaaatctcaaaagggacaggcttttctaagcagtgaatgtcttttcccccaagttttccttctgtttctctcctactcaataaatttgattatataa

SEQ ID NO: 345145 - DNA, 492 bp, Homo sapiens
agacttaatcacagaggatcttaattatgtctttcccaaggaatcaatactctcctctttcacagaaacatttttcaccgtttctaaatagtatttacattaacttttcaaatgccctatcaagttcacaagagacacaccaatggggagtggcgaagctgtcatgttcagattttcaatgagggaagataatgggagtatccatgtctagagtgctcagtagtcatcaaaacaccaatcagagtacacaaccagtaaaacacactgtgcctggctgtatgagcaaggtgagcagcttctaacacaatgacagtttgtattaacccattctcakgctgttatgaagaaatacctgagactgggtaactgattaaaagagaggtttaattgacttacagttccacatggctggggaggcctgaggaaacttacaattgtggtagaaggcacctcttcacagggcaggcggatagagaatgagcgccaagcaaa

SEQ ID NO: 345146 - DNA, 585 bp, Homo sapiens
gtagcaaaaaacacagatgcaactgccttaatcagttagacaatttaaattttcacatatcaagaagtgtacattcagaggagttctagacacataccaaactgggttctggtttgcagctctgcaaactacaacccgcaggccaaatctggcctactacttttctttgtaaataatattttattggaacacagccaagaccattcattaatttattgtttatgtaatacacagccaagsacattaatttatgtattgttctgtgctgcaacaagagagatgagtagttgtgacacagatcacatagcccacaaagcccaaaatatttattatctggacctttacagaaaaatagttgctaacccctgctatatctctatcttcctgtgactctctaggctttcctctcattcatgtattggctctgtgcccagcctttgtacccactccaggtcataggtgtcacatgcaagcatgacaatatttctagacagaatataagccatatttttcttgtgtcttcttgtaagaacaaggaagcttttcctaaaagcccatagaacacttttattcacatagctttgg

SEQ ID NO: 345147 - DNA, 585 bp, Homo sapiens
gtagcaaaaaacacagatgcaactgccttaatcagttagacaatttaaattttcacatatcaagaagtgtacattcagaggagttctagacacataccaaactgggttctggtttgcagctctgcaaactacaacccgcaggccaaatctggcctactacttttctttgtaaataatattttattggaacacagccaagaccattcattaatttattgtttatgtaatacacagccaagcacattaatttatgtattgttctgtgctgcaacaagagagatgagtagttgtgacacagatcacatagcccacaaagcccaaaatatttattatctggacctttacagaaaaatagttgctaacccctgctatayctctatcttcctgtgactctctaggctttcctctcattcatgtattggctctgtgcccagcctttgtacccactccaggtcataggtgtcacatgcaagcatgacaatatttctagacagaatataagccatatttttcttgtgtcttcttgtaagaacaaggaagcttttcctaaaagcccatagaacacttttattcacatagctttgg

SEQ ID NO: 345148 - DNA, 557 bp, Homo sapiens
tcacatagctttggcccaaaacatatcacaaggcagtacctgaaccagtcattggcaaggcaactgaaattgccatgactggttagaccaatcagaatctactctcagggactgagggtaggtcaccctctcctgaaccaaatggccaatgtgccaaggataaatgcctaaaccaaattaggactctcttgaaacagaggaaagcaaggagaatgaatgttgattactaccaaagggttgagttctaggaaagatggaagagctgagcttgccctggatgcctatgtctttcccctgtatatttacaatggaaaatgctaacaagaaagatactgaaaggcatgaagargactctaaaaagaaactattgagggaatacatgatacctattttgaggttttctacaatcagccctaccagtatccaaaataacaaatgccttattgtcacatggacctactgtaaaaacataagtcatatactccctggaagagcagaggaagaaaaaagagaagaaccaaggtgtcattctcctggagaaaatttaccagagtaat

SEQ ID NO: 345149 - DNA, 575 bp, Homo sapiens
tttcaggatgtttagcagcatacctagattctgcccactagatgccaatagcacccccacacccctgccaagttatgacaaacaaaaatgtctccaggcatagtcaaatgtcccctggggagtaaaatcatccccagttggaaatcagttttcaagtaatgagcctggttttggtgtttccccttggcaggacaatttcgggccccagtatgccagaggagctgaactccaggttgccrctgcctgcttccaaagtagaattcagaaagatgtggcttcagcctcatgcactgattctcattcctttctatacatttgggggccaaggagatattcctcttgctttgaatgacagctatgtctggttagttttcttgtttaaactttctatctatcattgctacatgtttgaagcagaggggggatgttaaggtgtaagcttaggaagccaagcagactggaagtctgtaggtccaaatctaatcttttgttttgtttcaaactaagcttttcccttcattagtcattagagtttttaacgtccaggaaatcagaatgtgtttgaatttctagag

SEQ ID NO: 345150 - DNA, 539 bp, Homo sapiens
cttggctctgctacacaatctccctctgcaaggttcagcaagtccttttactactttggatctcagtttccccacctttaagtgagggcaccattgttaccctgtatactccaaaggattattaggggtacaggtaagataatatatgtggaaaactttggagatgttaaatgcgtttcgtcaatagaagacctaggaatcagcaggcaactcaaacagcaagtcacaggctaatccaattagctgagccctatcctaaccttatccattctttacctgctttcagctctcttctgtactaacaaggaattttgcctgtcagkttgaggatgcagcatgcttctctgtttccatccatgaattcagcactagcagatgtgcagggagccaaaacgccagctctgtgttttcctacgttcatttccagtaacccagttagcctgctgctagctgcacacctgcagggtgtcttgcctcaggcaatcccactgcactttgaagcccttacttgtcgatgttaaatatgccatggtatacac

SEQ ID NO: 345151 - DNA, 586 bp, Homo sapiens
ttgaagctgatgttatggtaaagaaggcaccaacgaggagtttggattgagaatcmaacgtgtgtaaagattaccacctgtaatctgttaagctgttactaccagcttaacaagaaatatataacaagtcaacaaaaccaattataatgtttgcagactgaaattacaatattccctttagaggcagtaaaagttataaatttggaaatgttaattatgaggtaaaataggtatttttaaaggcaagataaattttacaagttttgtaaataagcatttaagtacaagtatcttacaaggatattgtgcagtggtttattttacttatgcatttttttttcttacctggaatatggcctcggcaagtgtaaaagaattctttgcaatagtctttgcagagcagaggaagtactaggtctctttccaagacttctctctcaggtgagtggaacaggctttgagaatgtggagagcaaagtgcacatttgatttcctccagtaacttcccacattctgtgttgttggtaacagaaaatatctgaaagccataaatcagaagcaaactttttttagtaggtaaatttag

SEQ ID NO: 345152 - DNA, 586 bp, Homo sapiens
ttgaagctgatgttatggtaaagaaggcaccaacgaggagtttggattgagaatccaacgtgtgtaaagattaccacctgtaatctgttaagctgttaytaccagcttaacaagaaatatataacaagtcaacaaaaccaattataatgtttgcagactgaaattacaatattccctttagaggcagtaaaagttataaatttggaaatgttaattatgaggtaaaataggtatttttaaaggcaagataaattttacaagttttgtaaataagcatttaagtacaagtatcttacaaggatattgtgcagtggtttattttacttatgcatttttttttcttacctggaatatggcctcggcaagtgtaaaagaattctttgcaatagtctttgcagagcagaggaagtactaggtctctttccaagacttctctctcaggtgagtggaacaggctttgagaatgtggagagcaaagtgcacatttgatttcctccagtaacttcccacattctgtgttgttggtaacagaaaatatctgaaagccataaatcagaagcaaactttttttagtaggtaaatttag

SEQ ID NO: 345153 - DNA, 554 bp, Homo sapiens
tatataatattgcacaaaatggatgtgctttcattgaagtatttcctaccatcaaatgtttaggtgatctcatgggctttcaaaatacttacatcaatttcctcagtctccactcacaatactatacagttcacttgctcaaaatggtctccttttggtttcttcttttctgagccctgtgctttttgtagacctaagataaacctatcatgctgtgtccatcaagtaattctctcttgtttgcttaaaagtttcttcaagtgtcactttttgcaagaaacctaaccttaaaaacatgtcccaaaaccacccattacagcatcactgacagatgattggtttttgycaagttgtccaaagaaaacaatttcttatttaaaagagagaaaagtatacatatatggtgaaaacattcttcttgtgttgccttacagtgttaatatctagatattccatcaacataagacaacagtaagcctgtgatgacttaacttctaggttgacgacttcctcctaccaaacgttcaccattagttcatttctcaagatccttt

SEQ ID NO: 345154 - DNA, 554 bp, Homo sapiens
tatataatattgcacaaaatggatgtgctttcattgaagtatttcctaccatcaaatgtttaggtgatctcatgggctttcaaaatacttacatcaatttcctcagtctccactcacaatactatacagttcacttgctcaaaatggtctccttttggtttcttcttttctgagccctgtgctttttgtagacctaagataaacctatcatgctgtgtccatcaagtaattctctcttgtttgcttaaaagtttcttcaagtgtcactttttgcaagaaacctaaccttaaaaacatgtcccaaaaccacccattacagcatcactgacagatgattggtttttgtcaagttgtccaaagaaaacaatttcttatttaaaagagagaaaagtatacatatatggtgaaaacattcttcttgtgttgccttacagtgttaatatctagatattccatcaacataagacaacagtaagcctgtgatgacttaacttctaggttgacgacttcctcctaccaaaygttcaccattagttcatttctcaagatccttt

SEQ ID NO: 345155 - DNA, 549 bp, Homo sapiens
tggctcagctgccagcattcccccgtgcaagcttctaacttccttatttacatttgcagctcaaattttcaggctggtctttgytagaaaagagatgatttgggggctgctttttgttagaaaagaagctctgctgaggactcttttgccctctatctgtctaaataatgactttctacctcctgtatcaaaatgacctttcttcttagaacaactctattgggattatgacctagactaggcatgctcatgtctgcctttgcagcagcagcccccattgtcctcacttctaagcagatgttaattatgacagttttgctacctttgtacagaactgtgcagtgtttcaggttttttttgtatatcttttcccatcctctctcacagtgaactcataaggtatgcatttaatgcaggaaataattattcctatttcacaaatgagataaaataagactcacagagttaacatgatttatccaactgttcatgtggtggataaaactagaacgaatatctggatcttcaaatttctagctctggtactct

SEQ ID NO: 345156 - DNA, 544 bp, Homo sapiens
tatcaaaatgacctttcttcttagaacaactctattgggattatgacctagactaggcatgctcatgtctgcctttgcagcagcagcccccattgtcctcacttctaagcagatgttaattatgacagttttgctacctttgtacagaactgtgcagtgtttcaggttttttttgtatatcttttcccatcctctctcacagtgaactcataaggtatgcatttaatgcaggaaataattattcctatttcacaaatgagataaaataagactcacagagttaacatgatttatccaactgttcatgtggtggataaaactagaacgaatatctggatcttcaaatttctagctctggtactctttccactatacctttatttatttgcttatttttttggagacagagtctcgctctgtcagacrtgctggtgtacagtggtgcaatctcagctcactgcaacttctgcctcttgggttcaggcaactctcatgtctcagcctcttgaggagctgggactacagccatgtgccaccacgcccc

SEQ ID NO: 345157 - DNA, 531 bp, Homo sapiens
gagaatgaactaaattcttatgatgttaaaacaatartttatggaagtgatacattttctatgaaaagtacctgagaagttctttagtaaagttgtattatgctaggaggtgatcatttttagatttcttttatttatttcttttatttatttgaatttgagacaggatctgactctgtcaccgaggctgcagcacagtggtgcaatctcaactcaccgtagcctcaacctccctggctcaagcaatcctgcctcagccacctgagtgactgggactacaggcgtgtgtcaccacacctggctaagttgtgtagtttttctagagatggggtttcgctatgttgcccaggctggtctcgaactcctgagctcaagcaatctgcccaccttggcctcccaaagttctgggattataggcacgagtcccttcacctgtccccatttttagatttcttaataatttttgtttagtaaataggagagcagaggcaacatccactgaatgcctactaagtgccactatgccactca

SEQ ID NO: 345158 - DNA, 531 bp, Homo sapiens
gagaatgaactaaattcttatgatgttaaaacaatagtttrtggaagtgatacattttctatgaaaagtacctgagaagttctttagtaaagttgtattatgctaggaggtgatcatttttagatttcttttatttatttcttttatttatttgaatttgagacaggatctgactctgtcaccgaggctgcagcacagtggtgcaatctcaactcaccgtagcctcaacctccctggctcaagcaatcctgcctcagccacctgagtgactgggactacaggcgtgtgtcaccacacctggctaagttgtgtagtttttctagagatggggtttcgctatgttgcccaggctggtctcgaactcctgagctcaagcaatctgcccaccttggcctcccaaagttctgggattataggcacgagtcccttcacctgtccccatttttagatttcttaataatttttgtttagtaaataggagagcagaggcaacatccactgaatgcctactaagtgccactatgccactca

SEQ ID NO: 345159 - DNA, 444 bp, Homo sapiens
tctgaacctggacaagcatggagtcatccagtgcctgatcacactgaacccttatcttttccataattctcttggagatttgcactactttccattcctcagaattgtagaacaagaaaggacctaaggtattattattatttgtttttatttatttatttatttgtgatggagtcttgaagtgttgcctgggctggagtgcaatggcatgatctcggctcactgcaacctctgcctcctgggttcaagtgattctcctgcctcagcttcccragtagctgagattacaggtgcccatcaccacactcagctaattttttgtatttttagtagagacagggtttcactatcttggccaggctggtctcgaactcctgatcttgtaatccgcctacctcagtctcccaaagtgctgggattacaggcgtggctgacccaaggtat

SEQ ID NO: 345160 - DNA, 564 bp, Homo sapiens
ctatatttatttctcataactaggatgtgagtcaggcattcttatgtgtcttagtgataagaacagagactgagaaagatgaagaattttgtccaaagatgatttcaaaacaaggctttttgacttcaaaatatgatcctctctgtgaaatttttatcttcatgcttcagatgccaagaaaatttaaattgctattggtgtagaaaaacaaaacatcactaaatgcyactatcccttgtcaaccaatcaactcaaagtaatttacagggtataatcttatttgatcctgatatatatatatattatattttatatatacttttatatatatattttatatatacttttcttattttccatatgctcttctgtcataaaattctttaaaaaaaagaaaaaagattacttggaatataataagtgctttcattatacttgttcccaattcagaaagataagccttgcctgcctgttgaccctgagttttcaaactcagtggcaaaggagttgatacatgaatttaattatgaattatctcctttttgacaaccaaatcttatgcag

SEQ ID NO: 345161 - DNA, 555 bp, Homo sapiens
tagctcaatctgcaaatactttttcattgattagcttctgggcctagagctacattaatatttaggaactgcagtagtaaaattgtgggtttcttaacaatgaccatgatagccaaggagaacaaggaaaaatgaaatcatagcaaaaacccaactgtgatcttacttagagcagctttaaatctataaactaggtgtgtgtttgcaaattaagccatgtttgggggaagtatttttttttcttttttgagacagggtctcactctgtcacccaggctggagcagagtggtgccaacatggttcactgcagcctcagcctctccaggttcaaccgatcctcccaacacagcttccaggaaagctgggactacagacctgtgccaccacacttggctaattttttgtattttcagtacgaacagggttttgtcatgttgcacaggctggtcttgaactcctggcctacaagtgacccacctaccttggcctccaaaagtgctgggactacatgcctgrgccatcatgcctggccttgggggagtattataaagggc

SEQ ID NO: 345162 - DNA, 614 bp, Homo sapiens
atttgtggacattttctagtaaacataagcactccactgcctttattttcatggtcatatttttattctacctgtgtatttttaggaagttcaataaaatatttgctcagaaagtattccrgacatgtaaaggtatcaggtgccaagtcatacaaagaactgaatgcaagagaggaacaggaagttgaatgggtgaaaagtggttgggcagagaagtacaaaaggaattaaaaaaaacgtagaatgacccttaacttaagaatcagaggaatcagactataaagttaaaagccgaaactgttttcataacttcttgttcccacaaatggtgtcttgattatcttaaacctctggcaagctgcctgtgcttgctcacacttagagaggagcttgacaatgaatgaaggcaattttagcccattagtccattagaaggtttcagaaatatcctctctgcactttttatcttcccattggtgtgcttaccatcgactcccatgcaaaaactgggagttcctttaggtgtgtgtttgacgtgggcaacctcatctcccttggggatgctgagggagagagagagtggtggcacaagaggatgcagccaccatgtacct

SEQ ID NO: 345163 - DNA, 512 bp, Homo sapiens
cacatattcagtcagtttcagagatccctagcacctccctggttgttcaaatcttcttaagattctgtgagaatgtaatatatagtgtaagatatccaactgaacggtgttgtgcattctgctaccgagactgggccaagttgagttgtkagttacaatctctgccaaaatggtgatcctgggagaactacagctccatggagaagggggcctgaaaaggagaaagaatggcttttgctgagaccattgataacactgaagacaaagaaaaattaaaacctaggatggataaggagaaaaataataggcttcagtgtcattacatagaataaaaaaaagcaaattttgtatttttaggagaaatttctcatttttaatgaagaaagaaagcttacatttaagaagaaaaaaatatgaataaggttttaacagtgcatttccttaaccctaggatatccagtccataaatatttttgggacatcagatgtgtgggcaaggaagtaggctattg

SEQ ID NO: 345164 - DNA, 572 bp, Homo sapiens
tgccatactgtgagttctgcctgtacaccaactcataaaattctatgaaggtatgatgttccaaaacatyaaaccaaaagcaaacattactccatttagccacagacactgtatggctcccctcagcctaacaccgcaaacactgtttgcattcgatggtccgtgttccctaatgctaattaaattgttcctatgctacgttttactgctcttaccctaaaaaaagtattgtcaattaattaaacagtatgatatgtttaattattttaatcgaccgtacatgccattttatgatttcttctccaaaaaatattttattccaactaaaacatagagaatcaatgagtcaaaacgccatgaattaaagaaatgcaagcacaaatttttatttctggttagcaaccctagataatctgcaacagaaaattacgatacaatgaatcggagcattgttttaaaaaataaactgcactgccttaaaactctggaaaatgcattatttcatatggcgaatgaataaactcttggaggaaggattatattcacatccattagtatctgaaccaacatct

SEQ ID NO: 345165 - DNA, 572 bp, Homo sapiens
tgccatactgtgagttctgcctgtacaccaactcataaaattctatgaaggtatgatgttccaaaacatcaaaccaaaagcaaacattactccatttagccacagacactgtatggctcccctcagyctaacaccgcaaacactgtttgcattcgatggtccgtgttccctaatgctaattaaattgttcctatgctacgttttactgctcttaccctaaaaaaagtattgtcaattaattaaacagtatgatatgtttaattattttaatcgaccgtacatgccattttatgatttcttctccaaaaaatattttattccaactaaaacatagagaatcaatgagtcaaaacgccatgaattaaagaaatgcaagcacaaatttttatttctggttagcaaccctagataatctgcaacagaaaattacgatacaatgaatcggagcattgttttaaaaaataaactgcactgccttaaaactctggaaaatgcattatttcatatggcgaatgaataaactcttggaggaaggattatattcacatccattagtatctgaaccaacatct

SEQ ID NO: 345166 - DNA, 612 bp, Homo sapiens
cgaggtaagagcattttggttgtggaagaaatgtcttcttaatgtgaaaatctcactgttcatgcatgcacatattctctatgtccacatgatgccatactgtgagttctgcctgtacaccaactcataaaattctatgaaggtatgatgttccaaaacatcaaaccaaaagcaaacattactccatttagccacagacactgtatggctcccctcagcctaacaccgcaaacactgtttgcattcgatggtccgtgttccctaatgctaattaaattgttcctatgctacgttttactgctcttaccctaaaaaaagtattgtcaattaattaaacagtatgatatgtttaattattttaatcgaccgtacatgccattttatgatttcttctccamaaaatattttattccaactaaaacatagagaatcaatgagtcaaaacgccatgaattaaagaaatgcaagcacaaatttttatttctggttagcaaccctagataatctgcaacagaaaattacgatacaatgaatcggagcattgttttaaaaaataaactgcactgccttaaaactctggaaaatgcattatttcatatggcgaatgaataa

SEQ ID NO: 345167 - DNA, 619 bp, Homo sapiens
acccattttgctgcaagtacaacagcagattaagacataacatatacaataaaattatcatataattttccatctacaaattaataaatatagtgataattggagtgtgtaaataaaatatatgcttattaaaggagtcaggtcaaaaacatggcagaacaggaagctctggaccctcctttttccagtgracatactgattcaataacaatttcctgtatgagctattcaaagatcagttgagaggctcctgtgtcctgggcaagcacaaaaccagctgcattaaagatggtttaaattgactatttaccacactctcttactgtaattctttcccctggcaaagcaccacatgattggaagtaaattgccgttcccagcttctccctggggaagaaaggaggggcctggactgtgtatccaatgttctgacttttcaaaggtccacagaagagacttgtttctgtgttgcccgaatatgaaaggtgacaaaaggacctattctccaagatatgtcatatgttagatcaagtcttaacaaatttaagaagactgaagttatattaaatatcttttccaaccacaatggcataaagctagaaattaacagaaaaaaccc

SEQ ID NO: 345168 - DNA, 518 bp, Homo sapiens
tattacactagcagaagttcttatctgtggaatgccttacgaggatgtacttaattatttaagattgtttatagtaaacaaacctatggatttatgtggagagcttgctgcaaattgtcgtataaactatgcaactgtctgatgtaatctgctgtgtattagcttccttactgcttatctttttgaaatgaacaaaatttgatagtgtggaagatatctgatttgtgtatgttttatttgacaatttgaattttttttgtgtataaatgcagctccagtatatgtagcacgtaacactagttttgaaaaagataggtctaggttatggcatttagatttgtgttacttaacttttacaacctcaagttttcctaatctttataaagagagaacagacttgttctgagagttttgctggtattaaatggtgtacaggaagaaaaatttcacctccatcctcttaaggtctgagctgggtctgaggatgaaattgacrtaacatagattaacaggagaaa

SEQ ID NO: 345169 - DNA, 506 bp, Homo sapiens
cagggtttcaccatgttggccaggctggtctcaagctcctgacctcaagtgatctgcccaccttggccttccaaagtgctgggattataggtgtgagccaccatgccgggccatgtattatcgttttgatgtactgttggatttggtttgctagtattttgctgaggatttttgcatctatgtcatcaagcatactggcctgtagttttcttttgttgttatgttcttgcctgattttggtatcaaggtgatactggttttataaaatgagttagggagaaatctctcttyctcaattttttaaagatagtttcagcaagattcatacaaattcttctttgtatatctggtaaaatttggctgtgaatccatttggtactggatttttttttgttgttgagagattttaaattagtgatttaattttattactcattattggtctattcagaatttccatttctgactggctcaatttgggagcttgtattttccaggaatttatc

SEQ ID NO: 345170 - DNA, 632 bp, Homo sapiens
taaataaacataaaacagccaacctatttttttaagctgttggtcaacaaagaaattatttgcatcagtttgcttttactttacaactggttgctggttgctgtaggacactgtatctagtagcagttgccattaattgagtgtctttgatgttccttacatagtgaaaaatgcttcatatttgttataattatatcagctaattcccataataaccactcagtggaggccttagggtcagtaattgagttctgaggagtcagtcaggatgtagaatcctatctgaggttgcrtgaaatgagtgggaaaatggaaggcatctgcgcaagacaaagatgaaagatgaaagatgaggaatggcaggacattttagaagctggaggaactcattgctgaaactaattccaaataggaggagctatatctttaaatgaataacagatgaaatcaacagtctggtagaggatgggcatggactgaagcaggaaaagcaggagaaaccacggacaattgctatgaactctatttcatacctctggtttgctttaatgggtcagtaagcatgaggcttgtgactgtgtccaactggcataaaaacataacatggaggtatgaagataacaccttactgc

SEQ ID NO: 345171 - DNA, 535 bp, Homo sapiens
atcaataagtatcagtcaacagatgaatggataaataaaatgtggtatatacacacaacaaaattttattcagctttagcaaaaaagaaactattatcacatatgatagcatgaatgagccttaaaaatattatgctaagtgaaatattcagtcaccaaaggacaaatgactgtgtgattcctcttatatgaagtatctaaagtggtcaaactcacagaagcagaaagtagaagggtggttgccatgggataggaggagygaaaaatgaaaagttgcttctcaacagctacacagtttcagttatgcaagacaaaaaacttttagagatctactgtacaacatggtgcttgtcattaataataccctattgtacacttaaaatttttgagggtgttctcatgttttgcgctttttgtcacaattttttaaatgtgtttactaaattgggggatgataatgcactgaaggaatgaattgcaagatcaaatgaatgtttgttatatttaatatacatgaaagtggaattattattgg

SEQ ID NO: 345172 - DNA, 597 bp, Homo sapiens
actatctcattttcctatgctctggtttatcatcatgaagacattaatttctcatgatttctcgtgctatctatggaaataatcctttattgaaaaaataagtatcttgaaattagtggcagcaaaatggatttgagaagatctcattaaagtgtatttagcaacatctcactgaatctttatatttttacacacagaaaaatattttggatgttttagaaaaaaaatgtgtagaattagagagctctaactgtgaacaccaacattgtttcgccacctgtatcttgcattaagagacagatggacttgcgccagagatttaaagtcaaataaagaagttcctgggtgaaaatcagtattactgaaaaatattttacaatgagttctttctctaagcaatgtttatggcacatgtattgatatttgaagtagaaattagttttaagtaaatatgacwtataaataatattacgtggagttccatgaaagaagggactgtgtcctattcagtgcaatatcctctgagtctgacactgaattaacagttgataaatgaaaaaataatcaatgaatcaatctatggatgtggtaaattca

SEQ ID NO: 345173 - DNA, 282 bp, Homo sapiens
catttaagtctttaatccactttgagttgatttttgtttatggtgagagrtatgaatttagtttcattttctgtatacattcggttttcctagaccatttattgaagagactccccaatgtatgttcttggaaccctcgtcaaaaatcagttggctgtaaatatgtagatttatttctgggttctgtattcgattccactggtctctgtgtctgtttttgtaccagtaccatgcgatcttagttaccatagccttgtaatatattgagtttcaagtagcatg

SEQ ID NO: 345174 - DNA, 282 bp, Homo sapiens
catttaagtctttaatccactttgagttgatttttgtttatggtgagagatatgaatttagtttcattttctgtatacattcggttttcctagaccatttattgaagagactccccartgtatgttcttggaaccctcgtcaaaaatcagttggctgtaaatatgtagatttatttctgggttctgtattcgattccactggtctctgtgtctgtttttgtaccagtaccatgcgatcttagttaccatagccttgtaatatattgagtttcaagtagcatg

SEQ ID NO: 345175 - DNA, 282 bp, Homo sapiens
catttaagtctttaatccactttgagttgatttttgtttatggtgagagatatgaatttagtttcattttctgtatacattcggttttcctagaccatttattgaagagactccccaatgtatgttcttggaaccctcrtcaaaaatcagttggctgtaaatatgtagatttatttctgggttctgtattcgattccactggtctctgtgtctgtttttgtaccagtaccatgcgatcttagttaccatagccttgtaatatattgagtttcaagtagcatg

SEQ ID NO: 345176 - DNA, 564 bp, Homo sapiens
attttctaaaaatggctcagttgtttcctcttttactggtgtataaattatttcaatatgaactcaggtagatgaggaactacatgcaatcttgaaaatatgtacgttccccaacttgtggctttgacacagtttatatttcatgtgaagaagaaaccacagttactttgcacaggagttaattttaagaagcatctgaccagtatgtgtatacactgacatggaactcatctgagatagatcttatatcagctcatataagcttagaatattaaaactttctattgytattccccagataacttgactttgtttttatatgccaataggccatatagtaagtactagtaagtaatcctgatttcagatactttattaatttgtttcttcccttagttcagaaaggctctttaattcatacttcttgagttctcatataggaaacacttaaaattatatatgaaccatagtggcaaaattggagattctccagtagtctggctcactagttcctctgaatgatttaccatagatctgcctttgcagttcatatatttccaggtc

SEQ ID NO: 345177 - DNA, 596 bp, Homo sapiens
taacatggacagatggatgacctccatgctcagttaacaggttcataattaaactcatctttctcccctaaatgtttaagactcatatagtccatattctatcagagagactctccaaatttcttttttaaagtttttctccagactcagccaaatacagtcagactactcttagatgggtctctcgaatatactatactttcctgatcattcattacttacttattcaatatgcttagtctagactctttcaataccttccaaactcatctccctgaatctagccttgccctcatttgtcgtttttcccatattgtcaccaaattaactttaggtattagttctgtctcatgcttaaaatcctttagtggctcctcatgtcattctgggaacaagccaagccctgtagctcatccttccaagtccttcttcctctgaatttstgctccaactttactttcagccacccttccttgccagcccactagctatgctcagcaacagggaactactcacacttctctgacataggttttcctttcttctctcagctctgaatatccttccttccacctggcaaattattagtcatttgc

SEQ ID NO: 345178 - DNA, 591 bp, Homo sapiens
caaatagtacgtgcagaatccccaaagttaaactgtttgtataattcattaaaacaaccaaggataaattacaataactctttatttttattaaatcttaaaattgtagagtgccatttctgaaggttatcagtttccacagaatttgtacttgtcaattccatctttgatgaaaaatatttttctactgactctcctgaatttgatagagctgtgctttatatagcataacttcgtcagtaacatgagcaatagtactraggtggcatcggcaaaccaataaatgatgaaaactttgccatacagttacatcatctcagtagtcttaccatttgtctactttaacttcttaaatttaaacttcctttatgtcacttggagtaaaggcatctaaaagattgctcacaacagcaataaagtcacatttcagctatgcatctcatttgtaaaatttaagtttgcagtattgccaaaagtgttggttagttcatattcaaaacaacgacaaaatgccagagcactcggtaatgcaacaagtgtagtattcccgactgttttagtgttttgctagctaaaatgcataccattcta

SEQ ID NO: 345179 - DNA, 419 bp, Homo sapiens
agacatgagatttgggaagggccaggggcagaatgatattgtttggctctgtgtccccactcaaatctcatytcaaattgtaatctccacgtgtcgagagggaccagtaatactcacatgtcgagaaagggaggtgattggattatgggggtcattcccccatgctgttcacatgatagtgagttctcattagatctgatggttttatacgtgtttgacagttcctccttcatatgctctctcgcctgtcaccatataggatatacctgcttccccttctgccatgattttaagtttcctgaggcctccccagccatgtggaactatgaatcaattaaacctcttttttttttctttttaacaaattacccagtcttgtgcagatttttacagcagtgctaaacagactaaaacaccag

SEQ ID NO: 345180 - DNA, 419 bp, Homo sapiens
agacatgagatttgggaagggccaggggcagaatgatattgtttggctctgtgtccccactcaaatctcatttcaaattgtaatctccacgtgtcgagagggaccagtaatactcacatgtcgagaaagggaggtgattggattatgggggtcattcccccatgctgttcacatgatagtgagttctcattagatctsatggttttatacgtgtttgacagttcctccttcatatgctctctcgcctgtcaccatataggatatacctgcttccccttctgccatgattttaagtttcctgaggcctccccagccatgtggaactatgaatcaattaaacctcttttttttttctttttaacaaattacccagtcttgtgcagatttttacagcagtgctaaacagactaaaacaccag

SEQ ID NO: 345181 - DNA, 558 bp, Homo sapiens
cagcagtgctaaacagactaaaacaccagaaagccattgggataatctttttagcatttttaaaagtggttactaggctatataaggctatataagacctaattggtaaaggtaaagggtgccttgtgcctggtggtatgcactttcacatttaaagtaaygaatgacgcaatgtggtaaaattgaaaatgactgagaccataaaatcaaaaactcacagatttgaatcccagcatcataacctagtgtatgattttaacaaaattacctaatctgtcttaatttatttcatttatttatttttaatggacaaaaattgtatatatatatggtgtggaacatgaaatatgtatacattatggaatggctacatcaagctaattaacatatgtattacctcatataatattcatttgtgttaagaactcttaaaatctctcttagcaattttcaagtatagaatatattgttattatctattgtcaccatgttatacaatagagctcttgaacttattcctcttatccaactcatatttttgtaatctatgaccaacta

SEQ ID NO: 345182 - DNA, 558 bp, Homo sapiens
cagcagtgctaaacagactaaaacaccagaaagccattgggataatctttttagcatttttaaaagtggttactaggctatataaggctatataagacctaattggtaaaggtaaagggtgccttgtgcctggtggtatgcactttcacatttaaagtaacgaatgacgcaatgtggtaaaattgaaaatgactgagaccataaaatcaaaaactcacagatttgaatcccarcatcataacctagtgtatgattttaacaaaattacctaatctgtcttaatttatttcatttatttatttttaatggacaaaaattgtatatatatatggtgtggaacatgaaatatgtatacattatggaatggctacatcaagctaattaacatatgtattacctcatataatattcatttgtgttaagaactcttaaaatctctcttagcaattttcaagtatagaatatattgttattatctattgtcaccatgttatacaatagagctcttgaacttattcctcttatccaactcatatttttgtaatctatgaccaacta

SEQ ID NO: 345183 - DNA, 450 bp, Homo sapiens
ttctactctgctcctttgagttcaatctttttagattccaaatattaagacttmtattatccatctgtaaaattctgcaaaattggaactattcagcaaacatcttaaaatgattaaaagacaataaagataataaacatgaatgtatgtggtatataaatagattaggaattattatttttcttccagcttctatactacttgtttccttctagctgtccttactcaatagaaaatactaaattgaagtcagaatatgaattataattagtaagggaatgatatggctctagttgttaatatacctacatagctacttgaaaattactcttatataggagggagagttcatgagaaatgcaggcaccaaaggaggaagtcagtaccaacattcattttcctttccatctttgacaaaatttaaaaagctatgggcaatgacacatggat

SEQ ID NO: 345184 - DNA, 489 bp, Homo sapiens
aaaaataaaataaaaattttaaaaattaaaaaaaaattctataaaaatgaatttaaactataaacccaatttttggtcagtgctttagatatgataatattttctagagaagagcctagggatattttctatttacaagcaaataaacattattttataacagattatttccaacccagtcttcacctacatattatggaaatgttaaattataattatatttatttaacattctcacatctttctatttgacttccttccaaaaggagaactaagcaattacctgatgaatttaatgattgcatacagtcatctgaataattataaaaaaaactaaaatgtttttcccataagccaggaaacagttgcttatttgattgcttttatttgcattgcraatttttattttactctgcagtatttttttcaaaatacagttaaaaggtacttaaaataatgcacctaaaaatcgactttttgatatcatgg

SEQ ID NO: 345185 - DNA, 475 bp, Homo sapiens
gtaaaagggtcagagagagcttctacctcgcggctgcagcttgcctagttgccgcaggtctgactcaaggtagggttgttggcgccttcctgtttggaggggcaatcaagcaaaagagaaagggggatccgagagaccggcggaatgagggttcatcctcaggggtcctgcccctaaaggggctgtgagagctcagggatgagtagaaaaaatgcaaacggagatgggcatttggggaggttccaatgctggatgtgatgttgaggttatttcagtttgcatgaaagaggtggccactgatggggccctggatgagagagcctttcgtaaggacaggcactttggaagaagccttaaggagyagattttgtttttcctgcatgttaattacttcccaggcaccttgacgatcgtaatatagttaagatgatttgttaggtgaatatttaagatgacataagcaggtggcattaac

SEQ ID NO: 345186 - DNA, 560 bp, Homo sapiens
ccatgaacaaaagagaggctattctctggggctgttcaattaccatagttaagaatcttctagtttttttcttggagatattctgggaatagtaaggggtaatggaactggagattccactctttattactacgtagatctttacttaatccacctatgctatgccttgtacctggtaaatctccaatctctctcctggaatgagagtagagaaaatactgcccagctacgaagcatgatcttgggacccaaccatggttttccattagtataaaagacttataacctgttttcagctctgtgctacacctcaccttctaagatgctgtgwgtttttttagtgctaagcctttcatgagtactaagtggtgtgccaccactcatttatctgctctctttcattatctaccaatttttccatctcctagtaaaatatagaactatctatcttttctgttttcatgttatttcattcctgtggcttaatgtcatttcatttctttactgccattttagcaggggtgttatggatgaatgcacaaaaacatgatgtttaatta

SEQ ID NO: 345187 - DNA, 575 bp, Homo sapiens
gtttctaaaacacaaaagatctaattttatcaatttaagcatagagaacatctcttttttcctccaaattaggacaagtgttctgactaagaagatttggaggtgaaaaaaacttgcatatctgggtttgagatgctacaaggaaaatgttaggcagttaaaagatcctttgaaaacaaggccgtcttgcctgataatccaaactatataaaatttgatttttttttgtttcctttaaatgagccatgtttggtaatttaacatttaccattttattatttaatgtctggaaacctattgcactaagtaattgccaacttgctgaatctgacaagtgaaattctgatatgaatttataatttatgagattaataatttaacygtcatttagacatgatagcttttgagtttagatcacaagtcttgcaccaggcacctccactgaaaacataatttggattttaagaaagtaataacacattctgaagtgtcataaaaatgctttgtaaatatttcctggtataaaattgtcaaaagacacaaaagtgatcttaggatttcaatggaaagtttag

SEQ ID NO: 345188 - DNA, 580 bp, Homo sapiens
ctttcctctctccccacctcctttccacattcatcaccggaatcattcagcattttatcaactctttataacttaaattctttctctatttaaatacaggagtaaggagaaaggggagttggagcgacctaggaagggtactataatgaaaacaggaatggactttcagaatagatagtggcctatctggaggaggagccaatttctagtcttttctcagttccaattctgttgctgttaaacttcccaagatagataaaaattcctaggaagaattttcatgattaattgacttctttctcctggagaatctgcatttagtcaaataaaggagattgagaaaaagcccctctctgtgcatttgctatttcccaaataactttagtgggaagtaatcagcataacaatgcggcatactttgggatgatatttcctggactccttcagtatacattatagaggcaagaggccaggcayggtggctcacacatgaaaatcccagctttcagaggccaaggtgggtggatcacttgagtccaggagttccagaccagcctggccaacatggtgaaaccccttc

SEQ ID NO: 345189 - DNA, 586 bp, Homo sapiens
cctaaaggtgttgagattaaaatggagaaaraggaaggaaagaaattagaaccaatttatattacctcttcccaccagttagaaatgaggtttggatccttccttgctaatccagatgccatgctggcagatggaatttttctactaattacttttttctacatttgtcctaagtagaccaaagtactccacgcttctccccactttcacacctgtcctatgaagttcctctaatttaagatgtaaattgattatgcttcatgttttcctcacctttaatgtctcatcattataaggaatggcatttgtttaccataattttaatatgatcaaattttttcttggttaagagtttagaatgtaggtcagtttcttttctgagtcagctccacatttcatctcactctatattctccttactgtttttttctgtaataagggggaaattctaaacaaaaaggcaatctttttgaaatgtgaaagtgggagagtcatgagaaggccttttctccaagagagaagtgcagtctcccagtttttaggctgggaaagccattttgccttttccaggaatcagtgtggaaat

SEQ ID NO: 345190 - DNA, 568 bp, Homo sapiens
accaggtactgtgtgtacctcaataaatgcattattttgaccatgaacatgtagttgcctctagtatttttatctattaaaaatggcattttttccattctcatatgtctcctgttgcatgtgtgcaaaatattctytcatgtaaacagctaggaatcgaatggttgggtcactggagtacacttactggataaaaaatattatcaaaaaccttcagcaaatacaatttgatgtggaagagttcccacactgattcttggcaaagaccaaaatacttttaaatatgccactcctaagtgtttaaaatgaagacactcattttgatttcctgagttgggggtgggggaaaacaatggagaacagcccttctcctcctctattttttttttcttttaacatttcttccaattactagagatacagtaaacgcaagtgacacagacaagaaaacatggagcagaccctaacagaaaaagtagggaatagaaactatgttcataaataggaattccacacaagagaattatgggaatgagtaagacagcaagattcctccaaaaaacctgca

SEQ ID NO: 345191 - DNA, 591 bp, Homo sapiens
atggactgtttatataaatgatgggaaagggttggggttagggtgtgagattactktagaacgtgttatttaaaaacagtatgaatgaaggacattgtaagtcaggttttttattatatcatggtcatatactcctgttcctgtcagtttttcctgcttcctttctttcaccaagatcactcctttccttctcagatcaccaagtcctcctagctatagagagggccttctattcctctccacctaaacttatataagctactgttttcctcatacagacatgttaatgaaaatgaatttctacaggatctccagtccattgaaatacattaatttttgagtctcttcacacatttttatttcctagatttaagtcttgattgcaatcacatacaactagtatttcttggaataaaacagcaatcacaaaaatcataaatatcacattgtttaaaaaaatttattatttgatgttgaggactccatcctgatttcaatgaattaattcatttgttcccttttaaaatgtcatctgtgttatttatgtgtataaattttcaataattgtttctcaatatagagtaaatgata

SEQ ID NO: 345192 - DNA, 591 bp, Homo sapiens
atggactgtttatataaatgatgggaaagggttggggttagggtgtgagattactgtagaacgtgttatttaaaamcagtatgaatgaaggacattgtaagtcaggttttttattatatcatggtcatatactcctgttcctgtcagtttttcctgcttcctttctttcaccaagatcactcctttccttctcagatcaccaagtcctcctagctatagagagggccttctattcctctccacctaaacttatataagctactgttttcctcatacagacatgttaatgaaaatgaatttctacaggatctccagtccattgaaatacattaatttttgagtctcttcacacatttttatttcctagatttaagtcttgattgcaatcacatacaactagtatttcttggaataaaacagcaatcacaaaaatcataaatatcacattgtttaaaaaaatttattatttgatgttgaggactccatcctgatttcaatgaattaattcatttgttcccttttaaaatgtcatctgtgttatttatgtgtataaattttcaataattgtttctcaatatagagtaaatgata

SEQ ID NO: 345193 - DNA, 560 bp, Homo sapiens
accagtgattaatgggaagtgctaataagtcatatttgaggttatccaacccgagattctgatttaattggtttaaggatactatcaccttgtgggttagatttgaaaaataataattgctttaaggaaggaacctgttggtatttaaacaaaaaactttccttcctgattcttacatgccgtcacttagacaaatctctggtctacatggctggatctctttctgctagttaaattctgtgctaccctgtgaaaaagaactgagattaataaaacggtagtgagaacacagggaaagataaaaatcatagcaagcccatccagtcatgctgtagtcatcctcacaaggatagggaaggatcttgtccttcatttatcacccaaagtgtgagtacaaactttaaaaacatatgatactataggaataatgaagatgtctccatttgcaaaaattgtgtgaaaaaatgcacttgacacaggtatttcctatgatttcataatasacaaaggtttaattacacaactcctggctgaatctagagtactaaaatgtggctgtt

SEQ ID NO: 345194 - DNA, 635 bp, Homo sapiens
gaggcagacagcagtatcaggaggagaaggagggtgaggaagagaaagaggtagatggaacatgaagtaaaactggaaagagaaagaaattaagatttcacatacatttgattttttaaaaatgtaacagcaatggttaccgctgaatagaagaccaggaataagggtgaggatggtgagggggaaaattgtactgctatgtgaattttgtttttttacaatattttcaaaaaggttttattgattgattgtttgattgattgattgagactagctttgttgtcttgctttgttgcccaggctagatagagcgcagtggtgcgatcttggcttactgcaatctccacctcctgagttcacacaattctcctgcctcaacctcccgaatagctgggactacaggcatgcaacacaaygcccgactaatttttttgtgtttttagtagagacggggtttgaccatgttggccaggttggtcttgaacttctgacctcaagtgatccacctgccttggcctctcaaagtgctgggattactggtgtgagccaccgggcctggccaagaggttgtaatttaaataaacaaaagtatagtttgaaaagaaagtaaacaaagaagcaagaaaatatgaata

SEQ ID NO: 345195 - DNA, 569 bp, Homo sapiens
gtggcaagaaactgctagaagagaataagctcgaaatctaaagagcaggttttgcgttgctgctatgctcgggccccgggcttatataagccggcgctgccctgtgattggtggagcgtccaatccrccgccctctggccgccgccgctcgcggttggactcccaaattgtgtttgttagtcctcaaaatttgattaaatgcttaaaacaatggtacagaatttggcactttgaagctccaaaggaggaaaacagcctccaggttcacatacttgtttgtgttttcaagaatcttgtgcaattgatgaaagatattttaaaaaatcccttcagcttttcataagaatccattgggctgagggcatcatgttagttagtagcgtgtcgcgataaatttctactaagtatccagtgaaagttatttttaaaaatttgcccatgagttcatgctttgatttttgcaggagaaaagacactgggttccttggtttgggcatgaagtttgtttctaactgtagcaagtaacacaggcacaggacagctggttgcctacagccccaacttaacca

SEQ ID NO: 345196 - DNA, 569 bp, Homo sapiens
gtggcaagaaactgctagaagagaataagctcgaaatctaaagagcaggttttgcgttgctgctatgctcgggccccgggcttatataagccggcgctgccctgtgattggtggagcgtccaatccgccgccctctggccgccgccgctcgcggttggactcccaaattgtgtttgttagtcctcaaaatttgattaaatgcttaaaacaatggtacagaatttggcactttgaagctccaaaggaggaaaacagcctccaggttcacatacttgtttgtgttttcaagaatcttgtgcaattgatgaaagatattttaaaaaatcccttcagcttttcataagaatccattgggctgagggcatcatgttagttagtagcgtgtcgcgataaatttctactaagtatccagtgaaagttatttttaaaaatttgcccatgagttcatgctttgatttttgcargagaaaagacactgggttccttggtttgggcatgaagtttgtttctaactgtagcaagtaacacaggcacaggacagctggttgcctacagccccaacttaacca

SEQ ID NO: 345197 - DNA, 567 bp, Homo sapiens
gttagtcctcaaaatttgattaaatgcttaaaacaatggtacagaatttggcactttgaagctccaaaggaggaaaacagcctccaggttcacatacttgtttgtgttttcaagaatcttgtgcaattgatgaaagatattttaaaaaatcccttcagcttttcataagaatccattgggctgagggcatcatgttagttagtagcgtgtcgcgataaatttctactaagtatccagtgaaagttatttttaaaaatttgcccatgagttcatgctttgatttttgcaggagaaaagacactgggttccttggtttgggcatgaagtttgtttctaactgtagcaagtaacacaggcacaggacagctggttgcctacagccccaacttaaccacatagacttgactttacaaactggttctgtgtcctaggagtttccatgtgctratgtctttacagaatgggattttgcagcttggaagagttccacagtcagagtgacttcttctgcattgcagcaccagtaatacaaatcgctttgacttaaggatctaactactcagattc

SEQ ID NO: 345198 - DNA, 472 bp, Homo sapiens
gtggcacatgcctgtagtctcagctacttgggaggctgaggtgggaggatcacttgaattcagggtgtcaaggctgcagtgagcaatgatagcagcactgcactccagccagggcaatggagcaagatcctgtctcgaaaaagcaaactaactaaaaactaaagagtgtgtgacagagactatatatggcctttaaaccctaagctatttattacctagcccttttgctgtgttataaatttctccacagagacacagatattgtataggcctcttaccgaacaatgcaaattgagaactaaagaaaaggagatcttcaygagcaaatgatctaaccaagcactttccactgttccaaacacaaaacttagaaggtccaggagaaaaaaaccccaaaactccatgtgtaatggagccagggtataacaataagagctgacactcattcagcatttactacctgacaggaagt

SEQ ID NO: 345199 - DNA, 629 bp, Homo sapiens
tcctcccttctgagtccttattgtctattgttccactctcatgtgtgtagtttttagagcctgttgttttttgtatttttgaggcggagtctcgctctgtagcccaggctggagggcagtggcgcgatctcggctcactgcaacctctgcctgccaggttcaagcgatcctcctgcctcagcctcccgagtagctgggactacaggcgcgtgccaccacggccggcagtcttttttttagtggacaggggggtttcaccgtgttagccaggatggtcttgatctcctgaccttgtgatccgcctgcctcggcctcaccagagcctgtggacactcaytgtgctacttgttcccttcagtaggggcaggtagatacgcaggagacacattcctcaaggataaaaacaggaatacttttcaaaactaaacttcatctgtaaaattgaccccatgacatgtcttttttgagtgataatccttatcagtaggaacaggttctgtatgtgaaattgatttagcataccaacagcctgtgacctgactcctgcattatagtgtgttgggccactaccacgttttgtccacagcttgtatttaacatggagctaagacacgtctcaaaagctacag

SEQ ID NO: 345200 - DNA, 579 bp, Homo sapiens
tctacacatttaaaaagtggcaaaaatattgtaaatgaagtcaaaatgcaacwgacaaaaataggagaaaatattcacaatgtctagcacaaagggctaatatctctaatatgtaaagaaccattgaaggaagaagagccaaatatcaaatagaaaaatggagaagtgaagcaatcaacaaaccagacaaaaaattattctcaccatatgaaaaaatttaaatgcatgtataattagacaggcacaaattaaaacaatattgagatacaatttctcacttattagactggcattaaaaatattagcatgttcttttagtgaagctctgtggaaacaggagttctcatggccagcaagagctgaactgagctgccagttgtgggagaagtcaattaaaacaacagccaaggaggaggagccaagatggccgaataggaacagctcgggtctacagctcccagcgtgagcgacacagaagacaggtgatttctgcatttccatctgagctttgaagagagcagtggttctcccaccacgcagctggagatctgagaacgggcagactgcctcctcaagtgg

SEQ ID NO: 345201 - DNA, 567 bp, Homo sapiens
ctttggctattttgccaatttcaaccctaatgaggcggatgtcaaatttaaacacaaatccctatagtacctatagyacttggctttggaagtaatttattattcaagactaaaattcaatttcagactggggtactcgtggatgatagtttattttgttactcaatatatctctgggtaattaattttgttatttagtttgtttgggatcgctcaatactagaaaccacacacaacatatttttattattgcattcatcatttttgggtcattgaaaaggactggatgcttcaacttaagaacaaaagagaacaattttgttctcagcgaacactgtattagaatttaaaactgctgcttttccttaaattctttttttgtcaatttcttaaacaatgaaccataatgagactttatgagtttttcccttggcttttgatatgtatgtaatagagtcacatgccattgtcattgtgtaatgattcccaagtttctactaacctataataaatagcactaatgagattttctcacattctttgtgtgctcagaaagcatgtcttatt

SEQ ID NO: 345202 - DNA, 567 bp, Homo sapiens
ctttggctattttgccaatttcaaccctaatgaggcggatgtcaaatttaaacacaaatccctatagtacctatagcacttggctttggaagtaatttattattcaagactaaaattcaatttcagactggggtactcgtggatgatagtttattttgttactcaatatatctctgggtaattaattttgttatttagtttgtttgggatcgctcaatactagaaaccacacacaacatatttttattattgcattcatcatttttgggtcattgaaaaggactggatgcttcaacttaagaacaaaagagaacaattttgttctcagcgaacactgtattagaatttaaaactgctgcttttccttaaattctttttttgtcaatttcttaaacaatgaaccataatgagactttatgagtttttcccttggyttttgatatgtatgtaatagagtcacatgccattgtcattgtgtaatgattcccaagtttctactaacctataataaatagcactaatgagattttctcacattctttgtgtgctcagaaagcatgtcttatt

SEQ ID NO: 345203 - DNA, 534 bp, Homo sapiens
taaaacacagtaatttgagagtacatccccaagtacacacagttgtaaacaaatcttaaactgtttttcagcaatcatattattaaagggagttttaggccwgttatgagtgttatatataatataaataaataaagctattgagtgattattttagcttccttgaatactagaagttttgatgtgaagaaaggtaatacaagatggttaaggttaagtcaaaaccctgtagttcttaattttatttgcatgtattagtatttaaattaacatgtactatctaactgaatccacaaaaaatcttagacaaaagattgacccagtagtgatgagggcctagattttggtctgtaaataccatttccataaaaaaggaatgaagaatattttgaaagataggcaatactagctctgagttaggaaatacaggacaagcttggactatcttattgtaataaaatataaagctatcaatgactgctagatttacgtcaaaaagaccctggaaccaacaatagtaagctctcattatgc

SEQ ID NO: 345204 - DNA, 447 bp, Homo sapiens
cactcatatttttttttcttttcttctctgtgttattttsattcccaacttcctgtttatttctaacataccagcatttaggtctctgttaatacctggtcttctactgacccatcttttgccccaagcactttatttaggtagccaaaaaacaaacagaaaaaagaaatctggtttcttctttaagagaacttgtggttttagctgttattatatgtttttactctaccttatactcatgaatcaatcatataaagtaaataaacagcttaaagcatgagttgtgtgaatagttatgcaaattagcttcaactctatgtatattatatgtgaacacctgtttttatgtgcagaaatagccatgcgcagcacattcatttacaaaaatgctcattaatgtccctagaatgtttagcttcatgaagtattgctgggccacatggtgcg

SEQ ID NO: 345205 - DNA, 447 bp, Homo sapiens
cactcatatttttttttcttttcttctctgtgttattttgattcccaacttcctgtttatttctaacataccagcatttaggtctctgttaatacctggtcttctactgacccatcttttgccccaagcactttatttaggtagccaaaaaacaaacagamaaaagaaatctggtttcttctttaagagaacttgtggttttagctgttattatatgtttttactctaccttatactcatgaatcaatcatataaagtaaataaacagcttaaagcatgagttgtgtgaatagttatgcaaattagcttcaactctatgtatattatatgtgaacacctgtttttatgtgcagaaatagccatgcgcagcacattcatttacaaaaatgctcattaatgtccctagaatgtttagcttcatgaagtattgctgggccacatggtgcg

SEQ ID NO: 345206 - DNA, 571 bp, Homo sapiens
agggaactgttaggcaattctttgtacctagggataacatgaacatattgagattctaaggattctgttaactgaggacgttttggaacttctggcctataataaggaagggatatgggtggccagaaataaagctggagaggtaaaccgcagacaggtttgaggagtctaagttttgtcctgaaggtgacagggaacctctgaaggaacaggaagtaacaygttcaaagtctacagtcgagaatcaattaggacaagaaatgggggaagaaggggagggatctatggcacagacaggtggaggcagggagagccacatgaactctttaacagctttagcaataatatagctgtatgaattttcaattgctgctataacttccaccaacttggttgcttaaaacaacatgaattttgtcaccaccaggcctgccttacaagagctactgaaggaagcactaaatatggaaaggaaaaaccagtaccagccactgcaaaagcataccaaaatgtagagaccatcgacacgatgaagaaactgcatcaactaacggacaaaataaccagctag

SEQ ID NO: 345207 - DNA, 571 bp, Homo sapiens
agggaactgttaggcaattctttgtacctagggataacatgaacatattgagattctaaggattctgttaactgaggacgttttggaacttctggcctataataaggaagggatatgggtggccagaaataaagctggagaggtaaaccgcagacaggtttgaggagtctaagttttgtcctgaaggtgacagggaacctctgaaggaacaggaagtaacacgttcaaagtctacagtcgagaatcaattaggacaagaaatgggggaagaaggggagggatctatggcacagacaggtggaggcagggagagccacatgaactctttaacagctttagcaataatatagctgtatgaattttcaattgctgctataacttccaccaacttggttgcttaaaacaacatgaattttgtcaccaccaggcctgccttacaagagctactgaaggaagcactaaatatggaaaggaaaaaccagtaccarccactgcaaaagcataccaaaatgtagagaccatcgacacgatgaagaaactgcatcaactaacggacaaaataaccagctag

SEQ ID NO: 345208 - DNA, 447 bp, Homo sapiens
cactcatatttttttttcttttcttctctgtgttattttgattcccaacttcctgtttatttctaacataccagcatttaggtctctgttaatacctggtcttctactgacccatcttttgccccaagcactttatttaggtagccaaaaaacaaacagaaaaaagaaatctggtttcttctttaagagaacttgtggttttagctgttattatatgtttttactctaccttatactcatgaatcaatcatataaagtaaataaacagcttaaagcatgagttgtgtgaatagttatgcaaattagcttcamctctatgtatattatatgtgaacacctgtttttatgtgcagaaatagccatgcgcagcacattcatttacaaaaatgctcattaatgtccctagaatgtttagcttcatgaagtattgctgggccacatggtgcg

SEQ ID NO: 345209 - DNA, 564 bp, Homo sapiens
ttatcatcttataatgatgttgtttagaagtttgatgtgggtctcactgcactcaaatcaaggtatccagagggctgcattcctttctggaggttccagggggaatctatttctgtkccatttgcatattttagaggccattgagatgctttggctcattgaccttactccatgttcacatccggtaactttacatgtctccatcttttctccctgctaacattgccctctgatcacagctcagaaacaatttctgtgattacagtaagcaggcctggaaatgcaagataatctccccatctcaaggtccttaaccttattcacatctgcaaagttccttttgccacgtaaggtaacatttacaggttgtggagattaggctgtgaacatcttgggaggctatattctgcctaccactgtttttgttcagaaacactttcctgaatttgaggaggaacttacttaatccattttgctttatgcttacctacttctacatttgcagcaattattaggctatgtcgtcatcttgagtcttccagagtgacctaccctcctcttttt

SEQ ID NO: 345210 - DNA, 535 bp, Homo sapiens
tctgcctaccactgtttttgttcagaaacactttcctgaatttgaggaggaacttacttaatccattttgctttatgcttacctacttctacatttgcagcaattattaggctatgtcgtcatcttgagtcttccagagtgacctaccctcctcttttttgaaattcacagtcatccctgcactacaggaggccaggtggccttgactccatttgtacacaggtgaacagaagagttatcccattatgtggtcttctccacccattaatgtccctgccaaactgcctgaagtcagtgcacctacttcccactgatgcaggagctggcaggacatcctgccttaacttactctcattgcatagtggtacatctaatagccagatggtgtacctaatgatcagawtaccttggagtcccaattgtaagtgcttaatgtggtcagtctcactcaaggtgaagccttggtcatagatattccagaattattctcactatgagagttgcttccattctaagagagctccaagtcagaaga

SEQ ID NO: 345211 - DNA, 488 bp, Homo sapiens
  misc_feature (1)...(488): n = A,T,C or G
caaagaaaattgtctagtatgcaacactccttgaaaggaaataatgaaagataaagagctcaaaggaaggcagccataataactgaagtttttttcttttttttctggaagggctctattctgaagcactacaagaggaaacagactggaacgrcaaagctgaatagagagacctatggaagacagagaactacagaaatctattctttatatataagttaaggcaaaacaaatatatcaattttactaaagcttttcaatacttagaccctgacatgtgtaaatgtgaataaacatatatatacatacaaatatgcacctttaaaataaaataagaggtgtaacttggtgatgagaaaaaagagaagcagtaatagccaaagtgtggactcggaagggaagaagaatgaggtggaggctttctttctttttctggcctcaagtttccatatggagagacttcatactgtagaannnnnnnnnnnnnn

SEQ ID NO: 345212 - DNA, 591 bp, Homo sapiens
ttctgtccccttctgtcaagtcttgattagatttctggagctgctcttcctgctttgtctaatgggacatcctgttccttggtttactgttgctcaaattgtgttgcttgtaatatcagtatcacaaccatttgagatgctaatttaaaaatgtagactcatgggatccccaccagaaatactaaatcagaatctctgatttggggcctgagaacctagattttaagaaaataactacatgatatgtataaataccatgagataacttctgcagaaggttcatttcatttgtcatgtatcacctgtcctggtttaaacctgaagaagttatcttatttccaaaacccagggtggtttttaagatggcacctatatactgagtagagtaacaagttggctcaagttaaaagtaaaaggaattataaaatctggccactagtagttcaagtgatgggcaaaattaatccacatttttaagtgacaaaaaatattataatagaaawcaaaatagtataatgctttagtgagttttgaaaataaaggcctgaagaaaagagaaatgtaaaaaaggaggctttgactatgtaacac

SEQ ID NO: 345213 - DNA, 595 bp, Homo sapiens
aaattttccatattacctcagaataatttcatgagtttataggttggtattattttacatagctctatgaacttcttttaatgttcatgctagaaaattaggaaaaattaaaagcattatccccaggaaagagagtttccacttcatttgttttraatatgtttagagttcccaggaattgccgaaatgcaatacatttcacacctgagtttgtaaatttgactaagctattcatctcatcagtgtgatacttgtcactgaaacatcaattcaaacaccaccaccctgggcaagcttatggaacttggtgcagatcagtatgaaaacgtaattaattggctgcccgtatgacctgcagtgttgaatcaaacgtgcttcttggataatcaacttctataccgtgaattaatgccaaatacaatatcaactctagccaacatgtttgccttggacatttctttctcattaaggcttaggaaaaggacataatttttaaaaatggaaaataatcaggaagctaaaagacagatattgaaatagctgaagacaactttacagaagagtcagaaaccaaataataaaataatcttacaat

SEQ ID NO: 345214 - DNA, 439 bp, Homo sapiens
atcaggtttatcttatgagaatgctcagggacacatttgccattttcactcacaatggaagcagttactttttgaggataaaccatgaagagatgcaaatgattttacctttctgtacctgggcttcatatttatttgtccttcactgagcctattgataactgtgcttgagcttatatgtccaatctgacagatgagatagctacatttaagttaaaatggaagactcctggcctagtggaataaatatgtgatagccttcatgtagcctcctttctcctctgggacaactctgtctttgcaccaagggaccaacagctagamtatgtcatgcacttaccttggtaatattttcacaagttcaaggttaaaggagaaattgaggatcatatagtaagttttccttgaaggtaagcaagctctttactcctcactaaac

SEQ ID NO: 345215 - DNA, 609 bp, Homo sapiens
cttttactcgatgttgatatgcgtcttttgaaggatggtgctccatccttgcaaagcagagctaggacttcagccatgtctttggcaggctattccaatgatcagatcatacattgcaccaccccaaaccagaagctgtggttgatctgaccagtgtgtgatctgaccagtgaatgccttagcgatgattccatttctgcatttctcttgctacaaagtgggttctttggtccaacacgatataatatggagtcctggactgatgggccaaatgttctataagccctatcttgtaagtctgtttctgtaaaaacaaaccactgaactttctaaagcagaaggggcctaatgtggtcaccttgccaccaggagactggttggcctctccttgagaaatgatgtgatttaatgttttcagcattgattggtttctgctgccagcaagctgaaagtcaatggtggcaccagctaggttagtataggtgagtgggaatgcctagcctccktctccaccataatggccacattgtttatgtgcccatcataccagcactgagttggccaatgagagactgactgatgccaactgaacaagatattttgtctact

SEQ ID NO: 345216 - DNA, 501 bp, Homo sapiens
atctcctcccagatgaaaagaagaaggcacactgcttttaaaaaatggaatttattacctttggctagaggcctcactatgtaaaataattacctaactactattgttagcttcttagaggctggttgataaatcctggtctgtggtaattaattatgaataactattttttattcccatttaaacctttcctctttttgtttmtctattcctccagcctcaaacctaatggatttgcctttataacttttgaaccaaatctttgacttttttttaatgtgttcaattttattttttactgcaatgtctaggtcaatgccttttaaacaatcatcagaaaagcttcagcccaacttcctgtggacttcctttaatcacacatcctttggactcattaaatcttatctgtgacaaaagatgaagcccaacatttcctctccagctgaggctttggcccaagactgtccaaagaactgttaactcttgagcctgggccaagcc

SEQ ID NO: 345217 - DNA, 473 bp, Homo sapiens
aatcctggtaaggagctgggatagaggggccagtgggccagaaactagtcctgtgagattcttttgtacaagaaaggcatgtttttacttagattatatgtttctttgcatgagggaagattattaggagctaagtcaactctcttacccaacaaagtcatccctttgtgctttgactgttcattgaaaccttcttgggattgacctattcrtctgtttcttgttaaaggctgaaggtccctgatctatatttgacacaatatgatgtcttctactgcaagacttcataaacagaacaatgtaagtttctatctactgctacctaaattcagctattagaattatttggaaagttttcaaagtatagatttctaggccctataggtggtattctgaattgaaatctctagggggttagctatagaaatctgattcttagagactctcaggtgactctgatgcaggtgtcagct

SEQ ID NO: 345218 - DNA, 583 bp, Homo sapiens
ataattatacctgtggctcatctaacaacaccactgagttttttgaaggatgaattaagtatgtttgaaccatcaacttaaagccacaaaaatatttttttaaagttttgcaataaaattttctctctctctcctaaaccaatttatatgtttttctttggtttttagagtgatgaaaataastaaacaagctgtccatgactggttttaggtcaaagcttaacctcaaagttgctcatcttaaagcagaaatgatgtggcttacagggtaagatgtgtaccaaggaataacagtacctacatgataattttatatgggtatatatatatatacatatatcatatatatatcagagatgtgcataatatatggaatatacataatttaaagaaactgggatggcaggagctggttataatgtgtctgttatgtggaaaaattcacagatttaatcatctgcataaagatttaactacatgataaaattagatgtgtcttttacataagatgtcacttgggatgatgagtttctcaaatcttaaccttttaggttgcaaaatggttcctgaggaagatgatagc

SEQ ID NO: 345219 - DNA, 597 bp, Homo sapiens
atacaataagatgcagaatagcatagctaccaggtgctaaagatagacacaaatctggagctggccccaacatcaaggaagaggtggctcattgaactataaccttatgcagaagagagattggtattacaatgattaaaattacaagacagtgaattgtcccaaacaacacaggttctggctggggtcttctattcacatgccagtgggcggtaacacatttcagagtaacatctctcaaaaagcagttataggtagaaaactcatcacccctagtgaggtgcactgcatgaacacagataccaggcccagatggagttctgtacacaagattacagctttgccatttataaaactgagccatgagatgcaaataagttctaaatgttgtttttcttccaagtaaaactcaaaacttgagaacttaatctgttgtttttgctttgaagctgaaatctgcagattgcaaaagttgagactagtagcctctctttgtttccttctttatgtkcttatataacatagcaagctttcccagaaatagatgataaaatttcacatcaaaggtgcacagtaaaattcctgcagacttaaaga

SEQ ID NO: 345220 - DNA, 597 bp, Homo sapiens
atacaataagatgcagaatagcatagctaccaggtgctaaagatagacacaaatctggagctggccccaacatcaaggaagaggtggctcattgaactataaccttatgcagaagagagattggtattacaatgattaaaattacaagacagtgaattgtcccaaacaacacaggttctggctggggtcttctattcacatgccagtgggcggtaacacatttcagagtaacatctctcaaaaagcagttataggtagaaaactcatcacccctagtgaggtgcactgcatgaacacagataccaggcccagatggagttctgtacacaagattacagctttgccatttataaaactgagccatgagatgcaaataagttctaaatgttgtttttcttccaagtaaaactcaaaacttgagaacttaatctgttgtttttgctttgaagctgaaatctgcagattgcaaaagttgagactagtagcctctctttgtttccttctttatgtgcttatataacatagcaagctttcccagaaatagatgataaaatttcacatcaaaggtrcacagtaaaattcctgcagacttaaaga

SEQ ID NO: 345221 - DNA, 581 bp, Homo sapiens
gacccaacagttgtcacatgactctggacacaatagtcatgtcaggagcttcttggtccctgccgcagctaaagtggtatttctaaacttcaaaggtctctggttagcttctcaatttcccctccttgtcttgttgagactgttctcttcctgtagccccaatctaaagcccattttcagcccttctgatgcttttgtaagcaactaattctgtatatggactctttctacctaaaatctgtcactgaattcctaactgaccctcagattacagaactaatttatgagcaaatggtgttattctcaggttttttttatttttaacataaactactttaagcaaagaggataactcctacactatgatgaccacacaccgatggccaccacactttactgaactggatgasgtcatacttagaaactgtctgtgttctgtagtaccctcactaggatctcaggaaagctccttgaatactacaggataattaaaggaatgataatgtcctggaaagtctgacttcaggttgaaagatcacaaatctgaagcctctccatccaaaagcacacatacacacaag

SEQ ID NO: 345222 - DNA, 609 bp, Homo sapiens
ccaaattttgatcattgccactttgatttgcatatttatgataactgaatttaatcytttgctggctgttgtaagggaaaaaacacaaaccaaaaataaacatcattattaaagtaacatttcccaatattaaaaaataactgcattggaaaagtactcaatttattggacaggatacattttcgcttaagagaaactacagctttagaaatacaaatcagtgtcacctatatgtgggtgaaaattaaacggataagcatatcttgagaggaaggcatggtatctattctcatgtaaattattttcattgtgctagtagctcagtattgtccaggatttaggattgcacagtatgagcagcaaagctgctaacacaaaagtcctattcctggctcagagtcacgagctttattcagttagtttcctcatctatgggatacaatagtcacccaggctctgagctgcagagaagcctcattagattgtccccacctatgggcactggcatactgactagaaggcatcataaaaacagagattattttataattaggataaatccttggatgaaagggatggattttcaaataatgctgtatggagaatgaa

SEQ ID NO: 345223 - DNA, 566 bp, Homo sapiens
gaggttgccatgagccaagatcacgccactgcactccagcctggtgacagagtgagactctgtctcaaaaaaaaaaaaaaaaagtcaaaaagtcatatgttggtgagggtgtggagaaaagggaacacttagatactgttggtaggagtgtaaattatttcaaccattgtgaaaagaatgtcaaagaactaatcacagaactaccatttgacccagcaagcccattgctgggtatatacccaaagaaataaaaatcattttaccataaagatgcatgcacaaaaatgttcattgcagcactattcacactatcacagacatagaatcaattaaatgcccatcaataacataytggataaagaaaatgtggtacatatacaccatggaatattatgcacccataacaaataacaagatcatgtcttttgtgcaactttgatggggctggaggctattatccttagcaaactaattcaggaacagaaagcaaataccacatattctctcttataagtgggagttaaatgatgagaactctcggacacaacaaggggaataacagagac

SEQ ID NO: 345224 - DNA, 566 bp, Homo sapiens
gaggttgccatgagccaagatcacgccactgcactccagcctggtgacagagtgagactctgtctcaaaaaaaaaaaaaaaaagtcaaaaagtcatatgttggtgagggtgtggagaaaagggaacacttagatactgttggtaggagtgtaaattatttcaaccattgtgaaaagaatgtcaaagaactaatcacagaactaccatttgacccagcaagcccattgctgggtatatacccaaagaaataaaaatcattttaccataaagatgcatgcacaaaaatgttcattgcagcactattcacactatcacagacatagaatcaattaaatgcccatcaataacatattggataaagaaaatgtggtacatatacaccatggaatattatgcacccataacaaataacaagatcatgtcttttgtgcaacwttgatggggctggaggctattatccttagcaaactaattcaggaacagaaagcaaataccacatattctctcttataagtgggagttaaatgatgagaactctcggacacaacaaggggaataacagagac

SEQ ID NO: 345225 - DNA, 655 bp, Homo sapiens
tctaaaaaaaaattaccctggtttgcaggagcattgtcacggagaaggactctcaggtgaagcttttccagatgtctttccgctaaagcttcagttaastttctcaaattattctcataataaacagatgttattgttctttggtcctccataaagtcaacaagcaaaaggctttaagaatcctaaaaaactcttgctgtgaactttgctcttgactggtctgcttttgctttgattggaccctttccacttcttggtagccattgctttgattgtgctttgtcttcgggattgtgctggtaaagccgtgttgcatctcctgttacaattgtttgaggaaatgcttcaggatcttgatccgatctgtttaaaattttcatagaaagctctgctcttgtctgcagctgatctgggcacaacagttttggcacccatcaagtggaaagtttgctcaactttaattttttagtcagaattgtgtaagctgacccagttgagaagtctatgctgttggcttgtttttggtgctgttaattgttgatccacttcaattagtgcatgaacaggatgattttttctcttgcaaactgatgtaaatagcccaccgctacagatttcatcttcaacattatcttgtcctttcttaaaataagtt

SEQ ID NO: 345226 - DNA, 655 bp, Homo sapiens
tctaaaaaaaaattaccctggtttgcaggagcattgtcacggagaaggactctcaggtgaagcttttccagatgtctttccgctaaagcttcagttaactttctcaaattattctcataataaacagatgttattgttctttggtcctccataaagtcaacaagcaaaaggctttaagaatcctaaaaaactcttgctgtgaactttgctcttgactggtctgcttttgctttgattggaccctttccacttcttggtagccattgctttgattgtgctttgtcttygggattgtgctggtaaagccgtgttgcatctcctgttacaattgtttgaggaaatgcttcaggatcttgatccgatctgtttaaaattttcatagaaagctctgctcttgtctgcagctgatctgggcacaacagttttggcacccatcaagtggaaagtttgctcaactttaattttttagtcagaattgtgtaagctgacccagttgagaagtctatgctgttggcttgtttttggtgctgttaattgttgatccacttcaattagtgcatgaacaggatgattttttctcttgcaaactgatgtaaatagcccaccgctacagatttcatcttcaacattatcttgtcctttcttaaaataagtt

SEQ ID NO: 345227 - DNA, 577 bp, Homo sapiens
ccaggttttaagccctgcatgcattacatatttgtcctagtgctcttcctccccttaccctcgaccacccagcaggccctggtgcattatgttcccctccctgtgtccatgtgttctcactgttcaactcccacttgtgagtgagaacatgtggtgtgtggttttctgttcatgtgttagtttgctgagaatgatggttccagcttcatccatgtccctgcaaagggcatgaactcattcttttttatggctgcatagtattccatgggtatatgtgccacattttctttatccagtctatcattgatgggyatttgggttggttccaattctttgctattgtaaatagtgctgcaataaacagtttttcataatacacatttttcctgaactttttgaagtccccctcatattatctttagtaaatgtatctctatggctttatttttatttgcagatagcttgcaaagtattctaagctgatgttcttgttttttagcaaaatagttctccaaatagagagcgatagttttctaatctttaatctgaaatttctaggtgattatttatggtacta

SEQ ID NO: 345228 - DNA, 577 bp, Homo sapiens
ccaggttttaagccctgcatgcattacatatttgtcctagtgctcttcctccccttaccctcgaccacccagcaggccctggtgcattatgttcccctccctgtgtccatgtgttctcactgttcaactcccacttgtgagtgagaacatgtggtgtgtggttttctgttcatgtgttagtttgctgagaatgatggttccagcttcatccatgtccctgcaaagggcatgaactcattcttttttatggctgcatagtattccatgggtatatgtgccacattttctttatccagtctatcattgatgggcatttgggttggttccaattctttgctattgtaaatagtgctgcaataaacagtttttcataatacacatttttcctgaactttttgaagtccccctcatattatytttagtaaatgtatctctatggctttatttttatttgcagatagcttgcaaagtattctaagctgatgttcttgttttttagcaaaatagttctccaaatagagagcgatagttttctaatctttaatctgaaatttctaggtgattatttatggtacta

SEQ ID NO: 345229 - DNA, 605 bp, Homo sapiens
  misc_feature (1)...(605): n = A,T,C or G
cattcccttgaattgagtggttaagtttatagccacaaaatagccaaatttgcatagctttgctttcagatatttcatttactacatggaattattgcaagcaagtttacttggccatcccttagctctagtagaaagtaaatatgctttatgtattacgtatgttatatgtaactagcaatcattcagctttgtgtggattttatttctctttcccagctgtaaatttgaaatgttaaaacctcaaggtcacattcaaaagtgaatgaatgagaatcctaatgacaatgcaaactcaatatgcctaaatgtaatgatagttaaaactaatttcatgcttatactataccaggccatggtaagtactttacatatatcactttatgtaaacctttcacaactcctgtgggggcattttattctccatattttcacasataaactgagattttgagtattccaaggtcatgaaactaggatatatagatcaagaattacactgaaatctttcactaaattactaattgtgccctatattgacatccaaactctggcctaaataaaatcctgtaaatagnnnnnnnnnnnnnnnnnnnnnnnnnnnn

SEQ ID NO: 345230 - DNA, 605 bp, Homo sapiens
  misc_feature (1)...(605): n = A,T,C or G
cattcccttgaattgagtggttaagtttatagccacaaaatagccaaatttgcatagctttgctttcagatatttcatttactacatggaattattgcaagcaagtttacttggccatcccttagctctagtagaaagtaaatatgctttatgtattacgtatgttatatgtaactagcaatcattcagctttgtgtggattttatttctctttcccagctgtaaatttgaaatgttaaaacctcaaggtcacattcaaaagtgaatgaatgagaatcctaatgacaatgcaaactcaatatgcctaaatgtaatgatagttaaaactaatttcatgcttatactataccaggccatggtaagtactttacatatatcactttatgtaaacctttcacaactcctgtgggggcattttattctccatattttcacacataaactgagattttgagtattccaaggtcatgaaactaggatatakagatcaagaattacactgaaatctttcactaaattactaattgtgccctatattgacatccaaactctggcctaaataaaatcctgtaaatagnnnnnnnnnnnnnnnnnnnnnnnnnnnn

SEQ ID NO: 345231 - DNA, 599 bp, Homo sapiens
gtttttatttggcagaataggctgtcttaacagcaaaaaaagaaataaaattcagctccccataattgaatgtgttcacagccttaccttgtttttagtacatttgtgttctcatgctcaggcacaataaaaagtacctacagtgcctctttctatgtgcagggcaagggatgctcatggtttgtgaactacatgaggcagagcaagcctggaagggyaaaatcagaagctgggggcaaccaagagtgtatgaatagccctatagatatcatccatgcaactatggtgtgcactgagagtagagtccactgccaggcatagctagagaatacaattttcagaatcaagagaggggtggtcatatgagtattaggatgctcaagaaggacaaaaagacacaagaaaaacttggcaaggctattcagaccagaacccagcccacagaagtctgagctggacaggagtggctatacatagctaggagtcagaaatctgctgggctggaagagaacggtcaaagtgtaaaccaggaggacagaaaagcaccaagaacctgaaacacacaagtaatgtcatagaacagtttaaatcacctggat

SEQ ID NO: 345232 - DNA, 579 bp, Homo sapiens
ccacattcttagtccccacaacatagttagggaagtgacccagtcctggcttgttatattttattcctcyggactctgggattggcccagtaagggacatgttattcaaagcgatcagagagacttgctattgagttatttagggaagtagaaaaaatattctttcctcttgaatcacatactagaagggtatgaagttggggctgctatcaatcatcttcccatcacgctgaggcctgtcttcagtaagaatggataaggaagccaagtagacataaaattgataccatctttttgcccagaaaaactgactttcaaatataacactcacttgtttaagcaagtaataggttcaactattggtttcaaatattgagtagtgacttatttcttgtgtgaatggaacgaagaatattgctgaaaaagtattaggagggacaatctatcaaaaatatgacctcttctgtctcagctgttggttgacagttcatggtaatggatctattgttttgtcttgagcattgtcctctacttttgatttattttaatttacaaatgcttccattgaggaggtaacac

SEQ ID NO: 345233 - DNA, 586 bp, Homo sapiens
gtgatcgtgttcaatttacctacttgggaccaactaggctttataggagctaatagtatcccyagtttaaggagtaataaattactgcacagaagcataaattcttcaaaaatgagtaatctacttacaaatagttcagcaattttcagtagtaagacctcaaggtgtcttcatttaagttaggatatatcaataggattctttaaaaactcaaaaattgcttttaattttgttaaacctaattaagctagattgaattgttaacaacaattagaatagcaaaggtagggagattttgcctcagttttatccattaaacagatgcagttggggttatactgttgatttctggcaattgaaagaagattctgaccagattatctactctttatcattgattgaggttggatggggcggtgggggggatttgtcggtacttgaatgtgccactttcctattctgtgccatgagtaggattgagcaatacctgaaaagcaaatatgtgttaaagtccagagcatttagtgacttttaaaatgtatttatagcctattgtgctttcactttaatagacagtgacaatttg

SEQ ID NO: 345234 - DNA, 586 bp, Homo sapiens
gtgatcgtgttcaatttacctacttgggaccaactaggctttataggagctaatagtatccccagtttaaggagtaataaattactgcacagaagcataaattcttcaaaaatgagtaatctacttacaaatagttcagcaattttcagtagtaagacctcaaggtgtcttcatttaagttaggatatatcaataggattctttaaaaactcaaaaattgcttttaattttgttaaacctaattaagctagattgaattgttaacaacaattagaatagcaaaggtagggagattttgcctcagttttatccattaaacagatgcagttggggttatactgttgatttctggcaattgaaagaagattctgaccagattatctactctttatcattgattgaggttggatggggcggtgggggggatttgtcsgtacttgaatgtgccactttcctattctgtgccatgagtaggattgagcaatacctgaaaagcaaatatgtgttaaagtccagagcatttagtgacttttaaaatgtatttatagcctattgtgctttcactttaatagacagtgacaatttg

SEQ ID NO: 345235 - DNA, 562 bp, Homo sapiens
ttcagacacttggtggattctttccaagagtaacaacataaaccccagggataaacacttgataatttttctaaagaaagtgacaccaaagatrccagtagggttatatataattagtgtgccattaaagagatttgagtaagacctacccaggagattttctttttgctcactagatgctgcttgtctgaacaggtttcggcctatttttgcctctttttctttcacaaaagccaaggacaatagagagataatgggacacatttaggaaaatgaaaacaggaatttaatatgcatcccctcacactccaggtaatccttgagtattggtgctgttcccaaatgcaatgggaagaatgatgatgagtagtaattcctgctgctgctggatgattaaaagtttaaatacggcacataaaaaataaatataaggtaccagaaaaagattattctgtacttggattgaattacttccttttggcatatgaactgtgttttcttgtgaaattcatttcggtttaagcagtgagctgcggctgccagctagccctccactagtggg

SEQ ID NO: 345236 - DNA, 622 bp, Homo sapiens
ttaacattaaatttattaacctgcacaatgttctttgcaggatcaccaacaaataatgtggtgtgaattgagggactttcttttctaggaacacgggatagatgtgtgttttcttatctttctaagtacaactgaaaagtgtagctataatacatataataatcatatgaagactttgaaagctggacatgagaaggcagactggctagagaccttggaacttgagaaacaacacagtaatgaggycttgggtgttctctttgcctcatgtatcccagacttggagctgaagaagccagcaacctggagacaataatgagggcagaccactacaaataaataaaaaacagaaaagaaattatgatttctctaggcaaaagactcaggaagaagtagcctaggaaaagtgaacatttttagacaataacctctccaattcagccaaacaccacagaaaaaaactgtgagtgcattctgatccaagcctgcagaggctgagtagtgagcctagatttccaacctaatgaagctgtaacaaggtgctcttgcatccaccaggatcccatcagggaatgccaagtagggatgctggttagtaataggacctttcttgcccactgtg

SEQ ID NO: 345237 - DNA, 562 bp, Homo sapiens
ttcagacacttggtggattctttccaagagtaacaacataaaccccagggataaacacttgataatttttctaaagaaagtgacaccaaagatgccagtagggttatatataattagtgtgccattaaagagatttgagtaagacctacccaggagattttctttttgctcactagatgctgcttgtctgaacaggtttcggcctatttttgcctctttttctttcacaaaagccaaggacaatagagagataatgggacacatttaggaaaatgaaaacaggaatttaatatgcatcccctcacactccaggtaatccttgagtattggtgctgttcccaaatgcaatgggaagaatgatgatgagtagtaattcctgctgctgctggatgattaaaagtttaaatacggcacataaaaaataaatataaggtaccagaaaaagattattctgtacttggattgaattacttccttttggcatatgaactgtgttttcttgtgaaattcatttcggtttaagcrgtgagctgcggctgccagctagccctccactagtggg

SEQ ID NO: 345238 - DNA, 631 bp, Homo sapiens
ccatgtgtcatgggagagactcagtgggaggtaattgaatcatggggtcagttacccccatgctgctattctcatgattgtgggtgggttctcacgaggtctgatggttttacaaggggcttttcccccttagcttggcgtttctctctcctgccaccatgtgaaaaaggatgcttctgcttccccttacaccattattgtaagtttcctgaggcctccccagccatgcggaactgtgagttaattaaacctctttcctttataagttacccagccttgggtagttctttatagcagtgtgagaatggactaatccctaagtaaattaaattaaattaaaaattcctattataggaattatttattccataccatakatgattcaggactgatcccatcctttcttaccctctgaagtgaaaattattttccttgtgggttggagacagctctaagaatcactgataatagaggcacattctcatgaagtctctttagcacttgtttatgttgctgtttttcttcttgaaaaggatgccttcttcaaacacagaaattgccaaaaggtgttcttctgggcaaatcattttgaaaaaaaaaaaaaggcttcttttcctccagaccgccagca

SEQ ID NO: 345239 - DNA, 502 bp, Homo sapiens
gtttaatgaaatcattgtgccaactctggacacaattcgatactctgcattaatggaattgctgaccacccatcaaaagccttcaatatttgtaggaccaacaggaactgggaaaagtgtttacattacggtaagtactgcagaaatctgcrtattaaactgtgcataatcttcctaagaatgtttttgaaatagcagacaaataattttttaaaaatactcaagtactttgatgtttgaactgcagagaatttttgaaaaattgcctacttatttttttttgttttagccaaaaggccaagaagtgataattgcctatttattttcaaaagttgattaatgatacgttgccattttataccattaaattgttgtcccatttattttgatattttaataagaattgcttgttccacatgagaatttcatacctcttgaaaagtgtgttttagttacacttgatattttctaagttattttatatctgaaggattattatgta

SEQ ID NO: 345240 - DNA, 469 bp, Homo sapiens
aggtaacataaggagaaaaccaatcttgactaacagataaatacatgaatctgaagaatcttcaaatgcacaaaagtagccatttcaactgggttcttcagagactgcttgaaaattgtggactatgtttagtaacttaggtactttacagtttactaaatcaactgcgttgacagtatccaactattagtctattcaatgtaatacagatgggactgacacaactcatttttggcacactaccaataacccgttgcattcatctttcaaatggrcaaaaagaagcaaagtataaaaactcagatagaaatctgagcctaaatttaccttttgtttagattacatatcccctactttgaaggcacaagttaacaaaattaacacatttgtttaacaagtatctattcactgtttatatcagatgctcttctaaagattggggaatcagcagtgggaaaaaaacagtcaa

SEQ ID NO: 345241 - DNA, 510 bp, Homo sapiens
aaataagtatcttttaaaaatcttcctgtataagtttgtgttgacaaaatatccaagcaagtgcagtatacagttctacaaataggagatatgtgtgttactgtgttgtgctatgtgtatttgcatgcttgaaaggctactacatatatatgttattctatatatatcatatataatatggtaaacatagatataataatagactttacatataatattgtggaactttatataatcatatttctcctcatctaactatatagaaatccctttttgtgatccagatttgaatgtctttctcttgttctccccacagtgtccttctagagcacatttttactccatcttcttggcatttctctgctacgcctatttttttaattaattaattaatttatttatttatttatttacttgcttctctcatccctcrgctgtccattttcacctgttctttccgtggcttcttctgctcttaaaaatgtctttaatatcaacacccagcattct

SEQ ID NO: 345242 - DNA, 559 bp, Homo sapiens
tcattttggaattatttgaatttgtattttgcagtaaaattgctcatgcttgttcaatccaaatgtatctaggatgtctttggctaaaattattcaaatgaatatttgataccatgtggttcacacaaattgatagtacatcaggaaaataaaatgttatgtaatatgtttgccttgcttataggtatgtgattaaacttgaatataattagttgtaatcacacggtttaagtgagtcttgcataaatgtctaagaatgttgtaaaaaattgagcagtatgaattaatctagtttagtttagctctcaattgtataacttgttcaggaaatggttaatatttagcatattcttttttgattaggtaactggagatgcmacttttgcctatacaaaatatgaacgaattaactgggtaagggattggcctggacagactgttctctgtgtatcccaaatcttttggacaaaagaagtacaaacagctattccaatggggataaaggtaaggttttattaaccctcgggtttttttaagcattttttcaatagtattattg

SEQ ID NO: 345243 - DNA, 560 bp, Homo sapiens
gctttcagttgactgaggggtcaactggaaactagcaaatatagatctgtagtttaaaatcataattgttaaatatgtttttgacatggaatttgaaatgtctttaagayattgttgaacaggggtttgaaaatgatgcaagttctctgtagacagacagattccaaagagtaagggactgagtgacacatgtttaattcactccaacttaccaacaggtcacctacttctcctctacaagaaggaatagggtgtaaaacaggaagtcaagggttttcaggaaaaggtctttcttcatgaaaagcagggcactggggcataagagtatccctaatagcagtaagcccctgagtttacttttgggcccttgggtgtttctccccatgtgtatttttcctttttcctcagtgagtccagagaattcattttgtctttatacttttaagctaccactcaccaaccaccacactcagagggatttctccaaggtggcccgccaggggacgtgcagcctcctgggatctccctgcttgtggttgaacatgggtgggacagaagtt

SEQ ID NO: 345244 - DNA, 560 bp, Homo sapiens
gctttcagttgactgaggggtcaactggaaactagcaaatatagatctgtagtttaaaatcataattgttaaatatgtttttgacatggaatttgaaatgtctttaagatattgttgaacaggggtttgaaaatgatgcaagttctctgtagacagacagattccaaagagtaagggactgagtgacacatgtttaattcactccaacttaccaacaggtcacctacttctcctctacaagaaggaatagggtgtaaaacaggaagtcaagggttttcaggaaaaggtctttcttcatgaaaagcagggcactggggcataagagtatccctaatagcagtaagcccctgagtttacttttgggcccttgggtgtttctccccatgtgtatttttcctttttcctcagtgagtccagagaattcattttgtctttmtacttttaagctaccactcaccaaccaccacactcagagggatttctccaaggtggcccgccaggggacgtgcagcctcctgggatctccctgcttgtggttgaacatgggtgggacagaagtt

SEQ ID NO: 345245 - DNA, 573 bp, Homo sapiens
tagtgtatgtcatcactgaaatcttgactatggaattgagctattaaagttatgcagcaaatgaatcctgcaaatgaatcctatcattctttttcaaagctaatatagaattgttgaatgttctggcctgaatattttgaagcttgtttctattatagcaagaaacaatttaagcatttgctttaaaataacagcctctcaaagaacaaaagagacttctgacactgcataattgatgtgcagttagattgatccaaaaacaaaatccagatcaacaggacatgctctgtcattggggaactcgagtttcagagactgactctgactgctaggcatcrcacactttgtaaggctgaagctaattaagtgagaatatggcatttattaggcagagagattctagagaaaagggagagggttctggaaaattatatgcatggtggtaggagaagctttggagtgagatgttgaataatgtattaaagttggaagaaataattctgagtttggatttttgtaaattcatgtgaacattattataggtatgagtaacaagttaagagttcaaccaga

SEQ ID NO: 345246 - DNA, 601 bp, Homo sapiens
  misc_feature (1)...(601): n = A,T,C or G
atctgctactgaaatctcaggtcgtttgaccagccttagacatgatccattcccaaaatgtcagtgaccattttggcaatgagatttacctcctttccaaactataataatttattgctttatttcccttgatttttcttccttttttcatgagatataaattatttgtatgtgtgtgtgtgtataaatagatatttggattaaggaaagcaagaaaatatgtaggtaataaataaaccaatttttaaaatgggaataaaaatatcagtagactttggattttttaatgaaaatattactgcattactcgtggtagcacttctactgtggtcaatatggtacttgcttarcttatatgttttaaaagaaattaatttttaatttagtgttaaatggtttctggagagaaagtctgtgagtaaactaggagtaggtgaatagggttgaagtagagtccagaacttttatgagcatagtccagaatctcttggctttgtacttaataaaagaccttgttttaaacaagcaaacaggcttcctaccttattggtaggtcttgtcttnnnnnnnnnnnnnnnnnnnnnnnnnnnnnnnnnnnnnn

SEQ ID NO: 345247 - DNA, 549 bp, Homo sapiens
ttgcctgactctcctgtctcccctaacaccctctccccctcttctgcttctgccatccctgagataagaagaccaacccctcctcttcctcctcctcctcagtatacttggcatgaagatgacgaggatgaagatcttcrtgatgatccactggcacttaatgaatagtaaatatatttttctcatgattttcttaataacattttcttttctccagcctactttaagaatatagtatataatacatgtaacattcaaagtatgtgttatgttatttttaaggcttctggttaacagtaggctatttgtagttaaggttttgaggagtcaaaagttatatgcaggttttcaactgtgtggggggtcagcgcccctaaaaccccaaattgttcaagggtcaactgtatttcaatttataagatgtaactggcatttaaagaaaaatgtacatactccaaaacagtgtggcactcatgagaaggtggaatatttaaatttacaataggttatcagtttgtttctaagtatagagaatatagataatgattt

SEQ ID NO: 345248 - DNA, 632 bp, Homo sapiens
ttaattatttaatatgtaatttaactgtaaattgatgatttatagttgtatatgattataaggtaaaaagtgttatgatttattaatacaatgtggaataattaaagctaattaacatatccatcacctcaaatacttaacwctttgtgtggagaatttatgaaatttactctcaaagattttgaaatgcacaatacatttactaaatttgccatgctgtgcaatatgttttaaagaaaaaaacaaaacttacccctgtctaactaagtctttgtagcctttaaccatcatctccccattccccctgcctccctccagcctctggtaacaaccattctactctctgtttcttttagttcaagtattttagattaaacatatgagaacatgcatatttgtctctctgtacctatcttatttcacttagcatagtgttcttcgattccatccaagttaaatgataaaatttcccttttttaaggctgaagtgtattccattgtgtatatataccacatttttttaatccattcatctgctgatggacagtcaggttgattacataactcagctattataaacagtgctgaaatgaacatgggcatgcagatgtctcttgaacatactaatttca

SEQ ID NO: 345249 - DNA, 588 bp, Homo sapiens
ctctaataacctgaatttaaaatgggcaaaagatgtgaagagacatgtcacaaaagaagacatacaaatggcaaatagacatttggaaaggtgttcaacatcattgattatcagagacatgcaaatcaaaactacaatgagataccatgtcacttcagttaaaatggcttttattcaaaaaacagtcaataactgctgtcaaagatgtagagaaaaggaaactttcttacactgttgattggaaggtaagttagtacaactactatggagaacagtttgcagcttccttaaaaaactaaaactagagctaccatatcatccagcagtcccgctgctggtatatacccgaaagaaaggaagtcaagatatcaaagagatatctgcattcccatgattgttgcagaactgttcacaatagccaagatttggaagcctaagtgtccagcaagagatgaatagataaagaaaatgtggtatctgtayacgatggtgtactattcagccataacaaacaagacgattctgtcatttgcaacaacactgatggaactggaagtcatattaagtgaataagccaggcacagaaag

SEQ ID NO: 345250 - DNA, 546 bp, Homo sapiens
gtcgcagatcttttattaaccatttccttctcaaagcattcccccatgaatttccattcccctatgaatttccattcccctctggattaatatatctgtagcacctaatgtttacctctaatatttcactcagtacactgtattgtaattgttttttaaactgactttcccatctgactgaaaaatgtttaaatacagaaactctatatcttttctctatcaagagcactactaaagtatgtggtatatagtagctaatcaaaattgcttcttggattgataggtgaaatttaagaattattttttctcacagttacttgctagatatacacatgtaatgttaactgtaaagggattcctatattgtaaaatctataaagacttccactgggtacarggtacagctgtaagcaattgcactagtgttagatcctgtataggttcttcaagtgattgggcctgcccctgtgccatacaattggcatgatatcaaagaagattccagtacaactgcattgttcttggccttaattctgaaccacttgc

SEQ ID NO: 345251 - DNA, 579 bp, Homo sapiens
gtcatgggggtggattcctcatggtttggttctgcccttgccatakcaaacaagttctcatgagatctggtcatttaaaagtgtgtggtaactccccactccagtctctcctgctcctgctcctgccacgtgagacacctgttgcctcttcactttccatcatgtctgtaagcttcctgaggcctccccagaagcacatgcaagcattatgcttactgtacagcttgcagcatcataagccaattaaacctcttttttaaataaattatccactctcaagtatctctttatatcgatacaagaatgacctgtcacacatgtacagtttgcaaattttttatcccattatgtgggctctttattcactgcctcctttgtgcagaagctttttagtttgatgtaatcccatttgtcaatttttatttttgttgcctgtgtttttgaggtcttatccaaaaaatccttgtccagatcaatgtcataaagcatttgccctatattttcttctagcagtttcacagttttgggtgttacatttaaatctttaatccgctttgaggtgatttttatatggtgaga

SEQ ID NO: 345252 - DNA, 579 bp, Homo sapiens
gtcatgggggtggattcctcatggtttggttctgcccttgccatatcaaacaagttctcatgagatctggtcatttaaaagtgtgtggtaactccccactccagtctctcctgctcctgctcctgccacgtgagacacctgttgcctcttcactttccatcatgtctgtaagcttcctgaggcctccccagaagcacatgcaagcattatgcttactgtacagcttgcagcatcataagccaattaaacctcttttttaaataaattatccactctcaagtatctctttatakcgatacaagaatgacctgtcacacatgtacagtttgcaaattttttatcccattatgtgggctctttattcactgcctcctttgtgcagaagctttttagtttgatgtaatcccatttgtcaatttttatttttgttgcctgtgtttttgaggtcttatccaaaaaatccttgtccagatcaatgtcataaagcatttgccctatattttcttctagcagtttcacagttttgggtgttacatttaaatctttaatccgctttgaggtgatttttatatggtgaga

SEQ ID NO: 345253 - DNA, 579 bp, Homo sapiens
gtcatgggggtggattcctcatggtttggttctgcccttgccatatcaaacaagttctcatgagatctggtcatttaaaagtgtgtggtaactccccactccagtctctcctgctcctgctcctgccacgtgagacacctgttgcctcttcactttccatcatgtctgtaagcttcctgaggcctccccagaagcacatgcaagcattatgcttactgtacagcttgcagcatcataagccaattaaacctcttttttaaataaattatccactctcaagtatctctttatatcgatacaagaatgacctgtcacasatgtacagtttgcaaattttttatcccattatgtgggctctttattcactgcctcctttgtgcagaagctttttagtttgatgtaatcccatttgtcaatttttatttttgttgcctgtgtttttgaggtcttatccaaaaaatccttgtccagatcaatgtcataaagcatttgccctatattttcttctagcagtttcacagttttgggtgttacatttaaatctttaatccgctttgaggtgatttttatatggtgaga

SEQ ID NO: 345254 - DNA, 581 bp, Homo sapiens
tttaatgaaaaagaacaaaacactttcttgaattgaccagactttactttaaaaaaaaacacaccattttctttgattattagtaaaatatgacattttccccatattttggttaaccattttatatccttttctgatgaattgcatatgtatggcacatatacagacagcaatgttgaagaataatgcaatagtaattgtggatccaaaaccaaatctcctgactagatcctatattacttccacacttcacatgcttagactgacagcttcccagactaaatgagcagtttttcttttccaccaaaaagacttgatatgactaattgctgccaagtgtttttgtatttccatttcatgcccctttatatgttaagtcttatgttttaggattttgckttagtgaaggaaggcatgattaacaaatgaaaaatggtaaatcctcttctatctaagaaacattttacaagttttatttggcattttcttttggaaagcctttcttgttgttgttgcagttcttgtatttgttcgctatgttattcatttatttggtaggatcaatctgaatatgtaaattt

SEQ ID NO: 345255 - DNA, 504 bp, Homo sapiens
tgtgtgtgcacagaagtttattcaaatatttctttggttccaaaaattaaaattcagtatgtatattacaaaatttaaaaayattataacattaaggtagaaagtaggaagtttggaacattttagtggttacctttaaaggggaccttggattaatgtgtggctccattcaaaagcttgtttaaataaaatttttaatacattatttatatttcccttttaagttctgatttaacaaatcaaacattactagatacttaaataatttataagtctagtattttaaacgtatacatatggtaagccttaagtacttttaaatgtttgaatattatctataaattaatatgatttttacttaaaagcacaaatgtaaatttactgctcagacacatgatttatattgaaagctcaagcctgatccacgaattgaacagaccaaattcttttaaagattaaaaagaatacataaaacaacaaatgtgcacagataatataaaaata

SEQ ID NO: 345256 - DNA, 525 bp, Homo sapiens
ctgttcattcttcattgaatctaagcataaaaatcgacagctttcccttcagaaatgaagatctaaaagccctatcttcatttctgaagatctaaaagatcctatgtcacayaaaattttgattaaatacatctgttatgtttttctcttgctaacttgctttttgctacgggagtttcgactatgacccttatgatcagtgaggaaaagtattaaaccttttagcccttacaatagtaaacaccagatacaatttaatctctttaattgaatgtctcttaactgtcttggacttgtatctggaatatataaagaacaataataatttgataatgataaaaccaactctcaaataaaagatggaccaagatttgaactgaaacttttccaaagaagatatgaagatgacaaatgagcacatgaaaagatgcacatcattagtctttatggaaatgcaaataaaatcacaatgagatatcattaactaaatggttaaaaaggaaacatacccctcccctgccaaaa

SEQ ID NO: 345257 - DNA, 551 bp, Homo sapiens
aatcaactgggcacggtggctcacgcctgtaatcccagtactttgggaggccgaggtgggtgaatcacgaggtcaggtgttctagaccagcctggccaacatagtgaaaccctgtctctactaaaaatacaaaaattagctgggcgtggtggcacatgcctgtaatcccagctacctgggaggctgaggcaggagaattgcttcaacctgggagacagaggttgcagtgagctgagattgcgccactgcactccagctagggcaacagtgtgagactctgtcacaaaaaaaaaaagagtaagttaaccaattctgtcaaaaataaaagatcttagtaataaaatatatataattgaaaaggtgaatgtgattaaaatgaacatgtktatatatttatatattagtatataaatatgaaaatatataaatattaaatgatctcattttacctccctaattctataagctggttatttctatgttttttaaaaaggaaattaaaagacaaagcaaataaatgacttacataaactgacatgtttaatcggaac

SEQ ID NO: 345258 - DNA, 596 bp, Homo sapiens
gaaattattgggctgtatgtataaacatttagcttttggatcaattttatcagctggaaaactgtagattcttttggtcgcacagaaaaaagatcactaatattatctcatatcacagggtatggtgcagggtaggcagcacaaagtctaattaggatgctgttacatctgctcaagcaagaaattttgagtgcctggactaataaggtagcagtaatagggttagggaggagggaatggattgaagaaatatttagcaatagggtttagactaacaacatatatttattaagagcctactagataccagccactgtgaaaatggaaaatatagcaatacggtgtcctacatttctaacaaaatgttgaacaytttattttattgctattatgcaagtatagataaagccatccttaaattcgtctgggaagacaaaggatgcttcacagaggttatataccatgggaactgaattttctggagttggttcagaatgcagattctggaatcaaattccctgtgtttgaatcctggctctggctcttagctgtgtctttgtgtggaaggtacttaataatgtaaacctcacttttct

SEQ ID NO: 345259 - DNA, 576 bp, Homo sapiens
cttaattcctacccacaaagcttggggccacatgtgtttccaacttcagaatttttcacattttaggaaaaaaaaatgtatacgctttatgttatatatacccccagtggggtctagggcaacactccatatgcaaggtcattaaatgcttctgaatcattgcatataatattcattctaaggttaatgaagactctacagtagactcacatgagttcagattttgcccccaaatgagtgctgatcaagttagttttactaataagtgactgccccatcccccaaaaccctctttatttttggagttctttagatttcagaattgtgggaaagagaycatggacctgtactgccaaataaatctataaattgattagcatcaactttagctcatctttagtgctatctcagcccagtgggaaacattgttgtgcctcaggaccttggttcaggcacagagaggttcccatggcacttgttgcctccaatctgcaggcccagaaggcttagactgttttcctctactcattaagtgagattcaacattcagtaatgtttgaggatgctttctcccag

SEQ ID NO: 345260 - DNA, 670 bp, Homo sapiens
gttttcagtgtactcacaaaattgtgcaatcactgccacaatcaattttagaacattttttatcacctccttctctaaaaaacccttgtgcccattgtcaccattgtcttcttttcccctctcctcccctccccaatcaccccaactctaggaaaccattaatctacatatctctatagagttgctcattttggacatttcacaaaaatagaaccatacattatatagccattagtgtttggctttttttacttagtgtaatattttcagggttcatccatgctgtggcatgtatcagtacttcatttctttttatggctgaataagaacccattgtatgtataaatcacattttgtccactgacagacatttgggttgtttccacgttttggttattatggctattatgaacaatcccgctatgaacttttgtgtacaagtttttgtggggacacatgttttcattttccttgaggctctgtttgtttttatgtcatccttatctaawaaaaaggtggggctcaaacatactctggtgaccaaagaccttgtggaattctaaactataatcacatcagagctttacttttacattctgtgagttatacgttagagacagagtgattaattcagacaccattgctcagggttcttagccactcttacaac

SEQ ID NO: 345261 - DNA, 327 bp, Homo sapiens
taatccctgctaaggtacaaagagtccagaggaaggttaagagtaaattcttgatatttttaaaagatgacttgtgggttccaagcatagcattaacttccattttagaatccaatagaaattgcatcagctaataagctaaatgaggctttttaacagttgcttctcatctctgcacaagagggcagcctttcaccaaaaccaaggaaacacttgggcagaagtgtgctamtgtatatagagaccccctccaatcatagaacttccatgaagagctcccttgacataaagaatgaagaaattatgagatagttaataccatgtgcc

SEQ ID NO: 345262 - DNA, 627 bp, Homo sapiens
taggattacttataaaactggtgattcttgaaaattcagcacaggaagtattttaattttaccatgaaaccaagatgctgtgtcatttttttcctaagaaattaattctgcatttaaatgagaggttatcatagtgtgtagtgtggtttctagaccactgatggcccacgagtgccctctgactcgtcttagggctcatcacttgtagtttgcaggtttataagacaccatctgtgcttttgttgctgccatgatttcataatctatttatgatggtcaataaaatccaratattacttcaagggtacaccaatcatgctgttaattctaaaaattattttattcttatactgagaaaaagttggcagatgagggggttcactggattttatgtatagcaactgacctgagattgatgaagtgtgctaaccatttctttggatagtctctgagcagaaaaggttgcaaactcttcaagactttttcacatagtctgtcttatcacagaccaaagctttcctgttgaccagctgcatataattgtatctttgtctttgaatcacagacaaagctagacatcagccatcagtaataaaggacataaacaaataatggagtgatctgagg

SEQ ID NO: 345263 - DNA, 426 bp, Homo sapiens
tgagagtggaatggacacctagcaaggaaggaggttctctttgggttgctttccagatagacctgactccctattttgccttggatattattagagaaattgttccagacagtggaagtttggagaacagcactttccagacagcatttatttctgaacttctctgtattcaaccttttaccaaaccaccaattgtagagtttgctttgctcatcttgggcaataaggtaatacaatgcccaaaaagagttcaaagtactctattccaaaggcagaatttgtccatccactggaaaaatggattaaggtaacccagctatgactccaaaggtgagaaagacacatttaaakgtatctgttagcatacaaagtgatggtagctctgcagaccaaggcaacagaaatggttactgaaatctgttagtc

SEQ ID NO: 345264 - DNA, 426 bp, Homo sapiens
tgagagtggaatggacacctagcaaggaaggaggttctctttgggttgctttccagatagacctgactccctattttgccttggatattattagagaaattgttccagacagtggaagtttggagaacagcactttccagacagcatttatttctgaacttctctgtattcaaccttttaccaaaccaccaattgtagagtttgctttgctcatcttgggcaataaggtaatacaatgcccaaaaagagttcaaagtactctattccaaaggcagaatttgtccatccactggaaaaatggattaaggtaacccagctatgactccaaaggtgagaaagacacatttaaatrtatctgttagcatacaaagtgatggtagctctgcagaccaaggcaacagaaatggttactgaaatctgttagtc

SEQ ID NO: 345265 - DNA, 490 bp, Homo sapiens
tcctaatgagtttgaagtggcatcttgtggttttgatttgcatttctctgatgactcgtgatgctgaacatcttttcctgttcttgttgaccatatcttaatcttaaccattattgtaaggtaacatctaagtgagtagactttagaatcaaataactaactgcaataccttattagcaaatatacatgaaaggtgaagtttatcaatactgcccaaagttctgaacacygagctgtggatgagagtaaatgaatatgtgagtaaacttgtgtgaaagcaatagtataggacacttccctactgaactcactatcggctttgccagtcaaaagacttttgtggcaaggaaaagggatgtatacttctcttctcatctcagaaaatcagatctagttgaagccatcgatgcaaaatgttctcttacgcataagaaaactgaggactagggaattaaagtgacctgcttcaaccgtttaatgacagaaccca

SEQ ID NO: 345266 - DNA, 627 bp, Homo sapiens
aagctatgatcacatcattgcagtccagcatacgtggcatagtgagatcctgtctctaataaaaaattaataataatattattcaatattgtactcaaggattcagttttaataaaattaataatctttactcttttattaagatatttctaagtgaaacaggattttgcaaaaactgtgtgaggcaactgaaaagcacaataactatctaatacagtggatgccattgccttgattttgctaaggcaccggaagtcttacccaccactgcttttgcacaatccatgcaacagtcaacaaaatgaaaaaggtaaatgtcttagtattattatgaaaaaatgtttgaccctgcagatcccctgaaaccattatgggttcttaggaaccctgaagattctgcatttcacactttgagaaccaccggtgtagatgatacaaggagaagaacctgtgaggggaggttgaaaggkttgggaaacagactttgtagagagagaagctggctaatcaaagccttagtatgtgccttaagtagtttcagtgaagggaaaggctgcagacatcttggatgcccaatacaccaattttaacgttggatttccctaggataaggatgtgcgtttcctt

SEQ ID NO: 345267 - DNA, 448 bp, Homo sapiens
tgcctgattcatgaatcgctgtctgctcaaataaactctctaaaattttaatgtatcttagtttatcttttaacaggtggtagagagggaggaaagagaggcaccagaaacaatgtttttatagwgttgtagcttctcctagatctggcctctgtcccacatatttgcctcagttttcttataattcattggaaaattgctgtcaaatgtgtgacccccctttaaatttccagaggaaaataaagaagcaagagaaagttagtggacatggattagtggctaaatatgaatgtggttctatcattttatgttccaatacatgcttttttaacattctctaattcttctccacatttcaacttgataaaaatcatttgctgtccttatgttcagttagtggatttcttctgggagaaaaagagcttttaaaaaacctactgtaatgacc

SEQ ID NO: 345268 - DNA, 662 bp, Homo sapiens
agtaaaaacacaggggaagcgagtttaagcactcagtgaaagtttcaaatctacactggcattaggacgggggtcctcaacccccagcgtgttaggaaccgggctgcacagcaggaggggagcagcaggtaagtgagcgaaggtgagctccacctccgatcagatcagctgcagcattagattctcataggaacrcgaaccctattgtgaactgtgcatgcgatggttctaggttgcacgcaccttatgagaatctaatgcctgatgatcggtcactgtctcccattacccccagatgggaacatctagttgcaggaaaacaagcttaagtctcccactgattctccatgatggtgattatgtaataataatagaaataaaatttgcaataaaggtaatgtgcttgaatcatcctgaaaccatctcccacctgcccccaccccgccccccaacctgtgaaaaaattgtcttccacaaaaccagtccccggtgcaaaaaggttggggaccactgcattagggcatagataagagccacccacatactgagttaaggtaggtgttttgtgttcaccttgtccttaggaatttaagcaaggtttccatgcactaaacaaatggtacttaaaaaaagaatgggaaagaaagacacttttactaaca

SEQ ID NO: 345269 - DNA, 562 bp, Homo sapiens
attaaaggcccagagaagcctgaaataaagaaatgtggtgcacagtgacctagcattctccctgaaagcaggaaccctagagttatataacactgcagctgtggagcgagaggtctgtattagacatgttggggatacactgttaacccattctgccatattttccatcctattaccttagttttatyattgtgggcctctattcatttgtgtcacagaatacctaagaaagagaggaaagaggttgaatttaggaaaacaagcgggaaaaagaggaaggtgaataaataataataataataataataataattaataataaaagcccaagatagatctagaacaacaatggcattaaagtggaaacccagctgaggtatattacagctaatcaaggacttttcacacgtaacatctgatttagggagaagggaagagaaaatgagggaccaggctgcctgggtcactgcatttgtgatgacaggattcctactctatgcacaaacagatgtgatctaatcttcagacactcagcctgttcagaagaattgtgatgaaggtg

SEQ ID NO: 345270 - DNA, 562 bp, Homo sapiens
attaaaggcccagagaagcctgaaataaagaaatgtggtgcacagtgacctagcattctccctgaaagcaggaaccctagagttatataacactgcagctgtggagcgagaggtctgtattagacatgttggggatacactgttaacccattctgccatattttccatcctattaccttagttttattattgtgggcctctattcatttgtgtcacagaatacctaagaaagagaggaaagaggttgaatttaggaaaacaagcgggaaaaagaggaaggtgaataaataataataataataataataataattaataataaaagmccaagatagatctagaacaacaatggcattaaagtggaaacccagctgaggtatattacagctaatcaaggacttttcacacgtaacatctgatttagggagaagggaagagaaaatgagggaccaggctgcctgggtcactgcatttgtgatgacaggattcctactctatgcacaaacagatgtgatctaatcttcagacactcagcctgttcagaagaattgtgatgaaggtg

SEQ ID NO: 345271 - DNA, 554 bp, Homo sapiens
ctttggtctgtggctaggacacaagagggaggtgagccattggttcatttgttttcaacccataccatattattccatataacacaagccatcgcactctggtgtaatatcaactgcattctcttcttggtcttaaccagaccatgagtcctttagtgtcacctcctgttgctccatacaaaatcattagcagcacttgtgcrtgatttggttgattctcttgcctgtttggctgcacttagaatcctagagcagttctacaaatgaaaaggtgtccaagtaaaggctctacatgttaggataattcagtaactaacggttgcactgttaatttgattttgctgctgatcagagataggaagagaattgtaactgaaatgcattgcaaccgatttgtaaatgttggtacacattatccatcattgttatgctattatgctattaacataaattatcacatagaggtaatttgaaattgtgaactgacacaggtatatctcatttctggcaataattacacataaaggaaggaggtcaggctaaatgttgcatag

SEQ ID NO: 345272 - DNA, 559 bp, Homo sapiens
tattaggtagcttaaacaccagaaatcattttctcacagttctggaggctagaagtccaaaaccaatgtgttagcagggttggtttgattctgaggcctctctccttggctcacagatggccaccttctcactgagtcctcacgtggtctttcttcygttggccgacatacctggtatctctccgtgtgtccaaatttctcttcttataaggacgcaagtcagattggattagggtctagcccgatggcctcattttaacttaatcctctctttaaggtccccatctccaaatgtggccacactctgaagtactggggattaaagcttcaatttagtgtgggttaggggacacatttctgcccataacagcaagatagctcatcagcctgtcagcctcacaaataggcatcgttacagagatgagcagaaatttttttgttgttgtttaactggagcaatatttctgtaaggtaaggtaacgcaaagtgttgtcatcatttactttcagttatcaagactctggagacataaagtagacagtgagtaaactggctcttt

SEQ ID NO: 345273 - DNA, 559 bp, Homo sapiens
tattaggtagcttaaacaccagaaatcattttctcacagttctggaggctagaagtccaaaaccaatgtgttagcagggttggtttgattctgaggcctctctccttggctcacagatggccaccttctcactgagtcctcacgtggtctttcttctgttggccgacatacctggtatctctccgtgtgtccaaatttctcttcttataaggacgcaagtcagattggattagggtctagcccgatggcctcattttaacttaatcctctctttaaggtccccatctccaaatgtggccacactctgaagtactggggattaaagcttcaatttagtgtgggttaggggacacatttctgcccataacagcaagatagctcatcagcctgtcagcctcacaaataggcatcgttacagagatgagcagaaatttttttgttgttgtttaactggagcaatatttctgtaaggtaaggtaaygcaaagtgttgtcatcatttactttcagttatcaagactctggagacataaagtagacagtgagtaaactggctcttt

SEQ ID NO: 345274 - DNA, 469 bp, Homo sapiens
tgaactggatttaatgattcaaatgtggacttgctgtgtaatcttaaatgcatatggcctcactgtgccttatgacctaatctgtaaaatccagatgatagtaattactttgcagggtctgataatattataatgtataagacagccaagtatagtacatggtacattctaggtgttcaacaaatgacaaatattgctatttttgggactactacattttacccttttcacagactcctcattctamgtcctgttctatctcttgtccaaccctttcctcaggatgtacaacccttgaatatctcaggagaaggctacttgtgcccccagagcccacacaccaaaatctgagtggcagcattgtcccagcccaccatgccacttccaggccattcctttccattctcttatcaaaatacctctgctctcacggctcatgccacacttgcccactcctcagttctgcctc

SEQ ID NO: 345275 - DNA, 575 bp, Homo sapiens
gatcttaccataatcagataagcattctattttagcattaaaacattttataatcaattttaagagatttaaaattttcatactgagcatttcacataaatctaaaaaagatatggctttctctgatattgcccaaactccctctctgtgtaagttcctgactcattagagggcacatttaaaaatcactcagagttataagggaggttaatacascaccacagtgtcatatttttaagaaggattcttctttttatttattgatctatgaaactgatctaccagaaatgctggtaaataaacaaattttaaaaatttgcccccgaacactaccccatgatgcccttaatagattcattccacaggtgagtctgtgtgattaaaaaagcatgttccttttcacttaggccactaggaagcttagagctaaatagtgattaacttctaataaccgtaaagaaccacacagtatatggtcctttgaacaactcagaagttagggtcactgaccctctgtgcagttgaaaatcgcatataacttttgactccccccaaacttaactactagtagctta

SEQ ID NO: 345276 - DNA, 592 bp, Homo sapiens
attaactcgtgtaatagaataaaagatcaagtctttacgcagtatgttttaggagagtcacattactcactagagttttctaacactttgtttggaaataaagatctaaaggaacactagacaaatagtaaaagctaccaaaataaacttttattttcctggttttaaccaaaaaattaaattttagaaaagctgagggtcagttatggaatgcagttgtccggagaatagacagatgttcatttttatttgcttaagagtataaactattggatcactgcagcagttataaatgatttatggaatgagacacattcttgtttaatgcacaaagactgtcaactgttctagcaattacagagatatggtrctatttttagtggtatagttacacaggaactacattattattatatgaaatatgaaatataaactaacttctctcactatggagttctcatgaagttacatctagtagaaaagtagtgagagaataattacatttctttgcaacctgtgtctacacttgcataataaagtggaataacagataatatacataattttagttttagcatttggctccacaggg

SEQ ID NO: 345277 - DNA, 493 bp, Homo sapiens
attttggctaatgaagtgtggtgtggtggaaagtacacagatgtttacagatttgagttcaaatcttagcccattcaattattagtagattattcagctgttgccatgctaatgctgcctaacaaaccatcccaaaccaataacaacaaacatttatttgtttagttcrtgggtctacagatcaaggcagtttggctctataggctgtgattgtctgggcagctctgcttcaagctgtggtcaggctggcctcaactcctcactgcaggacagggttaggtctatcctccatggataagtggccaccaaagatattattatcatggtaagtagcagaaaggcaaaagcaacctaaacgatataatacatttaaaaccattttcaggccttgctcacataatatccacttatttttctggtggccaaaattatgtggtcaaattcaaatgcggcatagaatgtactacatcccaagagggaagcagggaggtaa

SEQ ID NO: 345278 - DNA, 647 bp, Homo sapiens
acctgcatgttgtgcatatgtaccctagaacttaaagtacaaaagaaaagaaacacaaattaagaagcaaaagaaaaaagagctaataatacatgatctgatactttccaaaaagatgacaagcagaaaataatggcaaaaagagaaaaccttggaaatgctttcagagaaaataaaaataattacttggccagagtaattaaaaagagttagtaatcactgacagtacataaaaaatcatgagaaaataccccatacacgatgaaaaaagatcgaaaataatgaaaatgcatatttgttttaaacaactacttaatggattaccaaagaggtagaaaacctgggagttaaccagtagcaaccaacaactatgaaataggaaaactatcaaagaaacatcaaaccaaatgcagccagattcttatgatgcttctggtaaatgctatcacaacttcagcaagtaaataatatgtattgcactgaaacatatcccagaaaacagaaaattataaaatwccccctaataacaacgatgttagaattagcaaagctaaataattacatagaaagctaaaacctatattttggcaacttatgttttacaccttctaccaaaacattctttcttagaatgttttaaagccgaa

SEQ ID NO: 345279 - DNA, 567 bp, Homo sapiens
gaaaattataaaattccccctaataacaacgatgttagaattagcaaagctaaataattacatagaaagctaaaacctatattttggcaacttatgttttayaccttctaccaaaacattctttcttagaatgttttaaagccgaatccttctcatcactcaggttttaactcaaattgcaagtcctcagagtccttccttaaacactctaaggttatgctgcctcaggcactctctaaccaattcaatcaattttattttatttgtcatatgatgatgtgaactgattttactttcactttttaaacatgtttattgtgtgtttctgaccactggagggttagctccatgaaggcacagctgaaacctcaatgttttgaacactgcttaccacatagcaggcactcaatagatatttgtaaatgttgttatatctcacttaggaatacagatataaaatcctataatttaaatattaatacagtgcttcattttaagtataataattatatatacttcatatgaccataacttaaataccacagtgtattaaagagattctagatc

SEQ ID NO: 345280 - DNA, 569 bp, Homo sapiens
ggctattatcaaaaagacaactaaagataagaaatgttggtgaggatggggaaaaaaggaaacacttctgcactgttggtaggaatataaatcagtacagccacagctgaaaactatatggcggttcctcaaaaaactgaaaataaagctaccataagatctagaaatttcatgtctagatatggatctaaagggtttgaaatcagtacactgaagatacagctgcacttccatttttattgcatcattattcacaatagccaagatatggaatcaacctaagtgtccctcagtagatgaatagataaagaaaatatggtatatatacacaaagaaatactattccaccttaaaaaaagaaaaaaaaatcctgtcacttacaacaatatgagtgacaaagaagtcattatattatgtgaaataagttaggcacagaaagacaaataccacgtctgtggtattggtattccacgtatgtrgaacctcacctatatgtggaacctcacttatatgtggaatctaaaaagagtcaaactcataaaatttgagaataccagatgctagagggt

SEQ ID NO: 345281 - DNA, 566 bp, Homo sapiens
gacgctttttaaatatttaatgtttaatcattttaaaagggtatatctcagaattcgtcattcatgtccaaattcccagggagcttttccatttgtaatcacaattattggtgaaaatttggtattgatattgcaggttaaaaatatgcattctaacctatgacttggttattttctcagtttacaaataaatatatcatatatatcctttgcctgtcttctagatctgtgatttttctkataaacttttacctttagttctaattatttgtattcattttatatcacttattttactgtgctttatgtgatatctatgaacctttatctttcttctcaattaggctaatttttaaaatattttccttctactttttgtttcttatacctaaattctgacacttttctttttatttttgttatcttattctttggctgttctgatttataatattatttccaggctttgacatttatttaatgccttttaagttattctgaaaaatttatgtagcttgtgtatattctgtataggaaaaatttaatggcatttttctatagtattg

SEQ ID NO: 345282 - DNA, 525 bp, Homo sapiens
catgattaatgtttatattttattagaatttttataggatttgatcatacattttgtatttctcaaaaatgttttttctgtgtgggaacaaagatgggtcacrgtaattttccaagcaaaaggagacaaggaaaagcaaaaacgaaggtaagagaattgctctattatatgccaagacatacctccagataacagtcataaaaataatgtagtattaacctagcaatggacaaatacaccagtgtaatagaagtgggtccatatataaaataatttaacaaaaaaataaaatggcaccaaaatcaaaagggaaaggtagattatcaaatagatagaaaataaattagaatcctcatctaatccccatataaaggtgaaatctaggtgaaactatggagtaggtacaggcaaagtatcatttttaaaaaacttcaaaaacacaaagcataagataagaaatttatggattaatggttaagagctccattacctactagctgagtgaacttggacaatcctttaact

SEQ ID NO: 345283 - DNA, 561 bp, Homo sapiens
gatggctgagaaagagtgaccagtgaggacgaagtaaaactaagagtacatgtattcayttcttactgctgctatttaaaagtgctgtaaactgggttccttaaaacaacagaattgtttttctctctcagagttctgtaggttagaagttggaagttcaggtgtcagtaggtcctgctcgcaccaaatgctttaggaaagaatccttccttcccttatctaattttttgtggttgctggcaatcattggtgtttcttggctagtagatgtgtcagtttaatctatgactatctccacatggccttctcccctgtatgtttgtgctttcacattgtcttctctctgttcatatatctgtaaccaaatttcccttttcttatattgaatttggtgcctgcctgtatttagcattttcacattgctaaagatactacccaagatgggataatttataaacaaaggatgtttaactgactcacagttccacatggctggagaggcctcaggaaacttaaaatcctggcagaagaggaagccggcacctccttcataaagtggca

SEQ ID NO: 345284 - DNA, 612 bp, Homo sapiens
ataaagtggagaacatgtgcaaaatcaagaagtgagagggtctggtatgtttgggaaaccacaaaaagctaagaatgatatggacagagtgaaagtgaaagattcagatgagatgcgaaagatgaattaggaacaaattgtaaagactttttgaatacaaaaaagtagcttgaattttgtctttaagacaataattttcaaactttttgccaaaataatacagaaagcagagagtgagttggtaccatcataagtcygtcagtaacatatgaagtagtaatctactgcaaaccaaataaataaataaataaatgttattgtactttattgtgaaaattaatgataattttacattttattattttgtttgtaataatatgaaagagatgttttgacccatttacaaatgagtaaagtggatactagagtatgctcagccatagttattttggggcatctaaaacttttttacataatccaagaaagtatgcctttcccagcaagctttaaaggcagatttcaaaagtcccacgaggcagaggagagttaacagaggtataaatgtatatataaatacgtataaaagtaaatttaccagaaggaaatactttg

SEQ ID NO: 345285 - DNA, 612 bp, Homo sapiens
ataaagtggagaacatgtgcaaaatcaagaagtgagagggtctggtatgtttgggaaaccacaaaaagctaagaatgatatggacagagtgaaagtgaaagattcagatgagatgcgaaagatgaattaggaacaaattgtaaagactttttgaatacaaaaaagtagcttgaattttgtctttaagacaataattttcaaactttttgccaaaataatacagaaagcagagagtgagttggtaccatcataagtccgtcagtaacatatgaagtagtaatctactgcaaaccaaataaataaataaataaatgttattgtactttattgtgaaaattaatgataattttacattttattattttgtttgtaataatatgaaagagatgttttgacccatttacaaatgagtaaagtggatactagagtatgctcagccatagttattttggggcatctaaaacttttttacataatccaagaaagtatgcctttcccagmaagctttaaaggcagatttcaaaagtcccacgaggcagaggagagttaacagaggtataaatgtatatataaatacgtataaaagtaaatttaccagaaggaaatactttg

SEQ ID NO: 345286 - DNA, 608 bp, Homo sapiens
aaagggactagagaaagtgacagattattttgaaagtcataaacatcaaatgaacataccatttcaaagttgtactcctattgatatttaaacagataaattcatgactaaatgaatgaattagacaactaataggcttgttttttaaaaataaaattttctatgcggcagacaagggacttaagtaatattgtctcctagcagacaattattattttaattcacatttagagtatgaaaactcaaaaggtccccttccagtacacttttctccattgaacttcttattccccttcttgcctgtgtccaggttttctcctagagattaccttttccctgcaatatttcactgccatttctagattcaggttacatttttctgtttctgggtcaagaatagattctactacatcaaaaagaatttctagctggaacatacrccttgcatttttccttgtgttgacttgaatcatactttattttcaatctagcagttctgagtatgaataaataattctccatcataacaaaaagtatcccaaatttattgttcgagatagtgatatattaggagtaaataagaatttcttttttctttttttctcctc

SEQ ID NO: 345287 - DNA, 377 bp, Homo sapiens
acataagaaggaaagataaaataattagaataaataaaatcaattyggaaggaagtagttttcagcctagataatgttgtaattggctgttatcaagttaatcactaagcctttttctcaaacatggactgacattgatttagagcccaaagaggacctgattttaatatgctattcaaattaccccaaattccatggttgggatctcacaaatgctatgctacttcttaagatacatgtgagctatctcaaatttctaatgagctaaaagaaaactctgtcagtataaattcttataggtctaagcaacattttttacttttaaaggaaaattccacaataatcttttaacaaatgtgtttgatttttaaagaaaa

SEQ ID NO: 345288 - DNA, 604 bp, Homo sapiens
gaacctatctacaatattacaaagttgttgagctgaacctatctacaatattwtccttacacaacaatccttctctctcatttgtctttaatacactctctcaagtggaagtggtggtaggcccacaggatcatgaatgggtgtgtcaggtttatggtctgtatgtgatggggaagagtgaggggcatggtagattggtggattcagagcccagaaaatgctaacagagacatcattatatctagcatctttgaaatatgttaggacctggttctacgtcaacctcattttgtggtgacattttctgtattattcagatactacaatcagggggtattatgaagttagagtttatctagtgtggtaatttgaaactcacataaaatctttcagaaatgtttttttgtcattgccttgcatttgttcagaaagaatctgaaaaaactgcttctagtcataacggagtatggcgagaaacacagtctccagaggtttataggttaacgagaggaagccatcctacaatgacaaataaaagaaataaaacagccagtgcaaattaaggataagaaaaatatttatagtagtgtaaaccacctagttc

SEQ ID NO: 345289 - DNA, 614 bp, Homo sapiens
agaaaataccgtgccgattcaacttgatctgagaccttcctttattggataaagtggtattatgcctatatcttgaaacctcaatctgtttgccttattggctctctctggtacacattcagtctttagcagatgcaggctgcaaagctgttcttactgttctgagggcaggcaatagtaggcagtcatgagcctgcagctagcgtatctggtraaatgatccctgtgtttagactcagtgccagtgacatcatgtctgcccagttaattttaaacaacaacccctttcactttgttacttaagacctgaatccattaatatttgctgacttttttccaaatgtatatttatcagaattggaagagatgagaaagtgttcattcatcaacaaatgattgcagaactggtgccagatattaaaggtgaagccaattgaatcaaacaatctcaaagatatatccctgccttctagtgggtaacactgataaaaagaaatacagttagaccctccctttccacaagaatctgcacattcaatcaaccatggatcaaaaataaccagagaaagaaaacaataaatataacaattataacaatttaaaattgtacaaaa

SEQ ID NO: 345290 - DNA, 619 bp, Homo sapiens
gttcttatctacccgttttataactcagatatttgattcctatgtcagttattgcttgcccaagatcagaaactacatgacaacagaatagaaaatgattccaggactgctgagctgcctctatgaagtagttcacctttttgaattactaaaagttgaagtggaagttgaaaaatgaaagattacttttacttatgtctcacttttttcatatgtatgtgtgtgtataacatttaacattaaaaactacctacctaataaatatctttaattaaataagagaaaaatcaatcaaatggatagcttgcgataaagaataactatttcctacgaatgttttaaaaatagcctgataattctggaatttaagtcattttgatagaacttctatatggagttcttgttgacaaattattctatctctggtaaaagtagggagaaatataattccatatctagccaaatactacggtattttgtgatgttaaaagattcattataacctgaaatgatataytgtgtatcctctaaacaactgtttccctaaagatttagtggaaaaacactttcccccaatctgtgcaactctaagaaagtgacttattattgtgacaagtag

SEQ ID NO: 345291 - DNA, 609 bp, Homo sapiens
tgattgtcaacttgctatttactaatattcagatattgcttcctctctgaagctttctctggtcctaacagactaatctgtttctctcttttctgctctattataatgacatgttttacttacatatcttaatgacatgtttaattacattgtttttttaattccaaattttattacaaaatgttaaatgaagcaaaactaggcatgttcatgtatagtaagggatatttcatggaatataaaggcaaatataccaattttaattaacatgtaagctccatgagatcagggatttgtcttgttcactgcttaattgccaatacttaatgaatgagaaggtgcatcaaaagacaagctgcccacagaccccctggtatgtgcaagagaagagtgggtggagataggcaagcggtgaactattatgactttagagtaattaaaagtttgagggtaaagaagcagggtggaagttgtctgccattgaggtgctagtcaaaaaatacatgtgcaaacatttgttggtagamatcctaaaagaaaaagaaatgcagaatattgtaaaggtgccacagaatgaaaagtctctgggcttaatggttttgctgagac

SEQ ID NO: 345292 - DNA, 620 bp, Homo sapiens
tttcatcattcacagcagagcccatatctgtttgattctaaatccaattgtcattcatctacacattgctatattctccatctttagagttacaggcaggtttccaacccttcctctgtcttttgatgatattcatataaggttcccattttcttctcacctttattgtagtcaaaacttatgtttaaatagagacttctcagcctaatgtccattacctaactgcaaatgccaaataaagtttagggtatctaaatattccccataattgtccgaaaatttgtgtgtctctgtgttaatttaagcgaagtcaatagaatcaaattatttcatcagattttaaagggagatcatatttccctaccccacatctaaaaacaattgytctacaaaatatttagtaattacaataatgatgatagtagaaatataacatactaataatcattattattaattgaggtaatatgagggctttatagaaagtggcatatttaattattgcaataaactagaatacagtgttaatgatccacatcataatgatgaataaattgaagctgagaaagagtaagaaactttcttacagtgtcatattaagtggtgccaagagtatacac

SEQ ID NO: 345293 - DNA, 549 bp, Homo sapiens
tgaccttgtgacccactcacctcaggctcccaaagtgctgggattacaggtgtgagccaccgtgcctggccagtgcatggtttcttaaatgttttttttctctgaaattctgtacagtcatatagtatttactggtcactaattattgtacatactatgctagacattgtaggcatgtgctatgacacatcctaggaaagttaattatcactgaattsattaagaaactaatgatttttaatatgataaagcagaaggaagaaaaagaaatggacaatactgtttactaaatgataaatgacaggaatgcgatggctgtttctgcatgtaaacataaagcatttaaaggctagacttgtctaagaaatcaacttatccactggtcttaagaaatcaacacaaaagcaaacaagagcaaattctctacttacaaagcatttattaaggatgttgtgtcaagcttcggacttgtaatagtttgactaaagaatcaatagcttaagcattaatgatctgcagcagtggcagaggaacctccattcctgatgt

SEQ ID NO: 345294 - DNA, 549 bp, Homo sapiens
tgaccttgtgacccactcacctcaggctcccaaagtgctgggattacaggtgtgagccaccgtgcctggccagtgcatggtttcttaaatgttttttttctctgaaattctgtacagtcatatagtatttactggtcactaattattgtacatactatgctagacattgtaggcatgtgctatgacacatcctaggaaagttaattatcactgaattgattaagaaactaatgatttttaatatgataaagcagaaggaagaaaaagaaatggacaatactgtttactaaatgataaatgacaggaatgcgatggctgtttctgcatgtaaacataaagcatttaaaggctagacttgtctaagmaatcaacttatccactggtcttaagaaatcaacacaaaagcaaacaagagcaaattctctacttacaaagcatttattaaggatgttgtgtcaagcttcggacttgtaatagtttgactaaagaatcaatagcttaagcattaatgatctgcagcagtggcagaggaacctccattcctgatgt

SEQ ID NO: 345295 - DNA, 392 bp, Homo sapiens
ttagcgatcatgtgttaaaatgactttatctagatacaagaagaacttcatggatatgcctatctgtctgcctatctatatctatctatctagctagctatcaatctrtcttctatcaatcatctatctatcatgtatttatcatcactacatgtatacacacatatactagtgcatacagacaggcagattgattgaacgctaaaggctgtatctataaaacttacagtaagtagatttagaaaaaataaaatagattcttcatattttcccagaaggtaacacatagagaagtttgattttcttaataagtttatccttaaatccctaatagtaaatgttatatcatcattactaaaatggcatgtacataatgggagccgaaggattat

SEQ ID NO: 345296 - DNA, 626 bp, Homo sapiens
gatgatgaattgccttcaggcaagaaagagcttcattcttgattctgtatgttttcgtcctaagggctgttgccttcaggacagggtttacatcattmctcctagggatctagcatcttccctcaacgtgaagtcagtatccgcttctattttctggctgactctgttgcttaaagcagcaggaatagtgttcaatgatacgttttaaagatgtaattcttgaactactacaaaatagccacagagtaaatctatatgaggttatgtttacttttttagtaatttttcaataaaatcatgacagataacttaagtcactgctaaaataccagacacatttgaaaaagttgattatttttaccctgtttcaaaaaagggcacagaatttcagcatgattatttatagtaatataataagtagtttttccacataactgaattatctaggcaactgaaactcaacatttaaatgtaaattcttactctaagtatttatataagagttgttttaaaacattttcttaaaatgcatggttcctatttcacctttttattttgataattcaatacaattgtattatcaggttattatataggactgttattcattaaaaattttattccat

SEQ ID NO: 345297 - DNA, 571 bp, Homo sapiens
ctaaaataaaagtgtttctcaaactaagggatagagctagaattaaaaatgatttttcagactgatgyttccaaagagataattatatttatataaagtttcaagagaccattaattccacctttatagtagctaactcatcagtgacataaaaacatgaagtcatcagtatactacaaatttcaacccttactgtttgtcaagttttgtgtgaaggacttgagacatgaaaacttagatgtctccagtatttgtctgagctacattccctttccatatttctcctgtcctggaggggctgaaagtcttgaaatcaaattgctccaatgggaagttcttgcaaaggatttggaaggcaaaagaaaaacaaaaactgtccttctcctcctgaaacctatggtatagatggtagagcttggtagatccatagttttgcagaggtctcagtagtctagtggaaattactcctcttggggctgcagcaacctctgacaattggtgctcccttatctggaaaacttgagtaaaacctgagagccagggatgactttccctgaactttgcttctcta

SEQ ID NO: 345298 - DNA, 570 bp, Homo sapiens
acttaaattttgacagataagtatgaaataattgacatgaaatggccctttatgtagataaagattccttaaaaactgcgctgagtcaatataaagaatggaattcaaattgacaccttcatatttaagcaagcaaataaccagatttgcttttatttgagcagtttatataattttttaaaaaagcttaaaatatttctaaagataatatgaaacatttttattttaagtttaataaatacacttatttttcatagtaagtatacagagttttgctggcctttagacattatatccatttatgtgctgtaccaacaaatgctctgatgatatcactgtaaattatatccgagtacagatgacagaagagaatcatagatcgtagcatatgcatgtatcctcaagcagaatttgttattacatttgatagagaagcaagttaaactttaatccctacagtgttctttggatggtcttgcttttgtttatttattctagcatgaaagtgtaaaatattktctatatccttaagggtctcaagcttattttcaaaatcctcattttgttatt

SEQ ID NO: 345299 - DNA, 586 bp, Homo sapiens
aaatgtcattcagtaaaagcattattcaagtgttagaataccatggggcatgcttgttatgaaagtgtaaccagagatgtcagttaaattgtctactagaatagtgagtattgttgattatacacaaagtttttggtttggctagtggggagttaaagcttgggtataaagctaaatgttctggacacaagaaagttagcctcactctgagtgctgtaactaaatcacctccttctctgattcgccccaagcaaaatcaaaggtgctgaatgcgatcrtgacatattgatgttaagaactgcaaaattatttccacatggaaataatttataacaagtttataaattactaaattatctggcttgactagtctgaaacatcaatagacttacacaacaaaatgcaaaacagacatggttttttaaatgtctaagtattaagagaaatttctcccatagccctttaacactctgtcctcagaggttcaggatgctaattgattcttagcatcgccttgtagacactctataaattcccctctgttggatgacttgtttccttgctttgctaattttatacaatcaca

SEQ ID NO: 345300 - DNA, 586 bp, Homo sapiens
aaatgtcattcagtaaaagcattattcaagtgttagaataccatggggcatgcttgttatgaaagtgtaaccagagatgtcagttaaattgtctactagaatagtgagtattgttgattatacacaaagtttttggtttggctagtggggagttaaagcttgggtataaagctaaatgttctggacacaagaaagttagcctcactctgagtgctgtaactaaatcacctccttctctgattcgccccaagcaaaatcaaaggtgctgaatgcgatcatgacatattgatgttaagaaytgcaaaattatttccacatggaaataatttataacaagtttataaattactaaattatctggcttgactagtctgaaacatcaatagacttacacaacaaaatgcaaaacagacatggttttttaaatgtctaagtattaagagaaatttctcccatagccctttaacactctgtcctcagaggttcaggatgctaattgattcttagcatcgccttgtagacactctataaattcccctctgttggatgacttgtttccttgctttgctaattttatacaatcaca

SEQ ID NO: 345301 - DNA, 586 bp, Homo sapiens
aaatgtcattcagtaaaagcattattcaagtgttagaataccatggggcatgcttgttatgaaagtgtaaccagagatgtcagttaaattgtctactagaatagtgagtattgttgattatacacaaagtttttggtttggctagtggggagttaaagcttgggtataaagctaaatgttctggacacaagaaagttagcctcactctgagtgctgtaactaaatcacctccttctctgattcgccccaagcaaaatcaaaggtgctgaatgcgatcatgacatattgatgttaagaactgcaaaattatttccacatggaaataatttataacaagtttataaattactaaattatctggcttgactagtctgaaacatcaatagacttacacaacaaaatgcaaaacagacatggttttttaaatgtctaagtattaagagaaatttctcccatagccctttwacactctgtcctcagaggttcaggatgctaattgattcttagcatcgccttgtagacactctataaattcccctctgttggatgacttgtttccttgctttgctaattttatacaatcaca

SEQ ID NO: 345302 - DNA, 519 bp, Homo sapiens
tatctttatggttaaatcaggatttcctgaagcagttactcttttggatttstttctttattttttaccatttttgcttcctgactgaaaatatttttagtcaaaatgtatattgttttcatgaaggtggtcaaaatagaagcttagaatttaattaattctcaccttacatatattttacatctttcctagaactgaacaaagggctttgcaccaaagattagattattaaaaaaaaaacaaaacagaacaaatcagaaactagtcaggacagggttggattgtagtgttgcttgtgtgctagaaattccttcactggtttagtacactcaacacaagtatgactacattttcagtgtttgtctgttttttcttttttagagattggttcttactttgtctcccaggctagagttcagtggtgtgatcacagctctctgtagcctcaaactcctgggctcaagcaatcttcctgcctcagcctctcaagttgttaggactacagacaagtgccactat

SEQ ID NO: 345303 - DNA, 597 bp, Homo sapiens
gaacatggaataagtattaataagtgaagtagccatatttctcactgttttgaagttctagatttaaatatcaaatacgaatatctgatagattgttcagtcttatcccttaaatcttaaagtgagagaagggactaatgccctctgtcatacatgataccaatttcagaccattatctctttgtctttttgtaatactcattcctctttgagccacataacatttctaatactatcttttacttctgttcatcatgaagctggcccaatttccccatagaactgatgtttactgtttttttagataaacatagaaattgacccttccagtcttaaagcttaaaacttacattagtcttacctgagttcctttctcaggaaactttcagccccctcaaatagyatcaaagaactgaaactcaccagatcactatatcccaacaatgacatcctcatccatcatgattgcttccttaatcctctctaattcctgttttcccacacgtagttatgttccttcctcgctatacaaatctccagttttagttggttgggagatgaacttgagacttatctcccatcttccagctggcatta

SEQ ID NO: 345304 - DNA, 520 bp, Homo sapiens
atctggactcttctatgatacaggtagtgaaaccaaagtaaatggtggaaggattggtacaggattctctttagagaaatgagaaagcaaagaaktcagaaagaaattatgatgtatttctgccttttccgcctctcctgcctctccttccacctctttcacctcttctgcctctgctactcctgagacagcaagatcagcacctcttcttcctcgccctcagccaacatgtgacaatgataaggatgaaggtctttatcatgatccacttccacttaataaatagtaaacatattttctcttataatttttaataactttttcctagatactttattctaaaaatatagtatataatacatataacatataaatatgtgttaatagaccgtttatgctattagtatggcttctggtcaacaataagctattagcagttaagttttcagagagtcaaaagttacacacacattttcaactgcaggaagactcactcccctatcccccacagggtcaacta

SEQ ID NO: 345305 - DNA, 520 bp, Homo sapiens
atctggactcttctatgatacaggtagtgaaaccaaagtaaatggtggaaggattggtacaggattctctttagagaaatgagaaagcaaagaattcagaaagaaattatgatgtatttctgccttttccgcctctcctgcctctccttccacctctttcacctcttctgcctctgctactcctgagacagcaagatcagcacctcttcttcctcgccctcagccaacatgtgacaatrataaggatgaaggtctttatcatgatccacttccacttaataaatagtaaacatattttctcttataatttttaataactttttcctagatactttattctaaaaatatagtatataatacatataacatataaatatgtgttaatagaccgtttatgctattagtatggcttctggtcaacaataagctattagcagttaagttttcagagagtcaaaagttacacacacattttcaactgcaggaagactcactcccctatcccccacagggtcaacta

SEQ ID NO: 345306 - DNA, 528 bp, Homo sapiens
aaacttttatgattttattctatttgtattaagagcaaggatacctgatacaatgctttacttttcttggaaagcatgaggactctagccttgagcagctcctttataaatgttacctattgactgctcagtgagcacccatatgcagatgctccttgacttacaaggggcttacgtcctgataaattaaattttcaccttaactttaaaatactgttaagtttaaaaatgcatttaatacaaacttatcctagcctaccttaaacatgctcagaatacttacattagcctacagttggacaaatgtataatacaaagtctaytttacaataaagtgttgaatagctcacgtaatttattgaatactgtactgaaagtgaagaacagaatggttgtatgggcactcgaagtaaggtttctacataatgtgcatggctttcacattattataaagttaaaataattcaaaacattgaaagttaaggaatgttttatttccccaaagataagaatgaaaataagtatttg

SEQ ID NO: 345307 - DNA, 525 bp, Homo sapiens
  misc_feature (1)...(525): n = A,T,C or G
nnnnctctccctccttttatttttctgtcccctccatcttgctctctcccctttaaatattgaagttcccaaaaccctctctttggaaaacacacaggacgcaggtcctactgtgacttgtgtttmttttctctgggcacagcctcaaccttggcaaaaatcatcctctaaatcgatggagatctgcctccatcactttttggtttacagaacctttgagcaaaagcagaaagactagttaggagattgttatgctagtcccagcaaagttgatggtttgacatggattaaagtagaagctatgcagtgccacagacacacagatttattgcatgcgaagacccaactattgattaattattaaagacatttttattccttgagcaaataaaatgttttaacaacacaggaacaaactggggaaattagagtgtactaagaagcgtcggatggccaagggcacattttcagtccccttagcaaacttgtaccctagtagtatccgttattactgggccattgttt

SEQ ID NO: 345308 - DNA, 525 bp, Homo sapiens
  misc_feature (1)...(525): n = A,T,C or G
nnnnctctccctccttttatttttctgtcccctccatcttgctctctcccctttaaatattgaagttcccaaaaccctctctttggaaaacacacaggacgcaggtcctactgtgacttgtgtttcttttctctgggcacagcctcaaccttggcaaaaatcatcctctaaatcgatggagatctgcctccatcactttttggtttacagaacctttgagcaaaagcagaaagactagttaggagattgttatgctagtcccagcaaagttgatggtttgacatggattaaagtagaagctatgcagtgccacrgacacacagatttattgcatgcgaagacccaactattgattaattattaaagacatttttattccttgagcaaataaaatgttttaacaacacaggaacaaactggggaaattagagtgtactaagaagcgtcggatggccaagggcacattttcagtccccttagcaaacttgtaccctagtagtatccgttattactgggccattgttt

SEQ ID NO: 345309 - DNA, 594 bp, Homo sapiens
attctttaatcttttatttcatatatctatatatccttttcttattaagtttctaagcattataggccccgtgctattaatagttatttttaaatatttcaccacttaacccttcagaatcaacacagccttaagagtgttgtagccttcagaatctgcctaaatgaggaaacagatttgtccaaactctatggctggtatgagggctaagtggcattcaaacccaataattcacattcaatgcctaggattctctctccattataccacaataccatcctacacagttaatcatcttggcttcttttatgactataaaatrcatatcaagtagaaatttggaaaaagaatgatagattcagaatgcactcatttattcaacatatattatttctactatgtgaaatgcactattatagttgctgaggctaaagcagcaaaccaaacaatatccttgatctcatggatatctcattggagtaagggaagcagctatttatatccataagccagacttgtgaatatatatgcaaactaagaagacagaggaggttctacttaaataggttttatagtaaagacctatctgagaat

SEQ ID NO: 345310 - DNA, 588 bp, Homo sapiens
cagttgggagcttcagcaagcctcatgtctccaacaaccgagctccccgagtgagcaattcctgtcccttttaagggctgacaactcgaaggggctctgcgtgagagggtcgtgatcgattgagcaagcagggggtacgtgactgggggctacatgcactggtaattagaatggaacagaacaggacagggattttcacagtgcttttctatacaatgtctgtaatctatagataacataaccgattaggtcaggggtcgatctttaactaccaggcccagggtgtggcaccgggctgtctgcctrtggatttcatttctgccttttagtttttatttcttctttctttggaggcagaaattgggcataagacaatatgaggggtggtctcctcccttaataaaatagagcaacttagaagatctaacgagatttctgagagagacatctaattcaggctgagataagaaggaggattgaaaaatgtttccaaatggaggtgatatttgactaattagtgtagcattacctatgaaatgaagaaggggctggtcaaaaaaagagtatgtcagacaataaagctcagag

SEQ ID NO: 345311 - DNA, 588 bp, Homo sapiens
cagttgggagcttcagcaagcctcatgtctccaacaaccgagctccccgagtgagcaattcctgtcccttttaagggctgacaactcgaaggggctctgcgtgagagggtcgtgatcgattgagcaagcagggggtacgtgactgggggctacatgcactggtaattagaatggaacagaacaggacagggattttcacagtgcttttctatacaatgtctgtaatctatagataacataaccgattaggtcaggggtcgatctttaactaccaggcccagggtgtggcaccgggctgtctgcctatggatttcatttctgccttttagtttttatttcttctttctttggaggcagaaattgggcataagacaatatgaggggtggtctcctcccttaataaaatagagcaacttagaagatctaacgagatttctgmgagagacatctaattcaggctgagataagaaggaggattgaaaaatgtttccaaatggaggtgatatttgactaattagtgtagcattacctatgaaatgaagaaggggctggtcaaaaaaagagtatgtcagacaataaagctcagag

SEQ ID NO: 345312 - DNA, 597 bp, Homo sapiens
gtcactgagccagagtggcttgtgggagaggttgacacagataaactaaaattgttcctttcatccatttcagaaagatttttctaagtttttcacctttcgaggctgtttcaagttcttaattggattttacaggttttataaaggtattttggcccaaatagcattgttttatcagtgtttatgtgtggagatgagtgctaagacttcctactctgccatcttgctgatatcactcttcagcaaacatttttatttataatgattttttatattagctagaaatttaccaattctttagttaatttatctgtttttaaaaatttctttgtcaatttttctattgagtttttttatcgaattgtataagttcagtcttagatcattgattctagacttcaggtgttatataatttagtaattgagattttgatttattttcacatcaaaatttagaataaatatgtrgtgaaggatggaaatcttttagcatatggcttctgggcaatagttttgactttatatgcagaaaggaaattggactctttaatttgatttttaaatgaaccctgaaattgaacattaaactataaaaga

SEQ ID NO: 345313 - DNA, 597 bp, Homo sapiens
gtcactgagccagagtggcttgtgggagaggttgacacagataaactaaaattgttcctttcatccatttcagaaagatttttctaagtttttcacctttcgaggctgtttcaagttcttaattggattttacaggttttataaaggtattttggcccaaatagcattgttttatcagtgtttatgtgtggagatgagtgctaagacttcctactctgccatcttgctgatatcactcttcagcaaacatttttatttataatgattttttatattagctagaaatttaccaattctttagttaatttatctgtttttaaaaatttctttgtcaatttttctattgagtttttttatcgaattgtataagttcagtcttagatcattgattctagacttcaggtgttatataatttagtaattgagattttgatttattttcacatcaaaatttagaataaatatgtagtgaagkatggaaatcttttagcatatggcttctgggcaatagttttgactttatatgcagaaaggaaattggactctttaatttgatttttaaatgaaccctgaaattgaacattaaactataaaaga

SEQ ID NO: 345314 - DNA, 648 bp, Homo sapiens
tgcctttgccttctgcttatgttgaaccattaaaatccaatttttatatctccttaccacgaaatgtataagaacaaattcttattgccatggtggcttgatatatgtaataggggagaaacaatgttaagaaatgggaaaaagctgactaccagagagttttataacttatcataaatcccacagcaatgcatatattgttaatctgtcaaaagctcagatttaaatataatggaatctccaaataaaaagaaatgtaaagaaaattrgatttgcaatgtcttaatatttatgtaaggaataggagacgtaaacattgtcatttctaagtccccctactatacaaccacaagaaagatttattcaacatttctcttttttttatggatgactgaccttcaaagttaggaattatcaagaaaagaatttatgcaaaaaatcgggtcatctggcatttgcaagaattgcaagcagaaacaaacttcagagtaccaaatatttaaaaacagcattagccagcctaattgagccagattgatacttaaacaaatactgaaaattagaatggaacaaaaatgtatttcagcgaagtgctgttccaagtataatgcagttactcctgtggcagcccataaaatgtttgataat

SEQ ID NO: 345315 - DNA, 648 bp, Homo sapiens
tgcctttgccttctgcttatgttgaaccattaaaatccaatttttatatctccttaccacgaaatgtataagaacaaattcttattgccatggtggcttgatatatgtaataggggagaaacaatgttaagaaatgggaaaaagctgactaccagagagttttataacttatcataaatcccacagcaatgcatatattgttaatctgtcaaaagctcagatttaaatataatggaatctccaaataaaaagaaatgtaaagaaaattagatttgcaatgtcttaatatttatgtaaggaataggagacgtaaacattgtcatttctaagtccccctactatacaaccacaagaaagatttattcaacatttctcttttttttatggatgactgaccttcaaagttaggaattatcaagaaaagaatttatgcaaaaaatcgggtcatctggcatttgcaagaattgcaagcagaaacaaacttcagagtaccaaatatttaaaaacagcattagccagcctaattragccagattgatacttaaacaaatactgaaaattagaatggaacaaaaatgtatttcagcgaagtgctgttccaagtataatgcagttactcctgtggcagcccataaaatgtttgataat

SEQ ID NO: 345316 - DNA, 551 bp, Homo sapiens
gcccagtgtgtgatgttaccctccctgtgtccctgtgttctcattattcaactcccacttaacctttcatgtatttttcacatttgttctttccctgaatgttgacatcctatcattattcaagttttttctattctatttagtccttcttatgtaattaaatatgctaaaagtgataacatcttcctattaatttaagcataaactgtatattaggtatcatgatagttacagggatacaataaatcctacagaatgatgtagttccctgggaagaatatattcagtagagaaaagactagcttcacaaacatgcacagggatccatgctcagaagggatctgcctgtggtttaattctctgatgttgtcagcttaaatttcttaataatttttgaataagactcctccaccatttacattttgcactgaaccatgccagtgatatagctggtcctcagtggaaaagcagacttttaaaygggcaagaaatacaacgtgaggcactgtaatagaggaactacatgaatcagtagatgacagtagagggac

SEQ ID NO: 345317 - DNA, 565 bp, Homo sapiens
agatcagtgtttgtactcctgtcactccattgttatgcaaagaatcactgacaccaaagagaagactcagatggaagctaaattaagaaacactttcttccactgaacttcartgcactggaatatttttgaagagacttggaggaagagctgtcccagaaccagacaacacatttccccctttcacacgtgtaagctgggtgcatgcacatacactgagccctggccacttcaagcagtatacactctcacacttgttctagattgacagaggaaaggaaataaaagaagcaaaatctagttcaaatgtaatactttttattgaccaaatgtaacctcgtgttttggtaatttgcccaagatatatttaaagaataaaaaagaaactttataaaggcacatttgaacagatatttgtattccttattacaggaaaattttttgaaggcagacaccataatgaaaaaaactgggttttatttgtattaattaaagtttaaaactattctatgtggaaacatacatgcacaatcaatttgaagataaattatagccatgtgtggtg

SEQ ID NO: 345318 - DNA, 609 bp, Homo sapiens
tgctttttgggctccagccccatgtcagcatctaggactcctgaagtccaaatgggcgtgtgttacagtgtggtctttcaactacatcatctacagacggcttgtgttaactcaatagaccctctgccttatcgcaaggactggggaccagtgtgacagtcgatttctcgcccagcgtactggaagaagcagatcacacgtgggctggaaggttgagtgcaaggtttgatcgagtggtggaggtggttctcagcgagatggatggaaaaccaaaaggggggatggagtggaaaggtggtattcccctggagtcaggccgcccagtggcctgactcttctctgaccgcccctggctgaactccccttggtgtccagatgttcttctctgtttctctcctgtggcascccactactctccgccgctctgttcctccactcctcttgatgttcagctgttgtgtctgtgtccactaaggtctagggtttttataggcacaggatggggagaatggcgggccagagtggtattggaaaatgccacatttggacaggaaaacaggaatgtctgttctcacttaggtccgtgggcacaggcctgagggtggagcc

SEQ ID NO: 345319 - DNA, 669 bp, Homo sapiens
gctttaattatccatgtttgctacctacagcccagatttactatttaattgtcacattctcaatttatttctctcatgggaacccaattcaatgttatttttccttctagagttctaatgccataaaatttataatcatacaaacgacatatgttatctgtagtagtcacaaatttaaaaaaattctgratattttaatatgtattataagaaatactttactgcatgtacttcaaatcttagaattttgttgagttttcctgctaattacatgaaacatttttgaccacctgttatgctagatatgaaggaagctaagtgataaatttatgatcccctgtttccatctaggaaattgttggagacacaagtaaagctagatcccttaagtaaatggtggcttaattccatctttactttcctcggggaaaggcattctatcaaaagagttggtaaaagcttggataatactagtctttctaccttacatgtacttcacaaacactaaagacaataattacaagcaaatgttctttttcttctcctcctttttctttctaatggctttaaatcgttaaagtgagactcacacactttaccaagatcacattaaacctagaaacctaggtctcttgagcctccctaagagctgagcccataaaacaacag

SEQ ID NO: 345320 - DNA, 574 bp, Homo sapiens
ttttgttgttgtaaaatctatcttcatagcttctctatgttgagtaactctccattaaactctgcctttgattcacatcttgaaaagtcaataacctcttccttagaatttggtcagtawgtaagtgtatacactgcttatggctatagttggtatatacattttaactgcattgggatttaatatctgttcggcagttgtgaagctgtaacatttgaatacctgattttgacaaagtaagggacatttctaatgtatacaaagacactataatctagaccactatgacatattctatagctggcagggttttgttaggcttatttttgttattaaaaaatggcacactgttgccagacttgttttctagtcttgaactgctatatatttctgaaaagatgtacaattaatatgcagagtcatgcaatatagatcatctctctgttccatctcctaattaaatataaagtttccttattttcataaagactgctatgttgtaacatgagtacactgatactgcttcaccctgccagtatggaagacaaaaatcaaaagccctgaaatacaggat

SEQ ID NO: 345321 - DNA, 607 bp, Homo sapiens
cataaactgaagaaaccaatatataatagaagtttgtgtactatagatgttactataaatgttaccttttagaataatcatgtcatattttttattttgtcataataaaaatactttgaggttatttttttctgtataattttactgcatcaaaactgttatacgacccaatggtattgaagattaatattgtaaaatatatattttatgaatgatataacaaaatgtgaaacaacactaatccatgacaagaaaacaaagtatcaaaaaaaatcaatttaaaagtaatgagtaacaaacattagtaatgagtayataaaatttttactcttttctccctaaagtttaggaggtatttgtaaaagttaataccattgtaaatcaatgcatttacccatgagctattatatgcacatgtatataaataaatcttttgtctcttttcttggaagattcccacacacatctgcttttttccacagatattctttaagatgatgaatgatttaagttgcatgtcagtcagaagaaaatccagcgagagctcaaatacatgttatttctagatgtagcaattttgattaaggtgttttaattaaatgatatt

SEQ ID NO: 345322 - DNA, 573 bp, Homo sapiens
catttgtttattatcaacataatccctagatttttttaaatgttgagcattaagatttatgtttctaaatacaatatgattccatcccacatctgaatgcagttattactataatataaattagaaaaatacttggttatgtctggtgaataatttaatatattcgggataattacttattttgtccaacacaaaacaaacaaacaaacaaaaacaagagtgtttttagaccagataggattttctaagccttaagctcttgctgttacccagattttctttctggttctcaatatgtcacagctatctgtccgcagactagtataaagaatttagtaaccaaatgattcagagacattttatgcaaatggtaaacttagcatgagttctccggtaggtactaattggaagagggacaaagaagttttgaagcaaaattatgttttctatctgccttctgaatttcctgctcaattttgctcaaaagccaagtttcttcaaacttgagatcaagwtcccttggatagcacacactcagaaaccaggaagcaggggacacgaaaggaacagtga

SEQ ID NO: 345323 - DNA, 517 bp, Homo sapiens
ctgcagttgtgtttgatactaagctttaggtttacttaaaatacaagttctaacactttcatttaaaaatctgttccatatttgtaactaccaagaagtaaagctaatgatgtctacttaaatgtatttcatgctcgaagtatctatttcattgttaatatgtaaaacacgttttttttttccttatgtgtaatctgtgtgtctcttgagggggttccttgtctacccattattccttcactttgccttatttctgacccagaatgtatgcagcagatgaactaatgtattaatctcttttacaagactttgaagactgccctaattctaaacagcttcaataaaatggggctaacacttcacaaatgtttctctattatcacacctagcaagcatagctagtcaacaagctgtgctcctcagatacacacagaaaaactgaaattctacasagaacaataaataaatttttaaaatactgagccactgaaactctgccattttcataaaattatgg

SEQ ID NO: 345324 - DNA, 581 bp, Homo sapiens
gcatgacaaaggtaaaacactgattaattggaatggcagtcctcatgttcttgctcatgcaagtccctcaacacccygccaacctctgcccccaccactgtccctttttaacctccaatatatatatactcaatatttttattacagagaaagcaaatatttgatgttcttttaagttatgcatttaaggaacatactaaatctctcttatggtcactctctctctctctctctctctcactatcacacattctctctctctttctctctctctctgtctctctctgctctgtccactttaggccttaaccagggcttgcgtaatagccattcagaactaactagtctgggaaactctcttttccctcggtgccagcctccagcatgggcctgtctccctgtcccccatgctgtggtgcctccagcacgtttgccttcctggcagcattttctattcagcattctccccaccctgtcaaaacttactgctgctgtgctttaatccctcaaggtgttgttctttgtttatcttatccataaattcatgtgataggatgtagaatccatgactgcttcatata

SEQ ID NO: 345325 - DNA, 562 bp, Homo sapiens
gtcatctgtatagttggtgcctggatttcataagtaaatgttctgatatgtttgtataagattatttaatcaaattccaaagttaacaataaacaacagcaagcaattactgcatttttaaattaaatacaattaggaattcaacactttttaaattttaaagattgaaggcaaccaaaaataataattagaattgattttgacctttatatatagtttacaatgaaatttttattgtaggttttgctgatttggcataatagcccaatattttcttgtattttataagctgtttattcaaactaataasaaatgaaagataatattttgttttgccttttaaaatgtttaaaaagttttagtgtttcttggttatacttaaggctttaaaattattataatagtctgtattactttatctatgttaaccttcctttattattttgtataatgatttctgaacaagttgcagcacatattttagcatagcatgaggctttgtaagaaaattgattggcttatatttaatttgtttaaataaatatttttctaaatattttga

SEQ ID NO: 345326 - DNA, 604 bp, Homo sapiens
aaaagctacatttttgagtttttaagcgtaaaaatgaactacttttctcaaaaagttataaatagaaatactatatgatccagcaattctactactaggtctacatccaaaaaggaaataaaatcagtatgttgaakatatttctgcactcctgtctttactgtagcactcttcacaatacccaagatacagaatcaacctaaatgtccattaatgggtgaatggataaagaaaatgtgatgtatatatacataatggaacactattcagtcataaaaagaataaaatcctgtaatttgcagcgacatggatgaacctggagggcattattttcggtggaataagctaggcacagaaagacaaatagggcaccgtttacaaatatatggaatctaaatgttgttctgatagaattagagagtagaacagtggttaccagaggacggggagaggaggtaggagggaggaatagtgacagattggtcaacaggtacaaagctgcagttagataagaggaatatgttctggttttctattgcctagtaagataagtagaattaacaataatgtatatttccaagtagctagaagagaggtttttgaa

SEQ ID NO: 345327 - DNA, 604 bp, Homo sapiens
aaaagctacatttttgagtttttaagcgtaaaaatgaactacttttctcaaaaagttataaatagaaatactatatgatccagcaattctactactaggtctacatccaaaaaggaaataaaatcagtatgttgaatatatttctgcactcctgtctttactgtagcactcttcacaatacccaagatacagaatcaacctaaatgtccattaatgggtgaatggataaagaaaatgtgatgtatatatacataatggaacactattcagtcataaaaagaataaaatcctgtaatttgcagcgacatggatgaacctggagggcattatkttcggtggaataagctaggcacagaaagacaaatagggcaccgtttacaaatatatggaatctaaatgttgttctgatagaattagagagtagaacagtggttaccagaggacggggagaggaggtaggagggaggaatagtgacagattggtcaacaggtacaaagctgcagttagataagaggaatatgttctggttttctattgcctagtaagataagtagaattaacaataatgtatatttccaagtagctagaagagaggtttttgaa

SEQ ID NO: 345328 - DNA, 566 bp, Homo sapiens
tgggaacattcaatatcctccttctagctatttaaaactacataatactgttaaccacagtgctatagaacaatagaatgtattcttcctgtctaactttagttttgtatctttggacaaatctctacctatccctatcttctgcctacccttcccagcctgtggtatcctctcttctacaatacttctatgagatcaacattttttagctttcatatatgagtgatagtttgcagygtttaactttctatttctggcttacttcacttaacataatgcccttcagttccatccatgttgccatgaattatattatttcattcttttcatggctaaataatattccactgtgatgtgatctatatatcacattttcattattcattcatcatttgttggacacctacaacaacacatgtgataccttcagctttgttgttggacacctatgacacacaaatgaataaagaaaatgtgatatatacatcacatcacagaagaatgaatggtcatctctacctcctccttgtttattgcagcactaattacagtagccaaggtatgga

SEQ ID NO: 345329 - DNA, 551 bp, Homo sapiens
ttctcacaatttgtaattaagtattacgagtttcgtagcttaatatcattttcctttattaagccatacatttcatgaagatatacagggatcgtgcttgttttgtgcctagcatactgcttacacacagagaatgctgagtgaatgaatgagtgatgaatgaataataggtaggtttttttgtttgttttgttttgaggcagagtctcactctgtcacccaggcaggaatgcagtggtatgatctccgctcactgcaacctccgcctcctgggttcaagccagtctggtgcctcagcctcccaagcagctgggactacaggtgcgtgccaccacacctggctaattatagtagagacaggatttcattgtgttggccaggctggtcttaaacaactggcctcaaatgatccgctcacctcggcctcccaaagtgytgggattacaggcgtgagccactgcgtatgacctcctttgcctttcttttgccacaaccagatagtgttttttacagttgcctgataaattcattcatgctagagtcctagagac

SEQ ID NO: 345330 - DNA, 269 bp, Homo sapiens
ataactccattttagctctacctgctgttttgcataataggaacttacgtgtctctttggcttttttctttcatttgtactatataatagttatttaggctttttagtgttttgggtacttctcaatctctttttaattcctccaattcttgactagttatctcttttccgctagagaaaggaagctcacacacaytcacacactcacacattcacacactcacacacatacacacacaaaatatgagactattaatatggctgctgtg

SEQ ID NO: 345331 - DNA, 579 bp, Homo sapiens
aattgttccacctcagatcatcaggcattagttagattctcataaggagtgcacaacctatatactttgcatgtgcagttcacaataggatttatgctcctatgagaatctaatgctggtctgacaggaggtggagctcatagagtaatgctcattggcccgctgctcacctcctgctgtgaggtatggttcctaacaagccacagtagtggtctgttgcccaagggttggggacccttgttgtagaggacagtgtgcactgttattgtgttttttgtatgaaaactcctatgagcccttttatttggttctaaaagttagaaaatcctttgcttctttgaaaagtaactgattatatttttatttccttttatttgggcaccaraaaacagttaaatctttgtcctaacattctttttaatctcattctattctgatttatatttttttctattcctgttttctctcgatatttgttttcatagttttgcaaaatacttcaaattccataagagcaaatcaggtataactgaacattagtgaattacagtcttttttcacaattcatcataagtggtc

SEQ ID NO: 345332 - DNA, 517 bp, Homo sapiens
taaatatccaggtaaagaaaggttaaagatcttcaatcatattcaatccaaagtaacccaagacttataatcaaaccgtcaaaaatcaaagagaagatcttgaaaatagctggagaaaataagtaaataatgtataaggtattccaatattctagctgatttctcagcaaaaatcttacaggccaggagaaagtgagatgatatacatgcagatgttcactgtagtactgttcacaatagcgaagatatggaatcaacctaaatgctcattmatgaaagactggataaagaaaatatggtacatatacaccatggaatactatgcagccataaaaaagagtgagatcatgtcctttgcaggaacatggatggagctggagaccattatccttagcaaactaacacaggaacagaaaaccaaggaccccattgtcctcacttataagtgggagctaaatgagaacacatgtacacatagagcggaacaacacacattggggcgtttcatagggtgaag

SEQ ID NO: 345333 - DNA, 550 bp, Homo sapiens
aatatgcattattcaattacacatgaataattatccagtatagatcatatgttaggccacaaaataagtcttaacaaatgtaaaaagtttaaaataatatcagatatcttcctaatcacaacggtataaaattagagattaatagcagaagkagcattggaaaattcaaaaccacatggaaattaaacaacatacccctgaacaacaaatgggccaattaaggaattaaatggaaaattgaaaaatttattgagacaaatgaaaacacaacttatcaaaacttatgggatgatgcaaaaggagttctatgggggagctttatagcaatacatacctacatcaaaaaataagatctcaaataaacaatgttgcaccaaaaggacacacaaaaaataaaatactaagcccaaattaagaaaataaataataaaggtcagagcagaaataaatgaaagacactagaaaaatagaaaattaataaaactaagagttggtatttttaaaaaaatatacaacaaacttttagccagactaaggaaaaagaagaatg

SEQ ID NO: 345334 - DNA, 540 bp, Homo sapiens
cttctagttttgttatagaatattgtgaattttattttttgaagtattatatttagcttctttccatttttgtttccacacaaagggaaaaattatgctaacttcatcttcctggcaagaatttattatttctctcaatactgctggagtttcgaacatgagcctaggtgacctatatcatagcactgggttgttcaacatgagatatatcttgttgcacactggttcatctaaaaattaaaaagcaatgtcattctagtcttctgttgtggtctttgtgtgagtaatgtatgttatggcttattgcctatggggtgggcctgtacaaccccctctgaaaatatggcatctgtgacaaaaacacggttcatctagtcctttttatggaacaacctggcgtctgaaaatgactgaataaagaacccatggagtacayaaaattgttctttttttatgactttaataaagtgatgatatatagcagcttctgtcaacagaaaataaagttagacaatgttagaaaatcctatgtggaacaaa

SEQ ID NO: 345335 - DNA, 520 bp, Homo sapiens
tgatgacatggagctgctatagctgtcctgattggcttacttctgactttttttatacaagggaaaaataaaactctattttgtataagccactcttatttgtatttttttcttagatgtagataaacctcagctttactgaagcaaatagttttaaggacctgtgttggagtagaggctggatctagaatggagactcagagaaagttctctgtggaaacaatgcttgaattgagctctgacttagatggggtgggtaaggaagataaaagaaaggaaaagagaggagtttttcagaaagagaacatgtgcaagamcctcgagatagaactaagagaattaggcgtgttccaggaggggaaaaaaaaaaagattagtgtgcttggaacacagaaggttagactgagagtgacccaagttgctatttaagatttcagctcattgtatagcggattttttataattcataggtcttacacaactgaagctttatacccattgaacagcaagttagcaatac

SEQ ID NO: 345336 - DNA, 582 bp, Homo sapiens
taataacattgaattcaaattgactaaactatccaatcaaaagatacagartgcctaaatgggtgcaggggaaagactcaatcagctgcctacaagaaacatatttcacttataaagacacacgtagactgaaaataaaggaatgaaaagatattccatgcagtggaagccaaaaaagaccaggaatagctatacttgtgtccgacaaaaatagatttcaagacaaaaactttagaaagaaacaaagtcattatgtaatgacaaaggggtcagttcagcaaaaggatataaaaattgtaaatagatatgtgaccaacactggagtacccagctatataaagcaaataatattagacctacatacaataactggagacttcaacaccccactttcagcataggacagatcatacaggcagaaaatcaaccaagaaacaatggactaaatctgcactatagaccaagtaggcctaatagttacagaacattttattcaacagctgcaaaatacacattcttctcctcagtacattgatcattctcaaggatagaccatgttagttcacaaaacaagtcttaaaa

SEQ ID NO: 345337 - DNA, 582 bp, Homo sapiens
taataacattgaattcaaattgactaaactatccaatcaaaagatacagagtgcctaaatgggtgcaggggaaagactcaatcagctgcctacaagaaacatatttcacttataaagacacacgtagactgaaaataaaggaatgaaaagatattccatgcagtggaagccaaaaaagaccaggaatagctatacttgtgtccgacaaaaatagatttcaagacaaaaactttagaaagaaacaaagtcattatgtaatgacaaaggggtcarttcagcaaaaggatataaaaattgtaaatagatatgtgaccaacactggagtacccagctatataaagcaaataatattagacctacatacaataactggagacttcaacaccccactttcagcataggacagatcatacaggcagaaaatcaaccaagaaacaatggactaaatctgcactatagaccaagtaggcctaatagttacagaacattttattcaacagctgcaaaatacacattcttctcctcagtacattgatcattctcaaggatagaccatgttagttcacaaaacaagtcttaaaa

SEQ ID NO: 345338 - DNA, 540 bp, Homo sapiens
cactagccaacttcccatgaaacttaccttcagctaaatatacctatttgattttgagtttgaatgtagtatgttcaggatattatgaatgagggaaacttcagaacatctgttttaccaatatcatttcaaagggackaaaaactggatatttttcaaaaatcacacaatgcaacatacctttccaatattctatattagaatatctgaagatggggtccataaatcaaatgtttctaaaaatcttcaagtatttcttatcaatccagcactagattgtgaacaagtatttgggaaccacagttccagatgcatttctaacaatttacaattccaaagctcttactagtttagaatggttccactgattttcatccaatttaacgaacatgtattaagcatattttacatgtcaaggttagtgcttgttaggggcttaaaagaagaagcaaacaagattattgccccgaaggagctttcagcttaattgaaagaaagattaataggttaattacatacctataaaggttatgatgagtg

SEQ ID NO: 345339 - DNA, 523 bp, Homo sapiens
tccctcttggcttggtgctatacttgtgatagtgagttattttgagatctaattgcttaaaactatgtggctccccacacctctctgttgctcctgctcttgccatgtaatgtgtctgttcctgcttcacattctgccatgaataaaagctccctgagttctccacagaagctgagcaaatgctggcaccatgcttacacagcatggtgttaattaagcctcttttctttataaattaaccagtctcagatattcattcaaagcaatgcaagaatggtctaacacagaaagtaatcccatttagctacaaataaaataaaatacctaggaataaacttaatcaaagaagtgaaagatctctgcaatraaaactataaaacattaatacaagaaattgaagaggacatgaaaaaggaaagttattctatgctcatggattactagaaataatattgttaaaatgctcatactactcaaagcagtctgcagagattcaatgcaaaccctatcaaaataccaatta

SEQ ID NO: 345340 - DNA, 537 bp, Homo sapiens
ttttttacctacattaggagagagctacagaacttaatattccactaaggtaggtgttttcacatgttctacatcttccttgattcaatttcaatctttggcccacttcagggtgcacaagtattaatagcaaggaaaatgttagcaatatttcatgttctgttggaatctgaccaaatatgattcttcattgtaacactgacagatttgagtatattatgttcttcccaatagaaatcatggtataataaatgggaactttatatcagtattaggtttaccaataattcattagagtttaatattataagtaagagcaacagtgctagtytgcattatttttccgaatgcttaaataagtataacatttgtgttgtctgttactgcctcatttcgtttgccataaaagtgacccttggaggaataaaacagatccacacaatagctcagaattgctggtagtattaatcactgtttagtattgtgactcttattcgtagtaaatagcccagctgtttagccaaatgtttttaacct

SEQ ID NO: 345341 - DNA, 616 bp, Homo sapiens
gtgctacagtgcttgagttttctatctgttggtcatctgtcttctgaagccagtattactcatctctgaccctaaagccttagcagggccataggtcactttataatatgctctcagatggttggcctctttctggccctgtggctttcattctgcatgtacttctrattgtactatgcaacatgtagaggtgtatttctttacaggtgggagtaactaagctgcaataaggcacacaagccaacctcctaatgatctcttttctattaaaaccatgttgttaaatataatacttgtgaaaatagaaatatgaattatcattccttggtacaattttagaatatttgacgaatcaataaacaagaaaactccacttagaaagacctgaaacctcaatcctatgtacattcttaagatggcattacacatagaaatgatctaaaatgcctcaagtattatttcattcagatttttctgcacacatgatactattccatcatcaataaataagagaaagttctatgatacctaatgccaggtctaagaccctacaaagtctctggttttgtcatccaagaagtgctgtgtcagtaaaagtatccaattttggctgaat

SEQ ID NO: 345342 - DNA, 678 bp, Homo sapiens
ctgtgcttgagattcttcactctgcatatgaaaattaactgaattgtaatatgtaaactgcacagtatagtttctggcccagataaattgtttttattgttaattgaacacttactttgtgcccgtcatgattttaatcaatttacatgttttatttcagtcaacagttgcaaagaccctatgaggtttacatgagaagccagaatatagaaataaagcagctttccaaaaagcttaatttaactttattaagtaacaatttggactaaggcagtttgactgtggagtcgatgcttttaaccagtgtaccatgctgcccaagctttctgacctacatcacttctccttattgagtaccactctttcctaaggaaaatgttgctgcaaaatataaaacaattagttcttacagatgcgattgtcaytggtggtgtgcttatcaaaatttcagttttgattgtgaaattaaaaatttcagttttaaattgtgaagacacaatttaaaacgggtaacaaaatcaagagaacatatatgcagtactggaagtatatccttgataattgtatctgaacacacaggtaaaattagggtttttttaattcagatatggaacattctcaaccagtccccctcatcccattatatgtctccttctcccacaaacacacaagtttact

SEQ ID NO: 345343 - DNA, 523 bp, Homo sapiens
accaaactgattatgccacatgcaagcttaacagtgattaatagttccacatttccttctggataaaatacagacttgttaacatggcacctagtaccagatccggctgaatattaacttattaartaaatgaatgaaacttctatagaatgttttctctttcatgcatgccttgaaaagttcacttgtgtatttctatagcagtccttacttatgcttcttatagtacttttatgattgtcaatttacttgtttggcttccatacttgggttttaaattccttaaaatcaaggacagcatcactgattattttatttccagcatatagtatgattccttgtacccagtatgttctaaagtattgagtatatgaatgaatagacagttgttcctgctagggatcagaaagcaaatttagagtgttgtgtagggggttcatttcttgagtattgatcgcaattgatttttgtctaattaggtagagactcgtattcatcagaattgcaagggacatcaattctt

SEQ ID NO: 345344 - DNA, 645 bp, Homo sapiens
ttgcaagggacatcaattcttaagagaaagggtgccargtcaaggaattacactttccagggggttaaaaatggcttagagccatgtgtaaggacttttgtgtgcaagtaacatgatgtagagaatgtataaatgaatggagaacagcatgactgtgggctgctgcgtatggctggatggatggtacacggcacaattctacagacagttttccaaatagataatgatgtgcacagatctacctgaatgtatgtagttttgcaatcctaattgtaaaaaatttcactggagagaataaaatattcttagttgaaaccatggatgagaaatcttggagaaagatagaatatttttaggaagtcttcttacgtgatgtattgtgtaaaactcctgtgacacacttcaggatatagtaaaattttatgatattcttcacagctttcagattcagacatatttctttcaatggaacatgctgacccacaagagctctggaatttatgtgagttacacttatctggacaatttgataataagcatttgaataattattacaaaggtagtttgagacatcagatttttttcttaaaacacaaatatcacctcattagaaaagctctacctaaaatgctttggtatccactt

SEQ ID NO: 345345 - DNA, 645 bp, Homo sapiens
ttgcaagggacatcaattcttaagagaaagggtgccaagtcaaggaattacactttccagggggttaaaaatggcttagagccatgtgtaaggacttttgtgtgcaagtaacatgatgtagagaatgtataaatgaatggagaacagcatgactgtgggctgctgcgtatggctggatggatggtacacggcacaattctacagacagttttccaaatagataatgatgtgcacagatctacctgaatgtatgtagttttgcaatcctaattrtaaaaaatttcactggagagaataaaatattcttagttgaaaccatggatgagaaatcttggagaaagatagaatatttttaggaagtcttcttacgtgatgtattgtgtaaaactcctgtgacacacttcaggatatagtaaaattttatgatattcttcacagctttcagattcagacatatttctttcaatggaacatgctgacccacaagagctctggaatttatgtgagttacacttatctggacaatttgataataagcatttgaataattattacaaaggtagtttgagacatcagatttttttcttaaaacacaaatatcacctcattagaaaagctctacctaaaatgctttggtatccactt

SEQ ID NO: 345346 - DNA, 565 bp, Homo sapiens
gttccagacatactgaggaggttttatggagataatatctgagctttatcttgaatggtggaattaggccaggcagaaatgggagaaaaatgccatccagggcacctgactcgtagaatcaaataacttttcactgcagggaacagaaaatggcccacactgagatctcagtaactgcttttatcatcaaagatcgactattccctcatcaaccccaaatgaactgatttcagtgttgacttgaatgattttagttgacgaatgattcaacatataggacacaaatatttacagagttattggaaatctagaccttattttatcagaggaatgtttaagatactgattattcaaggttggggaactgaaagcacaaaygagtttgccctgggttagtaatataaaaataaataaaagctgctttaaagaaaaagaaaggagagagagaaaatggattggagtgtgttttatctattgtatctttaaatatataaccagaagaagaataaatcatagaatacctctaggcaagaaaaataaaatgaaaatttgttggtataaaata

SEQ ID NO: 345347 - DNA, 673 bp, Homo sapiens
tctctgtcccacctgggacatgattcatccctttgcctagcatatccacaccgtagatgctacttgcctattagtcactaaggagcctggttgttagatcaattgctacagtgcgatgcttgtacaaaagtaacccttattttacctgatgatggccccaaactgtaagagtagtgatgctggcaattcggatacactaaagagaagctataaagtgctttaagtgaaaaggtaaatgttctcaatttaataaggaaaaaaatcatatgctgaggttgttaaggtctgcagtaagaacgaattttctatctctgaaattataraggaggagaaataaattcaggaggaattagaaggagaaatgctggctacttttgccatcacacctcaaactacaaaagttatggccacagcgtgagatgagtgcttagttaagatagaaaagacattaaatttgaaggtagaaggcaaacagaaatgtgttcaattgacagcacttgggtttggtactatttatagttccaggtacctgctgagggtcttgaaacatatttcctgtggataaagggagactactctgagtctaagcagttgaaaaaaggtcttttgtattctttgtagacaagtcactctccaatctttgcctgagaaaatcacagtgcttgtaaaaaga

SEQ ID NO: 345348 - DNA, 551 bp, Homo sapiens
attgtaagaatatcttgagtaacaaatttgcacctgagttttacatgactgtgaaacaactttcaaaccagacaatcctagcacttcaatattgcccaaggactaagaaactaaatagaatttctgaaaggttataaactttggcaggaatgaaggaaatagaggaattgataggagtggactccttgtccttctcagaggtgaccagtccctcatcagtgttacagttggacttactggagaccagccagagcacagtgctttttatcrccaactgggtaattgcatcggtgagaccttgggtacagttacagcaaaaaagtctgaaaaaacaagctagacctctactaagaatgaactgcctagggtaaggtccctttgtcctttgacacaaagtaacttaattttgttgaatctacaacaaaacaacccagctgggatttgattcagatgttctttccattttaaattgaatgtaaacctcaattttaggttttccatgaagacaagcataacacaattttgactatcttactattggggcatcaaac

SEQ ID NO: 345349 - DNA, 561 bp, Homo sapiens
tactattggggcatcaaacatttcagccgctccctatgcccaatttattttcaagtgggatttgattcatcaaaatcccagctgggttgtttgatttgctttgtttgcaaaaatagagaaactgataataaaacgtataagaaatgcacgtgatccagtatactcaaaacactcttgaaaaaagaaaaaagaacagaacccagatgcagattcaaacttgcaaatttcacggaaactaccaagttataataatcaagatagtgtggtactggcataaagatagatatgtagatcaatggaatagaattgagggttcagaaataaacccacacattkatgaacagttgatttttgacaagattgtcaaaacaattcaatggaaaaaggataatctcttcaacaaatatgatggaacaactggatatgcacataaaaaagaatggatttggaacccacctcaatcatacaaaaacttaactacaaatagataacaaattgaactttaagaacaaataactaaaactcctaaaaattaaacaggagcaaatcattgtgaccctg

SEQ ID NO: 345350 - DNA, 458 bp, Homo sapiens
actttatgccttttatctatttcaggatccaactgaagtttctacaatacgctttgtcattatctgtcttcttagggtccacttgactatggtagtttcttagagtttccttgtttttgatgacttcaacagttttgaggagtaccgattaggtattttccagtgtccstcaattgagatttgtctaatgtttatattgtgattagaatggggttatagatacatctgagaatatctttattttccctttgaatcctgaaggatatttccctgtacatataattgtggatttatttgagtttaccctatttgaggtcagttgagctctttggatctgtagatatatgccttttgtgaaactcggaaagtttttagccatatatcttttagtactttttcagttcaaatctctctttgtctagaactacaatgatacaaatattagctctgttattatg

SEQ ID NO: 345351 - DNA, 567 bp, Homo sapiens
gaagcaaggaggagagggagttgggaggatgtgccacacttatcaaacaaccagatatcatgagaatagcaaaggggaagtctgcccccacagctcagtcaccttccaccaggcttagagatgagatttgcatggggaaacagagacaaaccacatcatatgctttgtgaattttttgttgaaaactatacatttaaatctaaaaatctctggaaatcacattctgyccctatcctgggtttgctgtcatttacattgtttctggaggccatttttgagccttcccgtgggtatgcatggttgctttttgattttccccacatatgcagttgtattcaatgtccttctcttcaatttctggctcccaaaacaaaaaaagaaaaatgaaggtaagtggaaaagggtgtcagctgtttcactctcctagaagtcacttcagctaggataggaatttacaacaatgcaggagcatctctttgtctacacctgtgtcagcagaagcagcaatcaggaaccagagcacagattgtagatatttcaaagacaggttcctttttacccaccttc

SEQ ID NO: 345352 - DNA, 568 bp, Homo sapiens
cttcattcttgaactggaaatcttatagaataggttatgtggcttattctccttagagagttgaagaatgtacttctgatcataaatgaatcaaattcccaggttttaaatattctgattctttcttccttttagctctaggagagtcagagatactttccaggatagtggcttgggtataggttgttgatataaggcaggaaaagagatggtattctcagttaacatacctcttaggaccaactgctggtaattgggctaagaaagcaaaaggatggatagagatttaggcaggcggatgatttatgagttatctgacatatggaaaagtggagtcaaagccaaagctaaaatgagagcagttgaaaattacagggcaacgctctcaaggtaggaacaagcagtaaatcagatttagacgcggagggctcagtaccctggatagctctgttggagataaatcattcagatcatatcctgaacctgcctccacattcttttagaaactgmttattaaaagtagcctaggcttttttggacacattttcatggaggatgggatacaagt

SEQ ID NO: 345353 - DNA, 632 bp, Homo sapiens
gccaacaagcataaaaataagtgttcaacatcactaatcattagagaaatgcaaatctagtaataagtgaaaaaataacagatgctgatgaggttgcagataaaagggaatgcttatacactgctattgggcatataaagtaggttagccactgtggaaagcagtttggagatttctcaaagaacttaaagcacagctaacattcaacccagcaatcccattatkgggtatatacccaaaggagtataaattgttctaccataaagacacatgcatgtgtatgtgaatcactgcactattcacaacagcaaagacacacatggaatcaacctagatgccagcaatggtgaactggaaaaagcaaatattgtatatatacaccatggaatactatgcagccgtaaaaaaataacaaaatcatgtgttttgcagcatcatgggtggagctagaggccatacataatactaagcaaattaacacaagaacaggaaaccaaatattgcatgttctttctttaggcgggagctaaacattgagtacaaatggatactaagaagggaacaatagacactggggcttacttgagggcaaggatggagaaactgcctatcagatactatggtcattacct

SEQ ID NO: 345354 - DNA, 578 bp, Homo sapiens
cctcatactccctggtttcaaaatatattgtggaagctattgcaatcaaaagagcatggtactgccagaaaaacagatatatcagccaacggcrtgggtgagacagcctagaaattaactcaagtatttatggttagttgattttcaacaaagatgccaagaacaattgggataggacagtctttaataaactgtgttagccaaactgaatatccacatgcaggagaatgaaattaaacttttatcttatgccacatgcaaaaattatctgaaaatagatagatgccttaaacgtaagtcctgaaactgtaatgttctcagaagacaacataggggaaaagctccatggcactggtctggacaatgattttgttcggataagactccaaaagcacagacaaaaatgcaaaaagtacacaaatgagattgcaccaaactagaaagactctatacagcaaagaaaacaataaacagagtgtgaagataattaactgattgggaggaaatatttgcaaatgatgcatctaaaaaggggctaacagccagaatatacaaggaactcaactcaatagcaagaa

SEQ ID NO: 345355 - DNA, 578 bp, Homo sapiens
cctcatactccctggtttcaaaatatattgtggaagctattgcaatcaaaagagcatggtactgccagaaaaacagatatatcagccaacggcatgggtgagacagcctagaaattaactcaagtatttatggttagttgattttcaacaaagatgccaagaacaattgggataggacagtctttaataaactgtgttagccaaactgaatatccacatgcaggagaatgaaattaaacttttatcttatgccacatgcaaaaattrtctgaaaatagatagatgccttaaacgtaagtcctgaaactgtaatgttctcagaagacaacataggggaaaagctccatggcactggtctggacaatgattttgttcggataagactccaaaagcacagacaaaaatgcaaaaagtacacaaatgagattgcaccaaactagaaagactctatacagcaaagaaaacaataaacagagtgtgaagataattaactgattgggaggaaatatttgcaaatgatgcatctaaaaaggggctaacagccagaatatacaaggaactcaactcaatagcaagaa

SEQ ID NO: 345356 - DNA, 578 bp, Homo sapiens
cctcatactccctggtttcaaaatatattgtggaagctattgcaatcaaaagagcatggtactgccagaaaaacagatatatcagccaacggcatgggtgagacagcctagaaattaactcaagtatttatggttagttgattttcaacaaagatgccaagaacaattgggataggacagtctttaataaactgtgttagccaaactgaatatccacatgcaggagaatgaaattaaacttttatcttatgccacatgcaaaaattatctgaaaatagatagatgccttaaaygtaagtcctgaaactgtaatgttctcagaagacaacataggggaaaagctccatggcactggtctggacaatgattttgttcggataagactccaaaagcacagacaaaaatgcaaaaagtacacaaatgagattgcaccaaactagaaagactctatacagcaaagaaaacaataaacagagtgtgaagataattaactgattgggaggaaatatttgcaaatgatgcatctaaaaaggggctaacagccagaatatacaaggaactcaactcaatagcaagaa

SEQ ID NO: 345357 - DNA, 584 bp, Homo sapiens
caaagtgggattattggatcatatgttagttttatttgtatttttgacaaatctctgtactgttttccatagtggctataccattttatattcccaccaacaatgtacaagtgttctgatttttccacatcctctccaattcttttgttttttataatagccatcctgattggtgacatcacatcatggttttgatatgcaytttttgatgattagtgatgttgagcaccttttcatatatctgttgtccattgttatgtcttctttgtagaaatgtctattcaggtcctctgcccatttttaagatgggttatttggggtttttttttcccattgagttacaggagtttcttatattttttgagtattaaccctcattccaccattttataagttactcttttactcttttgtttcctttgctgtgcagaagctttttacatatacatagtcacacttgcctgttttgttttgttgcctgtgctttttgtgtcgtatccagaaataattcccaagaccaaagtcaagaagctttactatctgaaactataaaactcctagcagaaaacataggggaaatatac

SEQ ID NO: 345358 - DNA, 584 bp, Homo sapiens
caaagtgggattattggatcatatgttagttttatttgtatttttgacaaatctctgtactgttttccatagtggctataccattttatattcccaccaacaatgtacaagtgttctgatttttccacatcctctccaattcttttgttttttataatagccatcctgattggtgacatcacatcatggttttgatatgcactttttgatgattagtgatgttgagcaccttttcatatatctgttgtccattgttatgtcttctttgtagaaatgtctattcaggtcctctgcccatttttaagatgggttatttggggtttttttttcccattgagttacaggagtttcttatattttttgagtattaaccctcattccaccattttataagttactcttttactcttttgtttcctttgctgtgcagaagctttttacatatacatagtcacacttgcctgttttgttttgttgcctgtgctttttgtgtcrtatccagaaataattcccaagaccaaagtcaagaagctttactatctgaaactataaaactcctagcagaaaacataggggaaatatac

SEQ ID NO: 345359 - DNA, 491 bp, Homo sapiens
ggcaagttcttagagaccttcaaagagacttagactaccacacaataatgstgagagactttgacacctgactcacgatattggacatattattgaggcagaaaattaacaaagatattcaggacctgaactcaacactggctcaaagagacctgatagataactacagaaatctccaccaaaaccaacagaatatacattcttctcatcaccacatggcacatactctaaaatcaaccacacaattagaagtaaaacagtcttcagcaaatgcaaaaaaactgaaactgaaaactgagagtctgaggcagtccctgaaaaacaaaaaactgaaaactgagggacagtcataataaatgggcaaaagctggaagcattcccttttaaaactgacaggagaaaaggatgtcttctctcaccattcctattaacatagtattagaatttctgtccagggcagtcaggcaagaggaagaaataaaaggcatcca

SEQ ID NO: 345360 - DNA, 491 bp, Homo sapiens
ggcaagttcttagagaccttcaaagagacttagactaccacacaataatgctgagagactttgacaccygactcacgatattggacatattattgaggcagaaaattaacaaagatattcaggacctgaactcaacactggctcaaagagacctgatagataactacagaaatctccaccaaaaccaacagaatatacattcttctcatcaccacatggcacatactctaaaatcaaccacacaattagaagtaaaacagtcttcagcaaatgcaaaaaaactgaaactgaaaactgagagtctgaggcagtccctgaaaaacaaaaaactgaaaactgagggacagtcataataaatgggcaaaagctggaagcattcccttttaaaactgacaggagaaaaggatgtcttctctcaccattcctattaacatagtattagaatttctgtccagggcagtcaggcaagaggaagaaataaaaggcatcca

SEQ ID NO: 345361 - DNA, 491 bp, Homo sapiens
ggcaagttcttagagaccttcaaagagacttagactaccacacaataatgctgagagactttgacacctgactcacgatattggacataytattgaggcagaaaattaacaaagatattcaggacctgaactcaacactggctcaaagagacctgatagataactacagaaatctccaccaaaaccaacagaatatacattcttctcatcaccacatggcacatactctaaaatcaaccacacaattagaagtaaaacagtcttcagcaaatgcaaaaaaactgaaactgaaaactgagagtctgaggcagtccctgaaaaacaaaaaactgaaaactgagggacagtcataataaatgggcaaaagctggaagcattcccttttaaaactgacaggagaaaaggatgtcttctctcaccattcctattaacatagtattagaatttctgtccagggcagtcaggcaagaggaagaaataaaaggcatcca

SEQ ID NO: 345362 - DNA, 491 bp, Homo sapiens
ggcaagttcttagagaccttcaaagagacttagactaccacacaataatgctgagagactttgacacctgactcacgatattggacatattattgaggcagaaaattaacaaagatattcaggacctgaactcaacactggctcaaagagacctgatagataactacagaaatctccaccaaaaccaacagaatatacattcttctcatcaccacatggcacatactctaaaatcaaccacacaattagaagtaaaacagtcttcagcaaatgcaaaaaaactgaaactgaaaactgagagtctgaggcagtccctgaaaaacaaaaaactgaaaactgagggacagtcataataaatgggcaaaagctggaagcattcccttttaaaactgacaggagamaaggatgtcttctctcaccattcctattaacatagtattagaatttctgtccagggcagtcaggcaagaggaagaaataaaaggcatcca

SEQ ID NO: 345363 - DNA, 345 bp, Homo sapiens
tctattacatatcactggcctakaaatattaactgatgccatcatcaaacctaatctagcattttcagattaaagaaaaaagctctgctagagtagttcgtcttcttgtcaacaatcatataactaaacaaaatatatgaagcaactgtgttcaggcactgcacagcaggcagtagaagagagcactctttgagagctggaaaacggaaggtaagctccattaccggaccagctatcttcctggaaataatattctgaccacagcacagagagccacggtccaagtagagcatggcagtcatgctaagctgagaagtcagctgttaagagttcatgacactaata

SEQ ID NO: 345364 - DNA, 345 bp, Homo sapiens
tctattacatatcactggcctataaatattaactgatgccatcatcaaacctaatctagcattttcagattaaagaaaaaagctctgctagagtagttcgtcttcttgtcaacaatcatawaactaaacaaaatatatgaagcaactgtgttcaggcactgcacagcaggcagtagaagagagcactctttgagagctggaaaacggaaggtaagctccattaccggaccagctatcttcctggaaataatattctgaccacagcacagagagccacggtccaagtagagcatggcagtcatgctaagctgagaagtcagctgttaagagttcatgacactaata

SEQ ID NO: 345365 - DNA, 345 bp, Homo sapiens
tctattacatatcactggcctataaatattaactgatgccatcatcaaacctaatctagcattttcagattaaagaaaaaagctctgctagagtagttcgtcttcttgtcaacaatcatataactaaacaaaatatatgaagcaactgtrttcaggcactgcacagcaggcagtagaagagagcactctttgagagctggaaaacggaaggtaagctccattaccggaccagctatcttcctggaaataatattctgaccacagcacagagagccacggtccaagtagagcatggcagtcatgctaagctgagaagtcagctgttaagagttcatgacactaata

SEQ ID NO: 345366 - DNA, 536 bp, Homo sapiens
  misc_feature (1)...(536): n = A,T,C or G
nnnnnnnnnngttaaaaattgatcatatttgtaagggtctatttttggactctccagtgttccaagatttatgtgtstgcatttttatatcatcatgacttgagtgttataggtttatggtaagtcttaaaaagaaaacactgtcattcctacaactctcttctttttcaatattgatttagctattttagtttctttgcccttccatttaaacattagaatcagcttatttatagctacaaaaaaatcctattgggatttcaattagaattgcattaaatatatagttaatttggagagaattaacagatttaaatgctgagtcatccaatctataaactcagtgttagtcaccatttatttcagtctactttgagttttcagcatgtacatcttgtactttatgtattttgtacttgttttatgtatctctacatattatatatcagagactatcgtagatggtattgtttttaactttaatttgtaattgttcacaactaatgtatagaaatatgattgttttgtatgttgac

SEQ ID NO: 345367 - DNA, 345 bp, Homo sapiens
tctattacatatcactggcctataaatattaactgatgccatcatcaaacctaatctagcattttcagattaaagaaaaaagctctgctagagtagttcgtcttcttgtcaacaatcatataactaaacaaaatatatgaagcaactgtgttcaggcactgcacagcaggcagtagaagagagcactctttgagagctggaaaacggaaggtaagctccattaccggaccagctatcttcctggaaataatattctgaccacagcacagagagccasggtccaagtagagcatggcagtcatgctaagctgagaagtcagctgttaagagttcatgacactaata

SEQ ID NO: 345368 - DNA, 511 bp, Homo sapiens
cccattaggtgggcctgccctttaagagctcagaaatctgttctacaatgtcaaagaaagctgataaagtaaatagagggtttataatccatcattctaattctacgtggagctttgaagtgattgtaaataaagttaatcttatttctactgtacttagcttgkgtcattgccatagttattgtatatttaagtgcattataactaaaaaagtctagttgcttgcaatcatttaaacaattaccagttgaccattgtatcacaagtttaaatataaatggataggaatatgaatttgctacacaggaaacaaaactttatgctggtaatttcctctagcagctacttttatgcctgaaacctggaatagacaactcattttctagcattcaaaacaaaatatctaagaggaagaactcctataaacagtattcttccattactgacaagaaaaaccactgcctttattcgtgatgaaaaccaaagtcaccagagggagaagttgatgctc

SEQ ID NO: 345369 - DNA, 587 bp, Homo sapiens
ttgtagacctaggtctctccagggtttgagtctaatttttttcctattgagcctacatagttcttctagaagttcgtggtacaggggctctccttgtccatacatgaagatgaagcctgcttggaagattttgagatgtgcgctttacttctgccattatccccatctcttcatctgctctcaccctcctgtgtttaccttatttctgtaaacctgaattttcactttctctctagccccttggaatcatgtagaagaactacttgactctgttttccttttcctccaggacatgtcgtgttgtgtagttcctccaggctccacatagtgcaaataggcagcaatgtcatgcacaacatttaggcttggccatggttcctaaggcccaggtccccgataattaggagatggagaaaatttaggaaaaatgttaaatcagaaatgagcaaaataagaaatctggagaaatgagaatattttataatgcactgtttcctmatgacttagatttgttctctattgtcttgctaattaggtagacaaatcctaaatgtaggagatcaaagggagtaaggcatatttaatag

SEQ ID NO: 345370 - DNA, 450 bp, Homo sapiens
cgaaatctgaaggataggtaggaattaatgagaaaagggctggtgagcaggaagtttgaggcaaacatattaagcctctgtagcaggagaaactgaaaaacgaccagatgggctggagaaaagagattttttaaaaagccaaaaacgaaaaaaattctggtacaagtctggagaggcagccagtggrccataccaacaaaccattttgtccttgctaagaatttgggtatttgtcctgggatcaatgggcgggtaaggaatgttttggtttctgtcttgaaaagattatacctaccgtaattccagaaatgaattgtgatggacagtgtcagactgaaaaagaccagttgataggctcttaaaataattccagcaagcgatgatgatggccaggactaggggtcagtggaaggagccaagtggaatggatttggaaacattcttaaactg

SEQ ID NO: 345371 - DNA, 590 bp, Homo sapiens
tgggagcacagtctctgcagctttgtatggagtttggttcactgattttgacctgtgttcaaaactgttctccagtcataagataaacaaaagcacattggcgtttccaaaatgtaggaataaaatgttctatattccaccataactctagttgttcttgtcttatactctggctaattctccattatgtgttttcttctttagcatccctgaccactattctttcgggttttttcccctctccattatcttttttgtctttcttttctccgccttatgtcttaatgttcttctaacaatttgaatacctcatctccctaggattctctcaaacctcaagtctcactcatcacaactctatcctctgagattaccatcctrattagccaaggcggaagctccttttcacaaactctcactttaaagcagacagtgtgaatctctttgacatcaggtaattcagtttacaaggcaattaacatttacataaatgccatttaatacaatgatattttattgtaatttatctcatttttcccatattggttgataatgtccaaatctgtcataattttagagtataacaattc

SEQ ID NO: 345372 - DNA, 562 bp, Homo sapiens
ctgttaattatatgttatattgataaatgtttagatatcaacctgacttctcttaagctagcagataagaaaattggtagagtttgaatctgactcttaatttttaaagaagacagttcctgtactattcaccttttagagcaactaccagattccatataattaatgtatattttataagagtgataatggtctcatcaggagtcttataatttagcaaattggtttcccrtaacttattcttctatttccactaggaaaccatatcgttattttaaattgcaactttttaaagtaaagtaaagtattagcacttgaataatttgtttgttttccctatatagttgcttcatcttgatttattttcttcttttctagctcctctttatcttcaatatttcatctacatcccaaatccattatattttctctcttgagactgctttttgaatttttcttctgttcaatattccatgaatgtgcagagaagtttctggccaaattctctcacaatttattgaaacaaaacaaaataagaaagcggtaaaaatttctgtgttgc

SEQ ID NO: 345373 - DNA, 538 bp, Homo sapiens
tagccaagtccaaactgctgtgggttgggaaataaagaactgagaaaggagagtcagtgaacagagatgactgtttatggcattcagtatttaggatgagagagtacattgagtgagaagtagaggaaaatgggattttgggtggygggtgggggtgggggtgggaataaggacacaagagaatgtccctggaaggctagacaacctggaaaaggagaaaataaagagtgagagagaggatctaagatgggtaaagacaaacacgtagttgaagtatatgggtcgccatggtgaggtagagagaatgtttacaaatgcagaaggttttgagatggatgacaagaaagcccacaaagttgagaaactgggaagtacagcagttaaaggtgatgggccaaggcagatagaagcaggaagaaaagactggaaatgagactgaataaggtttagagaaggagacctggttgttgaagtcactcaagaggaaggcaagagcagaaaaggagaagagaaaaatcttataactaattggtgttac

SEQ ID NO: 345374 - DNA, 560 bp, Homo sapiens
tgcttgaacctgggaggaagaggttgcagtgagccgagatattttgcatcttctcttttattgcaggatttttaagaacttacttttgaaatgctgcagagctgtggtgctgcagaaaatggatattcagcatagtgagacttaactttcaatatgaatttgattgaaatcagatgggaaaacattctggatcattcttccttctcctcttgtctgctggatattayctctataaataaaaataacccctgcaaaatgataatttgcataatgattttcttattgctttttgtaggagaaaaaaaaataacaagaaaatgaccatggaaagtaacaacaactgaaaacggataaaatgaagatgtgtgaaagagcacaagagtgcaaaaccaaaagtatacaaggagtgtttatgcagtaaccactttagaatgcctttcctcatgtttgaagacttctaaactagggcaaggacagatcccagcaactactggaagcataataaaggagaagaatgaggcattttcttctctcatatacagattatatgtaattaggat

SEQ ID NO: 345375 - DNA, 568 bp, Homo sapiens
cccaagtacaaaaaggttagagaacaccaagtagatttaatcyaaagaagactaccttgaatcgtttaacaattaaactcccaaaggtcaaggataaagaaaggatactaaaagaaccaagagaaaagaaacaagtaacatacactagagctccagtacacctggtagcagacttttcagtggaaaccttacacaccaggagagtgacatggcatatttaaagtgctaaagggtggaaaaaaagccttttaccctggaatatatctgacaaaaatatctctcaaacatgaaggagaaaataaagactttcccaaacaaaaactgaaggatttcattaataccagatctgtcctataagaaatgctaaagggagtacttcaatcagaaagaaaaagccattaatgagtaataaataatcacctgaggtacaaaactcgtaagtatacagaaaaacacagaatattctaacattgtaactgtggtgtgtcaactactcttatcctaagtagaatgactaaacgatgaatgaatcaaaaattataatgacaacaaattttcaagacatagt

SEQ ID NO: 345376 - DNA, 568 bp, Homo sapiens
cccaagtacaaaaaggttagagaacaccaagtagatttaatctaaagaagactaccttgaatcgtttaacaattaaactcccaaaggtcaaggataaagaaaggatactaaaagaaccaagagaaaagaaacaagtaacatacactagagctccagtacacctggtagcagacttttcagtggaaaccttacacaccaggaragtgacatggcatatttaaagtgctaaagggtggaaaaaaagccttttaccctggaatatatctgacaaaaatatctctcaaacatgaaggagaaaataaagactttcccaaacaaaaactgaaggatttcattaataccagatctgtcctataagaaatgctaaagggagtacttcaatcagaaagaaaaagccattaatgagtaataaataatcacctgaggtacaaaactcgtaagtatacagaaaaacacagaatattctaacattgtaactgtggtgtgtcaactactcttatcctaagtagaatgactaaacgatgaatgaatcaaaaattataatgacaacaaattttcaagacatagt

SEQ ID NO: 345377 - DNA, 516 bp, Homo sapiens
aggtattaaagcaacaattacagctagctgctgctcctgcctggtgagcaggtaagaaaggctgtgagttagacctgaaaaaaagctgtttagaggcaagtgtgatttaccttaaaatattccattctgcacttgaagtcagcctttaaaaaaatttctctggcttacatcatgttctcagggtacttggttctctcaactggtgtatggtttttctaaggaacagargtagtggtcaagtcaaaccagtatataattatgggttcagtctggattgctgcagagtctaggaagtaaggtgaccttggaagattagaaattagtatttagtgtattctctctttttctggcctctcagagcctggaatgcaagaatagtaggattatttaaagcacagaattggcagggcatggtggctgacacctgtaataccagcactttggaagaccaaggcaggtggatcacctgaagtcaggagttcgagaccagcctggtcaacagggtgaaaccccatc

SEQ ID NO: 345378 - DNA, 606 bp, Homo sapiens
acctccaggtaaatatatctgttaaggactagcatatggggcttgaagtctaggagtgaattccagacatgaattgaaaccatgatcttgggagatayaaccctgtgagaacatgtggaaacataatgaatagaaaatacaatacagaatcccttttttattcctttgtagtgatcatctagtttgttttcaatttgttgcaactgactatatatttcaaaatatatagtcactttttatatatgattagtaaaatgaattaaaaatgatttacatcagacttagatgaggtacctcttctaccaatcttttatagtcattcaatatggcgttataagaaaaatgaggtcatgtatgtacatacagtttaaattgctaggtagggtttgggatctaatttctgcctatcaattgcctggttcaaattttaccaggccactagaattaacattccctttatgtccagggattcaaataaatcattaataccatcagcagacttactcaggcatcttcagtattactgccaaggcacttacccatgctaagtaagtcccttacctgcagagaggcaatggcactagttacattaaatgcaaaggaggc

SEQ ID NO: 345379 - DNA, 499 bp, Homo sapiens
gtcactgtcgactaaaatttcatgtaaacagagtcaataccataagtatatttgtgtctggcttattttattgagcatggtgttttggtattcatccatgttgtgtgtttgaagcagtttgttctttattgctaagtagcattccaccgtatgagaatgccactttcatttgttcacctgagaaaattcatggggtcaaataatagctaggcttttagtgtgaggttcgawgtttatctggttagaagtaggcagtggttagctgtacagtggttgctgtagctctggtatcagtggctgaaatctgctctgttatcccttttttgactccctgttttctttgggttttcttaaagactccttaaatagtcttaggcttagaattctttagctgtaatcccttcctgttattatataggagccctactgatgtgaaggggggggggaagcaatctacagtccagtgattagatcttttagtgagcccgagttagatatt

SEQ ID NO: 345380 - DNA, 448 bp, Homo sapiens
agtggtgcactcttggctcactgcagccttgacctcccaggytcaagcaatcctcctgccccccagatagctgggactacacatgcacaccaccatgcccagcaaatttttgtattttttgtagagatagggttttgctgtgttgcccaggttggtctcaaactcctgagctcaagtgatccacccacatttgcctcctaaagggctgggattataggcatgagccactgtacctggactaccatactcttttgattactacagcttggtaatgtactttgaaatcaggcagtgcgaggctttcagctttgttcttatttctcaagattggtttggctattggtggtttttgtggctccatataaacttcagaatatttttctatttatgtaaaaatgccattggggttttaatatagagattgctttgaatctatagatctctttgg

SEQ ID NO: 345381 - DNA, 448 bp, Homo sapiens
agtggtgcactcttggctcactgcagccttgacctcccaggctcaagcaatcctcctgccccccagatagctgggactacacatgcacaccaccatgcccagsaaatttttgtattttttgtagagatagggttttgctgtgttgcccaggttggtctcaaactcctgagctcaagtgatccacccacatttgcctcctaaagggctgggattataggcatgagccactgtacctggactaccatactcttttgattactacagcttggtaatgtactttgaaatcaggcagtgcgaggctttcagctttgttcttatttctcaagattggtttggctattggtggtttttgtggctccatataaacttcagaatatttttctatttatgtaaaaatgccattggggttttaatatagagattgctttgaatctatagatctctttgg

SEQ ID NO: 345382 - DNA, 448 bp, Homo sapiens
agtggtgcactcttggctcactgcagccttgacctcccaggctcaagcaatcctcctgccccccagatagctgggactacacatgcacaccaccatgcccagcaaatttttgtattttttgtagagatagggttttgctgtgttgcccaggttggtctcaaactcctgagctcaagtgatccacccacatttgcctcctaaagggctgggattataggcatgagccactgtrcctggactaccatactcttttgattactacagcttggtaatgtactttgaaatcaggcagtgcgaggctttcagctttgttcttatttctcaagattggtttggctattggtggtttttgtggctccatataaacttcagaatatttttctatttatgtaaaaatgccattggggttttaatatagagattgctttgaatctatagatctctttgg

SEQ ID NO: 345383 - DNA, 477 bp, Homo sapiens
gggcggttaaatgaggatgtgataagaattattaccccttcgactctcgtcttctatgagggcattattttctgttgtattcccacagataaagcagtggctctggcttacatgctgataaagaagagaaattccttgggcttctacagaaataaaaaccacaaatacccacactctacagatcagggaaccaagtgatatagtttgagtgttttgtcccttccaaacctcatgttgaattgtgatctcccatgttggaggtgggcctagtgggtggtgtttgggtcatgggggcagatcccccatgaatggtttggtgcagtcctcaccacaatgagtgagttttcacgttatcagttcacacaatatctggttrtttaagaaagcctggcacctcctccctctctctcttgctccttctctcgcctgtggctcgcctttgcctttcaccatgattataagctcctgaggtcctca

SEQ ID NO: 345384 - DNA, 482 bp, Homo sapiens
aaagcccagagctgcatagcttcatgtgttcattccaccaaacatttaaggatgaactaataccaatccttctcaaactcttcaaaaaaaaaaaaaaaaatgaacaggagggaacaattccaaactcaatttattaggccagcattagtctaatatcaataccaggaaaagacagcacaagaaaaccagaggccaatatccctgaataatatagacacaaaaattctcaagaaaatgctaccaaagcaaatccasccacacattaaaaggattatacattgttgctaagtaatatttatccctgggatacaaatatgattcaacatatgaaaactaatatgatacattaatggagcaaatcatgaaaatcatatgatcattgcaatagatacagaaaaagtgttaggcaaaattcaacattctttcataataaaaactcttgataaactaggaatagaagaaaattacttcaagataataaa

SEQ ID NO: 345385 - DNA, 482 bp, Homo sapiens
aaagcccagagctgcatagcttcatgtgttcattccaccaaacatttaaggatgaactaataccaatccttctcaaactcttcaaaaaaaaaaaaaaaaatgaacaggagggaacaattccaaactcaatttattaggccagcattagtctaatatcaataccaggaaaagacagcacaagaaaaccagaggccaatatccctgaataatatagacacaaaaattctcaagaaaatgctaccaaagcaaatccacccacacattaaaaggattatacattgttgctaagtaatatttatccctgggatacaaatatgattcaacatatgaaaactaatatgatacattaatggagcaaatcatgaaaatcatatgatcattgcaatagatacagaaaaagtgttaggcaaaattcaacattctttcataataaaaacycttgataaactaggaatagaagaaaattacttcaagataataaa

SEQ ID NO: 345386 - DNA, 317 bp, Homo sapiens
cagtggggatccatactggggatggcttgctgactggtagggaatttgtccctttcttcggctgtcattctatcatttacttgactaagataccaggtatctccaaactctcaggctgcagctaaagccgcattcttttcattaaaggccagggtttgatctaacartagcatgacatctctccaagcgaggtcgaaggtttgccctagaccctgtaggacatctgtgtacctatcaggatcatctgaaaacttccccaggtctgccttgatctgctttaagtcagagaaggagaaggggacatgtacccgggttgg

SEQ ID NO: 345387 - DNA, 579 bp, Homo sapiens
caggatcacttgagcctgggaggtgaaggctgcagtgagccatgaccaagctactgcactccagcttgagcagcaaagcaagattctgtctcaacaacaaacaaacaaaaaaacagaacaaaacaaaaaacaaagagagggaacattccttytatgtcacaggttacgaaaaaaaaaaaaaagggaacatggtgaattgtttctaaaacattttcctggaagtaacacaaatgactttttgtcatatttagttggccaaaacaagtcttaaacctgatttcaatggaatttggaattataattttaatcagatgttggtaagcacttagatagtctgccatactcctattatataaagtccttagcttggcaacaattgatatccactggggttttgcgtcacatctgggatgaaatccttcagcatttgtatgtacttttccattaggatctaggcactcattcacagctccatttttctaaccatctctccacgagtttatctaaccgacatattttcagccaattcttgtgtaagtaattgggcatacagggataaataagacacaaaacctgtcc

SEQ ID NO: 345388 - DNA, 615 bp, Homo sapiens
attcatttgtgtgtggatgtattttgtccatgttattttgaagcaaatctgagacattatacaattgcccccaaattggkatagtatatatgtttacaaaataaggactccttaaaaaatattatcattaccataccttaaaaagttactcctaattctttaatgtcatcaaatattaaggtagtattcaaatttccattttccataaatgtcactttttaacagtttgtttgaataaggtccacaccttgtgacaggttgacatgtattttaaggctcttaaaatctaatgtatactttcctccttcctcttcctctctcttttcccctcgcaactatctcttttgtcctttatagtttcccatgagtgattatatccacgttatatttaaaaatgtttccctgtcctctttatttcctgtacattggcagttggatctcaagatgtggtcagattcagcttcaatattttttggcaagactcttccaaaggaggcatgtaaagtctggctgtctctcttttttgtgacattggtgttccttgtcaatgttgattaatcaggggttacaaaatggcaacattctaattctattgctcctttctgattcaatata

SEQ ID NO: 345389 - DNA, 615 bp, Homo sapiens
attcatttgtgtgtggatgtattttgtccatgttattttgaagcaaatctgagacattatacaattgcccccaaattgggatagtatatatgtttacaaaataaggactccttaaaaaatattatcattaccataccttaaaaagttactcctaattctttaatgtcatcaaatattaaggtagtattcaaatttccattttccataaatgtcactttttaacagtttgtttgaataaggtccacaccttgtgacwggttgacatgtattttaaggctcttaaaatctaatgtatactttcctccttcctcttcctctctcttttcccctcgcaactatctcttttgtcctttatagtttcccatgagtgattatatccacgttatatttaaaaatgtttccctgtcctctttatttcctgtacattggcagttggatctcaagatgtggtcagattcagcttcaatattttttggcaagactcttccaaaggaggcatgtaaagtctggctgtctctcttttttgtgacattggtgttccttgtcaatgttgattaatcaggggttacaaaatggcaacattctaattctattgctcctttctgattcaatata

SEQ ID NO: 345390 - DNA, 514 bp, Homo sapiens
aagtcactccaaatgtcaaatgtcaaattgatatttgtgtgtgcatctgtactggaacttgaaacacatagatgactactatgaagttagcctctcagcctcatcttctyttgtgtaagatgaacttaatcaaacctaccaagctaaattattttgatgattaaagtaaattataaatgtaaagtttattgcgtatattaggcaaatctcagtcctagaatcctacaactctgccaggaaatataaagaaaacctcaatttaaaaattagtagaaccatgaatgggcaattcgttgaagaaaaatatatgtagccagtgaaacaaaaagaaacatagcatcactagtaatcaagacatttcaatgaagatgagaacactattcttttatcttaaattgcatatgatttatgttgtggtgagataggttctctcataacctgctaataggggtataaattgatttagttttttagaaagcaatatcaagaaccttcaaaaagatttttttcaaat

SEQ ID NO: 345391 - DNA, 514 bp, Homo sapiens
aagtcactccaaatgtcaaatgtcaaattgatatttgtgtgtgcatctgtactggaacttgaaacacatagatgactactatgaagttagcctctcagcctcatcttcttttstgtaagatgaacttaatcaaacctaccaagctaaattattttgatgattaaagtaaattataaatgtaaagtttattgcgtatattaggcaaatctcagtcctagaatcctacaactctgccaggaaatataaagaaaacctcaatttaaaaattagtagaaccatgaatgggcaattcgttgaagaaaaatatatgtagccagtgaaacaaaaagaaacatagcatcactagtaatcaagacatttcaatgaagatgagaacactattcttttatcttaaattgcatatgatttatgttgtggtgagataggttctctcataacctgctaataggggtataaattgatttagttttttagaaagcaatatcaagaaccttcaaaaagatttttttcaaat

SEQ ID NO: 345392 - DNA, 592 bp, Homo sapiens
gaatgggcaattcgttgaagaaaaatatatgtagccagtgaaacaaaaagaaacatagcatcactagtaatcaagacatttcaatgaagatgagaacactattcttttatcttaaattgcatatgatttatgttgtggtgagataggttctctcataacctgctaataggggtataaattgatttagttttttagaaagcaatatcaagaaccttcaaaaagatttttttcaaataagtaattctatttctctaatctatcttaaggatctaaatataattgtttatagttgttgacctcaatgttagttataatagtgaaaaatggaaataactgaattactcaaaatatgtgaaaagttaagtaaattatgatgcactttcaaaatattataatgtacctataaaattaaatgtataaaattatctactgacataggaaaatgttcttctaartgaaaaggtgagctaacaagctttattttttatattgtagctttgttttaaaattatattttatgtattgatatgcttttattttgctagtaacagaccctgattcaaactgacttaaataatacagaagatttatt

SEQ ID NO: 345393 - DNA, 632 bp, Homo sapiens
atgacttataattttataattagtatctataatatgccaagcactgtgctaattgcatggcatctgtaatttcatatcacatatctttataatgacttggaagtccattcccattcatctctacgttatggaagagaacactgaggccaagaaaggctaagtttttgcccaatgtcacatagctaccaagtagaagagctgctactgaactcagccacgtgagattctccagatcrtacaacgggctacattcatgctagaaagcccctcgctcccattaccatgaatctgtgaatgaataaaataataacaactgtcaattttggtgaaaataaagtagtaagcattttaatattattgaaagtgatgataaatttagaccctatagcctggagacctagatatgtccaaatcctgtctaaggccaattacataatcttataaggagagtgatatgatcaaggaaagaaagaaaagtgatgtttattagttggtggggcttggtcctaaaccctaaagttgaagtctagtagggtgggctgggttatataagtcaggggccagcaaaatttttcagtaaaggaaaatataataaatatttgtggtcttgcaggccatatggtctcctgcag

SEQ ID NO: 345394 - DNA, 632 bp, Homo sapiens
atgacttataattttataattagtatctataatatgccaagcactgtgctaattgcatggcatctgtaatttcatatcacatatctttataatgacttggaagtccattcccattcatctctacgttatggaagagaacactgaggccaagaaaggctaagtttttgcccaatgtcacatagctaccaagtagaagagctgctactgaactcagccacgtgagattctccagatcgtacaaygggctacattcatgctagaaagcccctcgctcccattaccatgaatctgtgaatgaataaaataataacaactgtcaattttggtgaaaataaagtagtaagcattttaatattattgaaagtgatgataaatttagaccctatagcctggagacctagatatgtccaaatcctgtctaaggccaattacataatcttataaggagagtgatatgatcaaggaaagaaagaaaagtgatgtttattagttggtggggcttggtcctaaaccctaaagttgaagtctagtagggtgggctgggttatataagtcaggggccagcaaaatttttcagtaaaggaaaatataataaatatttgtggtcttgcaggccatatggtctcctgcag

SEQ ID NO: 345395 - DNA, 574 bp, Homo sapiens
tttgcaccttattttctctttgcccaaataaagaatacttgatattccagatcaattattttatgagtaatcacaaatatttctaatattcattgggtgcttgctatatgtgcagtactcagctatttatggtacttrttactcataacaatcttatggggtacatactctcattatcccgatttgacagattagtaaactgaggtgcagacaggcaagtgattcttccagagagtaggtaaatggcgtacctgagatatgagcccagtggtctgtccccgcaaactgtgctcttagtcacaacactactttttcagtatttgaacaaaacattcaagagcaaaacattctggcagatgcacagcaggtggtggggcaaaaagggacccggatggggatcaagaggctcacaagatagtctcagctctgccgcttagttttcaatgctggacaggtcctcatttattttcatttgttcaacaagggaggtggactagatgttctttaagattctgtctagttttaacattctgtgatcagtgacagaagatgttaaatagatcatgttgattgt

SEQ ID NO: 345396 - DNA, 517 bp, Homo sapiens
aaatcttcagttatgcaaggaataagttctagagacttaatgtacagcatggaatctatagataataataccgattttatacttaaaatttgctaaaagagtagatctcaagtgttgtcactgtcacagaaacaaatagtaactacacgaggtgatggatatgctaatttgcttgattggggtaatcatttcacaatgtatacatacatcaagacatcactatgtgctccataaatatatgcaatttttatttgtcaatcttacctcaataaagctrgagggaactaaaacaaaaataaaggcatatgcagttttttaaacaaagtaagatacatcctctttcttaggtaacaaatgttgagattttcccatcaagcctttggacaaactcatgcattgaaaaagtcagcccatcatctcaagagaaggttatgggtcaaatgttgaagtaggttcttggcttccgaccaagtcatagttaggagatgaggcttattttctttctttaaaatctgtc

SEQ ID NO: 345397 - DNA, 551 bp, Homo sapiens
cataaatatatgcaatttttatttgtcaatcttacctcaataaagctggagggaactaaaacaaaaataaaggcatatgcagttttttaaacaaagtaagatacatcctctttcttaggtaacaaatgttgagattttcccatcaagcctttggrcaaactcatgcattgaaaaagtcagcccatcatctcaagagaaggttatgggtcaaatgttgaagtaggttcttggcttccgaccaagtcatagttaggagatgaggcttattttctttctttaaaatctgtcttgggaccatgaaatggaaaccaagcttgaaggtgaggagggcccagggtccctcctccatgagcttgagaatgctatgagcactccccaaactcagtgcttgtgtctagtccttctgagggatacggtctccccgggattgaggaaaaccacgggaaagtgtgccctccctccatcaaaccaaccaaagagaaaagagcaaacacactgaagtagctaccacctgcctccaaacatggtgaactcccattcattcttgcccc

SEQ ID NO: 345398 - DNA, 609 bp, Homo sapiens
ccttcatttctatttcttgtcaaattgctctggctaggactcccagttctatgttgaatagaaatgactagagcgggcatccttgccttcttccctatcctacagggaaagttttcagcttttcatcattgagtatgatgttagccatgggcttttcacatacrgccttcaaattggtgagttaaaatccttcttagtcctagtttgttgagagaatttttatcatgaagcagtgttgaattcagccaaatgatttttctgtatcaattaagatgatcatatgatttctttccttcattctattaatgtgctgtatcgttgtatcacattaattaatttttgtatgttagacaattcatacatttcaaggataaacccaacttggttatggtgtatgatcctaaaactactcgggaagctgaggcgggaggatcacttgagcctaggaggtagagactgcagtgagttgtaattgcaccactgcactccagcctgggcaacagagcaagaccttgtccaaaagagagagagaaaaaaaaagaaaacagaaaaagagagaaagagagatgaccaatggaacagaatggataacccaggaataaagccatg

SEQ ID NO: 345399 - DNA, 609 bp, Homo sapiens
ccttcatttctatttcttgtcaaattgctctggctaggactcccagttctatgttgaatagaaatgactagagcgggcatccttgccttcttccctatcctacagggaaagttttcagcttttcatcattgagtatgatgttagccatgggcttttcacatacagccttcaaattggtgagttaaaatccttcttagtcctagtttgttgagagaatttttatcatgaagcagtgttgaattcagccaaatgatttttctgtatcaattaagatgatcatatgatttctttccttcattctattaatgtgctgtatcgttgtatcacattaattaatttttgtatgttagacaattcatacatttcaaggataaacccaacttggttatggtgtatgatcctaaaactactcgggaagctgaggcgggaggatcacttgagcctaggaggtagagactgcagtgagttgtaattgcaccactgcactccagcctgggcaacagagcaagaccttgtccaaaagagagagagaaaaaaaaagaaaacagaaaaakagagaaagagagatgaccaatggaacagaatggataacccaggaataaagccatg

SEQ ID NO: 345400 - DNA, 609 bp, Homo sapiens
ccttcatttctatttcttgtcaaattgctctggctaggactcccagttctatgttgaatagaaatgactagagcgggcatccttgccttcttccctatcctacagggaaagttttcagcttttcatcattgagtatgatgttagccatgggcttttcacatacagccttcaaattggtgagttaaaatccttcttagtcctagtttgttgagagaatttttatcatgaagcagtgttgaattcagccaaatgatttttctgtatcaattaagatgatcatatgatttctttccttcattctattaatgtgctgtatcgttgtatcacattaattaatttttgtatgttagacaattcatacatttcaaggataaacccaacttggttatggtgtatgatcctaaaactactcgggaagctgaggcgggaggatcacttgagcctaggaggtagagactgcagtgagttgtaattgcaccactgcactccagcctgggcaacagagcaagaccttgtccaaaagagagagagaaaaaaaaagaaaacagaaaaagagagaragagagatgaccaatggaacagaatggataacccaggaataaagccatg

SEQ ID NO: 345401 - DNA, 648 bp, Homo sapiens
tcaaaaaccaaccaacgaacaaaaaaaagaacaaagaacttcaatagacatttgtccaatgacatacagatgaccaagaggtatatgaaaagatgtttatcatcactaaccatcaaggaaatacaaatcaaaaccatataagatatcaatttacacttgttacaatggccgttttcaaaaaaacaaacaaacaaaaggtaaaaggtagcaagtgttggcaaagacatggagaaatgagactttygtatattgttagtgggaatgcaaaatgtttcagctgctatggaaaacagcatgaaggtttctcaaaaagctaaacatagaataccatattccagcaattccatttctaggtattcatccaaaagaattgaaatcaggttctcaaagagatgtttacactcccacattcattgcagcattatttgcaagagccaagatgtggaaacaacctaaatgttcattgatggataaaagatggataaagaaaatgtaataaatgcgtgtgtgtgtgtgtgtgtgtgtgtgtggtttatttacatatacatataatggaatattgttcagccttgaaaaagaagaaaccctgcaatattcatcaatgtggatgaacctggaagacattatgctaagtgaaataagccagtc

SEQ ID NO: 345402 - DNA, 648 bp, Homo sapiens
tcaaaaaccaaccaacgaacaaaaaaaagaacaaagaacttcaatagacatttgtccaatgacatacagatgaccaagaggtatatgaaaagatgtttatcatcactaaccatcaaggaaatacaaatcaaaaccatataagatatcaatttacacttgttacaatggccgttttcaaaaaaacaaacaaacaaaaggtaaaaggtagcaagtgttggcaaagacatggagaaatgagactttcgtatattgttagtgggaatgcaaaatgtttcagctgctatggaaaacagcatgaaggtttctcaaaaagctaaacatagaataccatattccagcaattccatttctaggtattcatccaaaagaattgaaatcaggttctcaaagagatgtttacactcccacattcattgcagcattatttgcaagagccaagatgtggaaacaacctaaatgttcattgatggataaaagatggataaagaaaatgtaataaatgygtgtgtgtgtgtgtgtgtgtgtgtgtggtttatttacatatacatataatggaatattgttcagccttgaaaaagaagaaaccctgcaatattcatcaatgtggatgaacctggaagacattatgctaagtgaaataagccagtc

SEQ ID NO: 345403 - DNA, 636 bp, Homo sapiens
gccatgaaaatctggggattcagttgttagcgcagtgtaacttagctacactgactgctacagaggggaaataaagcagttatgcacagattaaaaaaaaaaagagtaattcaggcagaaggtacttcagggttttggaatcagayttaagttaaaatccaactacttactgtgtgccaggcagtacgccaagatacatgacgctgaatgagaattcctgctctcaggaagcttataccttttggaatatttattcaagttaaaaaatgataccttaactacttctgtcgcccaagagagtgacacttttgattctgctaaatgactttatattgaatcaagatgagttaatttgagtatttcttccagagatttcaaatttggttaaagatattctggttacacctgatctattattgtagaaaatgttaactgaagattctattggacggacatcaacaacttcgaatgtgtaatgagtagaaagaaaaaaatagccttcagtagaatagggaggaattcttcaaagaaaactaacatatgagctagggagattgtcctcatgtctttccagattctggctccaattctgtcctaaggcccagctgttttcttcttcttgggtagcttacatga

SEQ ID NO: 345404 - DNA, 570 bp, Homo sapiens
tttttattcagtcctgtcttctctttaggccaaactgggccaccaaagctcctgacatcaaccacactaccatttccattgcwccatataagggcttgctgggtttgccctctgggtgtgccgggtatttagagaaatgtgtttggcaatattctcctgatatctgcagctctgagcatcttttccctgtgcttcctcatcttatttgatcttcactgcatgtggcagctattctctatatattgtggtttagggttatggatgtcccttggtttcatcagaagtggacagctcctttctttccaggtggtctttgttgctgtgagggtgatctccaagaggacaaagaagaaatactctctatattcactattttaaaactagaaatcacaagaaatatgattagtaatttacttttaagaagataaatctgaccacagtatgtagcaagaggcagggtatattagtttatcagggttctccagataaacagaaccaatagaacagatgaaagaagagagagggggatgttaaagtattggttcatgtgattacagaggctgaaaagct

SEQ ID NO: 345405 - DNA, 525 bp, Homo sapiens
caacagacttggagtctctctcaaagaattaaactgggtcttgatcaagaaaaatytcctatctccagagtacaagacagagcaatatttgtctggcgagatttcagaattgctatggaccgcaactactacaagcctcccatcattttcacttttatggttgtcttttcctgtcttaccatagtctgttgggtgtgtgggggtcagatgtttcttttaggttaaggtctccagattactgatacccacattcaaagaaccatacctaagaaggctcttctatatctggatgtgatgtagatcatgaagtcctagataatcttaaaattaatacataatatagatgtacatattttagaaatacatgagatattttcatatattcatataatgggtaaagattaaataaaggtaattgggatatccatcatctcgaatatttatcttatccctatgctaggaacattcaaattattctacctattttgaactgtacaacaggttgttaactatagtcatcctact

SEQ ID NO: 345406 - DNA, 525 bp, Homo sapiens
caacagacttggagtctctctcaaagaattaaactgggtcttgatcaagaaaaatctcctatctccagagtacaagacagagcaatatttgtctggcgagatttcagaattgctatggaccgcaactactacaagcctcccatcattttcacttttatggttgtcttttcctgtcttaccatagtctgttgggtgtgtgggggtcagatgtttcttttaggttaaggtctccagattactgatacccacattcaaagaaccatacctaagaaggctcttctatatctggatgtgatgtagatcakgaagtcctagataatcttaaaattaatacataatatagatgtacatattttagaaatacatgagatattttcatatattcatataatgggtaaagattaaataaaggtaattgggatatccatcatctcgaatatttatcttatccctatgctaggaacattcaaattattctacctattttgaactgtacaacaggttgttaactatagtcatcctact

SEQ ID NO: 345407 - DNA, 561 bp, Homo sapiens
acttggtttatgtcttatttcaacttaacaagcgctatcgatcccatgctacatcaaaagcactctgctacgttatcatgggagacaccaagataaagagcaccatcctgccctcaagggccccaagtgggtcaaaaaaaatagacaagtgtgtaataaagggcagaatgagatcagtgctataaaagaaataaaacgagaagatgaagaaaatacaagtaatgacttacagctgggaagaatcagatattacttcataatgaaagaccaatccttttaaaaattacaaaaaaataattgatctaacatatgtagagaaggatgagcattccaggaagaatcaagggcacaaaggagaggtctgctcaagggataygcaagctcaaaagtcaagggaggcattgagaggtgacataaggatagaaacagatagaaataatgttaagaacagaggcttgagaattaaacactggagtccaagccctgaacctatcacttactctgtgaccttcagcaagttcacacaacacgtgtttatatgtgctaccctagatcagacat

SEQ ID NO: 345408 - DNA, 632 bp, Homo sapiens
aataatacctatgtcgtgagactgaagtttaaaaataacacatataaagctcctaggatagagtcgacctatagaagatgcttaatgcaaaggactggtggtgatggtgattgagataaaaaagtgagggtaaccggagggaagaaactataaaatccttaaaaaaaataggtcagcccacgacttttttcttctttatatttccagggtttggacagtgccttgcatagaggagatagtgtatctctgtcttttcaggatcctrtattatggcttggcaaactacatctcacagaccaagctggcccaccatttatttttgttaataaagctttattggaacacagccatgcctgttcatttatacattatctatggctgtttttgcactacagtggcagagccaagcagttgtgacggagacttatggccaacaaagccaaaacgattggctattgagcccttcacaaaaaaggtgtgtctccctttaaattataatttggattgaaacacaccaaatgtgaaaatctccaatatcccctcctggatcaaaaacattctgtgatttttctgagttcccaactccaagcttacgtcttgcatattaccttctataattgacctcacccagc

SEQ ID NO: 345409 - DNA, 632 bp, Homo sapiens
aataatacctatgtcgtgagactgaagtttaaaaataacacatataaagctcctaggatagagtcgacctatagaagatgcttaatgcaaaggactggtggtgatggtgattgagataaaaaagtgagggtaaccggagggaagaaactataaaatccttaaaaaaaataggtcagcccacgacttttttcttctttatatttccagggtttggacagtgccttgcatagaggagatagtgtatctctgtcttttcaggatcctgtattatggcttggcaaactacatctcacagaccaagctggcccaccatttatttttgttaataaagctttattggaacacagccatgcctgttcatttatacattatctatggctgtttttgcactacagtggcagagccaagcagttgtgacggagacttatggccaacaaagccaaaacgattggctattgagcccttcacaaaaaaggtgtgtctccctttaaattataatttggattgaaacacwccaaatgtgaaaatctccaatatcccctcctggatcaaaaacattctgtgatttttctgagttcccaactccaagcttacgtcttgcatattaccttctataattgacctcacccagc

SEQ ID NO: 345410 - DNA, 612 bp, Homo sapiens
ccagcttaacttctaaattagcattcaactcagaaattccagtactccaagcattcacaaagcaacggtattagtctattttcacgctgctgatacagacatacccgagactgggcaatttataaaagaaagaagtttaattggacttacagttccatgtggctggrgaagcctcataatcatggcagcagccatagagaagcaggcaaaacggaggaggcaaagagagcttgcgcgggaaaactccaccttataaagccatcagatctcgtgagacttattcactgtcaggagaacagcatgagcgagacctgcccccaattcaattatctcctaccggatccctcccacaacacgtgggaattataggagtataattcaagatgagatttcggtggggacacagccaaaccatatcagtaactgatagttacagataccagtttaacaaacctaggtcaggaccacttaccagctatgtgacaatgaggcatcctaagtgcttctctcttcattagagaagaaattcttcccagaaacatcctgaaacttcttctttagccctactggcctgtgcagacttatatgttcttgccatatctgcaaggggag

SEQ ID NO: 345411 - DNA, 612 bp, Homo sapiens
ccagcttaacttctaaattagcattcaactcagaaattccagtactccaagcattcacaaagcaacggtattagtctattttcacgctgctgatacagacatacccgagactgggcaatttataaaagaaagaagtttaattggacttacagttccatgtggctggggaagcctcataatcatggcagcagccatagagaagcaggcaaaacggaggaggcaaagagagcttgcgcgggaaaactccaccttataaagccatcagatctcgtgagacttattcactrtcaggagaacagcatgagcgagacctgcccccaattcaattatctcctaccggatccctcccacaacacgtgggaattataggagtataattcaagatgagatttcggtggggacacagccaaaccatatcagtaactgatagttacagataccagtttaacaaacctaggtcaggaccacttaccagctatgtgacaatgaggcatcctaagtgcttctctcttcattagagaagaaattcttcccagaaacatcctgaaacttcttctttagccctactggcctgtgcagacttatatgttcttgccatatctgcaaggggag

SEQ ID NO: 345412 - DNA, 612 bp, Homo sapiens
ccagcttaacttctaaattagcattcaactcagaaattccagtactccaagcattcacaaagcaacggtattagtctattttcacgctgctgatacagacatacccgagactgggcaatttataaaagaaagaagtttaattggacttacagttccatgtggctggggaagcctcataatcatggcagcagccatagagaagcaggcaaaacggaggaggcaaagagagcttgcgcgggaaaactccaccttataaagccatcagatctcgtgagacttattcactgtcaggagaacagcatgagcgagacctgcccccaattcaattatctcctaccggatccctcccacaacacgtgggaattataggagtataattcaagatgagatttcggtggggacacagccaaaccatatcagtaactgatagttacagataccagtttaacaaacctaggtcaggaccacttaccagctrtgtgacaatgaggcatcctaagtgcttctctcttcattagagaagaaattcttcccagaaacatcctgaaacttcttctttagccctactggcctgtgcagacttatatgttcttgccatatctgcaaggggag

SEQ ID NO: 345413 - DNA, 467 bp, Homo sapiens
cacaaacactccatccaaggatcagcagcytcaaagacaaactcacaaagatgagaaagaatcaatgaaaaaaatgctgaaaacccaaaaggtcagagtgtctcttctcctgcaaatgatcacaatatctctccatcaagggcacagaactggacggaggatcagatagacaaattgataaaagtaggcttcagaagatgggtaataaaaaactacgatgagctaaaggagcatgttctaacccaatgcaaagaagctaagaactttgataaaaagttaaaggacttgctaactagaataaccagtttagagaggaatataaacgacctgatggagctgaaaaacacagcatgagaacttcgtgaagcatacacaagtatcaacagccaaatcgaccgagtggaagaaaggatatcagagtctgaagtccacttactgaaataagacatgcagatgacaatggagaa

SEQ ID NO: 345414 - DNA, 560 bp, Homo sapiens
tgaggaaatttcagcacgaagaagttaaattgtttgttgagggtcacgtggctaataagtcaaagagctggaatcatcccaggtcctctgggccttggtttcccatttatagaaggtggctctatctcagagaggaggacctcaaaacaaagacataaggaagctgaacgtaaattgaagactataaagggtagataaatattayttatagcatagtagctaagaatgtgattttcagagtcaagcagacccgggttcaagtcagtctttgcaattaaaaagtatccttgagaaagtgattctctcaacctaactttaagggttgccagagttagcaaaatacaaatacaggaagatgagttaaatttgaatttcagataaacaatgaatttttagcataagtatgttccatataatatctggaatgtaattatactaaaaaaaattgttcctctgcaatttaaatttaactgggcagcttctgttttatctagcaacccctaaccttggttttctcatctgaaaagataaaaataaataactggtaatgtatcagtgtc

SEQ ID NO: 345415 - DNA, 586 bp, Homo sapiens
agtaatgaccattggccacagtccttaccttggctgcatgttagaattttctgggcactgttgaaaactccccatgccccaracaattaaatgaaaacttctgtggacatctgtactttttaaattttaaaattaattgtttcattgatataattgtacatattattgcagtacaatttgatgttttgagacttatctattttggataatgatctagtcaaggtagttggtgtatccatcgcccagtgcatttattatttctttgtggtgagaacattcaaaagcctctcttctagctattttgtaatatagaatatcttattgttaaacatttaaagcttcctagggtcacactgtatggcaaaggagaaaacaactgctttaagttttcttcactgatttccaaataataccctacgaataacaagaattgctatggccatccaatggacattacaatagggtagttttcgactggggtccaggattcatggattgtttttttaaccaagcactccaggtggtgcttatcttcagtcaggtttgggaagtgctgtgtcaaggtcaatgagcataagaatcagaa

SEQ ID NO: 345416 - DNA, 516 bp, Homo sapiens
gaatctgtggccacctttgtaatctaccacagtccaccctctgcaaaatttacattctactcacagacaaaatatgcttgtcccatctccagmccctccaaaatatcatccaacaggattaagctctaggattctatttttaaagatttctcctaatgaaataattaaaaatgcacatacatatacaacactgtttgaagcagtgctgttgttcatgtagaaaagccaactgaaacttaaatgttcaacacagtagaaaagggactacacatactttaatattttcaatatgttacagattccaagagccctgatatttggtaaaagtgatgagttcaaatcccagttctgccaattgtgggctgcacaactcttaatctttaagagattaaggaaatcacttaatcgctctctgcctcagtttccttatatgtaaaatggaaataacaacacaacctacctcacaatatggtgattcctaaaaatattaacataaaattaccatatggttcggca

SEQ ID NO: 345417 - DNA, 574 bp, Homo sapiens
tgtgttatttttataagcaccacccctaatcatactttttaggagtttaagggagcttttctggcccaatatcctgtttatatgtcctcaataactagaatgtctttctttttccagaaaaagacaccaaccacatgccctctccatgtactgtttatattccctcaaacttcacccatgtgcccagatcaggggtccctctaataaaacagatcaggggtccctctaataaaggcagttctcagaacattcatttcaygtcctgtactcagaggaattctgagaagcaccagagacaaggagactagaacttcaaggagactttcttgcctgactttcctgccatggatgctgtgaacctttcacagctcgtgcttttatcactgcctagagttattctccctattccacctttgtcaaaatactttctatttttcaaggcccaactggatttcctatctttgtgcagccttccccaattctccaggttgagaggagctccccatcctgagttgcaaaggcagttagcaactacccaatcagttctcttgatgtgtcttcctacacaactaaa

SEQ ID NO: 345418 - DNA, 501 bp, Homo sapiens
atgtcacgtctgtaatatttgaggggggaattatgtcatttaatgtgtatcagcatctgtaaatgatacasgtgcatttaattatgtgggttctccgtagaattactttgcccaagaaggtcgtcagcagtagttttcataaaacaactctaaagttcctttgagacttcctggtatgcagagataaaaaggctaatttcattatttttcaaaaggaaaaaaaaaaaagtcttactcagtagtgggagatctcccagtattcacaacctggcactccactctaaaacaggctccactcaggtgggtgcggtggcgcacgcctttagtcccagcactttgggaagctgaggtgggcacatcatctgaggtcaggagttcgatatcagcctggtcaacatgatgagacctccacctctactaaaaatataaaaattagctgggtgtggtgatgtgtacctgtagtctcaactagtttgaggctgaggcagaagaattgcttgc

SEQ ID NO: 345419 - DNA, 501 bp, Homo sapiens
atgtcacgtctgtaatatttgaggggggaattatgtcatttaatgtgtatcagcatctgtaaatgatacacgtgcatttaattatgtgggttctccgtagaattactttgcccaagaaggtcgtcagcagtagttttcataaaacaactctaaagttcctttgagacttcctggtatgcagagataaaaaggctaatttcattatttttcaaaaggaaaaaaaaaaaagtcttactcagtagtgggagatctcccagtattcacaaccyggcactccactctaaaacaggctccactcaggtgggtgcggtggcgcacgcctttagtcccagcactttgggaagctgaggtgggcacatcatctgaggtcaggagttcgatatcagcctggtcaacatgatgagacctccacctctactaaaaatataaaaattagctgggtgtggtgatgtgtacctgtagtctcaactagtttgaggctgaggcagaagaattgcttgc

SEQ ID NO: 345420 - DNA, 501 bp, Homo sapiens
atgtcacgtctgtaatatttgaggggggaattatgtcatttaatgtgtatcagcatctgtaaatgatacacgtgcatttaattatgtgggttctccgtagaattactttgcccaagaaggtcgtcagcagtagttttcataaaacaactctaaagttcctttgagacttcctggtatgcagagataaaaaggctaatttcattatttttcaaaaggaaaaaaaaaaaagtcttactcagtagtgggagatctcccagtattcacaacctggcactccactctaaaacaggctccactcaggtgggtgcggtggcgcacgcctttagtcccagcactttgggaagctgaggtgggcacatcatctgaggtcaggagttcgatatcagcctggtcaacatgatgagacctccacctctactaaaaatataaaaattagctgggtgtggtgatgtgtacmtgtagtctcaactagtttgaggctgaggcagaagaattgcttgc

SEQ ID NO: 345421 - DNA, 645 bp, Homo sapiens
ctttgcctgtctttcacatttaaatctaaaatctcatcaatgattsttgtgaacagtgtggcatatgtcattaactttttaaaatttagaaattcagtagactcagaaccaattattaaacagccttttctatgttgtaggccagctttatcaataccacacagtggccctttaaaattcccagtcatgaggctaacactaaccctaactcctgctactccctaatccttccccttcctgttacatcactgcctagagctttacctctttcactttgtcctaccaaaattcaatctccccagctccacccctctcaactgcccaaaaccatctcctcccaacatctcactcctgtagcttacgttggaggaaaaggagaaaacagttttcaaagaattctgatatctggtgtattaatccagttgggttacaataacaaaatacagtagtttcccctcatcagcaggaaatgttccaagaaccccagtggacaccctgaaaccttggacaccacagaactgtatatatactatatgttttcccatacatacatacctaggattgggttacatttataaattaggcatgatactctgttttgtggctattgagtaaaataacggttacttgaattcaagcaccgca

SEQ ID NO: 345422 - DNA, 590 bp, Homo sapiens
tccctaatccttccccttcctgttacatcactgcctagagctttacctctttcactttgtcctaccaaaattcaatctccccagctccacccctctcaactgcccaaaaccatctcctcccaacatctcactcctgtagcttacgttggaggaaaaggagaaaacagttttcaaagaattctgatatctggtgtattaatccagttgggttacaataacaaaatacagtagtttcccctcatcagcaggaaatgttccaagaaccccagtggacaccctgaaaccttggacaccacagaactgtatatatactatatgttttcccatacatacatacctaggattgggttacatttataaattaggcatgatactctgttttgtggctattgagtaaaataacggttacttgaattcaagcaccgcaatactgacagtcaatctggtaatggatttggctgcaaagtgactaactcaggtagcatgtacagyatggatctacgggacaaatgggatgatccacattccagggtggacagagtgggacagtgcaagatttcattatgctgctcagaacagcacatagtcta

SEQ ID NO: 345423 - DNA, 198 bp, Homo sapiens
gtctcctactagcctgccaattgtatttttttgctagtcttttaatggttacaaaagacatcaaaaatttatcatttgcttatcacaatctaatagaarttatttttaagccacttcccagacagtgcaaaggtagaagtattttatatctatttaactcacttgcattttgtattactgttgtcacatattctacat

SEQ ID NO: 345424 - DNA, 602 bp, Homo sapiens
gaacaagatttcaaagctctcgttgtcttcaagttttttgccaccatttaggaactgagatgaatttctgaaagtgacaatatcttttggatagatttcaaataaacccttccactctcttctattttaatgtctgtggtagactgtttgcaaaactggccaccatagtttccctccccttaatcacacccttgcatagcccccgcatagctccctaccccactgactctgaacttgcccatatagcttcattaactgacrggacagcagaaaaggcaatgcaaacagagacttaaaaagtgcttatgcattgcggcttgctctattttttgttgcttttttcaacttttattttaaaatcagaggatacatgtgcaggttacaaaggtatattgcatgatgccgaggtttggagtatgaatgaatccatcactcaggtagtacccagtagtttttttcaacccttacttctcttcttccccctcctctcttgcactcccatgtctattgtttccatttttatgaccatgtgtactcaatgtttagctcccacatataagtgagaacatccagtattttgttttctgtttctgcatttgttt

SEQ ID NO: 345425 - DNA, 602 bp, Homo sapiens
gaacaagatttcaaagctctcgttgtcttcaagttttttgccaccatttaggaactgagatgaatttctgaaagtgacaatatcttttggatagatttcaaataaacccttccactctcttctattttaatgtctgtggtagactgtttgcaaaactggccaccatagtttccctccccttaatcacacccttgcatagcccccgcatagctccctaccccactgactctgaacttgcccatatagcttcattaactgacaggacagcagaaaaggcaatgcaaacagagacttaaaaagtgcttatgcattgcggcttgctctattttttgttgcttttttcaacttttattttaaaatcagaggatacatgtgcaggttacaaaggtatattgcatgatrccgaggtttggagtatgaatgaatccatcactcaggtagtacccagtagtttttttcaacccttacttctcttcttccccctcctctcttgcactcccatgtctattgtttccatttttatgaccatgtgtactcaatgtttagctcccacatataagtgagaacatccagtattttgttttctgtttctgcatttgttt

SEQ ID NO: 345426 - DNA, 512 bp, Homo sapiens
ttaagtatgtttaaaatattcaaagagatgagggaagaaagagagtcagtaatttaatggcacagtgaaaaaaaaaaataccagcagatttgaggaagaaccaaatacaaattgtggcactgaaacatatagtaatagaataaatagataggccaaatggtaaatttctaactaaatttcagttataccacctattagctatccttgggttgagtaagtttatttctctgggccttagtttccacatttataaaatggtctcataatatatagctcataaagttactgtagaatttaaatgaatatgcaaagactggcatatagttggtcttaaccttgttcctttttcatacttctgcctggtgttttgtttaataattgatacttgaattttccactactagattgtaagtttttcacaagcaaggtctagtacaaagtttgcatatagaaggttccrgataaatacaattttatatgataaaatattattaaacacacataatataagg

SEQ ID NO: 345427 - DNA, 607 bp, Homo sapiens
ctgccagttttatctactttaagggtagtacagatactccttgacttatgaggggttacatcctaataaacccattgtaaatgaaaaatgctataaattgaaaatgtgtttaatacaccaaacttaccaaagatcatagcttagcctaacctgcttcaaacatgcacaaaacacttatgttagcccacagttggacaaaatcatctaacacaaagccagctttataacaaagaattaaatatctcatgaaatcgtgtaatttattgaatagtgaaagtgaaaaacagaatggctgtatgggtactckaaatacagtttctactgaattcatattgcttttgcaccatcctaaagtcaaaatatcataagtcagagatgtttctcatctccataatttaatccttggagatgagtcagtaagtccagcctactctcaagggtttattctagcttcccctctttgcttatttttaacttcttttctgtgacagtaaaaaatgtagtttccattatctacaatttatttagttatttgttaatcccagtatacaattaacacaccatttttcaaggttaattaggtcaactccctttttttctactccca

SEQ ID NO: 345428 - DNA, 467 bp, Homo sapiens
gtaaactacaaaatatataaaatccttctgaatctggttcagatgaaaaagttgctatgagaaataggatattcagaattaagtgaaaattatcttggaaactcactgaagaggtaagtttttggacaacaaaatcaaatccattcaatgtagcagctggattaaataatgacagtaaacatttattattattacatttattttaaatgccaagctctgtctgggtgctttatgtggattttctcaatgaatcctcacaaaaactctatgaggttgaaaatattatccctattttacaaattggggaagcgaggcaaagaggggtttgagtgacttgctcaagatcacacggccagttaatgttaccggggaacaaaatataggcaaagagatcccagagcctacattctactctttyttttttcaatttgacttcatttattgagatattgcatacagccaatgga

SEQ ID NO: 345429 - DNA, 580 bp, Homo sapiens
gataagctacgacctctctgatcctctcactatacaagggtgatgatcacggtcagatgaggctgaggccagtgaggarcctagcaagcaaaatttaaggaggtactaactctctaggttatatcagtgcagggattccatgggcacaaccctgtaaaacagtgcttccttaaatttagccctaggcatcacacttggctcatcatatgaagtagaatttagccttatcattcaacaatcaagcctctaccttatgtctcaaatttaagaagcagatctcagtcataccccaccaaagctcacacatttcctgacttaacccctctcctatccctgggtagacctcatggtgtaatggaaagaacctggagttggagggagggaggtccacctgggaaagcctgagctgaaacagaaagtttcttggtctaaatacaccctgttgatactagttaatgctcagatcacacagatcacatgccagggactactctaagtgctttatgtggattgactcattgaatcctcacagaagctctaagaggcaggcatggttattatgcctgtctgatcaatgaag

SEQ ID NO: 345430 - DNA, 569 bp, Homo sapiens
taattttggataagctacgacctctctgatcctctcactatacaagggtgatgatcacggtcagatgaggctgaggccagtgaggagcctagcaagcaaaatttaaggaggtactaactctctaggttatatcagtgcagggattccatgggcacaaccctgtaaaacagtgcttccttaaatttagccctaggyatcacacttggctcatcatatgaagtagaatttagccttatcattcaacaatcaagcctctaccttatgtctcaaatttaagaagcagatctcagtcataccccaccaaagctcacacatttcctgacttaacccctctcctatccctgggtagacctcatggtgtaatggaaagaacctggagttggagggagggaggtccacctgggaaagcctgagctgaaacagaaagtttcttggtctaaatacaccctgttgatactagttaatgctcagatcacacagatcacatgccagggactactctaagtgctttatgtggattgactcattgaatcctcacagaagctctaagaggcaggcatggttattat

SEQ ID NO: 345431 - DNA, 580 bp, Homo sapiens
gataagctacgacctctctgatcctctcactatacaagggtgatgatcacggtcagatgaggctgaggccagtgaggagcctagcaagcaaaatttaaggaggtactaactctctaggttatatcagtgcagggattccatgggcacaaccctgtaaaacagtgcttccttaaatttagccctaggcatcacacttggctcatcatatgaagtagaatttagccttatcattcaacaatcaagcctctaccttatgtctcaaatttaagaagcagatctcagtcataccccaccaaagctcacacatttcctgacttaacccctctcctatccctgggtagacctcatggtgtaatggaaagaacctggagttggagggagggaggtccacctgggaaagcctgagctgaaacagaaagtttcttggtctaaatacaccctgttgatactagttaatgctcagatcacacagatcacatgccagggactaytctaagtgctttatgtggattgactcattgaatcctcacagaagctctaagaggcaggcatggttattatgcctgtctgatcaatgaag

SEQ ID NO: 345432 - DNA, 603 bp, Homo sapiens
aatctaaatatctgttcactgtggggaaacatttgagaggaaccatcattgacggagatgaaactagaaattgtgtgaagaggccygagtctgaccaggtgtgattttagaaagctaattttactgccttgaaattccagtgatgatgtcactcatcttacaaggtggttatgtaaattatctgatatgatctatttactcaatgattcagcaaatattatttgtgctccaactacatggcaatccccatgctaggcactggaaacacagaagttaataaaacagacaaggaccctgccacgtgaagcttgcattttattggaagaagaaaaatattaaacaaataaatacaataaagacgtatataatagcatagtatcagataatgatagttgattttaagaaaatgaaacaggataacagaatggacagtgagggcaggtatttgattaggatggttgaagaagacctctctgagaagataacatttgaatagaggtgtggatgatagaaagaagctggccaggaaaaagggatggaagaacagctttctggacagagagaccagctagtgacgaggcttaatagaaagagtttgacatg

SEQ ID NO: 345433 - DNA, 430 bp, Homo sapiens
tcctgggttgttatgaagttcaatgaaataatccatgcatagtaagtatacttattatatgcacttattatgtactcaacatctactttctgatatctgagattttcttataatttaaaaaagatattgaaggtctactgtgtaccaggtacatataaaacaatactwttcatttttaatctaaaattatcttaataaatcataataattattgttccacatccctataattttgggaaggagctatgtatggcctgatgaaatcactgacatggtaaatgtggtataaattatttgccattgagtaatatgtcatgtttacttgttgattttgctttgttttgtttttttgagacaaagtctggcttggtcacccaggctggagtacagtggtgtgatcttggctcactgcaacctccacttcctgagt

SEQ ID NO: 345434 - DNA, 430 bp, Homo sapiens
tcctgggttgttatgaagttcaatgaaataatccatgcatagtaagtatacttattatatgcacttattatgtactcaacatctactttctgatatctgagattttcttataatttaaaaaagatattgaaggtctactgtgtaccaggtacatataaaacaatacttttcatttttaatctaaaattatcttaataaatcataataattattgttccacatccctataattttgggaaggagctatgtatggcctgatgaaatcactgamatggtaaatgtggtataaattatttgccattgagtaatatgtcatgtttacttgttgattttgctttgttttgtttttttgagacaaagtctggcttggtcacccaggctggagtacagtggtgtgatcttggctcactgcaacctccacttcctgagt

SEQ ID NO: 345435 - DNA, 632 bp, Homo sapiens
atttttgagcacttgagctttacttccttcatgtgttaaattgggaatataaaaattacaatctctcagggttctactttttctttttaaaatacagtcatctctcagtatccctggtggattgataccaaaacctccctctgataacaaaatccatggatccacaagtccctgatacaaaatggcataggatttgcacataaactacacacatcctcctgtatactttaaattatctctaggttacttatgatacataatagaatgtaaatgccatggaaaaagttgttatactgcatttttcatttgtatttttttattgtattgttttttatyggattttttttcctgaatttttcaatccacagttgtttgaatctgggatgtggaatctgtggatactggatactgaaggccaactgtactaaatagtaccttccacttgttgaatcctaggtagtgctaggtacatttacctgttttcatctaaacttcctgtaaagtggtatcaacatttccagtttacagtgaggctcatagaggtcaaagtctcacaaagaataactatcagagttcatgatattgaatgatatctttagggggcctctatcaaagctgagacctcacagctg

SEQ ID NO: 345436 - DNA, 566 bp, Homo sapiens
tctctttaatgtgagcaattagaaaaactaggattgaacaatgctaagtaacttccttgaaagattaaaaaacaaagttaggattatttaatcagcaatattcattctaaaagagaaaatgaccttacacatttaaaaatatatacattacttttaaaatataattttggacatgtagcattatgaataagaaaaattaagtctccatttctgctctaatactcttttaatagatcaaaacaaaacaaaacatgacctatctcaaccaacaatgactttcattaacttcttttcaagagctcttaggaaaggaaagctataaagaggttgctttctattgatagaattttggacatttatgtaagtacaaatgttggttttgacattaaaatattaatgtaattaaaatctaaaatgctcaatgtatataaaaaataaaacttttaaggttctgaggcatttttcccatcttatactttaacagacttttttttwaaaaaaattatatttcaaatatgtttatttgagaactaacattaaagttgagaataattgtaattaacctt

SEQ ID NO: 345437 - DNA, 453 bp, Homo sapiens
ttaaaaatatgaaaaccttaaatgtatattacaaagtgaaagaagccaatctgaaaagtctacatactgtatgatcccagctctgtgacattctggaaagacaaaactatggagacaataaaaaaaaaaaaaaagaaaaaaaaatcagtgcttgcagaggttagggtgggaggatgsaatgaatacacagagtatagacaatgtttagggctgtgagactattctatataacactacaaagatagaaacgtcattatacatttgtccaaacccataaaatatgcaccaagcttgaaccctaatgtaaactatggactttgggtgatcatgatgtattaatgcaggcttactaattgtagcaaatgtaataatactctggtgggggatgctgatggttcgggaggctgtagcggaaaggggtacaagggaactctgtactttctacttaatttt

SEQ ID NO: 345438 - DNA, 606 bp, Homo sapiens
acttagctttacaatagcctgaaaagagaaccagcaatggtatgccatgctttttacccamtgagctgtgagctaataaacaggtggtgtttgaagctgctcaatgtgtgatgctttggtacatagcaatagaaactaatgctcctcttttcccctaagaaagcttaaactaatctgtactaaatattccaaatgaacttcttattttggattttaaaaattatctttttctcagttattgttaattttaaggagtacttttttttgttttaataccagtgttaaatgttttaatttttagctaatggtggaaacatctctgaatcttcatatactattttattttgtatattcaaaaagggtttgaagtgttcattgatagagataaaggtaagaagagatatgagccattacaattcacctctgttaaaaaatccagattggaaaagtaataaaactacatggctgtcttggacacatcatattaatgctaaatttaatttagacaatgagactaaaagcaaacaggaatgtaattaaaaccaatttagtcaagaagaaatcacaagaaagattgcctggattggaaaagaaatttcacggaag

SEQ ID NO: 345439 - DNA, 553 bp, Homo sapiens
taatatgattcctttccatatctgttttactggagttaatgaaggataccattgtcatgtgcatacctaagataacagctgatagctgaaacaaggacctgttgatagactggtcagtgacctcagctagatgatttttcattgtcatcattacttaattaaagacttctgatactcaacatacttctaatttctgatgcttcacgactaaaagtggaatatttctggaatttattcgcttctctctctcaccatctctcctctattctaagccaacacctctctacctgaatgagataacctctgcctgccttcctatccatcttcaacaatgcagtcaaagtgagtttctaaacatgcacatgttgtcttgactcatctccattaaatcttcatgggtttcarctgcatgaaagagaaaatccttaattcctgatgtcatctttaaggtacttaggacttggcctcagtctccgctacagattcatctgtaacagtttgctctccactcatcaccttatatcaagccttttctgtttcctttaaattttta

SEQ ID NO: 345440 - DNA, 485 bp, Homo sapiens
cttctgacttatagggtttctgctgaaacttacagaagtctgctgttagtctgatgggcttccctttgtaggtgacctggcctttctctctagctgcctttaatattttttctttcatttttgacgttggggaacctgacaattatgtgtcttggggatgatcttctaatggaatattttactaaggttctctgcatttcccaaaattcaatgttggcctctagctatgttggggaagttctcaygcataatattctgaaatatgttttccaaggtggttatattctccccatgcctttccagtacaccagtgagtcattgattcagtccctttacataatgccatatttcctggaggttttgttcattccttttcttctttattcttctctatacttggctacttggtctgtcactcctgcaatgttttatcatgatttttagcttccttgcattgagttacaatgcactcctcctgtagctca

SEQ ID NO: 345441 - DNA, 579 bp, Homo sapiens
tcaccagcgaaagctgcaaaacaccaaaggtggcagccttcccctctctctgggagctccatcccagggagatatgggcctattgctggcccagacatctgtagaaggtggctgaagaccccagttaggaagctctacccggtgatgaggaatgggactgggaatccactttataaagtagtctggccacatttttgtagaacagctgtgctgtgctgggtgtctgcttctgcccctggtggcctcagacactctgaagcccaaaagctgaaataactaagtctcccaaaaagcaaagatggtggtctaccctttcccttgggaactccatcctsgggagaactgagacctctgtcagctggagaataccagtgggggaagctggaggccccagttgggaggctccacctggtgataagaaatgggattggggacccacttaaaagagcagtttggccatgctctcatagggcagatctgatgtgttggggttctgcttctgcccctggtcagtttaggctctccaaaacctgaaagctggaatcgctaagtcccgcaaacagcaaagatggtggccca

SEQ ID NO: 345442 - DNA, 621 bp, Homo sapiens
agagaacaggggcaagggtggctcgaggacccagttgggaagttccacccagtgaggagcaatggaatcggggacccacttaaagaaggagtctggccatgttttggtaaagcagctgtgctgtgctgggggaacctttctgcccccagttggtctgaattctccaaagccagaaggccttaatggctaaattgcccatacaacagtgatggcagcctccctgtcccagggatgcgcaacactgcygccagtggttggctggaattccaagccagtgggtcttatcctgtgaggtactgtggaagtggggcctgcagactgtcactgctcagccccctggattcagcctctttccaagggatatgtatgggggtctaacctcctgctttgctggagttgcagctacttttgctaggaagcctggaaagcttgagtatctaaagctcccagttctctgtgtgtgcctgagcggctgctctgccaagcctccacctagctctgtgtgtcagactgaaggccctggtaaagtgtgttgatgaggggatctcctcacccaagggttgcaaagatctgtgggagaagcgtaggttcccaggttgcacattcaattactgcttcctt

SEQ ID NO: 345443 - DNA, 627 bp, Homo sapiens
ctttacatgtctcgtattctcttctctgtataatttttctccttgtgcattgtgaggcgtgaaacaactaggtcattttcatcccctgcaacaatttcatgagaaatgctttgcctttctcatggtaaatatacacaatggaatactattcaactacaaaaaggaaagaaatcctgtcatttgaaataacatggttgaatatgggagacattatattaagtcaaataaaccagacacaatagaaagtatctgaatacattttattgctctatcatccatatttactaattcttttgtgttttgatttgtgatttctaatttgctaataaactactctaatgaattcttaacccaagacactattattttttaatacagaatttccatttgacaaggtttctttttaatagattctasctttctgctaaagtttcctattctttcctctattttcttgaattgtatcaaatgtgcttaaagtcttttataacttcaatacctgatttatctgcaggtctgtttcaattgtcctttttctcctgttttgttcagttggtcctgaatcttaacatgcctttaatttttaatttgatacttaaaatgatagggtttttgaaaattgtgtga

SEQ ID NO: 345444 - DNA, 598 bp, Homo sapiens
tttcattttatttttagaaatttcttcttcatggcctaaacctatttaaatgttttgcttagcactctcctgatgacatttggtataaattttggcaaatcaacaatataaaatttattgtcagttttatatcatccacttccctgctaaaattcttctttgtcttttcattgcccttcacgttaaatattaatttgttaccttaatatgaaagctctacattgtcagcctcttaaaattttctccatcttaggattttcttcctaattttaacaaagcatgtattcttcagttgttgggtattgtattctaaaaatgtcaattaggtcgattgtttaatagggttgtatctttactggtattttgaccyatttcttctacaaattactgacaaagggttattaaaatcttcaactatgacttttttctgtttgattttctacctattttaaagcttttttattaggtgcttgcatagttaaggtttttgtagcttcttgaaaaatttacacttttattattatgaaatatctctttttgtctctagtaataatattttttggtcataaagtctactttgtgtgatgttaatttagct

SEQ ID NO: 345445 - DNA, 478 bp, Homo sapiens
atctagcaatttagtagttgcaaattactcttgccaatgtggtgatttttttttcttttgacctagaggaaattatgagtatttccacactagatttattttccataatctatcaactgcattgctttgaggacactgaaaatgagacaggagagtgcgaatgtgacagatgaggactgaaataattaaatagtgctcagcataaggctactatacatctctttgaccaggcaccttttgaaaatcccttaaatgccaattaaataaagactgcttagtggtgaacattgctcaatgccattctttcttttggcaattttgaccttgtcagtggcattttctaaaagataaattaatggctttctactagaagggtgatyataatttattctattttgttcttcagttcattggatagcactatattctatgaacagtataaattatatgaacatatatatgtgaggatttgagaaac

SEQ ID NO: 345446 - DNA, 430 bp, Homo sapiens
catatttctggatcaggcaaaattgatctttggtaagagaaatcagaacaatggccccttcttgatggacaggaatttcttggcaagtggctcaagggaattttctggagtgacagaaacattctactacttaatgcaagtgtgggtgtatatatttgtcaaaactgcttgaattgtacacttaacatctgcacatgacactatttgtaaatcactcctcartggaaacataaataataaataatctctacattaaaaaatgaggcataaaattctgatatatgaaagaaccatatccatgccaccctaggcttgaacttctaaaggagcctgaaatctacccaggcatcgagaacatctccaaccacaaccatgaatagtaggtcatacagagatgaatttttgactcttttctgtgaacttttaattc

SEQ ID NO: 345447 - DNA, 542 bp, Homo sapiens
tccacagcttctcttacagaatctctgaacttaaagcaggaccaatggcacttctgggagactcaccaatgtctatgcaccatttccttattgtcttctctcctccccctcaacaagaatcctttatcaagacttaaggttcaaaatatcagctcaaactgattcatgttcttccaaatcccttggcttattttctacatctgctctttttttctacatctgctaatgtctccttttcccaaggcatgaaggtggaaaatcctacatgcttgaggtgaagaaagggccttggggtacaagtaaattcagaggagatacacaccagtgctggtaatgttttgtttcttaagccgggtattaggcacacaagtgtgttcagcttacagaaacacatttagtatacttgtgatttatgtacttttctgtctatatacgatacttcartaaaatgcataataaaaagttattaatatctcaaaatggtattgtgctcatcgatcaattggtagatcaatagagacaaagataagaatacagaaaaa

SEQ ID NO: 345448 - DNA, 461 bp, Homo sapiens
atgttttgtttcttaagccgggtattaggcacacaagtgtgttcagcttacagaaacacatttagtatacttgtgatttatgtacttttctgtctatatacgatacttcaataaaatgcataataaaaagttattaatatctcaaaatggtattgtgctcatcgatcaattggtagatcaatagagacaaagataagaatacagaaaaaaatctgaacaaaatttgttaatggggtayggtggatcccgcctgtaatcccagcactttgggaagtggaggcaggcagatcgcttgagcccaggagtttgagaccagcctgggcaataaggcaaaaccccgtctctacaaaaaaaaaaaaaaaaaaaaaaaagagaattagctgggcatggtggtgcgcgcctgtagtcccagctactctggaggtggaagcgggaggatagcttgagccgggacaccattt

SEQ ID NO: 345449 - DNA, 580 bp, Homo sapiens
atacattgcagtagcactagtggttacratatttgggaataaaattaatatttttgactagaagtgtacaatgataaatcaacagaaatccaacttgaatacatctttaaggtggaatcagaaacggccagatgttaaaaattttaaagtagttaaaatttttgaagtaaggattacattgacatttcaaaatccgtactctgtagatcagtgtattttaattttttccccgtgtagacttttatttacctgggaaaggtgctttttaggatgcagggaggaggtgctttgctgtctctttaagctaggagaacaacatgcctttgatcctcacacttcctgtatttgaggaaagagtagccaggctttatggagaggtcagagctgggtgccaggagtcttgccttttactgagcttagggacatccttggattttgtcatacgcttctttgaatgaaccagagaaacagcccttttgcagcatgagaaagccccaaaacccctgggatttacctccacttcaataatactgaatattttttagcattagaatatgctgggtcatttgaattaattttg

SEQ ID NO: 345450 - DNA, 456 bp, Homo sapiens
tatttgggtttcaccagtttttccattaatgtcttccttctgcttcaggaccactccagacaccatgtctagttgctatgtctccttaatctcttttagtcagtgacagtctctcagacttttcttgtttttcatgaccttgacagtattttgtagaatatccccaatctaggtttgtctgttctctcatgattagatgtggrttatgggttttggaaaagaatgccacagaagcaaagtaccctcctcattacattacagcacgtcaggggtacctgatatccacatgacatcactggtgaggttaaccttcatcacttggattaaatggtgtttgccagatttttctaattcagtgttactatttttctcttttcctgctctattctttgtgagtcatcagttcaatgtattattcatagttctccagagaagccaaaccaataggtttgtaaa

SEQ ID NO: 345451 - DNA, 484 bp, Homo sapiens
gatacgagattttaactaaaagcaacaaggtaagccatctctaataaggctattaatatttagaactatgttgatgagataaagaacatgtatattttattttaaaaatatcttctagaatatcataagatgtatgttgtgttaattttttgttattcttcacwctcagtttgatttctgtcctacttctgagcttgagaagtcccacacttctttactgagaagtccccaataaatacaaatttcattgggtgttagagctttaagtagcgatttgaagaagaaacctggtaaacagtaacaggatgatataagctgcattaggatattcttggcatacatcctgccagaaacctagcctgcacctatgagaagcatcactaatcaataatagaactcttccccagtaagcctggacttggcctgggagtcctcctcaactcagtactcctggttcccacaaaggatacaatgaggactacta

SEQ ID NO: 345452 - DNA, 538 bp, Homo sapiens
gtcattttccttggggtgatcagtttcccaaaataggaattctctgggagtgaaatgccaggctgctagtgttttgagggcccaataaaagaaaatggctgtgaaatttcaccattcaatatgtgaacactcaaccatgcatcaactgaaagtggaagsctcaaattcagagactgtctctctggttcaacttcaccagagaataagtttctcatcatacagcttagagggcaaagaaatcatttggctgtctagggtacaggaggagacatggaggtcacgtggcttcctatagactttcaaccaattctactattcttggtcacaccctcacctccatgaaagttaccatgtacttccaagttctgaacttttccagggtcctagggtttgctttttgttggcattccctcactgcctggtttagatttcctcttcctcaggtttcttaagtcagttaccatatatgcaattgctttctttcattaaaaaatttctatgcatctgtctccactaccattttttccttgtaatattt

SEQ ID NO: 345453 - DNA, 538 bp, Homo sapiens
gtcattttccttggggtgatcagtttcccaaaataggaattctctgggagtgaaatgccaggctgctagtgttttgagggcccaataaaagaaaatggctgtgaaatttcaccattcaatatgtgaacactcaaccatgcatcaactgaaagtggaaggctcaaattcagagactgtctctctggttcaacttcaccagagaataagtttctcatcatacagcttagagggcaaagwaatcatttggctgtctagggtacaggaggagacatggaggtcacgtggcttcctatagactttcaaccaattctactattcttggtcacaccctcacctccatgaaagttaccatgtacttccaagttctgaacttttccagggtcctagggtttgctttttgttggcattccctcactgcctggtttagatttcctcttcctcaggtttcttaagtcagttaccatatatgcaattgctttctttcattaaaaaatttctatgcatctgtctccactaccattttttccttgtaatattt

SEQ ID NO: 345454 - DNA, 532 bp, Homo sapiens
aaggctcccctcaatcttcattttattaaattttttgattagtattttctgggccataaccttaaaatggctgcagttaaatctctgagctttgatcccagcattataaaaccaccatggggcccaggagaccatacctgggatagcagcagtcggagcatgaggacttctaagaaagtgaagaatgtgagtgaacagcaaacatgattgagtgccgagtatgcagagagagtaaatgtgccctcattatatattgcataatcaaaaagagagaagagaaacttataattatcttctttgaatcatcaaatatacatgtaatttttgatgccaaagtttagaacaatgaagaataatatacttacagaaatagcataaaggtrttcagtgaaaacaagtccacatgaagatgcatgttaaactgcattaagaataaaaccccttatttcatcagagcacaagctcaggaaagtccctgtactttctagcaaatatgtagctcccttaggattttgttttttcactttaaagc

SEQ ID NO: 345455 - DNA, 571 bp, Homo sapiens
tagaaattgtttgccccattttttaagcataataccaaaccaaagagagaattaatgagcaaaagcctcataaatgatgtaaatgttagaaattaccactattatttcaatgaaatgggggaaaatcaggcccaggaaaaatttgtgcagtaaactgggtcaatctggagattctgaagtatgcacttagaaacagaacatgtcaacaaaacagaagtattgtttttccttaatattcagcctgtttatattctctagcttattattttataattgatagcaaagctataaatggctttggggattgttgcatatctcatatgattgtcttgctgtggagtaacamtcaagtggaaatggaaaaattttttgtcaaagatttctttctgtaggcaagatgccgctttttttctaagtatcttttagctgttgagtattttataatcattgacataaatataaaaatggtaaacaatgtttattgtttgcatacaagtgagtctgaattggggccttttactgccagtcattcccaatgcaatctcaagaatgtaataggcaatcagatggt

SEQ ID NO: 345456 - DNA, 593 bp, Homo sapiens
tgatttttcttttcctaaacacttaccatctcctcttgtgtgacagtagcaataatttactgtgcgtaataccttgcgttagccaagaagctacagaaatatttcatagcttcaaccttgacatagtgaaagcacaaccctaaaaagataaaaggagcatgacactagcctgaggtagttaagttttaagaaacatagggtttgtttgcctgtacctgcgaaaccactgtctttaaaggggggggttgggcatcacactgaaagcaaacattttatataactgcccacagtttcattcattgaccagattattaagtaaaaagtcaacattatgtttgcttttcttgggttctctttgtctaacttggaatggcttattggatgcttcatattatatttgtctttcttttaaaataatcctttcatatatgctatctatgcctctataagaacatgctatatccaaacaaagtaatcttacagataagagcctctgcctgccttccccctctcatccrtggatggttatataagtggatgtaccctccctccaaacagtatctatccctacaaatggctaatagtaagaatag

SEQ ID NO: 345457 - DNA, 429 bp, Homo sapiens
tttctcaaacttcagcagtcatcattaactccaagtcaggtgaatgagtcttccactagttagttccactggcaaactctatatatagaaatttcagtttgtggaaagtcaatgaatatgaatttaagaaacaaatttaataaaggtgttaacatgtaattataaaagggaaaagaaatcttctaaccaactataaacctggtctcaagctcacttgggacaaagacatactaacctcgtcatactgattacttctgaggagggagggaaaacaaaagagatacasgctttagtttgatcgtaatgtattgtgtgcgttatgtgcatgtgttggggacctgagagaggccactgaatgggtgtctggcacattgtttacatagatgggctaatgggtgattgtggttttgggaatgcagagaaagacaa

SEQ ID NO: 345458 - DNA, 429 bp, Homo sapiens
tttctcaaacttcagcagtcatcattaactccaagtcaggtgaatgagtcttccactagttagttccactggcaaactctatatatagaaatttcagtttgtggaaagtcaatgaatatgaatttaagaaacaaatttaataaaggtgttaacatgtaattataaaagggaaaagaaatcttctaaccaactataaacctggtctcaagctcacttgggacaaagacatactaacctcgtcatactgattacttctgaggagggagggaaaacaaaagagatacacgctttagtttgatcgtaatgtattgtgtgcgttatrtgcatgtgttggggacctgagagaggccactgaatgggtgtctggcacattgtttacatagatgggctaatgggtgattgtggttttgggaatgcagagaaagacaa

SEQ ID NO: 345459 - DNA, 429 bp, Homo sapiens
tttctcaaacttcagcagtcatcattaactccaagtcaggtgaatgagtcttccactagttagttccactggcaaactctatatatagaaatttcagtttgtggaaagtcaatgaatatgaatttaagaaacaaatttaataaaggtgttaacatgtaattataaaagggaaaagaaatcttctaaccaactataaacctggtctcaagctcacttgggacaaagacatactaacctcgtcatactgattacttctgaggagggagggaaaacaaaagagatacacgctttagtttgatcgtaatgtattgtgtgcgttatgtgcatgtgttggggacctgagagaggccactgaaygggtgtctggcacattgtttacatagatgggctaatgggtgattgtggttttgggaatgcagagaaagacaa

SEQ ID NO: 345460 - DNA, 620 bp, Homo sapiens
accaatcagtactgttctgcagcccaggggtcgcagactgccttaaatgattatagcctatgttttcttaactaggctaattaacattagtgaagattaatttgttttgagatcagaccagcagctaagccaaatgaatgaggaaacagctgatttggcaccagcatgttcatgaagaatgaacagtctatggattcagaagctaaattatatatgtactgaatattagtttgggcacttaatagcaacatgactttggcaaattactccaactgagtgtctgtattattcactgtaaaacaaggtaaataatgcattgctggatattttgtttaacttttattttaggtttgggggtacatgagaaggttcgttatataggtaacatcatatcacrggggtttgttgtataaattgtttcattacccaggtattaagcctagtacccaacagtcatctttctactcttcttgctcctcccaccctctaccctcaagtacaccctggtgtctgttgttcccttctttgtgtttatgagttctcgtcattgaattcccttctataagtgagaatgtggtatttggttttctcttcctgtgttagtttgccaaagataatag

SEQ ID NO: 345461 - DNA, 619 bp, Homo sapiens
ctttgctttacagctatattcatattagtaaaaggtgctgatcagagtataatgggataaaacctatttgatggcaaacagtcaaactgatggcctccaggatttcgcataatctagcccctcctatctctctgaacttatttcacaccagtgcccttttatttaatattcttgggcatttttaatatttccccaaattctctaatcctaggatctttgcatcagtgtgccctcttttccaaaatcttcacaaagctcgtgctttctcactatttgagtctcagagcaaatgtgatctctctacagaagcctccctgactacgcatcttaggtcctggctccacctccatccattaccatctaccttactaattttattcacagcatttatcattatctgaaattattttatatatgtatttagtttcttgtttaytgtccattttcacccagtaaaatgtcagttctatgacatagacatcttattcctactttggtatcctcagagcctacaacagtgtctggcacataacaggcttttaaattcttgctgactaaataagcagactttcattttgttgttcatactttcttgaattgctttattctactggaagga

SEQ ID NO: 345462 - DNA, 601 bp, Homo sapiens
ctcaattggcagaagaaatttggggttccaaatcagccaattgtaaagagtcacgcactcactcgggatctcataactctgatacaccgatagaaaagtatttcttaaattttaaaattaatctttatccatggtaagcatacgaattatacagtcttggagactggaaaatagatttaaaaaccaatcccacccacctccacaaaagcacattctcaagagataaccactattataagtcttcttggcatccttctaaacattttctagatatatgtgctcatgcataggtaaatagayggatagtgataggaccaatcaaagaatacgattcctcaacttacagggcatggcactctgcaatgatggccctaattcttcactccttcctgtaactttgcagtgctttcctaccatgggtagttgacctgctccatcatttggcattgagctcagccacgtcaaatgctttggctaatgggatgttagcagaattgaaagagcagtggtttgaaatagtgttgtgcattggggctgctctcttgaacctctactgccatattaagaatttgtctcagctcgcctgccagggtatatgagg

SEQ ID NO: 345463 - DNA, 498 bp, Homo sapiens
aaagattttgtcgattttgttcactgctgtacctttagtgcctaaaacagaacctagcacatatgtgtttcataaatatttgctgaatgaatgaatgaatgagtgaattctcccaaaatattagggagccctttgtgtgacaccaagttagacataactgttacccttgaggtgctgaagcacacaatacttgaatggtcatagcaaacacatatctaatatagttattgaactcaattggaaatgmtagtgtgtgggaaggttcttggtgcattgagagagcaccattcagctaaaattcttaatgtgctaagggtgcccagacacagcgtgatgaggagaagatgctggagagaaaggctgcatcattatataccatttgcattttcctttgatttaaaatattcatggactgaagtagatataggacctcagggcagcaacagtcattaaagtcagtccagatttcctaatgggcaggccgagggggaggcagaa

SEQ ID NO: 345464 - DNA, 508 bp, Homo sapiens
ttgagagagcaccattcagctaaaattcttaatgtgctaagggtgcccagacacagcgtgatgaggagaagatgctggagagaaaggctgcatcattatataccatttgcattttcctttgatttaaaatattcatggactgaagtagatataggacctcagggcagcaacagtcattaaagtcagtccagatttcctaatgggcaggccgagggggaggcagaacaaytggacagcctggacaggctagtgagttgactctccttaaatgcttattttacacatattcattcaccattcatttaataagcacatggaaaaaatgttctattaataaaattgcaaactttttgtttgaattcaatgtgaggtatttatttaattccttgtagtaacaccatattttaatgtatttggaatccttcacttcacagtttttctgtcactcataactagagttagtcataaaactcactgaaaacaaacttcacttacattagtatgttca

SEQ ID NO: 345465 - DNA, 531 bp, Homo sapiens
ggtcatgaaaatagcagtagtggaaataataagttttcagacaataggcagaaattttagacyttcctcaaatggtccttaaatggtctttggagtgagacacagaaagtttccagttgtccagtcatgccaccgagtttttgcatgcacaggcaatgacaattacgttatgactgtgacctggctgtccacaattataagatatcattaatttttttttcttaagatggagtttagcgtttgctgcccaggctagagtgcaatggcatgatcttggctcactgcaacctccgcctcctgggttcaagcaattcttctgcctcagactccctagtagctgggattacaggcacctgcaaccacgcctagctaatttttgcatttttagtagagatggggtttcaccatgttggccaggctggtcctggactcctgacctcaggtgatctacctgccttggcctcccaaagtgctgggattacaggtgtgagtcaacgtgcccagccagatatcatcaattttaagccacag

SEQ ID NO: 345466 - DNA, 342 bp, Homo sapiens
gcagtcaatgttgatgccaagcctggtggacagccatgtcacacctgactcccagtgctcagctcataggtagggagccatccactccaaatcctaaaacctgcttagttagcatagcttactttatctcattaaccccatctagtgaacacgaaagtcatttttatttgtctacatgatgtgctcataatcagccataagtctcttgtaaacaagaacattatactaagtctttagcattttcttcaactcatcagccccattttccaccttycttgaagactacagctttagatgtttgttatgatatgaacacctgactctggacttctgcctggggtt

SEQ ID NO: 345467 - DNA, 589 bp, Homo sapiens
gtcattgtccaaaaataaaggactctaattaaaatgcaatgtgggccgggtgcacwggctcatgtctataatcccagcactttacgaggctgaggctggtggatcacctggggttgggagttggagaccagtctggccaacatagtgaaaccctatctctactaaaaatacacaaaccagctatacgtggtggcgtgcacctgtaatcccagctacttgggaggctgagggctgaggcaggagaatctcttgaacttgggaggcggaggctgcagtgagctgagatcatgccagtgcactccagcctgggcaacagagtgagactctgtttcaaaaaaaaaaaaaaaaaaaaaaaagcactgtggcagcttaaaggaatatctgttcacatgaaattaccataccacaagcaagtgcaaattaggtaatttcacatttctccttttgtaagtatcacaaaacatttagtcaacagttgattttgtaaatcttaatcccatattctagtaacatcaactggggataacttacctccaatctgaattctggcatccctaatgtgggttcatgttccaacataatgcagatc

SEQ ID NO: 345468 - DNA, 589 bp, Homo sapiens
gtcattgtccaaaaataaaggactctaattaaaatgcaatgtgggccgggtgcacaggctcatgtctataatcccagcactttacgaggctgaggctggtggatcacctggggttgggagttggagaccagtctggccaacatagtgaaaccctatctctactaaaaatacamaaaccagctatacgtggtggcgtgcacctgtaatcccagctacttgggaggctgagggctgaggcaggagaatctcttgaacttgggaggcggaggctgcagtgagctgagatcatgccagtgcactccagcctgggcaacagagtgagactctgtttcaaaaaaaaaaaaaaaaaaaaaaaagcactgtggcagcttaaaggaatatctgttcacatgaaattaccataccacaagcaagtgcaaattaggtaatttcacatttctccttttgtaagtatcacaaaacatttagtcaacagttgattttgtaaatcttaatcccatattctagtaacatcaactggggataacttacctccaatctgaattctggcatccctaatgtgggttcatgttccaacataatgcagatc

SEQ ID NO: 345469 - DNA, 589 bp, Homo sapiens
gtcattgtccaaaaataaaggactctaattaaaatgcaatgtgggccgggtgcacaggctcatgtctataatcccagcactttacgaggctgaggctggtggatcacctggggttgggagttggagaccagtctggccaacatagtgaaaccctatctctactaaaaatacacaaaccagctakacgtggtggcgtgcacctgtaatcccagctacttgggaggctgagggctgaggcaggagaatctcttgaacttgggaggcggaggctgcagtgagctgagatcatgccagtgcactccagcctgggcaacagagtgagactctgtttcaaaaaaaaaaaaaaaaaaaaaaaagcactgtggcagcttaaaggaatatctgttcacatgaaattaccataccacaagcaagtgcaaattaggtaatttcacatttctccttttgtaagtatcacaaaacatttagtcaacagttgattttgtaaatcttaatcccatattctagtaacatcaactggggataacttacctccaatctgaattctggcatccctaatgtgggttcatgttccaacataatgcagatc

SEQ ID NO: 345470 - DNA, 621 bp, Homo sapiens
ccttgttcttcttttgagacatcttcattgctgcctgtgatacctgctagctgccagccatgccagctattgatatttgaggggctccaaggatcctgggctgtctcacatcatgcttttgaatatgttctrccttagccaaagttggcctcccccattttgtctatctgggtaaatccttctgcgatcatcctctaataggtaaaggttcctcctctaggatttttttcttgactctcacaaccaaggatttttgagttcttctttattaatgtcctacggctgcctcaggacatgttctgtgagttacagatatttatttcattcttgactctgaggtctttagtgtcaggaactgtgacttcaacctccttaccaccacttcttagtctggctcctggcccatgacagatagtcagtaaatgtgaaattccggaggaaggagacggtggagggggaaattcatctccattcgtcttttaaaaaaaaaaatctacatcttgctaagggaattcaaggtcattctcttgcccacccttagctaaaatgcacagtaagctggattcttgctcaaaggaagccttgtaatggagaatattttggataccaagattagtttta

SEQ ID NO: 345471 - DNA, 580 bp, Homo sapiens
caatcatggagacagactgccctggttcaaatcccagctctgccatttacaagctttattaatttggcaagctgtttaatagctcagcttctccagctataaaatgggggatagtaatagtacttcttaggggttgtgaggatgatttcatatatgtaaagtgcttatacaggactctggaatatgataagcactatatgagtcttcattctcactcattgtctagatcaggattttcctaaatatttagctgcagagtcttttgtttgacacaaccttccacagaagttcacatataaaacataaatgcagatctgtcttatcgaaatggggtatagggctgggattaagcccagagctcctccctgaccatgcctgaggggttctttggagcacttaagactacasaagcctggttgagaagctctgatcacatcacaaagcccacattttctagaaggactaagatcacctgatcctcaatcccctcaatccagagcaagctccttcgaagacccatctcttctacccccgttccctgcaaagaacacacacaccggacagaaagaaatgggttctg

SEQ ID NO: 345472 - DNA, 610 bp, Homo sapiens
tactgccagtctaatgggtataaagtgctatctcattgaggttttcaattcacacatccccgatgaacgaagttagcattttaaaatgcttattttctatttagaatttctattcttgtcatttcccctctctccttccctagagttctccctctcactttccttctttccctctstgtctcccattatttttatatatattgtggtgttgttgatgtgtaagagttctttttatgttctgcacactaattatttgtcagatatgttgctcacattttcatctttatagtgatgcttttgaagcccagaattatcaaattcaacgcggtcaaatttatcatttttctcctttgagtgtgtgttattgtggtgtgttaagaaattcctctctagccctaattcataaatatattcaactacactttcctaataaaagatttaaagttttgtttttcatgttgtggtttttaactcatgtataattgattttgtgtttatggtaagagataaagttccatttttgtttctttctagaaaatcaatagtcttaaaaatttattagaatatcctttcttctgatctgcaaagcaggttttgtcaaatgctatgt

SEQ ID NO: 345473 - DNA, 610 bp, Homo sapiens
tactgccagtctaatgggtataaagtgctatctcattgaggttttcaattcacacatccccgatgaacgaagttagcattttaaaatgcttattttctatttagaatttctattcttgtcatttcccctctctccttccctagagttctccctctcactttccttctttccctctgtgtctcccattatttttatatatattgtggtgttgttgatgtgtaagagttctttttatgttctgcacactaattatttgtcagatatgttgctcacattttcatctttmtagtgatgcttttgaagcccagaattatcaaattcaacgcggtcaaatttatcatttttctcctttgagtgtgtgttattgtggtgtgttaagaaattcctctctagccctaattcataaatatattcaactacactttcctaataaaagatttaaagttttgtttttcatgttgtggtttttaactcatgtataattgattttgtgtttatggtaagagataaagttccatttttgtttctttctagaaaatcaatagtcttaaaaatttattagaatatcctttcttctgatctgcaaagcaggttttgtcaaatgctatgt

SEQ ID NO: 345474 - DNA, 610 bp, Homo sapiens
tactgccagtctaatgggtataaagtgctatctcattgaggttttcaattcacacatccccgatgaacgaagttagcattttaaaatgcttattttctatttagaatttctattcttgtcatttcccctctctccttccctagagttctccctctcactttccttctttccctctgtgtctcccattatttttatatatattgtggtgttgttgatgtgtaagagttctttttatgttctgcacactaattatttgtcagatatgttgctcacattttcatctttatagtgatgcttttgaagcccagaattatcaaattcaacgcggtcaaatttatcatttttctcctttgagtktgtgttattgtggtgtgttaagaaattcctctctagccctaattcataaatatattcaactacactttcctaataaaagatttaaagttttgtttttcatgttgtggtttttaactcatgtataattgattttgtgtttatggtaagagataaagttccatttttgtttctttctagaaaatcaatagtcttaaaaatttattagaatatcctttcttctgatctgcaaagcaggttttgtcaaatgctatgt

SEQ ID NO: 345475 - DNA, 584 bp, Homo sapiens
tctgactctgccacttaatagctgtgtgatttgacacagtcgaaattaatttcctccttctctatctcagttttcttgtctgtaaaatggggaaaataagagtacctgctgcaaaggactgctgtgaagaagtagataatatatgtaagtcacaaaaacagtgactagtgcattataagaactgcaaaggttagcttttttatgactcttaattattactaagaatagttgtgcaacaagtaggtgccgaataaatatttgctatttgaactgagcactaagactgataaacacctgtccccattacagcattagctactgcatccactgccygcctccatgctctagtaacacttgtagttatagtacttgtcacactgtatcataattgtggtccacatctgtctcctccacttgaactgcaattattttaagggtagagtgcatgtcttatttatctctttttcatcagcatttatctcagtgaactctataaaagttcacaataaatgtttgtggatatagtgattaattaaaattaatcagcaacattcattatgcacctacaatgtgccacgcacatt

SEQ ID NO: 345476 - DNA, 537 bp, Homo sapiens
taaaaatctacccctcttttcagtatggaccctaatcccagctgctctttgtggcttgcctgatctctgtctctctacaggctccaatcaaacctttctcctcagctctcacagcactttatgtcttcctcctagaacattctgctttatataaagcagaatgagtctctacgtgcattatttttccttctagattataacctaagggcagagacagttatatttatcttagcatctccctagcaccaggcagattattcagagaataaacatgtattgactaagcaattgaacaattgttgacaaattcagatgccaactagagattcttggacatggattttaaagtattgatttatttttttcagatgaatccaacagaaatggggtaatctaatttacaccaaagatcagttaaagcatagttcatgtttttctaattgactgtktagttaaacctaaaatgacaaagtaaatgtcaatatcagacattcacagtggaaatgtgtgctgttaaaaagaaatagatgaatgggt

SEQ ID NO: 345477 - DNA, 514 bp, Homo sapiens
catattattttctccaagagaaacaccattttatccaagcatttccatctattaaaattcctcttttttagataatttaacaggtatgagaagacatttgcacragaatgaaatgttcattacagtcaagtctatgataggggaaaattaaagccaacttaaatgtttaccagaaagcaactaattaggtaagtatggtacatgcagttgttcaatggaatacagttcagctgttaaaatgacatatatgtgtacatatatatacattgtatttattatatagacacggaaagtctatagaatattgtcaatcaatattatatagacatggggaaagtctgtagaatattgtcaatctctatatatagtatatacatactatatatacagtatatagttcatagcatatatatacacattgcatttattatatagacatggggaaaagtctatagaatattgtcaattcaaacagtaggttttgtaatttttttgtaaatatgttttaaaagtg

SEQ ID NO: 345478 - DNA, 514 bp, Homo sapiens
catattattttctccaagagaaacaccattttatccaagcatttccatctattaaaattcctcttttttagataatttaacaggtatgagaagacatttgcacaagaatgaaatgttcattacwgtcaagtctatgataggggaaaattaaagccaacttaaatgtttaccagaaagcaactaattaggtaagtatggtacatgcagttgttcaatggaatacagttcagctgttaaaatgacatatatgtgtacatatatatacattgtatttattatatagacacggaaagtctatagaatattgtcaatcaatattatatagacatggggaaagtctgtagaatattgtcaatctctatatatagtatatacatactatatatacagtatatagttcatagcatatatatacacattgcatttattatatagacatggggaaaagtctatagaatattgtcaattcaaacagtaggttttgtaatttttttgtaaatatgttttaaaagtg

SEQ ID NO: 345479 - DNA, 587 bp, Homo sapiens
ttataccagacaaaaaagaattcttcctgaggctacrttctgctctggttctatgctctccacttactctggtttcccagaacttttttgtgcatattgagggcactggaggttccttggggcattgaatagaaaaagggagagagagagagaaacaagttgttattaggcttgataggtttgttcaaaagagaaattaagatacttaatatttgatttttttctacccatctagacactcctggggtgaaagccccatgtgagaaatgactaaagaaaaataaaacagagccactgccctcagggactctacagataggggcagggataagtcaagtaggcatatgtctaaagcatgagatagagcgggcaagtggtctgcaaaagagtggactgatctgctcaagggggcccacatgcccgtcccccatgatgtatagaaatgcccctcaatagtaacacatttaccaaaatacagagcagtgctccaagcaggccagggatatcttgagatcctagaaatgaagagggactcaaagctggaataataagctggagttgaagccaacatgtccaaggaaggaaat

SEQ ID NO: 345480 - DNA, 587 bp, Homo sapiens
ttataccagacaaaaaagaattcttcctgaggctacgttctgctctggttctatgctctccacttactctggtttcccagaacttttttgtgcatattgagggcactggaggttccttggggcattgaatagaaaaagggagagagagagagaaacaagttgttattaggcttgataggtttgttcaaaagagaaattaagatacttaatatttgatttttttctayccatctagacactcctggggtgaaagccccatgtgagaaatgactaaagaaaaataaaacagagccactgccctcagggactctacagataggggcagggataagtcaagtaggcatatgtctaaagcatgagatagagcgggcaagtggtctgcaaaagagtggactgatctgctcaagggggcccacatgcccgtcccccatgatgtatagaaatgcccctcaatagtaacacatttaccaaaatacagagcagtgctccaagcaggccagggatatcttgagatcctagaaatgaagagggactcaaagctggaataataagctggagttgaagccaacatgtccaaggaaggaaat

SEQ ID NO: 345481 - DNA, 549 bp, Homo sapiens
agcagggaagaaagtatttcctgaaatttccttaggaccaaacattgattttgagaactctgcttctgtttggccaagagaaaagtagaaaagtctggcgcttgttctgttcctcaaggtcaaatatatgagataataaagacagagttatgaaattactatccatgtcctgaatgtaaaacgtccatttactctttaaaaaccaaaaagaagaggagaatccaacatgctgaaaaactaaacattatctttcttaataacccagcttggaaattaatgagctgtaggaaccraaagagtcactttgctttggctcagacagaaaacaatgatgggattctgtgccaatgcattgtggagctttgtaattgttctcctaaatggtcaatagttttaatttgtatataataacatgattttaatcagcctaggcaactgtttatgcaggtttttttttcctcacagaagttgcaacatgattgatatttaaatagagtttctcgtttgacttttcaaagaagataaatgcccgcatttaagaagacagga

SEQ ID NO: 345482 - DNA, 546 bp, Homo sapiens
aagtcatacaactgggagtttgtgtggatttgttcttgtggccagtcatgtggaaggccttccagaatattaaattaagcagacattctgttcccctgcagctaatacacagagcacgggggcaacatggcatatgctttgacaagcttaaaatcsttgacaatagtgaacagatttccaggaacagaaggtgacctgttgaattatcctggaacaattctaacaccttaaggagaaagaatggtcagaccaaactcagcatggttacatggacaattttaaattaaggagaaaagacactgtagattttgaagtgagagaattgagtaagaggtgagagaatgggacgaggcaggtggttttcctccccagagaaagaacgggttgtcggtacctacagatgtagtgagtacaaacattagacacgcttagttcttttcttaagttgagttccccagaagcagacagcaagacctggatttatatataaatattttatgaaggaagtgtttccaggagaagctggtaagagagtgaaagacaata

SEQ ID NO: 345483 - DNA, 540 bp, Homo sapiens
gaaaatttcatggacatttatcagttcccaaataatactcttataatttcttatgcctgtcttactttagtctcttaatcctgttatcttcgtaagctgagaatgtacgtcacctcaggaccactattgtacaaaytgattgtaaaacatgtgtgtttgaacaatatgaaatcagtgcaccttgaaaaagaacagaataacagcaattttagggaacaagggaagacaaccataagggctgactgcctacagggtcaggcagaatagagccatatttttcttcttgcagagagcctataaatggacatgcaagtagggaagagaccgttgaattcttttcctagcaaggaatattaatagttaatatcctggggggaaggaatgcattcctggagggaggtcaataaatggccgctctgggagtgtctgtcttatgtggttgagataaggactgaaatacaccctgatctcctgcagtaccctcaggcttattaggatgggggaaaaaaccccaccctggtgaatttgaggtcagactgg

SEQ ID NO: 345484 - DNA, 526 bp, Homo sapiens
actgtcaaagatatggaaattatggacatgattatgatggcaaaagcatattccttatagtcttcactaaaccacaaacagacactgaagagttgaaatatataaaatggatttagaacctgttggcagacataaaaacaggaagacaagggagagttttagrcttcactctgctcttcatttacttgttttcataatcatcttcatgacatacatcatcccacacaatattcttattatatttattcggcaattgacacgtgccagacaccgctctaagcaactttacttgaattttctcattgaattcccacagttaccttattaaccagaagttgttacttatctcctttgtaatgataaagaaactgaaacttagagcttgagaaatacgtccaaagtcatgcgactatgattgccacagacccaagacttaaacacaggcaatctgaccccagagcacttacttttaatcactgcctcactttataatttacaaagtagtgtctcatgtattgacatgtcg

SEQ ID NO: 345485 - DNA, 561 bp, Homo sapiens
atttactagctgtctatttggctaactgataataatccttttgagctagtataggcaataatatgcatggtacctaatctcctgttcttctcttgtcaagcctgatccaaatttttgatgtatcttggcagaactaagccagtcttccaaagaactaaaataataataatgaaaagaacatatttagcaataatatttttgagataacatttttcttctttggctgtacttgctaaaacaacttacccaattttctggaactgtccttctaagtagttccaaacatatcttattttctgcactttgatgcatctcacctgcaaaagaaaagtactaagaaaacctctagtttgaggatcagagaataaacagcaacccagtggctaaagaagcatttgtttgaaaagcaaagataaaactctaacatacttatttaagattttatccttttctaattyaccctttgcttttctaccatacaaatggtattctttattagaagtcatcattcaatcaacatgtatcatggacctactatatagaaaaatatatatgaataaa

SEQ ID NO: 345486 - DNA, 568 bp, Homo sapiens
tccacctaacacagaactcactctgggcagaaaagcagtgcacattgcttgaaaacattattaggctaacaaatgcagttgcctagggcaaaaaaattacagttgatacataaaataaccatctaaagcctggaagaaaagctaaggaaatttccttggaggaattagggcagtctaaagcatctgtgtatgctgggaaatgtagaatgctatgtaaatgcccagggcaaaagctatgtgcatcccagggcatagtacatgctcagtaaagaccagagaaaacccaaagccttcagctctggattatctccagactcagtgtaagcctggcaaagtgttgaataagtactccagcacagaaataatctgtaaggactggagaaggttttgtttgtttgtttgtttgttttttcactcctagaggtcaagcaaatctctakcaaaacattagctgaacaaaagctgaaggaacagggacatatgcgatctcacatgaaaactagtacagtctttccaaaaaaagctttggaaagtcactaaacaaatggactattacagccttcaacaa

SEQ ID NO: 345487 - DNA, 559 bp, Homo sapiens
tatgtgcatcccagggcatagtacatgctcagtaaagaccagagaaaacccaaagccttcagctctggattatctccagactcagtgtaagcctggcaaagtgttgaataagtactccagcacagaaataatctgtaaggactggagaaggttttgtttgtttgtttgtttgttttttcactcctagaggtcaagcaaatctctatcaaaacattagctgaacaaaagctgaaggaacagggacawatgcgatctcacatgaaaactagtacagtctttccaaaaaaagctttggaaagtcactaaacaaatggactattacagccttcaacaaagagtgaaacaaaaaattcaaaccctaaaataggagaagaatctaattttcagagttagagcattataatattcaacagagcaaaataaatggacagaatttgtccctgaggaagcacagatattagacttattaggtaaagactttaaaacaactatcttaaatatgctgaaataactaagggaaaccacgggcaaagaactaaaggaaattaggaaaacaatg

SEQ ID NO: 345488 - DNA, 533 bp, Homo sapiens
aatgaataaagaacatgtggtatacacgatggaatactattgagccttaaaaaaacaaggaaatcttgttgattgcaacaacatagatgaagcttgaggacactgtgctaagtggaagaagccagacacagaaggacaaattccacatgacctcactcatttgtagaatcaaaaaaagttgatctcatagaagtagagagtagaatagtggtttcttaaagctggaaagaatagagatagagaggagaaggggatggagagaaggttgtcagtatgtacaaagttatagttcaataggaggaataasttctattgttctattgcatagtaggatgattatcattaacaatagcagactttatatttcaaaattgctaaaaaagagaattctgaatgttctcactacaaaaaatgataaatgtgcaaagagataaatatgctaattaccatgattttactattacacaacgtatacatgtattgaaacatcacattgtacctcataaatatgtacaaatatgtgttaattaaaa

SEQ ID NO: 345489 - DNA, 606 bp, Homo sapiens
cggttttattaatcacacacacttacacacttgcccatgagccagcactgttggctggcatacaatgtgtgctcctcaaatgtataaaaaagagagagatataaggaaggaaagcctggctttgatatttactgggttgtaaagtcacttggtctctttgtatcctcatctgtaaaatggagatgataatgcccattttccagggttgttatgagaattaaataatcaatgacatactgctttataaactgtaaagtgaatagtattttaatacacggtaaaaagcactacagcggtcacaaatgaaaacacagagctaatgcaggacaggcaattaactccctcccttctgaactggcgcaaagaatgaatcaacaaagacttaacagagraggtgatatgtggctgaggaatgaggagaatttaataagtagagacaacacctactttctacatttacttgagaaagagaaagcatgtgtgtgtgttgactcctcactagaaaatcactctgtaaggacaaggatttccatctgttttgctcatagttatattcccagtgcctatgccaatgtctggtacatggttggtgtgtggtaaatacta

SEQ ID NO: 345490 - DNA, 615 bp, Homo sapiens
tggtggcataattcttccacatttattcgtttcaaaaattgtcttgactatcctacatcctttgcatttccattccaattttagaaccaagttgtcaattaccacacacacacacacacacacacacacacaagtctgaagagattttaaattggattactaatggctaatccccaaacttaatacagctcttygtttatttaggtctttactttctcttggcgatgatatgtacttttcagtttagatgtcttgtacaactttgttagaattattacaaggtaatcaatttctttctttgaaggtattataaatggtatttaattaattttcaaattgtttgttactaatatatacaaacacaattggttttcctatattgacctggtatccagcaatctgaataaattcacttattaactcttatactttgtatattcttttggatatttttccacattatctacacatagagtttagttcttgttttcaattgttattcccctcccttcccctcccctcccctccccttccctttccttcccttccctctttctttctctatttcttgcgttgcactggttaagacttctagtactgtactgataaatatta

SEQ ID NO: 345491 - DNA, 382 bp, Homo sapiens
agagaaagaggagaaccaatagaaaacatgcttaaaagcagggtgaatgcatatttctaacttaaaccttatttgaataatctcaaaatagagtggctgcctcattgaacttaatgaacttttttctcaggtggatgatagtgttgagggtcartggaaaaaatcttaagccaagagatgttttatagcatgatctaaactggcataaaatgcaggatgttcccgcatcaaaagtgctctagacacttagtaaaaactaagtttctaaacatgatagtcctgtgatctggacctgaaaattcagagttcagtcatatttttaaaaagcacaaaaacaacaatagcagaacctaaaataatagtatagtagagatattattca

SEQ ID NO: 345492 - DNA, 382 bp, Homo sapiens
agagaaagaggagaaccaatagaaaacatgcttaaaagcagggtgaatgcatatttctaacttaaaccttatttgaataatctcaaaatagagtggctgcctcattgaacttaatgaacttttttctcaggtggatgatagtgttgagggtcaatggaaaaaatcttaagccaagagatgttttatagcatgatctaaactggcataaaatgcaggatgttcccgcatcaaaagtgctctagacacttagtaaaaactaagtttctaaacatkatagtcctgtgatctggacctgaaaattcagagttcagtcatatttttaaaaagcacaaaaacaacaatagcagaacctaaaataatagtatagtagagatattattca

SEQ ID NO: 345493 - DNA, 439 bp, Homo sapiens
gaccctttgtgttagaagagaatgatttttctgatttagggtggaaaaatgctttggcacacaagtattttagtatttttaatgttrcatgaatctcttgtcatatgaatatccctatatcatcattgtgatgacggcatatacaaataaattctcactgtccctccaggagctgagctcaagccacctttccattcttatttctccccacactctttcaggacccttaggttctagtccagtggttctcagcattgaatgcaaaattgacttaagtgaaaaaaaatactgattttttaagccccatataaacaactgaatcaggatctctgaatggtgagatcccttggtactgctattttctccaaagctcccaagtgattatctcatgcagccgaagtacggaccactgcccttgtcaaactgagtgactcctggt

SEQ ID NO: 345494 - DNA, 580 bp, Homo sapiens
aagactttatcagatgaatgaaaattgaagataatttgttgacagtggacatgctcaaaaaataaacaacaacaaamgctacagggttcttcaggttgaaaggaaatgataccagatgttaacttgtaacttaaggaatgaaaacacagaaacagaaatgataatgatctgggtaaatataaaagtctaattttctttactcatgttctttaactcttccctgttgaaagtaaagactatcacatcatctggtgggggttttcaacatatgtcatagttatgacgataataacataaagaagagaaagcaagagacattcctggttataaggcttcttgaaaggagaggtatgtatgttgtgatgcctagagcaaccattaaaaattaatcatataacatctggctggctatccttaacatagcttctcccaggtttctaccaaactatgtatgaagatcctcaaaagagccgaagtggtaggaaggagctacctgaggctggaaggatacagggagccctgagcgctcataggcttcctccatgctccacagcaggcccctgacagcctgtctgctttt

SEQ ID NO: 345495 - DNA, 596 bp, Homo sapiens
tttcctggtccctctgtagggctttgctctaaataaggcagtagagttaagtggttttatactttaaatgggccaagatccatagaaccgtggatctgataattccactttattaaaaaagaaaatgatctcagttcatttaatttttattaaatagcttatgcattaaattttaaagaaaggatatatatatatatgttacatttttaagtaactygttaacttctaattgaattctaatagttgagactacgttattggcttccagaagaatgagcaaagcccctttcctctcctccaaccagcccttccttgatccttctgtaaatgctgatctgatggctgagtatctactacagggctcttttctagaggtggtttcaaaggggatagaggtcacggtatataagcatggtttctaaattttcctttccccaagactgaggagtaagagagtagggtctcacagcagcctctctctgtccttctctctctctctctcaccttctttttgcttcttctttctctcttttctgatgttctgtgttctcatggaacagtttctgtcagcttggagctatgcattaatggcaaac

SEQ ID NO: 345496 - DNA, 565 bp, Homo sapiens
attctcctgcctcagcctcctgagtagctgggactacaggtacaggccaccacgcctggctaacttttgtatttttagtaaagacggagtttcaccatgttggccaggctggtcttgaactcttgacctcaggtgawccacccgccttggcctcccaaagtgctgggattacaggtgtgagccactgcgcccagtcatggatcagatttaaatttgattatgtacaatgtttactgaagtttggtgcttgataaataagaaaaaaacatgaggtagctgcactgacaggaaatctttcctgtggaagtggttacctaggcagagtgtgtctacatctatcaactagaattcttaaatgtcctagataaatcctttacatgccttgtatttagtgctattaaaccaatatattttaataactctaaaaacttttttgtgacaatgttttgagcattacatctgaaatcttacataataataccatttctaaggcattttgcaatattgtcctagtccagatgtctggttcatttttcacagtgtctgatagaggaaaaacttataa

SEQ ID NO: 345497 - DNA, 518 bp, Homo sapiens
cgcctggctaacttttgtatttttagtaaagacggagtttcaccatgttggccaggctggtcttgaactcttgacctcaggtgaaccacccgccttggcctcccaaagtgctgggattacaggtgtgagccactgcgcccagtcatggatcagatttaaatttgattatgtacaatgtttactgaagtttggtgcttgataaataagaaaaaaacatgaggtagctgcactgacaggaaatctttcctgtggaagtggttacctaggcagagtgtgtctacatctatcaactagaattcttaaatgtcctagataaatcctttacatgccttgtatttagtgctattaaaccaatatattttaataactctaaaaacttttttgtgwcaatgttttgagcattacatctgaaatcttacataataataccatttctaaggcattttgcaatattgtcctagtccagatgtctggttcatttttcacagtgtctgatagaggaaaaacttataaacaac

SEQ ID NO: 345498 - DNA, 564 bp, Homo sapiens
aggctgtgcagtcaagaatgtggagtgtggagaataaagggccgtgagagctatctaggagccaaagcatggagaaccctaactgtccacagatatgtctaaaggcactggtgggctgggcacagtggctcatgcctgtaatcccagtactttgggaggccgaggtaggcagatcacctgaggtcaggagttcgagaccagcctgaccgacatggagaaaccccagttttgtaaaaatacaaaaaatcagccaggtgtggtggcacatgcctgtgatcccagctactcgggaggctgaggcaggagactcgcttgaacccrggaggcagaggttgtggtgagccaagattgtgccattgcactccagcctgggcaacaagagtgaaactccatctcaaaaataaataaataaataataaataaataaaggcactggtgactgaaggaggatgtagagagatttaaccactttaatcaggagagtaatatcatatttatgtataagagagagcactctgtccatagcacagggaatgaatcaaagtctggtgaggttggaggctg

SEQ ID NO: 345499 - DNA, 526 bp, Homo sapiens
actttcattaggaaaatggtacttggcactgcagaagtcccagcattacaggatttttatgaatctatgggattttgagggaaaagaacctgctttgccatggtctgcgacacatctattctttgtaagctaacataggaagaaggtgtgtacacttgtctccattacctgtctttctgggctgcctgagagaaatggatttgatctgaacttgaatgggaaccatgatacaccaataagagtgcgttcacagcctctcattttatctctgagaaacattttatgattcttctttatcttacagcaatgtcagccaaacatctcatcattatgccacgtgagtgagaaatcaaggcagtgtaaccttaagcaagtcacctctctggacctcagttgccatgcctatgatatgagataacctcacaggtcccacccagctccagcactgccatttgaaaatgaactacagttagtccataacacccagttttggactggaagcarcagctttaccaaatgctgcatc

SEQ ID NO: 345500 - DNA, 594 bp, Homo sapiens
aatcacaagttgtgacgattccaagttcacagaagcccaagggattttgacatttctccaaggagttagccagaagagatcctcgccggttgagttcagatggaagagaacagtaagaaggaccatcgggctttgctcaaccagggagaggaggatgaactggtgagtcttccctttattttattagtcttctcaaagagcccaaggcggtgagtatgggctacagctgaattagaaaatagagtgtagcatttatgcttcaggctttaggaccttgaaaggtttcagtctggtaaggttccttaagggctgcaaagcaccattttattgtggggaaacctgcaggggctgagaaacttgtgacctctggatgatagaattcttgccatcttcatatgaacctgtgatgtttcctcgcacatttacagtatttgcagagccccgcatggtgctcagtggggtgtctcccccttattatctggattgctatgtgatggaacaaactctattgaaaacaagaactcttttttattctcrtgctttgggtatgtatgcataacctaggcttagggggctctgggctgaagtcatgct

SEQ ID NO: 345501 - DNA, 598 bp, Homo sapiens
tctccctccacctatccctgtttgctactctaaggaaaacatatgatttcatctacatctatgttgttcaataaggcagccatrggccacgtgtagtttctgagcactagaaaagtagctagtccacacaaaatatgctttatgtgtaaaatacgcaccagattttgaagaatttagtaaaaaaaagtaaaacatcttattaataatttttatattgtttacacattgaaatgacaatattttagatagcttaggtaaaaatttcacctgcttctctttacatctttaatgtggctgctaggaacgttaatattaagaaggcagctcatatttgtggcttgcattattgtagcacgctaagcttgacaatagcacagcactttaaaatcttcagaattaaagcttttaaagaatgaaaatctattcacctgtgttcactgctgaacaattctgttagctctgatgttttcaacatgtagataagagtgcatgaaaaattacattgctctttattcttctctaactagttgctttatttgtaaagtttatagcctgatactttaattctctcactcacaaacaggacattggtatcata

SEQ ID NO: 345502 - DNA, 584 bp, Homo sapiens
ctctccctttgcagtcagtttttcttgtcttctccagaggtctcaggacccatagcttcactaagagcccacaggagccttcaaaacataagacccgaaataaatctgaagcctccaggttatatagctccatacttaatggaatgggatttggcttcaggctgacctgggttgaattctagttctgttaggcaagttatttgacctctctaatacctaccatttgggattgtggtgaggattaaatgaggtaatacagcttttctaaacatatcttctgcagtaggtattatataagaagtttccctgttctccttccctatcaggtttgagaaatactgggtgaaacgggtacrcaggtaacagcagggcttctcaaatcttgagtatatttgtcttggtctgctttgtgctgctgtaacagaagaccacagactgggtgattcataaagaaaataaatttatttattattgttctggaggctgggaagttcaaggtcaagggaccacacctggtgagggccttcttgctgtgtcattccatggtggaaggtaaaagggcaagagagcacgagagagcagga

SEQ ID NO: 345503 - DNA, 591 bp, Homo sapiens
ctgggcctttcctgaagtcagagatagttaaagcacgagagaggtctgatgcaagggaggttctaygttgcatttttgaagatggaagatgccctgtggtaaggagtggttgctaagactgagagtcgcttccagctgactaccagcaagagaatgggggccccccatcttaaggccgcaaggaaccgaattctgccaacaaccatatgagtgtgaagaggtctcttagctccagaaggagcacagctcaggtgacgccttgagtttagtcttgtaagacgctcagcataggacccagctaactgaatacccaacccataaaaactgagacagtaaatctgtgttgtattaagacactgagtttgctatgcagcaacagaaaaactaatacaccatcacagctgtccaacaagagagtatgcagccctgtaaggcaacgaaaagcccctcttaagcagacgatagatgctcatctgcaaagaacactgtatagctgttttttcctagagagaaatttgaaccaaataatctctgagactccctccctggttaacaatgctcttattttacaaatgacttttaaccgaactt

SEQ ID NO: 345504 - DNA, 520 bp, Homo sapiens
actaccagcaagagaatggggrccccccatcttaaggccgcaaggaaccgaattctgccaacaaccatatgagtgtgaagaggtctcttagctccagaaggagcacagctcaggtgacgccttgagtttagtcttgtaagacgctcagcataggacccagctaactgaatacccaacccataaaaactgagacagtaaatctgtgttgtattaagacactgagtttgctatgcagcaacagaaaaactaatacaccatcacagctgtccaacaagagagtatgcagccctgtaaggcaacgaaaagcccctcttaagcagacgatagatgctcatctgcaaagaacactgtatagctgttttttcctagagagaaatttgaaccaaataatctctgagactccctccctggttaacaatgctcttattttacaaatgacttttaaccgaacttgccatgttgttccatgcccttgatctagggcaaattctgttttcagaaattgttcttgctacttggg

SEQ ID NO: 345505 - DNA, 591 bp, Homo sapiens
ctgggcctttcctgaagtcagagatagttaaagcacgagagaggtctgatgcaagggaggttctacgttgcatttttgaagatggaagatgccctgtggtaaggagtggttgctaagactgagagtcgcttccagctgactaccagcaagagaatgggggccccccatcttaaggccgcaaggaaccgaattctgccaacaaccatatgagtgtgaagaggtctcttagctccagaaggagcacagctcaggtgacgccttgagtttagtcttgtaagaygctcagcataggacccagctaactgaatacccaacccataaaaactgagacagtaaatctgtgttgtattaagacactgagtttgctatgcagcaacagaaaaactaatacaccatcacagctgtccaacaagagagtatgcagccctgtaaggcaacgaaaagcccctcttaagcagacgatagatgctcatctgcaaagaacactgtatagctgttttttcctagagagaaatttgaaccaaataatctctgagactccctccctggttaacaatgctcttattttacaaatgacttttaaccgaactt

SEQ ID NO: 345506 - DNA, 591 bp, Homo sapiens
ctgggcctttcctgaagtcagagatagttaaagcacgagagaggtctgatgcaagggaggttctacgttgcatttttgaagatggaagatgccctgtggtaaggagtggttgctaagactgagagtcgcttccagctgactaccagcaagagaatgggggccccccatcttaaggccgcaaggaaccgaattctgccaacaaccatatgagtgtgaagaggtctcttagctccagaaggagcacagctcaggtgacgccttgagtttagtcttgtaagacgctcagcataggacccagctaactgaatacccaacccataaaaactgagacagtaaatctgtgttgtattaagacactgagtttgctatgcagcaacagaaaaactaatacaccatcacagctgtccaacaagagagtatgcagccctrtaaggcaacgaaaagcccctcttaagcagacgatagatgctcatctgcaaagaacactgtatagctgttttttcctagagagaaatttgaaccaaataatctctgagactccctccctggttaacaatgctcttattttacaaatgacttttaaccgaactt

SEQ ID NO: 345507 - DNA, 599 bp, Homo sapiens
atcttggactgtttttactttctccctttctaacaccccagtccaactttttgaagttgctgagttcatttactactggttaggatttcccttacactgtgacccttctgtttcaaaaatctttatttagcacttagatgacacattctcataatctatccttaacttagatttatgtacaagtgttcctccttctccaccctctctctttacttcctcttttctcatattgaaatttctgccgtatttctttccttgcttgtttacaaatttttttcgctgaagtattgyccttggatggaatgaaggggtgctcttagatttcttacatatgcttgaatatctttctttgctctgacacatgaatgacatcttgctcagatataagattcttgaattattgttcttttttcttaatgatctgtatgtaggggctattcctttgccttgtggcttctgatattgctcatgacaagtccagtgagagtccactgtaagtaacttactcttttctgcacataaactttttaactttgaaatttagaaatgtttgcctttgtgtttcccttatttcattaacttagtctggaacatggaca

SEQ ID NO: 345508 - DNA, 599 bp, Homo sapiens
cttctcttaatggacatgcttcctgggctgtgttttgaatggattccatttgattcagcaaacatgtatggagctccaagtttgtgcaagatactggagcaggtggtggggatgggcaggattgccgagtgaataaatctgggtccttcctggatggggaggtgtgatgggcatgtgatttgccacagctcaaactggggtatgggagggctgtgagggggtacaggtgagggtctaggggctcagaggagggcgagggcagttctgacaaggcgtgcatggggcagcctttgtcagaggtggagccgggcagtgtcctcagggtagagggtgggcaccggtgggaccttgggcttgtctgtgacagggatgtggcatgcaggagggttkggcagagggtgagtggagaggggctggaggaaattggggggcttaggtcaagaaggtggacttgatcctgcaggatggtgcctgcttggatttgggagttaaaagtattcctttgggtgtggactggagggttggttgcagggcaaggcctgaagctgagagagtgatgaggagatggatagaacaattcagcctggaggtgatggtgg

SEQ ID NO: 345509 - DNA, 285 bp, Homo sapiens
gacctctgtgcgcagacagcctggtccccaggccctgccatcgtttccctcaccctgtggctcttcccttgcccgtgggaggttgggggaaatctttgttctcccagccacaagcctgactccccaactaggctggttatctgagtgttatttaaatctgtgtcctcagcacctggccagaggggtgctcaggtgctctgtgagggggagccctggggaggtgcaggtgagacyggctcccagcccacagagggagggagggagggaagggcagctggcaacccc

SEQ ID NO: 345510 - DNA, 568 bp, Homo sapiens
agctactcaggaggtcgaggcaggaggattgcttgaggccaagagtctgagaccagcctggacaatatagtgagaccttgtctttaaaataacaacaataatattttttgaaaaaagattctactttggcattccctcttccaagaatagtccttctgctgtacctccactacactacattttattgtgctttcttggctatttctgcatcccagaccataagcttcttgggggccatatcttatttctgcttgtggggtcagtgccttcctctcctagggactcaatatgtgttggttgaatggttctgagcagtgggtgcagacagcatgtcacagggttgctgaaagaattaaatgagtgcagtgttatttgtcatgtggtctgggttatgctgtgtgacagtcasaaattctcagtggcttaaaagcacaagattgtttttcctcactcacactatctatccggggaggggggtctgctcattatagtgactcggggattgcagatgacgcaggctcctccaatcttcatgcgaggcttccctggcaggggaagagaatatgga

SEQ ID NO: 345511 - DNA, 559 bp, Homo sapiens
gcatgcagccaaatcagtgcttagagaaaaatttatagccttaaatgcgtatgttggagtaaaaaaaaaaaaaaagcttaagctcatttaggcaaaaacctatctataggactggcagcattcccacacagagcccagaatggggtggtaattagggctatttgtaggcatcctggttctcctctccttctgggaacaggttggatggcacgtggtagggtggcccttccatgagccctctctaagtcaggtgtggccatgtgatttgcttgcgtcmgtggaaaaaagtttgaagcacctgctgcagtcttctgcattctccgtttcttctcctaccatgaccaccaacattccaagcagtggctgctgcttccgactgagtcccagagtgacgaagcacagagcagagtcaccagctgacgtgcagtggcctgggatatgaacaggaagtaagcctgtgtcgtgtgaagtcactgaaacgtgggggtggcgcgtgtgagcagcgtaattggtctatcctggttgacccagaaacctaccagaacaaaaacatagcatt

SEQ ID NO: 345512 - DNA, 564 bp, Homo sapiens
tgcagcctccattaccccatgagtccccgccttataataaatctccttctcactttatgcacccccctacccccagttctgtttctctggagacccygactcagctactgtgatcccagggaaagggagcctcagagaaaggaaccctgtgtcccccgggctttctctccagggatttgctgacacctccactgtgcatggctggggtgagaaaccaggcagaaaacagctgcttcgaggccagaattacaggtaaagagttcagcatcctcccctttgtgggggaactgtggagcacgaggccttccaacgagaggccctggcgtcagcacagaccacgagagggctgggctcaggatcagcgccactgaaggaccctgcctgcatggaggcgcgtgatccagtgttctttccttgctggcagcagaaaatgttactggctccgaaggaagatgacaacatcctgcctctttgctgaagtacgtgcacagcatccaatgcacccaggacctctcagggcgccagaccctggctctgtgcttcggttgcgtgactcgggcaagc

SEQ ID NO: 345513 - DNA, 564 bp, Homo sapiens
tgcagcctccattaccccatgagtccccgccttataataaatctccttctcactttatgcacccccctacccccagttctgtttctctggagaccctgactcagctactgtgatcccagggaaagggagcctcagagaaaggaaccctgtgtcycccgggctttctctccagggatttgctgacacctccactgtgcatggctggggtgagaaaccaggcagaaaacagctgcttcgaggccagaattacaggtaaagagttcagcatcctcccctttgtgggggaactgtggagcacgaggccttccaacgagaggccctggcgtcagcacagaccacgagagggctgggctcaggatcagcgccactgaaggaccctgcctgcatggaggcgcgtgatccagtgttctttccttgctggcagcagaaaatgttactggctccgaaggaagatgacaacatcctgcctctttgctgaagtacgtgcacagcatccaatgcacccaggacctctcagggcgccagaccctggctctgtgcttcggttgcgtgactcgggcaagc

SEQ ID NO: 345514 - DNA, 576 bp, Homo sapiens
ccgcccagatcacatgtgtgctatctcatgtgttacatattgtctgatctggagcccagtggcaagccggaacgtgcatctctaagaatcatgttyatttcttaagaggatagggctttgctccaaagccctggggccctcctagctcaccctcctagtagagcttgccaccatctccatgtagcagcacatggggtgccactggatctgttgagtcagaagtgacaagtggccaggtgcagtggctcatgtctgtcatcccagcacattaggaggccgaggtgggtggatcccttgaggtcaggagttcgtgaccagcctggccaacatggtctactaaaaatacaaaaattagccgggcgtggtggtgggcacctgtaatcccagctactcaggaggctgaggcaggaaaatcgtttgaacccaggaggaagaggctgcagtgagctgagatcacaccactgcactccagcctgggtgacagaggaaggctccatctcaaaaaaagaaaagaaaagaaaaaggctgggtgcggtggctcatgcctgtaatcccagcactttgggaggccaaggt

SEQ ID NO: 345515 - DNA, 581 bp, Homo sapiens
ctatcattctttctatacttaaagcacccttatttttatttaatgaaggcagtgtcttctctgaactctcagaagatgtcacagttcagttgaattttccttcatctttcattgtttatctgggaataataatggtaattaataggatttgggggaggattcaatgtrgtaatacatccaaagtacttagaatgggccaggcatggtggctcatgcctgtaatcccacctgtaatcccagcactttgggaggctgaggcgggcggatcacgaagtcaagagatcgagaccatcctggctgacatggtgagactccatttctacttaaaatacaaaaaattagctgggtgtggtggcgtgcccatagtcccagctactcaggaggctgaggcaggagaattgcttgaacctgggaggtggaggttgcagtgagccgagatcacaccactgcactccggcctggcgacagagcgagactccgtctcaaaaaaaaaaaaaaaaaaaaccttagaatggggctatgccccgtatttttgtttacttctccaaatccactatgcaccctgattcactcttctgtgt

SEQ ID NO: 345516 - DNA, 581 bp, Homo sapiens
ctatcattctttctatacttaaagcacccttatttttatttaatgaaggcagtgtcttctctgaactctcagaagatgtcacagttcagttgaattttccttcatctttcattgtttatctgggaataataatggtaattaataggatttgggggaggattcaatgtagtaatacatccaaagtacttagaatgggccaggcatggtggctcatgcctgtaatcccacctgtaatcccagcactttgggaggctgaggcgggcggatcacgaagtcaagagatcgagaccatcctggctgacatggtgagactccatttctacttaaaatacaaaaaattagctgggtgtggtggcrtgcccatagtcccagctactcaggaggctgaggcaggagaattgcttgaacctgggaggtggaggttgcagtgagccgagatcacaccactgcactccggcctggcgacagagcgagactccgtctcaaaaaaaaaaaaaaaaaaaaccttagaatggggctatgccccgtatttttgtttacttctccaaatccactatgcaccctgattcactcttctgtgt

SEQ ID NO: 345517 - DNA, 581 bp, Homo sapiens
ctatcattctttctatacttaaagcacccttatttttatttaatgaaggcagtgtcttctctgaactctcagaagatgtcacagttcagttgaattttccttcatctttcattgtttatctgggaataataatggtaattaataggatttgggggaggattcaatgtagtaatacatccaaagtacttagaatgggccaggcatggtggctcatgcctgtaatcccacctgtaatcccagcactttgggaggctgaggcgggcggatcacgaagtcaagagatcgagaccatcctggctgacatggtgagactccatttctacttaaaatacaaaaaattagctgggtgtggtggcgtgcccatagtcccagctactcaggaggctgaggcaggagaatygcttgaacctgggaggtggaggttgcagtgagccgagatcacaccactgcactccggcctggcgacagagcgagactccgtctcaaaaaaaaaaaaaaaaaaaaccttagaatggggctatgccccgtatttttgtttacttctccaaatccactatgcaccctgattcactcttctgtgt

SEQ ID NO: 345518 - DNA, 581 bp, Homo sapiens
ctatcattctttctatacttaaagcacccttatttttatttaatgaaggcagtgtcttctctgaactctcagaagatgtcacagttcagttgaattttccttcatctttcattgtttatctgggaataataatggtaattaataggatttgggggaggattcaatgtagtaatacatccaaagtacttagaatgggccaggcatggtggctcatgcctgtaatcccacctgtaatcccagcactttgggaggctgaggcgggcggatcacgaagtcaagagatcgagaccatcctggctgacatggtgagactccatttctacttaaaatacaaaaaattagctgggtgtggtggcgtgcccatagtcccagctactcaggaggctgaggcaggagaattgcttgaacctgggaggtggaggttgcagtgagccgagatcacaccactgcactccggcctggygacagagcgagactccgtctcaaaaaaaaaaaaaaaaaaaaccttagaatggggctatgccccgtatttttgtttacttctccaaatccactatgcaccctgattcactcttctgtgt

SEQ ID NO: 345519 - DNA, 521 bp, Homo sapiens
tttaatgtttggcacttcagcacaaacgtttaccaatccctgttctaaattaacataaaattatgtttcgagggaaaagatgttttaattttgaaactagagtataactttaccatgttgattttacgcatttgtaatgtttagattgaagcacgtgaattttcagtgaaaaaacagtttattcttgacattaaaatgaattggaaakaaagctattcagtgtgtactttgatttttaggatccaaatttaattagcgtgaataattttgaagattgcagtttgtgtcccagtgttcccattgaacatggatttcgtagacaacagtctaagtcaaataatgttgaagagactgaaatacattggaaactgattccaattacaggtaagaaaagtatacttggacttgtgtttgcttcattttacttagagaccagtttcctgaatgtttccatcttctgtggatttcactcttgggtcactaggtgcttcatcttaattggtgctgacatcttcagtgtc

SEQ ID NO: 345520 - DNA, 590 bp, Homo sapiens
aggaatactgatttttaaattttgtccaagaaatgcacacaaggttttctgaatcagagacagattttgtgaataccccacagtaagtaaaaatgtattggccctcctttgccttagtccttaactccctagggcatgcaggcctaagccasttgtcctgagtagctgcatactacataggtaaaagatggggacaaatactttctatttgcttataaaagggaagaggcagctattccctgctatcctgaatgtgtctctttgaaatgttatgaatattaactccaactctttggtatataaataaaatcgcttcaggagccatttgtttagccctcttggaccaagagacatttccaaattcctggaaactcattctgtattgaaatgtaaatgcttagggagatctccatagtcttcttggcacctctggacttaacctaggaacctctctttgctgtaatctcttaatctaccccacttgatgctctcagggagataaaataagttttattattgtggagcagagcaattaactagataaatgactacagatctaaatcttaaggtatgcgaagagtaaaatattt

SEQ ID NO: 345521 - DNA, 590 bp, Homo sapiens
aggaatactgatttttaaattttgtccaagaaatgcacacaaggttttctgaatcagagacagattttgtgaataccccacagtaagtaaaaatgtattggccctcctttgccttagtccttaactccctagggcatgcaggcctaagccacttgtcctgagtagctgcatactacataggtaaaagatggggacaaatactttctatttgcttataaaagggaagaggcagctattccctgctatcctgaatgtgtctctttgaaatgttatgaatattaactccaactctttggtatataaataaaatcgcttcaggagccatttrtttagccctcttggaccaagagacatttccaaattcctggaaactcattctgtattgaaatgtaaatgcttagggagatctccatagtcttcttggcacctctggacttaacctaggaacctctctttgctgtaatctcttaatctaccccacttgatgctctcagggagataaaataagttttattattgtggagcagagcaattaactagataaatgactacagatctaaatcttaaggtatgcgaagagtaaaatattt

SEQ ID NO: 345522 - DNA, 520 bp, Homo sapiens
actatatatgtatatatatatgtgtatatatgtgtgtgtgtgtatgtgtgtgtgtgtgtgtgtgtgtgtgtgtgtgtatatatatatatatatatatttttttttttttttttttccacccaggctggagtgcagtggtgagatcacagctcactgcagccttgacatctctggctcaggtgatcctcccacctcagcctcccaagtagctgggaccacaggcatgcaccaccacccgggctaatttgtattttttgtagagaygggattgtgcaatattgcccaggttggtctggaactcctgggttcaagtgatctgcctaccttggcctcccaaagtgctgggattccaggtgtgagccaccatgcccagcctgataataagcaaaattccacttccctagtgctacagactaaatttttatgtcccacccaaattcatatgttgaaactcttaggatttcaccatccttgataattgtcagataaagaagtaggacctttgggaggtaactaggtc

SEQ ID NO: 345523 - DNA, 520 bp, Homo sapiens
actatatatgtatatatatatgtgtatatatgtgtgtgtgtgtatgtgtgtgtgtgtgtgtgtgtgtgtgtgtgtgtatatatatatatatatatatttttttttttttttttttccacccaggctggagtgcagtggtgagatcacagctcactgcagccttgacatctctggctcaggtgatcctcccacctcagcctcccaagtagctgggaccacaggcatgcaccaccacccgggctaatttgtattttttgtagagatgggattgtgcaatattgcccaggytggtctggaactcctgggttcaagtgatctgcctaccttggcctcccaaagtgctgggattccaggtgtgagccaccatgcccagcctgataataagcaaaattccacttccctagtgctacagactaaatttttatgtcccacccaaattcatatgttgaaactcttaggatttcaccatccttgataattgtcagataaagaagtaggacctttgggaggtaactaggtc

SEQ ID NO: 345524 - DNA, 584 bp, Homo sapiens
aggtactgtgatgcctctggctttgttctttttgcttaggattgctttggctatttgggctctcttttgattacatatgaattttaaaatagctttttctaattctgtgataaattttctggttagtttgataggaaaagcattaaatctgtacattgttttaggtagtattttaacaatattgattcttcctatccataagcatggaatgttattccatttgttggtgttgtctctgatttctttcagaagcgttttgtaattctccttgtagagatctttcaccttcgtggttagctgtattcctcggtattttattcttttcgtggctattgtaaatgggattgcattctggattgggtctcaatttggatgctgttggtatatagaaatactactaatttttatacattgattttgtatcctgagactktgctgaagttgtttatgagatctaggaactgaggtgtttccagtcttcttgccacaacagtctaatggagaatgctgggaaaagcacttcatcagggtggcggcagcaagatctgaactcattcacatgtgccatcaatagtagcagcaca

SEQ ID NO: 345525 - DNA, 578 bp, Homo sapiens
tgttagaagtaccaaaatgtgacataaattgagcacatgctgttggaaaaatggcatttatagatttgctttaacgcagggttgctaccawccttcaatttgtaaaataatgcaatatttatccaggcatggtggtgcatgtctgtagtttcagctagtccagaggctgagtcaggaggatcaccttagcccaggagtttgaggcttcagtaaactatgattgtaccactgcaatccagcctgagtgacagagtcagacctggtctccaaaaaaagaagaaaaagaagaataatgcattatctttgaagcacaataaagcaaagcacaaaaatgaaataggcctttactggacataatattatgtttggctttgagctataaaaatcctgatgaatagtagcttaaacacagaaagtgttaatttttctcatgagcactttggggtagagataggtagtccagggctgttatcactgaagttctgcaaaattatcaaggattcgaactccttttatttctctactctgccctcctcagggtgttgctgcctttgtgcttgttatggtttgaatgtttg

SEQ ID NO: 345526 - DNA, 537 bp, Homo sapiens
cccaatccatccccctttcagctcccctttccactgagagccactttcactgctcaattaaaatcctccgtatacaccacccttyaatttgttcgcgtgacctgattctttcttgacacgcaacaagaaattgggtactaagagggcaaggtataaaaggatgtcactccgacccttcgctgagctgcttaacacttagctgtctgtggttggcaaatgctaaaacagcactgattgtaacacatgccctctggggttccaggagtcacacacaccccctctcagacagcagagctaaaagaccattgtaacacacatggacgctgtcacacggcccgcagagagcctgctaatgccacacaggagtgaccactcagttccagcgttcatttgccctgtgtcccgcacctgctcacctccatgctccccctcctataatgggttcacagctgctggctgagtagatgagccaccccttcatgagtactgtgaaggggtcaaaggaactatcccatctcagaagcatcacaatggcgg

SEQ ID NO: 345527 - DNA, 537 bp, Homo sapiens
cccaatccatccccctttcagctcccctttccactgagagccactttcactgctcaattaaaatcctccgtatacaccaccctttaatttgttcgcgtgacctgattctttcttgacacgcaacaagaaattgggtactaagagggcaaggtataaaaggatgtcactccgacccttcgctgagctgcttaacacttagctgtctgtggttggcaaatgctaaaacagcactgattgtaacacatgccctctggggttccaggagtcacasacaccccctctcagacagcagagctaaaagaccattgtaacacacatggacgctgtcacacggcccgcagagagcctgctaatgccacacaggagtgaccactcagttccagcgttcatttgccctgtgtcccgcacctgctcacctccatgctccccctcctataatgggttcacagctgctggctgagtagatgagccaccccttcatgagtactgtgaaggggtcaaaggaactatcccatctcagaagcatcacaatggcgg

SEQ ID NO: 345528 - DNA, 537 bp, Homo sapiens
cccaatccatccccctttcagctcccctttccactgagagccactttcactgctcaattaaaatcctccgtatacaccaccctttaatttgttcgcgtgacctgattctttcttgacacgcaacaagaaattgggtactaagagggcaaggtataaaaggatgtcactccgacccttcgctgagctgcttaacacttagctgtctgtggttggcaaatgctaaaacagcactgattgtaacacatgccctctggggttccaggagtcacacacaccccctctcagacagcagagctaaaagaccattgtaacacacatggacgctgycacacggcccgcagagagcctgctaatgccacacaggagtgaccactcagttccagcgttcatttgccctgtgtcccgcacctgctcacctccatgctccccctcctataatgggttcacagctgctggctgagtagatgagccaccccttcatgagtactgtgaaggggtcaaaggaactatcccatctcagaagcatcacaatggcgg

SEQ ID NO: 345529 - DNA, 537 bp, Homo sapiens
cccaatccatccccctttcagctcccctttccactgagagccactttcactgctcaattaaaatcctccgtatacaccaccctttaatttgttcgcgtgacctgattctttcttgacacgcaacaagaaattgggtactaagagggcaaggtataaaaggatgtcactccgacccttcgctgagctgcttaacacttagctgtctgtggttggcaaatgctaaaacagcactgattgtaacacatgccctctggggttccaggagtcacacacaccccctctcagacagcagagctaaaagaccattgtaacacacatggacgctgtcacacggcccgcagagagcctgctaatgccasacaggagtgaccactcagttccagcgttcatttgccctgtgtcccgcacctgctcacctccatgctccccctcctataatgggttcacagctgctggctgagtagatgagccaccccttcatgagtactgtgaaggggtcaaaggaactatcccatctcagaagcatcacaatggcgg

SEQ ID NO: 345530 - DNA, 534 bp, Homo sapiens
ggaagtgaaactcatcagatcacctcatccagacaatgagatgccagacccctcatcagtcacaatttcttccttaaccccacccccaattccttcccacatgtagctacattccttttgcactatctaagcccccaattttagtaggttggggaagayggattttatgtttggcttccatctccctggctgatgtcagctaaataaaaagccttcttccttggcaatccttgttgtcttggtaattggctttctgtgctttgaacgatgggacctagaccacctgcctcagcttcccaaagtgctgggattgcaggcatgagccaccatgcccagctagtagagaagctcttctaaaagaacaaggataaagtggaataaaatctggtatgacttggtgtgccagttcttttgaacaattagagtgttaaagatgcctgtgccactgtcatgattaagagaggtcaaatcatatttaatattaaaaacgtaccctaaatctgtgaggaccttgtcattgattgtaccttggct

SEQ ID NO: 345531 - DNA, 557 bp, Homo sapiens
caaagctatcctaagcaaaaagaacaaaactgaatgaatcacatcacctgactttaaattatattgcagaggtatagtaaccaacacaggatggtgcttgattaaagtagacacatagcacaatggaatagaatagagaacccagaaacawatctacacacctacagtgaactcatttttgacaaaggtgccaagaacatacactgggaaaaagacagtcttttctataaatagtcctgggaaaactggacatccatatgcagaataatgaaactagacccctatctctcaccatataaaaaataaaataaaaatggatgaaagactgaaatctaacacttcacactatgaaactactacaagaaaacactggggaaaatctccaggacattagtctgtgcaaaaatttcttgagtaataccccaaagcaaaaatgaagaaatggtatcacatcaagttaaaaagcttctgcagagaaaagaatgcaatcaacaaaataaagagacaacccacagaatgggagaatatttgcaaactacccatctgacaagggatta

SEQ ID NO: 345532 - DNA, 472 bp, Homo sapiens
taatttcgtagagtattcatagttttcaaagtgctttcmcataagctatgttgtgtatggaaattagagcaatcatatgcaggtgtatagaaaaagtattatttattgtccatatgaagaaagtgagttttggaaaagataaatgacatatatatatatggttatcaaatagcacaatttaatagatttagcaaatttactgaaattagtaaattggacttaagaagaaattgtgaaggttcctctggtaagagtgcacaagagaaaattcaaggaggatagcagttagcaggatcctgacatagtccagctgaaatgtagcaagggtctgcactagggtaggcttgcttgcaatgttgtgggctctttttacagacaatgtagatacacagcgtatgcgagtttgcttttgattggacgtaagaagcaagatcaaagagatataccaaaggactcagaggctagtcacata

SEQ ID NO: 345533 - DNA, 576 bp, Homo sapiens
attctgctgtttgttccaaaaaccctcttcttcgtttctcttatcccacccacgtccgaatatagcatgccaaaaacagagccaaaaacaagattgtctgtgacatatctgtcctgtcacagacaaggacagattaagaggaccagatcagaaaatgtgtgtatactaagtagctcaaagacaagggcaaaactttaacgcaaagaaaatacattcagagctttccaagtcccaatttcttctgcttttacasttcagcctagttagttgtcctccacgccccccgccccacgcgcgtttgcgttttcttaataaacccacagcaagacctagggcgggggtgaaccacagcgcatgcgccgtagggagcgacctcaacagctagggtgctgtttgggcggggcctgggcggggccacacgcgcgcgagatttgaatttcctctgcgtgcggtcagtgcccgcgcagcgttgagttgcacagcggtattctcaccaggccctgcaatcggtgggccacagtgccggccacagagatggtggaaggaccaggctgtactctgaatggagagaagatt

SEQ ID NO: 345534 - DNA, 592 bp, Homo sapiens
tccagcctgggtgacagagcgagactccgtctaaaacaaaaaaaagaaagaaagacagaaaaaaaaaaattatttgacttactttgtcgattatgaatcttaaaacccccgttccaaaagggtcaggccccagaagtccaggaagamtccaaacagatgggccttgctgggcttccccctcattccactgctataagattagatcctttttggccagacacagtgattcacgcctgtaatgccagtgggtccggaattggtgggttcttggtctcactgacttcaagaatgaagccgcgaaccctcgcagtgagtgttacagttcttaaaggctgcgtgtctggagctcgctccttctgatgttcggatgtgttggcagtttcctccttctggtgggttcttggtctcgctggctcaggagtgaagctgcggatcttcgaggtgagtgttatagctcttaaggcggcacgtctgcagtcgttcgctccttctggtgggctcgtggtctcgctggcttcaggactgaagctgcacaccttcacagtgagtgttacagctcataaagacagtgtggacccaaggagtgagcagc

SEQ ID NO: 345535 - DNA, 592 bp, Homo sapiens
tccagcctgggtgacagagcgagactccgtctaaaacaaaaaaaagaaagaaagacagaaaaaaaaaaattatttgacttactttgtcgattatgaatcttaaaacccccgttccaaaagggtcaggccccagaagtccaggaagactccaaacagatgggccttgctgggcttccccctcattccactgctataagattagatcctttttggccagacacagtgattcacgcctgtaatgccagtgggtccggaattggtgggttcttggtctcactgacttcaagaatgaagccgcgaaccctcgcagtgagtgttacagttcttaaaggctgcgtgtctggagctcgytccttctgatgttcggatgtgttggcagtttcctccttctggtgggttcttggtctcgctggctcaggagtgaagctgcggatcttcgaggtgagtgttatagctcttaaggcggcacgtctgcagtcgttcgctccttctggtgggctcgtggtctcgctggcttcaggactgaagctgcacaccttcacagtgagtgttacagctcataaagacagtgtggacccaaggagtgagcagc

SEQ ID NO: 345536 - DNA, 478 bp, Homo sapiens
gagcttgtttaagacagttgggcacactctagccttctcaatcatatttacacacttgggagataacttgtcagctatatgtatatttgtccctacctatgtaacagcacgagtacaactttcagggrgtgactgaatccagtctagtgtataatgtcttaatgagaacacagtagttataatgcactaaaatggatttatattcctatggaacagaaagtcagtttcagcagccaaataaaagatcactcacttgtggcccagagttttagtcaaccaccaaaatcagcagaaaaactcagatgtataaaatgtgtagatgtcttggaatccattttttaaaaggaggtaagagctgatatttagaaattgttcatcttatgcagatggggttcatagtttaaccattaagcctcaacaacgattccttggcatttttgatctaattattattggcctgtaacgactttgaactact

SEQ ID NO: 345537 - DNA, 606 bp, Homo sapiens
ttgcttgtgctgaactgcaatagcatgatctcagctcattgcagcttcaacctcctgggccaaagtgaagtcatcctcccaccccaacctcccaagtagttgggactacaggagtatgccaccgcatctggctaatttttttaagagatgaaatctcactctgttgccaggctggtcttgaactctggggctcaagcaatcctcctgcctcagcctcccaaagggctgagattacaggtgtcagccaccacaactggccaaagcttgagtcttaaatggctttatgaattctatcaaacatttaagaaagaaagctaattctgtcaaacatttaagaaagaaagctggatttcctaggccaactaagaatccctaagcctagctgggaaggtgaccacatccacctttaaacatggggcttgcaacttagctcacacccgaccagtcaggtagtaaagagagctcactaaaatgctaattaggcaaaaacaggaggtaaagaaatagccaaacatctatygcctgagagcacagcgggagggacaatgatcgggatataaaaccaagcattcgagctggcaacggccaccctctttgggtcccctc

SEQ ID NO: 345538 - DNA, 578 bp, Homo sapiens
aatgtctcttgtcaaattcaggatttttattactagttactttaatccagttcagacattatttattgaatatactgtagagttaagtctactggactccagcttgaaaccaaaagatatcttcccatcgattattttaaaattttgtcctcatgcacttttcaaattgtgttccacggaatatttgaaaataatacaaaaaaagtatttttatgaagcattgggttaaagttttaaaaaataaagtrgtttcctctatgtggacttctaaggaccttcatccactagtgctcattgtggacttccaagggggaaagtatggaacattgcttcccaaatctattccatcactgaaatttatttcaagaaacacactctgcaaatgctacttgaggctcttcagcattaagccttgtgataattttacacagtttacagaaagtctgcctaaattttaaaaggctcttaatttgtccttttccatattgatcagcgaaggcattgtgttgccttgacccccctgtaatttcttctcattcagctggataagatagagagacattaaggctgtggatagg

SEQ ID NO: 345539 - DNA, 578 bp, Homo sapiens
aatgtctcttgtcaaattcaggatttttattactagttactttaatccagttcagacattatttattgaatatactgtagagttaagtctactggactccagcttgaaaccaaaagatatcttcccatcgattattttaaaattttgtcctcatgcacttttcaaattgtgttccacggaatatttgaaaataatacaaaaaaagtatttttatgaagcattgggttaaagttttaaaaaataaagtagtttcctctatgtggacttctaaggaccttcatccactagtgctcattgtggacttccaagggggaaagtatggaacaytgcttcccaaatctattccatcactgaaatttatttcaagaaacacactctgcaaatgctacttgaggctcttcagcattaagccttgtgataattttacacagtttacagaaagtctgcctaaattttaaaaggctcttaatttgtccttttccatattgatcagcgaaggcattgtgttgccttgacccccctgtaatttcttctcattcagctggataagatagagagacattaaggctgtggatagg

SEQ ID NO: 345540 - DNA, 529 bp, Homo sapiens
tttttgagacaaggtctcactctgtcacccaaactagagtgccgtgacacaaccatggctaactgcaggcttgacatcctgggttcaagtgatcctcccacctcagcctcctgagtagccgggactaaaggtacacacaactacacctggttaattttttattttttgtagagatggagtctcacactgtactgcctaggctggtcttgaactccttggctcaagcgatccttctgcctctgcctcctaaagtactgggattacgggtatgagccactgtgcctggcacctgcctctaggttcttaagcaatgtaaaggcaatggtattggagtactagcaaatatgcaccatatacacatatacaaatacayatgcattgacatatacatgtacgtatatgcttgctgttgctggtgtaacaaattacaacaaacttaccagctcaaaacaaaacaactttatcatcttacagttctataggtcagaagtctcactgggccaagatgaagttataagcaaagttgtgt

SEQ ID NO: 345541 - DNA, 273 bp, Homo sapiens
tctgaggagggccacaaacttggctttggattttctgaaagctcatgagcatacamgagcataatcagttgcattactggtagtattcataaaataaaaacacacagtaacccagattaggtcaactattccttgtactgagtcaggagggacaatttgcccttaagtcctcacagacatcacactgcataatgcagtaagccatgttcctgataatatccccacaagaatcacagtcacaagactaagagcccatctctctccacttgggcc

SEQ ID NO: 345542 - DNA, 614 bp, Homo sapiens
atgttgaaaaatagttgaaaaactattggatattatgatcattacacaggtgataggatttttacatctacattcataaggaatattgatctgtaactttctattttataatatcgtttgctttttcttttctttttctaaycaaagtaccgttggcctcatacaatgagttgggaggaatttgcttctcttgtacttgctgaaagaatttatataaaattagtggctgggcacagtggcccatgcctgtaatcccaacactttgggagcccaaagcaatgatattacaatataaaaagctacagaacaatatccttcattagtgtagatatgaaaagtcccatcacctccaggtagtgagcgtagcatctaatagttattcaattatttttagcccgttttcccttcttccctcctccctctagaagtcccaagtgtctgttgttcatattccaaacctcagtatcacgcaatgtacccatgtaacaaacctgcacatgtactcccgaaactaaaagttgaaattattttaataaataaataaatgctactaaagccaagatgaaacaaatatcataactgcaggtgctgcatatatattaaagcaataataa

SEQ ID NO: 345543 - DNA, 503 bp, Homo sapiens
atttatgcaaaaattttacttttttcttcttttatttccctttctttttttcttttctaaattcaattctattatgctttctaaaragtgacctttaaggtcaaattcaattctgaaattctatggtagtttttaaagtatgaagtttagttttgataatggattctgtagtatttacctatgttttttgaaaaataatctatgcattaaaattagtttaaaaatatcttcactctttctttagtagatgaaagatgtccttaaattttttggtagaaacatattttttaatttgacatatgattaataaatattggtaaattgtttccttgaatatacttcatcagcaatctaatttaatgctttattgaattgcagctttttaagccatatccaaatttcaccgctagtaagagcagtgtcttaactgacttttcagtgatatagtcagtaaccaaaactgggaaggaatgatcagtctggcaggagaagccacgttgatt

SEQ ID NO: 345544 - DNA, 580 bp, Homo sapiens
gtggtgaatttcagccaaagtggccaaagaaatcctgttcctgtgataatgacgccatcagcctctgcacctctgtcttcccttttgccacatgttgtctgttctccgtgactttggtaagagcttccttgtgtatgtggatgatgtccaggatgtttgtcttgtgtccctgagacagcactaacaggtccatggctgggtccaggtccttcctggactgactggcaaggagcttactgatgttcttgwaggcatctctggtgaagtggatggcctagtcaaattccaaggcctggctgaggctgaagaaaaactggccaccttctgatgctctttctaaaagcctgtcactgtcatctgcttgcttgtcaactcattggctgtgaggttgaactgagtggcctgtgtccatcttcttggggaaccatttgaagccatcagtcttgctctcccacccctaaaggttgatggtcaccacctgggggtgtgctgagggtcagaaagaagccagcactcactatctcatccttctcagccttcctcttgcactctctccaggctgtctcttcagtggtggtgg

SEQ ID NO: 345545 - DNA, 418 bp, Homo sapiens
tcagctgctggtaacatctggcctttgggcaggctcaaaaatttgaaagttaataatgttagattcaattgtgtatgggctatcccataatccctgtttctcccccttttttttgtttttattatcagwtgtgcatctgtatgcaatcgtaactgagcattttcaattcactgtgtggaatgaattatgtgtgaagaatcagaaatcacattaacaggcatatcaaaagcagtcaatacctcaattacatctacaagctccgctttttgagctgaagtatacggtgtctggaaaactttaccttttgatccagaataagaagctttaccattactagacccatctgtgaaacaacgaaaacgcttagcaggctgcaggttgtttactgcaggaattgtaaatgcaaaccgttcacagt

SEQ ID NO: 345546 - DNA, 418 bp, Homo sapiens
tcagctgctggtaacatctggcctttgggcaggctcaaaaatttgaaagttaataatgttagattcaattgtgtatgggctatcccataatccctgtttctcccccttttttttgtttttattatcagatgtkcatctgtatgcaatcgtaactgagcattttcaattcactgtgtggaatgaattatgtgtgaagaatcagaaatcacattaacaggcatatcaaaagcagtcaatacctcaattacatctacaagctccgctttttgagctgaagtatacggtgtctggaaaactttaccttttgatccagaataagaagctttaccattactagacccatctgtgaaacaacgaaaacgcttagcaggctgcaggttgtttactgcaggaattgtaaatgcaaaccgttcacagt

SEQ ID NO: 345547 - DNA, 418 bp, Homo sapiens
tcagctgctggtaacatctggcctttgggcaggctcaaaaatttgaaagttaataatgttagattcaattgtgtatgggctatcccataatccctgtttctcccccttttttttgtttttattatcagatgtgcatctgtatgcaatcgtaactgagcattttcaattcactgtgtggaatgaattatgtrtgaagaatcagaaatcacattaacaggcatatcaaaagcagtcaatacctcaattacatctacaagctccgctttttgagctgaagtatacggtgtctggaaaactttaccttttgatccagaataagaagctttaccattactagacccatctgtgaaacaacgaaaacgcttagcaggctgcaggttgtttactgcaggaattgtaaatgcaaaccgttcacagt

SEQ ID NO: 345548 - DNA, 581 bp, Homo sapiens
taatgcacactcctctaagctgttctatggcatcatcctgcttgaccacttgtgcatgtaaaccagcccagccaccaacccccaaaagttggtctgcagttatattaatttgaggttgggcccaggcattgmgagcagcctgaatggaagcttcatctgcccactaagttttaaattgtaagaactgagcaggagttagacaagctagagtaagagtgtcccagtcagtaggaatcatccgactggaaacagcaacattctttaacagtcccatttcaaaaggagaacctggtccatactgatttatagcttgtttaattttttgagtaatttaaaaggaaaaggctcaaatgtagctataatatttccctgttgatctgggggggtgtattcaaacagggaactgccaagcctctaaatcccacttttgtctagcttgctgaattcctgcctgaatagaactaagcagtcgctcaagtcaccagggcaactacttttcacccagtgtcctccagaaaagaaagatctggagggtcgttttcttcaaaataataatgagggggtgcagaagggtagggatg

SEQ ID NO: 345549 - DNA, 581 bp, Homo sapiens
taatgcacactcctctaagctgttctatggcatcatcctgcttgaccacttgtgcatgtaaaccagcccagccaccaacccccaaaagttggtctgcagttatattaatttgaggttgggcccaggcattgagagcagcctgaatggaagcttcatctgccyactaagttttaaattgtaagaactgagcaggagttagacaagctagagtaagagtgtcccagtcagtaggaatcatccgactggaaacagcaacattctttaacagtcccatttcaaaaggagaacctggtccatactgatttatagcttgtttaattttttgagtaatttaaaaggaaaaggctcaaatgtagctataatatttccctgttgatctgggggggtgtattcaaacagggaactgccaagcctctaaatcccacttttgtctagcttgctgaattcctgcctgaatagaactaagcagtcgctcaagtcaccagggcaactacttttcacccagtgtcctccagaaaagaaagatctggagggtcgttttcttcaaaataataatgagggggtgcagaagggtagggatg

SEQ ID NO: 345550 - DNA, 581 bp, Homo sapiens
taatgcacactcctctaagctgttctatggcatcatcctgcttgaccacttgtgcatgtaaaccagcccagccaccaacccccaaaagttggtctgcagttatattaatttgaggttgggcccaggcattgagagcagcctgaatggaagcttcatctgcccactaagttttaaattgtaagaactgagcaggagttagacaagctagagtaaragtgtcccagtcagtaggaatcatccgactggaaacagcaacattctttaacagtcccatttcaaaaggagaacctggtccatactgatttatagcttgtttaattttttgagtaatttaaaaggaaaaggctcaaatgtagctataatatttccctgttgatctgggggggtgtattcaaacagggaactgccaagcctctaaatcccacttttgtctagcttgctgaattcctgcctgaatagaactaagcagtcgctcaagtcaccagggcaactacttttcacccagtgtcctccagaaaagaaagatctggagggtcgttttcttcaaaataataatgagggggtgcagaagggtagggatg

SEQ ID NO: 345551 - DNA, 664 bp, Homo sapiens
tcctccagaaaagaaagatctggagggtcgttttcttcaaaataataatgagggggtgcagaagggtagggatgaacctctccctccttttctgctttagctttaggtggcaaataaacctggtctgtaacctctactgttactttgttatactctccttcctcctcattatcagtgtgaaaaagttccaaggtagaacgaaccacagcccacacttgtcccattgttaccctgatgcttctgagctccccttctgactcaccatggggattgctttaagagtactcggatgtcctccagctagttccacattctccaatcgttgctccagcgatcctttgacctgtattcgagcccccatgaatgggcaccacttgctgagaccaggtcggttggggagaccctaacccagcagcactagaggaattaaagacacacacactgaaatatagaggtgtgaagtgggaaatcaggggtctcacagccttcagagctgagagccctgaacagagatttacccacgtatttattaasagcaagccagtcattagcattgtttctatagatattagattaactaaaagtatcccttattcttaaggcacagatcactcatgctattgtttgtggcttaagaatgcctttaagtggttttccaccctgg

SEQ ID NO: 345552 - DNA, 515 bp, Homo sapiens
gctctggaaaccatgggcaaaactgctttactgtactaaagagtgataacaaattctaagtactaaatttcactccccatctttgtatgtccgcgggtgtcttttgatgatgtgtcctctgctttcatatgctctagccttccttcacggggtctttgtcaccccatgttgggcaccaggaatgttggggtgatcagacccaacactaggtcatgggggtgatgaagtccggcagagtcaaaggaatgagaaaaagacagtttgagagagaaagtgggcccaggagaccatcacgagtgtggagtctgcaaagtccccaagctctgggagcccacgctatttgttggtsctcaaacaaagaaacaggtggtgagtatgtgggggttaaaaggaaatggtgtatcaagtgaatgagaaacatatggccctgcctcagcttctcttccaacactcagcttttctcccaacacattccccttatgaacaggaataaaatagggatgcctgttctcccc

SEQ ID NO: 345553 - DNA, 508 bp, Homo sapiens
aaacgccctgtgctgatgcagcacaattccttcattcccttctccaaaaccccctcttccaattccactgaagagagaatctgatggaagtcctgtgtaagcaggctcagatatatctaccactatagatagtagaggtgattcacaaatccaagcctatcaaatacatcataaataagttacacgtttaattttttttgaaattagggatcatgatatgaaagttatcagaawcaaaactgtcactaatgtttaaaaagagaagaaaaaacctgaacaaatagattcagagaaggccttgaagagagggttctcatgcttctaggcctgataaaaactattacaaaataccacaaaaaccacaaccttgcacaaaggccatagcaaccttacacaaaatacacttctgtgaggacatctatccagcaactgcctgcccaaacttcaactgacattgaccttgttgttgatctttatattcaaaggtaactatatcaaaacaattata

SEQ ID NO: 345554 - DNA, 508 bp, Homo sapiens
aaacgccctgtgctgatgcagcacaattccttcattcccttctccaaaaccccctcttccaattccactgaagagagaatctgatggaagtcctgtgtaagcaggctcagatatatctaccactatagatagtagaggtgattcacaaatccaagcctatcaaatacatcataaataagttacacgtttaattttttttgaaattagggatcatgatatgaaagttatcagaaacaaaactgtcactaatgtttaaaaagagaagaaraaacctgaacaaatagattcagagaaggccttgaagagagggttctcatgcttctaggcctgataaaaactattacaaaataccacaaaaaccacaaccttgcacaaaggccatagcaaccttacacaaaatacacttctgtgaggacatctatccagcaactgcctgcccaaacttcaactgacattgaccttgttgttgatctttatattcaaaggtaactatatcaaaacaattata

SEQ ID NO: 345555 - DNA, 508 bp, Homo sapiens
aaacgccctgtgctgatgcagcacaattccttcattcccttctccaaaaccccctcttccaattccactgaagagagaatctgatggaagtcctgtgtaagcaggctcagatatatctaccactatagatagtagaggtgattcacaaatccaagcctatcaaatacatcataaataagttacacgtttaattttttttgaaattagggatcatgatatgaaagttatcagaaacaaaactgtcactaatgtttaaaaagagaagaaaaaacctgaacaaatagattcagagaaggccttgaagagagggttctcatgcttctaggcctgataaaaactattacaaaataccacaaaaaccacaaccttgcacaaaggccatagcaaccttacacaaaatacacttctgtgaggacatctatccagcaactgcctgcccaaacttcaactgayattgaccttgttgttgatctttatattcaaaggtaactatatcaaaacaattata

SEQ ID NO: 345556 - DNA, 262 bp, Homo sapiens
gaaccccttttatgagatggagaggccaggtcagtctcataacatgtgtccccctycgtgtgttgaatttatgtcagagccaggttctttcctatttgatgtctctcaccaaattccagtgtttatgccctaggaggtgcccaaaaaattctagagtggatgcaagctgtaattttagagaaattaagttagcaagtagaattagattatatacaatctaatcaacttttttttttttttctgaggatgaccaagatttggg

SEQ ID NO: 345557 - DNA, 262 bp, Homo sapiens
gaaccccttttatgagatggagaggccaggtcagtctcataacatgtgtcccccttcgtgtgttgaatttatgtcagagccaggttctttcctatttgatgtctctcaccaaattccagtgtttatgycctaggaggtgcccaaaaaattctagagtggatgcaagctgtaattttagagaaattaagttagcaagtagaattagattatatacaatctaatcaacttttttttttttttctgaggatgaccaagatttggg

SEQ ID NO: 345558 - DNA, 262 bp, Homo sapiens
gaaccccttttatgagatggagaggccaggtcagtctcataacatgtgtcccccttcgtgtgttgaatttatgtcagagccaggttctttcctatttgatgtctctcaccaaattccagtgtttatgccctaggaggtgcccaaaaaattctagagtkgatgcaagctgtaattttagagaaattaagttagcaagtagaattagattatatacaatctaatcaacttttttttttttttctgaggatgaccaagatttggg

SEQ ID NO: 345559 - DNA, 573 bp, Homo sapiens
tgtacagcccccctgtgatagtttctaatatccagggggtgtataccacccttgtgatattgtttctaatatgtagggggaaggacaatgatattactgtcagtatcacagggggtgtacaacaagccccccgggatatcattcctaatatccatgggaagwaagaatattataatatcacagaagttgtacaccccctctgtgatattgttcctaatatcaaagacagaagggtatgatgttcttcccaaaatcacaggaagtgtatacacaccctgtgctatttttcctaatatcgagagtgagagacaatgatacttccaatatcgtaaggagtgtacactctccccgtgataccaggtggggaaatgttgatattactccaaatgtcacagtgggtgtacacacgttttgcgatattgttcctaatagcaagtggggaggaggattgtattactcccaccatattactccccacaccccattatactgttcttaatatccagatttggagaggatgatattactcccaaaatctcaggaggtgtagaccccttctgtgatactgtttct

SEQ ID NO: 345560 - DNA, 573 bp, Homo sapiens
tgtacagcccccctgtgatagtttctaatatccagggggtgtataccacccttgtgatattgtttctaatatgtagggggaaggacaatgatattactgtcagtatcacagggggtgtacaacaagccccccgggatatcattcctaatatccatgggaagtargaatattataatatcacagaagttgtacaccccctctgtgatattgttcctaatatcaaagacagaagggtatgatgttcttcccaaaatcacaggaagtgtatacacaccctgtgctatttttcctaatatcgagagtgagagacaatgatacttccaatatcgtaaggagtgtacactctccccgtgataccaggtggggaaatgttgatattactccaaatgtcacagtgggtgtacacacgttttgcgatattgttcctaatagcaagtggggaggaggattgtattactcccaccatattactccccacaccccattatactgttcttaatatccagatttggagaggatgatattactcccaaaatctcaggaggtgtagaccccttctgtgatactgtttct

SEQ ID NO: 345561 - DNA, 573 bp, Homo sapiens
tgtacagcccccctgtgatagtttctaatatccagggggtgtataccacccttgtgatattgtttctaatatgtagggggaaggacaatgatattactgtcagtatcacagggggtgtacaacaagccccccgggatatcattcctaatatccatgggaagtaagaatattataatatcacagaagttgtamaccccctctgtgatattgttcctaatatcaaagacagaagggtatgatgttcttcccaaaatcacaggaagtgtatacacaccctgtgctatttttcctaatatcgagagtgagagacaatgatacttccaatatcgtaaggagtgtacactctccccgtgataccaggtggggaaatgttgatattactccaaatgtcacagtgggtgtacacacgttttgcgatattgttcctaatagcaagtggggaggaggattgtattactcccaccatattactccccacaccccattatactgttcttaatatccagatttggagaggatgatattactcccaaaatctcaggaggtgtagaccccttctgtgatactgtttct

SEQ ID NO: 345562 - DNA, 360 bp, Homo sapiens
caatccaacttggctgcaactgtgtgtgatgagctggccaccaagactctctaagccaaaaaacaagtaataatgagttgttttacttcagaatagataactggaacagaatatggcagctggaaatgagctgctstggtaatcagaagctacaatatgtgacacgactgtgaggctgacctgtaactgggcctcaaggagaccattcatgcaaccaggaagggcatcaagactcttggtcagggcctgaaggacggtgagaaaatgtcattggaaactggagaaaaggcctgagagttacgtgctgagggactgtgggaaaactacggccacaacatggaaactgaaaggacactgcac

SEQ ID NO: 345563 - DNA, 360 bp, Homo sapiens
caatccaacttggctgcaactgtgtgtgatgagctggccaccaagactctctaagccaaaaaacaagtaataatgagttgttttacttcagaatagataactggaacagaatatggcagctggaaatgagctgctctggtaatcagaagctacaatatgtgacacgactgtgaggctgacctgtaactgggcctcaaggagaccattcatgcaaccwggaagggcatcaagactcttggtcagggcctgaaggacggtgagaaaatgtcattggaaactggagaaaaggcctgagagttacgtgctgagggactgtgggaaaactacggccacaacatggaaactgaaaggacactgcac

SEQ ID NO: 345564 - DNA, 360 bp, Homo sapiens
caatccaacttggctgcaactgtgtgtgatgagctggccaccaagactctctaagccaaaaaacaagtaataatgagttgttttacttcagaatagataactggaacagaatatggcagctggaaatgagctgctctggtaatcagaagctacaatatgtgacacgactgtgaggctgacctgtaactgggcctcaaggagaccattcatgcaaccaggaagggcatcaagactcttggtcagggcctgaaggacggtgagaaaatgtcattggaaactggagaaaaggcctgagagttacktgctgagggactgtgggaaaactacggccacaacatggaaactgaaaggacactgcac

SEQ ID NO: 345565 - DNA, 372 bp, Homo sapiens
aactgggcctcaaggagaccattcatgcaaccaggaagggcatcaagactcttggtcagggcctgaaggacggtgagaaaatgtcattggaaactggagaaaaggcctgagagttacgtgytgagggactgtgggaaaactacggccacaacatggaaactgaaaggacactgcaccatctcagggatctgcctaaggagacatctgggaagaacatggaaagtgctaccagcctcccctaactgtcactgaataaatatgacaggagagggacatgatctaaagaagaaggttcagttttcaaacagaatttagagaaaatataaagaaataatttcttatctcaaaaggccaaagtaaaaaaaaagaaaa

SEQ ID NO: 345566 - DNA, 360 bp, Homo sapiens
caatccaacttggctgcaactgtgtgtgatgagctggccaccaagactctctaagccaaaaaacaagtaataatgagttgttttacttcagaatagataactggaacagaatatggcagctggaaatgagctgctctggtaatcagaagctacaatatgtgacacgactgtgaggctgacctgtaactgggcctcaaggagaccattcatgcaaccaggaagggcatcaagactcttggtcagggcctgaaggacggtgagaaaatgtcattggaaactggagaaaaggcctgagagttacgtgctgagggactgtgggaaaactayggccacaacatggaaactgaaaggacactgcac

SEQ ID NO: 345567 - DNA, 372 bp, Homo sapiens
aactgggcctcaaggagaccattcatgcaaccaggaagggcatcaagactcttggtcagggcctgaaggacggtgagaaaatgtcattggaaactggagaaaaggcctgagagttacgtgctgagggactgtgggaaaactacgrccacaacatggaaactgaaaggacactgcaccatctcagggatctgcctaaggagacatctgggaagaacatggaaagtgctaccagcctcccctaactgtcactgaataaatatgacaggagagggacatgatctaaagaagaaggttcagttttcaaacagaatttagagaaaatataaagaaataatttcttatctcaaaaggccaaagtaaaaaaaaagaaaa

SEQ ID NO: 345568 - DNA, 372 bp, Homo sapiens
aactgggcctcaaggagaccattcatgcaaccaggaagggcatcaagactcttggtcagggcctgaaggacggtgagaaaatgtcattggaaactggagaaaaggcctgagagttacgtgctgagggactgtgggaaaactacggccacaacatggaaactgaaaggacactgcaccatctcagggatctgcctaaggagacatctgggaagaacatggaaagtgctaccagcctcccctaactgtcactgaataaatatgacaggagagggacatgatctaaagaagraggttcagttttcaaacagaatttagagaaaatataaagaaataatttcttatctcaaaaggccaaagtaaaaaaaaagaaaa

SEQ ID NO: 345569 - DNA, 573 bp, Homo sapiens
tgtacagcccccctgtgatagtttctaatatccagggggtgtataccacccttgtgatattgtttctaatatgtagggggaaggacaatgatattactgtcagtatcacagggggtgtacaacaagccccccgggatatcattcctaatatccatgggaagtaagaatattataatatcacagaagttgtacaccccctctgtgatattgttcctaatatcaaagacagaagggtatgatgttcttcccaaaatcacaggaagtgtatacacaccctgtgctatttttcctaatatcgagagtgagagacaatgatacttccaatatcgtaaggagtgtacactctccccgtgataccaggtggggaaatgttgatattactccaaatgtcacagtgggtgtacacacgttttgcgatattgttcctaatakcaagtggggaggaggattgtattactcccaccatattactccccacaccccattatactgttcttaatatccagatttggagaggatgatattactcccaaaatctcaggaggtgtagaccccttctgtgatactgtttct

SEQ ID NO: 345570 - DNA, 538 bp, Homo sapiens
tgatgttcttcccaaaatcacaggaagtgtatacacaccctgtgctatttttcctaatatcgagagtgagagacaatgatacttccaatatcgtaaggagtgtacactctccccgtgataccaggtggggaaatgttgatattactccaaatgtcacagtgggtgtacacacgttttgcgatattgttcctaatagcaagtggggaggaggattgtattactcccaccatattactccccacaccmcattatactgttcttaatatccagatttggagaggatgatattactcccaaaatctcaggaggtgtagaccccttctgtgatactgtttcttatatccaggggaagactagatgatagtactcccaacagtgcagggtgttacacgccaccccccatgatattgtctctaatatcaagttggggagagggtgatattgctccaaatagtgtaaagggtgcacaccagcactgtgatattattcctagtatccagagaaggagagaatggtattatttttaatatcacagagg

SEQ ID NO: 345571 - DNA, 598 bp, Homo sapiens
ttgattcattccccactgtggctgtgtgtgggggggcagatgacaggtcaccacaacctgattcagtcctcactgcggctgagtgtgtgtgggtgcaggtgacaggccaccacaacctgattcaggattcagttgggctactagccagtgccataaggaaaaccattctggggctcttgagaggggcaaagcataatttgcatgtgggagaaacgttaatagtttgtggccagaagacacgctgtggtttattaaagactgctgcaggctcctactatgattctcatcaagaggtggaatctaatcaccttccccccttgaatcatggctggtctcagtgatgagtacgactggacagtgtggcaggagagatgctctgggacttctgaggggcgatcatgagaggccttacagcttctgcctgggcctcttggacacacaccctgggagaagccagacaaacctgactacctgacgctgccagactgggaggaagtccgtgctggccacgaagagagggcttggtgmctgctccatgtccccagccactagagtccttccagatgagaccagggacatcatgaagcaaccaaccaac

SEQ ID NO: 345572 - DNA, 578 bp, Homo sapiens
tacaccccttctgatattgttactaatatccgtggggggagtmgatgatattacttccaatatcacagggcatgtacaccccccttgtgatattgttcctaatatcctgggaggagactacgatattactggcaatatcgcagggtgtgtgcattcccgtgatattgttcctaatgtccagcaagggagaaaatattactcccaatatggtgggggtgtacacttcccatgcgatatcgttcctaatatccatgggggaaaaggatgatattactctaaatgtcgcaggaggtgtaaaccgcccctgtgatattgttctcaatatccatggggggagagaatgatattactcccaatatcacaggtggtgtaaacccctcgtgttatattattcctaatatccaggttgggagagaataatattacaggtaaaatagcagggggtgtacactccgcctgtgatagtgttcctaatatctcggggaagagtggacaatattactctcaatatcgcaggatgtgtacaccccctttgtgatattgttcctaatatccatagggggagagggtgataccac

SEQ ID NO: 345573 - DNA, 578 bp, Homo sapiens
tacaccccttctgatattgttactaatatccgtggggggagtcgatgatattacttccaatatcacagggcatgtacaccccccttgtgatattgttcctaatatcctgggaggagactacgatattactggcaatatcgcagggtgtgtgcattcccgtgatattgttcctaatgtccagcaagggagaaaatattactcccaatatggygggggtgtacacttcccatgcgatatcgttcctaatatccatgggggaaaaggatgatattactctaaatgtcgcaggaggtgtaaaccgcccctgtgatattgttctcaatatccatggggggagagaatgatattactcccaatatcacaggtggtgtaaacccctcgtgttatattattcctaatatccaggttgggagagaataatattacaggtaaaatagcagggggtgtacactccgcctgtgatagtgttcctaatatctcggggaagagtggacaatattactctcaatatcgcaggatgtgtacaccccctttgtgatattgttcctaatatccatagggggagagggtgataccac

SEQ ID NO: 345574 - DNA, 578 bp, Homo sapiens
tacaccccttctgatattgttactaatatccgtggggggagtcgatgatattacttccaatatcacagggcatgtacaccccccttgtgatattgttcctaatatcctgggaggagactacgatattactggcaatatcgcagggtgtgtgcattcccgtgatattgttcctaatgtccagcaagggagaaaatattactcccaatatggtgggggtgtacacttcccrtgcgatatcgttcctaatatccatgggggaaaaggatgatattactctaaatgtcgcaggaggtgtaaaccgcccctgtgatattgttctcaatatccatggggggagagaatgatattactcccaatatcacaggtggtgtaaacccctcgtgttatattattcctaatatccaggttgggagagaataatattacaggtaaaatagcagggggtgtacactccgcctgtgatagtgttcctaatatctcggggaagagtggacaatattactctcaatatcgcaggatgtgtacaccccctttgtgatattgttcctaatatccatagggggagagggtgataccac

SEQ ID NO: 345575 - DNA, 578 bp, Homo sapiens
tacaccccttctgatattgttactaatatccgtggggggagtcgatgatattacttccaatatcacagggcatgtacaccccccttgtgatattgttcctaatatcctgggaggagactacgatattactggcaatatcgcagggtgtgtgcattcccgtgatattgttcctaatgtccagcaagggagaaaatattactcccaatatggtgggggtgtacacttcccatgcgatatcgttcctaatatccatgggggaaaaggatgatattactctaaatgtcgcaggaggtgtaaaccgcccctgtgatattgttctcaatatccatggggggagagaatgatattactcccaatatcacaggtggtgtamacccctcgtgttatattattcctaatatccaggttgggagagaataatattacaggtaaaatagcagggggtgtacactccgcctgtgatagtgttcctaatatctcggggaagagtggacaatattactctcaatatcgcaggatgtgtacaccccctttgtgatattgttcctaatatccatagggggagagggtgataccac

SEQ ID NO: 345576 - DNA, 521 bp, Homo sapiens
tgtgatattgttcctaatatccatagggggagagggtgataccactcccaatagtgcagaaaaggtacagccccgctgtgatatcattcctaatatccagaggggacaggatgatattactcccaatatcacagagggcatacaccccctccccatgatattgttcataatacccagggggtagaggatgatattactcccaatatcgcagtgggtgtacaaccaccctgtgatattgttcctaatatccatgtggaaagggtataaagttactcccaatatcacaggggttgtacaacccccttgtgatattgttccttatattcgggggagagacaatgatatagctgtccatattgcaggtggtgtacaaccccctgggaatttgttcctaatattcagtggggaagatgatattaattaaaatrtcacagggggtatacaacccctttgtgatattattcctaatatccagggaaagaaagaatattattcccaatatcgcaggggatgtacacccc

SEQ ID NO: 345577 - DNA, 521 bp, Homo sapiens
tgtgatattgttcctaatatccatagggggagagggtgataccactcccaatagtgcagaaaaggtacagccccgctgtgatatcattcctaatatccagaggggacaggatgatattactcccaatatcacagagggcatacaccccctccccatgatattgttcataatacccagggggtagaggatgatattactcccaatatcgcagtgggtgtacaaccaccctgtgatattgttcctaatatccatgtggaaagggtataaagttactcccaatatcacaggggttgtacaacccccttgtgatattgttccttatattcgggggagagacaatgatatagctgtccatattgcaggtggtgtacaaccccctgggaatttgttcctaatattcagtggggaagatgatattaattaaaatatcacrgggggtatacaacccctttgtgatattattcctaatatccagggaaagaaagaatattattcccaatatcgcaggggatgtacacccc

SEQ ID NO: 345578 - DNA, 602 bp, Homo sapiens
ctctgaggctcagccagggaccacatgaggactctctccagacagccagaaggccatttgctagtttcctggtacctcagtggatgtggcagcggttcttctgttggggaccagtgagtacacactggggagggctcacctrtgcttcctcattggctccacctctgcttctaaaaaaaattactcattccagatctggggcagagaaaatacaagatgagcttagaacatcttctgccagaaattaaaaaagtgctgacagagtaatggagacaaatcaaagagacataaagtcagcttggaatgtctactactggcctaatcttggggaattgaagcatcagaatcaagagctttccttctcccttatttattggttttatttctccatgtagaacaaagaagacaataagaaaataatcatctggcaaccatcaaagtaataattgttcaaacacaagtcatccatgaaatgctaaatctagtgggttctgaggagtaacaagatatttacagagcctcaaagtatctccatacaaaatacggttgaactacaaaaagaaaatcataacattagcatggacaaacctggcaggtactcc

SEQ ID NO: 345579 - DNA, 367 bp, Homo sapiens
gaaagatgtgaaaacagaaactttcacagagaagactgtacttatacaccataaattcatcatgttccaaagcttaaacagttcccaagaagtctgtgcatctctttttcactggctctacactttcttaagttttgccatcctcatggaactgtcagccagcacactgaaacgattctcagaaaacaaawgcatcatcaagttctcagggtttcggtagagattgaaggccaacagacctaagactcattcagaaatacttagctgagcaataacccttcataagcagtcacttgacaggtgacattttaaatctcctgtcaattactatgtcattggcttacacttgttctcaggaaaagttcca

SEQ ID NO: 345580 - DNA, 367 bp, Homo sapiens
gaaagatgtgaaaacagaaactttcacagagaagactgtacttatacaccataaattcatcatgttccaaagcttaaacagttcccaagaagtctgtgcatctctttttcactggctctacactttcttaagttttgccatcctcatggaactgtcagccagcacactgaaacgattctcagaaaacaaaagcatcatcaagttctcagggtttcrgtagagattgaaggccaacagacctaagactcattcagaaatacttagctgagcaataacccttcataagcagtcacttgacaggtgacattttaaatctcctgtcaattactatgtcattggcttacacttgttctcaggaaaagttcca

SEQ ID NO: 345581 - DNA, 367 bp, Homo sapiens
gaaagatgtgaaaacagaaactttcacagagaagactgtacttatacaccataaattcatcatgttccaaagcttaaacagttcccaagaagtctgtgcatctctttttcactggctctacactttcttaagttttgccatcctcatggaactgtcagccagcacactgaaacgattctcagaaaacaaaagcatcatcaagttctcagggtttcggtagagattgaaggccaacagacctaagactcattcagaaatacttagctgagcaataacccttcataagcagtcacttgacaggtgacattttaaatctcctgtcaattactrtgtcattggcttacacttgttctcaggaaaagttcca

SEQ ID NO: 345582 - DNA, 604 bp, Homo sapiens
taactctttttgtttgtttatgcttggggctttattgttgttgtttcacttttctcccgtctcttcctgacttggtcaaatccaaaggaattttccaaattgtgggcagcaaggcctctgaattggctaaaactcctatggctgcaaacaaacaaacaaacaaataaacaacaacaaaaaacattccagttagcagaaattattttttaaaacttttttttttacataagtggtctcatctacataacaaggccacccttttgctagccaaggctaaactgaaggagtagtggtggtgacccaatgtgaagattctgccctgttcactacagaaacctgagtttggttcctaagtctagttctttctgtttgatatttgtgttacttttaaagcgtcagcagtttgtcccagctatgatgtggtaataaaagattcaaaaggattttctttacaagttctatgattaaaagcttaattaaaagcaaatttctttttttttagttatactttaagttctggggtacwtgttcagaacatgcaggtttgttacataggtatacacatgccatggtggcttgctgcatccatcaacccatgatctac

SEQ ID NO: 345583 - DNA, 369 bp, Homo sapiens
cgtgagaccagcctgagcaaaatagcgagatgctgactctacagaaaaaataaaagttagctgaccatggtgttgcatgcctgtaattaacarcttcttgggaggttgaggtgggaggatcccttgagtgcaggaggtcaaggttgcagtgagctgtgatcatgccactgcacttcagcctgagtgacaggcagagacattggcgcaaaaaaatttcaaaaatacattaaaatgtcttgtatagacatttatccatttacatttacttatttttgacagtttatctagagtatttgtgagaactgaggtattagacaaagctagtcatcatttctaggttattttcttgttaaccatgttatagcctgt

SEQ ID NO: 345584 - DNA, 565 bp, Homo sapiens
atggataataaactgtgaacaaattaaatttctagcaagattgcaaagttaatttattatttgaaagatcagtttaatcaattttattcacctggatggttacatctggcaaaactcagcaaactgtgcactttaaaatagtatttattttatgtaaattatgtttcaatacaattgattttttaagaaaaaaaaaacgtttcccagagtgatcaaagtggagggcagggaacagtaaacatcagtgcttatgttatagctactagaagcctcccaattccaacgacatgctttcaagcaggtctgatccttcccctggaggatacctctgacccaggtgtgctacaaatgyattgcccctagttgcttctgtcaccttagtgatggaagtgacaagagggtactggagaaagaaaaggtgtacaaggttccaaatgtacattctatttccaaaggacatttgtgaagccagtggaaagcgaacaaacaagctgctaaataagtcacaagtgtgttctcgtacagttttgcgattaactaaataggacattcaacagataaaatt

SEQ ID NO: 345585 - DNA, 369 bp, Homo sapiens
cgtgagaccagcctgagcaaaatagcgagatgctgactctacagaaaaaataaaagttagctgaccatggtgttgcatgcctgtaattaacagcttcttgggaggttgaggtgggaggatcccttgagtgcaggaggtcaaggttgcartgagctgtgatcatgccactgcacttcagcctgagtgacaggcagagacattggcgcaaaaaaatttcaaaaatacattaaaatgtcttgtatagacatttatccatttacatttacttatttttgacagtttatctagagtatttgtgagaactgaggtattagacaaagctagtcatcatttctaggttattttcttgttaaccatgttatagcctgt

SEQ ID NO: 345586 - DNA, 369 bp, Homo sapiens
cgtgagaccagcctgagcaaaatagcgagatgctgactctacagaaaaaataaaagttagctgaccatggtgttgcatgcctgtaattaacagcttcttgggaggttgaggtgggaggatcccttgagtgcaggaggtcaaggttgcagtgagctgtgatcatgccactgcacttcagcctgrgtgacaggcagagacattggcgcaaaaaaatttcaaaaatacattaaaatgtcttgtatagacatttatccatttacatttacttatttttgacagtttatctagagtatttgtgagaactgaggtattagacaaagctagtcatcatttctaggttattttcttgttaaccatgttatagcctgt

SEQ ID NO: 345587 - DNA, 369 bp, Homo sapiens
cgtgagaccagcctgagcaaaatagcgagatgctgactctacagaaaaaataaaagttagctgaccatggtgttgcatgcctgtaattaacagcttcttgggaggttgaggtgggaggatcccttgagtgcaggaggtcaaggttgcagtgagctgtgatcatgccactgcacttcagcctgagtgacaggcagagacattggckcaaaaaaatttcaaaaatacattaaaatgtcttgtatagacatttatccatttacatttacttatttttgacagtttatctagagtatttgtgagaactgaggtattagacaaagctagtcatcatttctaggttattttcttgttaaccatgttatagcctgt

SEQ ID NO: 345588 - DNA, 634 bp, Homo sapiens
gtggcttgtctggccaccgtgtgtgctgtcaaaccccttactgggcwgggaagcatgcagacaggcaggtgcaataggcagggcaagtggccatggtactgtctacgggtgggttcctgcgactcccacagcccaagtgggcatgtgttacagtgcactcttttagctttgccatccacagacggcttaagtgttaacctgttcagtgccctcttggtacccagttccttgtccagcatccagaaagaattaagttgcacacagacttgaggatggtgaatgtgggggttttattgagtggtggaggtggcactcaatgggatggatgggaagctggaaaggggatggaatgggaagatgatcttccccgggagctttgccatccagaggctgatctctccaaccactgccagccaaactcctcttggcattcagatgctccttctcttctttctgccacatcattctgcaattctgctcttctgttcatctcctcatctgcttgtctgcttctggagcctggggtctggggcatatatgggtacaggacagggggtgcatggtgagctgaaagacaacttttgggtgcaaaagcaggaatgcctgttcccatttagggccatgggtttccagg

SEQ ID NO: 345589 - DNA, 538 bp, Homo sapiens
tccttagcaacattgattttctgtgtcgttgttatgaaagccttactagtggatgcaaagtggcrtctcatttgggttttgccttgcattttattaatgaataatggtgtttagcatcttttcttttccttcttagacatttgtgtatcttctttggagaaatgtctgttcaagtcctttgcctatttttttaattgggatcttagaaattctgttgttgagttgtgggatattaagcttttatcagatacacattttgattttatcagatacatattttctcacatattatgggttgtcttttcactcccttgatagtatcctttgatgcataaagggttttttattttgattaaatctaattttcgtgtattttcttttgttatctgtgcttttctgtcatatttcaaaatacacttaaaactcaaaggtcataaaggtttaccgtgtgttttcttctaagagttacatatttttagtccttacatttaagtcttttattaatttagaattaatttttgtatatactgcaaggtag

SEQ ID NO: 345590 - DNA, 620 bp, Homo sapiens
gtgtatcttctttggagaaatgtctgttcaagtcctttgcctatttttttaattgggatcttagaaattctgttgttgagttgtgggatattaagcttttatcagatacacattttgattttatcagatacatattttctcacatattatgggttgtcttttcactcccttgatagtatcctttgatgcataaagggttttttattttgattmaatctaattttcgtgtattttcttttgttatctgtgcttttctgtcatatttcaaaatacacttaaaactcaaaggtcataaaggtttaccgtgtgttttcttctaagagttacatatttttagtccttacatttaagtcttttattaatttagaattaatttttgtatatactgcaaggtaggggtctaacttctctcttgtacactgacatccagctgttgaagagagtgttctttcctcccttgactagacttggccaccttgttgaacagtcattgaccatatatgtgaggactaacttgtaggatctcaaatctgttctgttgtattggtctgaaagtctattggtcttattccagtaccacactctcttgattactgtagatttgtagtaggctgtgaaac

SEQ ID NO: 345591 - DNA, 620 bp, Homo sapiens
gtgtatcttctttggagaaatgtctgttcaagtcctttgcctatttttttaattgggatcttagaaattctgttgttgagttgtgggatattaagcttttatcagatacacattttgattttatcagatacatattttctcacatattatgggttgtcttttcactcccttgatagtatcctttgatgcataaagggttttttattttgattaaatctaattttcstgtattttcttttgttatctgtgcttttctgtcatatttcaaaatacacttaaaactcaaaggtcataaaggtttaccgtgtgttttcttctaagagttacatatttttagtccttacatttaagtcttttattaatttagaattaatttttgtatatactgcaaggtaggggtctaacttctctcttgtacactgacatccagctgttgaagagagtgttctttcctcccttgactagacttggccaccttgttgaacagtcattgaccatatatgtgaggactaacttgtaggatctcaaatctgttctgttgtattggtctgaaagtctattggtcttattccagtaccacactctcttgattactgtagatttgtagtaggctgtgaaac

SEQ ID NO: 345592 - DNA, 620 bp, Homo sapiens
gtgtatcttctttggagaaatgtctgttcaagtcctttgcctatttttttaattgggatcttagaaattctgttgttgagttgtgggatattaagcttttatcagatacacattttgattttatcagatacatattttctcacatattatgggttgtcttttcactcccttgatagtatcctttgatgcataaagggttttttattttgattaaatctaattttcgtgtattttcttttgttatctgtgcttttctgtcayatttcaaaatacacttaaaactcaaaggtcataaaggtttaccgtgtgttttcttctaagagttacatatttttagtccttacatttaagtcttttattaatttagaattaatttttgtatatactgcaaggtaggggtctaacttctctcttgtacactgacatccagctgttgaagagagtgttctttcctcccttgactagacttggccaccttgttgaacagtcattgaccatatatgtgaggactaacttgtaggatctcaaatctgttctgttgtattggtctgaaagtctattggtcttattccagtaccacactctcttgattactgtagatttgtagtaggctgtgaaac

SEQ ID NO: 345593 - DNA, 592 bp, Homo sapiens
cctatttttttaattgggatcttagaaattctgttgttgagttgtgggatattaagcttttatcagatacacattttgattttatcagatacatattttctcacatattatgggttgtcttttcactcccttgatagtatcctttgatgcataaagggttttttattttgattaaatctaattttcgtgtattttcttttgttatctgtgcttttctgtcatatttcaaaatacacttaaaactcaaaggtcataaaggtttaccgtgtgttttcttctaagagttacatatttttagtccttacatttaagtcttttattaatttagaattaatttttgtatatactgcaaggtaggggtctaacttctctcttgtacactgacatccagctgttgaagagagtgttctttcctcccttgactagacttggccaccttgttgaacagtcattgaccatatatgtgaggactaacttgtaggatctcaaatctgttctrttgtattggtctgaaagtctattggtcttattccagtaccacactctcttgattactgtagatttgtagtaggctgtgaaactgaaaaatgtg

SEQ ID NO: 345594 - DNA, 471 bp, Homo sapiens
ttaaaatgttttcatagttctttacaactatatagaaatatagctcatttgcctatgtttgtttgcatcctgcctcttttattagttataatcggttttgtgttttgtttggagctttataccyataagatcatgtgtagatataattttacaccgattttttatttctaatttagatgccttttatttctttgtcttgcctaattgctctggctagaactgccagtgctacgttgaatacaagtggcaaatgcaccatccttttcttctagatgttaggaaaacagctttcagtgtttcatcattgatcatgatattaactgttgggtttttgtacatcccattgtcatgttgcagaagatcccttctatgcctagtttattgagtatttttattatagaagggtgttgtatttcatcaatgttttctctgcatcaattgaaataatcacgtgcttattcattttactgt

SEQ ID NO: 345595 - DNA, 613 bp, Homo sapiens
tgtcttacaacccgtgaacacagaatgtctttccacttatttccactctctttagttttttgcagcaatgttttgtgtataccaccatggttagatttatgcctgaataacgtattctttgatgtcattataaatggaatttttaaaatgttttcatagttctttacaactatatagaaatatagctcatttgcctatgtttgtttgcatcctgcctcttttattagttataatcggttttgtgttttgtttggagctttatacctataagatcatgtgtagatataattttacacckattttttatttctaatttagatgccttttatttctttgtcttgcctaattgctctggctagaactgccagtgctacgttgaatacaagtggcaaatgcaccatccttttcttctagatgttaggaaaacagctttcagtgtttcatcattgatcatgatattaactgttgggtttttgtacatcccattgtcatgttgcagaagatcccttctatgcctagtttattgagtatttttattatagaagggtgttgtatttcatcaatgttttctctgcatcaattgaaataatcacgtgcttattcattttactgt

SEQ ID NO: 345596 - DNA, 523 bp, Homo sapiens
tcggttttgtgttttgtttggagctttatacctataagatcatgtgtagatataattttacaccgattttttatttctratttagatgccttttatttctttgtcttgcctaattgctctggctagaactgccagtgctacgttgaatacaagtggcaaatgcaccatccttttcttctagatgttaggaaaacagctttcagtgtttcatcattgatcatgatattaactgttgggtttttgtacatcccattgtcatgttgcagaagatcccttctatgcctagtttattgagtatttttattatagaagggtgttgtatttcatcaatgttttctctgcatcaattgaaataatcacgtgcttattcattttactgttacagcatattacactgattgattttttatatgttgaaccacccttgcattttggggataaatctcaaagggtgatagtttacaatcctttgattatacagtattgctgctagtattttgctagtattgctagtattttgctg

SEQ ID NO: 345597 - DNA, 523 bp, Homo sapiens
tcggttttgtgttttgtttggagctttatacctataagatcatgtgtagatataattttacaccgattttttatttctaatttagatgccttttatttctttgtcttgcctaattgctctggctagaactgccagtgctacgttgaatacaagtggcaaatgcaccatccttttcttctagatgttaggaaaacagctttcagtgtttcatcattgatcatgatattaactgttgggtttttgtacatcccattgtcatgttgcagaagatcccttctatgcctagtttattgagtatttttattatagaagggtgttgtatttcatcaatgttttctctgcatcaattgaaataatcacgtgcttattcattttactgttacagcatattacactgattgattttttatatgttgaaccacccttgcattttggggataaatctcaaagggtgatagtttacaatcctttgattatacartattgctgctagtattttgctagtattgctagtattttgctg

SEQ ID NO: 345598 - DNA, 460 bp, Homo sapiens
gctctggctagaactgccagtgctacgttgaatacaagtggcaaatgcaccatccttttcttctagatgttaggaaaacagctttcagtgtttcatcattgatcatgatattaactgttgggtttttgtacatcccattgtcatgttgcagaagatcccttctatgcctagtttattgagtatttttattatagaagggtgttgtatttcatcaatgttttctctgcatcaattgaaataatcacgtgcttattcattttactgttacagcatattacactgattgattttttatatgttgaaccacccttgcattttggggataaatctcaaagggtgatagtttacaatcctttgattatacagtattgctgctagtattttgctagtattgctagtattttgctgagatttttgcttatatattcatargggatatagtgctgtatttctctctttt

SEQ ID NO: 345599 - DNA, 626 bp, Homo sapiens
gtatttctctcttttgtgctctctttgtctttggtataaggataatgctgttatcaaaaaatgaattagcaagtattccttcttcatatattttgtcagaagagtttgagaagaaatggtattaattcttctttaaatgttaggttgactcaccagttaatgcagctatttggtcataaatgtttctttgttaatcgctttcgattactaattcaatctcctaggttataggtctattcagattttctctttcttcttgagycactttggtagtttgtgtctttctagcgattcatccatttcatccagggcacctaatttgttgctagacagttgttcacagtatactcctgtaatccttttgtatttctgtaaagttggtagtaatggctctgctttcatttattattttaataattagtcttccatcttttgctcagtcaatatagtgaaaggcttgatctttcaaagaatctacattttttcattctactgctctccaaccttctattttattgatttatgctctaattatgctctttattatttctttccttctgctagctttggatttagtcttccacctggatttattttgggagtgatattgatgtaacttcctggaa

SEQ ID NO: 345600 - DNA, 569 bp, Homo sapiens
tttggtagtttgtgtctttctagcgattcatccatttcatccagggcacctaatttgttgctagacagttgttcacagtatactcctgtaatccttttgtatttctgtaaagttggtagtaatggctctgctttcatttattattttaataattagtcttccatcttttgctcagtcaatatagtgaaaggcttgatctttcaaagaatctacattttttcattctactgctctccaaccttctattttattgatttatgctctaattatgctctttattatttctttccttctgctagctttggatttagtcttccacctggatttattttgggagtgatattgatgtaacttcctggaaataatactagatagaaagttagyggatagattctctatctgatgagagtttggggcaagtcgagtaccaggttaccaagttttatttttttctctgacccaaaaaacaatttggcagccggtgagaaactctcacagctctggatgtgagtttaggacactgcatttctaccattcaatttcttactacttttttgcacagggatcat

SEQ ID NO: 345601 - DNA, 569 bp, Homo sapiens
tttggtagtttgtgtctttctagcgattcatccatttcatccagggcacctaatttgttgctagacagttgttcacagtatactcctgtaatccttttgtatttctgtaaagttggtagtaatggctctgctttcatttattattttaataattagtcttccatcttttgctcagtcaatatagtgaaaggcttgatctttcaaagaatctacattttttcattctactgctctccaaccttctattttattgatttatgctctaattatgctctttattatttctttccttctgctagctttggatttagtcttccacctggatttattttgggagtgatattgatgtaacttcctggaaataatactagatagaaagttagcggatagattctctatctgatgagagtttggggcaagtcgagtaccaggttaccaagttttatttttttctctgacccaaaaaacaatttggcagccggtgagaaactctcacagctctggatgtgagtttaggacmctgcatttctaccattcaatttcttactacttttttgcacagggatcat

SEQ ID NO: 345602 - DNA, 569 bp, Homo sapiens
tttggtagtttgtgtctttctagcgattcatccatttcatccagggcacctaatttgttgctagacagttgttcacagtatactcctgtaatccttttgtatttctgtaaagttggtagtaatggctctgctttcatttattattttaataattagtcttccatcttttgctcagtcaatatagtgaaaggcttgatctttcaaagaatctacattttttcattctactgctctccaaccttctattttattgatttatgctctaattatgctctttattatttctttccttctgctagctttggatttagtcttccacctggatttattttgggagtgatattgatgtaacttcctggaaataatactagatagaaagttagcggatagattctctatctgatgagagtttggggcaagtcgagtaccaggttaccaagttttatttttttctctgacccaaaaaacaatttggcagccggtgagaaactctcacagctctggatgtgagtttaggacactgcatttctaccwttcaatttcttactacttttttgcacagggatcat

SEQ ID NO: 345603 - DNA, 602 bp, Homo sapiens
atttatgctctaattatgctctttattatttctttccttctgctagctttggatttagtcttccacctggatttattttgggagtgatattgatgtaacttcctggaaataatactagatagaaagttagcggatagattctctatctgatgagagtttggggcaagtcgagtaccaggttaccaagttttatttttttctctgacccaaaaaacaatttggcagccggtgagaaactctcacagctctggatgtgagtttaggacactgcatttctaccattcaatttcttactacttttttgcacagggatcatggcacaagttgcagattccaccctgcccrtggaagatgaggagtccatggaagatgaggagtctgttgaagatgattccgtggagagcaggatggtggtgacatttctcatatcagctctcgagtccacggtgagaccttctgttctaacatgatataattgggtagaactgggtggtagataaggttgatttgtttttgtagaacttataattttatgatttgtagttctaatgagtagatctttttctggaatagtagttatggtcaaacacttctaaccaaat

SEQ ID NO: 345604 - DNA, 602 bp, Homo sapiens
atttatgctctaattatgctctttattatttctttccttctgctagctttggatttagtcttccacctggatttattttgggagtgatattgatgtaacttcctggaaataatactagatagaaagttagcggatagattctctatctgatgagagtttggggcaagtcgagtaccaggttaccaagttttatttttttctctgacccaaaaaacaatttggcagccggtgagaaactctcacagctctggatgtgagtttaggacactgcatttctaccattcaatttcttactacttttttgcacagggatcatggcacaagttgcagattccaccctgcccatggaagatgaggagtccatggaagatgaggagtctgttgaagatgattccgtggagagcaggatggtggtgacatttctcatatcagctctcgagtccacggtgagaccttctgttstaacatgatataattgggtagaactgggtggtagataaggttgatttgtttttgtagaacttataattttatgatttgtagttctaatgagtagatctttttctggaatagtagttatggtcaaacacttctaaccaaat

SEQ ID NO: 345605 - DNA, 534 bp, Homo sapiens
ctttagttctttttgatcaccaaccagacaatctagttctcccctatgagttgttgctctgaattattcttcagtgccaaatgtttaattggttctagataatgggtgaaatgtacaagggtgaaatctaaaactggtttactaaacacaagtactcctagatttttttaattcattttagttttcttaamctacattaaggagtacaacatgatgttttgatataattatttctagtgaagtggttcttataatcaagcaaatcaacatattcattttcccacattattgccctttaaatacaagtatttctaatggaatcttcagaatcttacaagtagagccgttttagaaggcagcaaattttgcctgttgagccatacaccactgatagccatttctcttccctgtctactttgtttgaactgcttgttcagtgtaaatcaccttagaaacaaaggtgcttctttagaatgattttaaaattataattccttacaacaggtatgctcttacacatcttcggtgtgaaaa

SEQ ID NO: 345606 - DNA, 534 bp, Homo sapiens
ctttagttctttttgatcaccaaccagacaatctagttctcccctatgagttgttgctctgaattattcttcagtgccaaatgtttaattggttctagataatgggtgaaatgtacaagggtgaaatctaaaactggtttactaaacacaagtactcctagatttttttaattcattttagttttcttaacctacattaaggagtacaacatgatgttttgatataattatttctagtgaagtggttcttataatcaagcaaatcaacatattcattttcccacattattgccctttaaatacaagtatttctaatggaatcttcagaatcttacaagtagagccrttttagaaggcagcaaattttgcctgttgagccatacaccactgatagccatttctcttccctgtctactttgtttgaactgcttgttcagtgtaaatcaccttagaaacaaaggtgcttctttagaatgattttaaaattataattccttacaacaggtatgctcttacacatcttcggtgtgaaaa

SEQ ID NO: 345607 - DNA, 344 bp, Homo sapiens
tccatgttatgtgcagaagtgtcaggattttcttcatttctatgactgaataatacttcttcatacatatatattttctatatatatatatatatatatatatgtatatccttttgtttatccatctattcctggatggacgttttggtttcttccacctagtggctgtgtaatgctcctgtgaayataggtgtgcacatatctgtttgaggtcctgctactagttattctgtctctgtagaagttggatggctggatcatatggtcattttattttatttttttgagaagccagttcatatttccaccaacagtgttcaagagtttcagtttcacctgcactt

SEQ ID NO: 345608 - DNA, 344 bp, Homo sapiens
tccatgttatgtgcagaagtgtcaggattttcttcatttctatgactgaataatacttcttcatacatatatattttctatatatatatatatatatatatatgtatatccttttgtttatccatctattcctggatggacgttttggtttcttccacctagtggctgtgtaatgctcctgtgaatataggtgtgcacatatctgtttgagktcctgctactagttattctgtctctgtagaagttggatggctggatcatatggtcattttattttatttttttgagaagccagttcatatttccaccaacagtgttcaagagtttcagtttcacctgcactt

SEQ ID NO: 345609 - DNA, 344 bp, Homo sapiens
tccatgttatgtgcagaagtgtcaggattttcttcatttctatgactgaataatacttcttcatacatatatattttctatatatatatatatatatatatatgtatatccttttgtttatccatctattcctggatggacgttttggtttcttccacctagtggctgtgtaatgctcctgtgaatataggtgtgcacatatctgtttgaggtcctgctactagttattctgtctctgtagaagttggatggctggatcatatggtcattttattttatttttttgagragccagttcatatttccaccaacagtgttcaagagtttcagtttcacctgcactt

SEQ ID NO: 345610 - DNA, 197 bp, Homo sapiens
tatcaattcctcagtgactttttgaaaaagtagtatctcttgttgcaagaaatgctgcatctgtgagtccatgtctctcactggaattggatggaagtggtgaatttcagccaaagtrgccaaagaaatcctgttcctgtgattctgacatcatcagcctctgcacctctgtattcccttctgccacatgttgcctg

SEQ ID NO: 345611 - DNA, 197 bp, Homo sapiens
tatcaattcctcagtgactttttgaaaaagtagtatctcttgttgcaagaaatgctgcatctgtgagtccatgtctctcactggaattggatggaagtggtgaatttcagccaaagtagccaaagaaatcctgttcctgtgattctgacatcatcagcctctgcacctctgtmttcccttctgccacatgttgcctg

SEQ ID NO: 345612 - DNA, 381 bp, Homo sapiens
ggccaaggtgggtggattgcctgatttcaggagttcgagaccagtctggccaacatactgaaaccctgtctctactaaaaatacaaaaatattagctgagagtggtgacatgtgcctgtaattccagctagtcgggaggctgaggcaggggagttgcttgaaccagggaggtggaggttgcagtcagctgagatcacaccactgcattcyagcctgcatgacagagtgagagtccatctccaaaagaaagaaagaaaaagaaaatgggcattgaacacaggtggctcccacctacatataatccaagcactttgggaagctgaggcagaatgatcacttgaggccaggagtctgacaacatcctgagcaacacagcaagat

SEQ ID NO: 345613 - DNA, 381 bp, Homo sapiens
ggccaaggtgggtggattgcctgatttcaggagttcgagaccagtctggccaacatactgaaaccctgtctctactaaaaatacaaaaatattagctgagagtggtgacatgtgcctgtaattccagctagtcgggaggctgaggcaggggagttgcttgaaccagggaggtggaggttgcagtcagctgagatcacaccactgcattccagcctgcatgacagagtgagagtccatctccaaaagaaagaaagaaaaagaaaatgggcattgaasacaggtggctcccacctacatataatccaagcactttgggaagctgaggcagaatgatcacttgaggccaggagtctgacaacatcctgagcaacacagcaagat

SEQ ID NO: 345614 - DNA, 596 bp, Homo sapiens
ttgagggtgggttgctggttaggttcagtggccagctgagtagtatctgaaaaattcattagtaaaattatggcactaggggtgagtcatgcagtcgaaggatgaatactaaatccagtacaaacacccatggtctttctttacatgaattccagtgaaaaatttctaagtgcctaaaatagcaagtggtctgaaatgatggcagcagtttattaaagactgaaaaaagaggccaggcacggtggctcacacctgtaatcccagcactttaggagtccaaggccagtggatcacaaggtcaggagttcaagaccagcctgtccaacatgctgaaaccccgtawctacagaaaatacaaagcttagctgggcatggtgacacatccctgtagtcccagctacttcagaggctgaggcaaaagaaatgcttgaaccctgaactgggaggcagaagttgctgtgaattgagattgtgccactgcactcgagcctggtgacagaggaagatgctgtctcaaaaaaaaaaaaaaaaagaaaaagaaatggcatcttcaagaaccacaagagagttccgcgctgaagaagctctgattctgc

SEQ ID NO: 345615 - DNA, 588 bp, Homo sapiens
tcatcaatcatgcctgcataatgaagcgttcataagcgccctcaacaactggagttggagaatgtctgggttgctgaacacaagggagataccaggaaggtaacatgcacaatagaggacatggaagttctgtacccctctcgacataccttgccctgtgtggtttttttttttttttttgagacagagtctggctctgtctcccascctagagtgccatggcacaatcgtggctcactgcgaactatgcctccctatctcaagccccatcctctcatcctctcacctcagcctcctgagtagctagaattataggcactgagtagctagaactatagataactgtgcctggctaatttttagaaaaatctttttgtagagatgcattttcaccttgttacccaggctggtcttaatctcctgagcacttaagcgatgctcccgcctcagtctcccaaagtgctgaaattacaggcatgagccactgtgcccagcatgtacatctctttcactgtctgtttctgagatttagcctttaaaatgaaccagtaaaagaaagtaaattggtgagatgcagtggttcatgcc

SEQ ID NO: 345616 - DNA, 525 bp, Homo sapiens
cacatttggtcagaggtgtttgaacgtaactactattcacgaaaaaggtctactcattagaactaaaaatcacaaaattgtaagttctacaaaaacaaatcaaccttatctaccgcccagtcctactgaactacagaatgtgagaacagaaggtctgaccatggagtcgagagctgacrggaatgtcaccaccatcctgctctccaaggactcctcatcttcaacagacttctcatcttcaatgggcagggtggaaactgcaacttgtgccatgatccttgcacaagaaaagtagtaagaaaatgagtggtagaaatccagtgtcctaaactcacatccggagctgtgagagttttttactggctggataattcacagttttcttgaatcaggggaaaaataagactcagaaactaggaattcgttttgccctaaactctcatcagatacagaatccatccgctaactatctagtattatttccataagttagatcaattatcactcccaaaacaaatgcacatg

SEQ ID NO: 345617 - DNA, 525 bp, Homo sapiens
cacatttggtcagaggtgtttgaacgtaactactattcacgaaaaaggtctactcattagaactaaaaatcacaaaattgtaagttctacaaaaacaaatcaaccttatctaccgcccagtcctactgaactacagaatgtgagaacagaaggtctgaccatggagtcgagagctgacgggaatgtcaccaccatcctgctctccaaggactcctcatcttcaacagactyctcatcttcaatgggcagggtggaaactgcaacttgtgccatgatccttgcacaagaaaagtagtaagaaaatgagtggtagaaatccagtgtcctaaactcacatccggagctgtgagagttttttactggctggataattcacagttttcttgaatcaggggaaaaataagactcagaaactaggaattcgttttgccctaaactctcatcagatacagaatccatccgctaactatctagtattatttccataagttagatcaattatcactcccaaaacaaatgcacatg

SEQ ID NO: 345618 - DNA, 532 bp, Homo sapiens
aattttcttttttggggggtttttgattactggttgaatcttcttactagttacaggtctctttggattttttatttctccatgatgcagtatggtggtttgtgtttctaggaatttataaatttattctaggttgcccagttttgtggcatatggttgctcacattagtctcttgtaatctttttcatttctgtggaatctgttgtactgtcacctcttttatttatgattttagtatttgagatttctctttttttcttaatatagctgtgagttttaaaatttttattgatctttaaaaaaactaactcagtggttttttttttcctttttttctgatcttattctgcttatctctattctaatctgttactttcttccttttgcttggtttgtctttagtttttttttttcccctttaggtgtaatgttaggttattgrtttgagatctttcttctttttaatttaagcacctgcaactataagcttccctttagcatggctttgagatctttcttctttttaattta

SEQ ID NO: 345619 - DNA, 532 bp, Homo sapiens
aattttcttttttggggggtttttgattactggttgaatcttcttactagttacaggtctctttggattttttatttctccatgatgcagtatggtggtttgtgtttctaggaatttataaatttattctaggttgcccagttttgtggcatatggttgctcacattagtctcttgtaatctttttcatttctgtggaatctgttgtactgtcacctcttttatttatgattttagtatttgagatttctctttttttcttaatatagctgtgagttttaaaatttttattgatctttaaaaaaactaactcagtggttttttttttcctttttttctgatcttattctgcttatctctattctaatctgttactttcttccttttgcttggtttgtctttagtttttttttttcccctttaggtgtaatgttaggttattggtttgagatctttcttctttttaatttaakcacctgcaactataagcttccctttagcatggctttgagatctttcttctttttaattta

SEQ ID NO: 345620 - DNA, 532 bp, Homo sapiens
aattttcttttttggggggtttttgattactggttgaatcttcttactagttacaggtctctttggattttttatttctccatgatgcagtatggtggtttgtgtttctaggaatttataaatttattctaggttgcccagttttgtggcatatggttgctcacattagtctcttgtaatctttttcatttctgtggaatctgttgtactgtcacctcttttatttatgattttagtatttgagatttctctttttttcttaatatagctgtgagttttaaaatttttattgatctttaaaaaaactaactcagtggttttttttttcctttttttctgatcttattctgcttatctctattctaatctgttactttcttccttttgcttggtttgtctttagtttttttttttcccctttaggtgtaatgttaggttattggtttgagatctttcttctttttaatttaagcacctgcarctataagcttccctttagcatggctttgagatctttcttctttttaattta

SEQ ID NO: 345621 - DNA, 558 bp, Homo sapiens
atatgtctacaaagtatgcacactttaatttacaaatactttattgttaacaagtgctaacagtcatctgagccttcagaaagctgcaatctttttttgtgtgcgtgacagggttttactctgtggctcaggctggagtaattgcagcctcaacctcatgctcaatcaaacccccacctcagactcctgactagatgaaactacagatgcatgccacctgtccagctaatttttgtattttctttttttgtagagatggggttttgccatgttgccttgacttcccggrctcaagcaatctacccaccttggcctcccaaggtgttgggatgacaggtgtgagccactgcacctggccaagtttcagtcttcttgctgatggaggggcttgccttaatgtaaggtggtggttgctgagcgttggggtggctgtggcaatttcttaaaataagacaccattgaagtttgctgtgtcaattgactctccctttcacaaaagaattatctgtagcatacgatgttgtttgatagctttctacccacagtagaactttcaaa

SEQ ID NO: 345622 - DNA, 558 bp, Homo sapiens
atatgtctacaaagtatgcacactttaatttacaaatactttattgttaacaagtgctaacagtcatctgagccttcagaaagctgcaatctttttttgtgtgcgtgacagggttttactctgtggctcaggctggagtaattgcagcctcaacctcatgctcaatcaaacccccacctcagactcctgactagatgaaactacagatgcatgccacctgtccagctaatttttgtattttctttttttgtagagatggggttttgccatgttgccttgacttcccgggctcaagcaatctacccaccttggcctcccaaggtgttgggatgacaggtgtgagccactgcacctggccaagtttcagtcttcttgctgatggagggkcttgccttaatgtaaggtggtggttgctgagcgttggggtggctgtggcaatttcttaaaataagacaccattgaagtttgctgtgtcaattgactctccctttcacaaaagaattatctgtagcatacgatgttgtttgatagctttctacccacagtagaactttcaaa

SEQ ID NO: 345623 - DNA, 628 bp, Homo sapiens
ttgcgatgagccaagatcatgccattgcactctagcttgggcaagaagaatgaaactctgtctgaaaaataaagaaaagaaagtaaaaggagagttaggcttaggcttaatggaatgttttttgctttttttcatcttctatctagaccaattaaactttcttcataacagcagcaagattatttagctttttatcattcatgtgttcactggagcagtactttaaatttctttccagaacacttcgtttgcattcacaacttggctaagtgtttgttgcatgaggtctagctactggcctgtcttgcttacagcatgccttcctcactaagcttaattatttcttccttttggtttaaagtgacagacatgaaactcttctttcatgaacatatagaggctattgtagggttattaattggccacattttaatattaataaaaagaagcctgagaaaaagagaaaraaaaatggcccgttggttgggcagtcagaacaaacgcatatgtcaattgtttgctgtcttatcctggtgtgatttgtggttcccaaaacaatgacaacagtagcattaaagatcactgattacagatcaccacaacagattcaataataagaatcttaaaa

SEQ ID NO: 345624 - DNA, 628 bp, Homo sapiens
ttgcgatgagccaagatcatgccattgcactctagcttgggcaagaagaatgaaactctgtctgaaaaataaagaaaagaaagtaaaaggagagttaggcttaggcttaatggaatgttttttgctttttttcatcttctatctagaccaattaaactttcttcataacagcagcaagattatttagctttttatcattcatgtgttcactggagcagtactttaaatttctttccagaacacttcgtttgcattcacaacttggctaagtgtttgttgcatgaggtctagctactggcctgtcttgcttacagcatgccttcctcactaagcttaattatttcttccttttggtttaaagtgacagacatgaaactcttctttcatgaacatatagaggctattgtagggttattaattggccacattttaatattaataaaaagaagcctgagaaaaagagaaaaaraaatggcccgttggttgggcagtcagaacaaacgcatatgtcaattgtttgctgtcttatcctggtgtgatttgtggttcccaaaacaatgacaacagtagcattaaagatcactgattacagatcaccacaacagattcaataataagaatcttaaaa

SEQ ID NO: 345625 - DNA, 476 bp, Homo sapiens
tacccgtgggagatggactggcttgttcattgggtcaaccgcagcttattggaggtgtcaatatggcacttagggtctttgctcccttgatattctgagggtagaaagggcactttcactgcagaggcaatggcagggagaatttcgtttgctcctggaagctctgtccagggaattgctgagttgctactggctggatagctctgatggtgaactggctggagacccasgtcagtaggacctgcccatcaagtagactgtctggccacttttctgtcaggctgctgtggtatgctgggggtcccctccagtccctaattgccttgtattttccagggaagatgatagcctgccccttcctctgggagctctgtgccactgaggtacgaacttgttgccagtatgaacacacctataagatgtgactggagacaagttgagaagtcttatctagtcaggaggaacaaaaacaggca

SEQ ID NO: 345626 - DNA, 609 bp, Homo sapiens
ccacattgaccaggtccctgctgaccagacccyacacatcaggtcctccctgatgacaccctcactgattagaacctcatgaccaggccccactaacaaggcccccactgccgggcacacaatgacaaggactccactgaccaggaccttactgacaaggactcactgacaaggcctcacggactatgtccttactgacaagtcctcactgactaggtcattattgacaaggcctcactgatcaggttccactaatcatgacctcattccctgatcccaaagatgaggccccactgaccaggcctccagggaacaggttgccactgatcaggcccctaataacgaggccttatgtcaccagatgcccctgactgggaccctagtgagtagaccccactgaaccggcaccaaatgctgagatccccgctgaccaggtcaccctgtagaccggtgctacaaaagtcaccactgaccaagtcctctctgaccaggacaatacagattaggtcccactgacaaggctgccctgaccagggccccactgacaagggcctcactgatgaggacacgcccaccagggtctgctgactaagtctcatgtgcccagtc

SEQ ID NO: 345627 - DNA, 609 bp, Homo sapiens
ccacattgaccaggtccctgctgaccagaccccrcacatcaggtcctccctgatgacaccctcactgattagaacctcatgaccaggccccactaacaaggcccccactgccgggcacacaatgacaaggactccactgaccaggaccttactgacaaggactcactgacaaggcctcacggactatgtccttactgacaagtcctcactgactaggtcattattgacaaggcctcactgatcaggttccactaatcatgacctcattccctgatcccaaagatgaggccccactgaccaggcctccagggaacaggttgccactgatcaggcccctaataacgaggccttatgtcaccagatgcccctgactgggaccctagtgagtagaccccactgaaccggcaccaaatgctgagatccccgctgaccaggtcaccctgtagaccggtgctacaaaagtcaccactgaccaagtcctctctgaccaggacaatacagattaggtcccactgacaaggctgccctgaccagggccccactgacaagggcctcactgatgaggacacgcccaccagggtctgctgactaagtctcatgtgcccagtc

SEQ ID NO: 345628 - DNA, 609 bp, Homo sapiens
ccacattgaccaggtccctgctgaccagaccccacacatcaggtcctccctgatgacaccctcactgattagamcctcatgaccaggccccactaacaaggcccccactgccgggcacacaatgacaaggactccactgaccaggaccttactgacaaggactcactgacaaggcctcacggactatgtccttactgacaagtcctcactgactaggtcattattgacaaggcctcactgatcaggttccactaatcatgacctcattccctgatcccaaagatgaggccccactgaccaggcctccagggaacaggttgccactgatcaggcccctaataacgaggccttatgtcaccagatgcccctgactgggaccctagtgagtagaccccactgaaccggcaccaaatgctgagatccccgctgaccaggtcaccctgtagaccggtgctacaaaagtcaccactgaccaagtcctctctgaccaggacaatacagattaggtcccactgacaaggctgccctgaccagggccccactgacaagggcctcactgatgaggacacgcccaccagggtctgctgactaagtctcatgtgcccagtc

SEQ ID NO: 345629 - DNA, 609 bp, Homo sapiens
ccacattgaccaggtccctgctgaccagaccccacacatcaggtcctccctgatgacaccctcactgattagaacctcatgaccaggccccactaacaaggcccccactgccrggcacacaatgacaaggactccactgaccaggaccttactgacaaggactcactgacaaggcctcacggactatgtccttactgacaagtcctcactgactaggtcattattgacaaggcctcactgatcaggttccactaatcatgacctcattccctgatcccaaagatgaggccccactgaccaggcctccagggaacaggttgccactgatcaggcccctaataacgaggccttatgtcaccagatgcccctgactgggaccctagtgagtagaccccactgaaccggcaccaaatgctgagatccccgctgaccaggtcaccctgtagaccggtgctacaaaagtcaccactgaccaagtcctctctgaccaggacaatacagattaggtcccactgacaaggctgccctgaccagggccccactgacaagggcctcactgatgaggacacgcccaccagggtctgctgactaagtctcatgtgcccagtc

SEQ ID NO: 345630 - DNA, 552 bp, Homo sapiens
gcattaagggcttggtgctttgccatttgtgaaggatccactcccacacctttatgattaaagctttttccacctaggccccgactctaacattagggagtgtactttcacaggagttttggaaggggcatagagaaaaaccgtattattctgtccctgaccccacaaatctcatgtccttctcacattgcaagatacagtcatgccttgccagcagtctcccaaagtcttaactcatttcagcattaactcaaagttacaaagtgcaaagtctcatctgggtcaaggctacattctcttttgcctacaagtctctgaaataaaaagcaagttcactgcgtctaaggtacaatgatggtacaggcattgtgtaagctttccatatccaaaagagagacattttccagaaagcttcttatttttatctgaggcyccctcagcctggccttcactgtccatgtttttgtcagcattcttgtcacagccatttaaccagtctctaagatgatccaaaaatgttctcatctgtctgtcttctttggagccctccaa

SEQ ID NO: 345631 - DNA, 546 bp, Homo sapiens
ttttctacagaatcctgagtgacacggttcccaaacgtcaactcttgccttctgtgcacctgcaggcccaacaccatgtggaagctgccagggcttgggccttacaccctctaaggccatagcctgagctgtaccttggcccyttttagccacagctgaagctggagtggctggtaagcagggcaccatgtctcaaggctgcacagagcagctgagccctagtcctggccaaataaaccatttttctatcctgggcctctgggcctgtgatgggaggggctaccataaaggtctctgacatgccctggagacatttttcccattgtcttggctattaatgcacagcttctctttacttctgaaaattttatgcatcaggcttgaattttttcccagaaagtgagtttttcttctctaccgcatgactgggctgcaaagttttcaaactttcatggtctgctttgctgttatatatagtgtctagtttttaataatctctttgttcacacatatgagtgtacactttcagaaacagccaggttacat

SEQ ID NO: 345632 - DNA, 546 bp, Homo sapiens
ttttctacagaatcctgagtgacacggttcccaaacgtcaactcttgccttctgtgcacctgcaggcccaacaccatgtggaagctgccagggcttgggccttacaccctctaaggccatagcctgagctgtaccttggccccttttagccacagctgaagctggagtggctkgtaagcagggcaccatgtctcaaggctgcacagagcagctgagccctagtcctggccaaataaaccatttttctatcctgggcctctgggcctgtgatgggaggggctaccataaaggtctctgacatgccctggagacatttttcccattgtcttggctattaatgcacagcttctctttacttctgaaaattttatgcatcaggcttgaattttttcccagaaagtgagtttttcttctctaccgcatgactgggctgcaaagttttcaaactttcatggtctgctttgctgttatatatagtgtctagtttttaataatctctttgttcacacatatgagtgtacactttcagaaacagccaggttacat

SEQ ID NO: 345633 - DNA, 621 bp, Homo sapiens
cataatctgacaaggaagctgtgctacattttgagtgacccttcctcttttggaccatttgtattctctaaagctgcaggctggaaaatctgagtctaccaaaccacagtaatggttgcagcccctctccctgggaacttaaacctgtctcaggcagattctagcctgttgcctttggctggctggaattctaaatcagagggtcttaacttgtgaggtgctgtaaagtggggcctgaagaatgatgattcttggctccccagaatcagcccactttctatggatatggatggatggatttttcactttgcyagtgattctggggcaagaatatgtaaaattcctgggtccttgtgtttgcctgagtggctgcactactgagactttacacagctctgtgtattgcacccaaggccctggtaatgtgggcttgtgatggtatctcctgatctgtgggttgctaagatccatgagagaagcataattacctgggctgggtcacacaatcactcactgcttcccttggttgggcatgggggttcctttggctccatggaccattgctccctctgcttttcttcattatctgtgggttgagttgtttgcctagtcaggcccaat

SEQ ID NO: 345634 - DNA, 619 bp, Homo sapiens
agtgggagataattgagtcatgggggcagtttcccctatactgttctggtggtagkgaataggcctcacaagatctgatggttttataaggggaaacccctttcacttgttttcatttatctcttgcctgccaccatgtaagacttgcttttcaccttccaccatgattgtgaggcctcctgagccacgttaaactgtgagtctattaagcctctttttatttataaattactcagtctggggtatgtctttatcagcagcatgaggacagactaatgcaacaacctaagcaatgccattctggaaatagaaatgggcaaagatttcataacgaacatgacaaaagcaattgcaataaaacaaaaattgacaaatgggatgtaattaaactagagagattctgcacagcaaaagaagctatcagcaaacagatgacctacagaatgagtgaacatttttgcaatccgtgcttctggcaaatgtcttctatcaagtatctctaaagaacttaaacaaatttacaaggaaaaaaacactcccattaaaaagtgggcaaaggacaggaacacacaccattcaaaagaagacatgcatgtggccagcacacatattttaaaaa

SEQ ID NO: 345635 - DNA, 619 bp, Homo sapiens
agtgggagataattgagtcatgggggcagtttcccctatactgttctggtggtagtgaataggcctcacaagatctgatggttttataaggggaaacccctttcacttgttttcatttatctcttgcctgccaccatgtaagacttgcttttcaccttccaccatgattgtgaggcctcctgagccacgttaaactgtgagtctattaagcctctttttatttataaattactcagtctggggtatgtctttatcagcagcatgaggacagactaatgcaacaacctaagcaatgccattctggaaatagaaatgggcaaagatttcataacgaacatgacaaaagcrattgcaataaaacaaaaattgacaaatgggatgtaattaaactagagagattctgcacagcaaaagaagctatcagcaaacagatgacctacagaatgagtgaacatttttgcaatccgtgcttctggcaaatgtcttctatcaagtatctctaaagaacttaaacaaatttacaaggaaaaaaacactcccattaaaaagtgggcaaaggacaggaacacacaccattcaaaagaagacatgcatgtggccagcacacatattttaaaaa

SEQ ID NO: 345636 - DNA, 619 bp, Homo sapiens
agtgggagataattgagtcatgggggcagtttcccctatactgttctggtggtagtgaataggcctcacaagatctgatggttttataaggggaaacccctttcacttgttttcatttatctcttgcctgccaccatgtaagacttgcttttcaccttccaccatgattgtgaggcctcctgagccacgttaaactgtgagtctattaagcctctttttatttataaattactcagtctggggtatgtctttatcagcagcatgaggacagactaatgcaacaacctaagcaatgccattctggaaatagaaatgggcaaagatttcataacgaacatgacaaaagcaattgcaataaaacaaaaattgacaaatgggatgtaattaaactagagagattctgcacagcaaaagaagctatcagcaaacagatgacctacagaatgagtgaacatttttgcaatccgtgcttctggcaaatgtcttctatcaagtatctctaaagaacttaaacaaatttacaaggaaaaaaacactcccattaaaaagtgggcaaaggacaggaacamacaccattcaaaagaagacatgcatgtggccagcacacatattttaaaaa

SEQ ID NO: 345637 - DNA, 599 bp, Homo sapiens
aaaaatggcagacagaagggcggactaaattgcagctcccagttagatggacagagcagcatgtggagactcacattgtaaacttttgctccaagaactactgtgggaatmccaggaaagctgtgagaattaacagcccctttgaaagaagcagactgcttctgcaatactcagaagacagcccaagtactctgagtgcccaaactgtgagagtgggaaacgggaattgtttgcccttgaatacacaccctcactggggaacctgaaggttcagataacagaagaaggatttgaccttacctggagctgagacaatctgaagagctgagcaaaatacaaggttagaggaggcagcaggaaaagccctgtgggctctctgggtacccagagaagccatttctaacttgtctcacaggggtccttggggagcactgccagagaaactgggaaaaaaaaacacagaaagaagaaaatctccagctagactttatgacaattccaaccaaattcagtttcctggccagaacttagaagagggcatgaatcggttgtgcagacttgacagatgaggaagcacaaaagcccggctgaatgaaaca

SEQ ID NO: 345638 - DNA, 599 bp, Homo sapiens
aaaaatggcagacagaagggcggactaaattgcagctcccagttagatggacagagcagcatgtggagactcacattgtaaacttttgctccaagaactactgtgggaatcccaggaaagctgtgagaattaacagmccctttgaaagaagcagactgcttctgcaatactcagaagacagcccaagtactctgagtgcccaaactgtgagagtgggaaacgggaattgtttgcccttgaatacacaccctcactggggaacctgaaggttcagataacagaagaaggatttgaccttacctggagctgagacaatctgaagagctgagcaaaatacaaggttagaggaggcagcaggaaaagccctgtgggctctctgggtacccagagaagccatttctaacttgtctcacaggggtccttggggagcactgccagagaaactgggaaaaaaaaacacagaaagaagaaaatctccagctagactttatgacaattccaaccaaattcagtttcctggccagaacttagaagagggcatgaatcggttgtgcagacttgacagatgaggaagcacaaaagcccggctgaatgaaaca

SEQ ID NO: 345639 - DNA, 537 bp, Homo sapiens
atttgtttatttcttgctgatttgcttgagttytttatagattctggatactagtcttttgtcagatgcatagattttaaatattttctcccactctgtgggttgtctgtgtatgctgctgactgttccttttgctatgcataagctctataggttagttaggtcccatttatttattttcatttttgttgcatttgcttttgggtcttagtcatgaattcttggcctaagccaatgtccagaaatgttaccaatgttatcttctagaatttttatgatttcaggtcttacatttagtctttgatcaatcttgagttgatttttgtataaagtgagagatggggatccagttttatcttctacatgtggcttgcccgtttccccagcaccagcatagggggtcctttccccaatttatatttttgtatgctttgttgaagatcagttgactgtaagtatttagctttatttctgggttctatattatcttccaatggcctttgtgcctatctttataccggtaccatgctattttgg

SEQ ID NO: 345640 - DNA, 334 bp, Homo sapiens
attgatacttgtggtagcattgtgaagttctcatgctgtgtttttcagctccatcaggtcagttatattcctttctaaactggctcttctggctacaagctcctgtattgttttatcatgactcttagcctctttgcattgagttacaacatgctctttcagctcagtgaaggtcattattatccaccgtctggagccttcttctgtcaactctgccatctcggcctcagcccagttctgtgcccttgctggaraagtgtcacaatcatttgcagaagagacactctggttttttagtttgtagcatttttacattgattctttctcatcctta

SEQ ID NO: 345641 - DNA, 583 bp, Homo sapiens
agtaatgggatatcacttctaaaaattaagttgtaaaaagactgtagctttaatcattagaactctgacattctctctctaatcaccaaccttgggaaaagctagagcttccagcaaccttgtagaagggtccaagtggcaagagatcaagccttgaaataatcatatgagtgagcttggaggaggatctgccaccaatctagccttcagatatgacagcagccatagctgacagtttgactgctacctcataagaaacctagagacaaagaaacccagctgagctgyacctgaatttctaagccacagaaactatgagataataatgttggtttctttaagctgcaaaacctggtttatttgcatcttcctcttatttttgcctaatcacaccatccattaatacaatcaactaattcccttgctgttagtccacacatactgatgtcctactgattataaatgaatgaatgcactattcagatattggaaatctgttcagcaaatgtatttctcaatggaatcactaactttgtagtcttatttataggttgctcacttcatttgcttggagttagtccta

SEQ ID NO: 345642 - DNA, 603 bp, Homo sapiens
ttgctaatctacacagttctaaatatggattccaaaagtgctgttttagggagctcaaatctgtgctcagatacctcaatacagctggagctatatgcctcgattcatacccactggacaaataaatgttgtccttgtatgctgggacaaacaactcctttttaaaatgacattacccaaacttttgaacttgttggtttacagcagcttttgccaagggtttttacccatggtcaaagtgtgtaaagcctatgcaagcatgtgcaccacctgatgacgcctgctctttgaggtggcttcagtctgatatctgctgaatcatgcttctcctttctatttacagaaaactgcttttcccctaagtcttctaacagaattctgggaaaatggtggcatgagaataggtccttaattctatgaggcattgtctcattctgtcayccaggctggagtgcaatggtgtgatctcagctcactgcaatctctgcctcatgggtgcaagtgattctcgtgcctcagccttctgagtagctggaattacaggcgtgcaacaccacgcctggttaattttttttgtatttttagtagagatggggtttcacc

SEQ ID NO: 345643 - DNA, 565 bp, Homo sapiens
cccttgcttaagcctaatgtagacaaacaaacaaaaattcatcaaaagactattagtttctatacagtcaaggataatgtccaaaatctggagccgggaactgattcagtgaggaaaccaygctcaccaccattaaagataggttgctataacttacatgggtgtcactattgtttcagtaacttgatcttgcccctactgctattgctaccagtgagaattttatagtgcttaaatgtatcattatatcataattaaaattctggggagtgggttaacctaattgatagagcttaggtcatcgggcataccctagctgcaacagagactgagataatgattaccgttatcttcagcttctatagtaggtggcaagctccacattgcaacaacaggcacaaaataaaaggtttctcaatcatataaaggtgattaagatactgagcagccgaaatgcacatatgtacataaacagacactctcattacacatatgcccaaagagatttatttcagtattctatataatattaaaaagttgaaaaaaatctaaatattggccaata

SEQ ID NO: 345644 - DNA, 565 bp, Homo sapiens
cccttgcttaagcctaatgtagacaaacaaacaaaaattcatcaaaagactattagtttctatacagtcaaggataatgtccaaaatctggagccgggaactgattcagtgaggaaaccatgctcaccaccattaaagatargttgctataacttacatgggtgtcactattgtttcagtaacttgatcttgcccctactgctattgctaccagtgagaattttatagtgcttaaatgtatcattatatcataattaaaattctggggagtgggttaacctaattgatagagcttaggtcatcgggcataccctagctgcaacagagactgagataatgattaccgttatcttcagcttctatagtaggtggcaagctccacattgcaacaacaggcacaaaataaaaggtttctcaatcatataaaggtgattaagatactgagcagccgaaatgcacatatgtacataaacagacactctcattacacatatgcccaaagagatttatttcagtattctatataatattaaaaagttgaaaaaaatctaaatattggccaata

SEQ ID NO: 345645 - DNA, 565 bp, Homo sapiens
cccttgcttaagcctaatgtagacaaacaaacaaaaattcatcaaaagactattagtttctatacagtcaaggataatgtccaaaatctggagccgggaactgattcagtgaggaaaccatgctcaccaccattaaagataggttgctataacttacatgggtgtcactattgtttcagtaacttgatcttgcccctactgctattgctaccagtgagaattttatagtgcttaaatgtatcattatatcataattaaaattctggggagtgggttaacctaattgatagagcttaggtcatcgggcataccctagctgcaacagagactgagataatgattaccgttatcttcagcttctatagtaggtggcaagctccrcattgcaacaacaggcacaaaataaaaggtttctcaatcatataaaggtgattaagatactgagcagccgaaatgcacatatgtacataaacagacactctcattacacatatgcccaaagagatttatttcagtattctatataatattaaaaagttgaaaaaaatctaaatattggccaata

SEQ ID NO: 345646 - DNA, 565 bp, Homo sapiens
cccttgcttaagcctaatgtagacaaacaaacaaaaattcatcaaaagactattagtttctatacagtcaaggataatgtccaaaatctggagccgggaactgattcagtgaggaaaccatgctcaccaccattaaagataggttgctataacttacatgggtgtcactattgtttcagtaacttgatcttgcccctactgctattgctaccagtgagaattttatagtgcttaaatgtatcattatatcataattaaaattctggggagtgggttaacctaattgatagagcttaggtcatcgggcataccctagctgcaacagagactgagataatgattaccgttatcttcagcttctatagtaggtggcaagctccacattgcaacaacaggcacaaaataaaaggtttctcaatcatataaaggtgattaagatactgagcagccraaatgcacatatgtacataaacagacactctcattacacatatgcccaaagagatttatttcagtattctatataatattaaaaagttgaaaaaaatctaaatattggccaata

SEQ ID NO: 345647 - DNA, 574 bp, Homo sapiens
tttggaaatttgttggtttcctttgataaagaactaatattttaatgcttggtgcaactgtattctccctgtgattcctaatcttttgaaaaaggataatatgagtgtgaggaattagcccatactctagtctaaactgtcactgaaagaaatgaaaccattgctagtttgaatctgtaaaacatggaagttctgattagaaaaataagttaactgctatggtgcaccatgatttttttatttttaatttttattttttttggacagagtctcactctgtcacccagactggagtgcagtggcgcgatatcggctcactgcaacctccacctcccaggttcaagtgattctcctgcctcagcctccccagtagctgggactacaggcacatgccaccacatccagctaatttttgttgttttagtagagacggggttttaccatattggccaggatggtcccatcccttgaccttgtgacccgcctgcctcagcctcccaaagtacygggattacaggcatgaactaccgtgcccggcgggtgcaccatgaatttttaagtggtattaaacatt

SEQ ID NO: 345648 - DNA, 518 bp, Homo sapiens
attttaagaaagaactttttataatttaatgtcaattaataatgtaaaataaacaataaagtttaaagatcagcatttctaaaatatagacaatacttagcaatggatgctgaaatgagtgatgcataataacaaagtttgatgcataataacatacagatgtttataaagtatcactccgcaaataatgttagttacactgaggagaaagtgtaactctacaggttagaatactggcataaactaccaaattcaagtaaccaaagttaatatctaataatgagacaaaccaatatcaaagccttcttaatataatccactagacagaatacagcatcacttctatcacatgcttgtcaaaaaatacataactgtratataatcatgaggaaatgctagactgctccacattggggaacattttgcaaaataacgccctgtgctttttcaaaaagattaaggtaggtaaagtcaatgaaagactaaatttttgcagattaaaagagaataaagagaca

SEQ ID NO: 345649 - DNA, 594 bp, Homo sapiens
ttctgtttcttggatcatgcgcttgacgttgtatctaaaaggtyatcaccatacccaggatcatctaggcttcttcttatgttatcttctggtagttgtatacttttgtgttttacatttagatctaagatccatttaggattaaattttgtgaaggatgtaaggtctgtgtctagatttcattattttgcatgtggatacacagaagctccagcaccatttgttggaaatactgtctttcctgcattgtatgacctttactcctttgtctaagttaagttgatttaagatcaattgtatttatttgggtttattcctgggctttctattctagtctttctctttcttttctattttgttgatctatttgtttattctttcactaacatttatcatattttagcctctataacattttctaactgattgtacttttttggttataatccatctctcctatccagaatataaaacacacaaagatggagaccttcatatattttgttttttcttttatctttttcctatttttgttttctatttactctagtgtaccccaaatgatgacttcagttcctgtatataatagtttct

SEQ ID NO: 345650 - DNA, 594 bp, Homo sapiens
ttctgtttcttggatcatgcgcttgacgttgtatctaaaaggtcatcaccatacccasgatcatctaggcttcttcttatgttatcttctggtagttgtatacttttgtgttttacatttagatctaagatccatttaggattaaattttgtgaaggatgtaaggtctgtgtctagatttcattattttgcatgtggatacacagaagctccagcaccatttgttggaaatactgtctttcctgcattgtatgacctttactcctttgtctaagttaagttgatttaagatcaattgtatttatttgggtttattcctgggctttctattctagtctttctctttcttttctattttgttgatctatttgtttattctttcactaacatttatcatattttagcctctataacattttctaactgattgtacttttttggttataatccatctctcctatccagaatataaaacacacaaagatggagaccttcatatattttgttttttcttttatctttttcctatttttgttttctatttactctagtgtaccccaaatgatgacttcagttcctgtatataatagtttct

SEQ ID NO: 345651 - DNA, 545 bp, Homo sapiens
acactagttttgttccttccaagagagtttaccaaaatactttttagaaatagctgtgtttcactgttcacggggcggtcaagctgtgctgcaggacagaatataaaatgagtgcggccaaggttaacaagcagatgaatgccacccagggaagagacctgcatgatttggggtcactgagaaccgaagacatgtacactaggctccagtggtatggtacagctatttatttacagaaaaagaagaaaagcagtgcaagactttgtttccccatggccagagaatccactccatagccgatgtggttagtgtggctgcaggtccctcactttgtactgcactaaagggaccatgacctcttccccttgggtctgaaatatagaaagctgggggagtgccaaaggatcactgaagyttgggcctaagcagaatatttatggaacatacatcaagcctaaacagggaaaagtattttcttgctggaaatatgacaagcccggcccaggctgtgagggttttttatctcccaataagaaatattacag

SEQ ID NO: 345652 - DNA, 565 bp, Homo sapiens
tttgtgtatatagaacaaacatcactatattttttcagtatatacttatattgtctcaaaaattagtataccagaatagtttttaagatatatatgcatatatacacatatacacatrcacacatatatatacatacacatatatatgtagtgtacatatgtgtcccacacattagagaaaataaaggacatagaatataattttattctaataaactgcttatctgacttaagtgataaatacaataaactttggtgttaaactttgtcttatggaaaagcacacaaaacagtgagaaaatattggttatagctcttcaaaatcagtagctagttgggataataactcgctatagaacattttcttcaggaaaaacattgttattgattatcttcataaaaaaaatttgtgtttgatttgactcacatcattcttttgttacgaagttttccaggttagcttgaagcctaatcatgtattcagattatcctcaatggttctcatcactgtctgcacaaaacaatcacctgaggctttatataatacaggtccctgggtcccatc

SEQ ID NO: 345653 - DNA, 565 bp, Homo sapiens
tttgtgtatatagaacaaacatcactatattttttcagtatatacttatattgtctcaaaaattagtataccagaatagtttttaagatatatatgcatatatacacatatacacatgcacacatatatatacatrcacatatatatgtagtgtacatatgtgtcccacacattagagaaaataaaggacatagaatataattttattctaataaactgcttatctgacttaagtgataaatacaataaactttggtgttaaactttgtcttatggaaaagcacacaaaacagtgagaaaatattggttatagctcttcaaaatcagtagctagttgggataataactcgctatagaacattttcttcaggaaaaacattgttattgattatcttcataaaaaaaatttgtgtttgatttgactcacatcattcttttgttacgaagttttccaggttagcttgaagcctaatcatgtattcagattatcctcaatggttctcatcactgtctgcacaaaacaatcacctgaggctttatataatacaggtccctgggtcccatc

SEQ ID NO: 345654 - DNA, 565 bp, Homo sapiens
tttgtgtatatagaacaaacatcactatattttttcagtatatacttatattgtctcaaaaattagtataccagaatagtttttaagatatatatgcatatatacacatatacacatgcacacatatatatacatacacatatatatgtagtgtacatatgtgtcccacacattagagaaaataaaggacayagaatataattttattctaataaactgcttatctgacttaagtgataaatacaataaactttggtgttaaactttgtcttatggaaaagcacacaaaacagtgagaaaatattggttatagctcttcaaaatcagtagctagttgggataataactcgctatagaacattttcttcaggaaaaacattgttattgattatcttcataaaaaaaatttgtgtttgatttgactcacatcattcttttgttacgaagttttccaggttagcttgaagcctaatcatgtattcagattatcctcaatggttctcatcactgtctgcacaaaacaatcacctgaggctttatataatacaggtccctgggtcccatc

SEQ ID NO: 345655 - DNA, 622 bp, Homo sapiens
gacataatctagcaaagaaatgagctcatgtttcagagctcatttgtgtatatagaacaaacatcactatattttttcagtatatacttatattgtctcaaaaattagtataccagaatagtttttaagatatatatgcatatatacacatatacacatgcacacatatatatacatacacatatatatgtagtgtacatatgtgtcccacacattagagaaaataaaggacatagaatataattttattctaataaactgcttatctgacttaagtgataaatacaataaactttggtgttaaactttgtcttatggaaaagcacacaaaacagtgagaaaatattggttatagctcttcaaaatcagtagctagttgggataataactcgctatagaacattttcttcaggaaaaacattgttattgattatcttcataaaaaaaatttgtgtttgatttgactcacatcattcttttgttaygaagttttccaggttagcttgaagcctaatcatgtattcagattatcctcaatggttctcatcactgtctgcacaaaacaatcacctgaggctttatataatacaggtccctgggtcccatctctagagatattgat

SEQ ID NO: 345656 - DNA, 571 bp, Homo sapiens
cattatcaacacccctgttttattttcctgaaaaaaatgtttactgttttcactggtttttcactggtcacctgttctaagtcatcatcgaataagtgaacttaaaggagaaaacctcacaacagtgttgaatgatctcattttaatatcctgaccactgaactcaagggattccttaaggctgtagggtgataccactctatctccttattcaatttgctctcccattattctgcgtaactgttccaattattccccactctatggaactagagcatttttcttccagatacatattcatggctattatttcactgagraagtagaaagtaaatgaagaaaatgcctgcatggacccatcatcgagtctatcaaccttcctatactcctatcctcttcccacaacaaataagctatatgctcctatataagtctcagctctacacttgtgcaacagatcccattacctcttgtttgcaaagcgaattactccggcaacttccctgtcatgttcctgtatgatcaatgttttccttattatttgggcattttcatttgcatagaaacattg

SEQ ID NO: 345657 - DNA, 571 bp, Homo sapiens
cattatcaacacccctgttttattttcctgaaaaaaatgtttactgttttcactggtttttcactggtcacctgttctaagtcatcatcgaataagtgaacttaaaggagaaaacctcacaacagtgttgaatgatctcattttaatatcctgaccactgaactcaagggattccttaaggctgtagggtgataccactctatctccttattcaatttgctctcccattattctgcgtaactgttccaattattccccactctatggaactagagcatttttcttccagatacatattcatggctattatttcactgagaaagtagaaagtawatgaagaaaatgcctgcatggacccatcatcgagtctatcaaccttcctatactcctatcctcttcccacaacaaataagctatatgctcctatataagtctcagctctacacttgtgcaacagatcccattacctcttgtttgcaaagcgaattactccggcaacttccctgtcatgttcctgtatgatcaatgttttccttattatttgggcattttcatttgcatagaaacattg

SEQ ID NO: 345658 - DNA, 571 bp, Homo sapiens
cattatcaacacccctgttttattttcctgaaaaaaatgtttactgttttcactggtttttcactggtcacctgttctaagtcatcatcgaataagtgaacttaaaggagaaaacctcacaacagtgttgaatgatctcattttaatatcctgaccactgaactcaagggattccttaaggctgtagggtgataccactctatctccttattcaatttgctctcccattattctgcgtaactgttccaattattccccactctatggaactagagcatttttcttccagatacatattcatggctattatttcactgagaaagtagaaagtaaatgaagaaaatgcctgcatggacccatcatcgagtctatcaaccttcctatactcctatcctcttcccacaacaaataagctatatgctcctatataagtctcagctctacacttgtgcaacagatcccattacctcttgtttgcaaagygaattactccggcaacttccctgtcatgttcctgtatgatcaatgttttccttattatttgggcattttcatttgcatagaaacattg

SEQ ID NO: 345659 - DNA, 571 bp, Homo sapiens
cattatcaacacccctgttttattttcctgaaaaaaatgtttactgttttcactggtttttcactggtcacctgttctaagtcatcatcgaataagtgaacttaaaggagaaaacctcacaacagtgttgaatgatctcattttaatatcctgaccactgaactcaagggattccttaaggctgtagggtgataccactctatctccttattcaatttgctctcccattattctgcgtaactgttccaattattccccactctatggaactagagcatttttcttccagatacatattcatggctattatttcactgagaaagtagaaagtaaatgaagaaaatgcctgcatggacccatcatcgagtctatcaaccttcctatactcctatcctcttcccacaacaaataagctatatgctcctatataagtctcagctctacacttgtgcaacagatcccattacctcttgtttgcaaagcgaattactccggcaacttccctrtcatgttcctgtatgatcaatgttttccttattatttgggcattttcatttgcatagaaacattg

SEQ ID NO: 345660 - DNA, 557 bp, Homo sapiens
acttataagttgtgatgggcttctaagcttacacttttaatatgtcccttcttttctcataaagtgatgaagcatggttttattcgactgtaattagtttggagaaaaagtgatttgagaaattatctcttttacataatgatgatattttatggataattaatgttcataacattagatttttaagcaagcaaataaaacaatgctaacagctgttctgatccacattttaatataagagttttcacagatagtttgtgattttgtttttagaatatccagggaagtggatgtgttgtgtttatatgtgaaatgacataaaattactttaagattttggagaatatgataaatgaagacttaaagmgtctcatttttcagcttctaatgttcccttgaagagaatgcctaaggtaaaagcaatgttagtttttcacctcatttcactgatgaagtagtaattcacaaaagtgcctctgtaagttgagaaagtatatccaggtgtataaatttgaatgcattcgagcatttggtttttgcttcaagctacatttttc

SEQ ID NO: 345661 - DNA, 557 bp, Homo sapiens
acttataagttgtgatgggcttctaagcttacacttttaatatgtcccttcttttctcataaagtgatgaagcatggttttattcgactgtaattagtttggagaaaaagtgatttgagaaattatctcttttacataatgatgatattttatggataattaatgttcataacattagatttttaagcaagcaaataaaacaatgctaacagctgttctgatccacattttaatataagagttttcacagatagtttgtgattttgtttttagaatatccagggaagtggatgtgttgtgtttatatgtgaaatgacataaaattactttaagattttggagaatatgataaatgaagacttaaagcgtctcatttttcagcttctaatgttcccttgaagagaatgcctaaggtaaaagcaatgttagtttttcacctcatttcactgatgaagtrgtaattcacaaaagtgcctctgtaagttgagaaagtatatccaggtgtataaatttgaatgcattcgagcatttggtttttgcttcaagctacatttttc

SEQ ID NO: 345662 - DNA, 541 bp, Homo sapiens
caaagttcaatagtaaactcccctagaatgatctttcctcccaaaggcaacattcagccaacaaggtctttgcttagaatcccaaggcagaagtgctrcatgttcattttcagcctctgcaaagacgtatatatgcaaattatttggtattattcatgcaaacagcattcaaatacctaatggtctcagtttaggatttccagcactatttctaatgccatactacacctgtctcccacatcaaagcactggaatttcaatctgccccgcctctgagataatccactttaatctatttcactccctattgcccctagaagccaatattagataaaatttaacatatcattcattctgggataaagatagcataaaatcatactgtggtgcttgcacatgatgtttgtaaaaaagaaaaaatcaataaaagtattcctttttctctggtaacatattctctattaccaaatttgtgaatgtgtggggaggaatccattcactaggggaagggaatcaacaaagctctatttatcttaataat

SEQ ID NO: 345663 - DNA, 541 bp, Homo sapiens
caaagttcaatagtaaactcccctagaatgatctttcctcccaaaggcaacattcagccaacaaggtctttgcttagaatcccaaggcagaagtgctgcatgttcattttcagcctctgcaaagacrtatatatgcaaattatttggtattattcatgcaaacagcattcaaatacctaatggtctcagtttaggatttccagcactatttctaatgccatactacacctgtctcccacatcaaagcactggaatttcaatctgccccgcctctgagataatccactttaatctatttcactccctattgcccctagaagccaatattagataaaatttaacatatcattcattctgggataaagatagcataaaatcatactgtggtgcttgcacatgatgtttgtaaaaaagaaaaaatcaataaaagtattcctttttctctggtaacatattctctattaccaaatttgtgaatgtgtggggaggaatccattcactaggggaagggaatcaacaaagctctatttatcttaataat

SEQ ID NO: 345664 - DNA, 541 bp, Homo sapiens
caaagttcaatagtaaactcccctagaatgatctttcctcccaaaggcaacattcagccaacaaggtctttgcttagaatcccaaggcagaagtgctgcatgttcattttcagcctctgcaaagacgtatatatgcaaattatttggtattattcatgcaaacagcattcaaatacctaatggtctcagtttaggatttccagcactatttctaatgccatactacacctgtctcccacatcaaagcactggaatttcaatctgccccgcctctgagataatccactttaatctatttcactccctattgcccctagaagccaatattagataaaatttaacatwtcattcattctgggataaagatagcataaaatcatactgtggtgcttgcacatgatgtttgtaaaaaagaaaaaatcaataaaagtattcctttttctctggtaacatattctctattaccaaatttgtgaatgtgtggggaggaatccattcactaggggaagggaatcaacaaagctctatttatcttaataat

SEQ ID NO: 345665 - DNA, 541 bp, Homo sapiens
caaagttcaatagtaaactcccctagaatgatctttcctcccaaaggcaacattcagccaacaaggtctttgcttagaatcccaaggcagaagtgctgcatgttcattttcagcctctgcaaagacgtatatatgcaaattatttggtattattcatgcaaacagcattcaaatacctaatggtctcagtttaggatttccagcactatttctaatgccatactacacctgtctcccacatcaaagcactggaatttcaatctgccccgcctctgagataatccactttaatctatttcactccctattgcccctagaagccaatattagataaaatttaacatatcaytcattctgggataaagatagcataaaatcatactgtggtgcttgcacatgatgtttgtaaaaaagaaaaaatcaataaaagtattcctttttctctggtaacatattctctattaccaaatttgtgaatgtgtggggaggaatccattcactaggggaagggaatcaacaaagctctatttatcttaataat

SEQ ID NO: 345666 - DNA, 610 bp, Homo sapiens
tatgcataattgaccattgaatattatgtgaccattgggccagagagagaaacttggtaaaaaacttaatgatgttgaaacagcatggactcaagcagaaatcaggccaaatattaactctgatattttgcctattaatttatgatttacaataaaaatagatgatggatgtaggctttaacacactctacaatctacagcctaatctaatattcttactttgcaccatttatattaattttgaatcacttttttgttgatatatgatatttgtwcatatgtatatgatacttacgatattttgttacctgcatagaatgtgtaataattaagtcagggtatttcgggtgtatatcaccttacatatttatcatttcaatgtgttggccacattacaagttctctattctagctattttgaaatattgaatacattcttcttaattatagtcactctacactactatcaaacataagaacttattctttcttactgtatgtttgtacccgttaaccaatctctttttatccctcccgtcacacacacccttccctgcctctactatctatcattctgctatcaccatgagatcaaattatttaattctca

SEQ ID NO: 345667 - DNA, 610 bp, Homo sapiens
tatgcataattgaccattgaatattatgtgaccattgggccagagagagaaacttggtaaaaaacttaatgatgttgaaacagcatggactcaagcagaaatcaggccaaatattaactctgatattttgcctattaatttatgatttacaataaaaatagatgatggatgtaggctttaacacactctacaatctacagcctaatctaatattcttactttgcaccatttatattaattttgaatcacttttttgttgatatatgatatttgttcatatgtatrtgatacttacgatattttgttacctgcatagaatgtgtaataattaagtcagggtatttcgggtgtatatcaccttacatatttatcatttcaatgtgttggccacattacaagttctctattctagctattttgaaatattgaatacattcttcttaattatagtcactctacactactatcaaacataagaacttattctttcttactgtatgtttgtacccgttaaccaatctctttttatccctcccgtcacacacacccttccctgcctctactatctatcattctgctatcaccatgagatcaaattatttaattctca

SEQ ID NO: 345668 - DNA, 495 bp, Homo sapiens
tacaaaggataaacatataggccaattaacataaactgcccaatcctacatagatacttgactttgacaaaggacactaaaaatctgtgaggaaaaaaaagaaaagaaagaaagaaaaagaaaaacctttccaacatgaggtactgtgttatattaaaaagaaaaaaaataaagaaacaatacgaaatagatttgagtccatctcacaccacactaaacaacataaactaaaataaatgttaggtggatagtagaataaaatataaaaagtaaaataacagagtattgagaagataataggaaagcatattcatgatgttagggtaggaaaggatatttcaagcacaacaattaaaaaaaaactaccaagaaatttgattaattgaactacactaaacttaagggtttttattaatcaaaagacmtaattaagacagtaaaaggcaaaccatgtagttgaagatatttccaacctttacctctgaaaagggctca

SEQ ID NO: 345669 - DNA, 494 bp, Homo sapiens
taaaaaaaaactaccaagaaatttgattaattgaactacactaaacttaagggtttttattaatcaaaagacctaattaagacagtaaaaggcaaaccatgtagttgaagatatttccaacctttacctctgaaaagggctcatatccataatttaaaataactactaagtattaaaattaaaatacaatcttaaaatatgcataaattcagcttcgcatagaaaattggcaaatagttaacattttaaaagttcttgaacttattatatatcaagttaatgcaaattttaaaatgagataccacaatagtracaagtaatggctgtgatgaagagtaatgtgaactctcattcatttcttttgtaatgtcaattgataccactaccttagaaatcattttggtagtaaaagacatgcataagaatatttagagtattattactcataaagctcaaaatgtaaagagactatataaacatattttgatatattt

SEQ ID NO: 345670 - DNA, 570 bp, Homo sapiens
tagtgataaacataggtctatttttatttcacagaggtctgcagattatccttgtccatttttagttcttaatgataaattattaattatatacatccattttaataactatttattgttaaaacagtgtctatcacccagatagacaaattttttaaaaagaaacgctacatggttttagtgctagttaaggtcaagtgatagaaatagaaaataaatagtgataaaaaataaatggtgatagaaaataaatggtgataaaaaatagcgttaccgcttgagtttacatccaaattgtatttaaattacattttaccattgcttatgtcaatttaataatactctttgcagaaggtagattttcacaataatggtcctgactaaatcactcttcgtctgtctacaacccagtaagttgattgctgctgagtagccattttcccacgtctaatacctgaactggccttgtgactcacacagaccaacacaaagtcgcaaaatgatgttgtstaactttgaggccttatgaggtcttatagtttccattcttgcttccttgcaatgattcac

SEQ ID NO: 345671 - DNA, 589 bp, Homo sapiens
ttgacttttctgagctccaatataaatatcatattactctgtttacaatagctttttaaaatgtgttcatacatgtkaaggcgaaattgtgctcttcaactttttttaacatattcattgggaattaacatatattaattattataaggagattaatatttaatctattagctatgccatcctcaaaaagaaaaaaaagccctcagaaaatctaactggaattacattaaacttaaataatagtcttctaatgagagtgagtcacagatactctcatctaagagcatgatgactccatttcatttgtgttaatgcgctggtaggtctttcacttatatattgtaggttgtgtctcataaaggtggttattatttgtttcttaaacttataactatcttttgtctattgtgaaatttaattgactactactgatctattaatggtaatttaaacacagttttatggctaacaaaacttaatattatgacctccaaaactaatgttaacatttctcagataaatcaagggactctgtatgagttcaacctaaaggtttggcattctggagatctttaaaattttataagta

SEQ ID NO: 345672 - DNA, 589 bp, Homo sapiens
ttgacttttctgagctccaatataaatatcatattactctgtttacaatagctttttaaaatgtgttcatacatgtgaaggcgaaattgtgctcttcaactttttttaacatattcattgggaattaacatatattaattattataaggagattaatatttaatctattagctatgccatcctcaaaaagaaaaaaaagccctcagaaaatctaactggaattacattaaacttaaataatagtcttctaatgagagtgagtcacagatactctcatctaagagcatgatgactccatttcatttgtkttaatgcgctggtaggtctttcacttatatattgtaggttgtgtctcataaaggtggttattatttgtttcttaaacttataactatcttttgtctattgtgaaatttaattgactactactgatctattaatggtaatttaaacacagttttatggctaacaaaacttaatattatgacctccaaaactaatgttaacatttctcagataaatcaagggactctgtatgagttcaacctaaaggtttggcattctggagatctttaaaattttataagta

SEQ ID NO: 345673 - DNA, 561 bp, Homo sapiens
atatgacagataaaaatatcccagcatyacagtccttgtactttggggctgttattaagtaaaataaaataagggttacataaacacaagcactgcaattccatggcaatcaatctgataaccaaggggtctactaagtgactaatgggtgggatgatttgtggccctgatccctgggcaggacagagtgggacagcatgaggtttcatcatgctactcaagatgatgtgcaatgttaaacttatgaagtgtttatttctggaatttcacatttaatatttttggcccatgaaagtaactgaaactgaaaagtcaacccacagataatgagagactactgtaattctctgtactttctgctctagtgtggcatgagcttaactgctctaaataaaaataaaatctttaaaagtaaaaaaaaaaagaggtggcttatttcatctacatataaaaatatgtatgcatatatggtaaatgttacatttttttaaagtagaatatggattatgagcggttcccatggtaatgcctcatggtgcagtattgtgggcataacgacac

SEQ ID NO: 345674 - DNA, 561 bp, Homo sapiens
atatgacagataaaaatatcccagcattacagtccttgtactttggggctgttattaagtaaaataaaataagggttacataaacacaagcactgcaattccatggcaatcaatctgataaccaaggggtctactaagtgactaatgggtgggatgatttgtggccctgatccctgggcaggacagagtgggacagcatgaggtttcatcatgctactcaagatgatgtgcaatgttaaacttatgaagtgtttatttctggaatttcacatttaatatttttggcccatgaaagtaactgaaactgaaaagtcaacccacagataatgagagactactgtaattctctgtactttctgctctaktgtggcatgagcttaactgctctaaataaaaataaaatctttaaaagtaaaaaaaaaaagaggtggcttatttcatctacatataaaaatatgtatgcatatatggtaaatgttacatttttttaaagtagaatatggattatgagcggttcccatggtaatgcctcatggtgcagtattgtgggcataacgacac

SEQ ID NO: 345675 - DNA, 561 bp, Homo sapiens
atatgacagataaaaatatcccagcattacagtccttgtactttggggctgttattaagtaaaataaaataagggttacataaacacaagcactgcaattccatggcaatcaatctgataaccaaggggtctactaagtgactaatgggtgggatgatttgtggccctgatccctgggcaggacagagtgggacagcatgaggtttcatcatgctactcaagatgatgtgcaatgttaaacttatgaagtgtttatttctggaatttcacatttaatatttttggcccatgaaagtaactgaaactgaaaagtcaacccacagataatgagagactactgtaattctctgtactttctgctctagtgtggcatgagcttaactgctctaaataaaaataaaatctttaaaagtaaaaaaaaaaagaggtggcttatttcatctacatataaaaatatrtatgcatatatggtaaatgttacatttttttaaagtagaatatggattatgagcggttcccatggtaatgcctcatggtgcagtattgtgggcataacgacac

SEQ ID NO: 345676 - DNA, 561 bp, Homo sapiens
ggtaatgcctcatggtgcagtattgtgggcataacgacacatagagaagatgagatttgagcaaatctttgagaaaggtaaaggagatgccaagcaaatattttagagatgtgccctgcagtcatggggagtgttgaaagaagaacactgtggtcagtgtgtctggatattatctgttcttacatggaaatcattttattattctgcatgttgtgggtttccatgaaaatgccatttctcttctttaatcataagctgcgtatgaaaatatattttctgtaactcattttttatccctgcatatactggtggttagaagctgcattgaaccaaattaattctagatatgaagtcagacaaaaatgataaataaagtttkcataagcctccagtttgaattactgaaaaggtataaagggaaagaaaaaaataatgagaatgcaatatttatatgatatttgtaatgaggtcaactttaatgttatttttctgtgttttgggtcagctttgcatggggggaggatgatctagtcagtatgctcagttgaaagagatatataa

SEQ ID NO: 345677 - DNA, 532 bp, Homo sapiens
atcaatagtttgttgttgttgttgttgttgttgttkctaacagtgtcagggatggaacagtttttaacaaaccaaataattttcagaaatctaactgaagtagtgggaccttgttgtaaatgcagagttataacctatttccaccgatactttttgtaaacgcctttgtgattacttttatgtcctgcatgtgtgtgtgacaaataaatctccttggaggagataccgtcaatgtaatgtcagacctgtgctcctggagaaagccagatacaactaagatctttcctacaaagactgtaaaagaatgcaaggctattcaatcaccccatcagtatccaggaaaatgcatatcccttcaaaggtgaaggcactgcagctgaaataagcattaaacagaacatgttcacctacctaggcactgagtagagcatattaatcaaatctagtactataaagtatttactagttgttgattggatggaatcgatgatttcagtaatattatagatgtgggctttaatggttagagcca

SEQ ID NO: 345678 - DNA, 532 bp, Homo sapiens
atcaatagtttgttgttgttgttgttgttgttgtttctaacagtgtcagggatggaacagtttttaacaaaccaaataattttcagaaatctaactgaagtagtgggaccttgttgtaaatgcagagttataacctatttccaccgmtactttttgtaaacgcctttgtgattacttttatgtcctgcatgtgtgtgtgacaaataaatctccttggaggagataccgtcaatgtaatgtcagacctgtgctcctggagaaagccagatacaactaagatctttcctacaaagactgtaaaagaatgcaaggctattcaatcaccccatcagtatccaggaaaatgcatatcccttcaaaggtgaaggcactgcagctgaaataagcattaaacagaacatgttcacctacctaggcactgagtagagcatattaatcaaatctagtactataaagtatttactagttgttgattggatggaatcgatgatttcagtaatattatagatgtgggctttaatggttagagcca

SEQ ID NO: 345679 - DNA, 532 bp, Homo sapiens
atcaatagtttgttgttgttgttgttgttgttgtttctaacagtgtcagggatggaacagtttttaacaaaccaaataattttcagaaatctaactgaagtagtgggaccttgttgtaaatgcagagttataacctatttccaccgatactttttgtaaacgcctttgtgattacttttatgtcctgcatgtgtgtgtgacaaataaatctccttggaggagataccrtcaatgtaatgtcagacctgtgctcctggagaaagccagatacaactaagatctttcctacaaagactgtaaaagaatgcaaggctattcaatcaccccatcagtatccaggaaaatgcatatcccttcaaaggtgaaggcactgcagctgaaataagcattaaacagaacatgttcacctacctaggcactgagtagagcatattaatcaaatctagtactataaagtatttactagttgttgattggatggaatcgatgatttcagtaatattatagatgtgggctttaatggttagagcca

SEQ ID NO: 345680 - DNA, 532 bp, Homo sapiens
atcaatagtttgttgttgttgttgttgttgttgtttctaacagtgtcagggatggaacagtttttaacaaaccaaataattttcagaaatctaactgaagtagtgggaccttgttgtaaatgcagagttataacctatttccaccgatactttttgtaaacgcctttgtgattacttttatgtcctgcatgtgtgtgtgacaaataaatctccttggaggagataccgtcaatgtaatgtcagacctgtgctcctggagaaagccagatacaactaagatctttcctacaaagactgtaaaagaatgcaaggctattcaatcaccccatcagtatccaggaaaatgcatatcccttcaaaggtgaaggcactgcagctgaaataagcattaaacagaacatgttcacctacctaggcactgagtagagcatattaatcaaatctagtactataaagtatttactagttgttgattggatggaatcgatgatttcagtaatrttatagatgtgggctttaatggttagagcca

SEQ ID NO: 345681 - DNA, 559 bp, Homo sapiens
tgttgattggatggaatcgatgatttcagtaatattatagatgtgggctttaatggttagrgccacactgagttcatggtcatccactgccactgcaagatgtccaccattattttcagttttaagaacagattgaattgggctatttaatagtaaaatagtaaaaataatcatccttttctacatagggctacaaagtagatttcaaacattgaaacccacattttaatttatattaggctttatgaactcttttaattaaaaaaactagaagatccatcgggttttatttgtcaagttgattttaagttccaaagacataattttatttcaattatttacttgagtcaaaggggccactataggatattttaagggcaatgaatactatggccattagaaattttggcaaagcaacatttctcatggttaaggtaacacatatctgttagttttctgttttatgcctggtaacttccttaagaaaatagcaggtactttgtttaaatttagtgaatttagtgggacctccatgtataataacaattttgtcacctat

SEQ ID NO: 345682 - DNA, 559 bp, Homo sapiens
tgttgattggatggaatcgatgatttcagtaatattatagatgtgggctttaatggttagagccacactgagttcatggtcatcyactgccactgcaagatgtccaccattattttcagttttaagaacagattgaattgggctatttaatagtaaaatagtaaaaataatcatccttttctacatagggctacaaagtagatttcaaacattgaaacccacattttaatttatattaggctttatgaactcttttaattaaaaaaactagaagatccatcgggttttatttgtcaagttgattttaagttccaaagacataattttatttcaattatttacttgagtcaaaggggccactataggatattttaagggcaatgaatactatggccattagaaattttggcaaagcaacatttctcatggttaaggtaacacatatctgttagttttctgttttatgcctggtaacttccttaagaaaatagcaggtactttgtttaaatttagtgaatttagtgggacctccatgtataataacaattttgtcacctat

SEQ ID NO: 345683 - DNA, 559 bp, Homo sapiens
tgttgattggatggaatcgatgatttcagtaatattatagatgtgggctttaatggttagagccacactgagttcatggtcatccactgccactgcaagatgtccaccattattttcagttttaagaacagattgaattgggctatttaatagtaaaatagtaaaaataatcatccttttctacatagggctacaaagtagatttcaaayattgaaacccacattttaatttatattaggctttatgaactcttttaattaaaaaaactagaagatccatcgggttttatttgtcaagttgattttaagttccaaagacataattttatttcaattatttacttgagtcaaaggggccactataggatattttaagggcaatgaatactatggccattagaaattttggcaaagcaacatttctcatggttaaggtaacacatatctgttagttttctgttttatgcctggtaacttccttaagaaaatagcaggtactttgtttaaatttagtgaatttagtgggacctccatgtataataacaattttgtcacctat

SEQ ID NO: 345684 - DNA, 546 bp, Homo sapiens
ctacaatattgctccagaaataaatgaattgattaatggaacattaaaacacttcaaaaatatatattgtttcagttggccttagttgcatgtgatgggctgaactgtggcaaaattcaaatgttgaatccctatctctcagtggattttatttggagatagagcctatacgaaagtgataattgttcaatgaagtcattattgtgagaatagggctgatgrtgttataagaaatgacatctctatctctgtgcacacccagaagaaaggccatgtgaagctactgccagaaggggcatctgcaaaccaggaagagacctcactggagacaaaccctgacattaccgtgatctagatgtacagaccccagaactgtaagaaaattaatttctgacatttaagccaggctgtggtattttattatggcagcccaagtaggctaatacattccataacacaatagtggcttaaacaacaattaattacttctcatgattctgtgcattggcaaacttggtggttcttctctttgtttacctagagtca

SEQ ID NO: 345685 - DNA, 546 bp, Homo sapiens
ctacaatattgctccagaaataaatgaattgattaatggaacattaaaacacttcaaaaatatatattgtttcagttggccttagttgcatgtgatgggctgaactgtggcaaaattcaaatgttgaatccctatctctcagtggattttatttggagatagagcctatacgaaagtgataattgttcaatgaagtcattattgtgagaatagggctgatggtgttataagaaatgacatctctatctctgtgcacacccagaagaaaggccatgtgaagctactgccagaaggggcatctgcaaaccaggaagagacctcactggagacaaaccctgacattaccgtgatctagatgtacagaccccagaactgtaagaaaatwaatttctgacatttaagccaggctgtggtattttattatggcagcccaagtaggctaatacattccataacacaatagtggcttaaacaacaattaattacttctcatgattctgtgcattggcaaacttggtggttcttctctttgtttacctagagtca

SEQ ID NO: 345686 - DNA, 567 bp, Homo sapiens
ttaaggtactcctgttttttttttttttgaaatattttatccacatctgaccctccatattccattaaacactagtttccctttgttttgcattatcagtcactgtttcagaaatttgtatttgattcctgaaaaagacgttcttgttacctgtagtcatatataamcaagtcgttattaaataaagtgatttttttaagcagcaatgtatcagtaaatgtactgtgaggaataaactattctaagaatcttcgggatgaattagatcagagaataatttgattttgattacaggttgtctctctactcctcatttaatgttccattaagattattttttagtcaagccaggtagaatcaaaatatccaagaatatagttatgaattgtcataggaatctggcattaatcacatacttattattaaaatgcaaaggttactttatcttcctggaaatcataattcgcttttctctgccttttctgatgcaattttaaattttcccatgtagatgctccatcaaaagcatggaaacttaattttttgtatttagaaaaatgtcttaat

SEQ ID NO: 345687 - DNA, 642 bp, Homo sapiens
atgcactatgcaatgatagacagaggtcacagccttgagggtgactgagggatctcccaatgtaacacgttgaggtcttatcagagggaaaagtgggagccacctcaactctcctgccaggccagcaggaaagtgatccatcttatagttgtattaatccatccttacactgctataaagaactacctgagactgggtaattcatgaagaaaaaaggtttaattgactcacagttccacaggcttaacaggaagcatgactgtgaggcctcaggaaacttaaaatcatggcagaaggtggaagagatgcaaggaccttcttcacagtggcagcaggagagagacacasagagagagagagcacaaaggggtaagtgtcacacactttcaaaccagatctcatgagaactcactcactgtcaggagaccaccaagggggaagtcctcctgtatgattcaatcacttctcaccaggcccctccccagcatgtgaagattacaatttgaaatgagatttggatggggatacagagccaaaccatatcacagtcattctcttggcccagtattctggctgttcagatcagacaggcacctcttatcatctgtaggaatatcgagaggacattcaaatagagaggaa

SEQ ID NO: 345688 - DNA, 587 bp, Homo sapiens
aatatctactagtcaatttatttagttttacacacaagctatgggatctactcataatcatataaaaaattaaatatcaatgaatacattaatttgtttgcactgtttttcaagtaattagattctttaaaggctgtgatgttcaattttgactatatttaaagggatttgggtaaagtagaaagggtacagtgagaatgaggcaggagccggaactcaactccagagtcggggctcagacactggatcaaattgaggactaactaatacagttccagggaaagcacctctccataaaacatactcaccagtgtgccatgtcagtttaccattgccatggcaacagccagctgttaccacctgtttccrtggcaacgacctgacaacgcagaagttaccaccctcatcctagaaatttctacataaacctcccgttaatttacatataagtataagaagggataaatatgaatgcagaacttcctcttaactgcgattctgggcactttgcctatggcgagctctgctccgccaggacaagtagtacttctgctgctgcactgacatttcaataaaagttgctggtt

SEQ ID NO: 345689 - DNA, 634 bp, Homo sapiens
taaatataataactgggtgaatcaatagaaattatccagtgtgataaacattaaagtgataaaaataaaaaatgaatacagcctctctaactggttggtaatattcagtggtagagaacgtgtacatttggagtaaatatagagaaaagacggtgatgtgtctgctaaaatatttccatgtagaatttctaaaacaaaatttatctcyggcttgtcgtgactattcttaattatcatataaagagtaagagatttcagcttattcttttgttcttattttgtgtcttttctgccttaaaaagtttacctaacataatatcacaattgttactataattcttacatgtatagcatttacatgggtaaatctatgacagatttcaatttttttggcataagacttaaaattcattttttcttgtttagtactttggaatccttgttcaaaataaattgattataaaagctgagttcaatttggattcaaatcagttcttttggtatatatttctacgtttagttgaataccacagtacagatcctatacatattaaaaggacaataagggaatgtacatgacaatacatttgaaaaattaaatgaagtgtacaagtattttaacaaatgtgaatta

SEQ ID NO: 345690 - DNA, 630 bp, Homo sapiens
tgctaatatttgtatcatattaaaataataatcatctttaataagcatggaattgtaaatcagagatgaaatttgcaatatttagctaatctgtttcaaatttattttcacattatactgtgattactatttagagaaaatcttaatttatagagctaaatgccagtagcaataggttttaaagtttgactttcagtctcagcctattcttacaaatcctgaaaaaagtaggaaatttctgttttaaagtgaaattacaacctatgtgaacagtgctcaaaattcttgtcataaatataaatattaaaagatattcaaaactgcaaaaaagcactgagactttgtgtggatgagagtactcacaaagcagaaattcctaaatctagtctagtaattgggtatagcacagtatacattctctgtaccacagcatttgttactcagcttcaaagaagcaacaagtcaaggatctagacttaaaaatgaaaasttatgagtttttatcttatttgtaataaagaggctaataataaatctctgatataacctttcctaaagggaaccgactagctacctcgttaatggttgtatattggatgcctttctgtgtggatggacaacaacttatcc

SEQ ID NO: 345691 - DNA, 472 bp, Homo sapiens
ggaaatatgataatgtagtgctctaatgtttcccactgtagtggcagaaagtttaaagccttcaatttttatagataggattatgtttctataatcccatagatatttatcataatagtaataattttcccattaagacctactttcttcctgggctcatggagcacttggctgrgcaataaactgttcattcccctttgcacttattaatttcatgcgtctaaatttgctgtgtgagcataagtggtgggtccaatatctatctaacttgcctaacagtaaattgattagtctatatctcctctttcccttcttttgtgttaactggaatggcaatttaacagaaatctttgtttgtttttcatttttgtttgtttgttttgttttgacaattagacaggtctaatgacaaaaggtagatggagcaacaagaagaaagaagccaggatccctgaatcctgcagattacagc

SEQ ID NO: 345692 - DNA, 472 bp, Homo sapiens
ggaaatatgataatgtagtgctctaatgtttcccactgtagtggcagaaagtttaaagccttcaatttttatagataggattatgtttctataatcccatagatatttatcataatagtaataattttcccattaagacctactttcttcctgggctcatggagcacttggctgggcaataaactgttcattcccctttgcacttaytaatttcatgcgtctaaatttgctgtgtgagcataagtggtgggtccaatatctatctaacttgcctaacagtaaattgattagtctatatctcctctttcccttcttttgtgttaactggaatggcaatttaacagaaatctttgtttgtttttcatttttgtttgtttgttttgttttgacaattagacaggtctaatgacaaaaggtagatggagcaacaagaagaaagaagccaggatccctgaatcctgcagattacagc

SEQ ID NO: 345693 - DNA, 645 bp, Homo sapiens
ccatagatatttatcataatagtaataattttcccattaagacctactttcttcctgggctcatggagcacttggctgggcaataaactgttcattcccctttgcacttattaatttcatgcgtctaaatttgctgtgtgagcataagtggtgggtccaatatctatctaacttgcctaacagtaaattgattagtctatatctcctctttcccttcttttgtgttaactggaatggcaatttaacagaaatctttgtttgtttttcatttttgtttgtttgttttgttttgacaattagacaggtctaatgacaaaaggtagatggagcaacaagaagraagaagccaggatccctgaatcctgcagattacagcaggcttctgggctagaggagcagagcttttaactgacagagtcattcttaggttttttggtcgttggtggtttttcctcagcccactccattttagttaagtttgatagggtgtttagtctttccataactaaaacaaaattataccacaatttttattaattagtagaatcaatctcatttgaagtcaatataaatttaagagaattattgccattgaaaacacaaataaaaatatgagctattgaaactgaaaagtatgtacagatt

SEQ ID NO: 345694 - DNA, 559 bp, Homo sapiens
gctatccatccagctccctagctatctagctatacatgcacaaacataaacatagaaagatgaaattttcctttcagaaaatctcatctctatttgtggtattcagaaattttactgtgttaaatccaagtgctttgcatttgtcaattgctttaaatttttcaatttgagaactcttgtttttcagcaatcagttttttgcatattgccttttaactatttcttttattttgtctacttcaaggtgtactctttgtactatgctgaattttagacatctaaactttaattatctttatttcccattccttatatattagtgctgtagttggtggtatcctctaaatttgtcttaatttatttatacacttttcacctatgcatagtcttgtcrttttgaaaataaatgtaattatctccaaaattagttcttgacttgtgatatggtttggctctgtgtccccactcaaatctcatgttgaattgtaagcctcagtgttggaggtggggcctggtgggaggtgactgaatcacggggatggtttctaatggtttagca

SEQ ID NO: 345695 - DNA, 559 bp, Homo sapiens
gctatccatccagctccctagctatctagctatacatgcacaaacataaacatagaaagatgaaattttcctttcagaaaatctcatctctatttgtggtattcagaaattttactgtgttaaatccaagtgctttgcatttgtcaattgctttaaatttttcaatttgagaactcttgtttttcagcaatcagttttttgcatattgccttttaactatttcttttattttgtctacttcaaggtgtactctttgtactatgctgaattttagacatctaaactttaattatctttatttcccattccttatatattagtgctgtagttggtggtatcctctaaatttgtcttaatttatttatacacttttcacctatgcatagtcttgtcgttttgaaaataaatgtaattatctccaaaattagttcttgacttgtgatatggtttggctctgtgtccccactcaaatctcatgttgaattrtaagcctcagtgttggaggtggggcctggtgggaggtgactgaatcacggggatggtttctaatggtttagca

SEQ ID NO: 345696 - DNA, 513 bp, Homo sapiens
aatattttataaattgatcttagtgyaggttactcttgagtgtacatacataaaaattcactgagcaaatccattatactttgtgcagtttactatattttatatcacaattaaattttttatttttacaaattaagggtaagcccattatttctctgtcttttgaaagccttaattaatatacaataatgaaacgaaaagtgccccatccttcttcaactcttgcttcttcaacttgacatttgaaattatagagttccaaatctctacatatctattcatgattcatttgaaaaaaatgtttgtcttatgtaataaggccattttataatttcccatgttatagtcatacaatatactttaaaataatattgtaacaggtttatgacatttcagtcataattgaaattataaaacttaatagtaatttgagagatttaaaggcaagatgacaattttccaggcattattttcttttttgcttaacatttctctccttcccgtcttgtttta

SEQ ID NO: 345697 - DNA, 513 bp, Homo sapiens
aatattttataaattgatcttagtgtaggttactcttgagtgtacatacataaaaattcactgagcaaatccattatactttgtgcagtttactatattttatatcacaattaaattttttatttttacaaattaagggtaagmccattatttctctgtcttttgaaagccttaattaatatacaataatgaaacgaaaagtgccccatccttcttcaactcttgcttcttcaacttgacatttgaaattatagagttccaaatctctacatatctattcatgattcatttgaaaaaaatgtttgtcttatgtaataaggccattttataatttcccatgttatagtcatacaatatactttaaaataatattgtaacaggtttatgacatttcagtcataattgaaattataaaacttaatagtaatttgagagatttaaaggcaagatgacaattttccaggcattattttcttttttgcttaacatttctctccttcccgtcttgtttta

SEQ ID NO: 345698 - DNA, 646 bp, Homo sapiens
ctccttttcctactttttaattagggtattaatttttggcacttgagcaggtaggtttcttttatattttggatcttaactccttatcagatatatggcttgcaaatattttctaccattctctaggctgctttttcatttgatgtagtcccaattgtttatttttgcttttgttgcctgtacttttggtgtcataaccaaaacatctaagatcaatatcaaggacctttttccctatgttttcttctaggagtttcatagtttcacttcacagattacatttacatccttttcaagttaacttttccatgtggtttaagtcacaggtctaacttcattcttttgcatgggaatatctaattttcccagcaccctttattgaagagactatcctttccccattgtgtagtcttgtcaccctgtcaaagactagtcaactataaatgaatggatttatttctgagttgtctattctgttccatgggtctacatgtctatttatttttatgccagtgccatactgttttgrtaactatagctttgtaatataattggaatcgggctgtgtgcctccaactctgttcttctttttcaaaattgctttagctatttggggtcttttgtggttctatatgaattttaggac

SEQ ID NO: 345699 - DNA, 483 bp, Homo sapiens
agccgagtcagtaaacttgcaaacagactccttgtgcaggcccctcccacattaaaccagagttggtctgtgtgacaacagcataccacagcagaagtgatggtttgccatgtacaygattaggtgataagacaatggcacgctcactcacatgttcatcatctgtcctggggaaaccatgttgtgagcagccctatgcagaggactacatagccaggagctacagtctactgccattggtcacatggataagtgtggaagtggatcctacagccccagccaacagcataactacactctcatgggaaatcctgagccagaaccacccagctaagccactcccagattgctggtgtgcagaagctgtgtgtgagataataatgtctgttgattgttttaggtttccaagatttggggtaatttgttacacagcagtggataactaatacaccaactctggctatacccagctggggagactta

SEQ ID NO: 345700 - DNA, 483 bp, Homo sapiens
agccgagtcagtaaacttgcaaacagactccttgtgcaggcccctcccacattaaaccagagttggtctgtgtgacaacagcataccacagcagaagtgatggtttgccatgtacatgattaggtgataagacaatggcacgctcactcacatgttcatcatctgtcctggggaaaccatgttgtgagcagccctatgcagaggactacatagccaggagctacagtctactgccattggtcacatggataagtgtggaagtggatcctacagccccagccaacagcataactacactctcatgggaaatcctgagccagaaccacccagctaagccactcccagattgctggtgtgcagaagctgtgtgtgagataataatgtctgttgattgttttaggtttccaagatktggggtaatttgttacacagcagtggataactaatacaccaactctggctatacccagctggggagactta

SEQ ID NO: 345701 - DNA, 602 bp, Homo sapiens
tacagaaattaactaattcacccagggcctcataactagagattgagaagaggtgagattcaaaccawaagatgaaggaaaggttcccctcttgctttatagcttgtattttaccaagtagagcctaaaatggcatctccacctcagcaagtcatgggacatagctcagtttcccactgacaacatctttttcaatttgatgacagtgtttgtgtgattccatacagtctttttagaaatttgtgtattggtgacagtggacaactgatgtggtttgactgtgtccccacccaaatctcatcttgaatcgaagctcccacgattcccacgtgtcatgggagggacctgatgggaggtaattgactcatgggcacatgtctttcccatgctgttcttgtgatagtgaataagtctcatgagatctgatggttttataaaggggagttcccctgcacacactcttgcctgctgccacgttaagacgtgactttgctcctccttcgccttctgccatgattgtgaggcctccccagccttgtggaactgtgagtccattaaacctcttttcctttataaattacctagtttccttcataaattac

SEQ ID NO: 345702 - DNA, 602 bp, Homo sapiens
tacagaaattaactaattcacccagggcctcataactagagattgagaagaggtgagattcaaaccataagatgaaggaaaggttcccctcttgctttatagcttgtattttaccaagtagagcctaaaatggcatctccacctcagcaagtcatgggacatagctcaktttcccactgacaacatctttttcaatttgatgacagtgtttgtgtgattccatacagtctttttagaaatttgtgtattggtgacagtggacaactgatgtggtttgactgtgtccccacccaaatctcatcttgaatcgaagctcccacgattcccacgtgtcatgggagggacctgatgggaggtaattgactcatgggcacatgtctttcccatgctgttcttgtgatagtgaataagtctcatgagatctgatggttttataaaggggagttcccctgcacacactcttgcctgctgccacgttaagacgtgactttgctcctccttcgccttctgccatgattgtgaggcctccccagccttgtggaactgtgagtccattaaacctcttttcctttataaattacctagtttccttcataaattac

SEQ ID NO: 345703 - DNA, 603 bp, Homo sapiens
aacacgggatgaagagcagacctacaccaaggtgtttcctcatggaattcaaattttttgggataacaaaaagaaaattgtgagagctttgaaaagccaagggaaacaaatattaacatgtggaaaaasaaataaaacaattttattatacttatcaaaagtaacactgtatgctaaaaaccaatggactcatgcttttaaaagtctgaaaaagatttccacacccaacaaaactatcaataaagcatgagacttagcaaatatatcagatcctgcctaaaaacgtttatttttttgttttgaatattttatttatttcaatagcttttggagtacaaatggtttttggttacatggatgaattgtatagtggtgaagtctaagattttagtgcacctgtcacccaagtactgtactcaaaacttttattttcattaacacaattatttaataatttaccagaggatatgctatagcaaaataaaagggtagagttagagagagatatggggcccaggaatcaaggaatccaattcaaaagagtggcgaaaggaagccccagactcagtttttcaactagccagtagagaagagaaagccgga

SEQ ID NO: 345704 - DNA, 603 bp, Homo sapiens
aacacgggatgaagagcagacctacaccaaggtgtttcctcatggaattcaaattttttgggataacaaaaagaaaattgtgagagctttgaaaagccaagggaaacaaatattaacatgtggaaaaacaaataaaacaattttattatacttatcaaaagtaacactgtatgctaaaaaccaatggactcatgcttttaaaagtctgaaaaagatttccacacccaacaaaactatcaataaagcatgagacttagcaaatatatcagatcctgcctaaaaacgtttatttttttgttttgaatattttatttatttcaatagcttttggagtacaaatggtttttggttacatggatgaattgtatagtggtgaagtctaagattttagtgcacctgtcacccaagtactgtactcaaaacttttattttcattaacacaattatttaataatttaccagaggatatgctatagcaaaataaaagggtagagttagagagagatatggggcccaggaatcaaggaatccaattcaaaagagtggcraaaggaagccccagactcagtttttcaactagccagtagagaagagaaagccgga

SEQ ID NO: 345705 - DNA, 574 bp, Homo sapiens
tctgactcatatgtgcaatctaaccatgctgaacccataacagtagaacagtgggaaccagagctaagaataggagaggggagaaggagatggggaagagattcgtcaatggctacaaagttacagttagagacgaggaataaattctggtgttccattgcaggggtccccaacctcctccgagccataaacaggtaccagtttgtggcctgttaggaactgggctgcacagcagaaggtaagtggcagacaagtgcttcatctgtatttacagctgctccccattgcttgcattactgcctgagcrctgcctcctgtaaactgcacatgggagggatctaggttgcacgctccttatgagaatctaatgcctgatgatctgtcactgtctccaatcactcccacatgggaccagctagttgctggaaaacaagctcagggctctcactgattctaccttatggtgagttatataattatttcattataccagtcaatgtaataataatagaaataaagtgcacaataaatgtaatgtgcttcaggcattcccccaaccctcctcccatcccag

SEQ ID NO: 345706 - DNA, 532 bp, Homo sapiens
tttctttttgcacattactgtttttttctttcagattgaagaactccatttagcatttcttgtaagacaagtctagtagtgctgaattcccccagctcttgttgtctgggaaagacttcatctgtccttcatgtttgaaagaaagcttttctgggtgcagtattcttggcttatggtttttttctttagcagtttgaatatgttgtcccatctttcctggcctctgtggtttccattgagaagtctgttgccagacgattcagagctcctcaacatgttattagctgctttcctcatgttgcttttagcatcctctctttttccttgacctttgagagtttgattattatmtgcttttttggtagtcttattcgggttggttatatttggtgatctctgacatccttgtacctggatatttatatcttgctctaggtttggaaatttttctgttattatctttcagaataaggttgctgctaccccttgctctttctcaattccgtcttagacaccagtgattcttagattt

SEQ ID NO: 345707 - DNA, 577 bp, Homo sapiens
tgctttcaattgctggactcaggtgggacggttgagggcccaggaccagctggaaactgccagtggaagggtcatttttaggggcttgctcatgtatgtgaacaattctgtcttgtgagactctgctttcctgtgtgttccttcctctctactctgactagtaacttaacccctttcttttcttttctatcttagtgattttcaacttcatcaaaccccaccccatttttttctaataaacattttgtagcacttcctttactgttctgtgctaaattttacacataatataatctatatacataygttaaacacccttccaatataatgctctactgtattataagggagacacaaaagaagacacatacaataatctgtagctcaatatgtagatgctctggcatgacaacaccagaggacatattgttgttaccagatacttgcaattatatgtcaaatctttgtgaatgacacagcttcaaatgcagctcagcaaaggtgtgttaggttggtgaacttaatacaaagcaatcttatgtaggtgatgcagctacatgaaatggtgagtgtctct

SEQ ID NO: 345708 - DNA, 610 bp, Homo sapiens
tttagggcctatagaacttgccctgagtttttagcaacccagtgcagtccagtggtgatggccacaggggtgcttgtgtcaccccacccctagctccaagcagctcagcacagagagagactccgtttatttgggagaaagtaagggaagaaaacaatagtctctgcttggtaatccagagaattcttccagctcttctccaagaccaccaacgtggtactttacaagtgtgcaagaatcacggtgttactgggcttggggtgccccataatgcagatatggcttagatcacaacacccacatctgtttgaatacctggaatgtcttcccaaaagaggacaggtacaaacaaactcagacagcaaagactacattaaataactaacccttcaatgctcagacaccaacgaacatccgcaagcaccaacaccatccaggaaaacatggcctcaccaaatgggcttgagcttcaaacagtagctcgaggattcagtttttctttatcttttgcctctactttcctctggattttgtatttatttttgggttccatgtggtggcaagatgatgacagtagctcawgcattacatccttgtaaattttggttta

SEQ ID NO: 345709 - DNA, 591 bp, Homo sapiens
agtcacagaaaatagaaacgatatgaaagtgctaaggagaggggagagctgagcagctgtgaatggtgcgggggaggagagaaagtcatctgaaggctagagctgtccctgttgtttatatttatttgaaagtaagggactttaaagccgggtgttagattactttgtaataatgcagcatgtatttaacatgagtgaaatacaatgatctttatttaccctgtggctttttaaattatgacaggagaaatgaaaacagccasagtagaaaacaaacctccccatgttaatgattagttcttcaggaaggataagtagaggggaaaaaagtgacacaaattaattggagtagtctttccttagcttgggttcatggacagtgactccttaaaacatgaattccatgttctcatcaatggcaaaataaattctcatgtatctaccaaagcttggcaaaaagatattagaattttcaagaatatccttttattctaaagagaggagtttgaaaaaaatcagggtttatacaggtcaggatcctcaaagctcctcagggaatagaagatgtttatgtcccattgattctgacaa

SEQ ID NO: 345710 - DNA, 475 bp, Homo sapiens
cactgcactccagcttgggtgatgaagtgagaccctgtctcttaaaaaaaaaatatgtaaacacaacgcctaaaactataaaactcctagaggaaaacataggtgaaaagctcartgatgttggtcttgtcaatgattttttggctatgacaccaaaacactggcaacaaaagcaaaaagtaaatgagtggaaactgcatcaaactaaaagtttctgcacagcaaagacttgtgcttttaaatagcatagtcagaaatgacctctccgaaaaaggaaatgttggagtaaagattcaaagaagatgaaggagccagcccgatgatatctggggtaagaatgttccaagtgaggggacagtgagggcagctgtcctgaggcagaggtgattggcatgtttgaggagcagcagtagtgtggccagggtagtgagggagaaggtggtaaggaatacagtcagatgattgaggctggagc

SEQ ID NO: 345711 - DNA, 617 bp, Homo sapiens
gtataatgagcacttttttacctactaaaaatgcattacatgttttatatacaaaaattaactcaaaatggatcacagtcctaaatataaagccaaaaactaaaaactgtctcaaagaaaacagaaaacaacctgtgtgatctcggattgggacaaatatttctaagacaccgaaagtaaaatacataaaagaacaaactagtatattggactttatcaaaataaaaacttctgctcctcaaaaaacattgttaagagagtgaaaagataagccacatactgggagaaaatatttgcagtttggttatttgataaaggaattatatcaagaatataaaaagatctctcaaaaytcaatactgagaaaacaaacaatgtgactttaaaaagtggccaaataatttgaacacacttcaccaaagaagatagacaggtgacaagcaaatgaaagatgtgcaacattattagccattaggttcatgcaaattaaatctgcaatatgatatcaccacacacctattaaaaatggctaaaattaaagatacagacaatacttagtgctggcaagaatatgaagggactgaaactctcattcactgctggtgagcacgcatcgg

SEQ ID NO: 345712 - DNA, 584 bp, Homo sapiens
tcttttttcttttttcacttagcatcatgtttttaaggttcattcatgttgtagcatgtatcagtactcaattttttttcaatcactggataatttattgtatgaatatatcacattttatttattcattcatccattgatagacgtttgggttgtattcaccttttggctattttgagtaattcctccataaacatttgtgtataagtttttgtttgaacatctgttttgcaccattttacatccccatcagaaatgtatgaagtttccaatttctccatatctttgccaacacttacgttttcctgcttacagccatcctcttgggtgtgaagtggtatctcattgtggttttgatttgcattttcctaaagactgatgatgttgagcatcttttcatatgcttctcgacsatttggtatcttctttggagaaatatctattcaagccctttataagttgggttgtttgtccttttttcttttgttgagttgtaagagtttttgatgtattctggatactagacccttgtcagatatagattttccagatattttctcccattttctccgttgtttttctac

SEQ ID NO: 345713 - DNA, 582 bp, Homo sapiens
aaacttattcactgtcatgagaacagcatgggaaagacatacccccatgattcarttacctcccactgggtccctcccataatacactggaattcaagatgagatttgggtgagggcacagccaaaccatatcagtctccaactgtaattgcgtgcttgtctatttcttttagttccatgagtttttgctctgtttattttgaaactctggtattagatacattcccatttaggattatgttgttatcttgatatatattgacctctttatgattatgaagttcctgtttttacttctagtaataatcctcttttctgaagtttactttgtaatttaatattaatgtagccattcaaagttacctgtatgagtgattgcatggtatatatttttcattcttttgcttttgattaatgtatatctttatagttaaagtgggtttcttatagacagcaaatagttgggttttcttgcttattcattccaaaatctctgcctttctaattagtgtgtgtaaatgatttacatttaagataatttttgatatgggtaaattgaaatctacagtcatgtgttgctta

SEQ ID NO: 345714 - DNA, 582 bp, Homo sapiens
aaacttattcactgtcatgagaacagcatgggaaagacatacccccatgattcaattacctcccactgggtccctcccataatacactggaattcaagatgagatttgggtgagggcacagccaaaccatatcagtctccaactgtaattgcgtgcttgtctatttcttttagttccatgagtttttgctctgtttattttgaaactctggtattagatacattcccatttaggattatgttgttatcttgatatatattgacctctttatgattatgaagttcctgtttttacttctagtaataatcctcttttctgaagtttactttgtaatttaatattaatgtagccattcaaagttacctgtatgagtgattgcatggtatatatttttcattcttttgcttttgattaatgtatatctttatagttaaagtgggtttcttatagacagcaaatagttgggttttcttgcttattcattccaaaatctctgcctttctaattagtgtgtgtaaatgatttacatttaasataatttttgatatgggtaaattgaaatctacagtcatgtgttgctta

SEQ ID NO: 345715 - DNA, 567 bp, Homo sapiens
ttcactggtatggcactgttaatttccttcaagaatttttcccttgcatccacaacttcactgtttggtgcaagaggcctagctttcagcatatcccagcgtatttcaaaatgcctttctcactaagctttatcacctgtagcttttgattcaaaaggagacacatgtgactcttcctttcacttgaagacttaggagccaatgtagggttatcaagtggcctaattgtaatattattgtgtctcagggaataggaaggcctaaggagggtgagagagatgggagaayggctggtcagtggagtaatcagaaaacacacaatactcatcaaataagttcaccatcttacctgggcacagtgcatggtgtaccccaaaacaattacaatagtaatgtcaaagatcactgatcacagatcaccataacagataatcataataatgaaaagtttgaaatattatgagaattacccaaatgggacatagatacatgaaataagcacatgctgctggaaaaatggcactgatagacttgctggacatagggttgccacaaaactttaatttg

SEQ ID NO: 345716 - DNA, 451 bp, Homo sapiens
agaacatcatacatgaaggctaaattacttcggttgatttctatgaaggaattcagcaccaaaacattaaaaatggatttttgtctgtgcatccactcaaactcatctcctaacacatttgaattcaaaagcatttttgcaamagtacacagcaaaacagaatctgcttaataacaaacaaatagcccaagtgctactaaaccacactgccctttcccgcctgcccactcaccagggaaacctccaagcccatcttgcatcacctccagagtgaggaggtttggataattagctatttccagactcaccatcagttcatctctgacctcccgggctgggatctaccgggatagcctggtgccttctgtactcagccccttgagtactagggcacaagtaggaataattttttcagctaatgatgtaagaggtgacaccctaaagcgtttag

SEQ ID NO: 345717 - DNA, 574 bp, Homo sapiens
gttcaaataaaatattaaggcatgtgtgacggttaatttcaggtgtcaactggatattaaggaatacttaaaaagttggtaaattattacttctgggtgtttctgtgaggacatttccagagggacctggcatgtgagtcagtggactgagtagggaagagccatcattaaggtgggtgagtgccatccaattagctggaggcccagatagaacaaaaaggcaaaagaaaggtgaattctctccctcactctcctggatctgggacactcatcttctcctgcctatagacatcagaactccaggctctctggtctttggactctggggacttaacactagcagccttcagccttggactgagagttacaccattggcttccctggttccaaggcatagcttcacgttggggcaggccatcasaaagaccaagcacaggattagagggttggaacttccagtgcctggatgggtagagggaggggagctggacttggactgaggcatgctaccagcatcccagggtttccagcttgcagactgcctgtcatttcttagcctccatcatcacatga

SEQ ID NO: 345718 - DNA, 562 bp, Homo sapiens
atcagaaagaccaagcacaggattagagggttggaacttccagtgcctggatgggtagagggaggggagctggacttggactgaggcatgctaccagcatcccagggtttccagcttgcagactgcctgtcatttcttagcctccatcatcacatgagccagttcccctaataatcccctctcatccatccatccatccgtcaatccatccatccatccatccattcactcatcctattggttctgtctctctggagaactctgaataacactgcatgtttcatctttttaaaacaataattccttctccaaatgactttttctgttaatcagacaactaatgatctcaatcatctatatgagagagcatctattaaaattaaaagtcatgattaactccagctcagtcattctcaaaaaggtcccctataatagggaatattataagcagccggaattatgcaacctaaytgaatattgtgcaaatattcaagactgaccccactttagatgtcaggccatctgcacttctgaccaacttgactacaaattcaggggttcc

SEQ ID NO: 345719 - DNA, 559 bp, Homo sapiens
actgtgtttgcttagtgagtgctcaaatgctagttatccttatttagagctgycttcttcttttgaatgttatctgttttgtagaggttcctgtactgttcatatttatggaaatttaggttttctgtttttttttctgttataaatgattatgcaaaatatgcatgttgtgattgtgtgttttggtggtttatgttatttttaacttagggtaaattttttgaagagcagttgttgcatccaagtttgatcccatgttttctgtcccctatgatggctgaaatttataggaaccctgcaaatactcttgactaaatagcatacgctgttttagttctaattttctacaataaacctggtaatttcaaaaatactaactgagtggggaatataacatctactacaggagtctctctgaggcttaaatttgagataacatttgtgaaaatgataaaattgtatgtacaggcggctatacttgtactttgccggcagaaatgaattgtacttaacacagatgcgtttgaaaaatgatttgcctgcattgcctaagttctga

SEQ ID NO: 345720 - DNA, 408 bp, Homo sapiens
agattttggaaaagtctcctttgctctggaaagtcttatttgttgtttagaaagcatttgcaagaaatagtgggaggcttgtctttcaagkggcactttcaaaggctggttggatttgagctagagaaatgaacatgtgaacatgttgctgttttctgccctccctgcaagtgtcctgtggtcattttacaggcttttcaagtaagtgttgccccgtggaggacagtgatttctaactatgcatagtctatatgtttgagctgttgccggctaaacatatccaataggaaataatacccaaattgaaagggagagagcagctattaatatgaattacttgtctagttagttgctttcaggataccatctagaaattggaaacattcacagaatggctaggtcagcatt

SEQ ID NO: 345721 - DNA, 408 bp, Homo sapiens
agattttggaaaagtctcctttgctctggaaagtcttatttgttgtttagaaagcatttgcaagaaatagtgggaggcttgtctttcaagtggcactttcaaaggctggttggatttgagctagagaaatgaacatgtgaacatgttgctgttttctgccctccctgcaagtgtcctgtggtcattttacaggcttttcaagtaagtgttgccccgtggaggacagtgatttctaactatgcatagtctatatgtttgagctgttgccggctaaacatatccaataggaaataatacccamattgaaagggagagagcagctattaatatgaattacttgtctagttagttgctttcaggataccatctagaaattggaaacattcacagaatggctaggtcagcatt

SEQ ID NO: 345722 - DNA, 349 bp, Homo sapiens
cactggtactggatgtggggaaagttaaaagggcatggggactactgggaagaaagtaatgatattaaatatgcttgtccatttatacctttaatccaagtgcatggtatcattgccaccaaggtgagttgatcaaccatggaccctggaaaggctgtaaagtaggttgaaaaggctgctgacagtttttactatattgatttaaraatacctccttcctggggaaaaaggcatataggtcacaggaaactccagttatatcttgtgtctaaagaactaaaaaatgaaagcaagaccatcattttttattcgttgatacatagctatctgagagcagagaagacactct

SEQ ID NO: 345723 - DNA, 572 bp, Homo sapiens
tgacagtttttactatattgatttaagaatacctccttcctggggaaaaaggcatataggtcacaggaaactcyagttatatcttgtgtctaaagaactaaaaaatgaaagcaagaccatcattttttattcgttgatacatagctatctgagagcagagaagacactctctgattcattgtctctcatcccatgcctagccttagagccatgtatgaggtaggacatcaggaaatgctggacaggttaatttcgtgtgtgttctacttaagtatggagaagatagattctcacaggtgttgccaggtggtatagtgtgacagttaatgttgcaggcactggagtcagactctgtattccaagcttggttctgctatttaatagctgtggaaactcctcaactataaaatgaagataataatagcatctaccttttaatacatttatgaggattaaatgcattattgtatgtaaagtggatatagtaaatgctacaaaagtgatagctgttagcagcagtaatatttatctttttgagagctgttcttagcattaggtcttgacgcaaagta

SEQ ID NO: 345724 - DNA, 572 bp, Homo sapiens
tgacagtttttactatattgatttaagaatacctccttcctggggaaaaaggcatataggtcacaggaaactccagttatatcttgtgtctaaagaactaaaaaatgaaagcaagaccatcattttttattcgttgatacatagctatctgagagcagagaagacactctctgattcattgtctctcatcccatgcctagccttagagccatgtatgaggtaggacatcaggaaatgctggacaggttaatttcgtgtgtgttctacttaagtatggagaagatagattctcacaggtgttgccaggtggtatagtgtgacagttaatgttgcaggcactggagtcagactctgtattccaagcttggttctgctatttaatagctgtggaaactcctcaactataaaatgaagataataatagcatctaccttttaatacatttatgaggattaaatgcattattgtatgtaaagtggatatagtaaatgctacaaaagtgatagctgttagcagcagtaatatttatctttttgagagctgttyttagcattaggtcttgacgcaaagta

SEQ ID NO: 345725 - DNA, 603 bp, Homo sapiens
gctttttgggcaggggccgccccccgtcaccttgggcttcccctaccctgaagggcttgggcgagttgtggccccagcgggttcgggggcgtgtgacggcgttagggaggggcaggccgggctgggcggatgcaggccggcccggcatagggcgctttctccgcgcttcctgggggtgaggggcgtggggcgagggcagggctgtggctccctggccccggggctggaatgtctcatctgcctggggatgggcttctctcaggttgaggccgcgcactgccaagcctcggccgccggcctctgaagcygttgcgagcggccggttgcggtagtcgtctgcttggctgcgaggttgggtgtgtgcagatgatttctctttcccagtccccatgagctgatctgggtgcacgttcagggaaagacgggactaaactgcttctcatttccctacctgttgctggcgagaggacgcctctgtgttttaaagaaaagggtggttaaacctcgcgcgctgaagtcggggtattttcctgtattactcttattttgtttttaaatatgggaagacaatgcagaactcttgggaattatcgagttctgata

SEQ ID NO: 345726 - DNA, 549 bp, Homo sapiens
ctaggggatcttttgttacagtggcttagcctttatcctaactaatacaatgctcagtaaatatttgttaaatgaatgaagtgtatgtttctgcaaatgctgtcagaatctcattttatctctctgacaagactgcacctttagtgcagggaccctatctttgtttactgtccccaaagcacccagattggtgacaggatcttgttgaattgaattaaatagaagaaacttarttctgactagatgagtctccctaaaccagccattttagtagtctactttgccagaaggggagaaagactgtctccctagactggtaatagttaaagagtttaggaagtgtttgacggtcttcggatgagaaggagaagcacaaagtggagacaccaggactaaggttaaaaacctcatggatgagtcgagaaaagttacagaattacagctggcagagctcaagcatttgcacagcaatgaaaagtcacaggggagaaagggaatcctctctatggagagaagcacgctggcagtggaagtgcatcagatttaaca

SEQ ID NO: 345727 - DNA, 549 bp, Homo sapiens
ctaggggatcttttgttacagtggcttagcctttatcctaactaatacaatgctcagtaaatatttgttaaatgaatgaagtgtatgtttctgcaaatgctgtcagaatctcattttatctctctgacaagactgcacctttagtgcagggaccctatctttgtttactgtccccaaagcacccagattggtgacaggatcttgttgaattgaattaaatagaagaaacttaattctgactagatgagtctccctaaaccagccattttagtagtctactttgccagaaggggagaaagactgtctccctagactggtaatagttaaagagtttaggaagtgtttgacggtcttyggatgagaaggagaagcacaaagtggagacaccaggactaaggttaaaaacctcatggatgagtcgagaaaagttacagaattacagctggcagagctcaagcatttgcacagcaatgaaaagtcacaggggagaaagggaatcctctctatggagagaagcacgctggcagtggaagtgcatcagatttaaca

SEQ ID NO: 345728 - DNA, 569 bp, Homo sapiens
agaattacagctggcagagctcaagcatttgcacagcaatgaaaagtcacaggggagaaagggaatcctctctatggagagaagcacgctggcagtggaagtgcatcagatttaacaacattgccacacacacacacacaaaatcctgtactgctgagaactcgttagttacatcggatgtgacatatgggggggtaatatagtctggagcctagatttctttaattaaccaatagcaatcaggagtgagggcaattccaggggaatggtaattgtctggaagttctggatgcctgcaggctgagccgcaggccaaaaacccagccagctctgtccccgggaagcacgctgagccaaggtcacaactgccattttaaacagggtcttttttcaaaaacgtttagatcacagctgattgttgtgggtgaggatttcctctgtgatacatacaaccttgggagastgtgtgtgctgtttggggcatcccaaagtaccacagtagtgaacatacaacctgttggggctctagggaccaaattgttcagtcgctgggtgatcagtgactggga

SEQ ID NO: 345729 - DNA, 569 bp, Homo sapiens
agaattacagctggcagagctcaagcatttgcacagcaatgaaaagtcacaggggagaaagggaatcctctctatggagagaagcacgctggcagtggaagtgcatcagatttaacaacattgccacacacacacacacaaaatcctgtactgctgagaactcgttagttacatcggatgtgacatatgggggggtaatatagtctggagcctagatttctttaattaaccaatagcaatcaggagtgagggcaattccaggggaatggtaattgtctggaagttctggatgcctgcaggctgagccgcaggccaaaaacccagccagctctgtccccgggaagcacgctgagccaaggtcacaactgccattttaaacagggtcttttttcaaaaacgtttagatcacagctgattgttgtgggtgaggatttcctctgtgatacatacaaccttgggagactgtgtgtgctgtttggggcatcccaaagtaccacagtagtgaacatacaacctgytggggctctagggaccaaattgttcagtcgctgggtgatcagtgactggga

SEQ ID NO: 345730 - DNA, 558 bp, Homo sapiens
cccttcccctgcatttatgtactggaaaagtcaaactatagaagtaagtgaagtttggttagtatcatagctggtgtcctcaagaaaacagaggctgaggccagcttgctgatgctttatgaggcaagtgacaggacagtaggagtgaagggaaagaagaagtgaggcagggaaaaaacgaaaatgaacacaaggtggtacatttcacaaaatgcacagctgaccactcagtcatcatggacttcttcaaagaagctatgaaaccactgcatttgaaaccagccaatgagagtgaagggccctgataccagtcccttcctaccacttgtctctctcttgtcacagctcactccagagtggtgttaattcccccacatatcccagctgtgttccttacctctccaggagcttttagagaagccaagtcttcataatttkaaactagtgctggagaccctgcagtgggtaagaagaaatcaggctgaagcccagtgaaactagcgaagtggcacttcccaactgcagaaagcaaagcagtggctgaagccgctctgacta

SEQ ID NO: 345731 - DNA, 634 bp, Homo sapiens
ctgcacttgctctactatatttcttagagtagatacacatttttcttgtactcatgtctctgtcaaacacaggaaaataaaggaaaagacagccatgagttttaggaaatgtgaaagagtgaaattctcagaggatacacttgtatatttaaatatgcaaacatttagctctgatttatggtttctgctgcccacccagcccttgtatgcatctgcattggcaacctctaatctggcctttggtaagaagcattacaaagaaaaaatgtttcactttgtcatcccattacctgtagaagttcatggaacccatcagccttggtctcctggacaaacaggctcagttagcatcctcacctgttyagggaggaggccatgattctatgacaccattgcacagtgtagactaccatgtcagtaaatagtatctgctccatttattggattatcacaagtacgggtgataataccacaaacctcaagacagctggctccatcaaagtctgtgcagccatgtggtaccttcaaccagttctactaaaccttggccacaccttggaaccacctggggagctttaaaacatatttttgcctgggtcacatccccaaagattattccgatttaatcagcctg

SEQ ID NO: 345732 - DNA, 634 bp, Homo sapiens
ctgcacttgctctactatatttcttagagtagatacacatttttcttgtactcatgtctctgtcaaacacaggaaaataaaggaaaagacagccatgagttttaggaaatgtgaaagagtgaaattctcagaggatacacttgtatatttaaatatgcaaacatttagctctgatttatggtttctgctgcccacccagcccttgtatgcatctgcattggcaacctctaatctggcctttggtaagaagcattacaaagaaaaaatgtttcactttgtcatcccattacctgtagaagttcatggaacccatcagccttggtctcctggacaaacaggctcagttagcatcctcacctgtttagggaggaggccatgattctatgacaccrttgcacagtgtagactaccatgtcagtaaatagtatctgctccatttattggattatcacaagtacgggtgataataccacaaacctcaagacagctggctccatcaaagtctgtgcagccatgtggtaccttcaaccagttctactaaaccttggccacaccttggaaccacctggggagctttaaaacatatttttgcctgggtcacatccccaaagattattccgatttaatcagcctg

SEQ ID NO: 345733 - DNA, 566 bp, Homo sapiens
tagagcagagaagagaacactcagggcatgaatttgtgctccacagagttctttgatgagtcacaactttactctcctttgagacctttccaggctttagcatgayatcctccattacagtgctgaggttttacagctgcatgcctgcctttttgaggttttttttttttttgtcccacctcttgatatccacatgtcaactatcactttttctgttgttattatacttgacattacctccttttacctttttatgtctaattctgttctgggctgataaatcagataatcaagtttgttgaaagtagacctaccattccatccagctgggtatctacctaaaggaaaagaagtcattatatcaaaaagacacctgcacatgtatgtttatcacagcacaattcacaattacaaagatatggaatcaatctaactgctcatcaacaaatctaaggccaaagaaaatgtacatatacaccatggaatactactcagccataaaaaagaacaaaataatgtttttgcagcaacttggatggagctggaggccgttattcgaagtgaag

SEQ ID NO: 345734 - DNA, 521 bp, Homo sapiens
tggtgaatgatagaaccttgcaccgttcctgtggaacctagccttcaggtgggtctcttgcctttggtaatatatccattctagcataacaaatgacctcagcctctttgttcctttctctgttagctgttagggtagctcaggtgttctcactcactgagygtaggcctttgctttcctaagatgctaaaaactaccgtaagatgaagtttgcttcatcttctgaacactaagttgttaaattctgcatccccaagaaataatccaaactgaaaaaaattcttgcttatctagtcttacactcaagcccccttagtcaagtctgctcaaattctaacctgggggttgtttttgttttctgaatcttacctgtataaacaagctaattcttgcaactcttttgtcatatagtctgtttcattatcacttatgaggccagcacctctctggccaggttggagagagattgttgtgctgaacgtttattaacatgaatagggaaggtaccaggttcaagaggc

SEQ ID NO: 345735 - DNA, 486 bp, Homo sapiens
gtttgcagtcgtaagtcactgacatttgggagttgtttgttacacagcatgattacaggaaaaactaattaatacacagtccctaaggaacacttctgagggataaaccagtggggaacaaataagtgaaagtaaaacttactctcaagagactmagcttagctccaaatataattcacagtaaatcagtggttctcaaaatgtgtaccccagcccagcagcatccatgtcacctggggatttttaagaaatgcaaattctggggcctctccccacacctactgaatcagaaactctagaggtggggcccaacaacctgtatttctataagcgctagaggtgattctaataatccacccttaagtttgagaacctctgcagttactgctgaactagaacagcttccttcagtctaggaatcattcatttcctgaaatgcagacattccagaattttaaatgataaagcccaattaacctaatgcct

SEQ ID NO: 345736 - DNA, 526 bp, Homo sapiens
attatttgtaaagttatactatacaaattactattcgtatgatcaaagcaaattctcttggttaaactgtgttccttggatgtgaacttaagtttccctgcttttcctccctgaggtgagaaaggaagtctagtcagagacaaagttgtctaacttatcttcctttgcwgaccatacatttgttgctaaacactttgggagtatttcacaatggctgctattcccctcaccctgccagaagtggaagggtttttcttgtatctttaccatcaagacctcaggagtaataggaggtaaattccataaaagtatagagctttgtaagactgtggccccaagaaatttttattcttacaagattatataccacccctagtgatttgtcaaagttaccattcagtcccatcagatccactaacttctgctccctgtaagctgattttggctatgattctctgtattctagattttcagctggtgtttttccctgtgacttcaattttctgagtccataaaaagtctttga

SEQ ID NO: 345737 - DNA, 526 bp, Homo sapiens
attatttgtaaagttatactatacaaattactattcgtatgatcaaagcaaattctcttggttaaactgtgttccttggatgtgaacttaagtttccctgcttttcctccctgaggtgagaaaggaagtctagtcagagacaaagttgtctaacttatcttcctttgctgaccatacatttgttgctraacactttgggagtatttcacaatggctgctattcccctcaccctgccagaagtggaagggtttttcttgtatctttaccatcaagacctcaggagtaataggaggtaaattccataaaagtatagagctttgtaagactgtggccccaagaaatttttattcttacaagattatataccacccctagtgatttgtcaaagttaccattcagtcccatcagatccactaacttctgctccctgtaagctgattttggctatgattctctgtattctagattttcagctggtgtttttccctgtgacttcaattttctgagtccataaaaagtctttga

SEQ ID NO: 345738 - DNA, 526 bp, Homo sapiens
attatttgtaaagttatactatacaaattactattcgtatgatcaaagcaaattctcttggttaaactgtgttccttggatgtgaacttaagtttccctgcttttcctccctgaggtgagaaaggaagtctagtcagagacaaagttgtctaacttatcttcctttgctgaccatacatttgttgctaaacactttgggagtatttcacaatggctgctattcccctcaccctgccagaagtggaagggtttttcttgtatctttaccatcaaracctcaggagtaataggaggtaaattccataaaagtatagagctttgtaagactgtggccccaagaaatttttattcttacaagattatataccacccctagtgatttgtcaaagttaccattcagtcccatcagatccactaacttctgctccctgtaagctgattttggctatgattctctgtattctagattttcagctggtgtttttccctgtgacttcaattttctgagtccataaaaagtctttga

SEQ ID NO: 345739 - DNA, 523 bp, Homo sapiens
ctcagcatttatcatttcctcgtgttaggaacattctaattatattcttttcgttcttttcaaatgtactataaattattgttgactgtagtcacactgttgtgccatctttactagatcttattcattctatgtaactatattttttcatccactaaccatccccactttacgtctcccctctccattgcccatctcagcctctagtaaccataatatacttaatagagtactagtcagccataaaaaaatartaagattcagtcatttgcagaacatggatggaactggaggtcagtatgttaagtgaaataagcctgggacagaaagaaaaatttcacatatcctcactcatttatcggagctaaaaaataattgaactcatagagagcagaatgatgataacatatttttgaagttgaaggtttcatacatgacttttcctaattacatatttattattcaaaagccttccagataataaaaatggagaaatatttttaatttttatttaagaccacaa

SEQ ID NO: 345740 - DNA, 521 bp, Homo sapiens
tgtaccttttcttcttatatttctatatctgatctattttgagttaatttttgtatgtgatatgaagtatgagtacaacttccttctgtgtgtgtgaatatccaatggactcagcaccattgattgaaaatactgttctttccctgttgaatgccttcgcactcttgtcaaaatcagttaaccatgtttgtttgttttctctggactctcaactctactctattgatttgcaagtctatcatatgctgctgccatactacctggcttactgttactttgttacaatttttgaaagcagaaagagtagttcctccatctttgttctttttcatgattttttaggttattttgagtactttgagttcytaaattaaatgtagaactgccaatctttacaaacaagcctgctgagattttgataagaattccattgaatttgtagattaatttggggaatactgccatattaacagtattaagtcttaagttacattaacatggatgccttccatttatttaga

SEQ ID NO: 345741 - DNA, 541 bp, Homo sapiens
aaacataatatacattataatatattttttttaagtgtacmtgtatgatacaaagataactttggagaaaatcatcttggcttgcaaaaaataaggttacgttccctccttttcctccttcattcctcctcaccctcttccttatactattattattagtatcactgtggttattactgtttgattgttctgctcaactttaatgcaaggcaattatggaagactatgaaaatcaaattattaaatttattaaaattaaattatcacattaaattattaatcctaaatatttaaactgtgataggtttgttggatcttttttttttataaaactacttgtaatatctatgataaagaaggaccatttatcttttagcaatggcaaaagtgatttattttccacacgaggttaaaagctaacatttaatttctcatttgaaaatttccagtgctttggaaaataaacatgcctgaccttaaaaatttttgcttgttttagtgtatatatatatatatatatatgctttactatatatgtaag

SEQ ID NO: 345742 - DNA, 537 bp, Homo sapiens
agtctatatttgttaaattgcttgtaatgttagttaatttttacaacctcatacactgttatttgttttctaatgatttttatttaatatttctcattcttgctatataaggaaaaataaaacaaagaaaaaaattaaaatcaagttccctgagtcataaactctgtcactggtgtccagtaatgctttaagatcacaaggataatttgtatattcctggaaggtatgaaacactaatctcagggctaaattatattacttaacattttacaaaaaatttataattattgatgtcgaatttctgtggggtctatagatctttatgctgccatttcataaatgaataacctgaagcttccttctatgacattcyaaatcccacacataagtcagtggaatggagccagaggaatgttagacagttttgaagtccagtcacaatgcatagtgaaatatctcctcactcaatccattagcaacattgcctcaaatttaatgaagtaatctcatgtagaaagtaaaacttttgttaaagta

SEQ ID NO: 345743 - DNA, 519 bp, Homo sapiens
tggcattattaccattactattagtttatttactatgcagtttgaaaacaaaatttaccttgtgtttcaattacttggagaaaaccttttttgaaagttagtgaagttgtagaaaagtctcattagaatgttaaatattaatgacatctttaaactccatgcttaagagttagggaaataagaataggaatacaataatttgcaaatgtaaaactgaataatytgaactttttaactctgggttctgtgtccaacattatgaccttgaatgatgtgagaaaatacatttcttgctttctttttttgcataatttggaatttaccgttaacctaggtcattgagatgctgggggttagtgaccaaaatgttcataagaaagatgatggcttgggaagttgaatttaactttttctaaggatgtagtttttttttttttttttttttaattacttaaaaacacaagttttaacatagaagagaaaggaaacatgtctttcaggaaatttgtaagtaacaga

SEQ ID NO: 345744 - DNA, 519 bp, Homo sapiens
tggcattattaccattactattagtttatttactatgcagtttgaaaacaaaatttaccttgtgtttcaattacttggagaaaaccttttttgaaagttagtgaagttgtagaaaagtctcattagaatgttaaatattaatgacatctttaaactccatgcttaagagttagggaaataagaataggaatacaataatttgcaaatgtaaaactgaataatctgaactttttaactctgggttctgtgtccaacattatgaccttgaatgatgtgagaaaatacatttcttgctttctttttttgcataatttggaatttaccgttaacctaggtcattgagatgctgggggttagtgaccaaaatgttcataagaaagatgatggcttgggaagttgaatttaactttttctaaggatgtagtttttttttttttttttttttaattacttaraaacacaagttttaacatagaagagaaaggaaacatgtctttcaggaaatttgtaagtaacaga

SEQ ID NO: 345745 - DNA, 621 bp, Homo sapiens
ttcttttacatctttggtaactttagggattaaacagattagaaaattttttcaatatatactgcaaaatcaaattgggtctttattttactagctccgtggccttatgtaataaaataacaacaaaatcaatcaaacaaacaacaaaacaaaacacaaatgtgtatatttgaaaggtatgtgtgagaaatttctcttctaaactctattttttcttatctaaagacaacagatttgttaataatttctgcttcttcatcgaactacctgtatatwtgtgtgtgttttccctccagtaccaaatccctacagaggcatttcctataagccagacttgggataaaggagagtagcaaatggagccatttgcccttggggccaagctcattttaccaatcacaaaatacaaaaatacaaaaaataaaaaagaacaaaagactttgtgttaaatatttttaaaatggttaactgtgtttaaaatgattaaaattatttgagtgaggagaggtgaatatttcagaaccctcaaagcacaagtcctttgaacttatttatttagctttgtagagttttgtgctttcagcaatttataggtatagaatcacatacatggctgctcat

SEQ ID NO: 345746 - DNA, 568 bp, Homo sapiens
cccccttaaaccttgaaagctcagtttggatatcacttcttttgggtagcttttctgcttgttgcataacaaaactgtcrttctaagatttcaatagcttctctgatactatagcaaaattcaaagtccctttttatgctcacaagactctttaagatcttttatcaacaattctgtctctctccactccccagcttgcatgctgtttcatccttgtgaaggcagtatggcttaatggtcaagactgcacaatctgaaactaaactgctcggctcacctcaggtatttagtagcccagtgaccttgggcaagtcaccttccttttatttctcatgttcctcacctgtaaaatagatgtaaatatggtcgcctttatgatagggtgggtgtgtgtgtagtgttcctgtaatccttttctcagtctctaattattctcataccccctccctctattatatagcgttatgaattttagaggttatgtatggggaatccttgatcccataaattctgaaaaagctttaggcacatgaatgttctcaataaatatttcgtgtttaaatgactc

SEQ ID NO: 345747 - DNA, 568 bp, Homo sapiens
cccccttaaaccttgaaagctcagtttggatatcacttcttttgggtagcttttctgcttgttgcataacaaaactgtcgttctaagatttcaatagcttctctgatactatagcaaaattcaaagtccctttttatgctcacaagactctttaagatcttttatcaacaattctgtctctctccactccccagcttgcatgctgtttcatccttgtgaaggcagtatggcttaatrgtcaagactgcacaatctgaaactaaactgctcggctcacctcaggtatttagtagcccagtgaccttgggcaagtcaccttccttttatttctcatgttcctcacctgtaaaatagatgtaaatatggtcgcctttatgatagggtgggtgtgtgtgtagtgttcctgtaatccttttctcagtctctaattattctcataccccctccctctattatatagcgttatgaattttagaggttatgtatggggaatccttgatcccataaattctgaaaaagctttaggcacatgaatgttctcaataaatatttcgtgtttaaatgactc

SEQ ID NO: 345748 - DNA, 572 bp, Homo sapiens
gaaatatttttaggatgctagcaaaacacatataagagtatacgtgtttcacagtatccatgtattccagaattatcttgctgtataaaagtattttactatgtaagaaatgcaaataataaaygaaaaggtgactaatgcttcctcactatagatatttggcattatagggcattcaggaaatgtactaatattactaaatcatttgttctgtagaaacccagatatttcactcttgtcttacattctcattgtcttccatctttgttttatgtacctattgtctttttccagagtactttagccactaaaggctagaaaaaggcagttcctcactagcagacattaagccctgagcagcaagaatcacaggcaatacatgggttgcagagcagtattgccacaaagagggatgtggggatggtagggatttcatttctctagagcaataagctcaacgtaaaatggttcccaattcttacctaaagactgtgcaccatcatcgtctctcataacatcactaaacagctaaatagtgtcattcacacccttcccaactgaaataatgccaa

SEQ ID NO: 345749 - DNA, 616 bp, Homo sapiens
ttcaataattgctatttaaaataatgttttaataaaatttacagacatttagatatgttacatataaaggtttcttatattaatataataaattccatatttttgaaattcaggatatacagcttactctattttgactktaaatattcaattatttctgaaatagtgtgttaaccatctcttaaaatgtagccaatattaactgtaatacacaccagacactttgaagaatttctttaaatttaaaatattttagaaaaatttttgtaatggaaaagctaagaaaaatttaaatattttaagaatagccattctaaccagtttgaggtaatatttagttatggtttaactcacacatatttagttatggtgattagtgataagtgttggcaaggatgtggagaaaagataactcttgtgcactgttggtgggaatgttaaattattatagtcattatggaagctcctcaaaaactaaatatagaattgccatatgacccagcaaatttacactactggttataatatatccataaagaaagtgaaatcagtacatcaagaagataagtgtactcacatgttcattgtagcactatttacaatagccatgatatgg

SEQ ID NO: 345750 - DNA, 616 bp, Homo sapiens
ttcaataattgctatttaaaataatgttttaataaaatttacagacatttagatatgttacatataaaggtttcttatattaatataataaattccatatttttgaaattcaggatatacagcttactctattttgactgtaaatattcaattatttctgaaatagtgtgttaaccatctcttaaaatgtagccaatattaactgtaatacacaccagacactttgaagaatttctttaaatttaaaatattttagaaaaatttttgtaatggaaaagctaagaaaaatttaaatattttaagaatagccattctaaccagtttgaggtaatatttagttatggtttaactcacacatatttagttatggtgattagtkataagtgttggcaaggatgtggagaaaagataactcttgtgcactgttggtgggaatgttaaattattatagtcattatggaagctcctcaaaaactaaatatagaattgccatatgacccagcaaatttacactactggttataatatatccataaagaaagtgaaatcagtacatcaagaagataagtgtactcacatgttcattgtagcactatttacaatagccatgatatgg

SEQ ID NO: 345751 - DNA, 616 bp, Homo sapiens
ttcaataattgctatttaaaataatgttttaataaaatttacagacatttagatatgttacatataaaggtttcttatattaatataataaattccatatttttgaaattcaggatatacagcttactctattttgactgtaaatattcaattatttctgaaatagtgtgttaaccatctcttaaaatgtagccaatattaactgtaatacacaccagacactttgaagaatttctttaaatttaaaatattttagaaaaatttttgtaatggaaaagctaagaaaaatttaaatattttaagaatagccattctaaccagtttgaggtaatatttagttatggtttaactcacacatatttagttatggtgattagtgataagtgttggcaaggatgtggagaaaagrtaactcttgtgcactgttggtgggaatgttaaattattatagtcattatggaagctcctcaaaaactaaatatagaattgccatatgacccagcaaatttacactactggttataatatatccataaagaaagtgaaatcagtacatcaagaagataagtgtactcacatgttcattgtagcactatttacaatagccatgatatgg

SEQ ID NO: 345752 - DNA, 533 bp, Homo sapiens
taagctgaaatcagttgatgcctgcccacagagggagtatttaaatcagctctagccagagggaaattgtttatctcagcagtcagaacttgagtttgagcaagacctgccaccatggtcaaaagtgcactgggacctaaataaacttcaaatgcagtctaggccacaaggactacaagtcctagatgagtcctactgctgaattgggctcagagccagaggatgtgggtggtatgtgactaytgaggcatcaaacagggtggatgagggagtgctatgtcaccccttttccaaacccaggcttcagagctcatgcctccaaaggagatgcctacctttcaactgaggagatgagaaggaagaataaagagaactttgccttgcatcttggatacaagctcagccacattaggatagagcactaggcagagtcatgaggccccttttccaggccctagctcccagatgacatttctagatacaccttggccagaagggagcccactgcctttaggaaaaggactttgtcctag

SEQ ID NO: 345753 - DNA, 533 bp, Homo sapiens
taagctgaaatcagttgatgcctgcccacagagggagtatttaaatcagctctagccagagggaaattgtttatctcagcagtcagaacttgagtttgagcaagacctgccaccatggtcaaaagtgcactgggacctaaataaacttcaaatgcagtctaggccacaaggactacaagtcctagatgagtcctactgctgaattgggctcagagccagaggatgtgggtggtatgtgactactgaggcatcaaacagggtggatgarggagtgctatgtcaccccttttccaaacccaggcttcagagctcatgcctccaaaggagatgcctacctttcaactgaggagatgagaaggaagaataaagagaactttgccttgcatcttggatacaagctcagccacattaggatagagcactaggcagagtcatgaggccccttttccaggccctagctcccagatgacatttctagatacaccttggccagaagggagcccactgcctttaggaaaaggactttgtcctag

SEQ ID NO: 345754 - DNA, 533 bp, Homo sapiens
taagctgaaatcagttgatgcctgcccacagagggagtatttaaatcagctctagccagagggaaattgtttatctcagcagtcagaacttgagtttgagcaagacctgccaccatggtcaaaagtgcactgggacctaaataaacttcaaatgcagtctaggccacaaggactacaagtcctagatgagtcctactgctgaattgggctcagagccagaggatgtgggtggtatgtgactactgaggcatcaaacagggtggatgagggagtgctatgtcaccccttttccaaacccaggcttcagagctcatgcctccaaaggagatgcctacctttcaactgaggagatgagaaggaagaataaagagaactttgycttgcatcttggatacaagctcagccacattaggatagagcactaggcagagtcatgaggccccttttccaggccctagctcccagatgacatttctagatacaccttggccagaagggagcccactgcctttaggaaaaggactttgtcctag

SEQ ID NO: 345755 - DNA, 561 bp, Homo sapiens
aatgacttaaaaacaaggtaggatagaagtttccagcactcactcccatggagaaacattaatttaaacaactattcatgcatgaaaataccatcacaagagctaaagccagatgagaaattatagtacctaaatatagcacaggaatttaaaaatatctttgaagaaggtaggaaggacagcttcatgttacttgtgtcatacttcccccaagattatgcagtgaaactcaaacaaaaatatgctccatgtgaaacgaaagtgaagtgagaatcaatctttcccacaaaccacagctccaggccagccccaatagtgccaggcactaggtccatccccacatacatcgtcattaggccctttagagaataaggatggcacttaygtactcaaagtcaatgcctgctccagcacaaggttgctctcccttagacttagacctttcagaccaaccattgtgatctcaagctacaggcccaactccctggaactagtcaccaggcccaacccagtggaccccagaaacagggcagtacagctgaacccaggacccagacctga

SEQ ID NO: 345756 - DNA, 579 bp, Homo sapiens
tctctctgtttttctttgtttctcatccatagcttttactaaacactaaatgcatcaaactactgattaataaatttcagggagtgttttcctttgagaatatgcaaaactttgaagcaaacagcacacgtgtttaaaaatagcccyttgggaacaagagaaacaaaacaaaacaactatgtcttcagtcttgtatgaatagaagcaatgtataatatttcagtagtctggaaatcatttaacttggcaactcgaaacagctggaacagagctaatgattggaaaataataaaaattgtaaaaaaaagttagtgtatatatgtgatagacatcaagaatctatggactaaaattcttgtactttactgacaagagatttcttcagactgaaaaagaaagcagaccatctagcgggttttattcattacacaaacataaacatagcaacttacttgaataactggcaagctaaaacttgtctgatgatatcagagctacttatatttcttatttccatcttctgtgtctttgttgttgattagaaagatttctcttttcatattaggttatgatcaggta

SEQ ID NO: 345757 - DNA, 528 bp, Homo sapiens
ttgttgtcctcaatgaagaacatgatgtatacaaatacatagattaaaaaataattttctcggttgcatgggaatgtaaagtttggagaaaaaatattcagctctgtcactatagtaatctgatgactggaattcaattattgtttaggcaacctatttataacaaataaatgattcctaatagaaaaatgtcatctagtctatttggaactatgaatgaactttaaatacccagtgtggacactatagcattgggtatctctgaagacataactcttatattgagaagggtaaatagatgctgtacaaagaaatgttaaaggtgatatttattgctatgggaaataaaggttttaatccagaggatgttatgtgagggcagctcccacacctgcccaatatgcatctcctctattcayacctggactgttcgctgaggagagactagctcccaaactgtcctagagactactttaggaactgctgccaccagggttcttgctgaaagaaatgcctggcaatgctata

SEQ ID NO: 345758 - DNA, 480 bp, Homo sapiens
ttagttgtttcttctcatttattccattgaatcctcagaaaatatgttgtaaacacttctgggaattacatgttgcacttgatgacccaagtagccttacagggtagggtgttctaaaggttaatggatttttgtgtgttgattgatttttttttaagaatcaaagggaaaccatttcaagtgtcatcttcctttctcattttctctaaaatctatatttataacatattcatttgaatattcatattttattctattgctgagagtttttaaaagtttctcaaattctttaactgttaaggttaggtgaggcatgtatgttaatcttgataagattaaaycaaatgtttgtttatattttacttaaaatttatggttatagaaataaattccaagactatttttgtcataacattaatgactatggtttaagtcacactactagagagcctatatgcataagatgcacatttttttgca

SEQ ID NO: 345759 - DNA, 551 bp, Homo sapiens
agcctgctggctaaatttacataagtaatgaggagccaaatgttaatcaccaagacaatgaagaaaatgtctccagagcatgtcagatgtcttcaaggcagctcgtcccatcaaaggcctggaggcctaggaggaaaaataggcttcaagtgtcaggcccagggccttgcttcttcatacagcctcaagactcggtgccctgcatctcagccatggctaaaaggggtcaaattaaagttcaagcactcacttcagagggtccaacccccaagctttagcagctttcatgtggtgttgagcctgcaggtgcactgatgtcaagaattgaggtktcagaacctctgcctagatttcagaggatgtacagaaacacctaaatgtccaggcaaaagtttgatgcagggatggagccctcatggagaacctgtgctagggcagtgtgtaagggaaatatgggtgagagcccccacacagagtctccactggggcactacctagtggagctgtgagaagatggccactgtcttacagatcccagaatggtagattga

SEQ ID NO: 345760 - DNA, 616 bp, Homo sapiens
attggttttgaaatgtgagaacatgagatttgggaggggctggggtgcaatgatatgatttggctgtgtctccacccacatctcamtttgaactgtaataatccccacatatcaagggcaggcccagatggagataattgaatcatggatgtggtctccccatactattctctcctggtagtgaataagtctcaccaggtctgatgcttttataaaggggagttcccctgcacaagctctctagcctgctgccagtaagactttgttcctcatttcccttccaccatgattgtgaggcctacccagctatgtggaactgtgagtcaactaaacctctttcatttataaattaaccagtctttggcatgtctttattagcagtatgcaaacagactaatacaacaggcttttttttccctttattttatattttcctgcaagataaatattgactttcaaataattttttaaagttatttttaaggtttttttaaaatttaaaaagatttcctctttagtttttgttttaaagactcatttaaaatgactttataataaaccacagggacaatagtgctaaaataacagctagactcttcttcttccactttgtgaa

SEQ ID NO: 345761 - DNA, 639 bp, Homo sapiens
ttcttctaattccaaaagatttcctccacatggaagtgagcctttatttctgtagagaattaatgtggagcaaatgtttcatcctagtgtttaatcatttaaccctgcagctacagcctttgaattcaacaattgttactaaaaggtgtgaactcagaaaatctgagacaggtttcagttaatttagaaagtttattttgccaagattgaggacgaacacctgtgagacagcctcaggaggttctcacgacatgtgcccaaggtggtcttaaatattttagggagacatgagacatcaatcaatatatgcaagatgaacattggttccttctggaaagacaggacaactcaaagcaaaggcaggaagactcaaagtggggaggggtcttccaggtcattggtagataagagacaaatggttgcattmttttgagtttctgatgagcccctctaaaggaggcactcagatacgtatgtatctcagtgaacagagggttgactttgaatagaatgagagaaagattgggcctaagcagttcccaggttgacttttccctttagcttcgtgatttgggggcctgaagatttatttttctttcacaaaggtaagaattgcaattgtctctcattgactctgat

SEQ ID NO: 345762 - DNA, 552 bp, Homo sapiens
  misc_feature (1)...(552): n = A,T,C or G
caccagaaatgagttttgcatttatgaactttatataaatggatatagagtatactcttttgtatcaagctctttttcagtcaacattatgttgttgagatccatggatttatcctatatatagttgttacttctttcattctcattgctgaatagcggttcattatgtgactgtgccacaatgtattaatatttatctatttcaacattaatgaatctttgagtaattttcagtttggagctatacccactgtatatatgctatacccactgtagttcacaagattcgctgcatatatacagacatttctsttgcatatatatctgcaagtgaaattcttgggtctttgaatatatgcatgttcaactgttacaatatagccagatgattttccaaagcacctcactcccacttggtatgaagtgactcattcttttttttttttttttttttttttttttntgagatggagtctcgctttgtcgcccaggctggagtgcagtggtgtgaacttggttcactgcaacctccacctcccaggttcaaatgat

SEQ ID NO: 345763 - DNA, 310 bp, Homo sapiens
tacacagttggttagagtgtaatttggtttaccttttctaggatgcagtttggcracagccttaaagatgttttggcattttacctactaatttttcttctaaaaatttgtgcttagacaatctgatataggtacaaggttatttgttgtaacttgatttatgaaagggaatactggaaatcttgatatccaattataatgtaatggttaaattaattgtgccataaatatttgatgggatattgtacaaggattgaaatttggttttaaaatatgtatttcatagcataggaattgattataatgtgat

SEQ ID NO: 345764 - DNA, 310 bp, Homo sapiens
tacacagttggttagagtgtaatttggtttaccttttctaggatgcagtttggcaacagccttaaagatgttttggcattttacctactaatttttcttctaaaaatttgtgcttagacaatctgatataggtacaaggttatttgttgtaacttgatttatgaaagggaatactggaaatcttgatatccaattataatgtamtggttaaattaattgtgccataaatatttgatgggatattgtacaaggattgaaatttggttttaaaatatgtatttcatagcataggaattgattataatgtgat

SEQ ID NO: 345765 - DNA, 589 bp, Homo sapiens
gctctaagaaaaacctgttgtgcttctattccaatgtttaatttacagaaaaactgaataatacctctttaactttagccaatatgtttacacacagaatcttttacagttaatttttataaaccttccacaacctgtttaaatctttagctttattctatctaacttaaaacaccctttacacacaaaaaaatccacattcccaggccttcttagaatcttttaccaaaagtccattccactttccttacacaccttacatgtaaaactgtatcttcagtagtctcaattacatgttatgttattaacttttagtgacttttacttttggtgaaaaccctggttggtaagcaattttaatcatgtactaggtgtggagcctagcctaagatataccaggcagaagtrcagataagaaccaactctccagcatagctagggggcatgactaactccacacgtccctaggccttaccttacttaagaaggcaagttgtacagtaagagttatagtgtcattttatgaagcatttaggaggcctaacaacctttaaattgtacaacattttttgcataaattccctttaac

SEQ ID NO: 345766 - DNA, 537 bp, Homo sapiens
gctgcggtctgcttcctttgtagggagggtggtttcttcagtatcgtcccttctgtagttcaccagaaatatgttacaggaccccaacacttacccaaaggtagctgttgggtcagggtttctgcactatagtcycttctgtggttgccagaaatatgttacaggaaagaggtcccgatccagaccccaagagagggttcttggatctcacacaggagagaattcaggtcaagtccacagtacaaagtgaaagcaagtttattaagaaagtaaaggaataaatgaatggctactccatagagcagccccaagggctgctagttgcccatttttatggttatttcttgatgatatgctaaacagggggtgggttattcatgcctcccctttttagaccatattggataactttctgacgttgccatgacattcgtaaactgtcatggcgctgatgggagtgtagtagtgaggacaatcagaggtcactccgtggccatcttggttttggtagaccagcttctttactgcaacctgttt

SEQ ID NO: 345767 - DNA, 428 bp, Homo sapiens
tgtctcaaaaaaaaaaaaaaaatagtggacataagtaaagctagcctctctctagggaagccttgaccagagaaaagtcaggttcggctgtgtcaatcaggtaagacacaatgacacgacaaaacgaaaatcatgaaacagaagaaacgtgctacttacagatctcagagcaatgagtggtgctgacaggaggctgacaggaagcctgcgggcagcaaaaagctcaagcagtgagtgrggaaacaagagaaagaggtaggacctgtgggccttatttattaagctccatgggtattattctttagggtttcccgtgggggggtgtggattggctagttcagagaaaacacctgtgtgacaagcaggaaaacttaattataggactcaggtgttggccactaggtttactgtggccagcagctgtaatg

SEQ ID NO: 345768 - DNA, 428 bp, Homo sapiens
tgtctcaaaaaaaaaaaaaaaatagtggacataagtaaagctagcctctctctagggaagccttgaccagagaaaagtcaggttcggctgtgtcaatcaggtaagacacaatgacacgacaaaacgaaaatcatgaaacagaagaaacgtgctacttacagatctcagagcaatgagtggtgctgacaggaggctgacaggaagcctgcgggcagcaaaaagctcaagcagtgagtgaggaaacaagagaaagaggtaggacctgtgggccttatttattaagctccatgggtattattctttagggtttcccgtggggggktgtggattggctagttcagagaaaacacctgtgtgacaagcaggaaaacttaattataggactcaggtgttggccactaggtttactgtggccagcagctgtaatg

SEQ ID NO: 345769 - DNA, 619 bp, Homo sapiens
aggttatctacttagacattgtttttagcagttaactgccatcatgatagtaatttaaaattaaaagaacatgacttttacaataatctgtaattctgatagaacatttctgaaatgagtaggattactgaagtgtgtatatgtgtgtctgcgcataactttaaacttagaaattttagagtaggttaatcagattaaaatataaaggatcactaagcaatttaaaatctttttgacaaatgtaaggagcttcctactgagtagctgcgactatgggcgtgyaccaccacgactggttaatttttgtatttttaatagagatggggttttgccatgttgaccggtcttgagctcctgacctcagccggtctcggcctcccaaagtgctgggattacaggcatgtgttgcttattttgaagataattgtctgtaaatgcatagctgtaaaatagtactgtagttgtatgccattgaaaattaacacaaaagagttttcatttgtcatgaagttatttgcaatgagaaacaggacagccaaagagttttgttgttatgataatgagactttcaagtaagataataaaaatatgtccaatacagattaccatcgtgttcttg

SEQ ID NO: 345770 - DNA, 515 bp, Homo sapiens
agcaggtggcagatgagagatcagtttgcaactaatagctggaactaatggcytcatcactggtacctctgtggaaattcatgctggttttcccatcagtatccatcctcctgagcatgaaaaaaacaaactcacttctccccatctgcatttagtgaaggggtatagcagctgctttccaagtccctacagttggaaagtcccgtgatgctgtcagcatttcagtgtggttggttggtactggttcaactcgcgggtggatttccctgttggtaataatagtgtgttggctgttttcagtgctggtgatatgtctgctacttggcctatgaagcaaaattgctgaaatagagcacctgagaaagcatcttaaaatcgtgttcttttaaaatgttaactaataaactctagtttgatgttttaccagaacctgtgggattatgggtaataaaaactaaaaatgtgaggttgatgtgctggaagcaataataaaatttgctttttatgcactttta

SEQ ID NO: 345771 - DNA, 594 bp, Homo sapiens
tacacctaataaacggtagagtcaaagtttgattctgatttttaggattctgacttcaaactttatgccctctgccctaaatcactcacctactccatgccccgtatgttccaggcagtacatcaggcactggagatgcacctgtgaccaagataggcatggtccttgccctcatgaaacttacaatctagtagaggagacagataaaaataattgcataaataattaatattttttcaattccctaataaaaattaaaatgcttatgcagttgttagtattttaggtgaaagaggagattcttttatccttttaactttggttttctttcttaacatagagaaggatggctcttgcctgcattgagaatagtgagtaaatacactatccctaaacatactgtgctttgggatatattgaaatctctgaatccttaygaatatgttataattagagtgatctttactactttgcaagtactctgaagccaaataatagctatgattgtaatttttgtttttgtttttattaattggtaagggatatgtaattttactgaactgaattggtatagtgacaaccaggaacaatgaa

SEQ ID NO: 345772 - DNA, 596 bp, Homo sapiens
ttccccattccctgctagcatttggtattgttgctattgtttacttgagctgtactgtagatgtataatgatatttcttggtggccttaatttgcatttctctattggctagtgatattgattgtgttttttttgcmctcattttccatcagtgtatcattttcagaaaaatatctcttcatatatttgtcattttccaattgaatatatgcatatatttactgttgagctttgaggatgagttacgtattctaaatatgaatcctttgttgaatgtatggtttgcaatagtttctctcaatctattgtttgtcttttcattcttttgacagtctttcatacagcaaaggtatttaattgtgattaagtccaatttacagattttaaaaaatatctagtgcttttagaatcatgtctaagaacttttcatgaagttccaggtcctgaaggttttcttctaggttaactcctaaaagttttagactttttatgttttacacttaaatctacgacccctgttgactcagtttttctaaaaggtatgagatttagattgaggtttactttttttgcccaaagatgtccaattattattc

SEQ ID NO: 345773 - DNA, 555 bp, Homo sapiens
ttcaccataatatgaacgttttctggaaagaaaagcattattgagttctgagcctgtgctaatgccagagtgaacccaaaccactatttcttaccactggaacatcaaaatacaggattgctactacgcttctccataacattgccagctggcttcagttgatctctactcaagaacagtgccatctgtagaaaaggacagtggctttttagggttaaatggaatctacatgtacctctatgttctgtttttccattttacaattcggattgatcatgcctggggacttttttctaagtttaaatagcaatccttcttaaatcactgtagrgcagcaagaaaaccttgctggtattgataattatacattgcccagaagttataaaaatcagcactgaatgttgttgctgctgctgctgctgcacatccatccccagtaatgttacactccagctgtaagttttgattttaacatattttcaaagtcatttcttcatatttaacttaaaatataaaacttggttgttacagactgaatgtttatgtctcccaccc

SEQ ID NO: 345774 - DNA, 555 bp, Homo sapiens
ttcaccataatatgaacgttttctggaaagaaaagcattattgagttctgagcctgtgctaatgccagagtgaacccaaaccactatttcttaccactggaacatcaaaatacaggattgctactacgcttctccataacattgccagctggcttcagttgatctctactcaagaacagtgccatctgtagaaaaggacagtggctttttagggttaaatggaatctacatgtacctctatgttctgtttttccattttacaattcggattgatcatgcctggggacttttttctaagtttaaatagcaatccttcttaaatcactgtagggcagcaagaaaaccttgctggtattgataattatacattgcccagaagttataaaaatcagcactgaatgttgttgctgctgctgctgctgcacatccatccccagtaatgttayactccagctgtaagttttgattttaacatattttcaaagtcatttcttcatatttaacttaaaatataaaacttggttgttacagactgaatgtttatgtctcccaccc

SEQ ID NO: 345775 - DNA, 571 bp, Homo sapiens
cttttcagaccaggtaggaaaagccttgatccaaccccaactggtaaaggtgtcaatgaacactaataaatatktaaatattttacatgggggcatctgggtatagtctgtttgccaatcttcaccagggtatgctcccctgtgctgaacaggccttactagaggaggaggtgaagactggttatttgggttattccaggcacatagttcacaggccctagttaccggctttactgttttaagtaagcctttacgtataaaaagcttttttcctataaaaagacattaagtgaaacagggaagctcttcccaaatgagtagagtcatgcaactacttaactgttttccactgattagcacctgatattaacagtttgctgtcattgacaagccagccagaaagctcttgaattaagccctgacctttagcccattcttgttcctcttcagtatatctagggtctgtcattgccgtggctgagggtacaaacctgccgacaagtccaactggctcctttaatgctgctgccttagcagctgtatctgcaaaggagtctcccttagccacatt

SEQ ID NO: 345776 - DNA, 522 bp, Homo sapiens
tagccacattagagtctcctttttgacgtcctctgcaatggattacagctacttccttgggcagcaaaacagcatctaatagatttagaatttctaagtgatgttttacaggagaacccttagcagctcagagtccctgttccttctagatagcagcaagagcatgaagtaccagaaaggcatacttagaatcagtgtaaatgttaactcttaaatcttytcttaattgcagggctctaataagagctattaattctgccttttgagctgaggtagaagctggtaaggcctgagattcaattacctcatgttaactgacaacagcatacccagctttcctgtttccctggtgcacaaagctacttctatctgtaaaccattctacctcaggattatctagaggctcatcctttaaatccagacggctggagtaaacttgctccataacttgtatataagaatgatctagggtgcctgtgggtttaggcaaataggtagctggattcaaagtttggcatactt

SEQ ID NO: 345777 - DNA, 509 bp, Homo sapiens
aaccttgggccttaagaaaacattggaggtaccctggtagtacttccataagcattaagaccatccaagaaaacaagactaatatggtttggctctgtgtccccacccaaatcttatctcaaattgtaaaccccaagtgtcaatggagggacctggtgggaggtgattggattatgggggcagtttcccccatgctgttctcatgatggtgagtgacttcccacaagatctgatggtttaaaagtgtctggcagttccccctccctctctctcctgccaccttgtgaagaaggtgcttgttttccctttgccttccaccatgattgtaagtttcctgaggccttcccagtcatgcagaactatgagtcaaataaacctcttttgtttataaattacccagtctcagatagtatctttatagcagtgtgaaaacagactaatacaatgacttcaccaaacaaactgarcaagaaaccaggcaccaatcccagagagacagagatatgtca

SEQ ID NO: 345778 - DNA, 613 bp, Homo sapiens
acagtctcttaatagcagaattgatcaagcatgagaaacaactagtgagcttaaagacaggctatgtgaaaatagacagaagagaaaaaagaagaaaaaagaagaaaacatgactaaagttctggaaaatagcctcaaaacggcaaatctaagagttactggtcttaaagagaaggtagagagacagaggaatagaaaatttaaagggataataacagagaacttccaaacatagacaaagataccaatattcaagtacaagaaggttatagaacacaaagcagatttaacccaaagaaaactacctcaatgcatttaataatcaaactcccacaggccaagggtaaagaaaggttcctaaaagcaggaggagaaaagaaacaaataacatacagtggagctccaatacatatggcagcagacttttcagtgtaaatcttacaggccaggagagagtggcataatatattcaaagtactaaagaaaaaaacccttttaccctagaatagttatctggcaaagatatccttcaaacatacaggaaagataaagactttcctagacaagrgaagctgagggttttcataaataccatatctgtcctacaagaaat

SEQ ID NO: 345779 - DNA, 439 bp, Homo sapiens
tggtattccactgatgcatttatrcactctatcaattctgatttcaaacagtagacatcaacactggctatcttcagctaaagtgaaatttactgagctgttatggggttcacaatattaatgggagatcaagtgtagaaagatgataaaacttggaaacacctaagggctggacatcagaaaccacattaaaagtgatgctgcagaatctatctggtccacaagctactataactgagatgcatatgagggcaccttttatgcaaaaccccagaagcaagatctgagtgaccacaactattgctagtcagaaaagagttggagtccttatgttaattagaacatgacatctcatctggggagaggcagccttataggagccaggctttgcatgcagatcccagataaattttagtctctattcatgaatagattctgc

SEQ ID NO: 345780 - DNA, 570 bp, Homo sapiens
tgggaaaccactggtgtatccaaaacctatctaaacacagaaaaggtacagtaaaaatatggtataaaagataaaaaatgacacatctgtataggggcacttaccatgaatgaagcttgcaggactggaaattgctctgggtcagtgagtgagtgagtggtgaatgaatgtgatggcctaggacaacatggtataccactgtagacgttataaacacggtacatatatgctacactaaattgatttcaatgttttattcattaataagttaatcttaccttactgtacccttttcactttataagctttttaattttttaaatttgttgactcttttgtcatagcaccgtttaaaacacaaattatatagctgtacaaaaatattttatttatatccctattgtataagcatttctctgtttttaattttttcatttttaaactcttttgttaaaagctaaracacaaacatatgcattggcccaggcctacacagggtcaggataattaatgtccctgccttctacctccacatcttgtcccactggaaggtcttcaggggcaataaca

SEQ ID NO: 345781 - DNA, 615 bp, Homo sapiens
cttttcccttttctaccttttcttcagggtccagagtccattctgctttaacattttgtgatcaaagttccatcctaaaaagaatacgttagacctttccactcttcaaaaaagaccagctacaaaataaacaaatgtcttattgctartattgagtgcctcttctggcaaattcctggtgcttgaatatgacaaagtaaaagacattctccattataacagtggggattcaaaggagcaaaggcaagagaaaatcgtttcctgccacaatttaataaataagtagaagaagaagttccctaaagtcatgttcaaccctgatatttccacaattctataattcctcccactatatagaaaaaaaatagtcttgtttatgctaaagccaggaccttctgtttaaccagacagtttgcctggaaatagttgataaattttaaaaaatcaatgtttcagacaaattgaaaaagactttcaggtgatctgtgagtctcaataataaagaaatagtggtaaagagaaaagaagagagaaaaaggagaagaattaaagaaaaggaaatgaatactaaaataaacactgcctattcaaagtacagagaactaacgttggtat

SEQ ID NO: 345782 - DNA, 390 bp, Homo sapiens
tttcagagcaaagtctaaagacagctacacaaaaatgaaagctgagtgggaaaacttaattggagatttgattgtgtccaatccctaacttttaatcttatttttcattgaactctgcacatacaacatacatatcaacaaatatatacacatacagatatataaccccgggtttgcttaactacagaatatgaagtaaataagaaccaggcaaccacttcacacttgccactagacacattatttgagtaagttgtgatgcacactacgttgttcttatatgttaatcgggtcaaggccatctgatcttgattctaagagtacttagcagaaaaaagttatgtaagaggmtcagtttgtttattttagccacataatggcaagcgtaag

SEQ ID NO: 345783 - DNA, 509 bp, Homo sapiens
agttcatacacacacacacacacacacacacacacgtggttgagagtaatgtaaatgcactagtctttgcctacacaattgtaattccttgaatcttgaaccattttatctgttttcctataccttttctttagagcttacattagccaatatttatgctgaatattttatttagaagttttgtgtttataggaaagcacacttgattatggaaatattgtttttaaatcttacttcctaatcaatgattagtcagatggatagtagcatttaagtcactatcccaaatggtgacaacaaattaaattttaggcagagttccaggaggtcatggcttgttttaaagataacatattttccagcttcatccatgtccgygcaaaggacatgaactcattcttttttatggctgcatagtattccacggtgcatatttgccacattttctttatccagtctatcattgatgggaatttgggttggttccaagtctttgctattgtgaatag

SEQ ID NO: 345784 - DNA, 491 bp, Homo sapiens
atctaacagaagatcaagcatatatatatatatatatatatatatgcccatctttataatgtgaaactgaagactcacaatgtgaatagtatttgccttcttgaatatggggctttgaaaatacasacaggcctcaaagacactggacagtgggagggataaagctatttcagtctgcaacacattggaagaagtaaaaatatgattcttaaattatgcattatttcttttaatgcagagaaagataacatgtggtacgcacaaattaacaaaacaggaaagaaaacggcattttacatgatgattattcctttacaaatatggaaaatatttttcaacatttgagacacatgaaaatatactttatctctaaggaaatttttgtgtagttacctatcttttggttttcagacattagtgtgctaataacaacttgagatgttggtttaaaatgtagatttctgagtttggttctaggatatctgacctgc

SEQ ID NO: 345785 - DNA, 491 bp, Homo sapiens
atctaacagaagatcaagcatatatatatatatatatatatatatgcccatctttataatgtgaaactgaagactcacaatgtgaatagtatttgccttcttgaatatggggctttgaaaatacacacaggcctcaaagacactggacagtgggagggataaagctatttcagtctgcaacacattggaagaagtaaaaatatgattcttaaattatgcattatttcttttaatgcagwgaaagataacatgtggtacgcacaaattaacaaaacaggaaagaaaacggcattttacatgatgattattcctttacaaatatggaaaatatttttcaacatttgagacacatgaaaatatactttatctctaaggaaatttttgtgtagttacctatcttttggttttcagacattagtgtgctaataacaacttgagatgttggtttaaaatgtagatttctgagtttggttctaggatatctgacctgc

SEQ ID NO: 345786 - DNA, 491 bp, Homo sapiens
atctaacagaagatcaagcatatatatatatatatatatatatatgcccatctttataatgtgaaactgaagactcacaatgtgaatagtatttgccttcttgaatatggggctttgaaaatacacacaggcctcaaagacactggacagtgggagggataaagctatttcagtctgcaacacattggaagaagtaaaaatatgattcttaaattatgcattatttcttttaatgcagagaaagataacatgtggtacgcasaaattaacaaaacaggaaagaaaacggcattttacatgatgattattcctttacaaatatggaaaatatttttcaacatttgagacacatgaaaatatactttatctctaaggaaatttttgtgtagttacctatcttttggttttcagacattagtgtgctaataacaacttgagatgttggtttaaaatgtagatttctgagtttggttctaggatatctgacctgc

SEQ ID NO: 345787 - DNA, 594 bp, Homo sapiens
gaggtgaggagagtggatcacacttgaggctaggagttcaagaccagcctggccaacatggtgaaaccctgtctctactaaaaatacaaaaattagcccggtgtggtggcaaatgcctgtaatcacagctgctcgggaggctaaggcaggagaattgcttgagcccaggaggcagaggttgcagtgagccsagatcacaccactgtactccagcctgggcaacagagcaagactctgtctcaaaaaaaaaaaaaaaagaaaaggagttcagaaaggatggaaccccgcactagattaattgaatgaaacaagaggtgtggatatgtatgtggagtgactcaaacttatagaggacaggaattctttaaattttatttcctgcaatatagaaattataggagactcaagattgtggttctagtagtaagaggatttgtctcgaataccttcactcctagatcttaaggaagtgaaatctctggttgctaagccaattcaatcagctgagatgatgaattcgttttctgttggctcaattaacagatcatcctaaacttaggggcttaaaatgatgtgtatttattacctcagcat

SEQ ID NO: 345788 - DNA, 636 bp, Homo sapiens
atttagattttgaagagttgggtgcctagctctgtggtacacattctgtaattgtttatgcgtatttatcaatcagattgtaaatatttcaaacgcagacatccattcaaagtcttatttttatgtatcacaagtatatacagtcaggttcattgtgcctttaattccttcagctctcttatttagttattcattcatttatttcaacaaataataaacatctgtgaacactatacccaggccaagagctagaatactggcaactggttgcaggtatctgggttccttcccatcctgtttttgggcggaagtttccaatacaagctatccatcattctgccttttgtatttttattttttgtgtgttatggactgaatgtttgtgtctccccaaggttcatatgatgaaaccctatcccctgatgtgacgatatgtagtgggaagcctttagaaggtactaataattaggattaaatgaggtcatgagggtggagcctcttagaagggattagtgcccttctragagtcacaagagagcttgcttccccgctctgctctacactgtgtaaggatacaattcaaagttggctgcctgtgatctggaagagggccttcaccagaaccggaccatgctg

SEQ ID NO: 345789 - DNA, 590 bp, Homo sapiens
agactttctacctgtccatcttcacctctcactatgccttgctttgaaacctgtataccaacaataacaaaccacgtgttattagccactctcctccccacccaatgcaccaaattaatcatcattttcccactactgactttgaatggagaaccaaacaagtagcacatctaaattacttatagagaatacttaattccacatcaccatttgcagaacacagagaaattctcatgttcttttttatatctctccctagcaaagtgtctggcctgcattgtttatatgcctttggtaaaaggagttcagatcataataattggggttgaagaacactgaatagattgacagctctgggtggaagcacaaaacagaattaacgagttgttgaatccagtctagagtcagtgtactagtctaactaaggcagggagaagaaaatcaagccaaattcaacccaagagggcctgacctctatgaagttacacagcaccaagaggtgtgatgtttcayagatacaaagagggcagatgttttcagaatggagagagaataatcagatgggcaactgctgcagtcatgtcagataa

SEQ ID NO: 345790 - DNA, 485 bp, Homo sapiens
ccacctaatgttgtcataaatcacatatcatagactctttctttcataatttatagtacagaaatttttctgtagggtatttccaaatccaaataatgcagaattttatcacagtaacagcaggaggagggcaagatggggaaaggaagaggaaggtggaaatttcggtaactggttagaaagccaaaaaaattgacctgatgtttttaataaattagtagatcacaggaaattgggctttaaagttttacgtgcttaaaatatttctaaagattatccaaagccacrttcaaagcctggtaatcattttttttttcctaacgatagatcacaagaattcagttaacgttttttgttttgccaaggacataaatgttgaaactatactgtgaatcctgcttagttcaaaattaacttattacaatcagtataagtgttagactctaacaattgggggctcattaacatatattcttctttattac

SEQ ID NO: 345791 - DNA, 589 bp, Homo sapiens
ccctatgacctcccctgcttttcctgaaaacaaacaaacaagcaaaaaacacatatggaagatgttctccttataccaggaggagagtcacattcttgtcatccaaggactagaaactgaggctgagagaagtctgtgcaaaccagccttgcaaactaacccactcctttccagtcacttctccacaattaactgccctagtccaagtccccttgccttgcaaaattttcataacttactgcactttgtccaactcagtatataagtgttcaactgtaactgcttatttgggtcttcattttcttatgggggctcctgtgccatgtaaaacttttattaaataattytgcatgctcttctcttgttaataggtctcaggtcactttaacttacaggcctaccaaaaaccctaggaggatagaggtaaaattttgcctacgctacataagtaaagtttaagcacgtttacaagtataaattaacttaatcctcaaaatctttttataatggaaatatttttattaactccattttaaaaattgcggaaattggggcacaggagttagcttcttgtggctacacagctgac

SEQ ID NO: 345792 - DNA, 397 bp, Homo sapiens
tagctttgtggcttaaaacagtaagaatttgtttcacattttctttgggtcaagaatttggttgtggtatagctggatgattctggctcaggatctctcatgaggttacagtcaagatgtcagctgaggctacatctcctcatgacttggcttggcctggaggatctgcttcccagaaagcttactcacgtgatgctggtagttggcaggaggcttcaatttctccccagtagacccctctatggactgcttgtatgtcctcacaatatggtggctgacttattccagaatgatcaatccaggactgcaaaatggaaattagaatgtccttaatgacctagccttggaagtcacwcaatagtaagtaagtcatttcctcattgttctattaattata

SEQ ID NO: 345793 - DNA, 495 bp, Homo sapiens
atacctaggataaattttaacttatgagttaggcacartaagatattaacagtaactaataacatagaacaattataacaatataatgtaataaaggttatatgaatgtggtttgtctgtctctctctctcaaataccttattctactgtacttacccttcttcttgttgtgatttgtcaatctgataatgagatggctcctgagtgagtgtctggccagtagtgtacacagggtagatacataggacaaaggaatgattcttgtccagaggtgggatggagcaggagggagaatgacagtgcaggaatgcaatataaaacatgacttatttctggaatttacaatttaatattttagggtgacagttgacctcagataactaaaatcatggaaagcaaaacaatacataaggcagagactactgtagaaggaagaagagagataatgagtaatgttgactgccaccgagatcaaaggatggtggttgaatttgc

SEQ ID NO: 345794 - DNA, 495 bp, Homo sapiens
atacctaggataaattttaacttatgagttaggcacaataagatattaacagtaactaataacatagaacaattataacaatataatgtaataaaggttatatgaatgtggtttgtctgtctctctctctcaaataccttattctactgtacttacccttcttcttgttgtgatttgtcaatctgataatgagatggctcctgagtgagtgtctggccagtagtgtacacagggtagatacataggacaaaggaatgattcttgtccagaggtgggatggagcaggagggagaatgacagtgcaggaatgcaatataaaacatgamttatttctggaatttacaatttaatattttagggtgacagttgacctcagataactaaaatcatggaaagcaaaacaatacataaggcagagactactgtagaaggaagaagagagataatgagtaatgttgactgccaccgagatcaaaggatggtggttgaatttgc

SEQ ID NO: 345795 - DNA, 581 bp, Homo sapiens
gtgttctctcttcctctccttaatctctaccacaaaaatcacatattttaagaaaattcaaagaattcctaaaaactcacaggatgtccaatttacctcaagaagacagacagagagagagagagaaagagagagagaaatatakagggtttctttaaatttttaagtaaagttctaagatggaaacattttttatcatgaacatagaaattttacctattgtgaatcaaattgtagcctcagaatccatctaactcaaatcctaaaagtaccaattgctgttaccacagctaggtggataacaaataacttggtggtctgaatagattttggacaaaaattaaatttctgatttcctgcccagtacttagtatattgatatatggtctatccttgaaaaatacagttgttaacattgaccagatattaaggtaactgtttcctttgtagcctttaatctcatttgcattccaactatacaaaaatgataattggtattactttagctggtagagcaactttatgtgaatttgaaaaagcaccttttccttaagatatatccttattatctgccataaatt

SEQ ID NO: 345796 - DNA, 425 bp, Homo sapiens
cccggctgcccattgtctgggatgtgaggagcacctctgcctggctgccaatcatctgggatgtgagtagtgcctctgtccagatgccatgctttctaggaagtgaggagtgcctctgcccagccaccttgtctgggaagtgatgaacgcctctgccccaccagcctgtctgggaagtgagaagtgactctgcctggctgccccatctgggaggtgaggagtgtctctgtatggctgccccgtctgggaggtgaggagtgtctctgtatggctgccccgtctgggaggtgaggagcgtctctgcccggccaccccatctgggaggtgaggagcgcctctgcctggccgccccatctgggaagtgrgcagcacctctgcctggccactgtgcaatcttccaagtgtgaagtgacagcctttctgca

SEQ ID NO: 345797 - DNA, 343 bp, Homo sapiens
aaacaccctttttgtagtacttrcaagtggatatttagagcgctttggggccaatggtagaaaagaaaatatcttcgtaggaaaactacacagaagctttctcagataccacattgtgatgtttgcattcagctcacagacatgaacattccttttgatagagcagttttgtaacactctttttgtagatctggaagagcatatatggaccactttgaggccttcattggaaccgggcatttcttcatgaaaatctagtcagaattctcagaaattccttgtgatgtgtgcattcaactcacagagttgaacgttcctttcaataaagcagttttgaaacatt

SEQ ID NO: 345798 - DNA, 595 bp, Homo sapiens
tccacggctgtcatgctgggttcacagcccagctctcctcatcctgtggccttgggaaacctactgtttctctcagagctcagtcttgtcatctgtatactacrgttcaaatgtataacttgagatactgcagtaatagttgtattttagacactggcctctgggcaaccttcctgagtctgaagttgcaacttcctttaatttttttttttttttttgagatggaatctcactctgtcgcccaggctggagtgcagtggcacgatctcggctcactgcaacctccacctcctgggttcaagcgattctcctgcctgagcttcctgagtagctaggactacaggcacataccaccacacctggctaatttttgtatttttagtagagacggggtttcaccatattgaccaggctggtctcgaactcctgaccttgtgatctgcccgcctctgcctcccaaagtgttgggattacaggcatgagccacagcccccagactaatttttttatacttttaaaaaacaacaataacaaaaaattagaatagattgagatttacaggacaattacaaagacagtacagagcattcccacg

SEQ ID NO: 345799 - DNA, 558 bp, Homo sapiens
gaggatctttgaggatatgattaacttaaagattttgagatggagagattatccagatgggctctaaaagcaatctcaagtgtccttctaagagagaggaagaggtggatgacacacacagaggaagccatgtgacaatagaggcaaagatgggagtgctgcagccacaagccaaggaatgctggcagctrcagaagctggaagagtgaggaatggattcacccctagggcctttggaagctcttgacttcagcctagtgatactgattttggacttcagggctccataactacaagagaatacatttctattgttttaagccatcttgtttgtagtaatatgttacagaaaccataagaaactaaaacaaccaggaaattacagtagggaaggctaaaatggatatagtagaaagagtgggtgctttggataaaagtagaactcaaatcaaatccctcctggtatgaccttgggcaataatagtaaaccagcatgggaaatacatatgcagccactcgccctcctatgccaaagcaaatgtggctcatcgataccag

SEQ ID NO: 345800 - DNA, 616 bp, Homo sapiens
ggggctgctgatctccacctggaaaagcacatttgagggttgagtgagatcattaaaaaagacagcgaccccagcagactgttgtctggcacaatgctgcacgggctaatgttagcaatccaggcctctttactgcagtgcaacggagacaggtcgggcctcagttggtgtagcataaagccctgacctggcggctgttggaaactcagcccattccttgacacacctcaatcccacagcttggtcttttttctctggagggaccacacctagagccagggagcaacagggtcacagtgacctgggccagaatactctataaggtcaacatgagccaggacaaggaattagaattacaaaaccaacagtcttttaaccaggatctaactaaggaccagtcacagggaggacatcaacagtgtggaagtgaacagcattttgatctgttctccctggactctctgggggctcttctcccattgtggggaggcagattgaatcagaggaaacagcaggscatcagcaccaaagaaccctgggttcaaatcctggccttccttacctactggctgagttgtcttggatgcacttttttacctccccaggcttcagtttc

SEQ ID NO: 345801 - DNA, 572 bp, Homo sapiens
atgggggcatcatctttcttcctaagctttgttttgagacaggcttcctttttctctgttaatcctgttaacgttgagactgtaacctggaccccgagtgacccagatcaccctacctctgaaatggacagaactgcgttcactatcatttcccatcaagggactgtgagagggtttgattaatgaacgactataaaatgctagcaaatatatagcaaaaagaaatactagcaaatatatatatttatagcaaatatatatagtaaaatactagcaaatatagcaaatcttaatgaataatttctcaacaactttttccttagtggcatttggctttcttctctgaatttttgctcccatcaaaagccaagttcctcatcagcgaaagaaagagggcagtgtttattttaatattttattttaatattttgatttattttatatttaacagtttttaaggtttaattaaaaaagttatatatgtttaatgtgtacaaactgatgtttttatatacacacacacacacacacacacacacacasggaaataatcaccacaatcaccacaatta

SEQ ID NO: 345802 - DNA, 570 bp, Homo sapiens
ggcaacctatcaatgaaacagacacacctgcacagttggaaatggaggatggagatacaattgatgtgttccaacagcagatgggaggtgtctactgaaaagggaacctgcttctttactccagaactctgttctttaaagaccaagattacattcgcaattagaaaactgcaacttggttccaccacatcctgactactaccatatagttttctctattctttcacttccgccttccccattcctttattgtatgtaaagtaactsgtatatgtgcacaagcatattgcattttttttaactaaacagccaatggtatgttttgattgacatcaagtggagacgggatggggaaaaatactgattctgtgaaaatatccccttcctccattagtggcatgctcattcagctcttatctttatattccagtaagttattttgctctcactgttttaacaacaacaaaaatataaaaatccttgcataccttgttcaactagagaattttaatgattttcatttatcattgtaaaaccaaggacaattgtgtaacttttttgtatgtagct

SEQ ID NO: 345803 - DNA, 593 bp, Homo sapiens
gagttagtgggatatgttcaccaatctcaagagttcttctgaggattaaatgagatcacacagggaaagtccttggctcagtggtctggcatgtaatctgtacccaagaaattctctctttttttcccaatgagatgcatagagctctgggagacttcaagcttgtgtatctcawtttcattgtatacagtaacctggagatggtaagcgtcttctaagatcatgcagcaagtcgcagcagaattggctctttggttgaaatctctaggatgtctgagttcaactaaaagttctttacaattccccccaggactgggcactgactagccttctcagcatccagccatgttttcaaggcctagagatgattctcagtgctccagaagacacaagtgagaccccagctctctgacttatttcaccattcgacagctattcatagagcatctcctatctgggtgatgaggactcacagcagtctctaagacagactcatgccccactcatagagtttccggtctagacaggaaggcaagcattaatcaaatgactgaccaaacaaatataaatttgcgatgatttcatgtgctatg

SEQ ID NO: 345804 - DNA, 547 bp, Homo sapiens
aaagaacgaaaagtttatttaaagaaataatgactgaggtcacttccaagatggccgaataggaacagctccggtctgcagctcccagcaagatcgaagcagaagatgggtgatttctccatttccaaatgaggaacctggttcatctcactgggactggttagacaatgggtgcagcccatggagggcgagtccaagcagggtggggtstcacctcacccaggaagtgcaaggagtcaggggacttccctttccttgccaaggaaagctgtgagtgactatacctggaggagtggtacactgctgcccaaatactgagcttttcccacggtcttcacaaccggcagaccaggagattccctcctgtccctggctcggcgggtcccatgcccacggagccttgctgactgctagtgcagcaatccgagatggacctgggacactggagcttggtggggggaggggcgtccaccattgctgaggcttcagtaggtggttctatgctcacaggataaacaaagtggcagggacgcttgaactgggcaga

SEQ ID NO: 345805 - DNA, 547 bp, Homo sapiens
aaagaacgaaaagtttatttaaagaaataatgactgaggtcacttccaagatggccgaataggaacagctccggtctgcagctcccagcaagatcgaagcagaagatgggtgatttctccatttccaaatgaggaacctggttcatctcactgggactggttagacaatgggtgcagcccatggagggcgagtccaagcagggtggggtgtcacctcacccaggaagtgcaaggagtcaggggacttccctttccttgccaaggaaagctgtgagtgactatacctggaggagtggtacactgctgcccaaatactgagcttttcccacggtcttcacaaccggcagaccaggagattccctyctgtccctggctcggcgggtcccatgcccacggagccttgctgactgctagtgcagcaatccgagatggacctgggacactggagcttggtggggggaggggcgtccaccattgctgaggcttcagtaggtggttctatgctcacaggataaacaaagtggcagggacgcttgaactgggcaga

SEQ ID NO: 345806 - DNA, 424 bp, Homo sapiens
tctggtttgcctggaacttagggtttcctgagacatggaactttcagtgctaaaatggagaaagtctggggcaaactggaataagtcagcctaattattttctgagcacattttattaatacaacaaagacttggttaatttatgagtattttgttcatatcaagttttagaaaccatagctttaagtattcttcattgatttaaattctgttcctcattttctatgcctcaaaaatmactaatttacataggtatttttctagtggtgatatcatttgaattggatttttttttttttttttttttgagatgaagtctcgcttgcccaggctagagtgcagtggcatgatctcggctcaccacaacctctgcctccaaaattcaagtggttctcctgcctcagcctcctgagtagctgggact

SEQ ID NO: 345807 - DNA, 424 bp, Homo sapiens
tctggtttgcctggaacttagggtttcctgagacatggaactttcagtgctaaaatggagaaagtctggggcaaactggaataagtcagcctaattattttctgagcacattttattaatacaacaaagacttggttaatttatgagtattttgttcatatcaagttttagaaaccatagctttaagtattcttcattgatttaaattctgttcctcattttctatgcctcaaaaatcmctaatttacataggtatttttctagtggtgatatcatttgaattggatttttttttttttttttttttgagatgaagtctcgcttgcccaggctagagtgcagtggcatgatctcggctcaccacaacctctgcctccaaaattcaagtggttctcctgcctcagcctcctgagtagctgggact

SEQ ID NO: 345808 - DNA, 424 bp, Homo sapiens
tctggtttgcctggaacttagggtttcctgagacatggaactttcagtgctaaaatggagaaagtctggggcaaactggaataagtcagcctaattattttctgagcacattttattaatacaacaaagacttggttaatttatgagtattttgttcatatcaagttttagaaaccatagctttaagtattcttcattgatttaaattctgttcctcattttctatgcctcaaaaatcactaatttacataggtatttttctagtggtgatatcatttgaattggatttttttttttttttttttttgagatgaagtctcgcttgcccaggctagagtgcagtggcatgatctcggctcaccacaacctctgcctccaaaattcaagtgrttctcctgcctcagcctcctgagtagctgggact

SEQ ID NO: 345809 - DNA, 450 bp, Homo sapiens
cctgtaatcccagcaactcgagaggctgaggcaggagaattgcctgaacccgggaggcagagtttgaagacagccgagattgcaccactgggcaacaagagcaaaactccatctcaaaaaaaaaaaaaaaaaaaaaaatacttgccccggctttttgtgtgatggactttctatttacagacgtgatatttatctatgactttactcagagtctggctcatagaccagaaggactggtatctcctggagcttgcagraaatgcaaaatctcaaacccctgtattagtcagggttctccagagaagtagagccaatgggatagagacagggatagggatgatagagatggagatagaggtagagatccattgattcctctgttaataaattggctcatgcagttgtgacaatttcgaaatctgcaaggtatgtcagcaagctggagaccca

SEQ ID NO: 345810 - DNA, 581 bp, Homo sapiens
tgctaggtagcttcaaggacagtcataattttcagttcattttagagtttaggtcaaatagattgtatttgtttgattgaacatactagtcaatgtaatatgggggtgtgcagaactagctagattagttgcttatataagtctagatayagtgttaaggaatgagagacaaggtgtttctggaaactaccaggaaccgggtgttcatgagaatcctccttatccttgcagaaatgactcagtcatggccaggagatccaggtagcagatggaattagagttttatatgaggtatcagaatgtggaaatggcaaagagcagtatggggtgggaaacaggagaaaaaggtcgttgagatattaggaccaaacatccacctttatgccatcaaaagattccaggaccaataggatgtaaatagaaacctgttagcagtaagaatcatgaggtatttctaggcatataggcagagaataaagaaataaaaagttttggaaatgaatggaagggggcctcatggtagtgggaagacagtatttaaaagacaaacagatctcagtccaaatgtagcttctacccct

SEQ ID NO: 345811 - DNA, 623 bp, Homo sapiens
cagctgctttggatgaccactgtgatttcttacaacacaaaatacagttttaccatatgatctcgcaattgcactcctcagcatttatccaactgatttgaaatctcatgtccatacaaaaacctgaatgtaaatgatgatagcaattttattcacaatcaccaaaaagtggaagcaaccaagatgatctctaataggtgaatggataaactgcagtcacccataaaaaggaatattattcggcaataaaaagaaataagctacaaattcacataaggacttgaatgaattttaaatacacgctgctaagtggaaaagttaatatagaaaagctatatactatatgatttcaattttatgacattctggaaaaagtagaactatggagggaataaatggatcaatatttgccaggggttcagtggcagagggggattgaataggtgaagcatgggatattttttaggatatmaaactattctgtataatacaataattctgaatataagatattaaacatttatcaaatccagagaaatttacaacacaaggagtaggccttgacatatgtaaatttttaaaaactcatttaagagattggggaataacaggatggaatcaac

SEQ ID NO: 345812 - DNA, 534 bp, Homo sapiens
gtagtaatatcttcacatgtctgaggagaacataaatgttagtctgaaattcaatatctagctacattatcrttcaagagagagggagaaataaagacatttacagacctataaagactaagagtgcgtttgctacctatgagccattattagaagaactattcaagatgatattacaataagaataaattaatctgaaaggaaagagatttatattttaagaaaagagggaaagggtcatagtccggaaacatattaatgtctttgtcaggaagatgacactattttaagatttaagggtaataacaaaaaaaaacccaaaagcacaatttagaaattctatatcagtagggcgaaaaagaaaggaaagattatagaagagaacacctgtaccttggattatttcaatctctctcttcttctccccaaacatatatcataagaactgaaaaacacctgctagattaaatcaaatatgagttatgttgaaatatatgaaaaaattggagttgaaaaattgggctaaccattata

SEQ ID NO: 345813 - DNA, 584 bp, Homo sapiens
ggttcaagtgattctcctgcctcagcctcccaagtagctgggattacaggtgcatgccaccatgcctggctaatttttgtatttttagtagagacagggtttcaccatgttggccaggctggtctcgaactcctgacctcrtgatctactaccttggcctcccaaaatgttgggattacaggcatgagccaccgctcctggccaatctgtcctattttttagatgcccaagataaatacagaaaagcctcgattatgtgacaccagaagctaattcaaattatttttgtccttaagcttaaggaaaataagaaaaaccacaagaaaataatcagtatatatttaaagcagtaatttcattcaggccaacataggttttatctagtcacctataattttgacatttccatttacctcactctactacgataacttggctacaaaatgccaacttttagggagaccaatcatcaaagaaaagttcaatcatcgttaatgcacaacgtacaaggatgaaaattgaattcatattttgataaatgtttttagagataagtttttgaaagtctaaaataacaggaaaca

SEQ ID NO: 345814 - DNA, 562 bp, Homo sapiens
tgtgtgctttacagcttttcatcatatatccagcctgttgtctgtgtatatgaaccaagtttgaatcaaaagattccctccaaaaaaaaaaaaaacctagccataaaaacaagcttaatttatctgtagtccagctaaatgcrgtcaccaaactagaaatgtttacatggactaaacaagtagctttttatccgaaggaaattaaataaaataaggggccaccctttgtctaaaaccagtatggttacttccattgaaaagtagtttatatcatatcatccattgctaaaaataagatagagggcaccctcttaatagaaactgttttcctcaaggttcccaatgaccccaacattgccacatccaaagggcaattcttagtcttcattttatttgacacctgagcacttgacattattgtttcatacttcctgaaacattgtctccagctggcttccagaatatactatactcttaattttccttccaagaccttggccacttctctctgcctcttcttcctttttctgatctctgaatgccaatgtgccctcagatatca

SEQ ID NO: 345815 - DNA, 427 bp, Homo sapiens
tgctgggcttgttggtgcgcacctgtaatcccagctactcagcaggctgaggcaggagaatcgcttgaactcaggaggctaaagttgcagtgagtcgagatcgtgccactgcactccagcctgggcaacagagggacactccatcttaaaaaaaaaaaaaaaaaaaaaaaagaatagattttgatttttatgtatattctgttttagagctgtaattattgcctggcttgatgtgggaaagacccaataaatcaataatacttaagcatgaatgatttatattatctaatgtgtcagtcaaggcaggctgsatcctgctatagtaaacaagcaatgttacaattttagaagcctaaaacaacaaaggtttgtttcttgctcctgctacatgacatgcaatatagtctttcaccactagtcacaatcc

SEQ ID NO: 345816 - DNA, 623 bp, Homo sapiens
taatacacatatttatggggtacatgtgatattttgatataagctgccatgtataatgattaaatcagaataattagggtatgtgtcacctcaagcatttatcatttatttatgttaagaacactccaattccattcttttagttattttgaaatatacaataaatcattgttaactatagttacccttttgtgctattgaacactagatcttagtccatctatccctttgtattttttcattaatcatccccctctttaccccctcgctaccctccccactacccttcccaacctctggtaactatcattctwctctcaatttccatgagtttgtttttcaggccctacatacaagcaatgttttgatacaggaatacaatgtgtaataattgcatcagggtaattgggtatccatcacctcaagaatttatcactttgtgttaggaacatttcaattccattcttttagctatttttaaatatgcaataactgattatagactgcagtcaccctgatgtgctatcagggtgatatactagatcttatttgttctatctaactatattttcatatccattaaccattcctactttttcccttcctccctgctcccattccca

SEQ ID NO: 345817 - DNA, 596 bp, Homo sapiens
gaacttcaagtcgagatagtggatacttcacagactatctaagtaaagatatatttcatgggctaggggaatataagaatgggttgccartatagaccattttctgctgagttacagaaaagaatagcgtcccatttgtttgatgcagattagatttggtccaaaaaaaaagaggaagatgagggaaaaataaataagtatttttgaagtttcatcgagtcatatgatcgtacagatgaagtttgacaaatgaatcaagaatggatactcagggaaaaatgcttcctaatactgcaccgagaaagctgaatcaagtcctgacacctgtagaatgaccgtagggctaatttgaatagcacaggtatcacaggggcattttggcctcgattatgcccactgtctacactgccatctgtgacatctttcttggctgcatggactcacccaaaacataatctagagcagcctctctaacatgattccttagtttaacatctgccactcagaggattctaagaccctttagcaaagaaagtttaagaggttcactcccaaactttcccagcccattaatcttattttatcatttcactcac

SEQ ID NO: 345818 - DNA, 596 bp, Homo sapiens
gaacttcaagtcgagatagtggatacttcacagactatctaagtaaagatatatttcatgggctaggggaatataagaatgggttgccagtatagaccattttctgctgagttacagaaaagaatagcgtcccatttgtttgatgcagattagatttggtccaaaaaaaaagaggaagatgagggaaaaataaataagtatttttgaagtttcatcgagtcatatgatcrtacagatgaagtttgacaaatgaatcaagaatggatactcagggaaaaatgcttcctaatactgcaccgagaaagctgaatcaagtcctgacacctgtagaatgaccgtagggctaatttgaatagcacaggtatcacaggggcattttggcctcgattatgcccactgtctacactgccatctgtgacatctttcttggctgcatggactcacccaaaacataatctagagcagcctctctaacatgattccttagtttaacatctgccactcagaggattctaagaccctttagcaaagaaagtttaagaggttcactcccaaactttcccagcccattaatcttattttatcatttcactcac

SEQ ID NO: 345819 - DNA, 572 bp, Homo sapiens
ctgctcaaaacttgccaatggctttctttagacaagaaaaaaaattgaaggcctttttctaccatgactccaagggcactgtcatcacccccaggctcctgcctggctcccagttcttacagctctctccttgcccattctactccggcttcaccagccctttgctgctgttagaagatatagtttctgggttttgcaattgctagtctcagcccgggatgttcttttctgagacactggcatgtttgctctcaatttcttcagatttctgcttcgatgtcacttcatcctagaggtcttacctgaccattctctcaagcagcatcccaggccttgttgtcccctttccctgcataaagtattcacttattgccacctggacatcttckacttacctgtttattgtctttcctctcccccacattacaatgtcagctttatgagtgcaagagcacatctgttttgtttattgctctgttacaagatcaataatggtgcatagcctatagttaggtacacaataaatatttatttatttgtataaatataagaatgatcatttgactatgcat

SEQ ID NO: 345820 - DNA, 580 bp, Homo sapiens
acagagacagctgtgcctgatgagaaccccagagacagaggaaggtggcacccacagtgagcaccagtagccttgctcggggagggacatgtgaggacgagtgcagtgtatgcttcatgacagccttttgtggagggattacattttaggaagaaagtagaaggcactttttccatgaaggtgataaggaggtagtaataactgaggtatacaataatctgactaaatcctcataaagatgtggtcagtatatatatttaatttgtctaaaaaaggaaaaggaaaaatttctaaactccaatcagtggctgttcattatttactgtgtacaatatttgattcatcaacattataatttaggagtrtgaatgttccattgtaacatgttcatttcattctcatgcctgggatgttacttacatgtatcttctataagttgtgagacaagcattgtggaaccagtaaactccctggtaattatcattagacagagtcctgtgacttgctgtttgttctttcctttctccaatttatgatacatctgatcctctaagtgaggatgtgagaatatatgaattag

SEQ ID NO: 345821 - DNA, 506 bp, Homo sapiens
aaagggtggtagctttttggaagagcctcttaagcatctcattctcatcctaaatccttgagctggactgacttgaataaacctcactgtctctatctcttccacatcctaactcaccccagggagagtcctgtgtgccttccatactacctggaatcatggtttcccagtggggagcatgccatcttctggtgttggcagagagttttgtggtctaccatgtttttcccagatgttgcagtgagtgtgctgaaaactgtatgtaaatctatagcttgtcctatttgggctacaccctgactataaaagtctggatctatccagggyattgttatgcatgtgaatggatgcttgtgttagttcaggccctcttaggagtaaaccctaaggtaagattagacctgcaaaaggtttactgggtaaaacaccagaggttaggagaaggtaagggaagttgtcagactgaagtgctggtctgccacctgagaaaagagagaaagaagaaa

SEQ ID NO: 345822 - DNA, 341 bp, Homo sapiens
gaataaaactaaggaagcacacaactaaatgcaatgcagtatcctatattagatactgggaacagaaagagggcattagagagaaaactgataaaattcaaataacatctatagtttagttaatactattgtaccagtgtcaactttctgattttgatcattgttacatcattatataaaatgttaaacatyagaaaaggtgaacgctacacaataacttgttttgcaatatttttgtaagtttagccatacttcaaaattaaaagtttagaatttatatataggtttttatacttatcatttggtaatagataagagtctaattggcagccatttgttct

SEQ ID NO: 345823 - DNA, 459 bp, Homo sapiens
gtactctgtcttgcatctcaggtaccagctcagccacagtagggtagagaaccaagtgggctctggagctccccaaatccaacccttcgtccttggatggcatttctggacctgacccaggtcagagaggagccaagtgacctgaaggcagattcccagaccacaagctaactgaagagcgcttggccttgagtgaatattggtggtagccagraggtacctgtcatgggcctggggcagtggtggccatgtgggaagacccctctgcttgtggaaagaggagggaagagtgagaaggacattgtcttgtgacttgggtgcaagctcagctgtaaaagaatagcactgggaagattagtaaggtttctgactcatctctggacccacctgagagtagggcgaactcactgccctgaagggaaagacacaagcctagctgacttcacagcctgctcacta

SEQ ID NO: 345824 - DNA, 459 bp, Homo sapiens
gtactctgtcttgcatctcaggtaccagctcagccacagtagggtagagaaccaagtgggctctggagctccccaaatccaacccttcgtccttggatggcatttctggacctgacccaggtcagagaggagccaagtgacctgaaggcagattcccagaccacaagctaactgaagagcgcttggccttgagtgaatattggtggtagccaggaggtacctgtcatgggcctggggcagtggtggccatgtgggaagacccctctgcttgtgsaaagaggagggaagagtgagaaggacattgtcttgtgacttgggtgcaagctcagctgtaaaagaatagcactgggaagattagtaaggtttctgactcatctctggacccacctgagagtagggcgaactcactgccctgaagggaaagacacaagcctagctgacttcacagcctgctcacta

SEQ ID NO: 345825 - DNA, 618 bp, Homo sapiens
ctatttatagtcacacactctgaccttgaacatcaatgtcgcattaatacaaaccattcagagaaacragaataacaatatatgaggttagaataagcattaaatgtatcgggataccaaggaagaaaaatacgtgggaaaatgatggcatgtttaaaactgaaaatgagctattcactcacattaaactaggaaatctatgcccagagatagaaataaattgtttttcttatcagagcatcatttcagtattacctaatctttcctaaaatctctagaatcttaagaagactttccataccgtattgagttctagaaagcaaagtgcattttaaaaatactttaaataatgcaccaaaatacaaaaaatgcaaagccacttatgaatattgaaatttaatagaaagcaaaattctgcagacctaactaatgaagaaatataaggtgctcagaccaagaaaggagtatgaacaaaagcaaagtcaaaagactaagttaagtatgttcctgaaacatctggaactagctgaataacaggaaagtcttttctggaactaaatcactaatggaagaaacatgagctttggattcagatgaatttccatttaaattccacct

SEQ ID NO: 345826 - DNA, 570 bp, Homo sapiens
ttggtttttttggttctttgaagccataaacataagaagtgcatacctagttttaagctaatgtatttaaatatttatgaaatttaaatctacactggtgggagatacaaaattgttttaaattatttttaatgttatttttaaattgacatacatgcaaatggrtttttctatacagttttgtaagtttaacaaatacatagatttgttcaactactgctacaatcaagatacaactgtttcatcatcccaaaaactctcccttaggcaaccactttgtactcacactatctcccaacctttaaccgctagaaaccatggatctgttccctatcaccatagttttgtcttttaaggaatgtcatattaatggaatcatacagcatgtaactatttgagacttgcttctttccctcaaaaaaatgccaaattgttgcatgtcaataatccctttcctttcatggctaaatagtttttccattgtatagttgtaccacagtttgtttatctagtcactcattaaattagattgtccccattttcagtcattatgagcagagtagatagaaa

SEQ ID NO: 345827 - DNA, 413 bp, Homo sapiens
ggcaaccactttgtactcacactatctcccaacctttaaccgctagaaaccatggatctgttccctatcaccatagttttgtcttttaaggaatgtcatattaatggaatcatacagcatgtaactatttgagacttgcttctttccctcaaaaaaaygccaaattgttgcatgtcaataatccctttcctttcatggctaaatagtttttccattgtatagttgtaccacagtttgtttatctagtcactcattaaattagattgtccccattttcagtcattatgagcagagtagatagaaatattaatgtacacaggttttgtgtgaacataaaatatcagttaagtaaatagaaatggaatggatgagtcatatgttttttatatgtatacatgtatgtatacatatat

SEQ ID NO: 345828 - DNA, 583 bp, Homo sapiens
tgagttcgtgacaatagagaatggtgtagggaggagcaaggtggtttcaactgctcatcgtcaagtctaatatgatgtcaggattatgtatttwaaaaaaattatccacaaggaaaatatttatgcctcagtcatgatattttcatcaaattaccttattccaaatttcaagtatcgagttttgcaaaaatacctagctttgtttcataatcccaggcagggtgcaaactcaatggctgttcaaaagttatgagcagacagggaattaaaactcggagactctggtcttctaatctacactggatcaaaacacttcccactgatgataagatagagtctggaatatgggcaaaggagtttgtatttaaaacacattcagaattctcaaagtcttagagaatgattaaatacccagttcagtaagtggtgatagtttagtgccttgagagctataaattatcctaaaataatgacaaaactgaatggcaccaggttcttctaagaattatcatgtcatatcatttaataaacactcatagtaaccactaccactaccattggtcacttaccaactactgtgcga

SEQ ID NO: 345829 - DNA, 583 bp, Homo sapiens
tgagttcgtgacaatagagaatggtgtagggaggagcaaggtggtttcaactgctcatcgtcaagtctaatatgatgtcaggattatgtattttaaaaaaattatccacaaggaaaatatttatgcctcagtcatgatattttcatcaaattaccttattccaaatttcaagtatcgagttttgcaaaaatacctagctttgtttcataatcccaggcagggtgcaaactcaatggctgttcaaaagttatgagcagacagggaattaaaactcggagactctggtcttctaatctacactggatcaaaacacttcccactgatgataagatagagtctggaatatgggcaaaggagtttgtatttaaaacacattcagaattcycaaagtcttagagaatgattaaatacccagttcagtaagtggtgatagtttagtgccttgagagctataaattatcctaaaataatgacaaaactgaatggcaccaggttcttctaagaattatcatgtcatatcatttaataaacactcatagtaaccactaccactaccattggtcacttaccaactactgtgcga

SEQ ID NO: 345830 - DNA, 583 bp, Homo sapiens
tgagttcgtgacaatagagaatggtgtagggaggagcaaggtggtttcaactgctcatcgtcaagtctaatatgatgtcaggattatgtattttaaaaaaattatccacaaggaaaatatttatgcctcagtcatgatattttcatcaaattaccttattccaaatttcaagtatcgagttttgcaaaaatacctagctttgtttcataatcccaggcagggtgcaaactcaatggctgttcaaaagttatgagcagacagggaattaaaactcggagactctggtcttctaatctacactggatcaaaacacttcccactgatgataagatagagtctggaatatgggcaaaggagtttgtatttaaaacacattcagaattctcaaagtcttagagaatgattaaatacccagttcagtaagtggtgatagtttagtgccttgagagctataaattatcctaaaataatgacaaaactgaatggcaccaggttcttctaagaattatcatgtcatatcatttaataaacactcatartaaccactaccactaccattggtcacttaccaactactgtgcga

SEQ ID NO: 345831 - DNA, 611 bp, Homo sapiens
taataggttataccctagctgtagggttgtcagttggctgaaattcagcttttagggagggtccttaatctcttcaaactcaaagaatctaactggtcattttcttgttttcctagtcaaggtgcctgatgccgtgaaactacccaatgatttgctggtaacttcacatatccayctttgagatagcagtccattttctgctctctgcttttccataggacaagcttgaatatccgaccttggctgataaggaggcatcctaggcaacagatgggtttttggaatggtcacttccagtaagattttcatgatgaaaatttgtcattgtgtatgcatagactaaagatctcagggtaactagaaacattggccttctccttcagtttacccaataaataaggctgactataaactcaagtcacagactaagaatgagaataatatttcagaattaggtagtttaatttttgcacatctaagtaactatatctggatattttaaaatgtatttgttttttctgaagattcgatttgttggctttgttctgaacttgtcagagaaaggacaactcttcagtgaatgtaacttgctttcatactctgtgaaatga

SEQ ID NO: 345832 - DNA, 611 bp, Homo sapiens
taataggttataccctagctgtagggttgtcagttggctgaaattcagcttttagggagggtccttaatctcttcaaactcaaagaatctaactggtcattttcttgttttcctagtcaaggtgcctgatgccgtgaaactacccaatgatttgctggtaacttcacatatccacctttgagatagcagtccattttctgctctmtgcttttccataggacaagcttgaatatccgaccttggctgataaggaggcatcctaggcaacagatgggtttttggaatggtcacttccagtaagattttcatgatgaaaatttgtcattgtgtatgcatagactaaagatctcagggtaactagaaacattggccttctccttcagtttacccaataaataaggctgactataaactcaagtcacagactaagaatgagaataatatttcagaattaggtagtttaatttttgcacatctaagtaactatatctggatattttaaaatgtatttgttttttctgaagattcgatttgttggctttgttctgaacttgtcagagaaaggacaactcttcagtgaatgtaacttgctttcatactctgtgaaatga

SEQ ID NO: 345833 - DNA, 611 bp, Homo sapiens
caacaaaccacagatcaaggaagctcagagataacccgcagaataaataacctccctctcctccctccaaaaacaaaaactatctataggcatatcatattcaagctgcagaaagccaaatgcaaagagaaaatcttgaaagtaaccagaaagaaataaaatgctttacctatataggaacaaggataataattacagcggacttctcaccagaaactatgyaagcaatatttaaaatatttaaagtaacaaaaagcaaaatatttaaagtgttaaaagaaaaaaaacctggaattctatatcaaaatacgttatccttcataaatgaaagaaaaatattttataaaacaaaaactgagggacttcattgccagcatatctatcatgtaaaaaatgtgtaaagattgtctttagatagaatgaaagctatgtaagccggatactttagtctacattaaaaaggaagagcaagggagaataataaataaagaaaaaataaatattgtatttttcatattcttagttgattaaaagataactattgcgtatttattgttactaaataataacaatttctatcttctggataactagaagaatgacagcaacgt

SEQ ID NO: 345834 - DNA, 611 bp, Homo sapiens
caacaaaccacagatcaaggaagctcagagataacccgcagaataaataacctccctctcctccctccaaaaacaaaaactatctataggcatatcatattcaagctgcagaaagccaaatgcaaagagaaaatcttgaaagtaaccagaaagaaataaaatgctttacctatataggaacaaggataataattacagcggacttctcaccagaaactatgtaagcaatatttaaaatatttaaagtaacaaaaagcaaaatatttaaagtgttaaaagaaaaaaaacctggaattctatatcaaaatacrttatccttcataaatgaaagaaaaatattttataaaacaaaaactgagggacttcattgccagcatatctatcatgtaaaaaatgtgtaaagattgtctttagatagaatgaaagctatgtaagccggatactttagtctacattaaaaaggaagagcaagggagaataataaataaagaaaaaataaatattgtatttttcatattcttagttgattaaaagataactattgcgtatttattgttactaaataataacaatttctatcttctggataactagaagaatgacagcaacgt

SEQ ID NO: 345835 - DNA, 388 bp, Homo sapiens
gacttcagaataagaaaaatgccatggataaacaaggcaatgattaaatgatamagggactgattatccaaaaagtcacaacaatcctaacaatagagcatcaaaccatgtgaggcaaaaactgatagaactttaaggcaaaatagataaacttactattatagttggagacttaaacatctatctttcagcaattgatagatcaagcaggcagaaaatcagtaaagatttagttgacctaaacagcaatatcagtcaattttttctaactggcatttgtggaatatgctattcaacaacactagaatatactttcttctttggatcacacaaaatgttcaacaagttagatcacattctgggccataaagcacatcttaccaaattt

SEQ ID NO: 345836 - DNA, 623 bp, Homo sapiens
gtgttgactcctaaccacaatgtgatgacatttgagatttaattttgggaggaaattaggattagatgaggtcctgagggtggggccctcataatggcatttgtgctttgtaagaagaaacacaagagaacttgcctctcccctcctctcctcttttctcctctcttccatatgaggacacagttaagtgaaaaggcagtcatctgcaagacagaagagagccctcatcaggaacccaaccatactggcaccctctcttcagatttccagcctccagaactgggagaaaacaaatttctattgttaaagccattcaatctattgtattctttacggcagctcaagtaggttaatacaataaataatgactttatgaaaaagaaagcaccaggcccagatgttttcaccagtaaatcctaccaaacatttatgataccaattcttctaaatcgctaccagaaaatagaagctggagaaagattactaactcattctctgaggtcagtactgcattaacaccaaaactagatgaaaacattacaacaaatttttgttgatattgaamcttaagaacaatatctatcatgaacatgcaaaaatcttcaacaaaattgtagcaaatt

SEQ ID NO: 345837 - DNA, 627 bp, Homo sapiens
ggcattcaagagagcttgtgcaggggaactctcattaataaaaacatcatatctcatgagacttattcactaccatgagaacagtacgggggaaagagtccccgtgattcgattatctccacctggccccatcctggatatgtggggattattacaatacaaggtgagacttgggtagggatacagccaaaccatatcatttaccatgaatcaaatttaccataaatcaaggaactgtgagtcctgaggcagaactggccataggcaaaattaatgtttttctcctaatacaacattaaatacttaaaatattgccaaatactctatcaaatactgagaataaaaggtgattaagatattttccttgtcctcaggaacttatcattctacaaatgacatggaaacatgtacractaatcctaactgggttagatgcatgccacattagaggtaataataaagtgttgtgggcactcagggacattggccttcctgcttgtctttttgaatttccatttctctgtctcctttccactattcctttttctctcctattgcatctctttcaagaaattcttttatggatccccacctagatctcctatatgctagatctttttctgacag

SEQ ID NO: 345838 - DNA, 453 bp, Homo sapiens
attggcacaattcagtgaaatgagtgctaacccaagaaagaaaatatctagaggggtcaaatcctgctttgttgcttactctactgtgactttgggcaagctggtccccatttggtgtctccctcctgtcttataaatgggagtgatgccatgcagccctgctacattatwaggtcatcataaggagcatatactatcttgtatattataatgcataggagaagactttgtgaattctagttctaataggtggctattcagaaattccataattctattaatatttatcaggatgaagggaagagaaataaggtaggtcagcaagaacctcctactactgagcttcccttccatgttgaaggatctgttctaagatgctttatatatatatagcatataattcttagaacaaccttatgaagtagatgtccttatttcaattccacagatgta

SEQ ID NO: 345839 - DNA, 573 bp, Homo sapiens
agacactccacttgatcagtctgctgctatagcctttgagtggtttggccctgctgatagcacttattttaatggccagaaggaaagaaccttttaagaakatcaaatgagacacctgaaaagaaatctgccttcttagtcccatgggtaggaaaagaagctttcatgttttgatttaaattttgagaattgtttgccttttcagactccagggaggagaaatagatttatattggagtctggcctggagataaaactgcatatcgctaagttaacttactgcattgagagagtgtagctgcctggtggtgtgaaagttggaaagactttagtacctgtcctggctatgccacttacaagctgtgtgaccttggaaaagtgaattaaccttcctgaacctatttcctcatctataaaatagagattagaatgtcttcatagacggttataattttaaaagaaaacaaattctttagttcatcaatttttagcaggctatcaattcccctagttctgaacaggggaccatagtttgagttctacatattggtgtaagaccttgagtaagtcacc

SEQ ID NO: 345840 - DNA, 532 bp, Homo sapiens
actcctttcattttgagaagagtagcattcaggaagctttcattgagtcactggagacaacagttagagtgataaaggtttagtatttcattgaaatgggtcccagttwgctctgtgaaatcctcaaactgatcacagatggtggtattttaaatccatatagaccttgtcattacaaagaatgacaaagcacttgataaagtctttgtggtcaccatgctacagagtgtccaatggggagataaaagagttgcatggaccattaacgcttgagaaattgaataaatgtgtgcagaagaaaaatgttgactagtgacaccaagaggaactctacttttctctaaaggaacccaagagatgtcagatcaaagaaaagactagattttgatgttaaattattcttgttcccattcattgaacaagttttttgagcattgactgtgtgtctgacaccattttagcaccgtggggaacactaggatggataagacagagtatccacttttgcagcaagaagaacaaaaaataacac

SEQ ID NO: 345841 - DNA, 532 bp, Homo sapiens
actcctttcattttgagaagagtagcattcaggaagctttcattgagtcactggagacaacagttagagtgataaaggtttagtatttcattgaaatgggtcccagttagctctgtgaaatcctcaaactgatcacagatggtggtattttaaatccatatagaccttgtcattacaaagaatgacaaagcacttgataaagtctttgtggtcaccatgctacagagtgtccaatggggagataaaagagttgcatggaccattaacgcttgagaaattgaataaatgtgtgcagaagaaaaatgttgactagtgacaccaagaggaactctacttttctctaaaggaacccaagagatgtcagatcaaagaaaagactagattttgatgttaaattattcttgttcccattcattgaacaagktttttgagcattgactgtgtgtctgacaccattttagcaccgtggggaacactaggatggataagacagagtatccacttttgcagcaagaagaacaaaaaataacac

SEQ ID NO: 345842 - DNA, 566 bp, Homo sapiens
aaaaaacatgcaacattactaatcatcagagaaatgcaattcaaaaccatagtgagatattattccaccccagttaagcttttatccaaaagacaggcagtaacaaatgctggtggataaatgggatgtggataaatgggaaccctcacacactgttggtgagaatgtaaatgagttctagccactatggagaacagtatgaaggttcctccagaaactaaaaatagaactaccatataagccaacaatttcactaccaggtataaatccaaaacaaaggaaatcagtatatcaaagagacatctgcactttcatgtttattatagcaatattcacaatagccaaagtatgtagtcaacataaaagtccaccaatgaataaatggataaaaaatatgtggtatgtatacacaatggcatattattcagctatraaaagaattaaatcctgtaatttacaagaacatgggtggaactggaggtcattatgttaagtgaaataagccaggcacagaaagataaatgtcacatgttcttattcctatatgggtgttgataaagtggatt

SEQ ID NO: 345843 - DNA, 576 bp, Homo sapiens
catttgaaactgaagattatctccttctattcttggactatcttctaaaagggaaacgagggaaaagtacaattgaacttcagctctgctcccaatcacacaaatttatgtcatgttttaaaagcttcattaaagtttcagtttcttttgatgccaattctctaaccagaagcattaaattgggaatcatttatttgcattatctctttctgtctcacggggtttcacttaagaatatgaactaaaccaaagggaaggaaactgaaaaagtaaaaagaattgcttttgaaaaaaactattaaaactcggcaaatactccaggataaacacacgatttgctgttttagagatttgctacgtttcygcccacaatttgactgcaaatggagtatttgagaaaaagtttggctccaaataaggtgtaacacatacaaggaaatatttgttccctagtgcttctattatgccagtaaatattgaatagcaatgggtacacttcacaccatgaaaattttccacttcagtcagcactgtactcagggcctttcccagtttcagcattaaagtttcacaaga

SEQ ID NO: 345844 - DNA, 670 bp, Homo sapiens
tccaaacttagaaaggagtatgaaaattttccaaggcatggaaaagatgctcattccatatcataagttatataataagcagaaggcaagcactattcaaactatgcctgaaaaattatttgcaaagaactaaaacactttaattctcaatgcttctaatgttgtaaattacaacatcctaagtgaatattggtgttattattctttcatttccctatacatttataaccaacaatgtctttaatgttgtgacaaaaagaaagtttttatgtcatgtaagttttcccattgattattaatatcacttcttaccattttatcttgcacaatcatttttactgtcctgaactaccaaagtgaagattggcaaagtgaagattgcctgcatttggtaaagcagtcatgatgaaagagaaaagggctgggcacagtggctcacacctgtaatcccagcactctggraggctgagacgggcagatcaccttaagtcaggagtttgaggccagcctggccaacatgttgaaaacccgcctctactaaaaaaacaaaaattagtcaggcacagtggagcacacccgtaatcccagctactcaggatactgaagcaggagaattgcttgaacctggaaggcggagatggcagcgagccgagatcgcaccactgtactc

SEQ ID NO: 345845 - DNA, 670 bp, Homo sapiens
tccaaacttagaaaggagtatgaaaattttccaaggcatggaaaagatgctcattccatatcataagttatataataagcagaaggcaagcactattcaaactatgcctgaaaaattatttgcaaagaactaaaacactttaattctcaatgcttctaatgttgtaaattacaacatcctaagtgaatattggtgttattattctttcatttccctatacatttataaccaacaatgtctttaatgttgtgacaaaaagaaagtttttatgtcatgtaagttttcccattgattattaatatcacttcttaccattttatcttgcacaatcatttttactgtcctgaactaccaaagtgaagattggcaaagtgaagattgcctgcatttggtaaagcagtcatgatgaaagagaaaagggctgggcacagtggctcacacctgtaatcccagcactctggaaggctgagacgggcagatcaccttaagtcaggagtttgaggccagcctggccaacatgttgaaaacccgcctctactaaaaawacaaaaattagtcaggcacagtggagcacacccgtaatcccagctactcaggatactgaagcaggagaattgcttgaacctggaaggcggagatggcagcgagccgagatcgcaccactgtactc

SEQ ID NO: 345846 - DNA, 559 bp, Homo sapiens
aggcacagtggagcacacccgtaatcccagctactcaggatactgaagcaggagaattgcttgaacctggaaggcggagatggcagygagccgagatcgcaccactgtactccagcctgggcaacagggcaaaaaaaaaaaaaaaaaaaaaagcagaagcagaagaagaaagaaaaaagaacatatgtgtaatatatgactgatgtgttgtattccagtgtctaacagtatagttaaaacaaattttaatcaccttgactagctagatgtttaaacttagaattttaggataaaatggaaaaactacttctgccttttcccaaatatgagaggaaatttgcttttttgatttgtatacccaagagtagaaaaagctctagaataagtttcaagaagcctgagttcaaaactgggctccctcacaaccgaagtcaaatccttctttcattctacaaacatttactgccagatgccctgttttgtgttgaggatacagaactgaatatgatgtggaatttgtcctcaaagaacttgtatcctattaggagagaaaaaacag

SEQ ID NO: 345847 - DNA, 564 bp, Homo sapiens
ttaggataaaatggaaaaactacttctgccttttcccaaatatgagaggaaatttgcttttttgatttgtatacccaagagtagaaaaagctctagaataagtttcaagaagcctgagttcaaaactgggctccctcacaaccgaagtcaaatccttctttcattctacaaacatttactgccagatgccctgttttgtgttgaggatacagaactgaatatgatgtggaatttgtcctcaaagaacttgtatcctattaggagagaaaaaacagaaacagctacagtacatttctcayctataaatcagatctaataatgcctatctcccagggtactgtgaggataaaatgaaactgtatggaaaaccattttgctatcaagtagtataccagtaccagctagtaatattgtcattgtggcacctgacaaaaattagaccagcttactcttatccagtggttctcacagtatagtcttcaaaacagcagcatcagcatcacctggaatcatgtccaaaatgcatattcctgagcctcaccccaatgtagtgaatcagaaact

SEQ ID NO: 345848 - DNA, 565 bp, Homo sapiens
tttctcatctataaatcagatctaataatgcctatctcccagggtactgtgaggataaaatgaaactgtatggaaaaccattttgctatcaagtagtataccagtaccagctagtaatattgtcattgtggcacctgacaaaaattagaccagcttactcttatccagtggttctcayagtatagtcttcaaaacagcagcatcagcatcacctggaatcatgtccaaaatgcatattcctgagcctcaccccaatgtagtgaatcagaaactggaggctgggctcagaaatctgtgtcttaagccctccatgtgattctgatgcaactaaagtttgaaagccactgctgagtcttatctatataagataaaaacacaggtactgtgaatcctagtacatacaaaacactccctctcaattatcaatgaggaaattaaagcagaatataaccaagtcttctaattggccagaaaaaaatagcatcataatgaatcaaaggttataaaaatcctcatgttctaatctagtccatggtcatcctgcttcagaagtcctcccactaag

SEQ ID NO: 345849 - DNA, 565 bp, Homo sapiens
tttctcatctataaatcagatctaataatgcctatctcccagggtactgtgaggataaaatgaaactgtatggaaaaccattttgctatcaagtagtataccagtaccagctagtaatattgtcattgtggcacctgacaaaaattagaccagcttactcttatccagtggttctcacagtatagtcttcaaaacagcagyatcagcatcacctggaatcatgtccaaaatgcatattcctgagcctcaccccaatgtagtgaatcagaaactggaggctgggctcagaaatctgtgtcttaagccctccatgtgattctgatgcaactaaagtttgaaagccactgctgagtcttatctatataagataaaaacacaggtactgtgaatcctagtacatacaaaacactccctctcaattatcaatgaggaaattaaagcagaatataaccaagtcttctaattggccagaaaaaaatagcatcataatgaatcaaaggttataaaaatcctcatgttctaatctagtccatggtcatcctgcttcagaagtcctcccactaag

SEQ ID NO: 345850 - DNA, 565 bp, Homo sapiens
tttctcatctataaatcagatctaataatgcctatctcccagggtactgtgaggataaaatgaaactgtatggaaaaccattttgctatcaagtagtataccagtaccagctagtaatattgtcattgtggcacctgacaaaaattagaccagcttactcttatccagtggttctcacagtatagtcttcaaaacagcagcrtcagcatcacctggaatcatgtccaaaatgcatattcctgagcctcaccccaatgtagtgaatcagaaactggaggctgggctcagaaatctgtgtcttaagccctccatgtgattctgatgcaactaaagtttgaaagccactgctgagtcttatctatataagataaaaacacaggtactgtgaatcctagtacatacaaaacactccctctcaattatcaatgaggaaattaaagcagaatataaccaagtcttctaattggccagaaaaaaatagcatcataatgaatcaaaggttataaaaatcctcatgttctaatctagtccatggtcatcctgcttcagaagtcctcccactaag

SEQ ID NO: 345851 - DNA, 472 bp, Homo sapiens
cagtgttgtcaaactttttaagaagaaaatatatttcagcatccaccctagaatgcaaaaattgttttctctcactctgaaaactccaggtccaacagtgctgagatccggataggatttcctgggattggaagacatggttgcatttttaaagccaatttatttaaacaacaattttaatagttctrttctccaggagaacagaatagttctattctccaccgagtggtgatggttactagaacttaaaatgctactgtgcaggcaattcttgtcttcaacacactccactgcaacagacactaaagccacaaaactgaaaggtacctgctcttggagttcagaagctggattctgccacttattagctgtgtgactatgaagggcagctcactaaatgttacctgtgcaactatgctgtgattgggtgactatgaacacgtctttaaatcttgtttcaggaattttccaa

SEQ ID NO: 345852 - DNA, 472 bp, Homo sapiens
cagtgttgtcaaactttttaagaagaaaatatatttcagcatccaccctagaatgcaaaaattgttttctctcactctgaaaactccaggtccaacagtgctgagatccggataggatttcctgggattggaagacatggttgcatttttaaagccaatttatttaaacaacaattttaatagttctgttctccaggagaacagaatagttctattctccaccgagtggtgatggttactagaacttaaaatgctactgtgcaggcaattcttgtcttcaacacactccactgcaacagacactaaagccacaaaactgaaaggtacctgctcttggagttcagaagctggattctgccacttattagctgtgtgactatgaagggcagctcactraatgttacctgtgcaactatgctgtgattgggtgactatgaacacgtctttaaatcttgtttcaggaattttccaa

SEQ ID NO: 345853 - DNA, 175 bp, Homo sapiens
aagaatcaatattgttaaaatgaccatactgcccaaagcaattgacagattcagtgctcttcctatcaaactgccaaggccatttttcacagagctagaaaaaactattccaaaattmatatggaaccaaaacagagccagatagccaaagcaatctgagcaaaaagaaaagcca

SEQ ID NO: 345854 - DNA, 554 bp, Homo sapiens
aatattatgtggtatgaatagaccacattttgtttatccatcatccatcgatagacattgggttgcttttattccttggccatgatgaatagtgctgctgtgaacatggctggctgtccagcaccatttttggatacrttgtatttttattattaattagttcaaaatctgttcactttttaaaatttctcctttgaaatgtgggttattttaaagtagttgatttccaaatgcctccatattttctggttatatttttgttatttatttctagcttgcttacccgtagtcaggaacagattatttacaatgttaacattttgaaatttgtttacactggctttagacttgtccaccatatgattaattttgacagactatcccatgtgcccttgtgtgtagttcctcggttcagtactttcgatatattcatgaggaaaaatgggtaattgtggtgttcaaatcttatatttccattcttatttttacttctttgttatatcatttactgaaagaagtgtgttaaattatccagctgctcataatgtctgtgt

SEQ ID NO: 345855 - DNA, 554 bp, Homo sapiens
aatattatgtggtatgaatagaccacattttgtttatccatcatccatcgatagacattgggttgcttttattccttggccatgatgaatagtgctgctgtgaacatggctggctgtccagcaccatttttggatacattgtatttttattattaattagttcaaaatctgttcactttttaaaatttctcctttgaaatgtgggttattttaaagtagttgatttccaaatgcctccatattttctggttatatttttgttatttatttctagcttgcttacccgtagtcaggaacagattatttacaatgttaacattttgaaatttgtttacactggctttagacttgtccaccatatgattaattttgacagactatcccatgtgcccttgtgtgtagttcctcrgttcagtactttcgatatattcatgaggaaaaatgggtaattgtggtgttcaaatcttatatttccattcttatttttacttctttgttatatcatttactgaaagaagtgtgttaaattatccagctgctcataatgtctgtgt

SEQ ID NO: 345856 - DNA, 572 bp, Homo sapiens
ttccagtgttaagagacaaaaaaaatgtgcccagctctcctggggttgacagtctcagttggtaaatcccatcccaagggggcagctcctctcctgtctgtggtttgcctgctgtcccccaggagccacactcaccagtttggtcagctggcagatgataagagggagagaatcttttagaaaacagatcctggagatcattgttagtggagaacttattatcaagtcaggaagaagaaaaatcattgttagttgagtgaatacattttaaaaaatgataaagtgttcgtcaggcacttgggatttcttgctcatatgctaataggatttttgaaaatccacycactgtttggaaacttgcttgctcagtgacaactgcatccaaatagcagatcatgagccaggtttgtggggggacaagagtgaagggagttcggaggaagtcgctctgggccaggaggcagggaccctggccaccagccatgtgacccggggcagatccttgcagtgctgggccttggttttggccactgccccctggccccccacttcccagaattattgtgaggaac

SEQ ID NO: 345857 - DNA, 593 bp, Homo sapiens
agtttgctgtggacttgtggtagatcctcactttgttaaggaagtctccttctggtcctaatttgctaggagtttttyctccctttaattgtgaatgcatgttgaactttatgaaatggtttttgggcatcaattgagatgatctgttaatgtgatgaattatgtgattgcgacaatagcttttctaatattacaccaagttgacatgcctgggataaacctgtatttcatcatgatatgtctcttaaaaattgctgggttcacttggctaatactttatttaggatgttttttcacctgtttataaatgagtttggcctataatttacctttcttattctgcctttcattggttttagtgtggagattatattagacccataacattcagcatctcatccttttctcttttggagagcaattaatataagactgaggtgatatgttcctcaatggtattgttaaaacttacctgtgacaccttctggttccagtgcattactagtggccagatttcaagtgactaattaaatttccttaacatttaaagtctattcacaatgaggaaataaaccttacctcatcagttggct

SEQ ID NO: 345858 - DNA, 624 bp, Homo sapiens
taagcaacaggattaacaccttaaagttccagaaagattttgagtaagtccatttaaaaattccattcataaataatgtttgctacttgaaagtgaagtctttgactgtacaaagtagatgtgcgattgcggatagtataaggattctggcccttggtacagagcactgtttagaattattttatttggaaggggaattagtcttgtgttgatgagtgggatgttgagcaygtattttaaaaaattatttgtaattgttataaacaaaagtagttggtatgatttagggctttaagccttgttatcatccctataatattaatacaaataggatatagagtagttgagattttggaaaggggtatagtgtgttgaaaaaattttagacttcttgtagttttttcccctcggatttacagactatgattctaatatagatcaatttttaggcactcggctttataaatacatatggttgatgtacttaagttagcctgcaaagactgagattcttgaactgtaagtcaagttgtatcagtggtaggtcattgttgatgtaacagtaactgcataaagatgaatatagctactttaacagtttcatagcatttatagcacatggtc

SEQ ID NO: 345859 - DNA, 643 bp, Homo sapiens
aagcgaattcaccatcctcttggggatgcaggggttgcgggtcaccatctgaggatctccccagcatgctgaggagtgggggcaggtgccagggtagccccactgctgccctaagacctggaagagagggctttgtggagcaggaccacacacttccagtgggattcccacctccaaagcctggtactcgggcctcaggacactctgggaccttcctgggtcatcatcaagagccagccccagggtcagaccattcttataattaagctgaaaagctcttgaaatctctacccagcatgggaatgagctgttctcccctgcaagggttgaaaacagctcatgaccatcttccaaaggaaaaccctccctacttgaaagcagttataaaatcatgcctcagccttttgtttcccagccaaatgatgccaattactaataccaaagggagagaacgtgactcactgatgttcccagtcctgacggctgactgccgtcaattccctggtccmtagagttcgctccactgtctcttttctgaccgttctccacagtcggtcaccagaaagtcaccctctcttcttgcttttctccaggagagttataggacttcccaaggcccgtaggtccattggcaaggtcacac

SEQ ID NO: 345860 - DNA, 643 bp, Homo sapiens
aagcgaattcaccatcctcttggggatgcaggggttgcgggtcaccatctgaggatctccccagcatgctgaggagtgggggcaggtgccagggtagccccactgctgccctaagacctggaagagagggctttgtggagcaggaccacacacttccagtgggattcccacctccaaagcctggtactcgggcctcaggacactctgggaccttcctgggtcatcatcaagagccagccccagggtcagaccattcttataattaagctgaaaagctcttgaaatctctacccagcatgggaatgagctgttctcccctgcaagggttgaaaacagctcatgaccatcttccaaaggaaaaccctccctacttgaaagcagttataaaatcatgcctcagccttttgtttcccagccaaatgatgccaattactaataccaaagggagagaacgtgactcactgatgttcccagtcctgacggctgactgccgtcaattccctggtccatagagttcgctccactgtctcttttctgaccgttctccacagtcggtcaccagaaagtcaccctctcttcttgcttttctccagragagttataggacttcccaaggcccgtaggtccattggcaaggtcacac

SEQ ID NO: 345861 - DNA, 624 bp, Homo sapiens
ttttctgtatctttgattttctgcagtttgagtataatgtgtctaggtgcctttgtttgtttgtggctttagttttttttttttttttttttgcatttatcctgcttagtgttctatgagcttcctagataggtgatttagtgtatgtcactaatttgggggaaatccttggtcattattggttcaaatatttcttctgttctattctgcccttcttctccttctagtattcccatcatgcatatggtgcagcttgtgtcgttgtcccacagttcttggatattctgttctgcctttttyagtcttttctctctttgcttttcaattttggaaagttttattttgatatcctctaatcaaatatcaaattcagtgattctttcctcagtcatgtccagtctgctaatgagcccatcacaggcgttcttcatttctattacagtgtttttgacctctagtatttttttgacgctttcttagaatgttcatctctctgcgtacattgccatctgttcttgaatgttgtctactttatccattagagtccttagcatctttatcatagttgttttcagttctcggtctgataagccaacatccctgctgtatttgagtttagttttg

SEQ ID NO: 345862 - DNA, 624 bp, Homo sapiens
ttttctgtatctttgattttctgcagtttgagtataatgtgtctaggtgcctttgtttgtttgtggctttagttttttttttttttttttttgcatttatcctgcttagtgttctatgagcttcctagataggtgatttagtgtatgtcactaatttgggggaaatccttggtcattattggttcaaatatttcttctgttctattctgcccttcttctccttctagtattcccatcatgcatatggtgcagcttgtgtcgttgtcccacagttcttggatattctgttctgcctttttcagtcttttctctctttgcttttcaattttggaaagttttattttgatatcctctaatcaaatatcaaattcagtgattctttcctcagtcatgtccagtctgctaatgagcccatcacaggcgttcttcatttctattacagtgtttttgacctctagtatttttttgacgctttcttagaatrttcatctctctgcgtacattgccatctgttcttgaatgttgtctactttatccattagagtccttagcatctttatcatagttgttttcagttctcggtctgataagccaacatccctgctgtatttgagtttagttttg

SEQ ID NO: 345863 - DNA, 369 bp, Homo sapiens
taattttaaataacaaaataatctccctactcaaattcctgattatgtattacagttcttcttgaaaacaacacttggttttaatttttacaaggctctaccagaaaatgtgtccaaaatgattccttataatttttgtcaagaatcactttgaagttgaaggtgtatttttcaaatattcgtacttcattctactgacagtaacataaaaccatagttcaattcaattcacataaactctggaaatgaacggcaggttaaaacacaaagaacttaacattatacataacaaagggctratacagtttatatatttagggccctcaaaaattgataaccaaaatctatgaaaaaacaatttacagaaga

SEQ ID NO: 345864 - DNA, 369 bp, Homo sapiens
taattttaaataacaaaataatctccctactcaaattcctgattatgtattacagttcttcttgaaaacaacacttggttttaatttttacaaggctctaccagaaaatgtgtccaaaatgattccttataatttttgtcaagaatcactttgaagttgaaggtgtatttttcaaatattcgtacttcattctactgacagtaacataaaaccatagttcaattcaattcacataaactctggaaatgaacggcaggttaaaacacaaagaacttaacattatacataacaaagggctaatacagtttatatatttagggccctcaaaaaytgataaccaaaatctatgaaaaaacaatttacagaaga

SEQ ID NO: 345865 - DNA, 369 bp, Homo sapiens
taattttaaataacaaaataatctccctactcaaattcctgattatgtattacagttcttcttgaaaacaacacttggttttaatttttacaaggctctaccagaaaatgtgtccaaaatgattccttataatttttgtcaagaatcactttgaagttgaaggtgtatttttcaaatattcgtacttcattctactgacagtaacataaaaccatagttcaattcaattcacataaactctggaaatgaacggcaggttaaaacacaaagaacttaacattatacataacaaagggctaatacagtttatatatttagggccctcaaaaattgataacmaaaatctatgaaaaaacaatttacagaaga

SEQ ID NO: 345866 - DNA, 573 bp, Homo sapiens
aaaaataatgacagtagttttttagtttctctagttaatttttttcttttttgctgaaacaattaatgagtagattattacccactamtttttatcttatagaaggaacataccccatattgcccataatagtgtatttgattatgttgcaagcatgatgctgaatactggagatatgtataccaataaataccaataaaaaagttatctgcaaagaactaaagtgcaaggtagacacatacagtgagttgtgagctagcagaagcaatatggcatattgtttacaaggattgggtatcacaccaaactgcctgaattggaatcctggctctgccactcactagtctgtgtacctgggtatgtttttaacttttctaggcctcagtttcctgatcccaataatggggataattattatcaacttcacaaattgtgagataatggattaagattgttcatataagttctaagaacagcttatggaaccttataaatgtttacattttatgacactttagcctgaatataactgcaaatccattaaaactaagaaaaatacagaaatattaataa

SEQ ID NO: 345867 - DNA, 573 bp, Homo sapiens
aaaaataatgacagtagttttttagtttctctagttaatttttttcttttttgctgaaacaattaatgagtagattattacccactactttttatcttatagaaggaacataccccatattgcccataatagtgtatttgattatgttgcaagcatgatgctgaatactggagatatgtataccaataaataccaataaaaaagttatctgcaaagaactaaagtgcaaggtagacacatacagtgagttgtgagctagcagaagcaatatggcatattgtttacaaggattgggtatcacaccaaactgcctgaattggaatcctggctctgccactcactagtmtgtgtacctgggtatgtttttaacttttctaggcctcagtttcctgatcccaataatggggataattattatcaacttcacaaattgtgagataatggattaagattgttcatataagttctaagaacagcttatggaaccttataaatgtttacattttatgacactttagcctgaatataactgcaaatccattaaaactaagaaaaatacagaaatattaataa

SEQ ID NO: 345868 - DNA, 488 bp, Homo sapiens
actcaatcttgccttcccaacagttccccaaagtcttaactcatttcagcattaactcaaaattcaatagtccaaagtctcagatgagacaaggaaagtcctttatgcctgtgaacctgtaaaatcaaaagcaagttagttacttcctaaatacaactggagtccaggcattgggtaaatatacccattccaaatgggagaaattggccaaaacaaaggasctacagggcccaagcaaatccaaaatccagcacggcagtcaaaccttaaaggtccaaaatgatctcctttgatgccatgtatcacatccaggtcacgctgatgcaagaggagggttttcatgatcttgggcatctccacctctgtagctctgcagagcacaggctccctgccagctgctttcaatgggctggtgttgagtgtctatggcttttccaggtgcaaaacgcaagctgttggtggatctaccattctggggtctggaggac

SEQ ID NO: 345869 - DNA, 573 bp, Homo sapiens
aaaaataatgacagtagttttttagtttctctagttaatttttttcttttttgctgaaacaattaatgagtagattattacccactactttttatcttatagaaggaacataccccatattgcccataatagtgtatttgattatgttgcaagcatgatgctgaatactggagatatgtataccaataaataccaataaaaaagttatctgcaaagaactaaagtgcaaggtagacacatacagtgagttgtgagctagcagaagcaatatggcatattgtttacaaggattgggtatcacaccaaactgcctgaattggaatcctggctctgccactcactagtctgtgtacctgggtatgtttttaacttttctaggcctcagtttcctgatcccaataatggggataattattatcaacttcacaaattgtgagataatggattaagattgttcatataagttctaagaacagcttatggaaccttataaatgtttacrttttatgacactttagcctgaatataactgcaaatccattaaaactaagaaaaatacagaaatattaataa

SEQ ID NO: 345870 - DNA, 512 bp, Homo sapiens
agggcaagtttatgaaaacatgaggagacgtgtgccagagagaaaaattcttggctctaaaatgttctagaattgtagaattccaagctgcgtctgctcctaatctaggcctttccagtgactctttgtaccatctttatacactatacatacttaaagcaccatcaaatatgctgagtaatgtggactaagtgctttttcacacatctttgagtgactacagagcttctgastctgtctcaaagcaaacaccttcagaggcacccagtaaatggggcttagctacactcctaaatgtgatatacaatgtctgtaaaatccaaagaccttcaccaaacactgatcctctttcatgaatataggatgtgaaaggtgcaaaaactcatcctttatcatagaaagcatatcccaccatattacagactatttgaattttaaagatttcaagatttcgaataaccatttaatctctgctaattttatctgtccacctctggcacacattttctttc

SEQ ID NO: 345871 - DNA, 585 bp, Homo sapiens
atttttatgactgaaaggtggtacctggtttacttagaacagcatgcacagctagcagacataggggacagttcagattatcaacaaagtagatgagctaatgcatatagctggaatagattttaaagcttttgtggatcaaagacagaccagccaatgggctgatacatggcttttacctggaattaatgcagagaattacggaaacaagataaaccaagatgaagataagatttggggaaatgtctgaggtcatgaatctctgaaattaataaagggaaagaatttatgaggctatgattttgtattttgtatctgractatatatactgtttttctgtcagtctttgtgttttatgaagatattctgggtagtcatcacatggacatgctgattaggatgcattcattgacacctctgtttttggactctataaaggtcagccaaacatatggccccaaacagcttatattcctaaatcttgccaagtttggaaaattgaacctacattgtatatcagaaaaagacaattttattcagcaactcataagtattttgtacagaccagggtactgtacaatatt

SEQ ID NO: 345872 - DNA, 565 bp, Homo sapiens
gactctttgtaccatctttatacactatacatacttaaagcaccatcaaatatgctgagtaatgtggactaagtgctttttcacacatctttgagtgactacagagcttctgactctgtctcaaagcaaacaccttcagaggcacccagtaaatggggcttagctacactcctaaatgtgatatacaatgtctgtaaaatccaaagaccttcaccaaacactgatcctctttcatgaatataggatgtgaaaggtgcaaaaactcatcctttatcatagaaagcatatcccaccayattacagactatttgaattttaaagatttcaagatttcgaataaccatttaatctctgctaattttatctgtccacctctggcacacattttctttctatattgtttaggatatttgatactccatactcactggatccaattagcatgatgtaattagtacattgcgccagtggaatgtctaatgaaatgtcaacattaccaaagtccctgcagaataaattgtaaagagaataagaaaattaacatagctctcaggcaagactatta

SEQ ID NO: 345873 - DNA, 592 bp, Homo sapiens
atcccaccatattacagactatttgaattttaaagatttcaagatttcgaataaccatttaatctctgctaattttatctgtccacctctggcacacattttctttctatattgtttaggatatttgatactccatactcactggatccaattagcatgatgtaattagtacattgcgccagtggaatgtctaatgaaatgtcaacattaccaaagtccctgcagaataaattgtaaagagaataagaaaattaacatagctctcaggcaagactattagtgtgtactactgcctttgtcaggtaacatttaattgctttcrattctctctactgatggaatatcaagatgtaataattcaccactcaataccatgttgttctgtcctcagtaaaagataccatatctgcagtagcagttgcaattggggctgccctttggttaagttcagagttgtccaccaccacccatttgttatctgcagagggcagacagacaattgaatatgaggtatagagaggacagctacactggcaacctccaagtctttattagcatcactaatcactgtacatcatcatgcaatgtgtta

SEQ ID NO: 345874 - DNA, 541 bp, Homo sapiens
gcctaaattataagtatgcacttttctagtaattcctttgatgtttagatcgacatgttatgctaatatgtaaaataacttctaaataaatgtcacctctaccattttccagggcctatgaagaaagaaatgtaatattaacaataattttctgtttttaataaatggttagctaaacgtataccaatctgaaaaaaaatgcttattatataatttaaaggtttctggaggttttgaagacataagataccaaactaatatgagaatatttatacaatcattataaaattaaagaaaatactaacacataattttcagaattttggcttgaaatgtcttgagttttatgttcagatattttgaacctttaaataaataattaaaataatggtttccatcttaaatcaacagaaaaacttaaagaagcctaraattttataattaaagctattagtatttcagaaaaacatggatcaatatgatcaatttggtttcgtcttcatgtaggcagaatatagtaattcttatttggtgttagtga

SEQ ID NO: 345875 - DNA, 559 bp, Homo sapiens
gaaacaattcatagcattttttaattccaaaacaatgtttgcctttctattagttctcttgggctctttttcaagtatgagttttaaatagtctctgatactttggttgttattgaatgctttgttaatacattttatcattttataatcattatttaaaggtcttatccaagaagggttctattttgtaaaactcttgaaatgttatttctcctttcagttggatcktctgtcttttattcattatataatagattgttcaataaaacaaagattggacagtacctgctgatggacttgtgattaagtttgtagggagaattggcaggagcaagccaggagtgttatgaggtgtgaggggctggggaaagaaagatttcaggaacagctcccatgatcctggcctaagtttataggaaacaatgccatttactgaaatggggaagaagtgggatttagggcagatgtaaagaaaagaaacagacattttaatttttaaataaattgtgatagaaatctaaggtattttgtgtgccgttctgagttcctaagaatgttt

SEQ ID NO: 345876 - DNA, 621 bp, Homo sapiens
cctcttgtgccagttagcccaaaggaaaagttattgaaggaaattgaaagtgtaatttctgtaagcacacatatgataagaaggcaaaacagccttattgctgatatggagaaagttttagttacctatttagaaaataaaaccagccacaatattcccttaagcccaaatctaatccartgcaagacactaactctcttcaattctataaatgctgagaggggtgaagaagctgcagaagaatagtctgaagtgaacagaggttagttcatgagtttttaaaaaatcagttgtccccaaaacataaaagtgcaagatgaaccaacaagtggtgatgtagaagctgcaacaagttatccagaagatttagctaaaataattcaaggagttgtttacactaaacaacaaatttttattgtacatgaaacaaccttgtagtggaagaagatgccatctaagactttcatagctagataggaggagttaatgcctgacttcaaagcttcaaaggacaggctggctctcttgttagtggctaatgcagctggggccattcagctgaagccagtgttagctcattatgaaaatcatatggtctttaagaattgtgctaaatctcct

SEQ ID NO: 345877 - DNA, 548 bp, Homo sapiens
agtaattttgactttcaggtcttattatctaagaaatgcattttctaaggctatacctgctctagactagattactctgatggattttgacaaggtaaattgagaaccttctggaaagaattccccattctagatgcaattaagagtatttataatgtgtggcaaggtcaaaatatcaacactaacaggagtacagaagttaactccaactatcatggatgattttgaagggttcaagaattcagtggaagaagtaacttcagatgtggtgataatagcaagagaactagaattagaagtgaaacttgaagatacgaattactgtartcttatggtaaaaatttaaaggataaggagttgtttcttatggatgaaaaagcaagtggtttcttcagatggaatctactcctgctgaagatcctgtgaacattgtggaaacgacaacaaaggctttagaatactatataaacttagttgataaatagcaagagaatttgagagaattatctctaattttgaaagaagttctactgggggtaaaatgctac

SEQ ID NO: 345878 - DNA, 591 bp, Homo sapiens
tgcctgctctgacatttagactgtaggttaacatgcttcaactgcattgtggccggggcccacacctatgctgaggtgacccatgtttccaactgttggatctgcactttcccccttccagcagcagctgctgcttgccttggcagatacatccagcatctgcagagagctggacatggctggagactctacgattccttgagtgctcttccagctacctgccactcrcacactgactcccctcggatctcaattagaacctgacatatatatttatttatatatactgctcaaaggaagttgttctaaatgaagtagttgctttaaaggaagtaaacattgagaaaaattagatcccttgctttatatcaaattaagtatattctaagatgtttagtgttttttttctactatgggaaaaataggcccccacacaatattttatcaataatgtcaattatatacaaacacctcaaatataacactgttgccaaaagtgcctgagactcagatcttagcaagcattatgggtagtttagaggggaaaattggggctaaattacaagacttctaccccagggattcaaaggt

SEQ ID NO: 345879 - DNA, 535 bp, Homo sapiens
ctgtaattgtgctgccaaaaatattgtcacataatattaagtatatatattattagccttgctaagtctattgtccatctaggagtcgctgagcacttcatatttgcttctagaactgcccaagcagaacctatccacccatatataatsttttcctgttctcttgtgtgtgtattttcagtcaagatgaatagagagtttagttgttgcattattttttatttttctacttaatattattttatatggttaatatggtccaatatacttttgaaatttttgaaatgatgttaaacattttccttttagatatttgcttctataaaattatttttgttataaatatgacagtgattaagtcattttaaaaactggctgcatcagtaaatttttccttctcatatactcaaaatatataaataccttacaggatcataacatgtatttccaaatggcttcttaaaaaatgactgtcattatagtatgtaaattagaagatagatggaaattgatacttcattgttcagttgactgg

SEQ ID NO: 345880 - DNA, 535 bp, Homo sapiens
ctgtaattgtgctgccaaaaatattgtcacataatattaagtatatatattattagccttgctaagtctattgtccatctaggagtcgctgagcacttcatatttgcttctagaactgcccaagcagaacctatccacccatatataatcttttcctgttctcttgtgtgtgtattttcagtcaagatgaatagagagtttagttgttgcattattttttatttttctacttaatattattttatatggttaatatggtccaatatacttttgaaatttttgaaatgatgttaaacattttccttttagatatttgcttctataaaattatttttgttataaatatgacagtgattaagtcattttaaaaactggctgcatcagtaawtttttccttctcatatactcaaaatatataaataccttacaggatcataacatgtatttccaaatggcttcttaaaaaatgactgtcattatagtatgtaaattagaagatagatggaaattgatacttcattgttcagttgactgg

SEQ ID NO: 345881 - DNA, 570 bp, Homo sapiens
gattgagacacactcttcatggagagcctgttctgtcagtatacaggcacctagaaatactttggaatatgaattataaacaacccaatagctaggtttttggtcaggtggctagagtggcaaaactgtaatgtccatttacttgtattttcagttttaattgtaacttagttttattttacaaagacccagatgcctgggccaaataatgcagtatgcctggataacatgtgttttgaagacttgctttaagcctgaaggaaaaacrcaagataaacagcactctaaagatttggcagtacaaatattggaaagaggggtactgccataccattccaatgtcagaccaatcactgatcaaaaagaaatattcttagataagccctcattttaaggtttctccagctttaaaatcatagagttaactattcagttatgtagccatacagtttacatcagttaatcaaacatttagcgaacataagtatgtttatgaagcattaactgaatgatacagaggaatttattccaaaatccagtgttttccaagcaacgaaacatgggacagag

SEQ ID NO: 345882 - DNA, 569 bp, Homo sapiens
aaacagcactctaaagatttggcagtacaaatattggaaagaggggtactgccataccattccaatgtcagaccaatcactgatcaaaaagaaatattcttagataagccctcattttaaggtttctccagctttaaaatcatagagttaactattcagttatgtagccatacagtttacatcagttaatcaaacatttagcgaacataagtatgtttatgaagcattaactgaatgatacagaggaatttattccaaaatccagtgttttccaagcaacgaaacatgggacagarccattccattaaaaaaaagtatccattgactcaaggtaaagtgagaaatatgaggaaaatataatactttgattatttttgtaagcagatatgttcaaactaatggaaacattaacaagggtctgatttttttgtcaatgaagaaaaatattgaacctctaaacacagtattagtacaacaaaacacaaaaattggaatagcatttaaattaaatacatgtgaaaggaaaaatacctatcctgctgaattcgtctggctccaactaaatcaca

SEQ ID NO: 345883 - DNA, 582 bp, Homo sapiens
ggctgcgtctaacagcatgttcttatatgcattcacaaagagaaggtctgaagttggaacttatatttaaaagggaagtagagtataaaagtttggaaaacttgtagcctgatcatgcagtagaaaagaaaagcccattttctggggagaaattcaagccacctgcagtaatttacatgagtaaagagggtccaaatgttaattgccaagacaatggggaaaatgtttccagggcatttcagagacttttccagcagccccacccatataggcctggaggcctagaagggaaaatggtttcatgcrctaggcccagggcctcactgctctgtgcagccttgggacacaatgctctgcttcccagccaccccagctccagcaatggtgaaaagggaccaaggtacagcttgggccattgcttcagagggtgcgagtcccaagtcttagtgtcttccacatggtgttgggcctgagggtgcacagaaggcaagaattgaggtttgggagcctctgcctagatttcagagggtgtatggaaacaactggatgtccagggagaagtatgctgcaggagcagagccc

SEQ ID NO: 345884 - DNA, 518 bp, Homo sapiens
gttgtttgaaagtctgtagcacttcctcctttgccctcctctctctcctgcctcaccattgtgaagatgtgcctacttccccttttccttctatcataattgtaagtttcctgaggtctctccagccatgcttcctgtacagcctgcagaactgtgagttaattaaagctctttttttaaaaaaktacccagtctcaggtagttctttatagcagtgtgagaacagactaatatacctgtaagtaaaataaaacaaaaattaattcaaattaagcacataaaaatgaagatagtgcaaaggagaggagcacagcatttaaaagaaaataaggcaataaatcaaccagataaaactatgtataataaagccatctccattttccttaacaaaggtaatgattttagagactacctatgtagctaccatatatatctctaccatatatatctactatatatctatatttactatgtatatatagtagaatactatatatacatgtatctactatagatat

SEQ ID NO: 345885 - DNA, 576 bp, Homo sapiens
taagggccctgcaaacaaaatctctgcagtctaatatttgatggaaacakttgtacacactttctctacattgaatgccaacagcctggcaaacagcctattcattcagctttctcaatacaataatcaaaaaaggaggaaattagtttctgtaacagaaattagccagaacaattattaaagtagatctccataaaccaatacctacaagacatgattacaaggtagtgttaatgtttattctctactagcacatcactattatttataagtaaatggttttcagtactgttatttctgttacttcttgcttatttttcttatcaggtatacggctaaataaaaaatttaactcattatatttcaaaacattttatgctagaaaataataatttacttccatttttatcgctctttgccttgtttatgtatcttactaatagtgacttttttaaaaggcacacatttacagaagactttgaattttttttggccataccccaatattgaataacacctaacttgaaagttttttaaattgaaaattactattcatgataatgtctccaacttttg

SEQ ID NO: 345886 - DNA, 576 bp, Homo sapiens
taagggccctgcaaacaaaatctctgcagtctaatatttgatggaaacagttgtacacactttctctacattgaatgccaacagcctggcaaacagcctattcattcagctttctcaatacaataatcaaaaaaggaggaaattagtttctgtaacagaaattagccagaacaattattaaagtagatctccataaaccaatacctacaagacatgattacaaggtagtgttaatgtttattctctactagcacatcactattatttataagtaaatggttttcagtactgttatttctgttacttcttgcttatttttcttatcaggtatacggctaaataaaaaatttaactcattatatttcaaaacattttatgctagaaaataataatttacttccatttttatcgctctttgcctygtttatgtatcttactaatagtgacttttttaaaaggcacacatttacagaagactttgaattttttttggccataccccaatattgaataacacctaacttgaaagttttttaaattgaaaattactattcatgataatgtctccaacttttg

SEQ ID NO: 345887 - DNA, 621 bp, Homo sapiens
attttaatgtctaattgttcaaacatttcacaaattttattaagaataatagaaaaacaaaatttttgaatgagtacctcacaaatgatttaatccttatatacatcgataaaacaatggcaagaaaacaagaatctaaatcagacattccaagttgttttccacaaaaataatcaccaatgtcaggtatacaggtaggcagcatagggcagaaaggtgcaaagccttttctcaccaccattaaggttcaaagccagcactcttataacaaaagacgtattaacaaaagaaaagcatatcaaatatatttaatcaaaattgtatgtgacatgaaagatcagaaatgaagactcaaagactccagggaaaactttatacgtgrgatataaaaaagggtcagccatgtaaaaatggggttgcaccaaagggtataatgtaatgataatacactgaggtgagaaatccagcaagtcctttgtacaaagattcttgttggtctgcctgtgtagcattacctcttctccacttccactccccagaaatgggcagtacctctctggaattagactcttaaagggagaaggaagagggtgatctctttacattttatggcttgctttc

SEQ ID NO: 345888 - DNA, 625 bp, Homo sapiens
tgcccgccagtttgtcatggcaattttccatagcatggcaacacttggaagttactacctctttccataccaataactcaacaacctggaagatatcacatttttcctagaaatttctgcataatctgctcatcaatttgcatgaaattaaaaatggtataaatatgactacagaactgcctttgagctgctactctgggcacactacctatggggtagccctgctccacaaggagcagtaccttcactgctgctgtacactgctgcttcaacaaaagttgctaagaccaacagcttgtcatagaaatctttcctgagtgaagccaagaactattctgagctaagccccaatttttgggctcccatgccctgaatcatatatatatatatacayacacacacacacacacacacacacacacacacacacacacaaacatacacacacacacacacatacatatatattggcattatatagtgctatttatgatacatatattcacatatacacatatatgcaatgctatttatgatacatatatatgtttgtgtgtgtgtgtgtatatatatatatatatgtttataattgcctttgctctttttgagacatgagatgaggtcc

SEQ ID NO: 345889 - DNA, 625 bp, Homo sapiens
tgcccgccagtttgtcatggcaattttccatagcatggcaacacttggaagttactacctctttccataccaataactcaacaacctggaagatatcacatttttcctagaaatttctgcataatctgctcatcaatttgcatgaaattaaaaatggtataaatatgactacagaactgcctttgagctgctactctgggcacactacctatggggtagccctgctccacaaggagcagtaccttcactgctgctgtacactgctgcttcaacaaaagttgctaagaccaacagcttgtcatagaaatctttcctgagtgaagccaagaactattctgagctaagccccaatttttgggctcccatgccctgaatcatatatatatatatacatayacacacacacacacacacacacacacacacacacacacaaacatacacacacacacacacatacatatatattggcattatatagtgctatttatgatacatatattcacatatacacatatatgcaatgctatttatgatacatatatatgtttgtgtgtgtgtgtgtatatatatatatatatgtttataattgcctttgctctttttgagacatgagatgaggtcc

SEQ ID NO: 345890 - DNA, 593 bp, Homo sapiens
attattttaaaaaatatataatttgtttcatttcttaaagtcatgattgaaagtgacccacttccgggccaatagggtccttcctgttgatgcctctctcctttgacacaccttcttgttttgtcagcttccttgtcttctgacacagtggtcctaggatcgccattcttctgaagagctgtttatctaatgggaaatggtatttagagttcacagttttgggtctagtggttgggacacttgccatttagaggttatagcttcttgaccttctgagtgggcaaatgtaaaaaataggaatttttgaaaaaaaaactaaattttatctatttcaattttaacatttcagggcttttctataatttcctttattctgaaaagctgtatttaacctcttgaaaatgtttttctttatattgatgcatacaattatatrtacaatattatttaataatttcaaagtattacagctttttgaattactggaaaaaataaagaattgacactcaagatctcctcataactgtttctgttctttgactatatctcactatggatatacaatcaaaatacttttaacttttgctttaatt

SEQ ID NO: 345891 - DNA, 627 bp, Homo sapiens
ttaggaaagtcgcaagagagaagaattttctttaggggcgtattgtcctttgtataaagactacaagctagttagggattgtatcagagaaatggcaattgtccctttgacaaaccataaaaaaaagtgcttagggcaaatcaatcgtttgagcagcaacattaatatgttgggaaaaatgtacttttaaaaaattgaagcataatgatcatacatatttatggggtacaattgatgtttgtctctatatatattgcataatgagcaaatcagggtaattattatatttaccatctgaaacatttatcgtatctttggagtgagaacattcaaaatcctttctcctagctattttgatatgtaccttacattgctgttaactatagtcactgatatggtttgsctctgtgtccccaccaaatctcatcttgatttgtaattctcataatccccacttgtcgaagaaaggaactggtgagaggtgattggatcatgggggtggcattccctatgctgttcttgtgatagtgagtgagttccaaggagatctggttatttagtaagtgtctggtgcttccccgttttgatcttcttctctcttcctgcaactttgtgaagaaggtactt

SEQ ID NO: 345892 - DNA, 587 bp, Homo sapiens
tctttaacttttgcttaaggcttttattctgtagtaaaattgttgagatattgtttatatactttattaaaatattagaagtaaatatttctggtagaatatagaacctgaacaaagttctactaatatctctcwcacacacacacacacacacacacacacacacacacacactttaataggtatgtttcatgcattaggaaaactttcaacaacacaggattttctacataaagaatatagacctaaatataaaggacttctttttccaggattagtgggtatagagtttcattttggacttaaaatggacttaaatatctcttgatgcattttttctctgttcttcttaacgtagtgagctagtcaggtttattcttctatactctacctctttattattctgtattctataaaatattctgaaagacttggcattttaaccattcaatgtgaagcttaaattgggtagatacaaatgttatatcttcacagttcatataacttctgttgtactatttttaaaaatgtactttattgatgcttttaattacctgttactctaagttgttttctttttcttgaag

SEQ ID NO: 345893 - DNA, 587 bp, Homo sapiens
tctttaacttttgcttaaggcttttattctgtagtaaaattgttgagatattgtttatatactttattaaaatattagaagtaaatatttctggtagaatatagaacctgaacaaagttctactaatatctctcacwcacacacacacacacacacacacacacacacacacactttaataggtatgtttcatgcattaggaaaactttcaacaacacaggattttctacataaagaatatagacctaaatataaaggacttctttttccaggattagtgggtatagagtttcattttggacttaaaatggacttaaatatctcttgatgcattttttctctgttcttcttaacgtagtgagctagtcaggtttattcttctatactctacctctttattattctgtattctataaaatattctgaaagacttggcattttaaccattcaatgtgaagcttaaattgggtagatacaaatgttatatcttcacagttcatataacttctgttgtactatttttaaaaatgtactttattgatgcttttaattacctgttactctaagttgttttctttttcttgaag

SEQ ID NO: 345894 - DNA, 515 bp, Homo sapiens
gtctgtgagtgggatgtttatgtgtagaagaaatccacatggaataaatgaaataataaatatagcttcaactccccaagttaattactctgaaatcttagttcagataatataggttcataaattaataataagtaaataaatagatatgagtccaaaatcaagcaagaggtagttttgtcctggaggwagacttccaattactgccatttgctactttacagacgtggcgtctttgaaaggttggtcaaagagggaaggagattatcagtttcttctgtgatttgttcaaatttctctttaaaaagtgactatctcaaatgagctgctgaaaaataagaagcagccaatattaagatacatatatgtctgtatgtgcacgtatgtacacaccccatactgtcatacacacatgagtttgtatgtcacatactaataaacttagaacactatggaaatttctgggaggcattaatttatgagaaaaatgactacacactctttcttctcacatg

SEQ ID NO: 345895 - DNA, 515 bp, Homo sapiens
gtctgtgagtgggatgtttatgtgtagaagaaatccacatggaataaatgaaataataaatatagcttcaactccccaagttaattactctgaaatcttagttcagataatataggttcataaattaataataagtaaataaatagatatgagtccaaaatcaagcaagaggtagttttgtcctggaggtagacttccaattactgccatttgctactttacagacgtggcgtctttgaaaggttggtcaaagagggaaggagattatcagtttcttctgtgatttgttcaaatttctctttaaaaagtgactatctcaaatgagctgctgaaaaataagaagcagccaatattaagatacatatatgtctgtatgtgcacgtatgtacacaccccatactgtcatacacacatgagtttgtatgtcrcatactaataaacttagaacactatggaaatttctgggaggcattaatttatgagaaaaatgactacacactctttcttctcacatg

SEQ ID NO: 345896 - DNA, 545 bp, Homo sapiens
aaaaattcctacatccctggcatgaaacccrcttgattatggtagattatcttttggatatgctgttgaattcagttagccaatattttgttgaggatttttgcatctatgttcatcaaggatatttgtctgtagttttcttttttgctatgtcttttcccagtttggtattatggtgataatggcttcatagaatgattaagggaggattctttctctatcaccagaatcagtgtcaataggctacataccaattcttcttttaatgtctgatagaattcaggtgtaaatccatctggccttgaactttcttttgttggcaattttaaaattatcatttcaatcttcctgcttgttattggtctgttcggagtttctatttcttcctggtttaatctaagagggttttatatttctattaatttattcatctcctctaggttttctagtttgtgtgcatcaaggtgttcatattagccttgaatgatgttttgtatttccatggtatcagttgtaatatcttccatttcatttctaattaactt

SEQ ID NO: 345897 - DNA, 549 bp, Homo sapiens
ttttgtgatatcagcctgaatggactaaaacagcccctcatttgggatttgatacttttctcatgattagattgaggttatggatttgggggaggaagaccacataataaaatcctcattacagtgaatcaagaatacacaccatcagcatgatgaatcactgttggtgattgccttgatcacttagctgagctagtgtttgtcaagtttctcgactctaagtttattctatttttccccctttctgtactgtctctttttagaagggaactaatattgttcagcccacacttaagaggctaagagataccattcccttccttgagggtagatacctacataaattatttggaattcttygggacaagagatttatctattcttcttcatttatttatatattcagtcatttatgtcgttatggattaatggatagttactttacatttttgtactttaatgttactttattttgttgttctaatgattctagctttggtcactgggaactctttctgttggctcctgtgactcttttacacggagaca

SEQ ID NO: 345898 - DNA, 549 bp, Homo sapiens
ttttgtgatatcagcctgaatggactaaaacagcccctcatttgggatttgatacttttctcatgattagattgaggttatggatttgggggaggaagaccacataataaaatcctcattacagtgaatcaagaatacacaccatcagcatgatgaatcactgttggtgattgccttgatcacttagctgagctagtgtttgtcaagtttctcgactctaagtttattctatttttccccctttctgtactgtctctttttagaagggaactaatattgttcagcccacacttaagaggctaagagataccattcccttccttgagggtagatacctacataaattatttggaattctttgggacaagagatttatctattcttcttcatttatttatatattcagtcatttatgtcgttatggattaatggatagttactttacatttttgtactttaatgttactttattttgttgttctaatgattctagctttgrtcactgggaactctttctgttggctcctgtgactcttttacacggagaca

SEQ ID NO: 345899 - DNA, 569 bp, Homo sapiens
tctattcaaggaaatactttacaactattaaataaggttatagaaggatacattgtcataaggaaatatgtttataattcatggtttagtaaaacaattaaaatagaacatatttctgaaaaaactcatatacatatataaatattaatagctttatgtctgcttaattgtattgtcagtgatttttattttcttattatctgctttctgatttttttacttagtaatctttgttaattggtaaatgatcctatgctaccaaataccaaattgaataacacttcagaagaagaagaaaggttctgagaataatatagaatattgtgtttttggttgtaggaagatttaagagattaccttatttttatttcattgtcattatatttgtgctgtggctttgtagttaccatatagtttcacatgtattgcttaatcctcaaaactcctctcyatctgtagaaatacctgtgtacagcaggtatttttatcattattttttatataagaaaattgggcatgtgttttatgttatgatttgccttctgtcactaggcatgtacgttataaca

SEQ ID NO: 345900 - DNA, 549 bp, Homo sapiens
ccagacaaagcagaaacattgaatcagtagtttctgttctcctgtggttcctgttctttctagatttcctttcgtttttgcttcattttgggttggttttctgagtgaggcaacaaactgtattaaatgatttacatttatttactataataaaatgaaacactacactgtttttttactgcctccaaatgttagtttctgtaactgccaaatttcaatgactggaaaaatgtgtgagaaaggtctctgcatttaaaaacttgctttttaaaaaaaacatatttccgctagagggtgttgacaacttcaacagaatcaggaccaatttgttacttttgctaccagttaggttttagtttgtttactgattccagttatgttttagtttatgtttactgattgtagtcatgtttacccatcagcactcaaatatccgcccaatgcgactgccactcaggatggctatgtttgtaattttttaaagttcattatttacaatattaacaattcattactattatttttsgtagtgaaaatgtcttacgatag

SEQ ID NO: 345901 - DNA, 457 bp, Homo sapiens
caagggaattactaacccaaataacttaaaaacaaacttgcttcagaattgcatcacatgagtcataattgattcactttatagttaaacaaattggagaaaacattgatgaaggtcttggtcagtcttatcaggcaacagaaagaaataaaaggcgtccaaattggaaaagagaacatcaaattgtccctctttgcagatgatataatcttatatttagaaaaacctaaagactccaccaaaaaamattagatttaataaacaaattcaataaaattgcaggataaaaaaatcaacatacaaaaatcagtaccaattcaatacaccaataatgaaatggctgataaagaaagcaatcccatttactatggttacaaaacaataaaatacctaggaataaatttaaccaaggaggtgaaagacctctggaaaactacaaaacactgatgaaagagat

SEQ ID NO: 345902 - DNA, 470 bp, Homo sapiens
gaagaaaacgtaaatactacaggaaaaagattttatgactaagatctcaaaagcacaagcaacaaaaacaaaaatagataaattggactattttaagttaaaaagcttytggacagcaaagaaacaaccaatataacagagagacaatataaagttaaatgggagaaaatatttctgaactactcatctgacaagaaactgatatccagaatatacaaggaaatcaaaaaactcaacagcaaaaaacccaacaacaataaacaatctcattaaaaagtgagcaaaggacatgaatagacatttctcaaaagacatacaaatggccaataggtatatgaaaaaaatgctctatgaaaaaaatgcacaacatcactaatcagggaaatgaaaatcaaaactacaatgagatattatcttaccccagttggcatgactgctatcaaaaagacaaacaaaaaacagataatggc

SEQ ID NO: 345903 - DNA, 572 bp, Homo sapiens
ttgtggggacaaaaaatttagtacataacactttccctcagattgttcctaagaaaactttgggtgcttgtaattagggttacacaatctaagcaaacttcaagatyacaaaagattttaaaagggcctgagggtacattgctagcaaaagtgacaaaatctggtggtctgattcttgtccattgagtgaacaaggaagtatagggtactatctataactatagttaacttcttttttatgtttcacttcctctcaaacaattcataagtaatttgacaatattatgaattatggattccaaacaatgatactctactggatgtaaaactttgacatactagatcataaattagaaaaatatagactctagccagctttgcagcaaggaaacattattaggaagaaatgcattaatccatgtattctgcataatatgcatattaatttttataagattttaagcattaatatcatctaaatttatgtaagtttgttttacatctgcacctgtcgtgtttatggtgtatcctatttattgatatttttaagagctttaggcataagagcagta

SEQ ID NO: 345904 - DNA, 572 bp, Homo sapiens
ttgtggggacaaaaaatttagtacataacactttccctcagattgttcctaagaaaactttgggtgcttgtaattagggttacacaatctaagcaaacttcaagatcacaaaagattttaaaagggcctgagggtacaytgctagcaaaagtgacaaaatctggtggtctgattcttgtccattgagtgaacaaggaagtatagggtactatctataactatagttaacttcttttttatgtttcacttcctctcaaacaattcataagtaatttgacaatattatgaattatggattccaaacaatgatactctactggatgtaaaactttgacatactagatcataaattagaaaaatatagactctagccagctttgcagcaaggaaacattattaggaagaaatgcattaatccatgtattctgcataatatgcatattaatttttataagattttaagcattaatatcatctaaatttatgtaagtttgttttacatctgcacctgtcgtgtttatggtgtatcctatttattgatatttttaagagctttaggcataagagcagta

SEQ ID NO: 345905 - DNA, 595 bp, Homo sapiens
atgaattttgtggggacaaaaaatttagtacataacactttccctcagattgttcctaagaaaactttgggtgcttgtaattagggttacacaatctaagcaaacttcaagatcacaaaagattttaaaagggcctgagggtacattgctagcaaaagtgacaaaatctggtggtctgattcttgtccattgagtgaacaaggaagtataggrtactatctataactatagttaacttcttttttatgtttcacttcctctcaaacaattcataagtaatttgacaatattatgaattatggattccaaacaatgatactctactggatgtaaaactttgacatactagatcataaattagaaaaatatagactctagccagctttgcagcaaggaaacattattaggaagaaatgcattaatccatgtattctgcataatatgcatattaatttttataagattttaagcattaatatcatctaaatttatgtaagtttgttttacatctgcacctgtcgtgtttatggtgtatcctatttattgatatttttaagagctttaggcataagagcagtacgctgaaattgttaaa

SEQ ID NO: 345906 - DNA, 527 bp, Homo sapiens
tgcaaacacattatcagatagctcattgcagtgaaaggaaatcttagccaaattcctcagaaaaatggacatgtattagttataatgaggcagaagcagcmaataaatcagtttgcaggttgcaattccttctctctgctctctggtatcctggccaacacttttatgtatgtctcatttctaagcagatgtgatgatagtcttacactataagtggcaaaccttgtaatcagatcttgaaccaagacttttttatttctctctgtctctctttttttttttttttttttgaagttgagagaaattaaatcaatacttttggctttctactgccatgaatcctgttataccattcccaactatttccttaacttaaacagcagtaacactggcaatcaaaaacttgtttcataaaacgtatgttatttactacaacttaaaatgtctatacagatacaggttcttcttttgaaaattatttttattgagataaaatttatgcacagtaaaattcacacattttaagt

SEQ ID NO: 345907 - DNA, 527 bp, Homo sapiens
tgcaaacacattatcagatagctcattgcagtgaaaggaaatcttagccaaattcctcagaaaaatggacatgtattagttataatgaggcagaagcagccaataaatcagtttgcaggttgsaattccttctctctgctctctggtatcctggccaacacttttatgtatgtctcatttctaagcagatgtgatgatagtcttacactataagtggcaaaccttgtaatcagatcttgaaccaagacttttttatttctctctgtctctctttttttttttttttttttgaagttgagagaaattaaatcaatacttttggctttctactgccatgaatcctgttataccattcccaactatttccttaacttaaacagcagtaacactggcaatcaaaaacttgtttcataaaacgtatgttatttactacaacttaaaatgtctatacagatacaggttcttcttttgaaaattatttttattgagataaaatttatgcacagtaaaattcacacattttaagt

SEQ ID NO: 345908 - DNA, 362 bp, Homo sapiens
aatccccaaaactgtctccagggcatgtcagaagtcttcaaggaagcccctcccatcatakgtccacaggcctatgaggaaaaactggtttcatgggccaggcccagggccaccctgctctctgaagtctagggacttggtgccctggattccagctgctccagccattgctaaaaggggccaaggtacagtttgggctgctgcttcagagggtgtaagccctaagccttggcagcttccacatggcattgagcctgtgggtgcatggaagtcaggaattgaggtttgggaacctctgcctggatttcagaggatgtatggaaacacctggatgcccaggcagaagtttgctgcaggggcag

SEQ ID NO: 345909 - DNA, 398 bp, Homo sapiens
ataaaaacatcaacagcacagagcaacaaagtcaaataaaaatctcactawgctagagtatttgtaaagaattagcagtaaaaatctaggtggcaaatttacttgttacaattactaaagaatatgaattctcaaatatagtagaaatgctgtcttcatagtcaagggcctcaagtcagttctaaaatattaatttctctcattagtaatgttcttgtttccctgaaaaaaaaaaaagttaatgtttatgctgtcacataatactttagcatctgcttttttcatccatcccccaagggtaagaaaattgttaagctttttcctcctctcttggaattcatcagttactgtcaatgaagggcctgtgctatgcacagtaatgtgctatgttttatgga

SEQ ID NO: 345910 - DNA, 398 bp, Homo sapiens
ataaaaacatcaacagcacagagcaacaaagtcaaataaaaatctcactatgctagagtatttgtaaagaattagcagtaaaaatctaggtggcaaatttacttgttacaattactaaagaatatgaattctcaaatwtagtagaaatgctgtcttcatagtcaagggcctcaagtcagttctaaaatattaatttctctcattagtaatgttcttgtttccctgaaaaaaaaaaaagttaatgtttatgctgtcacataatactttagcatctgcttttttcatccatcccccaagggtaagaaaattgttaagctttttcctcctctcttggaattcatcagttactgtcaatgaagggcctgtgctatgcacagtaatgtgctatgttttatgga

SEQ ID NO: 345911 - DNA, 588 bp, Homo sapiens
  misc_feature (1)...(588): n = A,T,C or G
nnntttatgtggtttctgtttcaaactgctcttggttaaaatcaatgagccatacacattacattgagagatgytccatttcgtaccatccatcacttattgccactgctatttcatctcagtgcttcactgcttatcttattaacagagatattttcttggtagattctgcagcatgctagggttgcttgcctttaatttttacagtgcttagataattgtggcttcttaatatgataatctgaaccctctgtccataactcaacttcattagatcatgctgatctttgtatacaagcaaaattgctatagtgaaagtcttctttctactcatttccccccattgttcttttctctttgttttcctatttcatgctccttctattctgttaacatctgaaatatgctaggggcttattttttcctatctgttctgttctaaaaccgccttccactaagcggaaaacttcttgagtatggaaactacatattattaatatttgtatctgcttcgtttgttagttaaactccataagcattcagtaactggttttgcattatataaatgtataagtagattctatttca

SEQ ID NO: 345912 - DNA, 587 bp, Homo sapiens
atactaactaagttctatgtggactatggagataaataggacacggtgctggctccatttccctgagcttatgttttagtgccttcagtaaggattcacttagccataatgaaccactttcctttaaggaaatccttcataactctacacaagggagaatataaacatgcrtatggtatactaccatacccagacttactttttcaagatgaaattttcatgatgaaataacaggtatttttctgaaaagtgagcctgtctaaagttatatatcttcttttggcctttctgacatgctgtttcagaatttgaaagtgttcttatgttcttgaattgtatactccacttaatctaaatcaccaaatcagaccatgccatttccttgattaaaattaaggtctttacattacatgctaaagttcaaagtcctctctgtgacacataagggcattcatgacctacttctctagccttacatccctctactttttaatcctgtaattccaagaccaattccctgcaactcgttgttcaatgcctttcttccttttcttatgttgtttgtctccccaggattaattccccac

SEQ ID NO: 345913 - DNA, 607 bp, Homo sapiens
aagctactaatgttaatagagtacaaaaaaatggtcttcatgtaacagtattccagtggtagccctaattatagagtggctatgacattttacaaaaaaaaaaaaaaagggtgctgacttattcagatgtcaaagtatctagttcttaattaaacaggactaaattatttsctgagagcctattgaattgcatacgactcactgtggataatttattggaagggataaggatgtagaaggagccagaataagtaatcctcactttattcaaaacctagagttaatttccaccctctgaaggacatactatgtcacttacctcaactgaaaaaaaacgttaacatagtaagcattgggaacctaataaatattagatgttgctcaaacacttacaccattctcttttttccagttattattcttttgattataaatatttgtagtgtaccttgctttaaattgcatacattcacatacacattcaagtcaagaatgcaagaacattagatctcatgcataacagtacaaaaggcaagtgtttttaaaagctgtttaattatcacttatgatctagctatcattatgcctttcttttgcacattccttt

SEQ ID NO: 345914 - DNA, 577 bp, Homo sapiens
aaaagtcagggacaaatttcatgtaatctttctaagggaataatattccctgtaggtaagcttcctgcagaacacatgtctgaggatttagtcttctaccaggtgttttccataagcactgggatgttcctgataacaaccccaaggtggaaatcatggggttttcatgagacaggacttgtttacacacacatacacacacacacacacacacacagtacaattccagaggacacatgcggaactgctggaaacagaattgttagagatcccttcatgagacacatcgcagtggttgccatacctcacacatacacacacartgtggtctcccactggacctcccagtttagtcccaataattcaagttaagttcagcccctatcaaagggactgcctcaaggcagtcagtttcaagtagccctgcttgctgatgccaattcatctgttccacaaggtgtagacatcgggaaatgtccttcgaggaaagagcaggagctggggccatcccctggtcgctcactgtaaaagacttcaggaaagggatggtttgtttgaattcaaggtgcttgcagca

SEQ ID NO: 345915 - DNA, 639 bp, Homo sapiens
tgtctacttcaaatgtgcagacccaatggaaggccataatgatcataaaaaattgaatagtcagggaaacatgacatcaccaaagaaacaaaataaatcaccagtaactgaccccaaagaaatgaaaatccacaaactgcctgacaawtaattcaaaataatcatcttaaagacattaagtggactacaagagaatacaggtaggaaactcatagaaaaaccacacaaaaatacataaacaaaataatttgaacaaaaagatagaagctatttaaaaagcaatcagaaatcctgtagcagaagaatataatgactgaaataaaaattatacagagagcttctatagcaaactcaatcaagcagaaggaaaaattagcttaaagacaagagatctgaaattactcaaaggagcaaaagaaaaaaaatttaaaaagtgaagatagcatatatgacttataagataccatcatgtgaaccattatataaactatgagggtcccaaaagtaatggagagagagaaaggagaggagagcttattcaaaaaaataacgacagataacttccaaaatctggagaagagaaagagcatctatatccatgaagcccaaataaccacaaataaattaaatagaaagaga

SEQ ID NO: 345916 - DNA, 639 bp, Homo sapiens
tgtctacttcaaatgtgcagacccaatggaaggccataatgatcataaaaaattgaatagtcagggaaacatgacatcaccaaagaaacaaaataaatcaccagtaactgaccccaaagaaatgaaaatccacaaactgcctgacaaataattcaaaataatcatcttaaagacattaagtggactacaagagaatacaggtaggaaactcatagaaaaaccacacaaaaatacataaacaaaataatttgaacaaaaagatagaagctatttaaaaagcaatcagaaatcctgtagcagaagaatataatgactgaaataaaaattatacagagagcttctatagcaaactcaatcaagcagaaggaaaaattagcttaaagacaagagatctgaaattactcaaaggagcaaaagaaaaaaaatttaaaaagtgaagatagcatatatgacttataagataccatcatgtgaaccattatataaactatgagggtcccaaaagtaatggagagagagaaaggagaggagagcttattcaaaaaaataaygacagataacttccaaaatctggagaagagaaagagcatctatatccatgaagcccaaataaccacaaataaattaaatagaaagaga

SEQ ID NO: 345917 - DNA, 534 bp, Homo sapiens
aatgcttttatgaaagatttaaaattatttttaattaaaaatgtttgtctagctatatatttctgtgacgtggcatgagtgatctgaatagcttcactgaccgttacagaaacaggtgggcttcctctctgttttttaactatgtccaaaaataatgggattttgatgatattaggaacttcagcacctatatgaaatctgcttatctcataaatgagatatctattttgataacctsttaacaagaggacctggcaggtcatagctaccttgtatttcaggtatttgcagagaaggtgcataaaggaggagagttactatgaccaaaggagaaagatgctctaaaatcagctcacggattggcttccatctgggtgttctgctgctttcaacttagtctcctctctctagcattaattgtcacctgttgtttttcctccggtgtccttactttctattcttcactatattatcgtgcctctttggcttgctttctttctctctactcggatttctttctttctgtgcaactaa

SEQ ID NO: 345918 - DNA, 563 bp, Homo sapiens
  misc_feature (1)...(563): n = A,T,C or G
cctttctatgagctgcttctactttcttttacttcaagatatccccatttatatcaactcacccacaacaaaatccattaaaaggtttagttgacttgctagcacatcattaaacatccatttcagttatgtgtgtactatcactacatgtacataattattgctagctacagtgctagctagctggatttattcttcctaacaaaactccttattctgtttcctataatgtcagtagcagctacacacccaatcctcatagttgccaacagcaaccatttctgatttcctgaccctcccttacaaacggcaacaacaaaaaaagaataggatccagtaaaaacatcttgatttaaaagcatcttgattttctggaacaagtctgttcttccaatcatcaaaacagaatatccatgtctccttatntcaatactaaacattttcttcttcagaatgacccccsacttcaccagctacatgaggttgtcagtgagttaattgacaattctaactctatatttaaattgtctgattaactccatggagcaatgtcagaaacgtca

SEQ ID NO: 345919 - DNA, 596 bp, Homo sapiens
aaaaagatggggagaaagtaagcaacttggaacatatattttaggatattgtccatgataacttccccaatctctctagaatggccatcaatcaaattcaagaaatacagaaaatccctgtaagattctacacaagatcacccccaagacacataattatccaattttccaaagttgaaatgaaagaatgttaaaggtagctagagagaaaaggcagatcacctacaagtagaattccatcaaattaacagtggacctttcagcaggaaccctacaagccagaagagactgggggcctacattctacattcttagagaaaaaaaaaaaaaaaccttcatttaagaatttcatatccagccaaactaagcttcctaagtgaaggagcaataagatccttttcagacaggcaaatgctaaaggaatttattaccaccagacctatcttawaagagtttttgaaagaagcactaaatatggaaagaaaagactattaccagacccccaaaaaaagacagttaagtacacagaccagtgacactataaaacaaccacataaacaaacctgcaaaataaccagctaacaacaaaataatag

SEQ ID NO: 345920 - DNA, 596 bp, Homo sapiens
aaaaagatggggagaaagtaagcaacttggaacatatattttaggatattgtccatgataacttccccaatctctctagaatggccatcaatcaaattcaagaaatacagaaaatccctgtaagattctacacaagatcacccccaagacacataattatccaattttccaaagttgaaatgaaagaatgttaaaggtagctagagagaaaaggcagatcacctacaagtagaattccatcaaattaacagtggacctttcagcaggaaccctacaagccagaagagactgggggcctacattctacattcttagagaaaaaaaaaaaaaaaccttcatttaagaatttcatatccagccaaactaagcttcctaagtgaaggagcaataagatccttttcagacaggcaaatgctaaaggaatttattaccaccagacctatcttaaaagagtttttgaaagaagcactaaatatggaaagaaaagactattaccagacccccaaaaaaagacagttaagtacacagaccagtgacactataaaacaaccacataaacaaacctgcawaataaccagctaacaacaaaataatag

SEQ ID NO: 345921 - DNA, 592 bp, Homo sapiens
gaccacagtccaaaaaaaaaaaaaaaaaatagaaatcaagactaagaaaatggccccaaaccataagaatagatagaaattaacaacctgctcctgaataacttttgggtaaataacaaaattaaggcagaaatcaagaagttatttgaaactaatgaggacaaagatacaatgtatcagaatcactggaacacaaataaggcagtgttaagggggaaatttatagcactaaatgcccacatcaaaaacttaggaagatctccaattaatgacctaccatcacaactasaagaactagaaaagcaagagcaaaccaaccacaaagatagcagaagacaaaaaataaacaaaatcagagttgaactgaagatgactgagacacaaaaaaaaacattcaaaagatcagcaatactagaagttggtgttttaaaaatattaataaggtggggttggtgcttccaagatggctgaataggaacagatccagtctacagctcccagcaagatcaatgcagaagatgggtgatttctgcatttccaactgaggtacctggttcatctcattgagactggttggaccctgggtacagcc

SEQ ID NO: 345922 - DNA, 592 bp, Homo sapiens
gaccacagtccaaaaaaaaaaaaaaaaaatagaaatcaagactaagaaaatggccccaaaccataagaatagatagaaattaacaacctgctcctgaataacttttgggtaaataacaaaattaaggcagaaatcaagaagttatttgaaactaatgaggacaaagatacaatgtatcagaatcactggaacacaaataaggcagtgttaagggggaaatttatagcactaaatgcccacatcaaaaacttaggaagatctccaattaatgacctaccatcacaactagaagaactagaraagcaagagcaaaccaaccacaaagatagcagaagacaaaaaataaacaaaatcagagttgaactgaagatgactgagacacaaaaaaaaacattcaaaagatcagcaatactagaagttggtgttttaaaaatattaataaggtggggttggtgcttccaagatggctgaataggaacagatccagtctacagctcccagcaagatcaatgcagaagatgggtgatttctgcatttccaactgaggtacctggttcatctcattgagactggttggaccctgggtacagcc

SEQ ID NO: 345923 - DNA, 563 bp, Homo sapiens
tctgagattgacctgggaagctggagcttggcagggggaggggcgtccaccattgctgaggcttgagtaggccattctatgctcacagtgtaaacaaagtggcaggaaatctcaaactgggcagagcccactgcagctcagcaaggcctactgcctctctagatttcacttcttggggcagggcatatctgaacaaaaggcagcagacagcctctgtagacatcaacatccctgcctgacagctctgaagggagcagtggttctcccagcatggcattcgagctccaatagtggacagcctgcctccccaagtgggtccctgactcccatgtagcctgacwgggagacacctcacagtgggggccaacagacacctcatacaggtaggtgcccctctgggatgaagcttccagaggaaggatcaggcagcaatatttgctgttctgcagcctccactggtgatacccaggcaaacaggttctggagtggacctccagcaaactccaacagatctgcagctgagaggcctgtctgttagaaggaaaactaacaaacagaaagca

SEQ ID NO: 345924 - DNA, 571 bp, Homo sapiens
gaaccgaggttgcaatcctttatcatatagtttgtgaataattttcagtgatcaatattttcaggtatcaggagtatgaaagaaagatctgggatttacagttgaacaaatctggtttcaaattttagcaatgcagccaagttataggcaagtatgttaaattctctgagtctgtgcttccttattggagaaatgggaatattaatacccacaactacaaggactaggggattagatgtgataatgatgtaaagtacctagcactgcttggcacatagtagacactcagtaaatactaatcccagtcactcaactagtgtttatcttctatgtgtcaggaactggacttggtgacttggtgctaattctttactccttcctcttcatactcatcaccacgtatacaacagaagaaaaatgtccttaacttgacattccagatccctgacaaactgkgtttatatccgtaataaaaaataataattagaaaatatgttaatgatgagcaggattataattataatgtgaaggataattattcattagcttagtaaggctccatgtttactga

SEQ ID NO: 345925 - DNA, 615 bp, Homo sapiens
agtcaaggccccttgataaggtctgcctgacacctgagtgcctgcttcccagtctccttgctacgttgccttccaggaaaggcatggaaaataatcagaatggtaacagagcaatccaagacaggatatgagaacctatcaggatataggacattactggggattcaaaatgagttagggagaagaggtaccaacaggcgarcagccccttgttctgattttcaccatttgaaataacgcccagaataatccgtcatttattattattatatttttcgagacggagtcttgctgtgtcgcccaggctggagagcagtggtgtgatctcagctcactgcaacctccacctcccaggttcaagcaattttcctgtctcagcctcctgagtagctgggactacaagtgcgtaccaccacacccagctaattttttttttgtatttttagtagagaccgggtttcaccatgttggccaggctggtcttgaactcctgacctcgtgatccaccctccttgtcctcccaaagtgctgggattttaggtgtgaaccattgcgcccagcccatcatttattattttacctaaatatttaatttattaattcactcaacaagtg

SEQ ID NO: 345926 - DNA, 615 bp, Homo sapiens
agtcaaggccccttgataaggtctgcctgacacctgagtgcctgcttcccagtctccttgctacgttgccttccaggaaaggcatggaaaataatcagaatggtaacagagcaatccaagacaggatatgagaacctatcaggatataggacattactggggattcaaaatgagttagggagaagaggtaccaacaggcgagcagccccttgttctgattttcaccatttgaaataacgcccagaataatccgtcatttattattattatatttttcgagayggagtcttgctgtgtcgcccaggctggagagcagtggtgtgatctcagctcactgcaacctccacctcccaggttcaagcaattttcctgtctcagcctcctgagtagctgggactacaagtgcgtaccaccacacccagctaattttttttttgtatttttagtagagaccgggtttcaccatgttggccaggctggtcttgaactcctgacctcgtgatccaccctccttgtcctcccaaagtgctgggattttaggtgtgaaccattgcgcccagcccatcatttattattttacctaaatatttaatttattaattcactcaacaagtg

SEQ ID NO: 345927 - DNA, 494 bp, Homo sapiens
atgtgttttttgaatttgatctagctttttttcagttgtgttcccgtgggagtgttaagctgccataaaccactctattctaagtggaaagccccatctgcmcttttgaaatggcagccaatgcaggacccaggttgctggtgggaaggactcttctgcatgatgccagccatagtgttgaatccatcttgcccccagaatagtatccattttgtgtccaatgaaactaaaaggatagaattgggactcaagaagattgccaaacaggttctagactgtttggtgtctgctttctaaaaaaaaaaaaaagaaaaaaaatgtgtgaaagatctgggtttgagaattttccttttttttcttttcatttttttgagacagagttttgctctgtcgcccaggctggagtgcagtggcacaatctcagctcactgcaacctctgcctcccaggttcaggcaattctcctgtctcagcctcccaagtatctgggattac

SEQ ID NO: 345928 - DNA, 604 bp, Homo sapiens
gagagatggggacacagtaaaacgtagtggtgggatctatgatcaaggcacctaatttcactcaagaaaaaaaaaattgtttttctgacagagtaagtcttaaaatatctctttgagttccttttgccaatggaaaacagtgtttgactccatatcttcattcttttactaagagcaactgctttgaagttgttctcagttttgtctaaaagtgaaagttatttcataaaattaagagattatgaaattgttccaaagagctgaagtggttttggagttttagagttggattatactactaggtgctaatatagagcagttatatctaaggatagaggaggaggggtactcttttcctagatttatatgttacaagaaagaatgatatcattacgactgacagtggcttttctggaaatgatacacccaaagaatatcattattgtaaccacttcatatcctgtccaccactactatttatgaagtagtctctcaggatagagttaatgtttattgagtgtttattatgtgccaaccctctcctaagccctttacacatgttaactctccatttaacygatgagaaaagcaaagctcaaagaag

SEQ ID NO: 345929 - DNA, 517 bp, Homo sapiens
gtgatgtctcccacctttcattttttaccgagactacagaggaaaaccaaacaaacctcttcttagttcagcattatacatctcccaagtcccacaccaacctcccctgccctcaacaaaacacattacctcccatacactgtgagaggtcaatggagtaaacatcatattttaagagacaggctatatcaggtagccastgcaaaatcttttcttttatcctaggaggctccttgaaatctgagtatctcgtaactcaagaaatcttgtgatcctcaacaccacccacgagtactaatggatttgagcttgataaatttcaggggccaagactcctcagccaggtcctgatgaatagattctaatacccagcattacacacaccttacaaataagcttaggcatcatttcctcaaatttccatcatttgcttatcactgtcatattatttgtcatagctctttaccatctttactattatttactaaatattttttcttaaaattgactcaatttt

SEQ ID NO: 345930 - DNA, 517 bp, Homo sapiens
gtgatgtctcccacctttcattttttaccgagactacagaggaaaaccaaacaaacctcttcttagttcagcattatacatctcccaagtcccacaccaacctcccctgccctcaacaaaacacattacctcccatacactgtgagaggtcaatggagtaaacatcatattttaagagacaggctatatcaggtagccagtgcaaaatcttttcttttatcctaggaggctccttgaaatctgagtatctcgtaactcaagaaatcttgtgatcctcaacaccacccacgagtactaatggatttgagcttgataaatttcmggggccaagactcctcagccaggtcctgatgaatagattctaatacccagcattacacacaccttacaaataagcttaggcatcatttcctcaaatttccatcatttgcttatcactgtcatattatttgtcatagctctttaccatctttactattatttactaaatattttttcttaaaattgactcaatttt

SEQ ID NO: 345931 - DNA, 517 bp, Homo sapiens
gtgatgtctcccacctttcattttttaccgagactacagaggaaaaccaaacaaacctcttcttagttcagcattatacatctcccaagtcccacaccaacctcccctgccctcaacaaaacacattacctcccatacactgtgagaggtcaatggagtaaacatcatattttaagagacaggctatatcaggtagccagtgcaaaatcttttcttttatcctaggaggctccttgaaatctgagtatctcgtaactcaagaaatcttgtgatcctcaacaccacccacgagtactaatggatttgagcttgataaatttcaggggccaagactcctyagccaggtcctgatgaatagattctaatacccagcattacacacaccttacaaataagcttaggcatcatttcctcaaatttccatcatttgcttatcactgtcatattatttgtcatagctctttaccatctttactattatttactaaatattttttcttaaaattgactcaatttt

SEQ ID NO: 345932 - DNA, 517 bp, Homo sapiens
gtgatgtctcccacctttcattttttaccgagactacagaggaaaaccaaacaaacctcttcttagttcagcattatacatctcccaagtcccacaccaacctcccctgccctcaacaaaacacattacctcccatacactgtgagaggtcaatggagtaaacatcatattttaagagacaggctatatcaggtagccagtgcaaaatcttttcttttatcctaggaggctccttgaaatctgagtatctcgtaactcaagaaatcttgtgatcctcaacaccacccacgagtactaatggatttgagcttgataaatttcaggggccaagactcctcagccaggtcctgatgaatagattctaatacccagcattacayacaccttacaaataagcttaggcatcatttcctcaaatttccatcatttgcttatcactgtcatattatttgtcatagctctttaccatctttactattatttactaaatattttttcttaaaattgactcaatttt

SEQ ID NO: 345933 - DNA, 673 bp, Homo sapiens
gtgacaaagaaatacacctaagaaatgttataattatccctattttatggacattttttgttttgttttttgaaagatgtaaccacattaaaatgtttatgcctagtatcttacttgcaaactctaggaatgactttataacaatagtagctaacactcatgttactaatatactgatagtggtatactactatttcatttcatcacagtaatggcaagcggattgtaatattgatccctataatgcaattttaaaagttatttttaaatttaatttaagttacataagtgacaaaaaaagaaatttgaattccatgtctataactcaaaggtactgttctaattgttagataatactgctgtaaaatctttttaattcccttctgctctggaataaaatctaggttataatactccagattttaaatgagggctcaagtatacttattttaatattgttttctcttaaactaatttgccgtaagaagaattttatagagaatattaaatataaaaatgcagaggatagtttaatggtatatttatgtcacattttcagtaagacaattactatgcttttygttaagtaagaattactttatataagtggtagaagttttcttgtagtgttttatacaccttaaggatgccaaaagtaaaacaaaatggcaag

SEQ ID NO: 345934 - DNA, 587 bp, Homo sapiens
tatggcatttatttatccagtcttacaataacatcttacgttgctatataattataatatgaatattatggatgatatacatatctttataatccatttaaatcacttctaaagcatgaataatatatatgtcttttacacatgcatgtatacacacaaatacaatttacttataaacctattaagaagttagcactatgggaatattatatatattatatatatatataacatttttcatctctctgtcyccaaactttgtgattttataatttcaataaaagtacaattttgttcaaactgtatttgtatcttatgtttctgttcatgcttctgcaggatattttacaagataaaagtgtggtccattgttatttgctttactaaagttctaaattttaaatactactaagaccaccaggaaaatactttctaatttattagaaaatacttacaataaagcattaattcgataattcaagaatgccaatataaatacatgaaatggaacacagttaaaaataaatgtatgaacagtcacataaaccatttcatgtcatcattttctgtatttaccaaagttatag

SEQ ID NO: 345935 - DNA, 571 bp, Homo sapiens
atttcaaattaatatggtaatatgcactgctsttacactgatctcttggtcaagtaatttaaaacaagaattaaaaactaaaattgaaatttaggtaattaaattctatgaataattttataaccaaaaggggcaactattgagatgctggagattaagggtatcctatcttaaggaatgtagccattgtggaattaggacagcacttttaaatgtagaacatacctgcatttgtttcttgtcaagttcaccattagagacaaaactgattgtcagaactgtggaacatttgagtagcaacatactttttatactgacaattaggttgaaacaaccgaagaatgaaacgcataaagaagtgtgttcatgcccaccacagaataagaattgcacttaaaaagttaaggaaatataattttgataggaaaatatttgttattagagagaataaagaaattttgtaaagtaaaaaataaacccattgacatattgagtagtagtgtgtacattccctgtccaattctattacaagcaagtctaaatctagagccactaaaatttctatgataga

SEQ ID NO: 345936 - DNA, 617 bp, Homo sapiens
tgactaaaaatcagtcagctgttaggtagcatagacatgatacaaccccagagcagcatggtgcttcactaataataacaaaataatgagttgatagttatatagcaattagaacagctctggcaagtgttaggttattgcttactttactattatcattatgatcattattattattatttactgtgtgattaccatgtgctaggcataatgctaagaactttacatagttacatggttgtatatgctttatttcattttcacctcacaatatccctgtgagatgagaacacttaytgctgtaagcaacttgtttcagtcacccaaccaataagcagatgagcctgaacaaaaacccatagttaaaaccatggcgtttttctttttcattttgtatcctgtacaggatttaataatagttttctcaaacagtagtaaactattatttactgaattgaattaaattgaatttgtatatctatgattcaaacttagttacattactttgcagtagagacattttcctttttttatatatatttgtgtctgtcttatttaatatctcttagcctgacgttcttaaaaaatatcagcttatcagatgagtagattgcaaa

SEQ ID NO: 345937 - DNA, 477 bp, Homo sapiens
cagccacactgaagttgatgggaaaatttgtggcacccacttgccaaagccctgcccttagctcagaaatgtgcaatcagaaggaagatcctaactcctcacttctccctggggaggaaatagaagactggaacatatgtctaatgttcagatttggagggaactagctaagagactgatttcttccctatytgaatctaagtgctgacaggaaagggtgtcagataagaaaccagtggaaacagaggcagccctttgaactagcacacactcagttaccatcatctttctccccagctcagcataacagtttcacctgacttggcatactgacaggaatttgaatgctctagatgcttgaggatactgaaaacaaacataagagctccagaggacctacagtatagcagacagaagctgattcaacttgacagtttgtccctcagggggaaaagagaagaataaaaggtgtgtcaa

SEQ ID NO: 345938 - DNA, 487 bp, Homo sapiens
acaaacagcaatatccaaatatatgaggaacttgtaaaactcaatagaaaaaaagaaattatccaattataaatgggcaaaggacatgaaaakatacatctccaaaaaaaaaaaagacatacaaatgacccacatcttcatgaaaagatgctaaatctttttaaacaggaaaaaacagatcaaaaccacaatgaaatatcaagtcatccctcttatagatggccgacatcaaaacaaaacaaaacagaaaataatcagtaaggatgtgataataataatcctcagtaatcctcaataatcagagaggatgtgaatacattgaaacccatatcccctcttggtgttactgtaaaatcgtgctggggctataagaaatagtgtgaagatatctcaaaaattaaaaatagaactactatatgatctagaaattctactcctacatacttatctaaagtaactgaaagcaggatcttggagagatacttgc

SEQ ID NO: 345939 - DNA, 487 bp, Homo sapiens
acaaacagcaatatccaaatatatgaggaacttgtaaaactcaatagaaaaaaagaaattatccaattataaatgggcaaaggacatgaaaatatacatctccaaaaaaaaaaaagacatacaaatgacccacatcttcatgaaaaratgctaaatctttttaaacaggaaaaaacagatcaaaaccacaatgaaatatcaagtcatccctcttatagatggccgacatcaaaacaaaacaaaacagaaaataatcagtaaggatgtgataataataatcctcagtaatcctcaataatcagagaggatgtgaatacattgaaacccatatcccctcttggtgttactgtaaaatcgtgctggggctataagaaatagtgtgaagatatctcaaaaattaaaaatagaactactatatgatctagaaattctactcctacatacttatctaaagtaactgaaagcaggatcttggagagatacttgc

SEQ ID NO: 345940 - DNA, 584 bp, Homo sapiens
acatgaacctaggggctgttttccactggagaagtttaaaagcagcagcagtctgttttgagatacttcccatggtaaggtgaggagagaagggtcagcagttaaacatgtgtccttktttttccaccttttattttaggtttaaggggtacatggttaggtttattacatgggtacatcgtgtgtcacggggttttggtgttcagattatttcatcacccaagtaataagcatagatatgataagtagtttttcgttgttgttgttttctcttcttttgtttttcttttgtcttcaacctcctcccacctcccatcctccaccctcaagtgggccccggtgtctgttgttcccctctttgtgtccataggtactcaatgtttaactccaacttatgaatgaaaacaggcagcctaaagatgtatagggcttctatggcctgaggagatgatgcggataatgggctggctcctgttatttttatgtagtccaacctataatagggttagagtgagggtaataagatatggaaggaatgttttcacatgggtcactctataagggcatagcctatactagacagg

SEQ ID NO: 345941 - DNA, 584 bp, Homo sapiens
acatgaacctaggggctgttttccactggagaagtttaaaagcagcagcagtctgttttgagatacttcccatggtaaggtgaggagagaagggtcagcagttaaacatgtgtccttttttttccamcttttattttaggtttaaggggtacatggttaggtttattacatgggtacatcgtgtgtcacggggttttggtgttcagattatttcatcacccaagtaataagcatagatatgataagtagtttttcgttgttgttgttttctcttcttttgtttttcttttgtcttcaacctcctcccacctcccatcctccaccctcaagtgggccccggtgtctgttgttcccctctttgtgtccataggtactcaatgtttaactccaacttatgaatgaaaacaggcagcctaaagatgtatagggcttctatggcctgaggagatgatgcggataatgggctggctcctgttatttttatgtagtccaacctataatagggttagagtgagggtaataagatatggaaggaatgttttcacatgggtcactctataagggcatagcctatactagacagg

SEQ ID NO: 345942 - DNA, 584 bp, Homo sapiens
acatgaacctaggggctgttttccactggagaagtttaaaagcagcagcagtctgttttgagatacttcccatggtaaggtgaggagagaagggtcagcagttaaacatgtgtccttttttttccaccttttattttaggtttaaggggtacatggttaggtttattacatgggtacatcgtgtgtcacggggttttggtgttcagattatttcatcacccaagtaataagcatagatatgataagtagtttttcgttgttgttgttttctcttcttttgtttttcttttgtcttcaacctcctcccacctcccatcctccaccctcaagtgggccccggtgtctgttgttcccctctttgtgtccataggtactcaatgtttaactmcaacttatgaatgaaaacaggcagcctaaagatgtatagggcttctatggcctgaggagatgatgcggataatgggctggctcctgttatttttatgtagtccaacctataatagggttagagtgagggtaataagatatggaaggaatgttttcacatgggtcactctataagggcatagcctatactagacagg

SEQ ID NO: 345943 - DNA, 580 bp, Homo sapiens
ggttattctttgtttgcattgctcttcaaccaactagctacatggatatctcttctcttgcaaatttctgctcaaatttgattacctcagtgagctcttccttgactattctgtataaaacagccaacaattaaccacttcccttaagatgacagcaagaatgaggaaaataaaaataaaaataaataaaagcataaaagattatccacttctctttcccattagtacttcctatattctctaatcttccattctttatttctatcattaaygttttattatgatatataatttatgtactataatatacactactcttaagtatttgctttttctccttaactcatgtcttctatgacactatatactttacttttatttatttagttatttattttttgaggcaggatctcaattctgtcacccaggctgcagtgcagtggtgtcatcacagctcatcaatgcagcctcaacctcccagcctcaagcaatcctcccacctcagcctcctgaatagctgggactaccagtttacaccaccacagttggatatgttgtttttttaaaaaattttgtagcg

SEQ ID NO: 345944 - DNA, 608 bp, Homo sapiens
aagtacttcatgactaaataaagattctctagcaatcccccaaatcctgtatctcaaaggaggtgaaaattatattatttgtatatccaaggaatataaagcacatgttgtttttgattcaaacagaatgaatatccttaagcaaatgacagagaaaatttagtgaaaatgttttatatataataagtaaaaataactggttaaagaaatgcttatgattataattagagatctttgtagttgtgttcagctaggcagtgtttttatctagtaatagaaaaataatttctaggtggaatcaagtataacttaccccaaccattagccaaggaggcttgcaaccctaggaggcttctgattacggtyaatgtctggacatgcctagcgtgtatcactttgtttctcagaagcctaatccaataaagcttcttttatatgtgtcttctgaaacatagcactaaaagccttaaccttttgcagtacaaaggtaaagtcattaaagccatgtgcaggctgacataaggcctggcctttatttagctaatctggagatgaatatagcaaatcaccatctggagctttgtgtaaatccataagcaaaatacttc

SEQ ID NO: 345945 - DNA, 595 bp, Homo sapiens
ttgtcaaattaagattctattagtatatcctgaacccacagtcccagttggacactggctttaatactatccttatattttcaaattactaaattaaacataaatcatttgtattacacttgatcctgcagtaagtgtgtgaaacatatatttaatcactctcctaatgaaagaaaagtaatattttaaaatattaaaatcacactgtagaaaaaaatttctatttgtagcaataaataaaattatacatgtgtatatgttttatgatttattctttatataatttatataatatttacacatttttcatgaatcaatrtgctactaacattttgttatctaaagggaagaacttttatatgttgactcatggaaatgagttattcataattatacactgtggcctcccaagacaatttacgctgaacataacatagtatcatgatgcacatatccatttatatctggaaaacagttcatctactatatcttgcttcttgtaagacttagaagtttcctccctttctccctctcttcctttctctcccttctttatctttctccctctgttactttctcttccttcttccttcct

SEQ ID NO: 345946 - DNA, 595 bp, Homo sapiens
ttgtcaaattaagattctattagtatatcctgaacccacagtcccagttggacactggctttaatactatccttatattttcaaattactaaattaaacataaatcatttgtattacacttgatcctgcagtaagtgtgtgaaacatatatttaatcactctcctaatgaaagaaaagtaatattttaaaatattaaaatcacactgtagaaaaaaatttctatttgtagcaataaataaaattatacatgtgtatatgttttatgatttattctttatataatttatataatatttacacatttttcatgaatcaatgtgctactaacattttgttatctaaagggaagaacttttatatgttgactcatggaaatgagttattcataattatacactgtggcctcccaagacaatttacgctgaacataacatagtatcatgatgcacatatccatttatatctggaaaacagttcatctactatatcttgcttcttgtaagacttagaagtttcctccctttctccctctcttcctttctctcccttcyttatctttctccctctgttactttctcttccttcttccttcct

SEQ ID NO: 345947 - DNA, 545 bp, Homo sapiens
  misc_feature (1)...(545): n = A,T,C or G
caagttggcagtaatgaaggtaatgttggattctggatatagttttgaacagaatttagagaagagatgatgaatttgttgtgaggtatgaaagaaatatatcccaaatctgtaaaaatttaaatttaagacctcaaactataagaatcttagaaaataatctagggaacaccattctggacattatccttgggaaagaatttatgactaggacctcaaaagcaattgcaataaaaccaaaaattcacaagtgggacctaattaaactaaagaggttytacatagcaaaagaaactatcatcatggtaaacaaataccctacagaatgggagaaaatatttgcaagaaaaaaaaaaaacgcaacaaaaaagacataaacagacacttctcaaaagaagacatcccagtggccaagaaacatgaaaaaatgctcaacatcagagaaaaactgatcatcagagaaatgcacatcaaaaccatgcaatatcctcacataccagtaagaatggctattattaaaaagtaaaaaaaaaaaaannnnnnnn

SEQ ID NO: 345948 - DNA, 545 bp, Homo sapiens
  misc_feature (1)...(545): n = A,T,C or G
caagttggcagtaatgaaggtaatgttggattctggatatagttttgaacagaatttagagaagagatgatgaatttgttgtgaggtatgaaagaaatatatcccaaatctgtaaaaatttaaatttaagacctcaaactataagaatcttagaaaataatctagggaacaccattctggacattatccttgggaaagaatttatgactaggacctcaaaagcaattgcaataaaaccaaaaattcacaagtgggacctaattaaactaaagaggttctacatagcaaaagaaactatcatcatggtaaacaaataccctacagaatgggagaaaatatttgcaagaaaaaaaaaaaacrcaacaaaaaagacataaacagacacttctcaaaagaagacatcccagtggccaagaaacatgaaaaaatgctcaacatcagagaaaaactgatcatcagagaaatgcacatcaaaaccatgcaatatcctcacataccagtaagaatggctattattaaaaagtaaaaaaaaaaaaannnnnnnn

SEQ ID NO: 345949 - DNA, 364 bp, Homo sapiens
aaaaaatcaagaaataaataaggaagaaaataataaataataaaagctatccagataattcaaatagggtgagaagacattgcctgggagggtattttagactgggtagtcaggaagcattgcagtgcaagttaatgtttaaactgagatttttataacagtgcaagagtattattggtcagttgttttaaaataatcatctggcagttgtgtgaggagacttgactgcagagagatgarcaagcgtgaaggaggatgataatagggaacctagaaaaatggacagatttattttcaattttcccatgttatttctcccagtattaatatgacttcatttcttcttagtgtttgaatacttatc

SEQ ID NO: 345950 - DNA, 600 bp, Homo sapiens
caacatggaatactatgaatctataaaaaaagaagaaattaatgtcctttgcagtaggatagatgcatctggaggacattatcctaagtgaattaaygagaaacagaaaaccaaattcttcatgttctcatttattagtgggagctcaacattgggcactcatggacataaagatggcaacaacagacgctggacactactagaggaggaaggaagagagagagagaggcaagagttgaaagactgttgaattcttttagtgccggggtgatgggatcattcttacacccaacctcagcttcacacaatgtgcccaggtaacaagcctgcacatgtgctcccaaatctaaaatataagttgaaaaaaaagaaagatatcacaaatttaaccactgcgcattattttcactgctgtcactctggctgaaaccatcaccatttatcccaagagttaatgcaaacgtcctttaatagatctttttgtttccactcttgcccacctccctcttcccatgtttatttttgggagaatagccacagtgatccttttaaaaattaagatatatagtggcaaatatttaaccaaattttgtattattt

SEQ ID NO: 345951 - DNA, 600 bp, Homo sapiens
caacatggaatactatgaatctataaaaaaagaagaaattaatgtcctttgcagtaggatagatgcatctggaggacattatcctaagtgaattaacgagaaacagaaaaccaaattcttcatgttctcatttattagtgggagctcaacattgggcactcatggacataaagatggcaacaacagaygctggacactactagaggaggaaggaagagagagagagaggcaagagttgaaagactgttgaattcttttagtgccggggtgatgggatcattcttacacccaacctcagcttcacacaatgtgcccaggtaacaagcctgcacatgtgctcccaaatctaaaatataagttgaaaaaaaagaaagatatcacaaatttaaccactgcgcattattttcactgctgtcactctggctgaaaccatcaccatttatcccaagagttaatgcaaacgtcctttaatagatctttttgtttccactcttgcccacctccctcttcccatgtttatttttgggagaatagccacagtgatccttttaaaaattaagatatatagtggcaaatatttaaccaaattttgtattattt

SEQ ID NO: 345952 - DNA, 600 bp, Homo sapiens
caacatggaatactatgaatctataaaaaaagaagaaattaatgtcctttgcagtaggatagatgcatctggaggacattatcctaagtgaattaacgagaaacagaaaaccaaattcttcatgttctcatttattagtgggagctcaacattgggcactcatggacataaagatggcaacaacagacgctggacactactagaggaggaaggaagagagagagagaggcaagagttgaaagactgttgaattcttttagtgccggggtgatgggatcattcttacacccaasctcagcttcacacaatgtgcccaggtaacaagcctgcacatgtgctcccaaatctaaaatataagttgaaaaaaaagaaagatatcacaaatttaaccactgcgcattattttcactgctgtcactctggctgaaaccatcaccatttatcccaagagttaatgcaaacgtcctttaatagatctttttgtttccactcttgcccacctccctcttcccatgtttatttttgggagaatagccacagtgatccttttaaaaattaagatatatagtggcaaatatttaaccaaattttgtattattt

SEQ ID NO: 345953 - DNA, 585 bp, Homo sapiens
gtattatttcaaattcatggccagaggtgcacatcaccatgacagatgctcttatggtttcgtgacagtgtgagatgaaaatatgtctctatgttttttctgtcttcatttactctttgctcttgatattttgcaattgtttcttgaacaaaatcaaaggcatggacctatacgcaaacacacacacacacacacacacacacacactcttaaacactcttacaatacttacaaacatttaccgaacagatacataaggggaattcaagaatgtgactctacacacaacaaaattagccatttaaaacattagggatcccatttctttcttgagtgtttcaaacatcaccattcttcagtggaaactttacytaaactttccacattctccaaaataaagaatctttttgttatcagaaaaagttcaaattctcaaaagaaataaaatactgtaaataacaacaagcacggtaaaaaactaaaacaatagaccattctgtcatttaaagtactaaaaatatttaagtatgactatttcaattctcagagcaactcattgcagagatttataatgttttatagctc

SEQ ID NO: 345954 - DNA, 435 bp, Homo sapiens
aaattataacttgataaatactttttaaagctgcctaaaacatcattgtattcgccagggttctccagagaaacagaaccatagaaggagctctctctatatatatatttacatatacacacacacacacacacacacacacacatatacacacacacagtatatatatacacacatgtatatacacatatatatacacacatatatacacacacacatgtacatatatagtacagtaccatatagacagataatgttttatatatgtgagatatatatatatacacacacacatgsacacacacactgagcgtaataaatatactcaaaagagttttattctgttctctcacttgattgtaacagtcaacacagaagacttctgtgaccaaatgtacacgggtttctcttcaccaccaagcaatcaattctgcg

SEQ ID NO: 345955 - DNA, 545 bp, Homo sapiens
ggtgacctccaattcaattctgacactatatacctaaagacagcatcagatcccaccggttgagagttcagtttcacaaaactgcccttcaccctcttccccacttcacacaccagtaacaaggctgggcctccagatcttctgaccaataagcttcaagttggggttcccacaaccctctctttggcttcaattaatttgctgcaatggctgacagagctcagggaaacatttatgtttatcagtttattatgaagggtattacaaaggatacagataaagaaatgattagagtaagttatcaggaaataggtgaagagctttcatgmcctcactcagtgtaccaccctccagaaactgccacatgttcagctgtccagaagctctccaaacccaggtttgggagttttatggaagcttcatcacataagcatgattgacaaccatgtagaaatgtgattggaaaaaagaggtgtgatctaacactaatagaccacatggggaaacccagcaaggcctctctgttcagatttttcttcatctct

SEQ ID NO: 345956 - DNA, 580 bp, Homo sapiens
tgtccctgcaaaggacatgatcttgttcttttttatggctgaatagtactccattgtatacatgtaccacattttctttatccagtgtatcattgatgggcatttaggttgattccatgtctttggtattgtgactagtgatacaaaacatatgcrtttatgtatctttatgatagaatgatttatattcctttgggtatatacccagtaatgggattgctgggtggaatggtatttctgtctttaggtctttaaggaatcaccatactgacttccaaaatggttgaattaatttacactcccaccaacagtgtataagtgtttaatttacactcccaccaacagtgtataagtgttcctttttctctgtaatctcaccagtgtctgtgtttttttgactttgtagcaatagccattctgactggtataagatggtatccctcttctttagtagttaattaagacaacatgaatcctcatatattgagagaacaagtatattccataatttattcttggattgttgggagtgagtctactatgattccttatgtctttctcctgtaatctttagcctttc

SEQ ID NO: 345957 - DNA, 580 bp, Homo sapiens
tgtccctgcaaaggacatgatcttgttcttttttatggctgaatagtactccattgtatacatgtaccacattttctttatccagtgtatcattgatgggcatttaggttgattccatgtctttggtattgtgactagtgatacaaaacatatgcgtttatgtatctttatgatagaatgatttatattcctttgggtatatacccagtaatgggattgctgggtggaatggtatttctgtctttaggtctttaaggaatcaccatactgacttccaaaatggttgaattaatttacactcccaccaacagtgtataagtgtttaatttacactcccaccaacagtgtataagtgttcctttttctctgtaatctcaccagtgtctgtgtttttttgactttgtarcaatagccattctgactggtataagatggtatccctcttctttagtagttaattaagacaacatgaatcctcatatattgagagaacaagtatattccataatttattcttggattgttgggagtgagtctactatgattccttatgtctttctcctgtaatctttagcctttc

SEQ ID NO: 345958 - DNA, 608 bp, Homo sapiens
gatggacagcaggatcagggaacagtgagatagtaactcaagtgagagttctactacttttcttataaattgaagactaaaatgactattcaacagttttttcaaaataaatcaaacatataaacctttgaccttaccacttttcactaactccattggcctcgtatcacatccctccttactcatcttacagtctagtgtacatcatttcaattgctctcctagagccatctgtaatctcrttccatttttattttatttaaatatccgaacgatggcaaaccctattttctgcttagtccatgacagaacttctttacaacttaatttgtttgataaaacagtcagtattgctaaatagctcacctttaaatttatgactacaacctcagagttatcagatatgtttcataattatataatatttctatagacaatttactatcactatgaaaataccatttcatggttttttctctcttcttgtataattgtgaaataaaagctatcagacaagaaattttacatgctcccactactgtgcctgccacactgcctcacatctggatgctcatactttgtctttccatgggttacggtgaaaactg

SEQ ID NO: 345959 - DNA, 548 bp, Homo sapiens
aagcagaaaagcttaaaaggagagatagtacatgcaatggtataccaaagaagagaaaatagtttaagattatggattcatacttaaaacaggggatcactaagttaccaaaaggaaaatagtatttattccctaattctcactacccctatgcaggaccagcttcatgattttttacatttgcacaggactcaatgctcaaaaggttcttgctgttggtttcatgatcttttgacaccattttaaaattctgaataaatttttaataagcagccccttatcttcattttgcactataccctgtcatttatacagccagtcctgtccccaactatagtagaaaccagtttatgtgactagtcagttcacgaaaatttctcttaaactcatgaacaccctccatacttaggggtggacttccaagagctgttatctgcaattctgacttcttgactacartaatttgattagccataaccttgtgtgaattattttattaaccacctaaaaatgaaagaaaatatactcttcattgtatagtaatggaa

SEQ ID NO: 345960 - DNA, 528 bp, Homo sapiens
gctatgaaattcctatttggatattcttctcatattaaactgttttgtttccattgaaaatccattgttcatcttaatcatcttcatcaattatcttagctagatcttctgaataacttgctgcagcttctacattagcacttgctgctctactttgcagttttatattataggaatgactcctttctgtaaacctcatgaacaaacatctgctagtttcaaacttcttttccagcatctgaggtaatgacttcccagttactttcaaacttttcttctgtaacttcctcatctctctgtcttcacgkaattgaagagagttagaaccttgctacagattaaactttggcttgggcaaatgttttagctggttttatcttttatccagatcacacagccataagcctgtttttatcattcatacgttcactgaaatagcactttccctcacgaacttccgctttgcattcataacttggttaactgtttggtgcaagaggcctggctttcaacctatctcagctttca

SEQ ID NO: 345961 - DNA, 528 bp, Homo sapiens
gctatgaaattcctatttggatattcttctcatattaaactgttttgtttccattgaaaatccattgttcatcttaatcatcttcatcaattatcttagctagatcttctgaataacttgctgcagcttctacattagcacttgctgctctactttgcagttttatattataggaatgactcctttctgtaaacctcatgaacaaacatctgctagtttcaaacttcttttccagcatctgaggtaatgacttcccagttactttcaaacttttcttctgtaacttcctcatctctctgtcttcacgtaattgaagagagttagaaccttgctacagattaaactttggcttgggcaaatgttttagctggttttatcttttatccagatcacacagccataagcctgtttttatcattcataygttcactgaaatagcactttccctcacgaacttccgctttgcattcataacttggttaactgtttggtgcaagaggcctggctttcaacctatctcagctttca

SEQ ID NO: 345962 - DNA, 294 bp, Homo sapiens
ctcaactaactttatgtaatatgctaaatccctgttatttcaacattgttcacagcatcttcgccaggaatagattacatctcaagaaaccatgttatttgctcatccataaaaagcaactctcatctctccaaatttgatcataagattgcagcaattcagtcacatsttgctggacacagttaacacaacccttcaatttgttaaaaaacaaacaaacaaataaaaaaacacacagcatcagcaaagcacaataaaacaaagtaggcctattttaaaagtgttgaggaacat

SEQ ID NO: 345963 - DNA, 615 bp, Homo sapiens
attacatttgcaaatgattattgcgatgtagaattccaagagcaattttagatagacaattgttacatttaacttcagggactacattaagaaccttttcttgagaaatttgccttgcttaatggctttagagctaaatggaaatcattgtcactgtaatttcaaatataaaacaaaacaaaatagttagatgcaagttttcaatttgcatataagcaattgtgtttaattttcagaaacttaactcaaactcgttaaatttcatttattcagtaaacataaaaatagaaaacatgtatgttataattatatgagactatttcacaacctctctttgcctaaaatatgyggtattatattgacattttcacaccagaactttccttttgttaactgaggcaagtcacaaaattaacatgtttttgttgttcatattggaaagatttaaaagtaagcaaatgaaagctggataaatttgtaattatctgaatcctccattatgcctgcattagttttctgttgctataacaaattgccacaaccttagtgaaataaaacaacacaaatagattatctcacagtttcaagaggtcagaatttggtgatttcagctag

SEQ ID NO: 345964 - DNA, 615 bp, Homo sapiens
gctgtgtgcagccaatgtcagagaactgtactgtaaaggtatagaaatcttgcgataaatcgcaaatgccatactattacaacttyatgtgtactaataggacatttaaacagattggaatttgtaaatataatatttaactgtctctgatcaatcaatacaatttttacaatgaaataattttaattcgaaatcttttcagtctttttctgcttgtcatgacttagggctttaaggaatttatctataaaaagaaaactaaacataaaactaagaaaattaggatttcatgagaaaacaagaaatagtctttcttatatacccatattatattcatactgaaggtatactttatactgacttttcaaataatttatttatgttcttagagtttcaccaaaactggttggaagcatgctgcttaaagttttaaattgcaattatacagaaaatgaacttatgtaggttgaattctctcaattcttcatcataatcagtgaagaagacatgcatataccaaggaagggtagccaagaagaaaggaagctttttttttttcaatattctaattatacccacacggttatttgattcaaaaaataaaagagaaaagtg

SEQ ID NO: 345965 - DNA, 615 bp, Homo sapiens
gctgtgtgcagccaatgtcagagaactgtactgtaaaggtatagaaatcttgcgataaatcgcaaatgccatactattacaacttcatgtgtactaataggacatttaaacagattggaatttgtaaatataatatttaactgtctctgatcaatcaatayaatttttacaatgaaataattttaattcgaaatcttttcagtctttttctgcttgtcatgacttagggctttaaggaatttatctataaaaagaaaactaaacataaaactaagaaaattaggatttcatgagaaaacaagaaatagtctttcttatatacccatattatattcatactgaaggtatactttatactgacttttcaaataatttatttatgttcttagagtttcaccaaaactggttggaagcatgctgcttaaagttttaaattgcaattatacagaaaatgaacttatgtaggttgaattctctcaattcttcatcataatcagtgaagaagacatgcatataccaaggaagggtagccaagaagaaaggaagctttttttttttcaatattctaattatacccacacggttatttgattcaaaaaataaaagagaaaagtg

SEQ ID NO: 345966 - DNA, 615 bp, Homo sapiens
gctgtgtgcagccaatgtcagagaactgtactgtaaaggtatagaaatcttgcgataaatcgcaaatgccatactattacaacttcatgtgtactaataggacatttaaacagattggaatttgtaaatataatatttaactgtctctgatcaatcaatacaatttttacaatraaataattttaattcgaaatcttttcagtctttttctgcttgtcatgacttagggctttaaggaatttatctataaaaagaaaactaaacataaaactaagaaaattaggatttcatgagaaaacaagaaatagtctttcttatatacccatattatattcatactgaaggtatactttatactgacttttcaaataatttatttatgttcttagagtttcaccaaaactggttggaagcatgctgcttaaagttttaaattgcaattatacagaaaatgaacttatgtaggttgaattctctcaattcttcatcataatcagtgaagaagacatgcatataccaaggaagggtagccaagaagaaaggaagctttttttttttcaatattctaattatacccacacggttatttgattcaaaaaataaaagagaaaagtg

SEQ ID NO: 345967 - DNA, 567 bp, Homo sapiens
ttttgctaggaaaaagaatcagttacacagagagatattttgatcattataaacacgatattttaaaaagtaattagtatgcttgtgagtaaatagcagaattagaattggctttgatcataaggaagctgaatattgcaagcatcatatcatcctgtgaaaattaatccgttaataaaactagaaaagttatagaagttttaaataaagtrcagttaggaagactttgaaatattgtcagagacagaggacatgtgtcaaatttgaatagaataatttgctttatatataggatgttcccctgtagttatggcacataggttagaatatttgcaatgaaaacatgcaccttttgacaaaggttctgcagctccagaaacctaaaagtatcataataggaaaatataaacataaaaatgtatctaaatgatggaacaaaatttatctgcgtatccttttctgccctcaccaatttagatttcattgttagcaattaatgactaatgaagataaataatccctatgagtttgaggtcatgcaaatctgagtagacaaactctgatatg

SEQ ID NO: 345968 - DNA, 567 bp, Homo sapiens
ttttgctaggaaaaagaatcagttacacagagagatattttgatcattataaacacgatattttaaaaagtaattagtatgcttgtgagtaaatagcagaattagaattggctttgatcataaggaagctgaatattgcaagcatcatatcatcctgtgaaaattaatccgttaataaaactagaaaagttatagaagttttaaataaagtgcagttaggaagactttgaaatattgtcakagacagaggacatgtgtcaaatttgaatagaataatttgctttatatataggatgttcccctgtagttatggcacataggttagaatatttgcaatgaaaacatgcaccttttgacaaaggttctgcagctccagaaacctaaaagtatcataataggaaaatataaacataaaaatgtatctaaatgatggaacaaaatttatctgcgtatccttttctgccctcaccaatttagatttcattgttagcaattaatgactaatgaagataaataatccctatgagtttgaggtcatgcaaatctgagtagacaaactctgatatg

SEQ ID NO: 345969 - DNA, 567 bp, Homo sapiens
ttttgctaggaaaaagaatcagttacacagagagatattttgatcattataaacacgatattttaaaaagtaattagtatgcttgtgagtaaatagcagaattagaattggctttgatcataaggaagctgaatattgcaagcatcatatcatcctgtgaaaattaatccgttaataaaactagaaaagttatagaagttttaaataaagtgcagttaggaagactttgaaatattgtcagagacagaggacatgtgtcaaatttgaatagaataatttgctttatatataggatgttcccctgtagttatggcacataggttagaatatttgcaatgaaaamatgcaccttttgacaaaggttctgcagctccagaaacctaaaagtatcataataggaaaatataaacataaaaatgtatctaaatgatggaacaaaatttatctgcgtatccttttctgccctcaccaatttagatttcattgttagcaattaatgactaatgaagataaataatccctatgagtttgaggtcatgcaaatctgagtagacaaactctgatatg

SEQ ID NO: 345970 - DNA, 567 bp, Homo sapiens
ttttgctaggaaaaagaatcagttacacagagagatattttgatcattataaacacgatattttaaaaagtaattagtatgcttgtgagtaaatagcagaattagaattggctttgatcataaggaagctgaatattgcaagcatcatatcatcctgtgaaaattaatccgttaataaaactagaaaagttatagaagttttaaataaagtgcagttaggaagactttgaaatattgtcagagacagaggacatgtgtcaaatttgaatagaataatttgctttatatataggatgttcccctgtagttatggcacataggttagaatatttgcaatgaaaacatgcaccttttgacaaaggttctgcagctccagaaacctaaaagtatcataataggaaaatataaacataaaaatgtrtctaaatgatggaacaaaatttatctgcgtatccttttctgccctcaccaatttagatttcattgttagcaattaatgactaatgaagataaataatccctatgagtttgaggtcatgcaaatctgagtagacaaactctgatatg

SEQ ID NO: 345971 - DNA, 592 bp, Homo sapiens
ttgcatatggttaacgtagaaaaataaatgacaagtcaatcagtaacactgtgcatagaaaccaccgttaagcacttcattcacctgttacagagatgccaaattagctcttcagtttagcttattttagagtgctagttatatttgaacttgatacctatcctccaaaaaaaccaaaatatttccgaacattaactcacagtctttcatgtcatctctgaacaggaaaggggacatttgctgccttttgcttcagaaaaatcaaccaccatactgaatcatgtaatggaaatacttatatcttgttctgaggttgctgctcagatcttgagtgaaatataatcacatggtaaggggacctgggccctaaacacttcatcctgtctacagctaaagaatagtacagtatatgagaatccatcaggatcatcacttcttacatgtgttcgtattgtcagcacasaatacgtagcaagtgttctacagacgtcgaaagaactagcaaacccactgttgtttgtggcgctctcacttcctgtactattttattactcaagataagcctaaaagaacagacaaaactatcacgaaa

SEQ ID NO: 345972 - DNA, 567 bp, Homo sapiens
gttagttaattttcactggaaataactattctattcacactacctccaagccagcaagacagaaatgtgtattagccagagaatgcttgtggaagggaatagatctgctcaggttattgagagaagatgtgctgctctgtgacttaacagtaatttatttcatgtgagaattgggctggtcattgtaaaaacataactcaaaaactttcagcattcaggagagccttctagtgatgataagcagctgttatctttatcctcacccttactctaagcaacagtagaggtacattatttggttggktcttcagactgtgtatctgcatatagtgctagggagtggcccctttcacaccatctgattcttagcccaaaatccaacctcatacttggcattgattctttctttggttgatttttctccatgatgtgcttgagatcagatgagccatagcaacagaagtcctttctgttcttagatatgctctaccagttatgattgagatttttttttaccaaagatgttagaatcagcaatgatgctgcttcctgctatttttatggcca

SEQ ID NO: 345973 - DNA, 558 bp, Homo sapiens
attcataaagaaaagaggcttaattgacacacagttctgcaagacatactggaagcatggctgagaggcctcaggaaacttataatctggaggaaagtgaaggggaagcaagcataccttaccatggtggatcaagagagagaaagagaagggggacgtactctacactgttaaacaaccagatctcatgagaactctatcatgagacagtactgggggatartgctaaaccattagaaaccactcccataattcattcagctcccaccaggttcctaccccaacactggggattataattcaacatgagatttagatggagacacagaaccaaccatatcattttgcccctggcccctcccaaatctcatgtttttctcacatttcaaaacactaatgcctttctaattgtcacccaaagtcttaactcattccagcattaactccaaagtccaagttaaaagtccctgagacaaggcaagctgcttccacctgtgagtctgtgaaatccaaaacaagtttgttacttcccagatacaacaggggtacaggcattgg

SEQ ID NO: 345974 - DNA, 558 bp, Homo sapiens
attcataaagaaaagaggcttaattgacacacagttctgcaagacatactggaagcatggctgagaggcctcaggaaacttataatctggaggaaagtgaaggggaagcaagcataccttaccatggtggatcaagagagagaaagagaagggggacgtactctacactgttaaacaaccagatctcatgagaactctatcatgagacagtactgggggataatgctaaaccattagaaaccactcccataattcattcagctcccaccaggttcctaccccaacactggggattataattcaacatgagatttagatggagacacagaaccaaccatatcattytgcccctggcccctcccaaatctcatgtttttctcacatttcaaaacactaatgcctttctaattgtcacccaaagtcttaactcattccagcattaactccaaagtccaagttaaaagtccctgagacaaggcaagctgcttccacctgtgagtctgtgaaatccaaaacaagtttgttacttcccagatacaacaggggtacaggcattgg

SEQ ID NO: 345975 - DNA, 558 bp, Homo sapiens
attcataaagaaaagaggcttaattgacacacagttctgcaagacatactggaagcatggctgagaggcctcaggaaacttataatctggaggaaagtgaaggggaagcaagcataccttaccatggtggatcaagagagagaaagagaagggggacgtactctacactgttaaacaaccagatctcatgagaactctatcatgagacagtactgggggataatgctaaaccattagaaaccactcccataattcattcagctcccaccaggttcctaccccaacactggggattataattcaacatgagatttagatggagacacagaaccaaccatatcattttgcccctggcccctcccaaatctcatgtttttctcacatttcaaaacactaatgcctttctaattgtcacccaaagtcttaactcattccagcattaactccaaagtccaagttaaaagtcyctgagacaaggcaagctgcttccacctgtgagtctgtgaaatccaaaacaagtttgttacttcccagatacaacaggggtacaggcattgg

SEQ ID NO: 345976 - DNA, 513 bp, Homo sapiens
tgatagtgatttttatctatcaccatgtatgtaattagctattatgtatcactgatgatttttgtcaaggtatatttctatgtagagtataatgaacttctgkgtaagtctacataatggactataccctctgcatagcacagcatctaccatatcataagagttcattaatgaagggtgatgaagataaaaagaaattgggtactgtgggaaagttatataccaacaaatggctatattaggcaggtaagactacgaggaagtattgtattttttaaaaaagtcaccatatggaaactatagccaactccctcagtatttatttcacataaatattagttttcaaacatttatgactagtataccaaaaaaagtcactggaacaatatattttcatcaggagaccgaggtttaagtttaaaggatcagccacccttacattctgcttgagaacgaagtccaagccatagtttcattagttttcctcttatggtcctagtagaagcacatcac

SEQ ID NO: 345977 - DNA, 585 bp, Homo sapiens
tggaggaagctttttcgttagtaggtacacatttttccaagtaatctgtgtccaaataggaggtgagccttctcaaaatgaattctaattttccaggtgttcacayagcaaacccctaatgaacctgaccctaggatggctctggttgcatggccagagtcttgtattcattggcctattgcttaaatattaatcttctattcagctttcttggttgtccatggcaaagggtgcattccatgcacatcaaagataggtagaagacatcattccttaacatgtaattcacatgtctcccttcatcataggtgaagtcacaaaatttccagaccacataacaaaactcatttgtatcattgcttataaaattgttaaatactttaattatgtatttctgcaatcttaggcattgtttgttctttcacacatctgtcctctgtgcttgtttggagaagtagaccctgaagagtatggcctcatgcattttggttagtgccagggcaatgtcaaaaatatatatggtcatcggtttttgttgaagattattgttcagagtgaagatcagaagaacattctgaaccaggc

SEQ ID NO: 345978 - DNA, 412 bp, Homo sapiens
ctgggttcatgttagtccagtwtttttggtttgagatagtcaagaagtgtttaaaactgggcaacagaaaacagtttgaaaacattaattaagaataattaaaataacattatggatacactatatgatggtttattataatagttaactcaggcacatgttatagtgatgacttctgttcactcagagaaatcagttatgattgctgacagcaaaatggagctgagttcaaagaagacagttcatacgcaaacagggcaatcagcatccagctctgtgacaaaagatgctgaagagtaggtagaatgacctatccaggtattaaggtgaaatcatccattgtccaaagaggaagaaactcataattaagcattttaagttaatggccactcataagttgagaaagttaaat

SEQ ID NO: 345979 - DNA, 416 bp, Homo sapiens
taagtaatatttatctcaagacacccaaagaccaatttttgttttcattaatatcagaaataaggtaaagatattcattactgccaccattaggattctttgcaggttttagtcaatagattaagatactaaacataactaagataattaatgactgaaaaggsaagtagaaatcatcttaatttctcatgtaattgtctaaaagaagacaatataagcaaacggtaagcaactataactaataaaagaattatagcaaggagaggtgaacattaagaaaaatatacaaaatcggtaaataaataaccagttagaaaatacaatgccgaatatttcatttaaaaaatatataattactagaaaaccgcccccccaatgtaaaatacattaaattgttaaagtgattattagacaac

SEQ ID NO: 345980 - DNA, 573 bp, Homo sapiens
gcaccacatctcagaaaagtcagagacagattttattctatgtagcaatgttatattgcaaaggtcacattacaaaatcaatggagcaaaagaaatggcaaagatttggtaccattgattgattagttaactgaagagttaataataaaattagacttatcacaaaatctttcactaaaatttttcatttgtactaaagaattaactatacatgaaaccataaataaaggaaataaggamacagattaatagtgatcttatctctgaatgcagaaggtctttcaatgggataaagtcaatggaagaaatgcagagagcaggaacagagtcaaatacacagaattttaaaataattttctctaagtttaaaattagaaagagtaaagaggaagaaacctaagcaaataattaaactaaaaactgatactaatgcttaacaaattagaaaacaagtggaaataatatttgcaacaaacatttgtgttgtaatattaagcaggccctgatttgataaatccaaaggaaatgatctgacatacaaccataattacacattcaaagagaagcattgga

SEQ ID NO: 345981 - DNA, 537 bp, Homo sapiens
cataaatgtgtttaccctagattaaaaggtggtgtgtctgaagggatggattaataaattggttgttccattgcattaagacaaggccagcatttcataatttttactttctattgtgaaacagtagaaatagccaagaagattttcctacaagctgttgcctttactaggtatatcagaatgctttagggttaaaagaggaaagaaacaattaaaagtaggtttaacaatacaggcattttatgtcttacaaactaaattcccaagcacattgggtgaaggtwtaatatttttttcttttgggggttgactttctgttctgccatttccagcctttgggttacaggatggctgtggcaatcctagacagtgtgttttcacccaacaagatttaaaggtgccttgttgaaaaagggggaaaagaaggcatgttctttccttggcttcccttttaaaagagagtgaactattttcaggcatctcatggcagacttcctgttaacattttattggccagatttgcaacttgtcccaagt

SEQ ID NO: 345982 - DNA, 583 bp, Homo sapiens
attttgcatttgcttcttctaggcactttagaaacatcttcggcctgggactagttttaacgttaattcttttgctttaggagcacaaattatgcaggtaatgtaatatgaacctcggagcccactgtgatgtaagccacgggaatgaattttcaggagacgtttttctagcaacaatacagtcagaaacaaacaagtttctcatcttcttctgccaatggaaaggagtttatagctaagtttttcactttgagtatccggattttacacaggaaagcctgagtttcaagtttttgcattcccaggccctggtgtgtcatgttcttttatgtttgayttttatcaaacatgtttgatatgttcttttatgttctttcattttggtatgaaaaatgatcctatgttattactccttaacccctaaaagagttatcttgcttatcattttggttttcaattctctctttgtttttgagaaataaattactttgatacatattgacctagaaaatatagctcaatataagtatgtttttatgactgtctactgattgactagacatatgcacacacagagcctata

SEQ ID NO: 345983 - DNA, 591 bp, Homo sapiens
gggctaaacttaatgagaggtacttttaagagaaaaagacacatcatagaaaaatacccctgctgacctggaagtaagtgacttctaggtcaaccaatttgtaaactgcttatggtgaccccatggcaggaaatctatttgtatattgtcagaattcctgccttccacrtgatgcttccagtaggaagagaaaaaggataccatgacaagttaaaaaaaaaaagggagggggctctcttttttcaagaaataatcacctctcatctgggatagcttaatataaacagaggagaccacaacatgagcacatcgatgagaggaaaaaggcaacctggttgaaagggctcactgacatgatggagcagcatttactaagtcacagtgaatgattagcctctgggatagcaatagtccgccaagaagtctacactcattcttatactgattaaatgagcatatccgtgccattctggaggcccagttttacactacatattacagaaataacatagagaccagtgggtaacctcctagaattaaacttcttgtgaaaaagcatatcttattgttttcacaattgaaaaaccttga

SEQ ID NO: 345984 - DNA, 595 bp, Homo sapiens
ttattttaggtacgcactggctcagtggactcacatccaaaaagctgagcattgaacaaagacagagyggggtttttataagtggccttacagaagcaaaacaaaagcagttagtcatacagtgacaggtcatgtaacctatagcataacataacttgtgaccttgcatagctggtggccttgtagctgcattgaaagaaaaacaagacctggctaaatatagacatttgtaaaacataataatgcttaagaagcctgggaaaagagtaacagtaaaagaatccgtctttctttttcttccttcaaccttgctctggaagggcatgggggggtgtctggagcccattcctttggccttggctattcagacagcattaacttacaactgtccttgaagtgagcttgctaggcagaggaaaatttgttcttttctttttccttttaacccttgccttgccacattctgagacttagcttttacttttctagtagtgaataaatgcagtacttattcttattattatttttaaatttctgcctcattaatatttgaggtaggaatgacaaaaagtatttggtaaggtaggggtgagac

SEQ ID NO: 345985 - DNA, 595 bp, Homo sapiens
ttattttaggtacgcactggctcagtggactcacatccaaaaagctgagcattgaacaaagacagagtggggtttttataagtggccttacagaagcaaaacaaaagcagttagtcatacagtgacaggtcatgtaacctatagcataacataacttgtgaccttgcatagctggtggccttgtagctgcattgaaagaaaaacaagacctggctaaatatagacatttgtaaaacataataatgcttaagaagcctgggaaaagagtaacagtaaaakaatccgtctttctttttcttccttcaaccttgctctggaagggcatgggggggtgtctggagcccattcctttggccttggctattcagacagcattaacttacaactgtccttgaagtgagcttgctaggcagaggaaaatttgttcttttctttttccttttaacccttgccttgccacattctgagacttagcttttacttttctagtagtgaataaatgcagtacttattcttattattatttttaaatttctgcctcattaatatttgaggtaggaatgacaaaaagtatttggtaaggtaggggtgagac

SEQ ID NO: 345986 - DNA, 595 bp, Homo sapiens
ttattttaggtacgcactggctcagtggactcacatccaaaaagctgagcattgaacaaagacagagtggggtttttataagtggccttacagaagcaaaacaaaagcagttagtcatacagtgacaggtcatgtaacctatagcataacataacttgtgaccttgcatagctggtggccttgtagctgcattgaaagaaaaacaagacctggctaaatatagacatttgtaaaacataataatgcttaagaagcctgggaaaagagtaacagtaaaagaatccgtctttctttttcttccttcaaccttgctctggaagggcatgggggggtgtctggagcccattcctttggccttggctattcagacagcattaacttacaactgtccttgaagtgagcttgctaggcagaggaaaatttgttcttttctttttccttttaacccttgccttgccacattctgagacttagcttttacttttctagtagtgaataaatgcagtacttattcttattattatttttaaayttctgcctcattaatatttgaggtaggaatgacaaaaagtatttggtaaggtaggggtgagac

SEQ ID NO: 345987 - DNA, 595 bp, Homo sapiens
ttattttaggtacgcactggctcagtggactcacatccaaaaagctgagcattgaacaaagacagagtggggtttttataagtggccttacagaagcaaaacaaaagcagttagtcatacagtgacaggtcatgtaacctatagcataacataacttgtgaccttgcatagctggtggccttgtagctgcattgaaagaaaaacaagacctggctaaatatagacatttgtaaaacataataatgcttaagaagcctgggaaaagagtaacagtaaaagaatccgtctttctttttcttccttcaaccttgctctggaagggcatgggggggtgtctggagcccattcctttggccttggctattcagacagcattaacttacaactgtccttgaagtgagcttgctaggcagaggaaaatttgttcttttctttttccttttaacccttgccttgccacattctgagacttagcttttacttttctagtagtgaataaatgcagtacttattcttattattatttttaaatttctgcytcattaatatttgaggtaggaatgacaaaaagtatttggtaaggtaggggtgagac

SEQ ID NO: 345988 - DNA, 591 bp, Homo sapiens
ctatcatctcacgtcatatataaaaaccaactcataataaattattattattattatttgagacaragtctcactctgtcgcccaggctggactgcagtggtgccttctcagctaactccaacctctgcctcccaggttcatgtgattctcctgcctcaacctcctgagtagctgggattacaggtgggtgtcaccatgcccagttaatttttgtatttttagcagagacggggtttcgtcatgttggcaaggctggtcttgagctcctgacctaaggtaatctgcctgccttggcctcccaaagtgctgggattacagtctttacaggctgaggcaccgtgcctggccactcaaaataaatcacttaaatgtaaggcctgaaaactggaaactactacaaaaaatagagtaaaagccccataacattggttgggcagtgactttttaaatttaacctcgaaatcccagggaagaaaaggaaaaacaaatgagtcagattactacaaattaaaatgctgttgcacagaatctgacacaatcaacaagtcaactaaaaattggaacaaaatatttgtaaatcatacatgtgt

SEQ ID NO: 345989 - DNA, 591 bp, Homo sapiens
ctatcatctcacgtcatatataaaaaccaactcataataaattattattattattatttgagacaaagtctcactctgtcgcccaggctggactgcagtggtgccttctcagctaactccaacctctgcctcccaggttcatgtgattctcctgcctcaacctcctgagtagctgggattacaggtgggtgtcaccatgcccagttaatttttgtatttttagcagagacggggtttcgtcatgttggcaaggctggtcttgagctcctgacctaaggtaatctgcctgccttggcctcccaargtgctgggattacagtctttacaggctgaggcaccgtgcctggccactcaaaataaatcacttaaatgtaaggcctgaaaactggaaactactacaaaaaatagagtaaaagccccataacattggttgggcagtgactttttaaatttaacctcgaaatcccagggaagaaaaggaaaaacaaatgagtcagattactacaaattaaaatgctgttgcacagaatctgacacaatcaacaagtcaactaaaaattggaacaaaatatttgtaaatcatacatgtgt

SEQ ID NO: 345990 - DNA, 525 bp, Homo sapiens
tgtagttaagacactctttttactcttctgttaaatgatcaatcagtatatgttaccaacattcaatttctacaactttcttctgaattctgcatgttgtgccacattgctaaagtaatggcaccatttgcaagatcagacttggcccatgactctagtaggctgtgacaagtagaaggaaaccattccttttgagattctttttcagataggtagaggagcaatctgggaaaacaacaagttccctaggctgaaagaagttaaaaaataacctttgtccctttaaaaatatctgactattctagatcttggkcccaagccttttatggcagagaaagtccagcttgaagagcttgtggcaaatggccactggtaccagagctgttccccagcatttgtgtatataatttctctatttcagtcactatagagaaagaaaaaaagaatacatgttctcttaagtcttggcccccaagagactggcagctttttcctttccttactgggaggccaaaagaagataca

SEQ ID NO: 345991 - DNA, 525 bp, Homo sapiens
tgtagttaagacactctttttactcttctgttaaatgatcaatcagtatatgttaccaacattcaatttctacaactttcttctgaattctgcatgttgtgccacattgctaaagtaatggcaccatttgcaagatcagacttggcccatgactctagtaggctgtgacaagtagaaggaaaccattccttttgagattctttttcagataggtagaggagcaatctgggaaaacaacaagttccctaggctgaaagaagttaaaaaataacctttgtccctttaaaaatatctgactattctagatcttgggcccaagccttttatggcagagaaagtccagcttgaagagcttgtggcaaatggccactggtaccaragctgttccccagcatttgtgtatataatttctctatttcagtcactatagagaaagaaaaaaagaatacatgttctcttaagtcttggcccccaagagactggcagctttttcctttccttactgggaggccaaaagaagataca

SEQ ID NO: 345992 - DNA, 525 bp, Homo sapiens
tgtagttaagacactctttttactcttctgttaaatgatcaatcagtatatgttaccaacattcaatttctacaactttcttctgaattctgcatgttgtgccacattgctaaagtaatggcaccatttgcaagatcagacttggcccatgactctagtaggctgtgacaagtagaaggaaaccattccttttgagattctttttcagataggtagaggagcaatctgggaaaacaacaagttccctaggctgaaagaagttaaaaaataacctttgtccctttaaaaatatctgactattctagatcttgggcccaagccttttatggcagagaaagtccagcttgaagagcttgtggcaaatggccactggtaccagagctgttccccagcatttgtktatataatttctctatttcagtcactatagagaaagaaaaaaagaatacatgttctcttaagtcttggcccccaagagactggcagctttttcctttccttactgggaggccaaaagaagataca

SEQ ID NO: 345993 - DNA, 525 bp, Homo sapiens
tgtagttaagacactctttttactcttctgttaaatgatcaatcagtatatgttaccaacattcaatttctacaactttcttctgaattctgcatgttgtgccacattgctaaagtaatggcaccatttgcaagatcagacttggcccatgactctagtaggctgtgacaagtagaaggaaaccattccttttgagattctttttcagataggtagaggagcaatctgggaaaacaacaagttccctaggctgaaagaagttaaaaaataacctttgtccctttaaaaatatctgactattctagatcttgggcccaagccttttatggcagagaaagtccagcttgaagagcttgtggcaaatggccactggtaccagagctgttccccagcatttgtgtatataatttctctatttcagtcactawagagaaagaaaaaaagaatacatgttctcttaagtcttggcccccaagagactggcagctttttcctttccttactgggaggccaaaagaagataca

SEQ ID NO: 345994 - DNA, 622 bp, Homo sapiens
caaatattgcatgacttcacttatatatggaacctaacaaagttgaatgcataaaggcagagtagaatgatagttgctaggggctggggggttgggggaaaatggggagatgttggccaaagggtaggaagtttcggttatgcaagatgatatgttttagaaatctattgcatagcatgctgactgtagttaaaaatactgtattgtatatttgaaatttgctaagaaagtgcatcttaagtggttctcaacacacaaaaggtagctatgtgagatacgcatatgttgattagcttgattgtggtagtcatttcacagtgtataggtatctcaaaacatcacattgtacacaataaatacatacaatttttgtcaagtgtacttcagttaagctgggaaaaaaaatacacagttttcatacacttctatcctctcttgggcagcatacagcattctccactgtcaacatcccactcccaagtaatatactgacactataccactacactgacaccatcattaccacccaaagttcatagtttatgtktattcttgggattgtacactctgtgggtttggacaaatgtgtaatgacatacattcaccattatgggatcatatg

SEQ ID NO: 345995 - DNA, 622 bp, Homo sapiens
caaatattgcatgacttcacttatatatggaacctaacaaagttgaatgcataaaggcagagtagaatgatagttgctaggggctggggggttgggggaaaatggggagatgttggccaaagggtaggaagtttcggttatgcaagatgatatgttttagaaatctattgcatagcatgctgactgtagttaaaaatactgtattgtatatttgaaatttgctaagaaagtgcatcttaagtggttctcaacacacaaaaggtagctatgtgagatacgcatatgttgattagcttgattgtggtagtcatttcacagtgtataggtatctcaaaacatcacattgtacacaataaatacatacaatttttgtcaagtgtacttcagttaagctgggaaaaaaaatacacagttttcatacacttctatcctctcttgggcagcatacagcattctccactgtcaacatcccactcccaagtaatatactgacactataccactacactgacaccatcattaccacccaaagttcatagtttatgtgtattcttggkattgtacactctgtgggtttggacaaatgtgtaatgacatacattcaccattatgggatcatatg

SEQ ID NO: 345996 - DNA, 622 bp, Homo sapiens
ttcaaatgtagggatggaagtgacattccacataatgaagtaagagaagagaccgtgagttcaatcagccaatgggctatgctagggtgggtggggcaggtgttcactggagaataaggaatgcaaggcacctggcttaaatgggcagggatcctgctctgtaacatgggtctcagattcctactgtgatggcttagaagtagacgtgtacaatggagagagagaaggattgcagagatacataatggttttcaagaargaaggatgttttagggcagaaagaccatattaaagggaggtgcaaaggtgggaaagagcaagtttggggaatcattacctgactattgccatcgagggaaagggctgtggtggtagctggtagcagaagaggccagaaatggtggggtacaccttttaaaaaggtttcaaatccttcaccaaataaataattagatagtattgttataatcagctataggatattatggaagattataattagcaaagtgacatttacataattgtgtgttttttaagaaagcagttgtttggcctataattccatacttgtattctgtaggattgtcacacctaatgatatgcaaaaggtagaaaaatgggt

SEQ ID NO: 345997 - DNA, 622 bp, Homo sapiens
ttcaaatgtagggatggaagtgacattccacataatgaagtaagagaagagaccgtgagttcaatcagccaatgggctatgctagggtgggtggggcaggtgttcactggagaataaggaatgcaaggcacctggcttaaatgggcagggatcctgctctgtaacatgggtctcagattcctactgtgatggcttagaagtagacgtgtacaatggagagagagaaggattgcagagatacataatggttttcaagaaagaaggatgttttagggcagaaagaccataktaaagggaggtgcaaaggtgggaaagagcaagtttggggaatcattacctgactattgccatcgagggaaagggctgtggtggtagctggtagcagaagaggccagaaatggtggggtacaccttttaaaaaggtttcaaatccttcaccaaataaataattagatagtattgttataatcagctataggatattatggaagattataattagcaaagtgacatttacataattgtgtgttttttaagaaagcagttgtttggcctataattccatacttgtattctgtaggattgtcacacctaatgatatgcaaaaggtagaaaaatgggt

SEQ ID NO: 345998 - DNA, 557 bp, Homo sapiens
atacaggcttttaagtcagcaatacctttttgaaataaggccccaggctcattcttctcatttgggtaactgaatgaatagtgacaacacagaccatcatatgaataaaggaagaatggcaaattttagaaggatgtgtagacaagggaattagttcatattaggaacattaaattttatatgcttttagcaggtttatgagatgtgtagtagatatgtaagaaacttaaaataaggttgaagagttttaaaatgtgttcagtgttgaggttaaatataagaattattggtataactgaagacataagagtgaatgatatgtaacagactttgagtaacgttagaagaaacagggctaccattcctgggaaagcactgatgttttcagggatggcagagaaaaaagatccaacaaaggagcctgaaaaggtgagagtgggaggagaaataggagagaatgggatacatatctaaagggaaagaggwctgagaaaaaagggattatcagacaggccaatttctgtgcaatttttgaaggtttttaaaaaggtaggttc

SEQ ID NO: 345999 - DNA, 553 bp, Homo sapiens
ctgatttaagaggttattttgttagaacactacctaatacattttgtatttcccatgcacttcaagacttccataggggctcttagaatatactatcatcttaaaataccttttctagttttaaaattttcttatcaaagaatgcacacatagcaacaaatacaagggtacaaaacagcttcagatgaagaacaaaactctctgctctaaccttcccagtccagaggtaaatatttaaaacactgatttactattaggactttttttctgctgattaacatcacagctctaaataacatgctaatatatttaaatctctaggcrctaagaaagatgagaatttaatatgtatattctgtcacattttttgtcttttttccatacttttctacatagtctttaaaagtttttattcatttaaatattgtattgttatgttactctacagttatttttattcattcaatataaatattaaattaatattttcatttaaatattctattatgttataactatacatagtatgtttccacttttatgtttggttccc

SEQ ID NO: 346000 - DNA, 577 bp, Homo sapiens
atcatcatgttctcaccctcttgtgaattgcagcctaaatatacaaatctggagcttggcatgaggcacatatacatcttgacttgtacaactaattcccatccattttgctcaactcaggctgagccagaattaactaactaatgcagaatgccacagaaattgcatctgatttttctttggctgcagattcactagaagctcatgttcttactattccttagaatttgggagtctagaaaagcacaggcctaaataaatttctaagagagaaatttaatttaacaattagagtaaaatattctggtaatgaaattgtattctgctagtgtgtgggggatcatatagactgaattatttaaagcagtcctaatttcaaataataataaccagtaaaataataataataaccactctaaattttgagtagttyatatatacataggctgttaattttcatagcaattctgttagtccttaataatttagttttttagttgtggaaactggggaatctatgaaattaagtactctgtagcagctaattcaacctatgcgtacataggttgattgattt

SEQ ID NO: 346001 - DNA, 600 bp, Homo sapiens
  misc_feature (1)...(600): n = A,T,C or G
nnnnnnnnnnnnnnnnnnnnnnnnnnnnnnnnnntagttagaggcagtataacatgttcgagcacaggggttcagattttatactgccctcatttatcttagagctctgctgttactgcctgtgtgattttggctctcagtttcctcatctgtatgtaaagaatacaaagcacctgccccactgggttgttgtacaaatccaaagagataatgtagttcaagcacttatgcatggtatctagaacctagtgtatgtttaattgatacaagctcctattttatcgtaagtcataaaatgatgtttggcatttatgacacttttattacacattaataaccgatctcagggaaaaaacatttgtttttgtttttttctgaaatgatggctcacacctttaatcmtagtgctttgggaggccgaggtggaagcatctcttgagccctggagtttgaaaccatcctggacaacatagcaagaccagtctttacaagaaaatcaagaaattatccaggcatgatggtgcatgcttgtagtcttagctagtcaggaggcagaagtgggaaaatcgcttgaccccaggagttcgagctatgatggaa

SEQ ID NO: 346002 - DNA, 616 bp, Homo sapiens
atggaaacatcatttgtgagacgtgagggatataggattgggaagaggaaggagctggactgtgatgtagtcacagcagaggcctcagcctaccctagatgccatgaggaactttggaggtaaaatagagcttcagagttttcctgctttgaggcaagggggcaaagccagtaaactcctgcatgaatcagtcattgcttggggctatcaactcctccacttaagggtcaccttaggtaaggcagctccctttggcccagggcaatttgtaaagaggctctcaggccagggacatcagccaccagcactccaagcagctgagaggagtgccttggtgccgaagggggttctgggaatcagacccacagcatccctacacctgtatttgcatagcagataktctaaaaatatgtagacacatgtcctctgctttcctacaatcttatacattgctctcttccaacaggtgagaagagatgagcttaaatattttttcgaactttctaaggtttttatgactcttctttgaaggtttttttaacccctaggaaggaaactccagttgcaacactgagagaggaccttgaactgtttatacaagtataaatgaaataga

SEQ ID NO: 346003 - DNA, 612 bp, Homo sapiens
gtgttaggccctgaggattcagtagtgaaactagcaaactaaattcttacaattatggaacttaccttccggtgtttgtgtggtggggtgttgggaagaggacagacgggggaaatttgaattttctataggtgcaactgtatctcaagaatggtcctcctgtggttatattttagcttccagaaatgctacgagccttccttgtatgacattgctcaggactctggttacagcagccatttattgaacgcttactacataccagataccacttgcgtttcaactgattacaggccaacatttttctatgaaattttamaagtttttatgtgtgtcatgatctcaaaaatgttgctgaggaaaacacatagatgcgtatttcatttattcattcaatgatttcttccttttacaaacttttgagtcctactcaataattctgtatattgaaaaatgtgactacttaaaataactgcatttgaaagcacctgttaaaaacataacattaacaaatataatgaagagtatgaggagggagaagaggtaattttttactgattcacttactgggcatttattaagcactgataatgtgtctgacaatagtagaca

SEQ ID NO: 346004 - DNA, 555 bp, Homo sapiens
taaaaatataaatataggagaacttgctgccctttcttaatctgtaccaagaaaatatttctgatgtttttaaaagagcttattagtccagggtattgatatttactaagtgtgccttcttttatgggtacattttattaagcagggatttgggtcagagttcttaaactgatagcatgccagctgcattgtacttgcagatatttcatttggttcatacaatattttataataatttaaattcattgctacattttaaaatgratagattttaacatggaaaaaaacaagctttttggcttttcttcaaacataggaagatctggcaacacgaaccctacattcttgaatgataatacatgtctggagttgagtcccaactgccccttacagatgacttgagcctctgcagtttaccatggttaccaccaagccatatgagacatattcttggaaatatatgacatagcaccccactgcagagggatgctagggttaagcttataacaagtacttattaagtatctactttttctagcactatgtgagaaatgt

SEQ ID NO: 346005 - DNA, 521 bp, Homo sapiens
  misc_feature (1)...(521): n = A,T,C or G
aattccatgactttgttattgtgaatagtgctgcaataaacatatgtgtgcaggtgtcttttttacataatgatttcttttcctttgagtagatagtcaagtagtgggattaatgggttgaatagtagttttacctttacttttttgagaagtctccatactgttttccatagaggttgcactaatttacattcccaccaacagtgtatgttttccattttttccatatccatgacgatatctgttggttttttgctttttaataatagccattctgactggtgtaagatggtatctcactgtggttttaattggcatttccgtgatgattaatggtattgagcattttttcatatgttttcaggtcrcttttatgtccttttttgagaaatgtctgtttatgtcagatgttcactttctattcatttttttcttgttgagttatttgagtttgttgtagattctggatgttagtcctttgtcannnnnnnnnnnnnnnnnnnnnnnnnnnnnnnnnnnnn

SEQ ID NO: 346006 - DNA, 549 bp, Homo sapiens
aggattttctgtgaaactgatgaagcttgtttcaggaccccttgcttgtaaaacctgcttctaaaaacccagggaggaccctatcaatgtgttcacatggtcacttttttttttttctaaaaccgccaaaaaaataagtaagactataaaaacataatcagttaagacatttttttttttatcttctgacttctttctttgtctatcttctcattttgagtggtcttggggtagccccaggcatttttagaatagggctcatgggggaagttgagttgggtatacattcagcttgactttaatgaaatatatttgttgtggtttaccgttactttcctgtataagtttgatgttacccatgctgttacagaaataacttctaagaacattctttccactcactttttaactcaccttgaagtataacagatatgttcagggtgagagtttaaatttgaaaaagtaacgagcctagcactgaatttagagggtgttytttagtaccctggttttgaaaaaaaaaaaaaaagaaaaaagaaaaaagatgtt

SEQ ID NO: 346007 - DNA, 512 bp, Homo sapiens
agatcctgtctctaaaaataataataataaattaattaaaaataaaagtaggatgaaggaccaaacaggtttttatgtgtctttgcatatggatatgactgcataaagcaaaacaaatgcaggaccatcaccataaagaatatgctcaagtttttcagtgagcaggagacagaccatggaaatgtatcatttagaaactgttgtaggactttctccttggttcagctaaaagatgtgcttttgtcacacgaccatgaaagttcaggctcgcagacactttgaagggtgagaaggacagggtttattgagagcaaagggaaaaaagggaaataagggctttcagcaaagcaagagtcctgctagcaggcttccacctcacgaactgaaaccctggttaccaccccagaacaggagaggccaggctcttccccactgcaaatggcgcaaacttcctgaagctccaccccagtgygcattcctcccagcgggcaggccggtcagaggttctctgg

SEQ ID NO: 346008 - DNA, 489 bp, Homo sapiens
ccccaggctggaccaagcctcccccagactccaccagctgcacctcacactggacacctgcaaacacagagacaccctggtcagaaactgccacasaaatccactgtttctctcactcatgtcccctcacactcaatctctctatttctccatgaatcaccttttaaaatagcaacaaggaaaacccagctcagcccaaactccatggtgagccctctgtgttcagtgctgatctctgaatggaaacacctgggaatctcatggctggggctcctctcccagagctgcagggtcagggctgggctggttttcatcagcaatggaaggggcccatttgcatgtctcctactatatagcgagttctggaagggatgcctcagagtgggctgtgtcccagagtggatatgagcgattatatgtcataaataattaattatcattagcatgtctacttttagatgcacatgaattatgctccgtgagagtcaa

SEQ ID NO: 346009 - DNA, 581 bp, Homo sapiens
ctcctttttattaggcccccgtctcactccagacaccagaccaacttggactgtgccccaaaaaacttgtcatccctactatcttctgtctagtcatactcctattcacagttctcaactactcatacatgccctgctcttgtttacactgctggtttacactgtttctctaagccatcacagctgatatctcctggtgctatccctaaactgccactcttaactcttaaagtaaataaataatatttgctggcaggactatgctgaatctccttaggcatgctctaattagatgtcctgggtcytcccaattcttagacctttagtacctgtttttctccttctcttattccgtttagtttttcaattcatacaaaaccatatccaggccatcaccaataattctaaatgacaaatgtttcttctaacagtcccacaatatcaccccttaccacaaaatacttccttcagcttaatctctcccactctaggttcccacaccacccctaatcccacttgaagtagccctgagaaacatcacccattatctctccgtaccacccccaaaaaattttcaccat

SEQ ID NO: 346010 - DNA, 554 bp, Homo sapiens
gaatgttatttgggacaagtccagatgactgaaagttgttcaactgtgagccctgtttagtcagatttttttttttttaataacttctggccagatgcagtggtttatgcttgtaatcccaatgctttgggaggccaaggcaggagaaccacttgaggctaggagtttgagacaagcttgggcaacatagcgagaccctatcttttcaaaaaataaaataaaacaattagcagggtatggtggcacccgcctgtagcactagctattaggawagctgaggcaggaggatcacttgagccgaggagttcgaggttacaatgagctatgatcatcccactgcacttcaggcagggcaacagagcaagaccctgtctcttaaataaataaaattaaaacttaaaatacttctaaatggggtgtgttggctcatgcctgtaatcccaacattttaggaggctttggtgggtggatcatgtaagctgggaagttcaagatcagcctgggcaacaatggtgaaatcctgtctctacaaaaaaaattacaaaattagttgg

SEQ ID NO: 346011 - DNA, 619 bp, Homo sapiens
atagagaatgacttcaggataggtgtagaatgagactcctggatcaattataaactatcaacttgggatgccaagttattcagtctcaatgtcctgtagctacctccttcccctgctcgtaacaacatatacaactccaatgacaactatgttccttctagactcaagctcatccttatagaaagtttaactgctgagaaaagccactacaatattttcatacaggtaaaagcaggtggaaattaatattagggataatgttgaagtgtaaaaattgatgtaggtgaaattggagtgggttgtaaaarcatattatctgccactaccttgacaaagataacagagtttctgacaaagagaaggacctaaacaaatattgatgaatgaagacaacaaacttccacaggggcctaaggtggggtgaaagagctgccttttttttattacttatgttttacctggaaagctaaaaggtaaactttaagagtgctttgcatgtgttatctcatttaatattgcctattttgtacagatgaggaaaccgaagttgaaagaagttaaaaactttccaagggctttcctcaagcaacaacgagtaggcaccagggccagaattcaa

SEQ ID NO: 346012 - DNA, 532 bp, Homo sapiens
gtaggaccagttgaatccactagttttgagtctccagaaggggagggtgatgagtgcataagctgtagccttccgctcacatgatattgtgctaaaagcagttacaaaatccagtctaactcaagtgccctcccaggctgccatacctctaacccccaaagtgaaagccatggagggaaagcatttttgaaattgtagccacttctgctaatacacagtaagcakgcaagtaattagagaactagtttactttagtcaacacaacttctccttgctctgagccaaagaaagcccttatgatgctgcccaataggtcggaaataaaagactaaggcaacaatataggggaaaggctatggagaaacaaacaaaggaaatgccctcttgaactaagagcaaagaggacaaatcatgaacatgcttagaggggccagaatacaaaacaagcatggaaatgttctcagtcttatttgagagccaggcagcaggggtgagacaatcaagaacattcagggttatcgcccacaggcca

SEQ ID NO: 346013 - DNA, 674 bp, Homo sapiens
ttacaataataatgtttctatgcagtatagtatgccccatcttattcttctaaatcatcttgtccctttgcatcttcaagttaattttataatcatttgtcagattatatttttaaagtcttattcaaattttagttagactttatagattaatttggaaagaaattgtagcattatgacgttttcttatacatgaacatgacagatctctccatttatttatttatttatttatttattgtttattgagacacggtctcactctgtccccagagtggagtacagctcactgcaacctctgcctcccagcctcacgtgatcctcccacctcagcctytgaaatacatgggactacaggcacatgtcaccacgactggctaatttttgtatttttttgtagagatggggttttgccatgttgcccgggctggtctcaaactcctggactcaagccatctgcctgcatcggcctcctaagatcctgggattacaggcatgagcaaccacacccagcctttccatttatttagacatttttaatcttaaaaaattttctcctttaagatttcgtactccttagctgggcatggtggcttattcctgtaatcccagcactctgggaggccaagcagcaggattgtgtgagcccaggagctgaagaggagcctgggcaa

SEQ ID NO: 346014 - DNA, 558 bp, Homo sapiens
ttataaagaaaagaggtttatttagctcaccattctgcaggctggaaagtgcaagaaacatggtgccagcatctgctcagcttctggtaagggccatgtgctaggtcaaaacatggtggagaaggtcaaaggggttgtggacctgtgcaaagaaagaaaacccaaggggttctggctttctaacaacccactctcaaggaagctaatccattactgagggaactaatccagtctcgccagggtgagaactcactcactacctggagaagggcacaaaccattcatgagggatccacccctgtgacccaaatacctcccacaaatctcacctcccaaaaatgccacattggggatcaaattcaacytgagttttggtggggacaaacaaaccatttacaaaccatagcaaatgccacatctcgaggtataaaggaaagaccagttccaatgttgccattggctttatcaagaaagttggagtttcaggccagtcagttgtaatggcagggtgggctgacagttccatgaaacaaagagagtgggaataagtatcattag

SEQ ID NO: 346015 - DNA, 566 bp, Homo sapiens
ttatttttttttgttactgggtgcatgtattaygctactggggacattaagtaatttatattattcttctaaaatctgagaatatctaaactcaaaaatacatttaattctaagaacttcagacaaagcattgtgaaactgtagtatgataggagctagaaataatcccaaaggattttggtagtgaagaaacctgtaagacaaactgaaaattccttaaggacctttgggtgtaatatgaaccttcagggactcatggaaccaacacatttaggaatccctatgaggtggttaaaaaatgatttcttggaaggtaataggtgtcatagatgaatgtgtacattataggggaaaaaaaccccaaggtattcagaaagtatccctttatctcctggcagcattctgcccaaattgtttggatctgtctgtctccccagagtatcagagttggagctccagttctgagtcacagcaacatcttctactatgaccatgagacagggtgctgacacggggatggcagctggcttgcctggttatgcccttaaacaccggtgcagccaatg

SEQ ID NO: 346016 - DNA, 561 bp, Homo sapiens
cttctttatgttcattctacttaatactgctatcacaagctcttctttcttgaaatgctccttctctctgttcatgctgcttcttgcccactcattgttttacacgtgctcctctggctgtaacccccacccccacccccaactctcactctcccagggtggctttttttccccattgtctgaaaaatcccctccactctcatggattcaactattccctatgagatgatggtagtctaaactacatctctagccctagctgatctcttcatacattttatttggatgccagtaggacataacccaaatgttccatagactccccaacttcaatttatctaaaacacaattaattaatcttttgcctcctgtgggtccctcctcagttaacagcttcattatctcttccctcccaaggggcatcaactttgaagtcttcctcawccagtcaaattctacctcataacatcttcatagcatcctctccattccaccaccatgtcctttgttcaggcatgagagaagtgaaggaacttaacattttcaagtactcactataca

SEQ ID NO: 346017 - DNA, 587 bp, Homo sapiens
tcttttctttaaaacactggagaattgggaatgctaggcccagtttcttacacagcagtgatcaatggactcagcccacgtgatagctgttccctttgggtctggcagtcactcggcagttcaccagcctccattgttctcaggtgtccatcacatctgccctgtgtccattgccatttatcactgagcttatactattgcatttccaagaacatgttgctccatttatttatattacttttgtcaccccatggttgtttgagttcacaatccctagactrtaagtgtaattagtcagcttgggctgccataacaaaatatcaaagcctgaggggcttaaacaacagaaatttattttcttactcttttggaggctgggaagtccaaggtcagggtgccagagtgatgggggtctggtgaggactgtcttcctggcttgcagatggctgcctacttcctgtgtccttatgtgacctttcctcagtgcacacacacagagacatctgtcttcttcttataaacctaccaattctatctgattaggaccttacacttaggaactcatttaaccttcattacctcctaaa

SEQ ID NO: 346018 - DNA, 546 bp, Homo sapiens
tgcaacctctgcctcacaggttcaagtgattctcacgcctcagcctcccaagtagctgggattacaggcaggtgacactacacccagctaacttttttatatttttagtagagatggggtttcgtcatgttggccaggctggtctctggcctcgagtgatccacccacctcggccttccaaagtgctgggattacaggcatgagccaccatgcccagcctaaaaccctataatttttagaaatacgtgtrtgtaaggcatgcatgcctgtgtttgaaatattcttattctgttgaacttttataattatttttatcaattccttttagttttaagtttttctttatccgtgttcataatcaaggaaattatttttctatcagatgtgttttttattttcaggggttgaggagaagcgaggatgaggtcggcctaagaagggatgctttgtctaggtattctatcacaatccagatgcttgaggtatctggaattcttatttttcacctgagtaggatattacttgttcttaattttttctcatatc

SEQ ID NO: 346019 - DNA, 546 bp, Homo sapiens
tgcaacctctgcctcacaggttcaagtgattctcacgcctcagcctcccaagtagctgggattacaggcaggtgacactacacccagctaacttttttatatttttagtagagatggggtttcgtcatgttggccaggctggtctctggcctcgagtgatccacccacctcggccttccaaagtgctgggattacaggcatgagccaccatgcccagcctaaaaccctataatttttagaaatacgtgtgtgtaaggcatgcatgcctgtgtttgaaatattcttattctgttgaacttttataattatttttatcaattcyttttagttttaagtttttctttatccgtgttcataatcaaggaaattatttttctatcagatgtgttttttattttcaggggttgaggagaagcgaggatgaggtcggcctaagaagggatgctttgtctaggtattctatcacaatccagatgcttgaggtatctggaattcttatttttcacctgagtaggatattacttgttcttaattttttctcatatc

SEQ ID NO: 346020 - DNA, 546 bp, Homo sapiens
tgcaacctctgcctcacaggttcaagtgattctcacgcctcagcctcccaagtagctgggattacaggcaggtgacactacacccagctaacttttttatatttttagtagagatggggtttcgtcatgttggccaggctggtctctggcctcgagtgatccacccacctcggccttccaaagtgctgggattacaggcatgagccaccatgcccagcctaaaaccctataatttttagaaatacgtgtgtgtaaggcatgcatgcctgtgtttgaaatattcttattctgttgaacttttataattatttttatcaattccttttagttttaagtttttctttatccrtgttcataatcaaggaaattatttttctatcagatgtgttttttattttcaggggttgaggagaagcgaggatgaggtcggcctaagaagggatgctttgtctaggtattctatcacaatccagatgcttgaggtatctggaattcttatttttcacctgagtaggatattacttgttcttaattttttctcatatc

SEQ ID NO: 346021 - DNA, 627 bp, Homo sapiens
cccctttgagaagccaccatttggataattcctttaatcccaccgtggtcactgcacctggtgctcttgtaggactcacactgctcatgtctgatcacgaatatgtgtaaaatccagttggaacatggcattgtggaaaacgaaaggttgtgctgagtcaaatgatatgcctgcaagaagagttagcctttcaagctaggcaaatgggttacttagtaggctctgcctgcacacccctccacctgccctttatatcttgttacctttcactacattgtattaaaacaaatatttcaaggcctctatgctgcttatgcagcttttatatcagggactctgttctattcattcttgtattgccattgtctgctattaggaagaacacttattcctccwcttctcatgttcccacatagcaatgtttatgaatgcaatactccaagcttctctgtggccctttgttcaccgctcttcctctcccaggcttccctggaagaagagaaacttctctaattgacaggtttggcagaatgaacccagaacacatcggaaggaatcagcctgccttcaggaacctgtattctctttccactgtactgaaagcttagtcagttgggagataaattt

SEQ ID NO: 346022 - DNA, 627 bp, Homo sapiens
cccctttgagaagccaccatttggataattcctttaatcccaccgtggtcactgcacctggtgctcttgtaggactcacactgctcatgtctgatcacgaatatgtgtaaaatccagttggaacatggcattgtggaaaacgaaaggttgtgctgagtcaaatgatatgcctgcaagaagagttagcctttcaagctaggcaaatgggttacttagtaggctctgcctgcacacccctccacctgccctttatatcttgttacctttcactacattgtattaaaacaaatatttcaaggcctctatgctgcttatgcagcttttatatcagggactctgttctattcattcttgtattgccattgtctgctattaggaagaacacttattcctcctcttctcatgttcccacatagcaatgtttatgaatgcaatactccaagcttctctgtggccctttgttcacygctcttcctctcccaggcttccctggaagaagagaaacttctctaattgacaggtttggcagaatgaacccagaacacatcggaaggaatcagcctgccttcaggaacctgtattctctttccactgtactgaaagcttagtcagttgggagataaattt

SEQ ID NO: 346023 - DNA, 566 bp, Homo sapiens
agtggatgatctataaggatcctttgagtttgaagctgatggagagctcaaagagttcagcaggggtaaataactagraagggcaggcaatgcttattcagcactttcttcataaacagagtttgtaggcagggtaagggtgggtgaaaggtggagctgggaatctatcagctggggtttgaatgggagtggagaaagcatcccaagagtggagaaagccacagcaaggggcagaacgtgaaagagcatgcagaatggaggctgcgtgtggcatccaggcgggcctcagatggcaccgatcctcagacagtggtcagggtaacactttcaagacagctcccttgtgagctttagtacctctctttagaagttgctggcagtgcattggctgggatcctgaaagttcatgctctgtgctagtgtatggggaacattttgatacttgggttagtgatttctgggactgaatattaaggacttgattttctgtccgttccacctgctttcaggaccactggagatagtcccttggcttttactgaagctggaagatttgtgtccatgta

SEQ ID NO: 346024 - DNA, 566 bp, Homo sapiens
agtggatgatctataaggatcctttgagtttgaagctgatggagagctcaaagagttcagcaggggtaaataactagaaagggcaggcaatgcttattcagcacyttcttcataaacagagtttgtaggcagggtaagggtgggtgaaaggtggagctgggaatctatcagctggggtttgaatgggagtggagaaagcatcccaagagtggagaaagccacagcaaggggcagaacgtgaaagagcatgcagaatggaggctgcgtgtggcatccaggcgggcctcagatggcaccgatcctcagacagtggtcagggtaacactttcaagacagctcccttgtgagctttagtacctctctttagaagttgctggcagtgcattggctgggatcctgaaagttcatgctctgtgctagtgtatggggaacattttgatacttgggttagtgatttctgggactgaatattaaggacttgattttctgtccgttccacctgctttcaggaccactggagatagtcccttggcttttactgaagctggaagatttgtgtccatgta

SEQ ID NO: 346025 - DNA, 603 bp, Homo sapiens
tcacaacgacattacaacagtggcgttttaatgggtggtgagggaattaaaaagtcagcagaggcactgtatgaaatattcatgggtatttttctattttcttgcctcttctcgctccagatacaggaatgaagtgtatctggagagagaagatacataccatatctggagagagaagaggcaagaaaatagatacaggccaagtgttctgagtacaggaagcatgcagaaatggctcctgcaggcctatctttgacctttcatgggagggatagacaaggctcttccatccccyaccccaaaccttaatttttattttcctgaaatcttgtttttccagtaagctgagatccctctgcttcttgcagagtatccaagatcctgaatggatattgacagtctaatctccccttgggaattagaggaggattttgaagatgcaaatttccccactaaaggcttctgggagagggtgaatgtgatcaaacagattattgtcattgaagtgagaaaatgggggctggatggactggtctggggtacctcttaggtactgcctgtaaagcgttgacatgatacaaagtcaggagatccctaggaagc

SEQ ID NO: 346026 - DNA, 527 bp, Homo sapiens
aggcaatatcttacttgcataaaggctgaacccgacagcttcctaagttatcttccagctctaaccaacctgcacagcaaccaggaaaaggaaaggctgtttgtcgagttcaacaaaggactgacttaagctaagtttcaactgatatgtttgtttacagggctctgaatccatagcacctccagccatctgagcccagggtcagcctgccccaagatctagcctcccattccaccacaggccccctcctcggcttttctagcctttctcagacatacacacccccactggccttgctttgatcattctttcacgttctttctttagctctcagtgaaccctggaagttgcattcccaactatgggattaaggctacctccaggttctcccagccccacttattcatctgtgaaacaactggccaagggaatgatgctgcttgtagactatcaaatagagagagaaaaaaaagtgttgccwgttttagtccttatgcaaagcaggagtgttatcttataaagttcaa

SEQ ID NO: 346027 - DNA, 570 bp, Homo sapiens
gaaaactcttaccaggaagtggtttgttaatgttcttcctttctttttgtctgccctaagttaatgcgcttctggctaaatacttgaatttatgcaccttacattatcttttcagcactgttttcagtaatttataggaaccagggtctgctgcatcatgttayttagtactgtggtggcttttagatatggtctgcaccttggtgcttctgcacggggaaagaaacagttatagatcctggacaggctctcctgcttttgtcctggggaagacacccctgtataggttagttactgagaagagttatggaggcattggcacagaatcctgagtcattccacaccattaagaaaagacaggctgaggaagagaaagtcctgaattatccaacaaagttgcacactgggacagccaacatcccagccagccagaaaaaccaggcaggggaaacagtgcccccaggatcacacagccagaggttctttatgtgagggtgggtggtggcagagggtttggaagtaggacagacagagcccatccccacatacagctacactttcaaagaacaa

SEQ ID NO: 346028 - DNA, 580 bp, Homo sapiens
atgcacacaatggcatgatcctgctccaagttattaggtgtggaggaaaagttcagcccaagcacatttgtgagtgtgtctgtgggtacacatgcacaccaaaacacacacacatacaccccgttctataagtagatacaaaaaccaggagtgtgtaaagctgtaaagctccgtaactccatcttaattccatctccattcttttatctaaaggagaacacagtgagcaaatgatggcagaacaatagggcagaccaagaggtgtccagagcygaagagcaggaagactcaccctgataccaaaaggccaggacaaccataaatacccaaatcaggcctgatgagcagcagcaggatatgggggcacctgcccatcttatgctgttacattatggaatccaagaaaggataactgttatctggtaattagcaaggcacaatgatacagtaaatatacttaatatactttacacttgcagctttctattatcattttttgtttgttctgtgtggttttgtttcttgaaaagtgtgtgtgtgtacacatatttgtgtgtgttttctccaggagtcaacatgc

SEQ ID NO: 346029 - DNA, 540 bp, Homo sapiens
tcacggcattgtgttactaacctgtacccaggagaatggacaccttcccctctgggagccttagaggaacatctggtcttgtcttgtcctgagtgttcgtacttggcctttcttcctatgarggcacttgtttgtaaatggttttacactttattaagcaatcagtttttgcttggaactaaactcgtgctaatttacctggattaatgctgtaggccaacgtggtgggtgatgagggttgggtaaggcctgcgtgtgccatgagagtggggaagtctgacctaaaccccaggaccaacccaagcttctcatgtctcatgcatgttccatgtggaaggcatttgtgccatcccaccatatgacgacccccagggggctctccgttggacacctctttattccttttctccccatctagtttgctcaattgctgttccaaagttgctcctcctcagaaatcttcaatagctctctgttgtcactgggacttcagaggcatctgcaatctggttcctatttatacatcctgtgggtaaaaaa

SEQ ID NO: 346030 - DNA, 578 bp, Homo sapiens
ttagcaatggtttctgttacttgcaaccaaaaacctttatgaatagaaagccttcaaaaggcacctggaawctgttccccagcttttgttctgttttgttttgctttttgagacgcagtctcattctgtcatccaggctggagtgcagtggtgcaatcttggctcactgcaacctccacctcctaggttcaagcaactctcctgcgtcagcttcctgagtagctgggactacaggtgcccgccaccatggctgcctaactttttgtatttttagtagagatgaggtttcaccatgttggtcaggctggtctggaactcctgactttgtgatccgcccgccttggcctcccaaagtgctgggattacaggcatgagccaccgcgcccggcctattccccagtttttgtgtcctctgatccccaccagaacctagattcctgacggccaactgaccctcataaggcttatctcaagcacagctccaggggagcagcacctcatgaccactctcttgtggaaccactctctaagatcagtgttaattgcccaattaaacagccctgatgctgacagaatgt

SEQ ID NO: 346031 - DNA, 578 bp, Homo sapiens
ttagcaatggtttctgttacttgcaaccaaaaacctttatgaatagaaagccttcaaaaggcacctggaatctgttccccagcttttgttctgttttgttttgctttttgagacgcagtctcattctgtcatccaggctggagtgcagtggtgcaatcttggctcactgcaacctccacctcctaggttcaagcaactctcctgcgtcagcttcctgagtagctgggactacaggtgccygccaccatggctgcctaactttttgtatttttagtagagatgaggtttcaccatgttggtcaggctggtctggaactcctgactttgtgatccgcccgccttggcctcccaaagtgctgggattacaggcatgagccaccgcgcccggcctattccccagtttttgtgtcctctgatccccaccagaacctagattcctgacggccaactgaccctcataaggcttatctcaagcacagctccaggggagcagcacctcatgaccactctcttgtggaaccactctctaagatcagtgttaattgcccaattaaacagccctgatgctgacagaatgt

SEQ ID NO: 346032 - DNA, 623 bp, Homo sapiens
aggctaaggaacctccccagtcacacagcagcagagytgggacctccaagccctccctctttcctcaccacaaagtggtttttaaaagtctgatgagtctggaaggtgcgctgaacagacgccagcccctgactggctccatgggaatagctactaattcactaaaaccacaaacttcctgcacttgggtgtacctctgataggtgtaatttgtgtaatgtgaaaatatgctgcaggacaaagaaaaataattagcaaagtgataaggcacattctatttttccttatatcagaaaggataaccattaacaaatggttagtctaagacccaccaaagcaggatgatctctgaaatacaaggacaggtagtttatacatgaagaaaagtagagagtgaaccaatgctgaaaaaaggcctggcatcttgctttcagcagattaaagaaaagcaaattaactcatttctgaaatgccaaaatgccatttgaattagtgaaaattcatttcaaagttatgaaatttaaggatattataaagaaacagatattcccatatcctcctgcgaatactgtatgctggcccagacctgccagggagcattctggcagaatgacaaagctatt

SEQ ID NO: 346033 - DNA, 472 bp, Homo sapiens
ctgaatcttctcacacaacagttcttagccatccatgtgtttaggaatcctggggagctattgtttcagatgcaggttcctgtcacccttttctcactccacccatatttggattctctaggactagggctaaactatggaagctgaatttttattactattttcagataaattgtattttcagcagagttttaggttcacagcaaaattgaaaggatggtacagagatatcccatctaccccctacccgcctccccaacacacacacaccctccctcactttcagtatcccagcagcaccagggtggcacatttgtgacaatcaatgaacctacactgacacatcactacccaaagtccacagttwacattaggggtcacccttagaggtgtgcattcttttggttttgacaaaagtataatgacacttaccattgtagaatcgtacagaatagtttcactgccttaaaaa

SEQ ID NO: 346034 - DNA, 590 bp, Homo sapiens
ctctacaacactttttttctccctgtggtgagagggacataagaagtttctgattcagtctctgctgcccaacatgctttccaaaaagaggctatcactcactacctttaaaggatggggcacgagtttgcacctgagggcatctttcctctgctgtctaccctctactttcagattaatcacaaatggagaggaaggaaaatatttggggttgaagattatgagtgcaaatgaaaatcatgcccagatgtggaaagggattgatataggtaaaaacaaaaatggcatgctgggtgaagacagaggaaagcctcagctccagcctcacctccttgagraagtcctccctgacagctcctgtcatggtactccaccatcccctgagtgtccacagcccacagggcctgttcataccacactggagccccacacctgctgcctgcagtattagctgctttttaatatgcatatggctgctcctctggttcacttcccacttctatttggatgactcccaaactttatccagctctagcctctcccatgagtgcctgtcccacatttccaaatgctgtgcaatgaaccgttgc

SEQ ID NO: 346035 - DNA, 588 bp, Homo sapiens
ttttatcagatataaaataaagcataggtacttctgattctggacaagagggagtaacagagagtgaatttacccgctcacatgaaacaatttaaraactaataaaacatataaaacaacaattttcatgtcactggacaccaagacaatgaaggagaagcatccctaagagacagtaaacaaattcagtaagccttgtaattgccccttaaccctgcatggacagagttttcaggctacattagggaaaagtaacttaggtgaagcccagtgatctccctgagttcagcagacagaacaggaaagcctaaggcaaagcagctagagtttgcaagaagcagtactgaaaaacggacagctgcacaagtagagagaactctggatatacagagcggactccctatcctactaagtcttcagctgagtattgatcagtgcatctatgtgaaaaatacccaacatcagaaaaagaaccgcctgaaagaattagaaggaacaattccagaagttcacacaaggccaataacagttactgttaccataagccagagtggcaaccctcataagtcatggggaatcaggtagaat

SEQ ID NO: 346036 - DNA, 588 bp, Homo sapiens
ttttatcagatataaaataaagcataggtacttctgattctggacaagagggagtaacagagagtgaatttacccgctcacatgaaacaatttaagaactaataaaacatataaaacaacaattttcatgtcactggacaccaagacaatgaaggagaagcatccctaagagacagtaaacaaattcagtaagccttgtaattgccccttaaccctgcatggacagagttttcaggctacattagggaaaagtaacttaggtgaagcccagygatctccctgagttcagcagacagaacaggaaagcctaaggcaaagcagctagagtttgcaagaagcagtactgaaaaacggacagctgcacaagtagagagaactctggatatacagagcggactccctatcctactaagtcttcagctgagtattgatcagtgcatctatgtgaaaaatacccaacatcagaaaaagaaccgcctgaaagaattagaaggaacaattccagaagttcacacaaggccaataacagttactgttaccataagccagagtggcaaccctcataagtcatggggaatcaggtagaat

SEQ ID NO: 346037 - DNA, 561 bp, Homo sapiens
ctgaaaaccaggtcagaaatgacacaggtgacagaattagtaaataaggacattaaaccagttattttaactttattccacaagttcaagaagcaagagaaaaaagtgtacatgcaagtagagacatgaaagatataagaagacacaaatcaaactttcagatatgaaaattataatgaatgagatgaaaagtacactaaaagggattaatgacagattagacattacaaggaaaaggtaaatgaaattgaaaacacagcaatagaaagtgaacgaaacatagaaaaaataagttttttctatttatttgcataccaaaatgaaacacaaaaaaaaaytgaggaaaaaatgaacagaaaatcagtgtgctgcaggacaacatcagttgtaatcagagtctctaaaaggagaaggaggtgtgggggtggggcagagaaaaatattttaagaaataatggctgaatattttcaaaacctggtgaaaactataagtcgatatccgagaagcacaaaaacttccaaccacaagaatcatgaataaaacaacatcaaagcacgtcg

SEQ ID NO: 346038 - DNA, 493 bp, Homo sapiens
ttactgtgggtaaaatgctatcagacagcatcacattctacagagaaatctttcatgaaagaagagtcaaccaatgcagcaaacttcattgtggtctcattttctgaaattgccacagccatcccaatcttcaccaaccacaaacctgatcagtcagcagccattgacattgaggcaagaccctctaccagcaaaaaagatgatttctcactaaaggctcgggtaatcattagtatttttagcaataaaatatttttacttgaagtatgyatttttttagacatgatgctacttaacacttaatagatgacagtataatgtaatcataacatttatgtgcatggggcaaccaaaaaacttgtgtgacttgctttattgtgatattcaccttattgtggtggactgtaacacacaatatctctgaggtatatgtgtgtatactcctgtacctaatggggtgtagatgaaagaaaacactaaatttccagacaaa

SEQ ID NO: 346039 - DNA, 493 bp, Homo sapiens
ttactgtgggtaaaatgctatcagacagcatcacattctacagagaaatctttcatgaaagaagagtcaaccaatgcagcaaacttcattgtggtctcattttctgaaattgccacagccatcccaatcttcaccaaccacaaacctgatcagtcagcagccattgacattgaggcaagaccctctaccagcaaaaaagatgatttctcactaaaggctcgggtaatcattagtatttttagcaataaaatatttttacttgaagtatgcatttttttagacatgatgctacttaacacttaatagatgacagtataatgtaatcataacayttatgtgcatggggcaaccaaaaaacttgtgtgacttgctttattgtgatattcaccttattgtggtggactgtaacacacaatatctctgaggtatatgtgtgtatactcctgtacctaatggggtgtagatgaaagaaaacactaaatttccagacaaa

SEQ ID NO: 346040 - DNA, 493 bp, Homo sapiens
ttactgtgggtaaaatgctatcagacagcatcacattctacagagaaatctttcatgaaagaagagtcaaccaatgcagcaaacttcattgtggtctcattttctgaaattgccacagccatcccaatcttcaccaaccacaaacctgatcagtcagcagccattgacattgaggcaagaccctctaccagcaaaaaagatgatttctcactaaaggctcgggtaatcattagtatttttagcaataaaatatttttacttgaagtatgcatttttttagacatgatgctacttaacacttaatagatgacagtataatgtaatcataacatttaygtgcatggggcaaccaaaaaacttgtgtgacttgctttattgtgatattcaccttattgtggtggactgtaacacacaatatctctgaggtatatgtgtgtatactcctgtacctaatggggtgtagatgaaagaaaacactaaatttccagacaaa

SEQ ID NO: 346041 - DNA, 562 bp, Homo sapiens
cttcagtatcaacacatctgttttatttgcagttatatctccagcacctgggacagcgctcagcacctccagcacccgggacagcgttcagcaccactgctgtaaataacagtgaagtgaataccctatcaccaactcatgattgggcattcatcacaacccacctcctattcaatcctacaaattacaacagagtctctcttacaggcaacacatcatgcttggtactaaggggatgtagggatgagagacacaaagttcctgacctaargcactttcagtgcaagaagggagatacatgcttatacaacttcctgcaaaaaaaatttgaaactggtctgacttacactaggttggagacactctacccattgtcttctgaggctagagcttcacatacatagagaagaagatggagatatctactggggccaaataacagtggttttaaataccaggtgtgtaaattttctattgctgttgtaacagattaccacgaatttaaaataacacaaatgtatcatttcacagttatgggggccagaagtccaaaatgggtttt

SEQ ID NO: 346042 - DNA, 613 bp, Homo sapiens
ataaatcccagggacattagaggtagaaaaacttagagcgtattgagggccatgccagactctgagaggaattgctctcctccagtcttttgcagaggctagcattcctttagcagcctcaccaatattcccaccagaaagtgatctgggttgcctaaaataacatatgcctgggtttgtctccacataactcctgagaaaggagcagaacctccagcggctgatggtggatgattaagagccctctctcatgtagcctaggacataataacaaagaacacataatttatttgtattgattcaccagcacacatttgatcgtatctccttgtccttccttttgctaagaatccatggccacagtcctgagaaatttatctttggcaaaatatctctgtaaaagtaagttcctcacatatcttagttacagcaagagttcatgccaggaaaacttgccaaggaaaagggtaaagggacacrgcagtccttcttgtgtgttgactctggtctaaacaatctccctccatgataagaaacagacaacgtgtgcttgggaattaaggcctcagttctgagacctgactgtcagatacagatacagaaactgaggaca

SEQ ID NO: 346043 - DNA, 568 bp, Homo sapiens
ggactggatgatctctaaggatcctttgagtttgaagctgatggagagctcaragagttcagcaggggtaaataactaggaagggcaggcaatgcttattcagcaccttcttcataaacagagtttgtaggcagggtaagggtgggtgaaaggtggagctgggaatctatcagctggggtttgaatgggagtggagaaagcatcccaagagtggagaaagccacagcaaggggcagaacctggaagagcatgcagaatggaggctgcctgtggcatccaggcgggcctcagatggcaccgatcctcagacagtggtcagggtaacactttcaagacagctcccttgtgagctttagtacctctctttagaagttgctggcagtgcattggctgggatcctgaaagttcatgctctgtgctagtgtatggggaacattctgatacttgggttagtgatttctgggactgaatattaaggacttgatcttctgtccgttccacctgctttcaggaccactggagatagtcccttggcttctactgaagctggaagatctgtgtccatgta

SEQ ID NO: 346044 - DNA, 485 bp, Homo sapiens
aaaaaattactataatgccatagatgttgggggatgctgacaataatatccaaaaccatgacggttaaattcattgatgtcaatttaaaatatacttctaaatcttgacagaatgaagtgtcacttacagtcaaaaacccagccctcatgtgcaacaaaacacatgtgtccgtgtaccatgtggaatgtgttctttccacttgagtgttaatttctctcaggaagacagtggaacagtaaggagaaaactttgccttccacctaaataagaaatctcygtttataacaagctcagtcctgcccccctcaacccgccccgccgtggcctcctgagtgccatctaatcagtttacaagagggtctcacggagggcaaacaactggccaagttcaggaatgacactcaagcctgcagcccaggaactcaagtgctcaagaattaggatgacaaatttagtccagtcgcaggaggacaattaagaaggc

SEQ ID NO: 346045 - DNA, 506 bp, Homo sapiens
tctacatacaccaggctatacccagcacacctacacaagctccccagctaaataggccatctagatgttaaagcactgctgtggcagacccctttcccatccctgcctgttagcatggtgatttttttcagcgaagtggagagatagctctgcccacaatatgcacattttagcccaagataaargcttttaaacagcagcagcagcatgcacgcgtgcaagagcagaggctcatcccatttaaggagactgacatgggagttcatctttctagtaaatttcatactgcccccacccccttgggggcacagcaaaggcactggcatttggcatttttaacttcctgaagcagagcctggttctgagtgttcttctcttgccagcatctattataatctttaaaagcagtgtcgtcctagagtgacctgcctttcaaatgcaagcactacggtttaggaacatcgtgttcaaagacaacagagaacactgatgtaacaatggccctg

SEQ ID NO: 346046 - DNA, 475 bp, Homo sapiens
ggggcccatactgagtgtcagtttagtaaggctgggtagagtgggagaaggatctcataaagcttggtggttttacttctactaataccagtatcatgttaacttctttttctttttaataccagaacttcctstggcccatcaattccttgctgcatacatttctcatttctcaaccttatatttttcttctaaattaattaatagtctttggtaagaccatgtttgattccactttgtatcatagcccaaacctaacacagagcaggtgctttacacttgttgcattgactgactatcttattcagtgctcagaagcaaatattctgtggtggcacttctactgtcatccagtcatgtattcaactatttattcagttacaaatatttctggtacatctataccatgccaggccctctctccttccctttcaggcctctttctcatttctctcacctttctagttagaacaaa

SEQ ID NO: 346047 - DNA, 578 bp, Homo sapiens
gcaccctcattgtattcctatgccacagatcattttaaggaaacatttttaaaagaaaacatgttagaagatgcaatgaaaaaaacaaagtcctttcatttatctaatactaaaaattgctagacattgctttgaagtcataatctccacctctgaatttgaaatttttttcagtcttactcatgttttcttaaaaaattttttctaggccagagcaaatcttacccaggcctcaaatctttattctggacaagtacaacagcctggtcagacaaatttttataacactgcccagtcaccaagtgctctccagcaggtaaactatggcatggtaaatttcctcaattttctttattattatttttattgcttttgttattgtttgggaatttaaattgaaccaagatgcaagatggaggatggtttttraactgttcactgagatgtcctgaagaattccactgggtccacgtagaaggggtttcaggctcatgacacccctcttctcaccaccatcaccccctacttcagtcattcctgtttttttatatcttccaggttttttgttggtttagggg

SEQ ID NO: 346048 - DNA, 606 bp, Homo sapiens
tgcctgatggctaaaatcaggtgtgagacactctgcctgggttcttccccctgagtgccagtgcgccctcaatctcacttgtctcaagcatagatgccacctcaaagacatggggagaggaaaagcctgaattggctgacaacacattgatgtgatggaatccaagctgaactggcaaatgaagtgttctaccattaggtacaatggcaactgaagagggaaattaagtttgttattaaaaaataatgcagctaggtgtggtggctcatgcctgtaatcccagcactctggaggccgagatgggaggattacttgaggccaggagtttgagacaagytggtcaacatagtacaatcctgtctctacaaaaaaatttagaaaataataatattgctataagggctgaggataatggagttattaatgggtgtattaataaccgtaaagtcaccgcactagccctgacttttcttttcccctggtacattaataacttgagttattaatgttctggagatgatggtcgtgatggttgcccaataatatgaatgtgtttaacactactgaactgtgcctttataaatcctgggatggtaaattttgtta

SEQ ID NO: 346049 - DNA, 571 bp, Homo sapiens
cctttggtcagctgtaaacaaacacccatttgtaaatgtctcaagttcaggcttaactgcagaaccaatcaaataagaatagaatctttagagcaaactgtgtttctccactctggaggtgagtctgccagggcagtttggaaatatttacttcacaagtattgacactgttgttggtattaacaacataaagttgctcaaaggcaatcattatttcaagtggcttaaagttacttctgacagttttggtatatttattggctattgccatttgctttttgttttttctctttgggtttattaatgtaaagcagggattattaacctasagtccagaaagcctgtgaatttgaatgaggaaaaaattacatttttgtttttaccaccttctaactaaatttaacattttattccattgcgaatagagccataaactcaaagtggtaataacagtacctgtgattttgtcattaccaatagaaatcacagacattttatactatattacagttgttgcagatacgttgtaagtgaaatatttatactcaaaactactttgaaattagacctc

SEQ ID NO: 346050 - DNA, 545 bp, Homo sapiens
atctccagttcctagcatagtgcctggcacagtgcaggttctcaatgagtttgcagagtgaatggaaatataaactagaaatatatcyttgttgaaatcagcacaccagtagtcctggtgtaagtgtgtgtacgtgtgtgtgtgtgtgtgtgtgtgtgtaaaaccaggtggagatataggaactattattggggtatgggtgcataaattgggatgttctttttaaaaagaaactccaaacagacttccggaaggttattttctaagaatcttgctggcagcgtgaaggcaacccccctgtgcacagccccacccagcctcacgtggccacctctgtcttcccccatgaagggctggctccccagtatatataaacctctctggagctcgggcatgagccagcaaggccacccatccaggcacctctcagcacagcagagctttccagaggaagcctcaccaagcctctgcaatgaggttcttctgtgcacgttgctgcagctttgggcctgagatgccagctgtccagctgctgcttctggcct

SEQ ID NO: 346051 - DNA, 545 bp, Homo sapiens
atctccagttcctagcatagtgcctggcacagtgcaggttctcaatgagtttgcagagtgaatggaaatataaactagaaatatatccttgttgaaatcagcacaccagtagtcctggtgtaagtgtgtgtacgtgtgtgtgtgtgtgtgtgtgtgtgtaaaaccaggtggagatataggaactattattggggtatgggtgcataaattgggatgttctttttaaaaagaaactccaaacagacttcyggaaggttattttctaagaatcttgctggcagcgtgaaggcaacccccctgtgcacagccccacccagcctcacgtggccacctctgtcttcccccatgaagggctggctccccagtatatataaacctctctggagctcgggcatgagccagcaaggccacccatccaggcacctctcagcacagcagagctttccagaggaagcctcaccaagcctctgcaatgaggttcttctgtgcacgttgctgcagctttgggcctgagatgccagctgtccagctgctgcttctggcct

SEQ ID NO: 346052 - DNA, 619 bp, Homo sapiens
agcctggggatgaccttgggcaagttattgaaccctctgcatcttcatttcttgtccataacataacaaagaaaattcctgctgtgaataatttttgtggggttcacatgaaatacctataagatgtaaaggatttttaaaaaatgtttagattgttagaattagargagatccaattctgaattttacaaccaaggaaagtgaagtcctaagatgctaaggggccaaggttgcccagctggtcagtggtagagcttgagacttgaatctgtggagacaattgaaagaatcatcattaccagaagtgtgatgaggcattacttatttcagactgttgaatgaagttacattctcaataaaaactcctgcatgtgtgtatgtgggtgtgggtggtgtgtgtgtgtgtgtacaaaaatagtggcaatgttttgcctttttttttcttttgtggtcatttaacaagtctttggggatttattagatgtgtttcctaattttatattttttcttgatctttccagctactccacttttgaaataagggcaacatcccattatattgaacaccaaacatggaagttcttttctagtagtagatgtttttcatgagcaggaaatt

SEQ ID NO: 346053 - DNA, 597 bp, Homo sapiens
taattctaatatttttacaaatcagtttttattcaaaagagaaatacagtatttcatgctattctctctgggatcactgtctttcattgtctaatattcagcatcttaaaaaaatgtttttatatattttgtctggtttgttagattgttccagggagaaggttaactatagtccctgttattctatcttggccagaagcggaagtccaagcattagttcagtaggactaacttatttgtaaagtaagttttagtcctattacatttggcttaattatttgcataaagtgcagcaagaataagcatttgccctataggccctctgtctctcttttttacatttcttttttttaaccttaaakacttttatccctaatcctttttaaacaatttgctttgctagaacctttttcataaggaatctaagattagacctttttaaaagcctggagcctagccaaggatttacctgtgcctgcaaatgcctgtgtgaattgggtgaattcctctttttaaggtcccaagaaaacttagggttcctgggcctgccagaaagtgtcattctttttttttctttaacctgcttcagaaaaggaa

SEQ ID NO: 346054 - DNA, 568 bp, Homo sapiens
agtgatgaagttaggtgtgtggacatttgggacagagggaagaactagtgcaaaggttcaaaggtagaagtgtgcctggtgcattcaaggagagygaggaagcttgagtagagtggatcagggacatttgtgggatgaaggcacagtggtggaggaaggaggccgacgatgtggggttttgtaagaactctgactttgactttgaatgagatgggaagcagaagccatagaggttttcagaaaaagaggcatgatctggcttgtgttttaatgggattgttctggctacagtgttgagagtaggctgcatgggtagagggaacagaagcaggtcatctgctattgtagtaatccaggaacaagacgatagtcatttagaccaattacagttgtagtgatgagaaatatgggaagattctggatctacgtgtttgaagatgaaacctacaaaagctgctgatgcattggatatggggtatgatagacaggcgggtaaaggataactctaagatttttggcccaagcaactagagggattgagtttcctcagccaaaagaagagcagatt

SEQ ID NO: 346055 - DNA, 587 bp, Homo sapiens
ctgggtgtcttccaactcagttcagttctgatactacattcccggagatagcatcagattccacaagttgagggctcagtcccacaaaactgccttccacttcagatgtcagttcaaagcataggttgtgacctgtgcctctgaccaactggctataaattagggttcctatgacctcctcctgggtttgattaatttgccagagtggctcgcagaactcagggaagccctttacttatgtttgcctgtttattataaaggatacagatgaacagccagatagaagggatgcataggcaaagtatgggggaaggcagtggagcttccatgccctctatrggcacagtatctggaagctcatccaaactcaggccttttggggtttcacgaagggttcattaaataggcatgattgattacatcattggccactggagatcaacctgaccttcagcccctctttcctcttgagaagttgtcaaaggtagggtgggaggtttaaagattccaaccctctaatcgcatggttggtttttctgggtgacccgccctcatcctgaagatagttagaggcccccagccaccag

SEQ ID NO: 346056 - DNA, 587 bp, Homo sapiens
ctgggtgtcttccaactcagttcagttctgatactacattcccggagatagcatcagattccacaagttgagggctcagtcccacaaaactgccttccacttcagatgtcagttcaaagcataggttgtgacctgtgcctctgaccaactggctataaattagggttcctatgacctcctcctgggtttgattaatttgccagagtggctcgcagaactcagggaagccctttacttatgtttgcctgtttattataaaggatacagatgaacagccagatagaagggatgcataggcaaagtatgggggaaggcagtggagcttccatgccctctatgggcrcagtatctggaagctcatccaaactcaggccttttggggtttcacgaagggttcattaaataggcatgattgattacatcattggccactggagatcaacctgaccttcagcccctctttcctcttgagaagttgtcaaaggtagggtgggaggtttaaagattccaaccctctaatcgcatggttggtttttctgggtgacccgccctcatcctgaagatagttagaggcccccagccaccag

SEQ ID NO: 346057 - DNA, 587 bp, Homo sapiens
ctgggtgtcttccaactcagttcagttctgatactacattcccggagatagcatcagattccacaagttgagggctcagtcccacaaaactgccttccacttcagatgtcagttcaaagcataggttgtgacctgtgcctctgaccaactggctataaattagggttcctatgacctcctcctgggtttgattaatttgccagagtggctcgcagaactcagggaagccctttacttatgtttgcctgtttattataaaggatacagatgaacagccagatagaagggatgcataggcaaagtatgggggaaggcagtggagcttccatgccctctatgggcacagtatctggaagctcatccaaactcaggccttttggggtttcacgaagggttcattaaataggcatgattgattacatcattggccactggagatcaacctgaccttcagcccctcttycctcttgagaagttgtcaaaggtagggtgggaggtttaaagattccaaccctctaatcgcatggttggtttttctgggtgacccgccctcatcctgaagatagttagaggcccccagccaccag

SEQ ID NO: 346058 - DNA, 587 bp, Homo sapiens
ctgggtgtcttccaactcagttcagttctgatactacattcccggagatagcatcagattccacaagttgagggctcagtcccacaaaactgccttccacttcagatgtcagttcaaagcataggttgtgacctgtgcctctgaccaactggctataaattagggttcctatgacctcctcctgggtttgattaatttgccagagtggctcgcagaactcagggaagccctttacttatgtttgcctgtttattataaaggatacagatgaacagccagatagaagggatgcataggcaaagtatgggggaaggcagtggagcttccatgccctctatgggcacagtatctggaagctcatccaaactcaggccttttggggtttcacgaagggttcattaaataggcatgattgattacatcattggccactggagatcaacctgaccttcagcccctctttcctcttgagaagttgtcraaggtagggtgggaggtttaaagattccaaccctctaatcgcatggttggtttttctgggtgacccgccctcatcctgaagatagttagaggcccccagccaccag

SEQ ID NO: 346059 - DNA, 602 bp, Homo sapiens
gggaactcattgataatgggcacagtgatattctttggatgtaggaggcaatacatacctcaattagatgtgctgctcttttccacatacagaatagacctaaagactgacaactctgaytgaagcccacagaagcaaaggctctccagctggtccaggctatagtgcaaacaactctgccacatggcccccatgacccagtgcatctaatggtgctcacactgactgtggaagatcaagatgcggtgtaaagcctagggcaagctccaataggagaatcataggggcatcccctaggttttttggagcaaacctatgttctctttaggcagtttttattatccttttgaaaaaaaattattgatagcctgacaatgtgtggtaaggcatggtcagactttctgcaccaattctttgattcagccccattatgcagtaatgcataagatgtgaaagtagccaaatcatacagtcgctatacaagaaatttctactatgctagtacattggatccttgagtgctatatggcaccactctgcaacctaaaatgctccaaaaggcagaaagcttgtggttctgggctcctttatctcactgaatg

SEQ ID NO: 346060 - DNA, 458 bp, Homo sapiens
catgaagaaaacctggtcatttggcactctttcagttaggttctttcacttggctggaggtctggtgtgccatagcagttctgcaagcctgccagagaaatctaacgatgagagtacagtaccttcattgtctaaacttcctcccaactagttaagtgaaactagctaaatgagcagygctggcttattccttcggagtcatattttttaacatgtgaaatataattattgtaagagtccactctcttaagtttcaggatttgttggaagactgggaatagagggtggccattgccagacctgtaacttgtagagctgtgagcccagccatctcctggggcactttcccaggctctctcagaatttctgggagaaggaactgccagcttcacccctgcagtgcccccatgtctgctgggcccttgcaacttgagaactggagttgggcactagagaca

SEQ ID NO: 346061 - DNA, 556 bp, Homo sapiens
tacaagcatttattccattacacttacctgattaaattatttgatagtttacctatattatttatgaaaactgtgacagtcattatttaaagttayttccctgttaatcatttttataacctattaatttcagccatttacctaactaaggaacttatggttaaaagtatgagtatttaaccaataactcaggatttagctgttttcattaaaccaacattaaatgtcttatttatcaaaaattaaacaagcaaagatcattctgttttgggctaggtttatagttttataatcctcatggcaaattttgacaccttatagtgttctgcagcgataagtataaacctcttgatcaataaatgcaaaaaaaacctaacaattcttaagatgtttctaataattattttaccaataattttaaagccagcttaagattttacttaagtcatgtgaacttgaaagagcatttgacttaatgtctctattttttaagcacttttttctttaagccaattaattagaactcttttatatatttgtagtagtgaaacattat

SEQ ID NO: 346062 - DNA, 556 bp, Homo sapiens
tacaagcatttattccattacacttacctgattaaattatttgatagtttacctatattatttatgaaaactgtgacagtcattatttaaagttatttccctgttaatcatttttataacctattaatttcagccatttacctaactaaggaacttatggttaaaagtatgagtatttaaccaataactcaggatttagctgttttcattaaaccaacattaaatgtcttatttatcaaaaattaaacaagcaaagatcattctgttttgggctaggtttatagttttataatcctcatggcaaattttgacaccttatagtgttctgcagcgataagtataaacctcttgatcaataaatgcaaaaaaaamctaacaattcttaagatgtttctaataattattttaccaataattttaaagccagcttaagattttacttaagtcatgtgaacttgaaagagcatttgacttaatgtctctattttttaagcacttttttctttaagccaattaattagaactcttttatatatttgtagtagtgaaacattat

SEQ ID NO: 346063 - DNA, 426 bp, Homo sapiens
gaattattccactttggtttgatctggtttgttggggcctagagcctgagctcagtccaaaacaatggccactcataattttgtttaaaaactccccgcttttggtcaggttctcmcttaggtgagagtataaccaaaacttagagccttaacgctactctcagttaccatcattttgggttttcattctcagcatgtcattcataggttacagtgccctcatggtcacacatttctctcagctcttctcattctagtggaagagagaccatttaacactctagagatggctgcatgcaaatatctaaaagttttgagggaatacggcagaccggggagactactattatgactatcaaaaggataatgccaagagtttggtgtatgctccttagccagggtccccatgaaccaaaccaactaaaa

SEQ ID NO: 346064 - DNA, 426 bp, Homo sapiens
gaattattccactttggtttgatctggtttgttggggcctagagcctgagctcagtccaaaacaatggccactcataattttgtttaaaaactccccgcttttggtcaggttctcccttaggtgagagtataaccaaaacttagagccttaacgctactctcagttaccatcattttgggttttcattctcagcatgtcattcataggttacagtgccctcatggtcacacatttctctcagctcttctcattctagtggaagagagaccatttaacactctagagatggctgcatgcaaatatctaaaagttttgagggaatacggcagaccggggagactactattatgactatcaaaaggataatgccragagtttggtgtatgctccttagccagggtccccatgaaccaaaccaactaaaa

SEQ ID NO: 346065 - DNA, 646 bp, Homo sapiens
cctcatgtaggtcatttcttgatgaagatccctgttactttcttcctctcttgaagggcagagattggttctgggactctacagtcctaggttttcttctaagccagccagatcagctgaaagcaatcatgactgagagaggtcaggtcagtgaacagggtcccaaaggagcagggggtcacgaggacagccccacatggagatggtcaggaccatgacatgggcaatatctgaccaattctgctagggaggatgcaccaaggattaaggggaggatgctrccataaagagaaaggtgaagaaccaaaggagttcaaggagaaggaaaataaaatgatttgaataaaggacagaaagaaatgcagagcccagaggcaaagccccatgtcacacacagagggttagttccaggctgtggatcctaatcaagaaattcctgctggattttgctcagccccatttcaaaatggttttgggtcagtgactttgttccttccactttccctctttttgaacaagaatcactagcattgttattctatgactgtcccaccattgcacgttgagggcagataagctttgttcaatttcacagctcagcagaggtaagggaattatgtcaaggatctgtacttgggctgggtgc

SEQ ID NO: 346066 - DNA, 560 bp, Homo sapiens
aggaaattgcatattaaaacaatgagatatcactatacacctaatagaayggctaaaatccaaagaagggacaataccaaaggctgtcaaagatgtagagcaacaggaactctcattcattgcagtggaaatgcaaaatggtagtcactttggaaaacagtttggcaggtttttttttacaacgctaaacatagtatcgcaatataatccagcaatggcagttttaggtatttaccaaagtaatgtgaaaacatgcttactcaaaaaactcgcatccaagtatttagaacagttttactcatacttgtcaaaaattggaagtaaccaaaatgtccttcactaagtgaatggctaaacaaacatggtatatctgtacaatagaatattattcagtgataaaaagaaatgagctatcaagccatgaaaaaacatggaggaactttaaatacataacgctaggaagaaactagtctaaaaactctatacactgtatgattccaacactaggacattccaggaaagtcaaaatggtagagatagtaaaatgatcagtgattgcc

SEQ ID NO: 346067 - DNA, 561 bp, Homo sapiens
gtagtcactttggaaaacagtttggcaggtttttttttacaacgctaaacatagtatcgcaatataatccagcaatggcagttttaggtatttaccaaagtaatgtgaaaacatgcttactyaaaaaactcgcatccaagtatttagaacagttttactcatacttgtcaaaaattggaagtaaccaaaatgtccttcactaagtgaatggctaaacaaacatggtatatctgtacaatagaatattattcagtgataaaaagaaatgagctatcaagccatgaaaaaacatggaggaactttaaatacataacgctaggaagaaactagtctaaaaactctatacactgtatgattccaacactaggacattccaggaaagtcaaaatggtagagatagtaaaatgatcagtgattgccaagcgtgaaggagggatgaattgagttgaatacaaggaggttttcagcagtgaaactattctgtgtgatactgtactggggatttatgacattaggtaattgtcgaaacccatagaactgtaaaactcaaagaatgaaccc

SEQ ID NO: 346068 - DNA, 561 bp, Homo sapiens
gtagtcactttggaaaacagtttggcaggtttttttttacaacgctaaacatagtatcgcaatataatccagcaatggcagttttaggtatttaccaaagtaatgtgaaaacatgcttactcaaaaaactcgcatccaagtatttagaacagttttactcatacttgtcaaaaattggaagtaaccaaaatgtccttcactaagtgaatggctaaacaaacatggtatatctgtacaatagaatattattcagtgataaaaagaaatgagctatcaagccatgaaaaaacatggaggaactttaaatacataacgctaggaagaaactagtctaaaaactctatacactgtatgattccaacactaggacattccaggaaagtcaaaatggtagagatagtaaaatgatcagtgattgccaagcgtgraggagggatgaattgagttgaatacaaggaggttttcagcagtgaaactattctgtgtgatactgtactggggatttatgacattaggtaattgtcgaaacccatagaactgtaaaactcaaagaatgaaccc

SEQ ID NO: 346069 - DNA, 524 bp, Homo sapiens
ttaaaatatactgttttaaaattgtctctatacatgtaaactgaaggtaactgataatattagcagcactaatattataaaaatgtaattactaccaagagaagagagtgctaataggtactcactaattttggggggcttgggggagaaatgaattaaaataaaatgtaattgaaagtaacagcaatacggccaggcgcagtggctcatgcctgtaatcccagcactttgggaggccgaggcgggcggatcacctgaggtcgggagttcgagaccagcctgaccaacatggagaaaccccatctctactaaaaatacaaaattarccaggcgtgctggcacgtgcctgtaatcccagctactagggaggctgaggcaggagaatcgcttgaacctgggaggcggaggttgtggtgatcaagatcgtgccattgcactctagcctgggcaacaagagcgaaactctgtctcaaaaaaaaaaaaaaaaaaaagtaacagcaatacttataacttagagaaaagga

SEQ ID NO: 346070 - DNA, 516 bp, Homo sapiens
gaaagtttaacatggaaattaaattaagagaaattgcgattgtkatttcttttgctgttttagagaaaattttccagtggtctgatttcacaaaactgttcccagcaatctaaaaaaattatgaactcaggcaacctcacacacatacataaaaggtatgaagcattaaattttatttagattaatggaatcacagactattaaagctgagtgagacctcagagactttttcttccagagtgacagaaactccttgagaccaaggacaatgtcttgttctttgtctgtagaaagccaagccccaagcccagttagtactaggcgttctgtaaatattttttacctgaatgagaaaatgtgaggcccagagagataattgactcataacttcatatagcaagtttgttgtggagatgggcctaggactggggtctcctgagccttgtccattaaaaattttttttttgtcctttttgctcgtcatggacttgaagctcatggcttgttcattttgag

SEQ ID NO: 346071 - DNA, 516 bp, Homo sapiens
gaaagtttaacatggaaattaaattaagagaaattgcgattgtgatttcttttgctgttttagagaaaattttccagtggtctgatttcacaaaactgttcccagcaatctaaaaaaattatgaactcaggcaacctcacacacatacataaaaggtatgaagcattaaattttatttagattaatggaatcacagactattaaagctgagtgagacctcagagactttttcttccagagtgacagaaactccttgagaccaaggacaatgtcttgttctttgkctgtagaaagccaagccccaagcccagttagtactaggcgttctgtaaatattttttacctgaatgagaaaatgtgaggcccagagagataattgactcataacttcatatagcaagtttgttgtggagatgggcctaggactggggtctcctgagccttgtccattaaaaattttttttttgtcctttttgctcgtcatggacttgaagctcatggcttgttcattttgag

SEQ ID NO: 346072 - DNA, 400 bp, Homo sapiens
gttttgctatgttggccaggctggtcttgaactcctggtcttatgtgatcctcccacctcagcctcccgaagtgctgagattacaggcatgaaccactgtgcctggcccagaattatttttaaaagtaatcatgcttgacttagccctgttaagcctccaaaattctggtgaggtccctttgcttgtaaatacttagaaaaactgtacatgagcaaaatagagaagaattagataaacatggctttgtatatagcagtgtcccagtaagtaagcaaactgatattccctacataccctatttcagagggcaggctgaggggcgctcaggcagaaatacmgtaagttcaactgaatggcaagttctttaatccaagattgaagtgtgtggcaaaacatgcc

SEQ ID NO: 346073 - DNA, 461 bp, Homo sapiens
atagaaaaatcttgttagataacctcagcagatattatgagataaccaggcaaaattattctaattaccttatcatagaacatatacataattttactacatcttcttttttttaaataattttttttgaaatagaggyagggtctcactatattgcccaggctggtctcaaactcctgggctcgagtgatcctcccacctcagcctcccaaattacagagattacatgcatgagccaccacacctggccgccttcttcttcttttttttgtttttaacactgaacttgcaagtagtggggaattaaatttaatggaaattagattaaaatttgtggatctccatggcagtacagtgagtgaaaaagtaaatttggcttgggtaatagggagaaactgagaaagaaaagtagatttacttcctaaatattttaatatccagtaacagcaaagctgctaatt

SEQ ID NO: 346074 - DNA, 461 bp, Homo sapiens
atagaaaaatcttgttagataacctcagcagatattatgagataaccaggcaaaattattctaattaccttatcatagaacatatacataattttactacatcttcttttttttaaataattttttttgaaatagaggtagggtctcactatattgcccaggctggtctcaaactcctgggctcgagtgatcctcccacctcagcctcccaaaktacagagattacatgcatgagccaccacacctggccgccttcttcttcttttttttgtttttaacactgaacttgcaagtagtggggaattaaatttaatggaaattagattaaaatttgtggatctccatggcagtacagtgagtgaaaaagtaaatttggcttgggtaatagggagaaactgagaaagaaaagtagatttacttcctaaatattttaatatccagtaacagcaaagctgctaatt

SEQ ID NO: 346075 - DNA, 461 bp, Homo sapiens
atagaaaaatcttgttagataacctcagcagatattatgagataaccaggcaaaattattctaattaccttatcatagaacatatacataattttactacatcttcttttttttaaataattttttttgaaatagaggtagggtctcactatattgcccaggctggtctcaaactcctgggctcgagtgatcctcccacctcagcctcccaaattacagagattacatgcatgagccaccacacctggccgccktcttcttcttttttttgtttttaacactgaacttgcaagtagtggggaattaaatttaatggaaattagattaaaatttgtggatctccatggcagtacagtgagtgaaaaagtaaatttggcttgggtaatagggagaaactgagaaagaaaagtagatttacttcctaaatattttaatatccagtaacagcaaagctgctaatt

SEQ ID NO: 346076 - DNA, 461 bp, Homo sapiens
atagaaaaatcttgttagataacctcagcagatattatgagataaccaggcaaaattattctaattaccttatcatagaacatatacataattttactacatcttcttttttttaaataattttttttgaaatagaggtagggtctcactatattgcccaggctggtctcaaactcctgggctcgagtgatcctcccacctcagcctcccaaattacagagattacatgcatgagccaccacacctggccgccttcttcttcttttttttgtttttaacamtgaacttgcaagtagtggggaattaaatttaatggaaattagattaaaatttgtggatctccatggcagtacagtgagtgaaaaagtaaatttggcttgggtaatagggagaaactgagaaagaaaagtagatttacttcctaaatattttaatatccagtaacagcaaagctgctaatt

SEQ ID NO: 346077 - DNA, 619 bp, Homo sapiens
atcttacaggtccctttctatatcctgctaaaaggtatcagataaataaacaaattaaaaaataagtgagtacagtaaatcacaggggattacaaagcactcccagacagatgggtcagtgtgtctaaggggttgcccattataatctgctggatcatcattcacggtcccctgttggccataygctgctgtctgaatactctgggacgttcatttttcatttcagggatatgattactcagtttcagtctttgctgatcgcattagtccattctcacactgctataaagaatttcccgagactgcgtaatttacaaaggaaagaggtttaattgactcagagttcaacatggctggggaggcctcaggaaacttaacaatcatggcggaaggggaagaaggcatgtcttacatggcagcaggcaagagagcaagtgtgtgttagcacaggaaaaacgaccacttatcaagctgtcagatctcatgagaattcactcactatcacaatagcagcatgggggaaaccacccccataatccaaccacttcccaccaggtctctccctaaactcctgggattataaatcatgatgagatttgggtggggacacaaagcctaa

SEQ ID NO: 346078 - DNA, 619 bp, Homo sapiens
atcttacaggtccctttctatatcctgctaaaaggtatcagataaataaacaaattaaaaaataagtgagtacagtaaatcacaggggattacaaagcactcccagacagatgggtcagtgtgtctaaggggttgcccattataatctgctggatcatcattcacggtcccctgttggccatatgctgctgtctgaatactctgggacgttcatttttcattycagggatatgattactcagtttcagtctttgctgatcgcattagtccattctcacactgctataaagaatttcccgagactgcgtaatttacaaaggaaagaggtttaattgactcagagttcaacatggctggggaggcctcaggaaacttaacaatcatggcggaaggggaagaaggcatgtcttacatggcagcaggcaagagagcaagtgtgtgttagcacaggaaaaacgaccacttatcaagctgtcagatctcatgagaattcactcactatcacaatagcagcatgggggaaaccacccccataatccaaccacttcccaccaggtctctccctaaactcctgggattataaatcatgatgagatttgggtggggacacaaagcctaa

SEQ ID NO: 346079 - DNA, 580 bp, Homo sapiens
atcttacaggtccctttctatatcctgctaaaaggtatcagataaataaacaaattaaaaaataagtgagtacagtaaatcacaggggattacaaagcactcccagacagatgggtcagtgtgtctaaggggttgcccattataatctgctggatcatcattcacggtcccctgttggccatatgctgctgtctgaatactctgggacgttcatttttcatttcagggatatgattactcagtttcagtctttgctgatcgcattagtccattctcamactgctataaagaatttcccgagactgcgtaatttacaaaggaaagaggtttaattgactcagagttcaacatggctggggaggcctcaggaaacttaacaatcatggcggaaggggaagaaggcatgtcttacatggcagcaggcaagagagcaagtgtgtgttagcacaggaaaaacgaccacttatcaagctgtcagatctcatgagaattcactcactatcacaatagcagcatgggggaaaccacccccataatccaaccacttcccaccaggtctctccctaaactcctgggatta

SEQ ID NO: 346080 - DNA, 534 bp, Homo sapiens
acttcggtttcattctgaatgaaactataagccattggtggccctagggtgaggaaagcaagagaagaaactgaaaaacacaataaaaactgattgctgtagacctagtaagaagtgaaactgccttgaactaaaaatatatcattgatagctcaaaattaggatatattttgaagaaaaagctgacaggattttctgatattttgaaatataggttttaaaagaaaggtaggcaacttttgacagccaaatctctgtactcaggatgtatctacccagaggaaaaataaaggtactttatacattatatagatggatagatagatagatatcattatacraaaaagacacttgcacacatgtttatagcagcacaatcagcaactgcaaaaacgtggaaccaacccaaattcccatcaatcaatgagtagataaactgtgagatacatatatatgtatatatgtgagatacgtgagatatatataagaaactgtgagatacatatatatatatacatatatatgcgatagaat

SEQ ID NO: 346081 - DNA, 533 bp, Homo sapiens
aggctgggagtttgagaccagcctggtcaacagcaagactccatctctgaaaaaaatcctaaaattasccaggtgtggtggcacgtgcttatagtttcagctcttgggaggctggggcaggaggatcacttgagcccaggaatttgaggctgcagtgagctatgattgtgccactgcactccagcctgggtgacaagagtgagaccttgtctccaaaaaaagaagaaaaaaaaattatcagaattctggatccacagctaccctgccagcactgagaaaaacccactaaaacaggatgggttattctggacagtaaatgattacaaaagtggggatagttctgctgaaagtggaagaagaggcaaaaaagaaatacacagaacattctagaggaagagctcaagctgtgaatcttgaacgttcagatatccagatgtgctgaatgaaaaataggtctttgtgtcatatgagcacaatcttgtgttttttattttcttttttcccttttatttatttatcttttactattagcc

SEQ ID NO: 346082 - DNA, 533 bp, Homo sapiens
aggctgggagtttgagaccagcctggtcaacagcaagactccatctctgaaaaaaatcctaaaattacccaggtgtggtggcacgtgcttatagtttsagctcttgggaggctggggcaggaggatcacttgagcccaggaatttgaggctgcagtgagctatgattgtgccactgcactccagcctgggtgacaagagtgagaccttgtctccaaaaaaagaagaaaaaaaaattatcagaattctggatccacagctaccctgccagcactgagaaaaacccactaaaacaggatgggttattctggacagtaaatgattacaaaagtggggatagttctgctgaaagtggaagaagaggcaaaaaagaaatacacagaacattctagaggaagagctcaagctgtgaatcttgaacgttcagatatccagatgtgctgaatgaaaaataggtctttgtgtcatatgagcacaatcttgtgttttttattttcttttttcccttttatttatttatcttttactattagcc

SEQ ID NO: 346083 - DNA, 533 bp, Homo sapiens
aggctgggagtttgagaccagcctggtcaacagcaagactccatctctgaaaaaaatcctaaaattacccaggtgtggtggcacgtgcttatagtttcagctcttgggaggctggggcaggaggatcacttgagcccaggaatttgaggctgcagtgagctatgattgtgccactgcactccagcctgggtgacaagagtgagaccttgtctccaaaaaaagaagaaaaaaarattatcagaattctggatccacagctaccctgccagcactgagaaaaacccactaaaacaggatgggttattctggacagtaaatgattacaaaagtggggatagttctgctgaaagtggaagaagaggcaaaaaagaaatacacagaacattctagaggaagagctcaagctgtgaatcttgaacgttcagatatccagatgtgctgaatgaaaaataggtctttgtgtcatatgagcacaatcttgtgttttttattttcttttttcccttttatttatttatcttttactattagcc

SEQ ID NO: 346084 - DNA, 554 bp, Homo sapiens
gtgtttttttcttgttgtgtttacataattttttgctttgtattcattgaacttatgttattagttgcttataattttgggactgatagttgtccatgtgtattgaaccttttatcattatgaattgatttatttctatcaatgttcttcatttataaacaaattgtttactgttaatggaattatacaagctttcctcagtatttgcttggcatatacataacagtttttcttctttcatactgtacatctttatgttacagatatatattgtctataaacaaaatatagctggatttagaaaacacagtttataagtttcttctttcttaaatgagaacatttgctccataagtttttaaattaatatatttggaatactctttatcattttatgatttktgtgtatttcatccaccttatgattttagtgaaggagttaatatatagatcaatggaacagaatgggaaatctagaaataaactcatacatatacctactaaataattttctacaggatgctaaagcaatttcatggggaaagaaatgtctt

SEQ ID NO: 346085 - DNA, 416 bp, Homo sapiens
caaagaaggaagccacagtcttctgtaacctaatctcagaactgacagctatatgtgccatttgtcatattctattcattagaggtcaatcactaggtctggcccacattcaaggggaggggactatacaagggcatgaatactaggagrcaggaatcatggggctatcttaaaggctgcttactacagacgtccttccaggctacctcattttggcctctgttagattctatttcaactcttttatttctttgaaggttatttttttttcctcatatttagtccagtgagggtcactttagtgctgacaactagattaattttagtaccttaggtttggatttcttcttagttcatgatgttgaacatggccatatatgacagaaagattgaagaataatgtgtgaaacctgtag

SEQ ID NO: 346086 - DNA, 416 bp, Homo sapiens
caaagaaggaagccacagtcttctgtaacctaatctcagaactgacagctatatgtgccatttgtcatattctattcattagaggtcaatcactaggtctggcccacattcaaggggaggggactatacaagggcatgaatactaggaggcaggaatcatggggctatcttaaaggctgcttactacagacgtccttccaggctacctcattttggcctctgttagattctatttcaactcttttatttctttgaaggttatttttttttcctcawatttagtccagtgagggtcactttagtgctgacaactagattaattttagtaccttaggtttggatttcttcttagttcatgatgttgaacatggccatatatgacagaaagattgaagaataatgtgtgaaacctgtag

SEQ ID NO: 346087 - DNA, 550 bp, Homo sapiens
tgctgtagtaataaagggtcatcacagttttatatttttaagcccaatatgggagagaatggaaatgtttacttcacattaaatttataacctggcaagctagaactagaacagtgaatatgaccaattccattaaactatagtaaaaaagaagcattctattcttatacgtagttgataggggtctcaatatccttatgcatccagtgccgtagggtggacagtgccagagagcacagactgtggccttagaactaggttggaattcttggtttgtcataatgaggcccaatttcctcatctgtacaatgaagtgtttgcctttaaatgaaatattgtatatgaaacaccaatgtctatcaaaaaaagaaggcacttaacaaatggcagatgtttctttcctgagaattcccaataaaatcgtcattgttagctctagggtaaagatgagaaagtcatgtatatgtgtgaaggaasagcatccatgaggaggaaggagagtgaatcttgagtggcacctgctgagcaggatcactgttcaagaaagtac

SEQ ID NO: 346088 - DNA, 507 bp, Homo sapiens
tgtctcctctgttgagatgtgacatgcagccttttcttcttccttactcttgcttgcaccatgctggactcagaaaatgctaaggctttataactgtctcaagttctgtttaggacacagtcttcctcattgttctcagattctcaaatatacccagactgttttttcctccctagaacttagcctagcaggtgaggacaaggcctggggccttctctcaatgttctctttgaatccctcctgaccagagaaagtttgtctagtctagggttgggctgtatgtcctttcatctgtttttttttttttcccaaatcatactgtttacagtataaactttatgcccccgaaagactttgaaacttgaagggtctttttgttttcacaaacaaatgcctctgccaagagtttcaaaagaccytttctcttttctttgatgccattttctttcccctgaggcaataagcataaaatatcttagctgctgcctgaggtggggtgtcacagga

SEQ ID NO: 346089 - DNA, 424 bp, Homo sapiens
tttctccacattctcaccaacacttatttttcatatttttgaaaatagccattctaacaggtgtaaggtgatatctcattgtggttttaacttgcatctccctagtgattagtcatgtcgcagacttttttcatatatctgttagccatttgtatgctgtcttttgagaaatgtctattcagattgcttgcccttaatcagattttctttctatagattgaattctttatatattttgaatattaatcccttactacatgtatgacttgctaatattttatttctgtccataggttatctttcaactctatcaattttttttctttgccacacagaaggtttttattctcatttgtctgtttytgtttttgttgtctgtgcttttgaagtcaaatctaaaaaatctttgcccagaccaatgttg

SEQ ID NO: 346090 - DNA, 588 bp, Homo sapiens
ttctctgcattgggttagaacattctactttagctcatcgtagttttttattactcatcttctgaagcctacttctgtcaattcatctatctgatcctctgtgcmgttctgcgcccttgatgcagggatgctgcaatcatttggaggagaggaggcactccaggcttctgggttttcagcacttttttcgtggattcttcctcatcttcatgagtttgtctagttttggtctttgaggctgcttacccttgatggggtttttgtgagggacttttgttgttgttgttgttgatgcattgttaccactttccacttgcttgtttttgtttcaatagtcaggtccctcttctgcagggctgctgcagtttgctgggggttcacttcaggtcctgttcatctgatttgcttctgtgcctggagacatcattcaagaggctggagagcagtaaaaatgggtgccagcaccttttctgtgacttctgaccttgatgggcaccagcctgatgccagtaggattgctcctgtatagggtatctgacaacccttgttggagtgtctcacccagttgggtggcacagggagcaggac

SEQ ID NO: 346091 - DNA, 497 bp, Homo sapiens
tttctgctgtaacaggacagcactaagttcaatgcctcacaactgctgtgttttccctcccctagttcctagagaygctctcaacaccatgctgccattgccagtggggatagggagtggaggcagtgtttcaggactttaaaaaatctctttagtgcttccttcagtgatacgaagttaaaaccaggtaatatgagtgctcacctgatttttggttcttaggaaggtatttttttctgtgtagataattgttttcttggtgttcttgcagtgaggggacaattggtggagccttctattttgccatcttgctctgccttctctctaaatatgtttttatttacaaattgtaggctcagtgttttagaaataaagcgtttaatataaactatgtttttagtccacatggtcaatatgtactatgtctatagtatgctagtcatactactagggaaaaattaagaatatacctagagaaacataatcattaaaacaaa

SEQ ID NO: 346092 - DNA, 497 bp, Homo sapiens
tttctgctgtaacaggacagcactaagttcaatgcctcacaactgctgtgttttccctcccctagttcctagagatgctytcaacaccatgctgccattgccagtggggatagggagtggaggcagtgtttcaggactttaaaaaatctctttagtgcttccttcagtgatacgaagttaaaaccaggtaatatgagtgctcacctgatttttggttcttaggaaggtatttttttctgtgtagataattgttttcttggtgttcttgcagtgaggggacaattggtggagccttctattttgccatcttgctctgccttctctctaaatatgtttttatttacaaattgtaggctcagtgttttagaaataaagcgtttaatataaactatgtttttagtccacatggtcaatatgtactatgtctatagtatgctagtcatactactagggaaaaattaagaatatacctagagaaacataatcattaaaacaaa

SEQ ID NO: 346093 - DNA, 497 bp, Homo sapiens
tttctgctgtaacaggacagcactaagttcaatgcctcacaactgctgtgttttccctcccctagttcctagagatgctctcaacaccatgctgccattgccagtggggatagggagtggaggcagtgtttcaggactttaaaaaatctctttagtgcttccttcagtgatacgaagttaaaaccaggtaatatgagtgctcacctgatttttggttcttaggaaggtatttttttctgtgtagataattgttttcttggtgtycttgcagtgaggggacaattggtggagccttctattttgccatcttgctctgccttctctctaaatatgtttttatttacaaattgtaggctcagtgttttagaaataaagcgtttaatataaactatgtttttagtccacatggtcaatatgtactatgtctatagtatgctagtcatactactagggaaaaattaagaatatacctagagaaacataatcattaaaacaaa

SEQ ID NO: 346094 - DNA, 403 bp, Homo sapiens
tcattaattgaaagttctttcttacagatttttaagttttatttctccatctctaaagcaacaagttcttaaaccagatgaaaatgtcctataaaccacaatgttcaaaatattttctacactttgtctttctttaggtcattgaatagaaaagaatattatccttctgtaccttcttaggttgatttgctgaaagcagatgtgaatcattgggcttgagatatactcctaataaaacaaaatacaatatgtagctgatctgaggaaaaataatttattgaacttcttcagagtttccagtgcttctatttccataatgtataacatttatgtttaccagtaygtttgagacttgtggttttttactcaatagccattttcatcattaaaaatactaacagat

SEQ ID NO: 346095 - DNA, 572 bp, Homo sapiens
aactattattaatataatgtgttttatagaaaattggatatatttcaaattctaaagagcaaataaaatmatctaaaatctaatgcccagagataaatcatggcttgatgcatatttggtgatttttttcttatctcacacacacacacgcacacacacacacgtgcatgcacatgcatacatacatttttttcagaataaaaagggatcaaagtgtttaaacagttaagtgtcttctgcccattatttaattttctatcacaaacattttcccttttggtatcataaataacatttataaaaataccttccacattttattatttattgaaaacaatttttaattactgaatataagttttaatttattttcctctggaatctataatgtcatggaatcaaataacagagtcacagtaaattttctaccataaaagtttaacagcttgtaactatggaaagttgttggctatctttatggttctttttaggtgttttgtaagaacaattcataaatattaaaatgtcaaatatatgtgaactaattaagaaatgtaatttagttttttgga

SEQ ID NO: 346096 - DNA, 629 bp, Homo sapiens
cttctttttgatgtaggaatttattgctgtaaagtttactcttagaactctttttgctgtatcccattttagtatggttttagtatgttgagtttccattttcatttgcctgaaaacattttaaaatttatcttttaatttcttcattagcctcttggttgttcaggagcatgatgtttaatttccacagttttgtgaattttccaaagtttctcctgttattaatttctagctttataccattgtggtcagaaatgatacttgattcaatataaattatcttaaatttgtaagatttgtcttgtggcctaacatatgatctttcctggagatttttccatgtgcagtagagaagaatgtgtattctgcagctgttggatgtaacgttatgtatatgtccrttaggtccatttggtctagagtgcagctttaagttaaatgttttcttgttgatattctgtctggataatctttccattactataagtgggctgttaaaatctctcactattattgtgttgcattctatctctccattcatatctattaatatttactctatatagttacatgctgcaatgttagctacatatatatttataattgttgtatcctcttgctgaatcaac

SEQ ID NO: 346097 - DNA, 629 bp, Homo sapiens
cttctttttgatgtaggaatttattgctgtaaagtttactcttagaactctttttgctgtatcccattttagtatggttttagtatgttgagtttccattttcatttgcctgaaaacattttaaaatttatcttttaatttcttcattagcctcttggttgttcaggagcatgatgtttaatttccacagttttgtgaattttccaaagtttctcctgttattaatttctagctttataccattgtggtcagaaatgatacttgattcaatataaattatcttaaatttgtaagatttgtcttgtggcctaacatatgatctttcctggagatttttccatgtgcagtagagaagaatgtgtattctgcagctgttggatgtaacgttatgtatatgtccgttaggtccatttggtctagagtgcagctttaagttaaatgttttcttgttgatattctgtctggataatctttccattactataagtgggctgttaaaatctctcactattattgtgttgcattctatctctccattcatatctattaatatttactctatatagttacatgctgcaatgttagctacatayatatttataattgttgtatcctcttgctgaatcaac

SEQ ID NO: 346098 - DNA, 583 bp, Homo sapiens
aaggtcatgcggtttcttgatctgagtggtggcttaacgggtgtgtttagttgtgtcaattcatcatgtttgcacttatgtgagcttttcagtatgtataacatattctgatgttaacaacaataacaacaacaaaccacagttactacgaacaagtagaaaatatgttctctagttttccataaacattactaagtaaagaacaatgacttttaaayctctcaaacctatcgcattgagaaagaaaagtttaggtttactaataccagaaaatggagtaggaaactatttgaatattacctatgatttgacctgtattactgttattttttttctttggagatagggtcttgctctgtcacccaggctggaatgaagtggcacaatcacagtcattgcgatagggtcttgctgtgtcacccaggctggaatgaagtggcacaatcgcagtctttgcagccttgacttcttgggttcaagtgatcctcccgcctcagcctcctgagtaggtggaatgacaggcatgtgccactatccccagccatttttctttagtttttttggtggagatggggtctcacca

SEQ ID NO: 346099 - DNA, 498 bp, Homo sapiens
gagtttattagagcagtctgaaaatgtgagtattgatggtagttaaccttaaagacagtaaagaaatatattaaaactttgagttgctatctttaagtggtaagatcatgaataagtttaatttttttgcttttctctattttctatattttttcattgactatatattacttttataatcacaatggttaacctatggtaataaatgcaaaaaaaatcaagctacttaaaatatattatactttgaaaatgaataatagtttttgagggatggttgatattctctttcatgtaacaaaaaactagtctgaacacaattatcctaattastaacaggccgttctgtgggcaaatagttgatcaactttatccaaaagattttttttttcaattcctgaggaaaaacttatccagaaataattacagagaattatatattctagcaaaactgggggacacattgccaaaactcctagaattgtgtgtagcactaaatct

SEQ ID NO: 346100 - DNA, 556 bp, Homo sapiens
tatcttaattacagtatatttgaaatatactagttaatggatgtaatatatagttatctgtgtatgcttatatatgcatatataaacttatatgtgtaaattatatatattaaatatatacataatattatgttacagtgtatttgcagttttcttttgatcccacatagtctttgttgcctctggctacttgtttgtttctgtgtytacattgaatattgcaggcttttctcaactaccaggtgattcttagcagtcttttcatattctagagtgaaacactaagattctgagtgcaaactctgtggtaagagcaaggtttgttgactgcagggtttcactggtaagtcaaagattgaccgtctcattagaggatccacaatggccaatatcaattgatcctttatcctagtcagtttttcctaagaggatatcttcagtctagtcagtttctcctaagaggatatcttcagtctcatgcctggagatacaaatcaaggttctggaagccccagtgggtcttaactcttcatgtgtcatattttttgagtttccc

SEQ ID NO: 346101 - DNA, 577 bp, Homo sapiens
ctacacagacgcatgccaaatgctgttatagtattagtcttgattgcaatatttgttattaaattttgttatataattttacaatttgggtttctatctagaaagaataaacattaatagctctttgtgttttcctgatatccataggtgcagattggagcacaagtttaattattcatttctactttgatggttccatccattttttatgattttgagagtcatttagcacagctacctcacttaaccccaaataagatgacttttgttattatgccactgacaacattcaaatgagtcacatgacttaatgtactttttaccttgtaaaagtgtccgaaattttagaggacatccaaacagattttttcatacttcctttaataaacaaactctctttaaaaaaagcaacttggaagaggaagttagagaaaattaggtaygattcaagttcttggtatcatttgtcaatacacttaaattgaatatgtctacattttctgttacctggatttttataaaagccttcttggtggacatataatgtaagactgataacaccgtgtgcacagagtac

SEQ ID NO: 346102 - DNA, 637 bp, Homo sapiens
caatatgtgattatacaagatatacttactatttgtagtactgctcttggtttgtgccctacaaatgcaggtattctaatactattctgaagaatgyctgaaaaacatgttgtttttataattatgcaatattattcagaatattcttgaaggaatagaactttcattttgattggtgtcaatgagaactgaatcattttcttataattttacatgtctgataattagaagaattttccatagactagattgttgctccatatatttcaaatctatttctcctccattatccatgaatattctgtgctgaaaatcagagggcatgttcatatcaaattataatctctggaaatatacattaatttcagtgatgcctgatgagtcaacaacaacttaagtatacatataaaaactgtgaaacttaagtagattagaaacaagataatatatctccaacttaactttctcttagccagattctaaaacatccatggctaatccatttctattggacctcaggggatttgtaatggggatgaagtcagaaaagaaagagacagcagtccaaccaattaccattaaaatatcttatgtttgaaagttttagaaaaactagtgattacatgaacacgttgca

SEQ ID NO: 346103 - DNA, 291 bp, Homo sapiens
caaacaaaaacctcaattcatcctcttgtatctagcccaactcctcctacattctccatctaaggacacccactgctaaggacaaaaatcaagaaggcatcytgggtttctcctgtcatacttcatatcttgtctgctgtgaaatcgttatttgttctgcctcacaaagaacaaacggattaggatagttttctctgtcctcactactcaccttcaagccatcctacatttcaagttagaataatgtttcttatactcagatctgagtaaccacattttctatttagaagc

SEQ ID NO: 346104 - DNA, 617 bp, Homo sapiens
tgcccagtatagatggcagcattgcctggtgtctgtttgccaggtgaatgaatgaaaacatccaagtccttttcatagattccttgattatctcaaattattttcattagaacagatgactatttcatgggatgatataagtataatttggctttaaaaggaatagatagaatagatgacaccttcaagttgttatgagggttctgagagtaataaatttactgtctttacaaattccaaagtagataccattaaaatggctttttcatagccctcttcaagatactgagagtggcaggaggcattcagatgcctaggcatagggtgggtccccagtgaaaccccacctccaagctgaagactgtttaatgcctgaaagccaagctacaagttaaatcctcggaatggattsagaacatgtctttctgtttggtgcaccttcctccatagttccccacccttcacctattttacatatacctatcctttcctaatttgtttcctacactgtatgtccacctttgactcgtgtctttgctttaaccttttttgcatatgcacaggccagtcagcatgcactccctattctgagtcatatgaggccccagacccagcca

SEQ ID NO: 346105 - DNA, 617 bp, Homo sapiens
tgcccagtatagatggcagcattgcctggtgtctgtttgccaggtgaatgaatgaaaacatccaagtccttttcatagattccttgattatctcaaattattttcattagaacagatgactatttcatgggatgatataagtataatttggctttaaaaggaatagatagaatagatgacaccttcaagttgttatgagggttctgagagtaataaatttactgtctttacaaattccaaagtagataccattaaaatggctttttcatagccctcttcaagatactgagagtggcaggaggcattcagatgcctaggcatagggtgggtccccagtgaaaccccacctccaagctgaagactgtttaatgcctgaaagccaagctacaagttaaatcctcggaatggattcagaacatgtctttctgtttggtgcaccttcctccawagttccccacccttcacctattttacatatacctatcctttcctaatttgtttcctacactgtatgtccacctttgactcgtgtctttgctttaaccttttttgcatatgcacaggccagtcagcatgcactccctattctgagtcatatgaggccccagacccagcca

SEQ ID NO: 346106 - DNA, 549 bp, Homo sapiens
aatgatatggctgcaaaaggggaaccgtcccatggatatgcccagctgtcattaacaaataagagctacagatagcattatcagatattcttaccaacactatacattgctcactggaaagccagcacaggtctataattattatgttccatacattgtgttcaaaatatgtaattatttctagacccatagacaaatatgtactgcagcatttagagttgcataataaaaactttttgagtgtataggatgaggtgaaatgtgagcaaataccataaatatttttagcttcagataagatgattttgaattagcagaaaaagacagtagtgttaagctctatattactttctgaggtaaagtcatctacgtggtctaaatgtgtcttactaaggcaaatcagatttaatgtttgcattatgaagaggcmaagtatgaaacagaacaaaattctatctagtctgttaaccgcattaataaaaaactctacttatgagataatctatctgataatttcatgaaccattaaaagtatttgagaggtttatc

SEQ ID NO: 346107 - DNA, 574 bp, Homo sapiens
cataaactgccacatgagaaaatataygtagaatatttagaacaaaataatgtgccatgcccattattgaaatacattatttatagtcatgtgttgcttaacaatggggatatgttctgagaaacgcatcattaggtgatttcattgtactgagaacatcacagagtatacttacacaagcctagattgtatagcctactgtgcacctaggctatatggcatagcctaatgctcccaggctataagcttgtacaacatgttactgtactgaatactgtaggcaattgcaacacagtggtatttgtgtatagaaacatctacacatagaaaaggtacaataaaatacagtatgaaggataaaaaaaagcactcctgtgctggagaggatgtggagaaataggaacacttttacaccgttggtgggactgtaaactagttcaaccattgtggaagacagtgtggcgattcctcaaggatcttgaacaagaaaaccatttgacccagccatcccattactggatatatacccaaagtattataaatcatgcggctataaagacacatgcacacgtat

SEQ ID NO: 346108 - DNA, 602 bp, Homo sapiens
catattaaactactattcccatagctgaaaatactgcagtgattttctctggagggtgaggtaatcaggatatttttacatttttcttccctttgtatagttcaagttcttacaattagcttataatcattttatatttagaaaaaagcagtttctattgaaaatgaaataaaatggatgtaaaactaatcaagagaatcagtggtcttctaatgagctattgaaaagtatgtaagtaatgagaattttgagacaaagagagtatttggtattaactgatatgctttagttggagaatagtattttgaatcaagctctataattgaagaaaatcttctgagagtcattgtaaatgtgtagtagggatagtmactcacctggaaagaactaaggagaaatgagtggagaaaaatcagaagtaggagtagcaaatgtgcctcaggcccttagatgcttattttgcttatttttaatttatctatgaaaggcaagggttgatagctggtctgtgacatttcctcaaacctcagaaacatctgagaatttgatgcggaattgaatcctcctggaactcaaactcaaggaattatagaaatatacca

SEQ ID NO: 346109 - DNA, 572 bp, Homo sapiens
tttatttatcttagatgaaattttagagattcactggaattgaaggcggttggaaggaacatgaaagctcaagtaaagaaacaattattaacaacaacaaaaatacttccacagctgagcgtcaacacttcctctaaattaagttcatactacattattagctctaactggagtatatgtagatctattctgaaaattagcctcctttcctctgttgacaattttttttttttttttttgatrtggagtctggctctgtcgctaggctggagtgcagtggtgcaatcttggctcattgcaacctctgcctcctgggttcaattctcctgcctcagcctccccagtagctgggactacaggcgtgcaccaccacgcccagctaatttttgtatttttagtagagatggggtttcaccatgttggccaagatggtctcgatctcttgacctcatgatctgcctgcctcagcctcccaaagtgctgggattacaggtgtgagattctgcacccaggcacttggcagttcttgagggcatctagtcttttagtcttagaattttctcattggttgt

SEQ ID NO: 346110 - DNA, 572 bp, Homo sapiens
tttatttatcttagatgaaattttagagattcactggaattgaaggcggttggaaggaacatgaaagctcaagtaaagaaacaattattaacaacaacaaaaatacttccacagctgagcgtcaacacttcctctaaattaagttcatactacattattagctctaactggagtatatgtagatctattctgaaaattagcctcctttcctctgttgacaattttttttttttttttttgatatggagtctggctctgtcgctaggctggagtgcagtggtgcaatcttggctcaytgcaacctctgcctcctgggttcaattctcctgcctcagcctccccagtagctgggactacaggcgtgcaccaccacgcccagctaatttttgtatttttagtagagatggggtttcaccatgttggccaagatggtctcgatctcttgacctcatgatctgcctgcctcagcctcccaaagtgctgggattacaggtgtgagattctgcacccaggcacttggcagttcttgagggcatctagtcttttagtcttagaattttctcattggttgt

SEQ ID NO: 346111 - DNA, 577 bp, Homo sapiens
ttgcctctgctggccatttggtatactagccactgtgccatggcctgtgcagagtcctggttaatgcctcaargaacagctctgaagttagcagaaacagttgagaatgtggaaaactatagattggatgtactaaaatgtatttcagtacaaaacattgttgcagaaattaaaggcaagaaatatttctttagaatacatagagaacaatatgaacatgcttactattgtggtttcatcatttacaaatatgcaactacatatttaactatttcataaacattttatttttcagcataccattttggcagcaataaattaaaaatggaaaatgcaggtttaattattagtccaatttctgaatgccaagaaaattgttgatgattatgcaacttaaacataatgtctgtgaatatttacacccaccatggggtctataatgatattactgatcacataaaaaccagaagacataggaacactaaaaaagcatcaaaaaaaggaggagcctattcaagatagcagactagtgggtgcctcatccatggagatgaatcaaaatagaagtaactatgcc

SEQ ID NO: 346112 - DNA, 574 bp, Homo sapiens
cataaactgccacatgagaaaatatacgtagaatatttagaacaaaataatgtgccatgcccattattgaaatacattatttatagtcatgtgttgcttaacaatggggatatgttctgagaaacgcatcattaggtgatttcattgtactgagaacatcacagagtatacttacacaagcctagattgtatagcctactgtgcacctaggctatatggcatagcctaatgctcccaggctataagcttgtacaacatgttactgtactgaatactgtaggcaattgcaacacagtggtatttgtgtatagaaacatctacacatagaaaaggtacaataaaatacagtatgaaggataaaaaaaagcactcctgtgctggagaggatgtggagaaataggaacacttttacaccgttggtgggactgtaaactagttcaaccattgtggaagacagtgtggcgattcctcaaggatcttgaacaagaaaaccatttgacccagccatcccattactggrtatatacccaaagtattataaatcatgcggctataaagacacatgcacacgtat

SEQ ID NO: 346113 - DNA, 635 bp, Homo sapiens
acaggtgttttctgaggctctcagctacactgtgtcatagagatagacaactacatctgttggatgtcagggtcatgaatcttgggatggagtgtgatagggaaacagactgcatttctgcctccctgggacatggagctggtgcagcccctttcctccctgcaaagacttcagtgcatttcaccaggagttcctctaggacctcctctgttagggcagtgcttgtgctcatcattggtgtattcatgagcaagtttggtggtccagctccatcaacatctatccccatgcggccccacactgaaaagggaactcaaggtattgagtatgctacagaccagcccatcatgtgaaacaacagggaacacatcccartatacaaaaatcaagcacatacatatttgcttctgccacaaccggctcttacccataagcagcacctatggccaggaggttgagctgcacaatccaatgtaaaacctgctgacagaaatgcacaaggttaaagaagaaaagccaaagcaccctacttaacatacactacagtcacaccttcaaggtgaaaaagtcccatccaaatgaaaataagtttaaaaataagaagcaaaaactttgccagataaaaagaaaccagc

SEQ ID NO: 346114 - DNA, 635 bp, Homo sapiens
acaggtgttttctgaggctctcagctacactgtgtcatagagatagacaactacatctgttggatgtcagggtcatgaatcttgggatggagtgtgatagggaaacagactgcatttctgcctccctgggacatggagctggtgcagcccctttcctccctgcaaagacttcagtgcatttcaccaggagttcctctaggacctcctctgttagggcagtgcttgtgctcatcattggtgtattcatgagcaagtttggtggtccagctccatcaacatctatccccatgcggccccacactgaaaagggaactcaaggtattgagtatgctacagaccagcccatcatgtgaaacaacagggaacacatcccagtatacaaaaatcaagcacatacatatttgcttctgycacaaccggctcttacccataagcagcacctatggccaggaggttgagctgcacaatccaatgtaaaacctgctgacagaaatgcacaaggttaaagaagaaaagccaaagcaccctacttaacatacactacagtcacaccttcaaggtgaaaaagtcccatccaaatgaaaataagtttaaaaataagaagcaaaaactttgccagataaaaagaaaccagc

SEQ ID NO: 346115 - DNA, 593 bp, Homo sapiens
catgaagtgcaaagctcacaggtcctataaagcagttacataactgagaataaaaagcaactaggtaacaacattataacaggagcaaaacctcacatatcaatatttaccttgaatgtaaatggcctaaatgctccacctaagatacaaacagaaaaattggatttaaattcaacattgaattattcactgcttacaagagacccataagaaggtcaaagatatctacacactcaaagaggtggaaaaagttatatcagataaaagagacattaaatcaacagtaaaaagacaaaatagrtctttaataataaagggttcaattcatcaagaagttataactatcctaaatatatatgcacccaacactggagcacccagattagtaaagcaaatactactagacctaagacaaatatagaaagcaataaaataatagtgagcaacagatcatcgaggcagaaactcacaaagaaacttaggacttaaaacagaattctagacaaatggaccttatagacatttacagatcattctgcccaacaactgctgattatacatttttctcatctgtgcatggaacattctgcaca

SEQ ID NO: 346116 - DNA, 425 bp, Homo sapiens
ctatcgttgggtggggggaggggtgagggatagcattaggagatatacctaatgtaaacgatgagttaatgggtgcagcgcaccaacctggcacatgtatacatatgtaacaaacctgcatgttgtgcacatgtaccctagaacttaaagtataataattwaaaaaaaaaagcactcctgtataggagttaatgcaaaggcctagtatattactgttcactcctgtagactttataaacactgtacacttgggatacactaagtttataaaaatatttctttaataataaattaacctaagcttactgtaacttttttaaacttagaagctttttttttaatgttttgactcttctgtaataacacttggcttaaaacacaaacacactgtatagatgtacaaaagtgctttctgtatatcctta

SEQ ID NO: 346117 - DNA, 494 bp, Homo sapiens
agcttttgtataatgagatatttgtaaatttgttaagctgttggttattatgcacttgtggaaaatgtgtcaaataactgtccagtgatacgtgaatatgttaggagctatataatgcaatataatgtcttaaattagtaaattmcaatacattattcttcaaatgtaagacatgttgtgactaatatcaacaacaacatttcagaaataatctgttaacgctcttgagtcttagtttacagtgtacttaagcatttcctcttataaaatattactaataaacttttaaagtaatgtaattggaatacgctttattactttttaagagtcctagtttgatactttcggtgctgtgatttgaaggccttcctctaatacagtttatttgcaaacacagtttagtaacagtaatagcatacagagattcaaattggagaagtacgtcattccttgcatttatcaaattatgtcagttcaatccccaattgtgcaga

SEQ ID NO: 346118 - DNA, 402 bp, Homo sapiens
ttggttagggcagaccagtatttcaaataaaatatcccactgagtttcgttagaaaatctggacacacaaaaagtctgctggaaattatcagggtgccaaaataattatggggccaggatggaggagagcagggggctctgggcagtgagacttgtgtttaaggggttagggagggagagcttatcacaggttcrgattaaccttggttgggggacatttactgactttgacaggaggctgagagtggagcttttgattgcttcatagactgggggcacagtgattagacagagaaaagctgaacaaaccattagcaatcttgacctaatgaacatatttacaataatgcttctcccaaatattcttttcaagggcatgtggaacatttacagaaattgatt

SEQ ID NO: 346119 - DNA, 497 bp, Homo sapiens
atttggcttttgtcttacactctcctctggagctctcctggggcagacagtgctggctgcctaccccacaaccataccccttcttatcggtaagcagaaccttcattttggtcattattgagcatccsagggattgaatgactatttttctaagccagttatacaattccttctccctttgcagttattggtttagatatgcaagtgggataaaaccttggtcactgagtggtaatagaatacatgctggatgctttctggaaaagggacctgagacagcaagttgatcctgccagtcttcgaacatcattctggggatatgttgcttgaaaaggtagcaagtaacctgtgtccgtgagtagagcagagaagtcatgtggagtcctctctagattgaattgctgaagtaactgaccttagtaccacctacttgggcacttattgttatgaggaatgaggaattttgcttcctgcttatggtgattttgatatttaat

SEQ ID NO: 346120 - DNA, 617 bp, Homo sapiens
gagtgtggttcccagaccaacagagttatgttctcaggggtattatggctgcctctgctgcatcacacaggttgccagggacgtgggggaaagccaggagccacaggcctcacccagctcccatgcagctggcagcctgaaagacaggtctcactcccacygagctcccccaacagtactgagtttaattccagagagttggtgaccagggctgagtacttgccccaggctacactcctcccagctgagaacaagctgacatagttccttggctgtcctatggagcttgaggtgccattctacctccttcaaagggtctgtggattctcttggcttttctggtatgttcctgaagtaattcttggagcaaaagtttacagcgtgagtctccatatgctgctctgtccatccgaatgggacctgcaagttagttttgcctcctatccgccatttttctgtaagtctccccccaaaatcaatgcagaaagaaaaaagagcaacaaaaatatggaagaaaaatgattaaaaaataagtaccaaagttaatagtataacacattaataacaatgataaaattaagtggtttaagtgctcctcttaaaagcaaaagggtatc

SEQ ID NO: 346121 - DNA, 617 bp, Homo sapiens
gagtgtggttcccagaccaacagagttatgttctcaggggtattatggctgcctctgctgcatcacacaggttgccagggacgtgggggaaagccaggagccacaggcctcacccagctcccatgcagctggcagcctgaaagacaggtctcactcccaccgagctcccccaacagtactgagtttaattccagagagttggtgaccagggctgagtacttgccccaggctacactcctcccagctgagaacaagctgacatagttccttggctgtcctatggagcttgaggtgccattctacctccttcaaagggtctgtggattctcttggcttttctggtatgttcctgaagtarttcttggagcaaaagtttacagcgtgagtctccatatgctgctctgtccatccgaatgggacctgcaagttagttttgcctcctatccgccatttttctgtaagtctccccccaaaatcaatgcagaaagaaaaaagagcaacaaaaatatggaagaaaaatgattaaaaaataagtaccaaagttaatagtataacacattaataacaatgataaaattaagtggtttaagtgctcctcttaaaagcaaaagggtatc

SEQ ID NO: 346122 - DNA, 507 bp, Homo sapiens
tgtctcctctgttgagatgtgacatgcagccttttcttcttccttactcttgcttgcaccatgctggactcagaaaatgctaaggctttataactgtctcaagttctgtttaggacacagtcttcctcattgttctcagattctcaaatatacccagactgttttttcctccctagaacttagccyagcaggtgaggacaaggcctggggccttctctcaatgttctctttgaatccctcctgaccagagaaagtttgtctagtctagggttgggctgtatgtcctttcatctgtttttttttttttcccaaatcatactgtttacagtataaactttatgcccccgaaagactttgaaacttgaagggtctttttgttttcacaaacaaatgcctctgccaagagtttcaaaagaccttttctcttttctttgatgccattttctttcccctgaggcaataagcataaaatatcttagctgctgcctgaggtggggtgtcacagga

SEQ ID NO: 346123 - DNA, 524 bp, Homo sapiens
tgatgataatagttaataatgttttattgaaaatttggaaatttgctaaaagagtagatatcgggtaccttcaccacaaaacaagcaaacagaaaaagcaaaaaccaaaaaattaattatgtgagatgctgcatatgttaactctcttgacttagtaattatttcactatactaaatagcatgttgtacaccttaaatatatagaatttttattttttaaaagagcagagcatccttacacagccctctgcgcactgaactagtcatttaccactcataatacaggttgagcattcytaattagagaatccaaaatctgaaatattccaaaatctgaaactttttgagcatgaatgacactacaagtggaaaattccacacctgagctcatgtgatggattacagtcaaactgcagtcaaaactttggtgtacaaaattattaaaaatattgtataaggctaacttcagtctatgcatataaggtatatatgaaacataaataaatttcatgtttagagttggg

SEQ ID NO: 346124 - DNA, 468 bp, Homo sapiens
aatcccttgggaggattatttaggcacaacaagatagaatagtgacacaatttatcacaataactcaccttgtacacatgaattttcggtgctcttagcctttggagtggatgtagtgaaaactattccttgcaaaagcactaaaaatttcaaaacttaaaaaagtatcatttagcaaataagtcactagacttatttctgtgttttttgaggttmatttgatgttaacatttaaaatgtttatttttaggcaatgtagcataatgaaataaccatagtttttgagaaaagattctggtttaaatcttatcgatcttatttaagatctttgacaagttcatttttttgtacctcaatttcatcatggcttaaataggactactaatacctatctcacagaggagtattgagaataaactgctcattagaagtataaatgttgagtgttttattgcaaaaaaattcctt

SEQ ID NO: 346125 - DNA, 468 bp, Homo sapiens
aatcccttgggaggattatttaggcacaacaagatagaatagtgacacaatttatcacaataactcaccttgtacacatgaattttcggtgctcttagcctttggagtggatgtagtgaaaactattccttgcaaaagcactaaaaatttcaaaacttaaaaaagtatcatttagcaaataagtcactagacttatttctgtgttttttgaggttaatttgatgttaacatttaaaatgtttatttttaggcaatgtagcataatgaaataaccatagtttttgagaaaagattctggtttaaatcttatcgatcttatttaagatctttgacaagttcatttttttgtacctcaatttcatcatggcttaaataggactactaatacctatctcacagaggastattgagaataaactgctcattagaagtataaatgttgagtgttttattgcaaaaaaattcctt

SEQ ID NO: 346126 - DNA, 410 bp, Homo sapiens
tggatattctttcacattcatattactttggcatgatacactcatgctgtttcatgaaaaaaaaaatccatgctttagaatagacyattatacaatcttgatataaccaatgtcacctcatataatgaatgagttaataaaatacacaaaatgatttcttctcttcctcactttctttatatcctagttgaggccgctacaagtgcatacaatacaataattattattatgtccaattgtcaaaatatattggaagcttaacaactactgatgaacaaatctcaatggggtttgaattgaaagttccttagttccccccaaaaatttcactgaagtagatgtctcataaaatcctgagggctctttagtctccactgagagaaaaattctgtaattatatagaattttct

SEQ ID NO: 346127 - DNA, 521 bp, Homo sapiens
ataatttatgttatttttcaccaaccactaatccacatgcaagtagaaacatattctgaactaattagcctatatgcaacaggaatgggaaattatcttctgaagagtcgaatcttggccagtcctagtttaattttattccatttctggatcaaatttcaagcaataatattgttctttacrccaaatgttgtaaaaatgcaacatcataatatgtcctttatagtaatattataaaatatcataaactggacatggtgccctatcaaagtcacctattttcttttgtcccaagtacacctttctaagtccttctctttagcatttcttctgtgctccttctcattcactaataaatatttgtgatctcaaagctatgcacacatacatcacacacacacacacacacacacacatacaattctctcagactcgagtctgttctctctaaagatgagtgccatatttgctcccagagagctcagccatttgctctggggactcagtacattcccttgatg

SEQ ID NO: 346128 - DNA, 409 bp, Homo sapiens
atgatgagggtctatccctcatgaatggcttgggccagcccactgctcataagtgctctctctttgagttcacatgagatctggtcacacgatgtgacatgtstgctcccgcttcaccttctgccatgactgtaagcttcctgaggcctccctagaccaagcagatgccagcaccattcttcctgtaaagcctgaagaaccatgagccaattaaacttcttttctttatagattacccagactcagttatttcttcacatcagtgcaagaacagcctaacacatccatcattgcatgtgtgcaaaccccaggcatgttagacatcaaatatgcaagtcaaacatgacaaattctcaggttggccaatgagactaataatcatagaggctaatgagatggaatagttgcc

SEQ ID NO: 346129 - DNA, 409 bp, Homo sapiens
atgatgagggtctatccctcatgaatggcttgggccagcccactgctcataagtgctctctctttgagttcacatgagatctggtcacacgatgtgacatgtgtgctcccgcttcaccttctgccatgactgtaagcttcctgaggcctccctagaccaagcagatgccagcaccattcttcctgtaaagcctgaagaaccatgagccaattaaacttcttttctttatagattacccagactcagttatttcttcacatcagtgcaagaacagcctaacacatccatcattgcatgtstgcaaaccccaggcatgttagacatcaaatatgcaagtcaaacatgacaaattctcaggttggccaatgagactaataatcatagaggctaatgagatggaatagttgcc

SEQ ID NO: 346130 - DNA, 569 bp, Homo sapiens
aactttggcattaaaacaatctctgagaaaagtttgacctttcagagagatggtcgtctttcaaaattgcatcagtgggatattctcaggtaggattatgcaggagttcttctgttatggcaatgctttaatgaatgtaaaacctttcagatgctggatgacttgctgtgtctgattctcttcaccaggttgacagagtcaggatttttgccttttaatgaaatgagttatctcttgggtcctttgaaacctaattggcagaagggctgggtacaaccctgatagggagtgcctttcatagaaggattttttttttccagccttaaaagctaaaaagaagctttgtgccaaaaacctttatgatgtgcagttttctatcactaaaatgaccccgtgttttaattcaacaggttttaaacacacatttcttagaagctaagaagggacatttcagagtttattgggacctttcagaattatgaaaatatccagccctaartgctaaaaacaagctttgtgccaaaaagctttattatgtcttgatttttttttaatttttaatttttatt

SEQ ID NO: 346131 - DNA, 569 bp, Homo sapiens
aactttggcattaaaacaatctctgagaaaagtttgacctttcagagagatggtcgtctttcaaaattgcatcagtgggatattctcaggtaggattatgcaggagttcttctgttatggcaatgctttaatgaatgtaaaacctttcagatgctggatgacttgctgtgtctgattctcttcaccaggttgacagagtcaggatttttgccttttaatgaaatgagttatctcttgggtcctttgaaacctaattggcagaagggctgggtacaaccctgatagggagtgcctttcatagaaggattttttttttccagccttaaaagctaaaaagaagctttgtgccaaaaacctttatgatgtgcagttttctatcactaaaatgaccccgtgttttaattcaacaggttttaaacacacatttcttagaagctaagaagggacatttcagagtttattgggacctttcagaattatgaaaatatccagccctaaatgctaaaaacaagctttgtgccaaaaagctttattwtgtcttgatttttttttaatttttaatttttatt

SEQ ID NO: 346132 - DNA, 485 bp, Homo sapiens
aatctgatgattatatgtcttggggttggacttctcatggagtatcttactggggttctctggatttcctgaatttgaatgttggcctgtcttgctaggttggggaagttctcctgaatcatatcctgaagtgtgtttttcaacttggttctgttttccccatctctttaggtaccccaatcagtcataggttcagtctttttacataatcccatagttcttgaagattttgtttgttccttttcattatttttctccaatcttgtctgcctgccttttttcaacaagatagtactcaagctctgatatcctttctttcacttggtctatttggctgtttatacttgtgcttgcattgtgaagttctcgtgttgtgtttttcagttccataaggtaatttatgtttctttctaaactggttattctktttaacagctcctgtaatgttttatcatggttcttagctttgttgcaaggggttaaaa

SEQ ID NO: 346133 - DNA, 485 bp, Homo sapiens
aatctgatgattatatgtcttggggttggacttctcatggagtatcttactggggttctctggatttcctgaatttgaatgttggcctgtcttgctaggttggggaagttctcctgaatcatatcctgaagtgtgtttttcaacttggttctgttttccccatctctttaggtaccccaatcagtcataggttcagtctttttacataatcccatagttcttgaagattttgtttgttccttttcattatttttctccaatcttgtctgcctgccttttttcaacaagatagtactcaagctctgatatcctttctttcacttggtctatttggctgtttatacttgtgcttgcattgtgaagttctcgtgttgtgtttttcagttccataaggtaatttatgtttctttctaaactggttattcttkttaacagctcctgtaatgttttatcatggttcttagctttgttgcaaggggttaaaa

SEQ ID NO: 346134 - DNA, 528 bp, Homo sapiens
gtttggtcagcaaggatttaaaataacttttcaataatcacatgttgttagtgaaaatagtttgcttcaaaactttgaggatataatctctccatggattttagtggaacagtattttcatcttgtcaggttatatcagcatcaaattatactaattctcacctaataggaattataggcttttctttaaccctgtgtatgtcatcaaggccctgttgaccgaagctgcacagattytgccattcctcccatatctgcagtctcagtgagatgaattaacctgttgactcaaattgtctttgccatagactgaagtaaacataacttctggaaatgccatttttagcattgactaagatccaggtactattttaagcattcacatatagaaactcatttaaccttcacaccacacatgatgtgcatatgaatcgtttcctcattttacagttgaaggaacccagacaaatggaagtgaaggtactatatgctcttatagcgttgaggctactgttctttaataacaaa

SEQ ID NO: 346135 - DNA, 559 bp, Homo sapiens
catgtactcccatagtttttgagattggctgtgagataacagatatgttaaatcattatgttgttttctaaaattacaataaagaatagattttaacagtaatataacactccaaataactatacaaatagctcatcataatcacaaatattttctacataaacatgtttatttttgtcaaatgtrtaacatcaattattataagttatattctattctccaacacaataaaatagctacgttcagttatacttaataaaagagattattacactgtcttttaaaaaataaaattattctaatgtagcattagactagctgtctttgaaaagttgcgaattttttggctctgccaaggaaggcatccaaatatatttgtcaaagcttgttccctaagccttctcatccttgtaaatgccaatcagcccattaggctggtgatgaggagggaagagggaacttgaatcacaaagcatattcagccccctaagagattgaacacttgaagattgatatttaccatatttcttcaagtctataatgtacattttctgaaatc

SEQ ID NO: 346136 - DNA, 588 bp, Homo sapiens
ccaattaattctgggatacctaggtgatctttggaacatgcttagggattgatttcaggggtgctctgccaaactagcctaaatgtttgtacaacacatttttaaaaggtagaactaatggagggtgggagtagaaccataattctattaatttgccttttgtcatcttataaccaaacgatctcatcatgggttagatctgtggtggtaaaacattaacaaaatcaagtaaaatgcctgtgtggaggtgtgggcaagaaaaggggaaaaaattccttctgccgacatgacagtgtccaatgatgtgacactagattggtccaatgccacaaatgaagagtcacatgacccttttcctttaagtcactgtaattagattttcatgtccctttcctccaccctccttcccaccaaaaagaaagtttgtctttccttgtgaactactttgcttcttttgattaaaacatgggatctatttcttgttttgctttgcctgccagggatctcagagctaaactyggtgccaaataagagtcatgattgcacacatgtgaaacctggtgctgttcctaccccctttgcagccat

SEQ ID NO: 346137 - DNA, 588 bp, Homo sapiens
ccaattaattctgggatacctaggtgatctttggaacatgcttagggattgatttcaggggtgctctgccaaactagcctaaatgtttgtacaacacatttttaaaaggtagaactaatggagggtgggagtagaaccataattctattaatttgccttttgtcatcttataaccaaacgatctcatcatgggttagatctgtggtggtaaaacattaacaaaatcaagtaaaatgcctgtgtggaggtgtgggcaagaaaaggggaaaaaattccttctgccgacatgacagtgtccaatgatgtgacactagattggtccaatgccacaaatgaagagtcacatgacccttttcctttaagtcactgtaattagattttcatgtccctttcctccaccctccttcccaccaaaaagaaagtttgtctttccttgtgaactactttgcttcttttgattaaaacatgggatctatttcttgttttgctttgcctgccagggatctcagagctaaacttggtgccaaataagagtcatgattgcacayatgtgaaacctggtgctgttcctaccccctttgcagccat

SEQ ID NO: 346138 - DNA, 407 bp, Homo sapiens
caacaagaataatgaggattaactggacagctcaggttyttattcccatgaagccagaggtattatagttcctgttctttgcatgataccagattataaagttcttcatgtacaaaaagttgaaattttaatttttgtgcacctgtggtgccagctactctggaggctgaggtgggaggatcacctgagcccaggtggtcaaggatacagtgagccatgattggaccactgctctccagcgtgggtgacagagaccttctctcaaaaaaaaaaaaaaaaaaagaaagagagggagagagacacagagagacttttttccaactctaggctcataagaacataattcttgactgttcaaaaggcagtggccataccaaggatgagaagtaggaatggtctgccgctgg

SEQ ID NO: 346139 - DNA, 407 bp, Homo sapiens
caacaagaataatgaggattaactggacagctcaggttcttattcccatgaagccagaggtattatagttcctgttctttgcatgataccagattataaagttyttcatgtacaaaaagttgaaattttaatttttgtgcacctgtggtgccagctactctggaggctgaggtgggaggatcacctgagcccaggtggtcaaggatacagtgagccatgattggaccactgctctccagcgtgggtgacagagaccttctctcaaaaaaaaaaaaaaaaaaagaaagagagggagagagacacagagagacttttttccaactctaggctcataagaacataattcttgactgttcaaaaggcagtggccataccaaggatgagaagtaggaatggtctgccgctgg

SEQ ID NO: 346140 - DNA, 407 bp, Homo sapiens
caacaagaataatgaggattaactggacagctcaggttcttattcccatgaagccagaggtattatagttcctgttctttgcatgataccagattataaagttcttcatgtacaaaaagttgaaattttaatttttgtgcacctgtggtgccagctactytggaggctgaggtgggaggatcacctgagcccaggtggtcaaggatacagtgagccatgattggaccactgctctccagcgtgggtgacagagaccttctctcaaaaaaaaaaaaaaaaaaagaaagagagggagagagacacagagagacttttttccaactctaggctcataagaacataattcttgactgttcaaaaggcagtggccataccaaggatgagaagtaggaatggtctgccgctgg

SEQ ID NO: 346141 - DNA, 534 bp, Homo sapiens
aaattttaatttttgtgcacctgtggtgccagctactctggaggctgaggtgggaggatcacctgagcccaggtggtcaaggatacagtgagccatgattggrccactgctctccagcgtgggtgacagagaccttctctcaaaaaaaaaaaaaaaaaaagaaagagagggagagagacacagagagacttttttccaactctaggctcataagaacataattcttgactgttcaaaaggcagtggccataccaaggatgagaagtaggaatggtctgccgctgggcagaaatgagcactttaaaattgcctgcaaggtgataattaaaaaaaaaaaaaaaaacagacttgggggttttattattgtttacacattttctataggtaagacaccatcttattatctgtatctgagactgagtactctcaccagctaccgccactgtcaaaaggacaggcttctaggggttgagggcagggggtgatgagcaagagttgggctttccataattgggattagaagggagggtgtat

SEQ ID NO: 346142 - DNA, 534 bp, Homo sapiens
aaattttaatttttgtgcacctgtggtgccagctactctggaggctgaggtgggaggatcacctgagcccaggtggtcaaggatacagtgagccatgattggaccactgctctccagcgtgggtgacagagaccttctctcaaaaaaaaaaaaaaaaaaagaaagagagggagagagacacagagagacttttttccaactctaggctcataagaacataattcttgactgttcaaaaggcagtggccataccaaggatgagaagtaggaayggtctgccgctgggcagaaatgagcactttaaaattgcctgcaaggtgataattaaaaaaaaaaaaaaaaacagacttgggggttttattattgtttacacattttctataggtaagacaccatcttattatctgtatctgagactgagtactctcaccagctaccgccactgtcaaaaggacaggcttctaggggttgagggcagggggtgatgagcaagagttgggctttccataattgggattagaagggagggtgtat

SEQ ID NO: 346143 - DNA, 462 bp, Homo sapiens
actcatcttttgagggcattttctctggtcccagtgctccctatttcttttggggcaataagagaaccccaccccacctccattctggccttaatttttttgaaactcttccttccctgaaagatacattaaaattcatctgaattgatgtaatgctgggataaatttaagattaggttagaatagctagtatattgatgtattgctgcaaaaaaatcagcccacaatttggtgrcttaaaacagcaatattgatatattattacttccagtttctattgctcagttcttgctttagtccttgcacagttgcggtcctatgttggccagggctacagtcatttgaaggcttgagtggggtggaaggacctacatcctacatgactcatttacatgcctgacaatgtgatgctggctgttggttggagctaccattcctctctactatgtcgcgtgagagttc

SEQ ID NO: 346144 - DNA, 506 bp, Homo sapiens
cagttgcggtcctatgttggccagggctacagtcatttgaaggcttgagtggggtggaaggacctacatcctacatgactcatttacatgcctgacaatgtgatgctggctgttggttggagctmccattcctctctactatgtcgcgtgagagttctcaatgcatggcagctggctttcccagtgtgagtgacccaagaccaaggtagaaattgtgatgccttttatgtcctagccttggaaatcactgccactttccctgtattctattggtagagacaaaagtatgcccaggttcaaagggagagaacattgaccctaatgcctgatggaggagtgtcaaggtcacactgtaagaagagcatgtggaatgggatatgtatcattgcagccatttctggaaaacataatctgccataatggctaataaaaagtgccatgagtgtcccaggggtaattattgaaaacgggttacttaggatttttagggtacaaagtcttatcac

SEQ ID NO: 346145 - DNA, 506 bp, Homo sapiens
cagttgcggtcctatgttggccagggctacagtcatttgaaggcttgagtggggtggaaggacctacatcctacatgactcatttacatgcctgacaatgtgatgctggctgttggttggagctaccattcctctctactatstcgcgtgagagttctcaatgcatggcagctggctttcccagtgtgagtgacccaagaccaaggtagaaattgtgatgccttttatgtcctagccttggaaatcactgccactttccctgtattctattggtagagacaaaagtatgcccaggttcaaagggagagaacattgaccctaatgcctgatggaggagtgtcaaggtcacactgtaagaagagcatgtggaatgggatatgtatcattgcagccatttctggaaaacataatctgccataatggctaataaaaagtgccatgagtgtcccaggggtaattattgaaaacgggttacttaggatttttagggtacaaagtcttatcac

SEQ ID NO: 346146 - DNA, 624 bp, Homo sapiens
ttttagggtacaaagtcttatcacaaagcccgaagagataatgttggaaatagggtagttgcttgcgatgtaatgtaggatagcaaccagaaaccatatatgaaagattcagaaatgagtgagatttagaatctgasttaggagatctcacaagtgtaaaaaaaaaaaaggcaaaatattaggatttacaatttgagaatgctccactcttctctcctccccacatttgcttaaaataaaatgttctcagacacttttggcttagggaagctctgacttcagaagacaggttcttggggctttgggaatgcagagttaagaaaaaggggctgggagagtggggggagagtggagagtaaaatggaaagaatggagggaaaggtaaaggatttaggcctacagtagtaagctgatctactagtggcctgagatgaaggaggagttgggagtatagtctgacatttgttacagagcagttggctgtgaaggtaggtgaggaaagaggatttcaggtgtttggactgtgcatttgatatgttttagagttcttgatggatttggccaaagaaagggattccctttaggttaattttgccccctgaactgtacttctgtacttttgga

SEQ ID NO: 346147 - DNA, 455 bp, Homo sapiens
atcagggaggaaaaaaagttgtaaaataattaagaaaaatcgtgctaaaatcttaattctttcaaaaacacccaaactctaatatgttctgattagattttaacttttcttccaggctatttaaagtgaaagtgaaggtggaaactgagaccaaatatccactttcccctcaaacttacagttttattctggaaacatgttcagacttttttttttttcattggaagcttagatggtgttttccctctctggtataaaaaggaagagtttcartatgactcacatgtaatttgaaattattttgtaaagattttacttttttttctatccttttttctaagctgtaggattatactggttataatctagggtcttatgttgctgaaggtaataatgacagtaactgaatatgaaaaacctgtaatattctgaagccttcatctgccctgaaattg

SEQ ID NO: 346148 - DNA, 589 bp, Homo sapiens
gttttgccttttccagaatgtcacatggttagaatcatacagtacaatctgcagggtaagttggctggctggagatccagggaagggctgatgctgcagtttgactttgaaggcagtctcctggcaaaattccttcttcatcagggaacctcagtctttttctattaaggccttcagctgattggaggagatccacccacattataaagggtaatctgctttactcaaagtctacwgatttaaatgttaatctcagctaaaaaaaaatacattcacagaaacattttgaataatgtttatccaaataccggggtcccatgacctagccaagttgacacattaaccatcatacttagcgtgtgaatttaaagtctcctcaatgtttgtttgtgacttcatagctcatttctttttacagctgaataatactccatcgtatggatgtaccacagttgttgatgaacatcttggttgcctccagtttttggcaattatgaataaagccgctataaacattcatgtgcgggtttttgtgtggacataatgctggatgatgtggtaagactacgtgtatctttgtaagaaactg

SEQ ID NO: 346149 - DNA, 584 bp, Homo sapiens
tgctccccttctcggtgattctcaggtcttttaagattaggcaggtttatgacactcttcctactyattgtgtattcactccactgaactgggtggattgtctttgagaattctttttcagtgtttacacttccactcatccctttgtattcagcctagtctagattatgctgcagtgacagtccaaaagtcttggatcaaaacctccacattgcacttcatgtccatcaaaggtattctcagcaatccaatctgatggaggctggaccatctggaacattgctactggcttgctagagacaggaaaacaggaatgtgaggatggcccagtgggtcctaaatttctcagcccagaactgacacatgtttcttaggtcctatcaagtctcatgaccaaatcaaatttaaaaggggcaaggaaagacaatcccaacatgtacttaaaggaagagacaagatatatcagtgaatagccctagtaacaaccacaaccttacatctggggaatcctgagacatccaggctatgattgataattaccatgtaagagctcctaaggggtcctgtgtgggacttttcaattt

SEQ ID NO: 346150 - DNA, 584 bp, Homo sapiens
tgctccccttctcggtgattctcaggtcttttaagattaggcaggtttatgacactcttcctactcattgtgtattcactccactgaactgggtggattgtctttgagaattctttttcagtgtttacacttccactcatccctttgtattcagcctagtctagattatgctgcagtgacagtccaaaagtcttggatcaaaacctccacattgcacttcatgtccatcaaaggtattctcagcaatccaatctgatggaggctggaccatctggaacattgctactggcttgctagagacaggaaaacaggaatgtgaggatggcccagtgggtcctaaatttctcagyccagaactgacacatgtttcttaggtcctatcaagtctcatgaccaaatcaaatttaaaaggggcaaggaaagacaatcccaacatgtacttaaaggaagagacaagatatatcagtgaatagccctagtaacaaccacaaccttacatctggggaatcctgagacatccaggctatgattgataattaccatgtaagagctcctaaggggtcctgtgtgggacttttcaattt

SEQ ID NO: 346151 - DNA, 584 bp, Homo sapiens
tgctccccttctcggtgattctcaggtcttttaagattaggcaggtttatgacactcttcctactcattgtgtattcactccactgaactgggtggattgtctttgagaattctttttcagtgtttacacttccactcatccctttgtattcagcctagtctagattatgctgcagtgacagtccaaaagtcttggatcaaaacctccacattgcacttcatgtccatcaaaggtattctcagcaatccaatctgatggaggctggaccatctggaacattgctactggcttgctagagacaggaaaacaggaatgtgaggatggcccagtgggtcctaaatttctcagcccagaactgacacatgtttcttaggtcctatcaagtctcatgaccaaatcaaatttaaaaggggcaaggaaagacaatcccaacatgtacttaaaggaagagacaagatatatcagtgaatagccctagtaacaaccacaaccttacatctggggaatcctgagacatccaggctatgattgayaattaccatgtaagagctcctaaggggtcctgtgtgggacttttcaattt

SEQ ID NO: 346152 - DNA, 495 bp, Homo sapiens
tactgtacacgtggtaacaaaaaaagggaagaccaagcctccatgttggacatgcctggccccagacagcccttttctattggcgcttcttccagcwttcccccatgcaagcatcttgcttccttatttatgtttgcagctgaatttttcaggctgttcagtcagaaaagtaataatttggggggctgcttttggttagaaggaaaaaatccactgaggacacttttgccctcactatctgcctaaataattcatttctacctcctatatcaatagggcacgagaactggggtggagagaaatgataagagttagggcctcaggtttgtgtgagacccatctaggtatgaagcaaatgggctggagtcaaggtgatgtggctcagtgctaccagcaggaacatgggagcaaatccgttgagaagtaattgatactagggaagctggttgggatggagcttctcacctggtttgtcttttcgggggtctgcaaaag

SEQ ID NO: 346153 - DNA, 495 bp, Homo sapiens
tactgtacacgtggtaacaaaaaaagggaagaccaagcctccatgttggacatgcctggccccagacagcccttttctattggcgcttcttccagcattcccccatgcaagcatcttgcttccttatttatgtttgcagctkaatttttcaggctgttcagtcagaaaagtaataatttggggggctgcttttggttagaaggaaaaaatccactgaggacacttttgccctcactatctgcctaaataattcatttctacctcctatatcaatagggcacgagaactggggtggagagaaatgataagagttagggcctcaggtttgtgtgagacccatctaggtatgaagcaaatgggctggagtcaaggtgatgtggctcagtgctaccagcaggaacatgggagcaaatccgttgagaagtaattgatactagggaagctggttgggatggagcttctcacctggtttgtcttttcgggggtctgcaaaag

SEQ ID NO: 346154 - DNA, 621 bp, Homo sapiens
tgcttttggttagaaggaaaaaatccactgaggacacttttgccctcactatctgcctaaataattcatttctacctcctatatcaatagggcacgagaactggggtggagagaaatgataagagttagggcctcaggtttgtgtgagacccatctaggtatgaagcaaatgggctggagtcaaggtgatgtggctcagtgctaccagcaggaacatgggagcaaatccgttgagaagtaattgatactagggaagctggttgggatggagcttctcacctggtttgtcttttcgggggtctgcaaaagcctacaactgtagaccatgagctrtcaactttcatgacaaagaaaaataaaagagccacatagtcaatgttacacagggtagttcacacaaggaagtggccattaccacccataaagagaacagccagtgcatcatggtgctgtgatctaaggacatagaacacattactttttcctccctccctgttgaaggaagaggagcaagagcagggtttgggatagaagatgaggtgttggcacacatacccccttccctctgtgctgctggttccataaatctagtctgtgcagagtaagggagaagaaaaacct

SEQ ID NO: 346155 - DNA, 607 bp, Homo sapiens
tggggccacctctgaggagatgaccttccaatgatactggaagagaaaagccagccttgtggacagccctggaagaaggctagaaggggggatagcaaatgcaaaggccctgaggcaggagagagtttggccgtgataggtattccccacaggttgggagcctgggacacagtgagtgagggagggcgcaggatgaatggacctttgggtgtggggaagagcacaaagacaggagaaattgaaatggaaatggaggaacttcccccattagctgattctatttaatttatgctgttaacctgattgcttgattgctttctaacccaatactactcttgttgcatctggcaaagggagaggcagaggtcttctagccaatgttttaaacaaagtttcstgcatttcacactcaaaaattgtcaaacctaacatatgagtagtcccgccatcccatgatcattgatgtagacttcaccagagaataatgagctcgtcttagaaaaatcatcccaacttgtctaatcactccacctatcgaaaagctggctaagataaattatatttagagcaaataatctaaggcacatgcttggcctcctcagtatct

SEQ ID NO: 346156 - DNA, 507 bp, Homo sapiens
agaatcttgtcccttagtgtctgtgccactgattcatccttatagmtttcaatatccccttgaagccatcttgcagactacagtcccgctttctggactatatagaggatcctttccaaggtaccactgtaaatggggtttaatatggggatctagtcacagaggtgttggaggagctgagagtgaatagggaaaggtaagccacctcagagtttaacaatggtaacagggtgctattactgctagaactggggggaccaagagaacaggcacattatcagtgcccaggagttagggatgcttggagggagatgaaacctgggaggaggagctggcccagggaccatgtatcttggactgtcaggcaaaagctggaatcctgggagtgtagctactcagtgggaactggagctaaaggagaggctgtccagagaaaatgaggaacacagaggaagtgtatatccagtaggagctgggaacatgcagggaatgcagctgcagacaaga

SEQ ID NO: 346157 - DNA, 606 bp, Homo sapiens
ctgggaattatggtttttggaatttcactttctatgaacagagataagaaatggatcctagaatgaccatccttgaacatgatccacacagatgttaaaggaaaatgacatctgagtgacattgcaattattatagcttacaaacagggaccacaaagtctagaaacacagaagaatatatacaatatgtggtttattaatattacattataatacatacatgtacagtgacattaaaggatacattcaatattttgactttcattagtrgtacatggtttaatgcactgtgaaaattgcttcagtaatggtagactaatggatttccatccatctctgcacaagcatctgagatctcctctaattttgtcctctgtctgccataatttgtatctttagcattaccaaaagaattgtgttcaatctgttaaaaaaatccatgtttctatcagtttcatatatattaatttatttaaataactaatgtcaaacattaaattccgtctccaatttattccagagagaagatctgaactaaactgtggcaacctgaacttccattttcacatgcccaattttatgacaaaaccctgaggccctagtagt

SEQ ID NO: 346158 - DNA, 545 bp, Homo sapiens
gaaataaatcagatatagaccccatcatgtgccacaactcatttcaaaatggcatcttgtatagtgaaaatctgggaatgctatccacttggcacttaaatttctggaggatcacaatttgaacagagaagaggacttgaagtttattccttactgatccaagaagcaagaaatgtaggcagggtattaggtcaaaagttaatctcagaattttcagagaccatgcatgatggacaaggcctatgtactattgtctcctctacattcctaacaaaatgattagtcttaacacccacttagctgtccaagctgtaaatctcargcttcctccaagtcctgtaaattctacttcttaggttattttctttcaatctagtttgtcttgctcattcccatgaacactgcattatttcaaatccacatctactcgtgccttgttcactgcagtaacttcctaattggcctcccatttcaacatgttcgctcattcaataaatcatccagtatttccatatggtagctagagtgacatttctaaaataccg

SEQ ID NO: 346159 - DNA, 545 bp, Homo sapiens
gaaataaatcagatatagaccccatcatgtgccacaactcatttcaaaatggcatcttgtatagtgaaaatctgggaatgctatccacttggcacttaaatttctggaggatcacaatttgaacagagaagaggacttgaagtttattccttactgatccaagaagcaagaaatgtaggcagggtattaggtcaaaagttaatctcagaattttcagagaccatgcatgatggacaaggcctatgtactattgtctcctctacattcctaacaaaatgattagtcttaacacccacttagctgtccaagctgtaaatctcaggcttcctccaagtcctgtaaattctacttcttargttattttctttcaatctagtttgtcttgctcattcccatgaacactgcattatttcaaatccacatctactcgtgccttgttcactgcagtaacttcctaattggcctcccatttcaacatgttcgctcattcaataaatcatccagtatttccatatggtagctagagtgacatttctaaaataccg

SEQ ID NO: 346160 - DNA, 574 bp, Homo sapiens
ttctttcaatctagtttgtcttgctcattcccatgaacactgcattatttcaaatccacatctactcgtgccttgttcactgcagtaacttcctaattggcctcccatttcaacatgttcgctcattcaataaatcatccagtatttccatatggtagctagagtgacatttctaaaataccgatctaatcaagtgatcccttggctaagaactatagtggtccctttttctattgaattaagtccattaagactttccattgaacacagaaaaaatcataaactctttagcaaaacatacaagactcttcrtaatctgactccagtctaattttgaagtccctctccagcaatttttctatacttaagcttttttgtaattctaaagaaaagaatcttatttcaatttgttcaggtgtggatataacaaaaaattctcagagacctgttttagttgttagtgctatttgtcaagtatttctggttctttgccttcctagtacatagtgggactgtacttctctttttttggtagggctgagtgactatttccagccagtgagttttgatggta

SEQ ID NO: 346161 - DNA, 634 bp, Homo sapiens
ttttagttcttaaatttagggccacaatccattctgagttaattttctgtatggtattgttgatgtttgcctggaaatttccattcatccttttactttcaaactatttatataataatttcagtgagtttcttatagatggaatatagatgggtcatctggcaatttttgtcttaattgctctacttagaccatttatatttaatgtaattattgacatattagaacataagtctaccattttatgttttgtttctgttttttttaatcttttttatttctctgctttctttttcctctatttctakgggttacttgaacatcttttagaatttattttgatttatctgtaatgttttttgagcatatttctttatatgtatagctcttttagtgatttctctaggtattgcattatatatacatataacttatcacagtctactggtatcctcatttcaccagtttgaatcaagtatagaaatcttaccttcctttacatctcattacacttttccatttaggaaataattgccttaaatatatctatcctctacatacattgagatccccattagatattattacaatttttggttcatttgtcaaaacacatttggaaaatgcaagaaga

SEQ ID NO: 346162 - DNA, 534 bp, Homo sapiens
aaactatttatataataatttcagtgagtttcttatagatggaatatagatgggtcatctggcaatttttgtcttaattgctctacttagaccatttatatttaatgtaattattgacatattagaacataagtctaccattttatgttttgtttctgttttttttaatcttttttatttctctgctttctttttcctctatttctaggggttacttgaacatcttttagaatttattttgatttatctgtaatgttttttgagcatatttctttatatgtatagctcttttagtgatttctctaggtattrcattatatatacatataacttatcacagtctactggtatcctcatttcaccagtttgaatcaagtatagaaatcttaccttcctttacatctcattacacttttccatttaggaaataattgccttaaatatatctatcctctacatacattgagatccccattagatattattacaatttttggttcatttgtcaaaacacatttggaaaatgcaagaaga

SEQ ID NO: 346163 - DNA, 491 bp, Homo sapiens
aaccattggcatttctggattgctgactccaggcaaaaagaaaacttggaggaactcaccaccatgtcatttttggttccaaggtccctcgctatctgggtttccttctttttttctcaccttttagagtcttcttatgttggtttaactatactatccagggtttttagctgtccttastgagagaaataggaaaaagtacatctatttaatctttctaaaagcagaagctctcatccagcaaacttttagaaaccctgttgttcaagtctgcgttggtcgatttgagtgtgattgatgattcttctatggtctcactggagtgtccactgcccttgctctcagttcctcttcctgccagtggttaaagttattttaccggtacgatgccttgtaataagaaatgttaacctgctgtgtggagagctgaacccagcttttgcctagagatttctgccaaaattagaagctaattacagactttaagaatt

SEQ ID NO: 346164 - DNA, 491 bp, Homo sapiens
aaccattggcatttctggattgctgactccaggcaaaaagaaaacttggaggaactcaccaccatgtcatttttggttccaaggtccctcgctatctgggtttccttctttttttctcaccttttagagtcttcttatgttggtttaactatactatccagggtttttagctgtccttactgagagaaataggaaaaagtacatctatttaatctttctaaaagcagaagctctcatccagcaaayttttagaaaccctgttgttcaagtctgcgttggtcgatttgagtgtgattgatgattcttctatggtctcactggagtgtccactgcccttgctctcagttcctcttcctgccagtggttaaagttattttaccggtacgatgccttgtaataagaaatgttaacctgctgtgtggagagctgaacccagcttttgcctagagatttctgccaaaattagaagctaattacagactttaagaatt

SEQ ID NO: 346165 - DNA, 585 bp, Homo sapiens
aagtgatactgtaaggataagggagaatgtatatacaccaccaaaaaggagagagtcacaccgaraagtcagttttgagatcagtttagagaaaatgcaggccaaggcagtgtcagagggataaaaaaatatacatctggacctctcttttgtttctccctccagtctcctccaggggctcccaatggttgaactcaaaaggaagccataggatgaggaagcccatgttagcctcttgggacagaaagtcagcttaaaagggggcctgtggaatatattcagcctagatggtttatttgttaatattcaagtgtaaatctgagcagattagttaggtggtgtgctgagggacagttagagtcaagaatttaaactttgaatcttataaaatactcagaccaatattaggaatttgagtaagtggaaagctataacttgcttaaaaattaatgcatgtgaaataccgatgatggcttttagctagagtccctataaccaaaatatggggtaacctgggctcagggtttctagtttttccttgatgaatttacttgggaagttaatcatgagtgttaggcagaaatt

SEQ ID NO: 346166 - DNA, 556 bp, Homo sapiens
atcagtttagagaaaatgcaggccaaggcagtgtcagagggataaaaaaatatacatctggacctctcttttgtttctccctccagtctcctccaggggctcccaatggttgaactcaaaaggaagccataggatraggaagcccatgttagcctcttgggacagaaagtcagcttaaaagggggcctgtggaatatattcagcctagatggtttatttgttaatattcaagtgtaaatctgagcagattagttaggtggtgtgctgagggacagttagagtcaagaatttaaactttgaatcttataaaatactcagaccaatattaggaatttgagtaagtggaaagctataacttgcttaaaaattaatgcatgtgaaataccgatgatggcttttagctagagtccctataaccaaaatatggggtaacctgggctcagggtttctagtttttccttgatgaatttacttgggaagttaatcatgagtgttaggcagaaattactgaataacttttcaaatcttccagtttctcctgtctatcttctgccat

SEQ ID NO: 346167 - DNA, 594 bp, Homo sapiens
ataacttgcttaaaaattaatgcatgtgaaataccgatgatggcttttagctagagtccctataaccaaaatatggggtaacctgggctcagggtttctagtttttccttgatgaatttacttgggaagttaatcatgagtgttaggcagaaattactgaataacttttcaaatcttccagtttctcctgtctatcttctgccatgatttctggcacttaatacctatcccatgttcagggaattacaagaaaaggctgaaaaagtagtaagaaggtagtacatgactgtttttctttcctacactctcacaaatttcagcttagtaattgagtgatacaatctccagtattagcaccgaaatattatttttattcccctaatataatgcataattagaagatccttttcataggagatgctttcatttttagcatctttgagcttaaagaagtatggaaccaactttggaagcagtctggctatagctttagtatgcaaatggtatttcatctgcrattaccacaagccttgagatacaggaaatatctcaaacctggtgatccatgactgatattaatgccaataccttccc

SEQ ID NO: 346168 - DNA, 378 bp, Homo sapiens
cacatttttagtaggtgtgtttgactgctccatagatcttgtcttctgcctaaatgttcctttaaaatattttgatttattatgattaaatgtaagctaggttggaccattaattaattacaaataaatttgagttaaacccagacattaataacagcattagaaaaaaatgcastgggtttacatgctaaacagagagctgtaacttggttgtgaaattttaccttctttgaaaatgactgataccaggagttaaaacaggcaccccctgggttaaatttagcccatagggtgttttctttggacagtatcatattttaaaacaaattagaattagtgaccaccacttgaaaatcaggagagttttacacaaaatca

SEQ ID NO: 346169 - DNA, 378 bp, Homo sapiens
cacatttttagtaggtgtgtttgactgctccatagatcttgtcttctgcctaaatgttcctttaaaatattttgatttattatgattaaatgtaagctaggttggaccattaattaattacaaataaatttgagttaaacccagacattaataacagcattagaaaaaaatgcactgggtttacatgctaaacagagagctgtaacttggttgtgaaattttaccttctttgaaaatgactgataccaggagttaaaacaggcaccccctgggttaaatttagcccatagggtgttttctttggacagtaycatattttaaaacaaattagaattagtgaccaccacttgaaaatcaggagagttttacacaaaatca

SEQ ID NO: 346170 - DNA, 432 bp, Homo sapiens
atgatttaattttattctatggacattatacttctgtaaaccagacttgaatataaagattatgtatcagtcaacaaaaacatttctcagagytgtatctatttttaatcttatctgggttccaagaatatcatttgttcttttaaaaatatatatttaattgaaaaataaaaattgtatatattgatcatgttcaacatgttttgaaatatgtatacactgtaaaatggctaaattgagctaattaatatgtgcaatatctcacatacttttaattgagttgtttttttagagaaatgtagaatgaaagtctaatatcttctagaattactaataaggatttcactattaattaaagtcaaaaatacactctgtgggagagcaacaaaaattctcactgaatggaaagaaaaaagaagtgaatatgtggat

SEQ ID NO: 346171 - DNA, 432 bp, Homo sapiens
atgatttaattttattctatggacattatacttctgtaaaccagacttgaatataaagattatgtatcagtcaacaaaaacatttctcagagttgtatctatttttaatcttatctgggttccaagaatatcatttgttcttttaaaaatatatatttaattgaaaaataaaaattgtatatattgatcatgttcaacatgttttgaaatatgtatacactgtaaaatggctaaattgagctaattaatatgtgcaatatctcacatacttttaattgagttgtttttttagagaaatrtagaatgaaagtctaatatcttctagaattactaataaggatttcactattaattaaagtcaaaaatacactctgtgggagagcaacaaaaattctcactgaatggaaagaaaaaagaagtgaatatgtggat

SEQ ID NO: 346172 - DNA, 647 bp, Homo sapiens
ttaataaatggcattgaagaagaggtggtatttagactgagtcttgaaatatggattggaggctgccaggtgaagagcagagacaagtgcatcatgtacaaaacaaagggattggagagagtatgtacaaagtgttaagatactacactttaaaagtctttaaactttgctgattcctggtcccatctgaagagtttgtcctattcgcagacgctgggtggggctatacttcttacctactacctgctcaactattactgattgggtcaaagatgaatatctgactcaatccattcgttgttaagtaaccaatcatattgtctctagagaatctgaagtaacagaccagaggtacttaagctaaaaagttgagataagggcagccatattacatgtggtcatggctatattaggacatgtgcagggccaaaaggcagagaaaactgggcccagagataaataggaaatgaacaggctcaccaaaaaaaacgtggcagtaaaagaaaccacataatayggtttgtctctgtgtccccacccaaatctcatctcaaatagtgattcccatgtgtcgagaaggggatctggtgggaggtgattggatcattgaggtggtttcccccatattggtctcatgatagtgagtt

SEQ ID NO: 346173 - DNA, 565 bp, Homo sapiens
gtactataacatgtgggatctgcaaagaagctccaaaaagctgaaatctactttgtgtactctgaattttaatgtgcagasaacagcaggctgtctacccatacaaattggcttttaaaaccaagcatttaatcttaaggcaaataatctgttattttaataattaattcaactccttgaaaaagatggttagaagccagttaccaagagatttaaaaaatagttattttattgggttcaactttaaatgaaagtttaatgtttagaattagacaagtgaggatataaatgttttaataataggtttagattattttgataataaattcaaaagacaattaatggtaagtttgcagcaactggtgaaataaacaaggtcaagagaggactcagaacagtatatgtagaggacttttggggaaaatgaagaaagaaaaatatggaaagagagatggtcaagatgcagcaattctttcccttggttttgtgtcaaagttcttttctatttttactagagtgtcatgaaacaggcaaaaggatttcagaaaacaaaatttcacagtga

SEQ ID NO: 346174 - DNA, 510 bp, Homo sapiens
ggtgcagcaaaaacaaagggagagtagcaaaaaacagcatgacaggcatggtgggtacctgtcaggtaatgaaagcaggcaactggatgctacttgaggctacagcccatggcgggggatttgttggtggcaaagtaggaaggtaccagtttacacaggtcattgtgttacatgctaaggagttaaagttttatcctataagaaggaatagcaaatataaaactctctaacacctgatagggacaggatcacaggtacatttttcaactgttactctcattcctttgtggawaacgtatctgatgggaacaagtccagttcagttaaatttgcctttttctttactttttttttttttttttttggaaacagggtcttgctgtgctgcccagcctggagtgtggtggtgcgatcatggctcactgaagcctccacttacaactcctggactcaagtgatcctcccacctgagcctcctgagtagctaggactataggcacttggcaccac

SEQ ID NO: 346175 - DNA, 459 bp, Homo sapiens
cacacctggcaaattttttttatcataggatctcgctacattgrccaggctggtctcaaacttctggccccaagtgattttcccacctctgcctcccaaagtgctgagactacagtctggcccttcatgatctctagatattaccaaaagtcccagagaaatgagtgcatggatggcttaatgacaacccactttcttctctggaagaaagaacttagtacagccctaccagaaggtgggatggcaatgccatcttcagacttgagtgttggggaggccttttctgctaaccaacagcaaatgttttacaagagaaacaggacacacagtagatgaaggcagccatggaaaatctgtatgaattatccactctgttgatctgtgcttaaaatatagaagggaaagtgaagaataaaaatgtgtccatgagcatcccacctggcttgcatccagattgaa

SEQ ID NO: 346176 - DNA, 580 bp, Homo sapiens
tacctctttgatatgctagaggtatgttctcaaaaatcagagatagtttaattatcttagacagcaaccttttgattaaaaaaagactctcgaaataaagagatccaagcttatagcataagtaagaatgtaaggaaagtcaagctactgactggagcttcttagaaatgtaaatttaaacccatcacccatcatgttaacttgtttgtacatattccatattcaaaggcatgtgggccaaaaaaaaaaaaaaaacaaactctacttgtcctgacttgataamtaggcataagaaaatcctgtataattaacatgaagaacgagataatgaagagaattcattacctagattaattgataacacccacagaaaaatggctgttcatgaagctggaggcatcaaaattccaacagtagagtcacaattaaattatgccacactaattgtaaagcatatatatatgtgctgcatagaatcctattatttctgtctgttaaattacctacaccaaacatatgagaagagaatatcttacatttgtatagcatttaaatgtttagaaagtgccatcacacaaat

SEQ ID NO: 346177 - DNA, 558 bp, Homo sapiens
gattctcttgcctcagcctcccgagtacctgggactaaagatacctgccaccacacccggctaatttttgtacttttagtagagacagggttttgccacgttggccaggctggtctcgaactcctgacctccrgtgatccacctgcctcagcctcctaaagtgctgagattacaagtgtgagccaccacgcccagccaaaatagatactttaagcaagctttatgattgcaatatatgagagtattcattcctcccccctttctctttgtgaaaagtatatataattgcacatttaatattttggtaggggaaatctatgattccaggacataaaagcaaatcaaggacaggcagtttccttcctctggaatttatcttcatctctacattttagcagcctctccctatgaaagtgctattgtaatttgttcatgtattcattcagccaattttgatggaggacttgtagatatgttgatgtgatagcaaccaagacacacagtgtgtctaccttaattgtcataggaggatggacaaataaagaggtttactcccaa

SEQ ID NO: 346178 - DNA, 558 bp, Homo sapiens
gattctcttgcctcagcctcccgagtacctgggactaaagatacctgccaccacacccggctaatttttgtacttttagtagagacagggttttgccacgttggccaggctggtctcgaactcctgacctccggtgatccacctgcctcagcctcctaaagtkctgagattacaagtgtgagccaccacgcccagccaaaatagatactttaagcaagctttatgattgcaatatatgagagtattcattcctcccccctttctctttgtgaaaagtatatataattgcacatttaatattttggtaggggaaatctatgattccaggacataaaagcaaatcaaggacaggcagtttccttcctctggaatttatcttcatctctacattttagcagcctctccctatgaaagtgctattgtaatttgttcatgtattcattcagccaattttgatggaggacttgtagatatgttgatgtgatagcaaccaagacacacagtgtgtctaccttaattgtcataggaggatggacaaataaagaggtttactcccaa

SEQ ID NO: 346179 - DNA, 336 bp, Homo sapiens
ggtacaatgatagcaagaggcctcccaaatatattcataacaatatacaactaaagatttctgttttatatgggtcagtggagaatcatcaccgctgaatcaatgtatctaacttctcaaatgtctacatttaaaaagaatacattcccgctaagattcctatcagcttttgctgattacgtttcataraaggaaattcttataaggtgagcttttaaaaggaccaattttctccttctcttgactatataagacgttcaggaattaatgggaaaaaagcaatgcctgtctggtttgtaagcatcacagtcttatttctgcataaattctcacaag

SEQ ID NO: 346180 - DNA, 606 bp, Homo sapiens
taacaagatttttcccatagatgatgatcataccacatgttcatgtatatgttagtgtgagggattttatgtctttaggggcaggttttaggcattgaaaagatcttccagaggtttaaatgtgaataattaagttacaaattttaaagccaactttctgaatttgtagatctcattctatttataaatctattcaattttgaaaaatcacctttaaggggattgattcatgttttcaaacaatgaaactcctttaaatacgcaaactgcctgtacaaatttaatatatttcgttatagttttgttttcaattttatgctagtccrctccatttaagaaattctcacaaaaaagtttaaaaatcgtcaagaaattcttaagttctcttaaatgtgctgatactgcctgcatactcagtaagatttcaacttaaaattgcaaattttttatcacgtgcttagtcacacatgttagactgaacatgtatgcttagtcatacatgttagattgtatgaaaacaggacactgacctgttaatccaaatatttcttacatgtggaaaatgcataaaatatcaaatgcacaaaaatattgaacaatggagtg

SEQ ID NO: 346181 - DNA, 606 bp, Homo sapiens
taacaagatttttcccatagatgatgatcataccacatgttcatgtatatgttagtgtgagggattttatgtctttaggggcaggttttaggcattgaaaagatcttccagaggtttaaatgtgaataattaagttacaaattttaaagccaactttctgaatttgtagatctcattctatttataaatctattcaattttgaaaaatcacctttaaggggattgattcatgttttcaaacaatgaaactcctttaaatacgcaaactgcctgtacaaatttaatatatttcgttatagttttgttttcaattttatgctagtccgctccatttaagaaattctcacaaaaaagtttaaaaatcgtcaagaaattcttaagttctcttaaatgtgctgatactgcctgcatactcagtaagatttcaacttaaaattgcaaattttttatcacgtgcttagtcacacatgttagactgaacatgtatgcttagtcatacatgttagattgtatgaaaacaggacactgacctgttaatccaaatatttcttacatgtggaaaatgcataaaatatcaaawgcacaaaaatattgaacaatggagtg

SEQ ID NO: 346182 - DNA, 575 bp, Homo sapiens
cactgaccttgtcagattattccagtcctcattcctacttctcccattcctaggctttgtcctcaagaagtgtttgaaaatatctgttgcttaaatgaagttgaggctgaggtttgaggtgatgtggacatgctgtggacatggaaaggaaggaagagaagaatttgaggattaggagcagaagatgctgctagaaaaagaagagacmatcaaaaaagtcggacaaaagaagagaggtgaagccactgtcttcatgtacatgaactagatgtatataaaggtctttgctcaacatttttctatctacacagaagcaaaaggagaaaacacaggcaaaaattccagcaagtatgcttagctataaagaataatttcttcactgtaaagatgtaaaaatagagaacagtctgtgaaacactagcccctgtgaatctattaaaagctcctgcagacattgcgactgaattaggtcagctgaaaaatgcagtttagaaagggagttggaactgttaagagaatgtttttcagtctttcttcttccagacagcacttaataccctactggatcaagaccc

SEQ ID NO: 346183 - DNA, 440 bp, Homo sapiens
ccttccatgagacacaaaatgtttatatggaagaagaagctatgaatcgttttatggctkaatcatgctcctgatcccagtgaagaccccttggtagttttggtctgatttatatcaggccctgtgcttttatagatctgttctggtcccatttacctgcctgaaaagccactcctgggccttctaatggatacttgtaattaatgtggaatgctctgatacttgtattgagacaagtccatttgggagcttcaaatagctaggacaacagtgaaacctctaagtttcctggtctttgaagcagaaaagactgactcaatgttttcttagatgacagggcacttagtagagttatcctcagttcatcccttttagcgaaactcactcattaaacacaaaacagatatcatcctctcaaccttcttgtaagaagtagtaag

SEQ ID NO: 346184 - DNA, 440 bp, Homo sapiens
ccttccatgagacacaaaatgtttatatggaagaagaagctatgaatcgttttatggctgaatcatgctcctgatcccagtgaagaccccttggtagttttggtctgatttatatcaggccctgtgcttttatagatctgttctggycccatttacctgcctgaaaagccactcctgggccttctaatggatacttgtaattaatgtggaatgctctgatacttgtattgagacaagtccatttgggagcttcaaatagctaggacaacagtgaaacctctaagtttcctggtctttgaagcagaaaagactgactcaatgttttcttagatgacagggcacttagtagagttatcctcagttcatcccttttagcgaaactcactcattaaacacaaaacagatatcatcctctcaaccttcttgtaagaagtagtaag

SEQ ID NO: 346185 - DNA, 543 bp, Homo sapiens
cggtaacatgtcctacagtttcaagagatagtaagatatgcttggtcatagaaagaaatttgtaattaagtagttgggaaaacactgagtgaaacagagttaaataggtttttctactgcaggacatccaagctgttctaatatcttaacatgcattgcagatcttcaaggaatatacgcatttttgatacgtrttttataagaggactctttggcttatggaaacttgcatgtgatcagtgttccttagaattttctaagaaacaacgcccttttcattcaggactatattaaatgagggagacaagatgtttccctaaatgtcaggcaagtttaaatactttccttctcaaatattctagaactcctcatactatataataatgatctaatgtcccctttttttgcatttcaaatcctagataatctggccccagcctttttttccctttgtaacccattacttagtttacctggcttctcacactgtggccaaacttatttcttgttgctctatgaatactgttgttatctcttacctct

SEQ ID NO: 346186 - DNA, 545 bp, Homo sapiens
cagggaggcagttgagcttacaaaaggactattgtaccccctctttctccaaccacattcttgctgagggtgctgtcttcatggtcttgcctcactcagactttaaatctccctcccagagccctcatgttgcttaggatatttggctcagacttttgtttgctgtggattcatcattgatgactrtcttacctctaggatctgcaactggggaagacaatgtttacctctccattcagtttctttgcctagcttcagctctgagaatcctagcctggtttagagagctgagccttcccattttatcagaataaacctgcagttacttgcactgttccaggaagcaaaagaatagagaattaagagtaaataatgagctctggagtcaagctgcctgggttcatatcctggtttcaacactaaagagctgtaagtttggtcaaatagcctttgcgatttcagtttacttagctataaagtaaaatgagagtagtgcctattgcacaacatttttgtgagaattaaaggaaataacatgggtaaag

SEQ ID NO: 346187 - DNA, 545 bp, Homo sapiens
cagggaggcagttgagcttacaaaaggactattgtaccccctctttctccaaccacattcttgctgagggtgctgtcttcatggtcttgcctcactcagactttaaatctccctcccagagccctcatgttgcttaggatatttggctcagacttttgtttgctgtggattcatcattgatgactgtcttacctctaggatctgcaactggggaagacaatgtttacctctccattcagtttctttgcctagcttcagctctgagaatcytagcctggtttagagagctgagccttcccattttatcagaataaacctgcagttacttgcactgttccaggaagcaaaagaatagagaattaagagtaaataatgagctctggagtcaagctgcctgggttcatatcctggtttcaacactaaagagctgtaagtttggtcaaatagcctttgcgatttcagtttacttagctataaagtaaaatgagagtagtgcctattgcacaacatttttgtgagaattaaaggaaataacatgggtaaag

SEQ ID NO: 346188 - DNA, 589 bp, Homo sapiens
atatgaaaagcacaatgtgatcacacataccccattccctttgtcacagattctgcccacactaaaggggagaggatcacacgaaggcatgaataccaggaggtgggcatcatggggtcatcttcgtgtctatctgccaccagagggatgatttaaaaagaaacaagctcatgggttgttgtgaggatgaaatgagtcaacgtttgcaaagcatttaatatggtgcctgatgcatagtaggtgctyaataagggttttccatttataatcaggccaatgagtgtaggagaaagctgggttggaatgaatgaaggaaggaagctgctttcaggattcataactgagtagattcttcccaggttatctttatgcaaggctaatttccccagtggttttagattagcggctgcaggctctgctgtgggtggtgttgaatgtcaactgtgggtgggtattacgtgcattagtcatgtgtaactaatttaaagtacactgtgttttcaggcaagcgtctgtaattgccatttttgctaattgtgagagagacttgtttgccatcttccctcacaaccacacaaaaaagagtcag

SEQ ID NO: 346189 - DNA, 573 bp, Homo sapiens
gccaaaaggctagactaaaatgaatgtgatattcaccactccttattacctggaatgagcttccatattatccacacttgctcttgctcttcataattcacttggaaagaggctataactcctgtcaaatcattagaagaaaggctaaaataatcactgtaatagttagaatcatgattatcacaaagaacagatagtactgtgttttatacatacataattgcatacatataacaaacctgtgaagtatgtactgttatatccatgttaaagaggaagaaactgagactcaaagaggttaactaacctgtccagtcacagagttggttagaggatccaacaccagctgtctgactgcagaactcaggcacattaatggcttcccacgctgtctgccattggaacaggacctggtgccctgtattaggacagaggtgaacagctcccaaacgaggccctctctcttcttcytgcaacatcctcaaggtctgcgaagaggttccagagagcccctcagtcccagctgtcaactttttctctaaacaaccatgatttatttgtaaacacaaacta

SEQ ID NO: 346190 - DNA, 527 bp, Homo sapiens
tcgcctttaattccaaatcattttatttcctgcagccaaaacgagtctttgaactttgcagtctttaatcaggagattcattattccagaaacatgcctaggtttatgattaaaataagtcaggctgcacatttttcatttttcctgtaagaacccaggcagcaggcagtaaagaatctgtcaaaggtttgcttcttttaacaagtatggaagccagccacttcaagccctgaagctgttagaggaattmtaggcgtaatgagtttatgcattaaactttttttttaaagtacagaaggattctaggcaaactttggaatcctgctgttctaatggcttctctccctacttcagtagctttcaattttttaaatttgtgtccatgttaccttgtgactgaaggggacacatacacaaataactgaaagtagagtttcatgatctaacaccttcattcacttcatgggatatacttggtattttttatattcctttctcttgtaataggttcatttaaaaaatgaaac

SEQ ID NO: 346191 - DNA, 527 bp, Homo sapiens
tcgcctttaattccaaatcattttatttcctgcagccaaaacgagtctttgaactttgcagtctttaatcaggagattcattattccagaaacatgcctaggtttatgattaaaataagtcaggctgcacatttttcatttttcctgtaagaacccaggcagcaggcagtaaagaatctgtcaaaggtttgcttcttttaacaagtatggaagccagccacttcaagccctgaagctgttagaggaattctaggcgtaatgagtttatgcattaaactttttttttaaagtacagaaggattctaggcaaactttggaatcctgctgttctaatggcttctctccctacttcagtagctttcaattttttaaatttgtgtccatgttaccttgtgactgaaggggacacatrcacaaataactgaaagtagagtttcatgatctaacaccttcattcacttcatgggatatacttggtattttttatattcctttctcttgtaataggttcatttaaaaaatgaaac

SEQ ID NO: 346192 - DNA, 560 bp, Homo sapiens
caatcaatttggaaagtttattttgccaagattaaggacgtgcccctgacagcctcaagaggtcctgacaacatatgccgaaggtggctggggtayagcttggttgtatatttgggttacattttagggagacatgagacatcaatcaatatgtgtaagatatacattggttcagtccacaaaggcagaacaacttgaagtgggggtcttctaggcggtaagtagataagagacagaaggctgcattttttggggtctttggccagcctttcactaaatacacaatttacatgtgggaggggtagagaaataatcacttatgccctagtgtggctcagtgaatcagagtgaatctcagtgaatgatgtaaatttttatataaacaatagggtagaggaaacaatgtgacaggcatttgtctcaggtgagcagggggatgactttgagttctgtcccttgtcccgcacctgtgaagataagctaccaatttttacattgcgggggaaaatccaacagaacttttttacggtaaagatcttgtgggcaaattgtgaaggagt

SEQ ID NO: 346193 - DNA, 488 bp, Homo sapiens
gtttacataataaatcttctgtttggttttttttttccttcaaactttctgtgtctctcttataagcagcacatagtagaagtgaaaataaaaaaccctaaatctggccaggcgcagtgactcacacccgtaatcccagcactttgggaggccaaggcaggcagatcacttgaggccaggagttcaagaccagattggccaataatgtaaaaccccatctctactaaaaatacaaaattagccaggtgcggtggtgggcacctgtaatcccagctacttaggaggatgaggcaggagaatcacttgaacgtgggaggtggaggtttcagtgagctgagatcttgctactgcactccacactgggcaacacagcgagtctctgttttaaaacaaaacaaaacaaaamcccaaatctccagtcttacaagtttttttattggagtacttaaattacacatatttggtagaatactgatgtaatattattt

SEQ ID NO: 346194 - DNA, 488 bp, Homo sapiens
gtttacataataaatcttctgtttggttttttttttccttcaaactttctgtgtctctcttataagcagcacatagtagaagtgaaaataaaaaaccctaaatctggccaggcgcagtgactcacacccgtaatcccagcactttgggaggccaaggcaggcagatcacttgaggccaggagttcaagaccagattggccaataatgtaaaaccccatctctactaaaaatacaaaattagccaggtgcggtggtgggcacctgtaatcccagctacttaggaggatgaggcaggagaatcacttgaacgtgggaggtggaggtttcagtgagctgagatcttgctactgcactccacactgggcaacacagcgagtctctgttttaaaacaaaacaaaacaaaaccccaaatctccagtcttacaagyttttttattggagtacttaaattacacatatttggtagaatactgatgtaatattattt

SEQ ID NO: 346195 - DNA, 529 bp, Homo sapiens
caccactacattacagcctgggtgagagagaccctgtctcaaaaaaaaaaaattatttagggagaacatagacatagaacatagactctgagaaagctccacaatctgttgagactctgattatgccctctagccaggatgatacacagaaaaaagactctattttttgcaacactgtttctttcccccaaaatcattattagagcacagttgattatgagagctgctttattcattactctggggatatcaataaaccatataaatttgtaaaactcttgtctgcctcaggaaatataaagaacttgtgatcaatgttgagtgtaaacagattgggaaagaggccytgagcaatggtaatatttttacagagctgtaaactgtcagtaaatgtatgtgtgagtgtgtgtgatcatgcattagaatttttttctttccatttcttatctccatactgctaagggattcataacagcatcagtttttatttgcatttagtaaagttctgaaaaactccatcagctaaatt

SEQ ID NO: 346196 - DNA, 519 bp, Homo sapiens
ggtattattcatatgtagaatctaaacaaacaaacaaaaagacaaacacaaaaaccagagtagaatggcagttgccagaacagagatggggatctgggcatgtggttggtggaggaaaaagggttgatcaaagggggcaaaatttcagttataagtcatataataagttttgaagatctaatgtatagcatggttaccattgtcactttgggaggccaaggcaggcggatcacgaggtcaggagatcgagaccatcctggctaacatggtgaaaccccgtctctaccaaaaatacaaaaaattagccgggcgtggtggcaggcgcctgtagtcctagctactcgggaggctgaggcaggagaatggcgtsagcccgggaggcggagcttgcagtgagcagagatcgtgccactgcagtccagcctgggcgacagagcaagactccgtctcaaaaaaaaaaaaaaaaacaaaaaaaaaaactgcattgtattcctgaaatttgctaagagagtaggtctt

SEQ ID NO: 346197 - DNA, 597 bp, Homo sapiens
gattattctgcaaaactgactctcctcctctaattgttcctagttattatttcaggtcaactctaagtaggcttcttgcctgtacagtggattaacaatagtgaatacctacctcttttatagacttgtagcaattaaattaggtaacctgtgttaaacatgtaaacacagtgtctggtgcagagtgagtgtgcaaacaaatgttagtgtgtgtgccagtcctgggcctgtttgtccttagctgcatcctcaccctsctctttgctgctctgccacccactgaagtctgtgcttacagagttgcatgcctgcaggtctctgactgggcttggccaatggaaggcactgatggaggatccaaggacagagacaagtgagataaatcagggtctttttcctcttccttttctttatcaggcagtatttctgacagttttccttctcttttcatggttttggctccaatgattatgcccaccatgattttatattcttccaggtcacccagatgccctaggttcctatacctttttgtaaggggtagcagcttcttgaaattgctgatctgttagttgcctcattattccttggttggtg

SEQ ID NO: 346198 - DNA, 556 bp, Homo sapiens
gaccctgatacccacaacaggaacttgcaccttcccctagaaaatmattcagttacttcagagagcagattcccaggaggtgcctgtgacaagtgtctcctttatcaggtggtgtgcacatatggaagtgtgtgaggtttttgggcaggctggctggaaaagtcttccacagacttaacttcaatgaatctgcctgcttttgatcacttgtgccattcccaccttcatacctgagtattcagcgttggcagtgaactctgcaggaaccctcacttctactcagttttgtccttccacatgtttcttagaaattcaacaaatctctcacccatagcctctctcttcttttctttgccctgttacaaatttattctcttttgtttgttgccttcattctgcagacttcaggagagaggatgaaagttacataatcttaaacccaaagcttttacttcatctttcagagccccagatcctcttctgaacaatagggacaatcataccaaatgttacaacaggcacaagtaggtgccttctgcatattaggagcttaata

SEQ ID NO: 346199 - DNA, 556 bp, Homo sapiens
gaccctgatacccacaacaggaacttgcaccttcccctagaaaatcattcagttacttcagagagcagattcccaggaggtgcctgtgacaagtgtctcctttatcaggtggtgtgcacatatggaagtgtgtgaggtttttgggcaggctggctggaaaagtcttccacagacttaacttcaatgaatctgcctgcttttgatcacttstgccattcccaccttcatacctgagtattcagcgttggcagtgaactctgcaggaaccctcacttctactcagttttgtccttccacatgtttcttagaaattcaacaaatctctcacccatagcctctctcttcttttctttgccctgttacaaatttattctcttttgtttgttgccttcattctgcagacttcaggagagaggatgaaagttacataatcttaaacccaaagcttttacttcatctttcagagccccagatcctcttctgaacaatagggacaatcataccaaatgttacaacaggcacaagtaggtgccttctgcatattaggagcttaata

SEQ ID NO: 346200 - DNA, 580 bp, Homo sapiens
ggaaccctcacttctactcagttttgtccttccacatgtttcttagaaattcaacaaatctctcacccatagcctctctcttcttttctttgccctgttacaaatttattctcttttgtttgttgccttcattctgcagacttcaggagagaggatgaaagttacataatcttaaacccaaagcttttacttcatctttcagagccccagatcctcttctgaacaatagggacaatcataccaaatgttacaacaggcacaagtaggtgccttctgcatattaggagcttaataatgataactttccttattatttatgtgatacagtgagtgctttccgttactttagcaacaatgaaaacaayactcgaatgagttttcatcatttcatggtgaccgtgaggggtgctcacagatttcaccatttcatggtgaccgtaagggatgcagatttcaccatttcatggtaaccgtgaggtatgctcactgatgttctaggtattcaggttctcacttctgcacttctccatccaggctggaggttacaggggcctgcaggatgtgctttagctaatgcaat

SEQ ID NO: 346201 - DNA, 580 bp, Homo sapiens
ggaaccctcacttctactcagttttgtccttccacatgtttcttagaaattcaacaaatctctcacccatagcctctctcttcttttctttgccctgttacaaatttattctcttttgtttgttgccttcattctgcagacttcaggagagaggatgaaagttacataatcttaaacccaaagcttttacttcatctttcagagccccagatcctcttctgaacaatagggacaatcataccaaatgttacaacaggcacaagtaggtgccttctgcatattaggagcttaataatgataactttccttattatttatgtgatacagtgagtgctttccgttactttagcaacaatgaaaacaacactcgaatgagttttcatcatttcatggtgaccgtgaggggtgctcacagatttcaccatttcatggtgaccgtaagggatgcagatttcaccatttcatggtaaccgtgaggtatgctcactgatgttctaggtattcaggttctcacttctgcacttctccayccaggctggaggttacaggggcctgcaggatgtgctttagctaatgcaat

SEQ ID NO: 346202 - DNA, 584 bp, Homo sapiens
gattctcaccctcttgtctgtgctcagaattggtaattgctttgtgttaaaagcagcttcagaatcaactctgcccaactttcatgtttcctcttaactctagttcttattgacccagcagctctctgctgcctttaaatacatcagctctgcattttatgtgttttttactctgtattttaactctggcttttctagttattctcagttggaggccggtcagttttaagctacttcttctcaccaggaaattaatagttttgctttcccccttctcttttgttttgacataaatatgaacattctgcatgtcaactgcaaattgcttctattgttagtaatagtaatgtcttgggactgtttgaaagattggaatcttgggtccaatctttggatctttgaacttttccaattaaaataatggaatctttggattccatttccaacctttccagtgtttcttggttgtctttatacacacacaaaaaamacacacacacacacacacagagtatatgtggatcataatctatccatctgtatgtataatttttaaaatctgtaacagtattccacagtacaat

SEQ ID NO: 346203 - DNA, 559 bp, Homo sapiens
tatgtgaggtagtgttctgttaattgacttgtcttaattatttcataatatgtaagtatatgaaatgatcacattgtgcacttcaaatatatgcacttatgtttttgtccattatacctcaataaagctgaaagaaactaatgaataataaggacaaaaaaagagggtgagctctaggctcaggcaccaacaccaccacttactagttctgtaacttttgtcatattaacatcctcaaccccatgccttaattttctctctgtaaaattgatttaatgttttctacaacaaaagactgtcatgaagaataagaaaatgatgtggaaagtatcggagtttttcaaaaggtagaaatcctaaaaattaactccttaacacagtcttgacacccctccattatwtggccccacttccatcttcagtcccataaactgcaccctaggttccagcctacagagctacaaatagttactgaatatttaaggttgcttcagaactctaagtctcaattcatgctttcttcccttcatgtctttcctgaaccctatgcacacatttt

SEQ ID NO: 346204 - DNA, 561 bp, Homo sapiens
acatggcagaaatagcagcaacaatggaagaaaatgaggtctatcggaggtctcgttccattcttcagttttctcttcatgagacactgatagtactaactcctaaatcaaagtcaaatagggatccttgcacttataaaatagggttagtttggggagagaaccaaactctcagtaggaaggaatatgatgatgattctgtgaaatgaggcatataattggcataggttaaagaactatgatgactttgagtcaggacttgtgacatagaatatcagttatagagagatttggctctatttatatagtacttggggtaaggctatagattacagatgaaaatggaaaaccttcttaacattgtagtaatgaagatgtagttctctgtggcccgcattagcrtgtatgtgagacttataggttgactgtgaaaacgtagctttttaaaattaacataagataaaatttaacataagaatgaagagaaagtcctaggggttactgcaggacactccaatcccccacaattgtgtatgttcgtaattcctttgaatgctgcat

SEQ ID NO: 346205 - DNA, 565 bp, Homo sapiens
gcatgtaggatgatgaacagtagaaaggaaagcaagcttctcagtgaaactgtgaaaggcttaggctcagcttggaggtaaaaaggcaggggaggtgtgagaaggataggggtggggtttcattckcttggccagcatgttgctctgcaaatgcctggaaaactaaaatgtaagaccaaataatggccaggattacagtgattcacacctgtaatcccagcgctttgggaggccaaggcaggtgaatcacctgaggtcaggagttcgaaaccaccatggccaacatggccaaaccctgtctctactaaaaatacaaaaattagctgggtgtgatgggcgcctataatcccagctacttgggaggttgaggcatgagaatcacttgaacccatgaggcagaggttgcagtgagccgagattgccccattgcactccagcatgggtgacagagcaagattccatctcaaaaacaacaacaacaataaaattgtattaaatttatcttcagcaacaatggctgttaggcgatgtcaaaaaatactatcacacgaatttagttaaagat

SEQ ID NO: 346206 - DNA, 550 bp, Homo sapiens
ctttataaataggatctgcaacaagaagatcagactgagggacaagcattcctgaggaatacctgattttcctaaattcctttatctccatattggcacatccccatccaagtctagaagagcctactcctagggtcctttgtaagtgtgttgcatgtggagttcattggttttctttaatcccactacattttgtaccaaaaaatggatgtaatttattctggggaagttactggtgtgcwgtcactgctcaacaacaaaaacaacaacaacaacaacaaacaaacaaacaaaaatagctgctgcaagttagttatggggctttgctacccatgagtaataataaacatcatcaacttctgttttctgaaaaaattgtagacttctttggggtcctccagcaccaagtttctactagttgcccacgtgaagaagattaaagataaagttttacttttgggctttcacagggagagtataaattatgcctccaaaagaaaactgtgtgggggaaaatgtttacttggatctgaatcgtatatgagaacct

SEQ ID NO: 346207 - DNA, 550 bp, Homo sapiens
ctttataaataggatctgcaacaagaagatcagactgagggacaagcattcctgaggaatacctgattttcctaaattcctttatctccatattggcacatccccatccaagtctagaagagcctactcctagggtcctttgtaagtgtgttgcatgtggagttcattggttttctttaatcccactacattttgtaccaaaaaatggatgtaatttattctggggaagttactggtgtgctgtcactgctcaacaacraaaacaacaacaacaacaacaaacaaacaaacaaaaatagctgctgcaagttagttatggggctttgctacccatgagtaataataaacatcatcaacttctgttttctgaaaaaattgtagacttctttggggtcctccagcaccaagtttctactagttgcccacgtgaagaagattaaagataaagttttacttttgggctttcacagggagagtataaattatgcctccaaaagaaaactgtgtgggggaaaatgtttacttggatctgaatcgtatatgagaacct

SEQ ID NO: 346208 - DNA, 560 bp, Homo sapiens
tgttgtttattcatatgattgatgtgctttgtctcaattctgtcatattttacattatagttattatggtatatatgctatgtttcattttatggtatactttctttgcccttttgttaaaatttctttggatatttaagagggtttatagtttttaaggattttctttgtacttatgtcctttttattgcctgtcgtctgttgttttccaatttaatcttctgatttgtaagttttaatagtatgttttaactcctatttcttgcttatacaataagcaatgtgctattcaactatctttattccctctcccgtctcttcttttttagttgctgtgttcmtacttatcagaaaatataacatgtgtcatgcaacttctaacattattcttcctaccttatccccactgtttttcattttaaataaaccttattcagttaattctgatgcacagtaggtgtgaaagccaccattctagagattcttgttcaagtcaaaagtaaatgactgctcaggtctttgggtacatagtcttcaaataagataaagtaccttctacc

SEQ ID NO: 346209 - DNA, 555 bp, Homo sapiens
gaaacattgtcctattgagaactggaatttttatgttttccttgcaaatatttacctgttttagtttgtttttgtcyatttatttaattgttcttttgctagtgtaacaacagaaccactacagcagctcagctctatattccaaccagctcaagattattctagtattggggactaagaatagacagaaggtcttcctccctcagtgacctcttctcaaagcccaaggacagccagtcatggtggctcgcacctataatcccagcactttgagaggctgagggggatagattccttgaggtcaggagttcaagaccagcctgcacaatatagtgagatcccatctttacaacaaaaatttttttaattagccaagtgaagtagcatgcaccttatagttccagctacttgggagactaaggcaggaagaccacttcagcccaggagttcaaggctaatacaacaaggccctataaaaaaaaaagcccaaggacatcctgtataaggcatcaacatgcatctgtcatgcaacaattgaaggccttcttgattctt

SEQ ID NO: 346210 - DNA, 656 bp, Homo sapiens
ttttattctctaccttaacatattgtaatggagttccattgctctcatgatgacgagcaaattatttcacatggtctacaagcctctgtgactggcctatgcctgcctgtcttgtrgtactcccctctcctttctctccaccctggcaacaccatccttgtttttaagttattctctgccaggttcattttactctgtttttccttcattgcagttatcacaatactttcatatctatttcctgaatatttgattttgtctccactgaaaagactgtttcaaaaatcaggactagaaacaagaatattttatcccaaagcatcttgttcacacatagtaggtgttctacaatcacctactggatgaaaatctgcattacagatactaagatttgtaactcatcagttaaaaccatgggagtggaggggctaacctagaatgagaagagaagtgggtcaaagaaagaaccccagagagagctgacattacaactacccaagaaagaaggtgcaggctaggtattcatttcatctgaatatgaaatgtctcatacataagcttttatcctttccttcctgaggatagactcacttcacaacctaatgttaaatacgcaaccactttacctgttttcactgacaagcaattgccactga

SEQ ID NO: 346211 - DNA, 576 bp, Homo sapiens
tcttgttaagtttcttgttcagcggttcaaattcttcatgctgctactgatgccatactgctctaggcacatctcactatataagatctggattaaaacccttaggataaatcgctttttgccgcctacttctagtttaagtagacaagcatcaggaggtgttttgcagccctcattgactttggtctcgttaaaggattccttgtgatttgggggtatcaaaagtaaaaatgcttgaggatcacttgaggccaggagtttgagaccagctttggtaacatagcaagacccccatctytattttcttcctgaaagaatctgtagtatcagtctatagtgtcataagatgccaaaaatatatgagagtcacagtagctgaggaagtatctgaatggggaggggaaggagaagaatactgtaatgtgaaaaagagacctaatacatacaaacttcaggaaaatcatctcttaacctgagcataagcactcacaagtacctcctcccaggatgcatctgagcagcctaagcttaatcatgctttctaagttgcatgagcacaactaggaatctgccttc

SEQ ID NO: 346212 - DNA, 576 bp, Homo sapiens
tcttgttaagtttcttgttcagcggttcaaattcttcatgctgctactgatgccatactgctctaggcacatctcactatataagatctggattaaaacccttaggataaatcgctttttgccgcctacttctagtttaagtagacaagcatcaggaggtgttttgcagccctcattgactttggtctcgttaaaggattccttgtgatttgggggtatcaaaagtaaaaatgcttgaggatcacttgaggccaggagtttgagaccagctttggtaacatagcaagacccccatctttattttcttcctgaaagaatctgtagtatcagtctatagtgtcataagatgccaaaaatatatragagtcacagtagctgaggaagtatctgaatggggaggggaaggagaagaatactgtaatgtgaaaaagagacctaatacatacaaacttcaggaaaatcatctcttaacctgagcataagcactcacaagtacctcctcccaggatgcatctgagcagcctaagcttaatcatgctttctaagttgcatgagcacaactaggaatctgccttc

SEQ ID NO: 346213 - DNA, 573 bp, Homo sapiens
acatctccactgcaatgcttggtccagaaattactcttgggactggaagagcagatatcatattctaccccagcagctatacaagctaattgtatggaagagagattttaacactgagatgtgtctagaaatgccgaaagcataaatcgagacaaagggaattagagggaagtttcttttggatggatctaatagttacacattcatttggagtggagtctatctttcatgaataatgctttcctaatttgtgcttatgcagccacttagagggtataagactgaccaggcaatccaaattcatactttctaaactcacttcactcagctcctgaaaagcartatctacaatggattccctggcactttctgtatgagtacagattatttgtcttgaccacatttcctttggagaaatcagattcttttagcttaaattacctaagaacaattgaacttggcatgtttcttcctgagtggaaaaacgtttctcaagtgttctggagatatgatcccggttttcaaaaagcccaagatttgctgggtgtctctttttttttttttaattaactt

SEQ ID NO: 346214 - DNA, 501 bp, Homo sapiens
cttaacctacacctaaatgagaccagctattctttatgtccctatgcaaaagcctgtggaaggcttttccaagtgatggttggtcacagggcacttggatcagaataactggggagacttccatttctagttaggatggacaaaatcacaggagacaattgcttctatgctactaagaacaagccaaataggckgcaagctacaaaatcctagtttaagaagtcaattagagagttcaggacagaaatagacctaaataaactaaaatatagaaagtggtaagtctttcctaggagctgagaggcattcctgtttttcatacctggcagagtggtgagggtgggaggaatccatcatagatggggtaagaaaaaaccagtagaattcttaacaaatttttaatagcatgtttgggctgataagatacattctgtatcttacatacatacaatctgaggagcccaagacataatttgagcctgcacatacccaccatctctt

SEQ ID NO: 346215 - DNA, 520 bp, Homo sapiens
cttcaaaacagcatcagaattcaatttttttcagcattaatgaatattttacaaaaggaatgaagtgatcccaacagcactttgagaacactgcattcggttgtgttactcccatgaccacacctactctccaaaagtttaggcacatgcatgaattcacagatgcagaagttctcacgaatcttttgcrtcacttgcattcttgctcctctttcatcatgacaaacttgctcctaccccagggcctccgtgcctgctcttccccctgcctgagaccatcttcacctgtctccctccctcacttgtgttctgctcattatgatcacctcttttgctgcacccatcaggagaccttattaggttacacttaacgtgtcatctcataagacaactgtgcaccacgcaggactccaattcactaaaaaggacaggaacaaaattgagcctgctaaaaccatagtctcaagtgtccctctacagcattgggcatccttgcagcaactcatgtgctatcgtccac

SEQ ID NO: 346216 - DNA, 595 bp, Homo sapiens
gtgtaaatatgacaaatgagatctgttctgaacttccgtgggacttaatccctgtgctgattcagattttgttgttgttgttttttgttttttgttttgttttgttttgcttttgagacagagttgcccattctggagtgctctgttgcccaggctggagtgcagtggaatgatatcggatctctacaatctccatcttctgggttcaagagattctcatgcctcagcttcctgtgtagctgaaattacaggtgcatgccaccatgcccagctaatttttgtatttttagtagagacagggtttcattatgttggccaggctggtctagaactcctgacctcaggtgatcctcctgccttggcctcccaaggtgctgagattacaggtatgagccaccatgcccagacctgatttagatgttttgctcagggcttggatgtaaattcctcccatgtagacacatagctatatgcatccaagtagtcatggtaggcaggtgtaattgytttcaagctatttccttacagatcgtgttgataatcgagtggaatggacgtggagcaaggcatgttgcacaacgctgagatacgcaca

SEQ ID NO: 346217 - DNA, 599 bp, Homo sapiens
ttccaagtaggaattttgtttgtaaaataagttttgcacagctggtgtcaaacccctttccttgctcccaatattctaataattgcaatcagctttggtgatttctcagaggtgaattacagtaactcttcctccaagccttacaacaattttccctcattttttatcattattactcaaaaatgctgatgcttttaagaggcaactcctccatacagttaggattctccaccaactctgcattcttgtcttcatcctaaaggccatrtagaaggaagaaggtgatagaagaagaaaatttcacagtaaaagtcaaaattttacctaggtactaccttatatgtattcagctttgtgggtttttgtttgtttttttgcagttagcttttatgtcttacatacaagatttgtaaattaagaactagtttctacatccctgaggtttttggcacctgttttttccctccctatattaccactaccatcacgattcaattgctctggaaaagatatctgtcaatactgtcaaagaacaaaatttcaacacattgagttttgaagattgaattgacttttattagttatccatgcagtgggaa

SEQ ID NO: 346218 - DNA, 631 bp, Homo sapiens
tgtgtttagaagacacagcaatcactaagaagccggtattctccaacaacacttttctttcatctttggatatgggctgctacagaagggagacatgtaacctggggcaaggcaactctcttccgtcagcacaaatattgcagagggctgacagctgagggtatctgcacatagcactaccagcaggtagaggagtaagtcctccagtgctgatgagggatgcaggcagtacattacagcatccactctggtctctcctttatactgcctggatccactactttaagttctagaagcatctcctctaggrttccagctgtgaggttggaggatggtaaagattctcctaagggaaacataagaggaaatggtttgtaggacaagctgcagccttggcccttgcagccctggccactgcagctggtttcagggttacaactgatatccatgatctcattcctcttcaacaattgtattgactcccctttctcttgtctagcacctctgctgattgtggtggcttacccaaggcatatccagatcctcattcccaaggaatctcagtccctggtcccctgctgctgcatttaaccatttatcatcaataacaaacaagggagtatgaagaatg

SEQ ID NO: 346219 - DNA, 631 bp, Homo sapiens
tgtgtttagaagacacagcaatcactaagaagccggtattctccaacaacacttttctttcatctttggatatgggctgctacagaagggagacatgtaacctggggcaaggcaactctcttccgtcagcacaaatattgcagagggctgacagctgagggtatctgcacatagcactaccagcaggtagaggagtaagtcctccagtgctgatgagggatgcaggcagtacattacagcatccactctggtctctcctttatactgcctggatccactactttaagttctagaagcatctcctctaggattccagctgtgaggttggaggatggtaaagattctcctaagggaaacataagaggaaatggtttgtaggacaagctgcagccttggcccttgcagcyctggccactgcagctggtttcagggttacaactgatatccatgatctcattcctcttcaacaattgtattgactcccctttctcttgtctagcacctctgctgattgtggtggcttacccaaggcatatccagatcctcattcccaaggaatctcagtccctggtcccctgctgctgcatttaaccatttatcatcaataacaaacaagggagtatgaagaatg

SEQ ID NO: 346220 - DNA, 527 bp, Homo sapiens
ctgtcatttggggtccttggggtcctgctttttcattcaaactctctaagaaaattataaatgcacatattttcttcttgaaaataatgtatatttattttaaaacaaatgagccacctaaccagcaacaaaatctcatttttgtcacctaatttggaaatgaaattggggagaaggtacaaatacagacwctgccttctcagaagtgtcagtgcttgatgttagaaacagagagaaaccgttaggcattcttgcttttgcttttgttttattttacttgggagtatttttccttctttggttttcaaaggagaaaaattttgactttctgctttgcagggtggggagtgtcccgtctcattatattcactaaaggttttatcttttatgtagtcacatgtgctgtaattttctccttttcttaagtgtaggtaatgactcattagtttcacaacttctggttcgagtgatttttagttcttccagacataaaatctaaatcccagaatgtgagaacttctgctttg

SEQ ID NO: 346221 - DNA, 527 bp, Homo sapiens
ctgtcatttggggtccttggggtcctgctttttcattcaaactctctaagaaaattataaatgcacatattttcttcttgaaaataatgtatatttattttaaaacaaatgagccacctaaccagcaacaaaatctcatttttgtcacctaatttggaaatgaaattggggagaaggtacaaatacagactctgccttctcagaagtgtcagtgcttgatgttagaaacagagagaaacygttaggcattcttgcttttgcttttgttttattttacttgggagtatttttccttctttggttttcaaaggagaaaaattttgactttctgctttgcagggtggggagtgtcccgtctcattatattcactaaaggttttatcttttatgtagtcacatgtgctgtaattttctccttttcttaagtgtaggtaatgactcattagtttcacaacttctggttcgagtgatttttagttcttccagacataaaatctaaatcccagaatgtgagaacttctgctttg

SEQ ID NO: 346222 - DNA, 565 bp, Homo sapiens
ctggtttcttcatcacttgcccagtggttccatgacatttcacactcaaggtcacataaggaaaaatatttcctccaaagtcccctagactttgtctttaatgtactttgaggcaagcacttacatgagaaggaacaggagcagaawactctttgtccttttattctcatgcttttggcttctctgacttcaacctgcagagggcactgatcctcaaagaaccggaagacctaggcctggcattgcagaaggccagctgttcaccctgcagggaggggaaatcctgagcagttctctgcgaataatttatatgatggaatttaaccagagaccttatgagcatttataaatggagtcttttcccccatatattataaggaagctcccaaaccatggctcatgctgttcattccttccctttagagatgttttccccaccatcctatcattagcactatgcctctaatagactttctctggaaactaacccaatatttcctggttacgttcagtatctgagtaacatcagaaagctgagagaaatctgggacccaggagccagtcc

SEQ ID NO: 346223 - DNA, 528 bp, Homo sapiens
gaacaaatcagcatcatgaggatgaattcgaggaaccaactggtttcttcatcacttgcccagtggttccatgacatttcacactcaaggtcacataaggaaaaatatttcctccaaagtcccctagactttgtctttaatgtactttgaggcaagcacttacatgagaaggaacaggagcagaaaactctttgtccttttattctcatgcttttggcttctctgacttcaacctgcagagggcactgatcctcaaagaaccggaagacctaggcctggcattgcagaaggccagctgttcaccctgcagggaggggaaatcctgagcagttctctgcgaataatttatatgatggaatttaaccagagaccttatgagcatttataaatggagtcttttccyccatatattataaggaagctcccaaaccatggctcatgctgttcattccttccctttagagatgttttccccaccatcctatcattagcactatgcctctaatagactttctctggaaactaacc

SEQ ID NO: 346224 - DNA, 576 bp, Homo sapiens
acactgggagggttttccacgggcaattaaattctctaactcagaagtgaccgcagtaactctgccaacaactttttggctagaactggctccatggccccacttaacttcaggggactaggatatgcaatcctgtgtacctggaagacagcaagaaatatttggcaaacaacattaataagcacaaaggtgggattcagagaagttaaattattgatctaaagcagtgattcttaaagcatggtccccaggccagcagcagcagcattagggaacttagcaaaaatgcaaattcttcatttgtcttgacttaagaggatcagaaactccagggtgagatcttccaggtgattctgtgtcgcaataaagcttgagacccattcactgcacaccatgggtattttcacaaaggtgtctggtgactttgccctggtycttgatctactgaaagaaaaaaaaagacgacttcggtgggaatttcaggtgtaatagaagggggcaggcatataggattgctactagagaaacttttcatcatgactttccccaaaaatgtttctctgcctttgtcatctt

SEQ ID NO: 346225 - DNA, 552 bp, Homo sapiens
agcagacattcctccttctctcacttttgtgggtaggtagagtgagaaggctcatagagcagttttctgcaaagaagtctttctcataaaattctgttgactctcatacatatttstggggtatagaaccatctaactgatcctcagtcatttcctttgaacctctcactttcatatttcatgtgtgctgcaccttggtgccttgtggaagtctaactttgaatttctctcaggtatgcttatttaatctaccaccactaactagaagttcccccagctgtctttatttgcatagcatgaaggctttccatgtcaggaggctaagagacactccctaggcctctcaaaacagcaaggatgaatcaaaggctcgggttcctctgggcactatggtcacggctgaaactcaggtaggtgagccaaatgtgatggaagtatggaagagaagtgttgcttcacatagcgtcaactcctgctgctttgtatgtcatccaaaagtggcactggctgtacaagaaaataacttccacaaagtgcctatggtgtattatg

SEQ ID NO: 346226 - DNA, 556 bp, Homo sapiens
gtgtaactgacctcagaaagatttactagagatgtaggtaattttcaaggcttttattggctgtagaaatggtctgggagacaaatgtcctaaaaatccccaatttcccttaactggcttcacaatctttggcaagtcactttacctctctgagcccccatgccctcatctctgcactaggtctgccttgacacttttgtttgcagggtttaggaccagatggaagtgccttgtaaactgaaaaataccacattatatatyatatcacattattatactttctgataaatggttacaaagctatctgaaatagaagtttacattttatttctgattaactttcaatattaagtgatagaacctaagaagcaaaagcgaacataaaattcaactggaaaatttgaaagagaaatggttttttctctaggaaatttgcactaataactttttcccaccatcccccgaccagtaactttttgacaagaaaatgaacgtggcctattaatttatctaaagctatttcataaaattttcttccttcaatccagattattgg

SEQ ID NO: 346227 - DNA, 590 bp, Homo sapiens
cacccaggctgatgggggacaaaggaacaatggttgaagcttgagtctacctgacaattggggtttgtcaggtaagccccattctcttgataactttttcagtgggctagacccagacccaatcatgttaagtatgatagggatcagtggcccagctggtgtggaagacaagtgggtcatactgggtttaggcccacatagcactaaaggtcttcaacatgcaattagaagctcaaatgttgacgggaatattgttcactctaaaaaagatgtttctattagaatttacttactctttcatgaaaacatagatgcttcctctttcctgattgtgagaacagtgtacctgactagcttccccttttctttaactgttaggaagttctgtcctagagataagtttcaaatttatgaaacaataatttcagggattattatttgcatcacttttcttaattgactctttatagtttccttttttatagtttatatagaggttttatartgattttaaaatttttattctcacactattttattttatgcattaacattgtaagccagctcaagtcatttgtaaaacgtggagt

SEQ ID NO: 346228 - DNA, 577 bp, Homo sapiens
tagcctgtaaaaataaaatgcaaactcaatttgaacaacttataaatttaaattgctaaagtgtttcctaaccccaaattacaattatcttcaaagtattaaagagcattaaaagcacttatcctgaaagagctattttaatgtttgactaacagcagagaatgttctcacacaacctaaccctcagtaagcactccacaaatgctaactaagagaaaactcatactcttggttattgaaaatctcaggcaagccagatagctttatctcctttctcatggcagttatcttgtagagcaaaactgatccacagttgctacttgagatttgtaagttgcccttgtaagactggaaatgctaagagtccattcactgattcagagaaacatttattccattctggcactgtgaaaagtgctgaaacaaaaatgaacaatggtggtaataaaggacaatggcatccaagttcaagaatrtacagagtgccatgaggtttaaaggagggaatggctgtacctggaggtaggggtggggtattattcaagaaaagcctcctagtggttagagatgaaataac

SEQ ID NO: 346229 - DNA, 341 bp, Homo sapiens
ctggtgtggccttattggttaatttatagctactgtggcaacagcaagcagcctagatgaacacacagctcaaagaggagaaggacagaactgctgtstcatttgaatatctctctgggcctgattatttcaaaggacttgcatttctcacatgaaagttattttcttttctcaatgtccataaatgagaataaatagacgtaaaatagatcttttcgaggatgaagtaaatggaatgaaaaacaaaacccaagctgaccagaaatcatagagggaagaaaaggttataaatatatggatttttcaaagtgattttaagctattaggaatcagttaaatgt

SEQ ID NO: 346230 - DNA, 453 bp, Homo sapiens
ggatgatcagacatcacctgcagaatggtgaagaatgaagaacctgatcagatattgagaatgaggggttctttggtaaacttggcagtgttctttgctaatgctggattttgcgaggaagtgcacagtttagcctagctgaagatttasaagcctgactaaagttggccaagcaaagaatctttgttatcaacatattccatcaaacctcacatccctgccttaaatgatcaaaccatccacactcctgtatgctactgttctccatgaaaagttacttcttctttgccttaaccaaaatccagccattctagaaagacaccagaaggctttctgcagcatctaaaattccccacattctaggcccaaatccttttcctttccctgttgcttttagatccacattgtgtaaccctcatctggaaacctcagtttcttggagtcatttttttt

SEQ ID NO: 346231 - DNA, 453 bp, Homo sapiens
ggatgatcagacatcacctgcagaatggtgaagaatgaagaacctgatcagatattgagaatgaggggttctttggtaaacttggcagtgttctttgctaatgctggattttgcgaggaagtgcacagtttagcctagctgaagatttacaagcctgactaaagttggccaagcaaagaatctttgttatcaacatattccatcaaacctcacatccctgccttaaatgatcaaaccatccrcactcctgtatgctactgttctccatgaaaagttacttcttctttgccttaaccaaaatccagccattctagaaagacaccagaaggctttctgcagcatctaaaattccccacattctaggcccaaatccttttcctttccctgttgcttttagatccacattgtgtaaccctcatctggaaacctcagtttcttggagtcatttttttt

SEQ ID NO: 346232 - DNA, 453 bp, Homo sapiens
ggatgatcagacatcacctgcagaatggtgaagaatgaagaacctgatcagatattgagaatgaggggttctttggtaaacttggcagtgttctttgctaatgctggattttgcgaggaagtgcacagtttagcctagctgaagatttacaagcctgactaaagttggccaagcaaagaatctttgttatcaacatattccatcaaacctcacatccctgccttaaatgatcaaaccatccacactcctgtatgctactgttctccatgaaaagttacttcttctttgccttaaccaaaatccagccattctagaaagacaccagaaggctttctgcagcatctaaaattccccacattctaggcccaaatccttttcctttccctgttgcttttagatccacattgtgtaaccctcatctrgaaacctcagtttcttggagtcatttttttt

SEQ ID NO: 346233 - DNA, 592 bp, Homo sapiens
ataatctctcaactatttgaaacacggctcacatgtattaattttttaagcaaatatatatataatatcagtgtatatgaaactgaattttggactttagaacagcttcttagaatcctgacttaaatgtctacagtaatagttggcttaaaaaaatttagcacactgtcactatgatgaaaaaaattactataaaatatttaaaaattttttccaccctaacatttagaatattctcacatttgtgrttaaaacctattgtgattgttcttagaatttagataaaaaatgtcccagaaagattgaagagaagcactttagtcaatttttagttgttgaagcatgaagaaatggcatttcattgacattttaaaaattattcagattccctctttgaattcaagaatttcaaagatatcttattttaaaataccaaaataggaatagaatatgaagggctggttatgagtaatatgatacaattttatgagatgatgagattacaataacaatacctcctctcatagaatagccagcaagtctccactaaataacagtgccttgattttatagatgtttcatcatggatatt

SEQ ID NO: 346234 - DNA, 592 bp, Homo sapiens
ataatctctcaactatttgaaacacggctcacatgtattaattttttaagcaaatatatatataatatcagtgtatatgaaactgaattttggactttagaacagcttcttagaatcctgacttaaatgtctacagtaatagttggcttaaaaaaatttagcacactgtcactatgatgaaaaaaattactataaaatatttaaaaattttttccaccctaacatttagaatattctcacatttgtggttaaaacctattgtgattgttcttagaatttagataaaaaatgtcccagaaagattgaagagaagcactttagtcaatttttagttgttgaagcatgaagaaatggcatttcattgacattttaaaaattattcagattccctctttgaattcaagaatttcaaagatatcttattttaaaataccaaaataggaatagaatatgaagggctgkttatgagtaatatgatacaattttatgagatgatgagattacaataacaatacctcctctcatagaatagccagcaagtctccactaaataacagtgccttgattttatagatgtttcatcatggatatt

SEQ ID NO: 346235 - DNA, 592 bp, Homo sapiens
ataatctctcaactatttgaaacacggctcacatgtattaattttttaagcaaatatatatataatatcagtgtatatgaaactgaattttggactttagaacagcttcttagaatcctgacttaaatgtctacagtaatagttggcttaaaaaaatttagcacactgtcactatgatgaaaaaaattactataaaatatttaaaaattttttccaccctaacatttagaatattctcacatttgtggttaaaacctattgtgattgttcttagaatttagataaaaaatgtcccagaaagattgaagagaagcactttagtcaatttttagttgttgaagcatgaagaaatggcatttcattgacattttaaaaattattcagattccctctttgaattcaagaatttcaaagatatcttattttaaaataccaaaataggaatagaatatgaagggctggttatgagtaatatgatacaattttatgagatgatgagaktacaataacaatacctcctctcatagaatagccagcaagtctccactaaataacagtgccttgattttatagatgtttcatcatggatatt

SEQ ID NO: 346236 - DNA, 571 bp, Homo sapiens
tttgaatatgcaagagtttgaggaattcactactcacactttcttgaacagtctatccaagtgcatcaagcaaaatgtgagtaaagaaattttgagcaaaggattgatagtaatgttgaatacatttaatagtagatcaaagattaaaaggtgaaagtgagggtgagaagagtgtatgaatgctttgtgttctgacaaagagaatgtagcacccaggtcctacctgcttggatgcattgccagtgcccacggtaggccattttatccaggtttttaggtattgtcttattttgtttgktttttttcttttcaggagtgttagtccaagaccaataactccgtaactggtagatttggaagactttaatagtgcttaacattttgtacatagctttataacagttttctttttctttttttctgagagattcttttcaatataccccatcatggttgaactcaaaaatcattgcttatttaaaatctacaactgctgacgttttgtaacgttcgcattccaggtaattgcttttttgtgcattttctgtatttttctccatcagtctaccta

SEQ ID NO: 346237 - DNA, 254 bp, Homo sapiens
ttgcagttgtcaaatagcccaggtgatgttacagatttactccttataaaaggaggcattacacattacacatgcatcttagtggcctcacaaaagtgtttggtttatttgtaktgactattcacctttaaaatatttcaatattcaataaaatggcttccaaccaatattattacacttatgtttctaactttcgtttttgtattgatatctgccttcattgctgtttgtttaggacatatattctgtgtcac

SEQ ID NO: 346238 - DNA, 254 bp, Homo sapiens
ttgcagttgtcaaatagcccaggtgatgttacagatttactccttataaaaggaggcattacacattacacatgcatcttagtggcctcacaaaagtgtttggtttatttgtagtgactattcacctttaaaatatttcaatattcawtaaaatggcttccaaccaatattattacacttatgtttctaactttcgtttttgtattgatatctgccttcattgctgtttgtttaggacatatattctgtgtcac

SEQ ID NO: 346239 - DNA, 254 bp, Homo sapiens
ttgcagttgtcaaatagcccaggtgatgttacagatttactccttataaaaggaggcattacacattacacatgcatcttagtggcctcacaaaagtgtttggtttatttgtagtgactattcacctttaaaatatttcaatattcaataaaatggcttccaaccaatattattacacttatgtttctaactttcrtttttgtattgatatctgccttcattgctgtttgtttaggacatatattctgtgtcac

SEQ ID NO: 346240 - DNA, 490 bp, Homo sapiens
aacatggtgaaaccccgtctctactaaaaatacaaaaattagccaggcagggtggcacgyggctgtaatccccgctactcaggaggctgaggcaggagaattgcttgaacctgggaggcagaggttgcagtgagcggagatgacgccaccatactccagcctgggagaaagggtgaatgagactccttctcaaaaaaaaaaaaaaaaaagagttgcaaagtcatacctttctgctcttgtcagacaattaaggggtctttgaatacttcagccctaataatttgcttcctaacatacatattgcagtgcttatctaattttaaatattcttttgtttcaacacctaattttctattttgatctatctttatgtttacaatatattttgctctgtgttcattctttgatttcagaacttcaatctttctgaagcgtgttttcagagtttcctttgagtttctttagtggaattctgctggtggtgttttgt

SEQ ID NO: 346241 - DNA, 490 bp, Homo sapiens
aacatggtgaaaccccgtctctactaaaaatacaaaaattagccaggcagggtggcacgcggctgtaatccccgctactcaggaggctgaggcaggagaattgcttgaacctgggaggcagaggttgcagtgagcrgagatgacgccaccatactccagcctgggagaaagggtgaatgagactccttctcaaaaaaaaaaaaaaaaaagagttgcaaagtcatacctttctgctcttgtcagacaattaaggggtctttgaatacttcagccctaataatttgcttcctaacatacatattgcagtgcttatctaattttaaatattcttttgtttcaacacctaattttctattttgatctatctttatgtttacaatatattttgctctgtgttcattctttgatttcagaacttcaatctttctgaagcgtgttttcagagtttcctttgagtttctttagtggaattctgctggtggtgttttgt

SEQ ID NO: 346242 - DNA, 587 bp, Homo sapiens
tgtgttcattctttgatttcagaacttcaatctttctgaagcgtgttttcagagtttcctttgagtttctttagtggaattctgctggtggtgttttgttttttgtctctaaatatgtgatttagccataggttgatgaatatttttcttggttgagaatttcagaatggcattattattcttaacaaataatattgtttattttacctttcatgctttcagatttcaatatgattaaaggtaatttgatttttctagtgctaattgaaatatttttcccttcctgattgtttactatttctctaggagatatgtagatgtaggtttatctccatcgtagcttgcttagcatgcatagaagttttgaatatgtggattagtgtcttacaraactctagagaactttcagccaaaataccatcacatattgtcccttccccgttcccttcctctatgagaacactcactaaacacatgctacactttctcactgtatcttccatgtctcttcatgattctgtccacattgtgcctttttttaaattttctgtaatgcattctgaaatatttatgagctctcaccatgg

SEQ ID NO: 346243 - DNA, 525 bp, Homo sapiens
aggaatctgcactcattcattttgctacatgtccgtagggcaaaatcagtatcagtgtttaggtgtattttgtctgctccctgcattcccatggttttgaccttatcttttacttttttttgtgaacataccaatgcttcaatttttttccagtaatataatcaacyatactataagagaaaaatttcgataaaacacaaatttcatgttttcctactctaattggcttttacgtaaaaatacaggtaaaatttatttgtgcttttttgctatttctgttttgctattttctgtttgtctatgtcttcaccacatagacacaattagggaattttgtacactcttgtgccaactgctttgatagtaacaaaatgtatttctcgaactcctaggtataaaactcaagtatccactatttaaattcttttttgctcacttctagtatgtttccagtctcaatagaaatcgatgccaatccagaaatacaagcattattctaatacttctcacacattactggtatgg

SEQ ID NO: 346244 - DNA, 525 bp, Homo sapiens
aggaatctgcactcattcattttgctacatgtccgtagggcaaaatcagtatcagtgtttaggtgtattttgtctgctccctgcattcccatggttttgaccttatcttttacttttttttgtgaacataccaatgcttcaatttttttccagtaatataatcaaccatactataagagaaaaatttcgataaaacacaaatttcatgttttcctactctaattggcttttacgtaaaaatacaggtaaaatttatttgtgcttttttgctatttctgttttgctattttctgtttgtctatgtcttcaccacatagacacaattagggaatkttgtacactcttgtgccaactgctttgatagtaacaaaatgtatttctcgaactcctaggtataaaactcaagtatccactatttaaattcttttttgctcacttctagtatgtttccagtctcaatagaaatcgatgccaatccagaaatacaagcattattctaatacttctcacacattactggtatgg

SEQ ID NO: 346245 - DNA, 308 bp, Homo sapiens
gaatggttttcttcccagcagctacagctaaggaataggggctgggctatgaatacatctgctacaaaccaataaagcccttatgctccttttggtgatcgacaatgtatttaaaaatattagatgatcaagaagggctgcagaaaggaggaaacagaaacaaacagcacacctcttggtttrttttttttcatttcatcagtttcaaggaaaatatgttgggagttcctggcatagagaatgtcacaaagacatgttttcaatagtagtgctatcccgagggcagagaagacccagagaaagcccaa

SEQ ID NO: 346246 - DNA, 308 bp, Homo sapiens
gaatggttttcttcccagcagctacagctaaggaataggggctgggctatgaatacatctgctacaaaccaataaagcccttatgctccttttggtgatcgacaatgtatttaaaaatattagatgatcaagaagggctgcagaaaggaggaaacagaaacaaacagcacacctcttggtttgttttttttcatttcatcagtttcaaggaaaatatgttkggagttcctggcatagagaatgtcacaaagacatgttttcaatagtagtgctatcccgagggcagagaagacccagagaaagcccaa

SEQ ID NO: 346247 - DNA, 308 bp, Homo sapiens
gaatggttttcttcccagcagctacagctaaggaataggggctgggctatgaatacatctgctacaaaccaataaagcccttatgctccttttggtgatcgacaatgtatttaaaaatattagatgatcaagaagggctgcagaaaggaggaaacagaaacaaacagcacacctcttggtttgttttttttcatttcatcagtttcaaggaaaatatgttgggagttcctggcatagagaatgtcacaaagacatgttttcaatagtagtgctatcccgagsgcagagaagacccagagaaagcccaa

SEQ ID NO: 346248 - DNA, 213 bp, Homo sapiens
cgtgccacctgtccacactccttggctctgccatcatgctgaagatcgctttaaaggactggcttccctcccyccaaaattaaaagagcacagactgagaaactgaatgtgggagacagcagtggattatgctgttctcaggggtcacctcaggtttggaagcattctttcaaattaacccatctcaggccatctgcagagaagaaaggtggt

SEQ ID NO: 346249 - DNA, 592 bp, Homo sapiens
agacttcagcatcaagaatatcttgtctcttggcattgaatttatacaaggtgctctttctttaatgctgtctcaaaggacatatttttactcattaaaaaggaagatcrgaatctagttgtatgcactgctccaacatattaataattaaaattaggaggtaaatgtggtcaaagctatagaaagacggagatgtcatttatatggattactctatagcactctacaaacagaaattgttaaataatagtttatataaatattttgtagcatttcaaatatttgagtgcttgaagtttctcctcttctatagttcagattatcaatttgaagacttactccgctagttaatatgtttttagtctcgtttgagtattatataaaagcaattttcagttaaatgtgttccgcttacataaaacgttacaaattattgaggatttaattacttattcatgttcctgtaatgtctttagaagattttcttattattacctatcaatatatgtatgctttgtcaaagaaaaatcaaacatatatatcattgaaattgaaactttttaaaagtacttattaattctattgaaaaacc

SEQ ID NO: 346250 - DNA, 592 bp, Homo sapiens
agacttcagcatcaagaatatcttgtctcttggcattgaatttatacaaggtgctctttctttaatgctgtctcaaaggacatatttttactcattaaaaaggaagatcagaatctagttgtatgcactgctccaacatattaataattaaaattaggaggtaaatgtggtcaaagctatagaaagackgagatgtcatttatatggattactctatagcactctacaaacagaaattgttaaataatagtttatataaatattttgtagcatttcaaatatttgagtgcttgaagtttctcctcttctatagttcagattatcaatttgaagacttactccgctagttaatatgtttttagtctcgtttgagtattatataaaagcaattttcagttaaatgtgttccgcttacataaaacgttacaaattattgaggatttaattacttattcatgttcctgtaatgtctttagaagattttcttattattacctatcaatatatgtatgctttgtcaaagaaaaatcaaacatatatatcattgaaattgaaactttttaaaagtacttattaattctattgaaaaacc

SEQ ID NO: 346251 - DNA, 261 bp, Homo sapiens
ttaccaattgatgttaactaatatttataagagccagttggattgatatatattgttgaacctgaaaaatatttattatatacatgtttaaaatacacacagaaataaatagcaattgcactaggcatttgraactgtactaaaatataagctgtgaacattttgtgatcattacaaattcttacactgaataaatatttttatttttacaatattaatatgtttgatacctgtgtatatttttttacaatgtgttatttt

SEQ ID NO: 346252 - DNA, 483 bp, Homo sapiens
aagtttgactttgtgttctaggttttccctgccaatatatgcagcgtctttaaaactaattgggctgaggcaggagaactgcttgaacccaggaggaggaggttgcagtgagccgaaattgcaccattgaactccagcctgggtgatagagcaaggctccatctcaaaaaaaaaaaaaaaaaaacagcaaaaagaaactaattaggttcaagaagttcgaatgaattcaacttagacaagcwcttaagcagacatgttggaagttccagaaaagacagtttgggaaaatattttattaaaaaaaaaaaaaaagactgccctccacttcctcactctttcttcccacttattttcactccactggtgcagtttggtgtcaactctcctcactctactgaaactgctgcagccgaggttactagttatttaattaacaaaatcaatagattttgttttttttaattgcattatactctactattt

SEQ ID NO: 346253 - DNA, 483 bp, Homo sapiens
aagtttgactttgtgttctaggttttccctgccaatatatgcagcgtctttaaaactaattgggctgaggcaggagaactgcttgaacccaggaggaggaggttgcagtgagccgaaattgcaccattgaactccagcctgggtgatagagcaaggctccatctcaaaaaaaaaaaaaaaaaaacagcaaaaagaaactaattaggttcaagaagttcgaatgaattcaacttagacaagcacttaagcagacatgttggaagttccagaaaagacagtttgggaaaatattttattaaaaaaaaaaaaaaagactgycctccacttcctcactctttcttcccacttattttcactccactggtgcagtttggtgtcaactctcctcactctactgaaactgctgcagccgaggttactagttatttaattaacaaaatcaatagattttgttttttttaattgcattatactctactattt

SEQ ID NO: 346254 - DNA, 501 bp, Homo sapiens
tcattattcaacgtggatcagcaattatttttaagatgtactggccaggtgtggtggtcatgcctataatcctagtattttgggaggcccgagtgagaggatggcctgagctcaggagtttgagaccagcctgggcaacaaggcaaaatcacgtctttataaaaaatacaaaaattagctgggcatggcagcacacctatagacccagctattcgggaggctgaggtgggaggatcacttgagcctagcaggttgagaatgcagtgatccytgatcatgccactgtgctccagcctgggcaacagagtgagaccctgtctcaaaacaacaacagaaagatatgctgaccgcctgtgatgctggccaggatggcgtatgcatgctacggcctgtcatttccactgatcacaatttgaaactctggacaaaatataaatagcaatgacccaagtactctgaaaagtaaccagcagacaggttgggaaacgtcaaaacctgaag

SEQ ID NO: 346255 - DNA, 603 bp, Homo sapiens
tatcaaaatatgtgcttacagggcaatttatggcactaaattatgagaaatgaagcatcaaatcaataatgtaagcatttactttaagtaaaaaaagaaccaaataaactcaaatcaggcataagaaaaacagactaaatcagtaatatttaaacaaaaacagtaaaggaaaaaaattcaaygaaatccaaagttggttctttgcaagggcggtgggaggtggaagtcaatcaaatgaggaagcctctagcagactgacaaaggaagaagagaaaacacaaattgccaataccagaaatgaaaggaatattattacaaatcctgtagacactagaaggctagaatggacactacaaaaacaaaacaaacaactatatgcttctaaattctacaaattaggtgaaatagatcaattccttgaaagacagactaccgaaactcaagaagaaacagacagcttgaatacccctgtatttattaaagaaacagaagtggcacagcactttggaagacaatttggcaggttctgataaagtcaaacgtacatggaccatgtgactcggcaatcctacccttaggcatttgcacaagtgaaatgaaaac

SEQ ID NO: 346256 - DNA, 603 bp, Homo sapiens
tatcaaaatatgtgcttacagggcaatttatggcactaaattatgagaaatgaagcatcaaatcaataatgtaagcatttactttaagtaaaaaaagaaccaaataaactcaaatcaggcataagaaaaacagactaaatcagtaatatttaaacaaaaacagtaaaggaaaaaaattcaacgaaatccaaagttggttctttgcaagggyggtgggaggtggaagtcaatcaaatgaggaagcctctagcagactgacaaaggaagaagagaaaacacaaattgccaataccagaaatgaaaggaatattattacaaatcctgtagacactagaaggctagaatggacactacaaaaacaaaacaaacaactatatgcttctaaattctacaaattaggtgaaatagatcaattccttgaaagacagactaccgaaactcaagaagaaacagacagcttgaatacccctgtatttattaaagaaacagaagtggcacagcactttggaagacaatttggcaggttctgataaagtcaaacgtacatggaccatgtgactcggcaatcctacccttaggcatttgcacaagtgaaatgaaaac

SEQ ID NO: 346257 - DNA, 599 bp, Homo sapiens
aaaaaaattcaacgaaatccaaagttggttctttgcaagggcggtgggaggtggaagtcaatcaaatgaggaagcctctagcagactgacaaaggaagaagakaaaacacaaattgccaataccagaaatgaaaggaatattattacaaatcctgtagacactagaaggctagaatggacactacaaaaacaaaacaaacaactatatgcttctaaattctacaaattaggtgaaatagatcaattccttgaaagacagactaccgaaactcaagaagaaacagacagcttgaatacccctgtatttattaaagaaacagaagtggcacagcactttggaagacaatttggcaggttctgataaagtcaaacgtacatggaccatgtgactcggcaatcctacccttaggcatttgcacaagtgaaatgaaaacctatgctcagacaaaaagcactttgtgaattccaatccacttataatttatcaaaaagtgaaaatagtccatattcctccaatgacaaaccaataagcaaaccatgtagtatttatacaatggattactatttggcaattaaaaggaataactgttgatacagta

SEQ ID NO: 346258 - DNA, 599 bp, Homo sapiens
aaaaaaattcaacgaaatccaaagttggttctttgcaagggcggtgggaggtggaagtcaatcaaatgaggaagcctctagcagactgacaaaggaagaagagaaaacacaaattrccaataccagaaatgaaaggaatattattacaaatcctgtagacactagaaggctagaatggacactacaaaaacaaaacaaacaactatatgcttctaaattctacaaattaggtgaaatagatcaattccttgaaagacagactaccgaaactcaagaagaaacagacagcttgaatacccctgtatttattaaagaaacagaagtggcacagcactttggaagacaatttggcaggttctgataaagtcaaacgtacatggaccatgtgactcggcaatcctacccttaggcatttgcacaagtgaaatgaaaacctatgctcagacaaaaagcactttgtgaattccaatccacttataatttatcaaaaagtgaaaatagtccatattcctccaatgacaaaccaataagcaaaccatgtagtatttatacaatggattactatttggcaattaaaaggaataactgttgatacagta

SEQ ID NO: 346259 - DNA, 601 bp, Homo sapiens
tattacaaatcctgtagacactagaaggctagaatggacactacaaaaacaaaacaaacaactatatgcttctaaattctacaaattaggtgaaatagatcaattccttgaaagacagactaccgaaactcaagaagaaacagacagcttgaatacccctgtatttattaaagaaacagaagtggcacagcactttggaagacaatttggcaggttctgataaagtcaaacgtacatggaccatgwgactcggcaatcctacccttaggcatttgcacaagtgaaatgaaaacctatgctcagacaaaaagcactttgtgaattccaatccacttataatttatcaaaaagtgaaaatagtccatattcctccaatgacaaaccaataagcaaaccatgtagtatttatacaatggattactatttggcaattaaaaggaataactgttgatacagtatatgaaagtagccagactcaaaaggctacatcctgaacgattccatttgtataaaattctgaaaaaaaagcaatgccagaggaacacagatcagttattgccagaagtttacaatggaaggttttactataaagggtaaggta

SEQ ID NO: 346260 - DNA, 599 bp, Homo sapiens
aaaaaaattcaacgaaatccaaagttggttctttgcaagggcggtgggaggtggaagtcaatcaaatgaggaagcctctagcagactgacaaaggaagaagagaaaacacaaattgccaataccagaaatgaaaggaatattattacaaatcctgtagacactagaaggctagaatggacactacaaaaacaaaacaaacaactatatgcttctaaattctacaaattaggtgaaatagatcaattccttgaaagacagactaccgaaactcaagaagaaacagacagcttgaatacccctgtatttattaaagaaacagaagtggcacagcactttggaagacaatttggcaggttctgataaagtcaaacgtacatggaccatgtsactcggcaatcctacccttaggcatttgcacaagtgaaatgaaaacctatgctcagacaaaaagcactttgtgaattccaatccacttataatttatcaaaaagtgaaaatagtccatattcctccaatgacaaaccaataagcaaaccatgtagtatttatacaatggattactatttggcaattaaaaggaataactgttgatacagta

SEQ ID NO: 346261 - DNA, 459 bp, Homo sapiens
gacagcttgaatacccctgtatttattaaagaaacagaagtggcacagcactttggaagacaatttggcaggttctgataaagtcaaacgtacatggaccatgtgactcggcaatcctacccttaggcatttgcacaagtgaaatgaaaacctatgctcagacaaaaagcactttgtgaattccaatccacttataatttatcaaaaagtgaaaayagtccatattcctccaatgacaaaccaataagcaaaccatgtagtatttatacaatggattactatttggcaattaaaaggaataactgttgatacagtatatgaaagtagccagactcaaaaggctacatcctgaacgattccatttgtataaaattctgaaaaaaaagcaatgccagaggaacacagatcagttattgccagaagtttacaatggaaggttttactataaagggtaaggta

SEQ ID NO: 346262 - DNA, 459 bp, Homo sapiens
gacagcttgaatacccctgtatttattaaagaaacagaagtggcacagcactttggaagacaatttggcaggttctgataaagtcaaacgtacatggaccatgtgactcggcaatcctacccttaggcatttgcacaagtgaaatgaaaacctatgctcagacaaaaagcactttgtgaattccaatccacttataatttatcaaaaagtgaaaatagtccatattcctccartgacaaaccaataagcaaaccatgtagtatttatacaatggattactatttggcaattaaaaggaataactgttgatacagtatatgaaagtagccagactcaaaaggctacatcctgaacgattccatttgtataaaattctgaaaaaaaagcaatgccagaggaacacagatcagttattgccagaagtttacaatggaaggttttactataaagggtaaggta

SEQ ID NO: 346263 - DNA, 601 bp, Homo sapiens
tattacaaatcctgtagacactagaaggctagaatggacactacaaaaacaaaacaaacaactatatgcttctaaattctacaaattaggtgaaatagatcaattccttgaaagacagactaccgaaactcaagaagaaacagacagcttgaatacccctgtatttattaaagaaacagaagtggcacagcactttggaagacaatttggcaggttctgataaagtcaaacgtacatggaccatgtgactcggcaatcctacccttaggcatttgcacaagtgaaatgaaaacctatgctcagacaaaaagcactttgtgaattccaatccacttataatttatcaaaaagtgaaaatagtccatattcctccaatgacaaaccaataagcaaaccatgtagtatttatacaatggattactatttggcaattaaaaggaataactgttgatacagtatatgaaagtagccagactcaaaaggctacatcctgaacgattccatttgtataaaattctgaaaaaaaagcaatgcyagaggaacacagatcagttattgccagaagtttacaatggaaggttttactataaagggtaaggta

SEQ ID NO: 346264 - DNA, 448 bp, Homo sapiens
gaaattccaatcagttttgtgaaggctgctaagtcaactctaaaatggccaagaatagacaagatcaccggagaggaagcagggaggtggacacaaatatcttctgattgatgagtgaaatcattagaaggccagcaaaaatacaagtaagccagaatttctaaagcaccacaaaagaacactagttagtagtgcatawaggtatctcctaaatttgttgtaaacataggcctttaaaaaaatattagaaactgatatttaaagagatataaactcatattaagcttttaaaaaattctaagcaagggcctcacctaatttcataaaaggttgcgtagaaccaaccattgctgcaaacgatgtgctgccctgagatgtgaggatcccagtggtccctctgggtcaacagcagctaccgcaggtgagcccaaattctgatacattatct

SEQ ID NO: 346265 - DNA, 303 bp, Homo sapiens
tacaagtaagccagaatttctaaagcaccacaaaagaacactagttagtagtgcataaaggtatctccyaaatttgttgtaaacataggcctttaaaaaaatattagaaactgatatttaaagagatataaactcatattaagcttttaaaaaattctaagcaagggcctcacctaatttcataaaaggttgcgtagaaccaaccattgctgcaaacgatgtgctgccctgagatgtgaggatcccagtggtccctctgggtcaacagcagctaccgcaggtgagcccaaattctgatacatt

SEQ ID NO: 346266 - DNA, 303 bp, Homo sapiens
tacaagtaagccagaatttctaaagcaccacaaaagaacactagttagtagtgcataaaggtatctcctaaatttgttgtaaacataggcctttaaaaaaatattagaaactgatatttaaagagatataaactcatattaagcttttaaaaaattctaagcaagggcctcacctaatttcataaaaggttgcgtagaascaaccattgctgcaaacgatgtgctgccctgagatgtgaggatcccagtggtccctctgggtcaacagcagctaccgcaggtgagcccaaattctgatacatt

SEQ ID NO: 346267 - DNA, 482 bp, Homo sapiens
gatataaactcatattaagcttttaaaaaattctaagcaagggcctcacctaatttcataaaaggttgcgtagaaccaaccattgctgcaaacgatgtgctgccctgagatgtgaggatcccagtggtccctctgggtcaacagcagctaccgcaggtgagcccaaattctgatacattatctatctacaatcattatttttaacaatktatatcaatgctacccataaggcacagagaagcagaaatgtttatgtggcctcctgccaaaaacaatcacttgcacttatttctagtactccagaagacagtaatagaagtttttcaatttagaaaaacatttacagcaaagaaaaaaatctctgtaaacttcctgcttatccaatctagtgaattgtgatgagccatataaattcatttagccaccttatgaaagacttaatccaaagtcacttctaacttctagaagagctaatgtattat

SEQ ID NO: 346268 - DNA, 482 bp, Homo sapiens
gatataaactcatattaagcttttaaaaaattctaagcaagggcctcacctaatttcataaaaggttgcgtagaaccaaccattgctgcaaacgatgtgctgccctgagatgtgaggatcccagtggtccctctgggtcaacagcagctaccgcaggtgagcccaaattctgatacattatctatctacaatcattatttttaacaatgtatatcaatgctacccataaggcacagagaagcagaaatgtttatgtggcctcctgccaaaaacaatcacttgcacttatttctagtactccagaagacagtaatagaagtttttcaatttagaaaaacatttacagcaaagaaaaaaatctctgtaaacttcctgcttawccaatctagtgaattgtgatgagccatataaattcatttagccaccttatgaaagacttaatccaaagtcacttctaacttctagaagagctaatgtattat

SEQ ID NO: 346269 - DNA, 556 bp, Homo sapiens
catcctggttttgccacctgctcaccccactgcctgttcttctctccaaggaggcttctgccagccctgcttgtccttccctagaaaaggaaagccttttcctgtttgatcctgagacacctgtagattgagtttggaatattctccctattgcaatagtatttttgaataagttttatttttccctacctctggttgatttttaattaataccagtaagcttggatgaaagcctgcacaccttaggtgtgtgtgtgtgtgtgtatgtatgtactttagcattatcataaagtaataacagtaaaatcaaacaaacacagatggataagcaatatgttggactagtatgaaaatggcattgccagcagtgatatgatttttttttcaaaatggtacactttttgaagtataatcttattttaacctaaaatcttactrtcagaaaatgcagtgtacattaaaatgttctgaactgcttttattcatatattaaatggttgtactcaaatatctacaaatttgtttttcacttatgtaattgtcttatagaatgttc

SEQ ID NO: 346270 - DNA, 535 bp, Homo sapiens
tttgccccatggctatttacggtatgaaactgtatttaaatgagtgtacatatataaaagctgccattctggctgtaaactattgcaggttatcaagattaaaaaataaacaaataaaaatatttcagtttttctatgaaatstctttactcgagtccaaatgtagagatataaaatgcttgaaattcataaaaccaagtgtttcacatatttcagttgtgatggcctttgtcctacttttgttagtgaagcaggcagactgcattttttccctctcatacatcttcaaatggtagacagaaaaatttgataaaacttctagggcattatctgatgaaacacattaaacactaaaggagaaatacaacttcattgtttataaaagacgtataagaaggaaacctgcatacatatatctatcagttttgtattttcaagaaatatttgccttaaaatgaacttcattagaatatgtgttctcccacagagccaaggaaagtaagttagacacaggatctggaagtctacctgtgtg

SEQ ID NO: 346271 - DNA, 535 bp, Homo sapiens
tttgccccatggctatttacggtatgaaactgtatttaaatgagtgtacatatataaaagctgccattctggctgtaaactattgcaggttatcaagattaaaaaataaacaaataaaaatatttcagtttttctatgaaatgtctttactcragtccaaatgtagagatataaaatgcttgaaattcataaaaccaagtgtttcacatatttcagttgtgatggcctttgtcctacttttgttagtgaagcaggcagactgcattttttccctctcatacatcttcaaatggtagacagaaaaatttgataaaacttctagggcattatctgatgaaacacattaaacactaaaggagaaatacaacttcattgtttataaaagacgtataagaaggaaacctgcatacatatatctatcagttttgtattttcaagaaatatttgccttaaaatgaacttcattagaatatgtgttctcccacagagccaaggaaagtaagttagacacaggatctggaagtctacctgtgtg

SEQ ID NO: 346272 - DNA, 535 bp, Homo sapiens
tttgccccatggctatttacggtatgaaactgtatttaaatgagtgtacatatataaaagctgccattctggctgtaaactattgcaggttatcaagattaaaaaataaacaaataaaaatatttcagtttttctatgaaatgtctttactcgagtccaaatgtagagatataaaatgcttgaaattcataaaaccaagtgtttcacatatttcagttgtgatggcctttgtcctacttttgttagtgaagcaggcagactgcattttttccctctcatacaycttcaaatggtagacagaaaaatttgataaaacttctagggcattatctgatgaaacacattaaacactaaaggagaaatacaacttcattgtttataaaagacgtataagaaggaaacctgcatacatatatctatcagttttgtattttcaagaaatatttgccttaaaatgaacttcattagaatatgtgttctcccacagagccaaggaaagtaagttagacacaggatctggaagtctacctgtgtg

SEQ ID NO: 346273 - DNA, 535 bp, Homo sapiens
tttgccccatggctatttacggtatgaaactgtatttaaatgagtgtacatatataaaagctgccattctggctgtaaactattgcaggttatcaagattaaaaaataaacaaataaaaatatttcagtttttctatgaaatgtctttactcgagtccaaatgtagagatataaaatgcttgaaattcataaaaccaagtgtttcacatatttcagttgtgatggcctttgtcctacttttgttagtgaagcaggcagactgcattttttccctctcatacatcttcaaatggtagacagaaaaatttgataaaacttctagggcattatctgatgaaacacattaaacactaaargagaaatacaacttcattgtttataaaagacgtataagaaggaaacctgcatacatatatctatcagttttgtattttcaagaaatatttgccttaaaatgaacttcattagaatatgtgttctcccacagagccaaggaaagtaagttagacacaggatctggaagtctacctgtgtg

SEQ ID NO: 346274 - DNA, 565 bp, Homo sapiens
gtacaccttaattttatatatatatatatttaaattacataaaataaataagccactaaaaatttttaaacattttcttatatttcctttcagtatttttatgtgcatgcatctgtacttggtaatattgctgaatgcatgtttgcattgacaaagcctctccccttgcccaaactctagttgggatcctctaagccacctctcagcctcagctttcagtgttcatcctagtctgacccacatctctcaggtttaggaagaaacttgcaaagaatcccccactctcagtactgatcacctttgatatctgatcaaatttgttatctcccaccaccctccagatgatttctgatcagtctggcctgccttcagtaagaatcctgttcgatctgtttaacccaaatcccctttgcccctgatatttcctcttagtatccccagttgagccaattttcaaccattaaaaaaatcttggacaaaattaagttcagrtaggttccagagtgcttatgttcagttcttggctttctgaagacctggcatatcctctttaaattgcctcaat

SEQ ID NO: 346275 - DNA, 565 bp, Homo sapiens
gtacaccttaattttatatatatatatatttaaattacataaaataaataagccactaaaaatttttaaacattttcttatatttcctttcagtatttttatgtgcatgcatctgtacttggtaatattgctgaatgcatgtttgcattgacaaagcctctccccttgcccaaactctagttgggatcctctaagccacctctcagcctcagctttcagtgttcatcctagtctgacccacatctctcaggtttaggaagaaacttgcaaagaatcccccactctcagtactgatcacctttgatatctgatcaaatttgttatctcccaccaccctccagatgatttctgatcagtctggcctgccttcagtaagaatcctgttcgatctgtttaacccaaatcccctttgcccctgatatttcctcttagtatccccagttgagccaattttcaaccattaaaaaaatcttggacaaaattaagttcagataggttccagagtgcttatgttcagttcttggctttytgaagacctggcatatcctctttaaattgcctcaat

SEQ ID NO: 346276 - DNA, 575 bp, Homo sapiens
cccccactctcagtactgatcacctttgatatctgatcaaatttgttatctcccaccaccctccagatgatttctgatcagtctggcctgccttcagtaagaatcctgttcgatctgtttaacccaaatcccctttgcccctgatatttcctcttagtatccccagttgagccaattttcaaccattaaaaaaatcttggacaaaattaagttcagataggttccagagtgcttatgttcagttcttggctttctgaagacctggcatatcctctttaaattgcctcaatataagaaaatacaaaatggaaagaagtagacattagaaattggaaaaatggagaaatacaggaatraacataagtttctatttcaagtaattaggtaaattgtaagatgtttatatttaactttttctcattagctttagccccttgaatctttgagaacatgttattactatagttatcgaatgttatattttttattttaacgtagaatggtattttcactcaaatctcttgaaacatatatttatagtcaatagttaaattttatttaatatcaattgttcc

SEQ ID NO: 346277 - DNA, 535 bp, Homo sapiens
acaacacttccctactaatagtagggaagaagacataggtacagattcaagttgatttgaaattatgaaagtgaggtaattgacctgcagtggttgctgctcagtgaaatcagcatagtgattacctgagctaggttagagatttgatgggtaagaaagaacacctgagggtaatcctggagggggaaaaaaataaagtgtttgctggagagaatgagttgrattgctggacttcaatgtgtgtgggttgagtttgtgacttaaaaatgaaaccagtctattgcttgtgtggcttttccaaaatactgttattccgttacctatctcttaccccaagagtagtcacattcttatttctggttattttaattcctggtggtatttttatgtgattaatgagatagtacttgttaatttgatgatattctagaaacctggtaagtactatgtaccttgtcttaagttttggttacttgattggtaaaattatgcatgcaccattgaattacctaattcaaaatatatccttttattg

SEQ ID NO: 346278 - DNA, 535 bp, Homo sapiens
acaacacttccctactaatagtagggaagaagacataggtacagattcaagttgatttgaaattatgaaagtgaggtaattgacctgcagtggttgctgctcagtgaaatcagcatagtgattacctgagctaggttagagatttgatgggtaagaaagaacacctgagggtaatcctggagggggaaaaaaataaagtgtttgctggagagaatgagttggattgctggacttcaatgtgtgtgggttgagtttgtgacttaaaaatgaaaccagtctattgcttgtgtggcttttccaaaatacygttattccgttacctatctcttaccccaagagtagtcacattcttatttctggttattttaattcctggtggtatttttatgtgattaatgagatagtacttgttaatttgatgatattctagaaacctggtaagtactatgtaccttgtcttaagttttggttacttgattggtaaaattatgcatgcaccattgaattacctaattcaaaatatatccttttattg

SEQ ID NO: 346279 - DNA, 434 bp, Homo sapiens
aagtcatccaggaatggttgtgcacaaacatggagtgtgttcctcatgccgtaattctgatccaggtccttgacttaactgcattgccattaagcttgtgaaaggaggggaaagccggtaccagacattggttatatgtccaatatctgtttgactctttgttagaggtattacctaagttatcttacaatactctaaaagcaattctacaaagcccattgctattttacagaaatgaaatctgaaaatgaagagggtcaagtaaactaagaagtctaygcataactaagaagtggggctgcctgaccccaatcctgcactcttggctctttatgacttcacttgtgagcatactgaactcaaagtgttctggacgtctccaggtagagggctctaggaggcagctgagtacgtgagtctggaacttaggagag

SEQ ID NO: 346280 - DNA, 434 bp, Homo sapiens
aagtcatccaggaatggttgtgcacaaacatggagtgtgttcctcatgccgtaattctgatccaggtccttgacttaactgcattgccattaagcttgtgaaaggaggggaaagccggtaccagacattggttatatgtccaatatctgtttgactctttgttagaggtattacctaagttatcttacaatactctaaaagcaattctacaaagcccattgctattttacagaaatgaaatctgaaaatgaagagggtcaagtaaactaagaagtctacgcataactaagaartggggctgcctgaccccaatcctgcactcttggctctttatgacttcacttgtgagcatactgaactcaaagtgttctggacgtctccaggtagagggctctaggaggcagctgagtacgtgagtctggaacttaggagag

SEQ ID NO: 346281 - DNA, 661 bp, Homo sapiens
aattatacaaaatgtcactaaatctaaaatgccattggtaatgacatacactttttaatgcactaatattaaataatgctgaaattaagttatgcttatctaatgtaagatacattgcagtttcagatactaaaatttgaacaagtagacaaacgtttctcttgaaatcagtgaaatctctatctaaatcccttagaatagggttagcacatagtattccaggaaagcaaagcactaattattattgttgtmttgtacccagattatgttactatttaagtttctactttatgtaaagcactttttcatatggatattctttatcctaacaatagtccatttgttacaccagaagtaacaccagatacttctgaataataatggcagttaaatctgtggttttgtggaattttgcttatatacgtcactgttgattcaaacaatatagcagctctaagaacatctgtgcctccagcctctgcattttaaccatgagagcgtcatttctctccatgatgcttaaattaaaaatctaaatatttggtaaattttacgcttttctagaatatgttttgttaatattatattctagtaaaaacaaaaaatgttcttagcctgagaaagattttacagaaaagctttagtaaacattacaattcat

SEQ ID NO: 346282 - DNA, 641 bp, Homo sapiens
cagcctctcaagtagctgggattacagacgcaagccaccatgcctggctaatttttgtattttcagtagagatggggtttcgccgtgttggccaggctggtctctgactcctgacctcaagtgatctgccctccttggtctcccaaagttctgggattacactaaactcatgggaggcagagaagcaacagctaacagaagtggggaggaggcactgtaacaattacattgagggccatctttgtttaacatcagaagattacaggataaaattatttgtcatgtagtgagccaggggtagaaatcctgttttaaaactgattttctgtggcttcagcaaatcatagaattgtcagagcaattacccaaagctccagtggaaaggaagagtcagtcttgtttgcatacttgcctggcctagatcttttcatgatctttctgccaccatgttgctgaagaaatcttcmctccctttgcctgtgtgtgtttgggatggaattactgaaatccttcctgaattctgcttacgtgaaatgttactccatgtggttttaattccatgaagatatttcctccagtgcatgtgagttatataggttgggaataactagaaaaagagatgactgggttagaaacaggaa

SEQ ID NO: 346283 - DNA, 277 bp, Homo sapiens
attaaaatagatatttacgaatgtcttcagggtgagtcacagctcttgtttcccagccctccctttctcaagtcttccattcctccattgcaagttttccagcacagatattttccgaagctggattcctgtattggggaagttgttctgcactttaatcacygacttgtacctacacaaggggagaggttgtaactcgggaagctaatgtaaagagaagctgtaccattcaacctatgtatatgaaagttgtcatttttactttacatgcatttat

SEQ ID NO: 346284 - DNA, 277 bp, Homo sapiens
attaaaatagatatttacgaatgtcttcagggtgagtcacagctcttgtttcccagccctccctttctcaagtcttccattcctccattgcaagttttccagcacagatattttccgaagctggattcctgtattggggaagttgttctgcactttaatcaccgacttgtacctacacaaggggagaggttgtaactcgggragctaatgtaaagagaagctgtaccattcaacctatgtatatgaaagttgtcatttttactttacatgcatttat
